United States Patent Application Publication US 2007/0277267 A1 - sequence listing, part 5

SEQ ID NO: 27394 - DNA, 399 bp, Glycine max
  unsure at all n locations
agcttgcacttgaggagggaaggatatttgcagctaatgaaaaactttcttaactatttgtccttcagattttactatttttttttcttatatgtaaatataaataatataaggctatggcttatggacatggtcatttttacccctaacaatcttagaagtaaatatagaccatgtttttacgcgatacccttataccacctactctttctgcaaaacttcattactgttgttcaagacatacaagtgagcttgtaacaaatcttctacacttggagtgatcacctgcagtcctcttgaacccttaccaccgactctgtcatcatgctgagactcangaagcccaacaagtttagccttctctaagtattctgaacaaaattcaatggcttcttcttc

SEQ ID NO: 27395 - DNA, 441 bp, Glycine max
  unsure at all n locations
tcttgcgtagctgctcttggtgctcagaanatcccaaaaacaaatttctcttattactagctattttgaattctttagttcctgaatgtacaaccttcaaattggtgctcgttcccctctttggtttttgcaaaacagaaaataaaaaaaagtacctcaggtacttcatcattatttacataatgaaatatttatatatttgtgccgataaaaaaaaaaccttacagatcatagctacacactaacagcagtaccagatatcacacagataacaacatcagacaataattccaaccaagaggaaatcatgactacaaatagtagaggcaataacagaccataatgcaacacacacaggcccaagtacctcagtgacttcgtataaggaccagaggagctgcaagcccgatagcagattctagaattccttctacttcgtat

SEQ ID NO: 27396 - DNA, 364 bp, Glycine max
  unsure at all n locations
tttcttctatcangcaacgcagaatcgagaattcataatcctaatccctgtcatccacagaatagcattcaaaccctgaaatggctgacatcgttctgccaataccattacgcaagagagaaagcttgacatacagaagaagggatataataaatgctgaagcgcattcaaaattaggtgatcactcttcaagcgcagatcagactacaaagagccttcatgacacgaaacgactataacacgtgaaggtggcgctaccaaccgggagccatggttcgccaagagctgaaagcctaggtccctcatccttacttgatacatggaaacatggtggaagctgtgattgtggcggctgggacatggc

SEQ ID NO: 27397 - DNA, 443 bp, Glycine max
tatggtgtcgctcatgttcttggtttccctcacctacatgtgtttatactctaaagctggtttccacgtccacatcatcaagcacgtgcagccacgctcctttcatcatcaaccacctcttcccttcctcaaacgtaacggagtggccgtcttcatcccaaacttcccgcaccggaaaggggaaacggccggtgcgccagaaaacggagctccgccacctggtgttcggaatcgcggcgtcatcgaagctatgggagcacagaaagaactacataaagacttggtacaagaaggacaagatgaggggagtggtgtggctggacgatcgcgtgaagacgaacccaaaggaagggttgccaccaacgaaggtgtccaccgacacctcgaatttcgtatacaccaacaagctggggcaccgctccgcgattcgaatctcccgcatc

SEQ ID NO: 27398 - DNA, 396 bp, Glycine max
  unsure at all n locations
agcttatcttgtatgtgttgaataacagtaatgaagttttgccatacatacttcgccatgaaggtttagtgaaagaaagtaatccaaaaatgtcgaagaactgggtcctgaaaaagcataacaagactttcctagaagaaatgtttctgaaatgttaagaaatctagcaaatagccctaaaaaaaatgttataacttggcaaggatatgatataaacaagtattccttttatacaaaagcacaagatgagaaaagtacaatgcaaaatagtggggtcaccctaagggtacatgatgacaatccccgtgtagctttcatcccttactttgggttcattgaagaaatttgggagcttaactatgtcaaatttattgtctgtgttntcaaatgtaaatg

SEQ ID NO: 27399 - DNA, 446 bp, Glycine max
  unsure at all n locations
ctcagcttatggtagttcttaatatctggtctgttcttgagacggatcctgctctccttcctgcaactcgtgcaatgtaggaactcatccctgtgaaagtttcgtttcctcattgcagagtctttccagttagccacatttgcctggtgaggggtgagaatcctcaaagaacacaatcatggagaggggtgagaagccttaagtgtaaataaatcccgaacaaatagattatgattattgttaattaaaaacatataagtcttgtaatatgcatgcatatttaaggagaaggaaagaaagtttctctcaaaaagaaaagagaagganaggacgtagataaaagtctatgctattcattntaataattcgtccaaattacaaaacaaaagctattatttaacttattctacatatganagagaatcatgaaaggctaaaaaaacagc

SEQ ID NO: 27400 - DNA, 405 bp, Glycine max
agcttgagaaactcaattagcataaatagataatataagagaatataatcacaattatcataccattaaaaatataattaagcctaatgataagaatttgattttgtattgtcaaggtaaaatttatacgatcaatctataaaaaaacattttaaatatataacggtgtacgtatgtttaaatcacaacattgttaatgtatcataattaaattcaaattatgatttcaaagagtatatgttattgatattcttttaggtttgggtggataagaaacatgaggaaaggaagaaagcattatggaggtggccaatgggttgttaaactagttagggtaaatagtcacttttatctttaaatgaatataaaatttagtttttgatagtgtaaaaagtgcgataaata

SEQ ID NO: 27401 - DNA, 137 bp, Glycine max
ctcagcttattagacttaaagtttcgattcattgagagatctcaaccttctttgtctaatagctggggcgctttacacaaggtcgttactatgcagagagagagtgtcaaaaccacaaacactttctgcatcatata

SEQ ID NO: 27402 - DNA, 407 bp, Glycine max
agcttatggaattgttctcattaaacaactaacagtcttgttgcaagagacaattaagtacagtactatacccggaagatgttcctttgttgggatgtatgaagatagaacatttcctgttgggtcctcgattatatggatcattaagattaaaatttagtaagtagctagttaaaagattatatccttattaatatatagagtacgaaatgccaaagtaatcattataaaaaaaaatgccaaagtaataaataagagaaataaaggatatacatgaaaattacaaataattttaataaaaatgacaaaattaattaattttttaaactatatattagaacctgataaatttatgactggtccaacatccaaagttttaaattagaacctcataatgttcttaagta

SEQ ID NO: 27403 - DNA, 435 bp, Glycine max
  unsure at all n locations
tatccagaagaacttctaggagaagaaaaaaatgaaatgatcttttctataagtgaaaattatcttatgtacaagaataattgtagaaattctctcatctttagagaaactagatgacaagtttctaccaacttagggggagccctagcagatataaaaaaaagttggaaagttaaattatctcacaatgataataacatacatttcctttcatgttaatgctgtcagtcaatttctcaatgcaccatgtgatagtcattggtatgtagttgttcagatcctgagatgcatcaaaggattacctggcaaagggcttattgatatgaacaaggctaacatcattgtacatacaaatgcaaattgggaaagagatgctagtgatagaatatccacgataggctattgtgttcttattggtggngacttgatattgag

SEQ ID NO: 27404 - DNA, 371 bp, Glycine max
agctttttgttcttgatgtttttgtgttttgagccatgattttgatataattgtgtaaaattatttgaggggttttattcctcatgttgtgataatttgaacttgtgattaaaggtgaatgtgtattaagatgtgagctatggactgtgcaatcacacaattgtaagaccatttaagggcgacgagtattgtgatgggatccactgtgggaacccgacagttaaaatgattttgaaaacaattgagtagttgtgtgtattgcatggtttataggtaaagtgtatgtgattcatgaagtgtgtttagcacttgatatgacaataattgtattgtgagctatgaatcatacaataacctgaccagtgttgatg

SEQ ID NO: 27405 - DNA, 457 bp, Glycine max
  unsure at all n locations
ctcagcttcaatcaatgacatgattgcaggaatttataaattgttggactcttttctctttgggcacacttgtatctatcttggctctaagagagctaaatgcaaacatcatattataagccatgatactatgttggtaatttatgctttcgcgtgattcctaatcacataatagttgttgcaaaagcattggaggattcttgagaaaaggaagttgtacccttcccatgatgcaacanatactatatttggcattagcgtgatttctattttttcttgttctttcttcataccacatagcagcttggcaatatgcacatgtttcagaaggatctcctagatcaacatatcctacaaaataaatattatttagtttgacattaacaacatattgttgaagctaanacctctgcattgtgagactaanacatgtgctaatgtcatgagcagattcatg

SEQ ID NO: 27406 - DNA, 404 bp, Glycine max
  unsure at all n locations
agcttatctatcactttgtacatgcagcctatcaaggatattggtctataatcatttagggactgaggatggttaactttggggataagagccaagaaagaggcattgctgcctctagggaaacaaccgttgacatggaactcatccacaaatcttctgaactctggttttagcacactccagaattccttaataaaattgaaattaaaaccgtccggcccagggcacttatctccaccacaactccacactgcttccttaagctcctggtctgagaaaggtaaaattaaaccctccctctgcctttgatcaagagaagggaattgaactccatcaagggtaggcctagagggattctgctcagaanatctgttgagaaagaagttcacagcgcctatcttcac

SEQ ID NO: 27407 - DNA, 446 bp, Glycine max
  unsure at all n locations
gtgttgtttntcaccttctcgctaagccaatctgctggcttatgcgagagcgtccgctaagcgtaacactcatgggctaagcgcgaggaagactctggaagaagatgagctatacaggttctctaagcgcatcgcttcatcagactaagtgcaccgcttcagttcatacttatcttgattaagtcttctcttgattgctgaatcttgagtcttgaatcttgatcttgattattcttgattcttgaatcttgaatcttgaatcttgaaatcaaatttgctcttgatccttgaagtgttcttgactcaatcttgaactcattcttgaatgttatcatctttgttatcatgaagtgatcttgacttttgagctntttgtcatcatctttgttatcatcaaaactccttgaatcaatcttgattcatcatgaagcttgcttctacaatct

SEQ ID NO: 27408 - DNA, 399 bp, Glycine max
agcttgcttcttctgaatatcaaatgcattttgggaaaaagaaatagacaaattaggattggttagaagagcactaactgaaattaaattgaatttgaatttaggaatgtaggcaacattatgcaagagtaaggtattggttaagcaaactgaactaatggcaatgataggtataacatcattgttaggcagagtgacagttttatcagaaacaagttggtaagaccgaaaatgatgaagggaacaagaaatatgaatgctggcaccagaatctaaaagccaacaatcatgaagaaaattagaagtggatgtagaaaggatcataccactggcagaagaacaccttgagggatgaaacattggagcatgacttctaaaagattatcaattggtatattg

SEQ ID NO: 27409 - DNA, 312 bp, Glycine max
  unsure at all n locations
tataatgganaagtctcatctggtcctagtatgatgcttatttccttttagtggtcactaagaacataaatgtatacatgtgtatagcattgtccgactcagtttggtttacctaattgtaaatattaaatttttgctggctttatgctacagatgtggcatacttgttgatacttgaactgattgccaaatcatatcttcatttggcatgggttttgattgtcctgtgaaatgaaaagaattgataattaaatttggatacctatttgatcattagcttacttgcatatcacattcctataatttcatttg

SEQ ID NO: 27410 - DNA, 388 bp, Glycine max
agtcttaaagataaaccttcttgaggttaccacgtccttcatttgcttaggcctctgcagcctgcacgcctctattgcatttaccgccggtcccccatgattggcaagtgaatttgtcttcacattcgggccatcttcttggaatgttagccaccccgcgtcaatcaagctttgcactttatgcttgagggccacgcactgctcgattgaatgtcccggagtacctccgccgtgatacgtgcaggtcgcgtcgaggttgtaccacctcgggaaaggagactagtagattcttccggggatcaccactaccaactggttggcgattaatgatggcaacaagtccccatatgacatcagaatcacggcgaactctggaagcttctttact

SEQ ID NO: 27411 - DNA, 391 bp, Glycine max
agcttgtactcttgttattggccgtgacgaagagattagaagggttgtgaggattctatcacggaggactaagaacaacccggttctcattggagaaccgggtgtgggaaaaactgcggttgtggaagggttggcacagaggatagtaagaggggatgttccaagcaaccttgctgatgtgaggcttattgcgttggatatgggggcgttggtcgcgggtgccaagtatagaggcgagtttgaggagcggttaaaggctgttttgaaggaagtggaggaggctgaggggaaggtgatactcttcattgatgagattcatttggtccttggtgctggtagaactgaaggctccatggatgctgctaatctattcaaacctatgcttgctcgc

SEQ ID NO: 27412 - DNA, 430 bp, Glycine max
cttatttgttcttacgatttcatggatttgatcatttttggatgattgatcggatttattcttgattttggtgtcttatatgttttgtgtgtatctgtttgacattgttcctctttaatctattgtattgtcttccattaatggtttgagccaaacaaatgacaatagaattgctaatattggtgcaggtgcatccatatacttaccgaaatgagttcccatttttgcatttcaacttcagtcaagatccgtatatggaatatgatttctggatcaacaagataggcgttgatggtctctttacagacttcactggtagtcttcatcgttatcaggaatggacctctaaccgtaaagatgatgatgatgacaagactgaatccaatctattacataaaattgctttgttagtctcctcttatgaatgatc

SEQ ID NO: 27413 - DNA, 401 bp, Glycine max
agcttattcttgcaagaagtaaagcttcacctgaggttgattctgttctgcacaatgaggatgaaggttgcactcttcctcagggattgtagatataggaatcagataaggtgttttcggttcttaattttaggatataaaaagtaatagggttattctatttactgattattagtgtcttcagttaatgacatttccaataaaaacaaattatgtgcagacttttgaggttagtggaaatctgacatccaagccctctagcaatcctcaataaatagcttgtactgatactaattacacaaaagtggaattagtggcaaattcagagagtctaaagactaatgtacaacaagttgttcctgacattgatgcaatccaaaataccgatattcaaaatccat

SEQ ID NO: 27414 - DNA, 449 bp, Glycine max
  unsure at all n locations
tgcttatatntgccctccatgtatatttttcttgccataactgttatccaaacaaataagcatttaggtcaaattgagaaaattggatctgccattntgaccagaaaaagaaagaatacatgtaacaagaaaactgggatgttatggatcatgacataacgttttccataaattgagtgagagtgagagagaaaatgaaaaagataaaactgatattattgcttagaaagaaaaaaacccatagagttagatacaacagaggtatttaaagagttttgacttgagaaactaaccacaactaactctaactacctctaactaacttctaacagaatgtaaactaactctaactacctctaactaacttctaacaaaatgtaactacttgggcgcaatttagtgaaaactatcagcccttacaacatatacactgttgtctaatatgaaac

SEQ ID NO: 27415 - DNA, 400 bp, Glycine max
  unsure at all n locations
agcatcncttgggccatttcctacgaaggcaaacatttggaaagttagttttaccaagaaatgctactcttaaaacaaaaatggcatacaaactcctccaataaacacaaacatcaatgtaaatttagagcaaactcatgcacatacttccttatgaacattcactcgcacaagatattcttctaactaaaaaaatgcacccatgcacaatcaaggcaccttcgttacctagaccacttatatgcacttccaaggtgtatttgctacctacatcacatgcatttcctttgctaaatctacatacatgcatactcaaggcactttggctaccaaacattgcatacgtgcacattcaggtatttctaatacctatacatacacaaactccgtgatgaatctt

SEQ ID NO: 27416 - DNA, 431 bp, Glycine max
tgcctgaattaacctataatgagagaaaatgattattaaacgcattaattggaagtactaagtatttattacctatacttaacagaaaatacttataacactaaaaaataaccataaattggaagagtttgatacaatttgcacatattttgtacacaaaagttagtcgtattcaccgactaacaactcccccaaatttacggttttgcttgtcctcaagcaaaaagagaacaattcacttgtcctcaagtgacaatgatatgcaatgactatgtacaaaggtgtatgcaacaaaagttactgattgcatgataagagaatgaagcattaggtactcatcacttgtctttcacaaggtatgcagttatccagagaatagaataaaatgcaacctatacaattagatgtgagtagacataagacagatatca

SEQ ID NO: 27417 - DNA, 406 bp, Glycine max
agctttccttcctcattatcatccttgttaccttgctcaatttttcaacaagtcacgcacaagacgaccctttttacctttaccaatattgctcaagcaacagaaccactgccaacacctccttccaaataaacctcagaaccctcctctcttccctttcatctcacgccaccggcgacacccaattctacaacacaacattcaccggaaccaacccctccgacacaatctacgccatgttcatgtgtaggggcgacgtcccttctcagctttgtcaagcatgcgtcataaacgccactcaaagactctcctcagaatgctccttgtccaaagaatcggtgttttggtacgacgagtgcatggtttggtattccaccaacccgatcttcaccaccgtggccacaac

SEQ ID NO: 27418 - DNA, 442 bp, Glycine max
  unsure at all n locations
tcaagaacagctccctcttcanagcctaagtaaatatgttagcttcttgatcttttctcttatagtgtactagatcagtagttccatccttgcaaagatctcttaaaaaataaacttcacatcaatatgcttgcttcttccatgtagaattggatttcttgacaatttaatggttgaactatagtcatagaaaattgtagtagctttaatttgcttgaactacaactcctcaagaatttttctcaaccatatttggcttggcaaggtgacaattggttgctttttagatgaccacaaaacgacacctgttccaagcataaagacagaaccaaaagtgctctttctatcatctagatcacctacataatcgttgtcagttccccaaggtttcatgttccttgaaaatagtgaagaattctcttggcagccaacaaatgcaact

SEQ ID NO: 27419 - DNA, 391 bp, Glycine max
  unsure at all n locations
tagcttgccacccatctcgcccaggcgagctaggttgcttcctctagaagcaaccgccttctggaggaattttctggaaggctcgagtgggcctagttactatttgcacccccatttttactaaatacacccccttgctctttnttggtgattctttttccgtaacgttacgaaattttaggaatttcataacgatgcttgttttctttccgtaatgtcacaaaaccttatggattatgtaatcatcccttgtttgccttccggaacgttacggaactttacggattgcgcactaacagttccttttaatttccggcatgtcacgaaacttcacggattgtgctacaatgctttcttttgacttccggcatgttacggaacttcacaaatt

SEQ ID NO: 27420 - DNA, 397 bp, Glycine max
  unsure at all n locations
ntactgaattntctagacatctggaagaaagttaggaattttatacaagtgatttggataaaaggaaaaatacgaataatcacacaagttggcaggaaaatcagtatccaggaaaaaaaatgaaagggaagtgtgcttgttgttttggctcanaatttattctataattggaaatttcaattcaaaattagtgtgaagacaagtgccaaagctagagttttgttgagtccttttttcagtttttttttactctactctagagccattctaagtttctctttgagtcctagcttgcttctatgtccttttaattgctttaattgttgaataatccttgaaaaattgtcttgttaaaactccattggtttagctttcatttcattttttttggtctttg

SEQ ID NO: 27421 - DNA, 396 bp, Glycine max
  unsure at all n locations
tgcttgggaggattgatggggacccggtgttgagagaaacgaggatatgggctacgtgggagtacgtgagctcagttggaggtgggcaacaggggatggtgggtttatgcgcgcattgtggatgtggaaaaacttgttgtgcaccatcgcccgaccgccacctagtaccacatgtgatgggtaccccataatcctacaagcttgagatgaggaagtgttgaagggtgaaacttcctgcttttattgttgaccacagagtggtacctggagatatgtcgcggtggtcaggagaccttgnggacgtcaggtggggtgctattgcccataaccaagcttgaccaatcccgacccaacccgggcatagtcggtcagtgagaacctgtgatgtacctaagc

SEQ ID NO: 27422 - DNA, 441 bp, Glycine max
  unsure at all n locations
tgacagacctgcaattcttacaccgaccgaggttaccactcttgttactagatgacacttgtccatgcttgggggctcgaccgactcgtccnccttctatttgtcatgctacatgacactacgagacacacatcaaccctccatgtcagccttgatgcaagagcatgaacgcctagcccatagcagcccgactccccaactaacaggttatctctaacctcttattatttgaacataatggcatccctttatctctttatgggtattcaattgtctataaggctgttagtcgatgaatatgactaacttttgtgtataaaacctgtgtaaattgtatcaaactcctccaatttatgggctatttgtagtgttggaattactttgtgttaaagataggtaataaatacttagtactcgcattntgtgtgttaataatcattc

SEQ ID NO: 27423 - DNA, 398 bp, Glycine max
agcttgtttttgggcaatagcaccccacctgacatccccaaggtctcctgacccccgcgacatatctccaggtaccactctgtggtcaacgaataaaagtaggaagtctcacccttccacacttcctcatttcaagcttgtaggattatggggtacccatcacatgtggtactaggtggccatcgggcgatggtgcaaaacaattctccacatccacaaatcacgtataacccaccatcccctgttgcccacctcaacttagctcacgtactcccacgtagcccttatcctcgttcctctcaacgccgggtccccatcaatcctcccaagcttccaaaacatccaagaaaacagggcagaggcagaaaactctgtccaatacacataccaacatcaca

SEQ ID NO: 27424 - DNA, 440 bp, Glycine max
tccccaacatccaggtaattcaaaatccatatcatcacaaactatttttccaagcaaaatagggcataggcagagaactctgcccaaaactcaaaccaaaatcacagctttttctcacttaaagaccccagtaacatttcctccgttccaattcgttaaccgttggatcaactcgaacattttactggaagtctctagtacataagtctacattttgaccgttgggatctgccagaaaacatcaagaactcattctgcactactctttccacaaccagcaaaacatagcatttttctgcacttatgcaaaattctgctgcacaatttcacagcaaaattctgcataaagtgcagatttcgaaaaccacacttcctctcatccagtcttgcccatatcaaatcctacaagtctcaaaacatgtatcaatcatgtctaaacc

SEQ ID NO: 27425 - DNA, 547 bp, Glycine max
  unsure at all n locations
cccgcgaacaccccgtaataacactacccctagcattcatcaacngttaacaaacttcnnnnnnnnaagaggnnnatgagcatgcaatcccggcgaancnagctcagnacccggcgatcctcaagagtctacctgcgggcaagcaaactttataatttgaatgaaaaacgancaccaaccgcgggaaaccaactaccaaacacctctaaaccacaacacagcgcacagtgcgaattcaacacatacaccctcgtgcaaaacacccccggccaacaggaaacaaatacacacgcaggataacccaaaccacacagcaaatccccggaaaaacaccactcaacccaaaaatcctagccagaaccatcgcgactacaacgggaatcccctacctattaaaaaacaccacaccgatgacacgaaaagcagcatcgacacacacaccacaacatacccgaccacggcagcgagaaacaagccctaacaacacacaaaccagcagccataaccaaaacaaaagccagaacccaaaccacacacaaacaccccc

SEQ ID NO: 27426 - DNA, 368 bp, Glycine max
agcttttgttgtctagagagttctagagagagaagggcccatgttccagagagtttgagagattttattctgtgaagatctgcagagactagagcttgaagaggaacccatcctgagagcttgacatgagtttgtgagtgattgtgaggtcttacaggtggaggagacatccccaccacttgtatttctgcaatctttcatctttctcttctctttgttgtaaaggaagtttcctagttatggaaagcttaatcctctgttggatctttcttgtaggtacttgatgtgaatatctttttatctatctaacgatgttctgcgtgttctctatgctatcggtatatcattctagtatgcttctaccttga

SEQ ID NO: 27427 - DNA, 287 bp, Glycine max
catccttgcacacatctcttaaaaaataaactccacatcaatatgcttgcttcttccatggagaatcggatctcttgacaatctaatggctgaactatattcatagaaaattgtagtagctttaatttgcttgaactacaactcctcatgaatttttctcaaccatatttggcttggcaaggtgactattggttgctttctagatgaccacaaaacgacacctgttccaagcattaagacagaaccaatagtgctctttctatcatctagaccacctacataatcgt

SEQ ID NO: 27428 - DNA, 564 bp, Glycine max
  unsure at all n locations
ccaaccacgacatacacgacntgatagtaatataatacaactacggaaatgagtgattnnntatnnnnnnnnnaagacggtnntttgacgcattgaganacacgngganaannaagctcggcaccgggagaccctcaagaggacacccgcacgcacgcactcttgtctaagcaacatatcacacagagccgggacactaagaaccccgaccgccgacgacatagataccaaataccacacacgcgaaaaaacagactaaaagcacgatgcactcacactatacacaactaccacacgttcaagactacgattgagagaaggagtaccacagcccacagtgcaacataaggagaactaagagcgaaggcgccaaacaaatctccaccgacacaagcgacgaaaaacgaaacgtacgcagccaccaccgctgaagaaactcacgtacaacacgaagaccataacacgcccaaacataagccggtacccacaatccacccagcaaacagaccaccggaaacaaggacaacagaaaacgcgccagacacaaacaacaggaaacgctac

SEQ ID NO: 27429 - DNA, 388 bp, Glycine max
agctttatttgaatcaagattgattcagagatgttttgatgataacaaaggtgatgacaaatagctcaaaggtcaatcaaagaatgagttcaagatgttcaagatagaatctagaacacttcacgattcaagaggaaagttgaagaacacttcacgattcaagaggatagttgatttcaagaatcaagattcaaggatcaagcttccaagaatcatgatcaagattcaaacctctagattcaagaatcaagagaagacttagtcaagattagcatgataaggctttttcacatactgagtagcacatgaatttttctcataacatgtttaccacagagtatttactctctggtgatcgattaccatattgatgtactcgattaccagt

SEQ ID NO: 27430 - DNA, 377 bp, Glycine max
ccaagccaatcataatgctagacaaaatatagatgttattataggtaacaatggcggtaatgacggaccgaggcagaaccgggttaagggagtaaagctcaatgttcctcccttcaaaggcagaagtgatccagatgcctacctggactgggaaattaatattgagcacgtatttgcctgcaatgactacactgatgtgcataaagtcaagctaacagcagctgaattctccgactatgcccttgtttggtggcataaataccatagagaaatgttgagagaggaacgaccagaggtagatacatggactgagatgacaagggtgatgagaaaaaggtatgtgcccactagctataacaaaaccatgcgacagaaac

SEQ ID NO: 27431 - DNA, 370 bp, Glycine max
agctttgttttggtttaggcatgattgatacatgatttgggacttgtaggaattgatttgggcaagattggatgagaggaagtgtgattttcgaaatctgcacttatgcagaatttttgctgtgaaattgtgcagcagaattttgcacaagtgcagagaaaatgcttgtgtgtggttggctgtggaaagtctagtgcagaatgagttctggatgtttgccagtagatcccaacggtccaaatgtaggcttatgcactatagactcccactaaaattttggagtcgatccaacggttaatgaattggatcgaaggaattgttactgtggtctttaagtgagaaaagctgtgattttggttgatgtgttgag

SEQ ID NO: 27432 - DNA, 453 bp, Glycine max
  unsure at all n locations
ttgagccaaaatcctgactcaccataaaccttgacccanggtgataatgtcaatccttaccctcggaagcgaaaagaatagaagggaaatttccaatcaaagaataggaaagaaggaagatttccaatcaaagagaaagcaaaaaaagaaaagaaggaatattcccaatcatagagtgggagaaagcaaaaagaaaagaaagaaaattcccaatcaaagaatgggagaaagtataaaaggaagaagaaggaaagaaagctcctgatcagggatcgaaagataacagaagatatgtgcagaaaggtctttggaccggacaatatctgaataatacagaattgtcaccaaatgaacaaaaagaatgaaaggaaaccacgacctataatggtcttctcccattgattaccaaccataatcccgtgcgctagcgactttttcgccccgcactaaaca

SEQ ID NO: 27433 - DNA, 376 bp, Glycine max
agcttgttctccatgaatacatagacatttgccttgtgaagaaattatctaacttagacacatttcttctgacttactcatgatgatgcatgatgcacagaagatatgatatggactaagatgcgccatgcattatatcaacgcatatatatgcacctcaggggattcgagcatgtattatacactacatcttcgaggactctccgcgctatgagcgctagtcttaatgtggtacatgccgctccctgtaacaccctggaatattaaaccatatatcgacgcatagtcgactacatcatgctaactgactatatggctgacttgaatgattcgaggtatgacttgagccattcgtgtatgaacttcatgacgtcca

SEQ ID NO: 27434 - DNA, 172 bp, Glycine max
aactatactgctaagagagcctagctactacattctatagtagaaggtgcacaccccatgtcgatgcgttggagtattctacagtatgtgtctaacataagcagcctatcattcccaacgaactcataccttagcggtacagatgataagttgctttctaccactcttttac

SEQ ID NO: 27435 - DNA, 367 bp, Glycine max
atcttcattccttgtttctgcaaagatgctcacaatatcagacaaatggtgatctccgtcaccattgactgggtctatttgctctatgctatcttattatcattaatttatggtgagtttgtctaaatttatttcttgaaaaaatatttattctattttttatttttacttattttttataaacaaatgttatatgcttatcaaaaaatactttttattttaaattctttttttaaaattaatttttttaagtttaaggaaataaccccttaatcaaatttgtcctttctactttaacttttcttaaggaaaagaaaactctcgtgactttacatacttcttactctttttatcccgttgaagtaaa

SEQ ID NO: 27436 - DNA, 471 bp, Glycine max
  unsure at all n locations
cactatatactactcacgcttgcagttataaatgtgttaaaaatacntttaattaatatctgtatttctattcctttattaatatatatgtgaggggtagatggtgtcacaacatacatgttactttcatgcctaaagttcacactccccaggtcttcaaccaacaaaagtcaaataaagacaacaatttcattcatcacaataaatacatataacgcatcccattcgtcaaaaacatagtttttcctgaaaatcgggatgcatatcaaggacagttatatcgcatcccattagttaaagacataattctcttgaaagaaaaatcaacatgcaacagggacagacatatatcctcatagttaggttccctgaccctagctatggttgttaaatggtaaattttataataaactcccttcacctattgtgagttaccccgcgggttcctctgcgcgtcacttgaagattctt

SEQ ID NO: 27437 - DNA, 397 bp, Glycine max
tcttctttagtttaggtcccatgaatgtttatttcttggctattccacttctcacaaaggctacaagtgtctctcacctaatggaaaactgtatgtttccaaagatgttgtctttaatgagcttaaatatccttacaatgatgtttttccatccttatccaactctgtcactccatctaagagtaactttttaccaactgctcatattcccattgtttcaccttctcctaatgaacccagtcttccctctcaaactgctgaaactaatcctccttctataaatgctgaccctcctattgccctaaatgctgaatgcaccaattcccaaaatgtcacactatcttcttcctctttgactgctgaaccaacttctgtaaatgatgaacactctaacact

SEQ ID NO: 27438 - DNA, 428 bp, Glycine max
taggactagaccaccctctatacactatgttgttaatgtatttttctatacaattcctattgtcatctctttgattgaaacaagagtcatttctaaagagccaaagctcatgcacagtttctgtcaaagctaatctaacaagttcagatttccagcctttacctccatagcaatgcataatccaatttatctcctcattccaaattcttggagtatgatggataccaagccaatgaagtattccaacccagaacttcttcaacataaaaaaatcaaagaataaatgatcaatggtttcaacctcagcacagaagacacattgattattattcaacatatcaaaccgatgcaatctggcctttgtggctaatttcccatgacagatcattcataatgtatagatgcacgacgtcttgctctattgtgga

SEQ ID NO: 27439 - DNA, 377 bp, Glycine max
ttgtcttttaggattaaagtctcacgattgtcacatgttgatgcaacaattgttagtcgtggatatacaagacatcttgccaaacaaagtcaggttagccataactcgcctgtgctttttcttccatgccatatgtagcaaagtcattgatcctgtcaagtttgatgagctggaaaatgaggctgcaattatactgtgccaatcgaagatgtattttccccctgctttctttgacatcatgattcacttgattgtgcatctgtcagagaaattaaatgtcgtggtcttgtttatttgcactggatgtacccggttgagcgatacatgaagatcttaaaagggtatacaaatgaatttatatcatccataagcattta

SEQ ID NO: 27440 - DNA, 403 bp, Glycine max
  unsure at all n locations
agctttagatgaggaagtgtagaagggtgaaacttcctacttttattcgttgaccacagagtggtacctggagatatgtcgcgggggtcaggagatatgtcgcgggggtgctattgcccaaaaccaagcttgaccaatcccgacccaacccgggcatagtcagtcagagagaacttgtgatgtacctaaacaggtgagctcctggcagtcaacatataaaaggaacaaagaccacaaagcaaggaggcttgtggtggctggccagctgtgaaacgtgattgatatgtgagatatggcctctggtaatcgattaccaagggtgggtaattgattacaaggcttanaaatgaagacaggagactaagatggtctctggtaatcgattaccaaggggtgtaatcga

SEQ ID NO: 27441 - DNA, 448 bp, Glycine max
  unsure at all n locations
tagtcttgtactgagattggatttgcttcattgcatattctntgttatcatcaagtaaagctaatgctgtctaatgtcgcatgaggtcatatggaaaagtaagtataaaatattattaagatgcattatcgataatatttcaatatataaataaaatcttagtagaatgaaattgatagttatacttaactntgttagacactggatgatccatcactgagtgacctagacatcccataagattttgatgaaaacaagatataaacttgtattaaccactttattgcatgtaagtcaacaggtttgaggagtggaagaacaccaggtgagacctatccattagtggatactntgtctactagaagcaagaagtactcatctaatccatccaaacaccaattggaatggacattctatttgaattatctatctatgatagctcatatga

SEQ ID NO: 27442 - DNA, 401 bp, Glycine max
agcttttctgtcgcacatccggtgcctaaacaccacctttagcgtaaaccaaaaaggaattttgcagcaaaaagcctgtaggattcagcccaaattccggggtcatatgctaacttgctcccatatctaattgataatgcaatggtagccataacccctgccagggttcctcaacctccatttttccgaggatacgactcaaacacaacatgtgcatatcatggaggagatccgggacattccattgagcactgtatgaccttgaagcgtaaggtgaaaagtctaattgatgtgggctggctgaaatttgacgagaatcacttgtgaatcctaacattgacaagcggcaccacacatgtgggcaattgaaggttgttggttgatgactctaatgactcatt

SEQ ID NO: 27443 - DNA, 446 bp, Glycine max
  unsure at all n locations
tctagccaaatggacttaccttgaattaattcctttgatgcctttttagccttgtttccctttccttgttttgaagctcactacaagccttaagtgataaaccatgatattaccatatccttaaggaattttggagctttggaattgttttgggaataagtgtgaggggtttttgtttcattggacaacttgttttgttgactatgcttcatgatgtattttgggccatacttgatgtacattgtatattggttaaatgttggacatgctgaatgaaatgttgtttctcaaaggcnttacantaaaataaattacatataataaaattcgaataaaaaataaaagcaataaagttgagtgaataagatcttaaatggcacaagattgatgaaactctgggttctgctcttcatgtttaaattttatctttacttcttttatatttc

SEQ ID NO: 27444 - DNA, 394 bp, Glycine max
  unsure at all n locations
agcttattctatctgntaaatacaaggcatccttgccttatatagggagaggacaaaacaaaaaaaataacagaataaccttccatatggatttaggtcacagcccaataattcaccaccttgaactaacatccatataggacacaaactgctccctccaagcacacatgaacttaaccccaacaatcaacattgagcaagcttaagcggtgatcaaacttgctctttggaacaagctttatgaacatatcagcaggattgtgtagagtgctaatcttatgaactttgattcttctttctaaccgaatgaagtgatatctaacatctatatgcttggttctatcatgatgaacttgatccttggccaagcatatagcactaaggctgtcacagt

SEQ ID NO: 27445 - DNA, 418 bp, Glycine max
  unsure at all n locations
tgtctgcactagagttaccttcttcataatgtgagattctaaattcatgttagtcgntagatgaaccacattatntcacctgtttaagaaattccaacaaggaacgacttctgaacattcaaaagcttcaaggatagcagatgagtcatattacagccagaggttcctccaccctttaacatgtgcaaactcaatggcagtaacagctgcaagaagctcggccagcaaagaggaggaaatgccaagaggaactacgaatccacaataaaaacctccatttgagttttgaaatatgcctccattagaagcaaggcctagattatcctttgaagcctcgtcaaagttacattntatcttagacagatgtggttgcaactagataaccaaattaaaatatggttgtgattcctaataaata

SEQ ID NO: 27446 - DNA, 396 bp, Glycine max
  unsure at all n locations
agcttttatacaaagatgaaagtaatgagatcaacgtgaaagtaagaaagttgtatcttgtatgttttgatacttgaatctgtctttactgattgatttaacttttctatccattctcaacaaattattacaagtttaaagacaaacctttttattattattattagtgttaagtttaaagacataaattttgacctttggacgcgagatagtgcatgtgtctttctcctgcaataactaaaggaagtagggaatcgttgtcgttcagaaatagaaaagggaaaaatgattgatgatgtatgaattttatatcctacaaangtatattaacggtatgtttggaaaattataataatggtgcatgtttaaacgacatacanaatcattattgggaat

SEQ ID NO: 27447 - DNA, 255 bp, Glycine max
  unsure at all n locations
tggtggaccatgtggataacgaacctaaatttttgaacccgcatattttcctagattttaggcttggcccatntagtctgcggacttcacgagcttaattcgcaaaggccacaaacttatctgtatccgctttagttgaaggtaagccaaagagaccagaccattcttccattcccattagctaacgcaaacctaatttggtggagtttcatttttcttctcctttgagaacacatagtcatcatcggccctcct

SEQ ID NO: 27448 - DNA, 405 bp, Glycine max
  unsure at all n locations
agcttctanactttgtacaagaatgaagctctgataccacttgttagacaagtggcctcagatatcttaagaagggggggttgaattaagatattccaaactgtttcccctaattaaaaatctatttctctttttactcaagttatgaattcccttaaagacaatcttcttaaatattaattcaaacgaagcaacttgaatgtgaatataaagcaataataaataaaagagattaagggaagagaaaatgcaaactcagttttatactggttcggccacacccttgtgcctacgtccagtcctcaagcaacccgcttgagagttccactaacttgtaaattccttttacaagttctaaacacacaatgacaatccttcctttgtgtttagagatcctttacaaca

SEQ ID NO: 27449 - DNA, 449 bp, Glycine max
  unsure at all n locations
tagcacgttatccgcttgctaagcgagtcatctttcgcntccttgtttatcgcgaaatggcgctaagctcaaattcacttactcatgctaagcgcgagaatgacgctaagcgtgacgtcgagatcaggaagtcctttttaagcctgatttgcacaaaattaaagaaagaagagagaactgttcactactcagaggcctgaagagtgtgaatntcagagaccatagagtagagcaagaggccaagttttcatcttttagggagattagtgaatttttgagtgtttgtgagattcctagaggtggaggagacatccccactcctttgtaagcaagcaataactcttgattcctcttcttcagtgtaaaaggagcttccttgccatgaaaggctaaaaccctcagttgtggattcttatggattagtggatgtaaactctttctcatatcta

SEQ ID NO: 27450 - DNA, 400 bp, Glycine max
agtttatatcaatttgttgcaaaattaccaacaacctccttcgaacgaaaattcacaacatcctccttcgatgtttcctttgttgccactaccacctccttcaatgagcgaaaattctcaaattcctcctcatttcattccctatttgccactccctccaccaccagtaacttataatcaatccccttctaccgaaaattctcaaagatctcaaacttttcttcaatgtcacaaaacacctctatcgcatttcataagcctcccaatagttatattcgtgcacaaactccttcaaatgaggaagttgatattacaatagaggaaggatgagggagttctacaaagaagaagaagggataacgattatgcttttcgattgaagaggataaacttgtcatta

SEQ ID NO: 27451 - DNA, 442 bp, Glycine max
tgcagaccctttatcatttgttgtttgcgtcatcgttcactgttttctttgttggacactattgatactgagcattatcacatgtacttgtcttggcctgatttatgttacaattattattacgttgttttatgtgattaatgactattgttgtgcatatagttaatgtttatcatgagtgaaccttagattcctgtttgagattcaatacagtgattcttgtggatagttcgcattaatcattgtattgaagcttgatattgttcgtttggacagtttagggagactcatatttttatggtagattcatgcgtaaaggttaagattactttggtaaatttgatgacagttctgtacaattaatgcatatctagttgttctctgagtgcatacttgcttattgcggaaataatctcaccgatttcatgtcgagaacttggag

SEQ ID NO: 27452 - DNA, 394 bp, Glycine max
agcttgtatggttaacgtctcacgattgacacgtgctcatgcaacaattgttaggcgtggctatacgagacatctttccaaacaaagtcggggcagccatcgctaccctatgtgacttctttcatgcgatatgtaccatagtcctggatcctgtcaagctcgatgagctataaaatgaggccgcaataatacagtgctagtaggagacgtattgtccccctgctttctttgacatcatgattcacttgattgtgcatctagtcagagaaatcaaatgatgtggacctgtacatctgctgcggatgtacccgtgagaacgatacatgaagatcttagaaggatatacacagaatctatatcgttcagaaggcattaatgatgagaggtacattgc

SEQ ID NO: 27453 - DNA, 432 bp, Glycine max
cccgacacatgtggtactacgtggttttctatcaaaggcgcaagacgactatccacatgcacaaatcacacataaatccaccatccccagggggccaccttcaactgagctcacgtactcccacgtagcccttatcctcattcctctcaacatgcgggtccatatcaatccctccaagcttccacaacatccacgcaaattgaacatccgaacatcatgaactatcaataccaagaaaaaacaaggtagaggcagataactctgcccacaagacacaaaccaataccacaacttttcttactgatatacccgacgaacattctctatgtttcaattcgttcaccgttggatcgactcgaatattctactgcacgtacctagtacatacgtgtacattattaccgttgagatctgctagaaaacgtccagaac

SEQ ID NO: 27454 - DNA, 395 bp, Glycine max
agctttaaaagattggctaagattttgttaaaacataagcacttagacaatgaaggaaagctggagttgctgcacatgatgtccaacggtatgtcaaggaataagatcgggctgcacaatgcacaaggcaagataaaatgtcaaatgaagaattgaagttgcaggatccacgatgtcggatacaatgtcctgacatcctgcccgaaaatactggagttgctgtacaatgcaagataaaagacaagtgcagaagtgaagctgcaggatccacgatgtcggatacaatgtcctgacatcctgcccgagaatactggaattgctgtacaatgcaagataaaagtcaagtgcagaagtgaagctgcaggatccacgatgtcggacacgatgtcctgaca

SEQ ID NO: 27455 - DNA, 417 bp, Glycine max
gtgtggaagagtcagtcttcctacttttattcgttgaccatagagtggtacctgaagatatgtcacgggggtcaggagaccttggggacgtcaggtggggtgctattgcccaaaaccaagcttgaccaatcccgacccaacccgggcatcgattacacagtgtaaattgcaggtttccatgttctgaagctgtgtaactcgagtttggcctctggtaatcgattaccaatgttgtgtaatcgattaccagagaagaaaacccttgaggcataccttttaactacatgtagcggttatgggactcattgtgttgtacacgtagttagatttctcatgaaagagtctacccctttttctcttatttcttgtagatcgcgatggcagcgcaattaatccatgattgagtggagatggagt

SEQ ID NO: 27456 - DNA, 438 bp, Glycine max
  unsure at all n locations
tgtganaggtgatttgcgagagataaccccacaacttanatgattgtattattgattgacattcggtttatatacagtccatataatatagccattatcatagtacgaacctttttttttaatttgttacatgaaattctaaaaaaataattcggcaaaaaaaccgattaaactatagggtttagtgcttaattatgtatacattccttttgagttgtcacgtgcttcgtgcttaaacattttctatgataaacaataattgacaagtcatcaatatagcctgttttctcggtcattcgtacactntccctaagattatcattntgttcgtggaatttaataccaaataattgtttgtcattatattcttaaggaatttacgtccctcttatntgtactattgccttacaactagcatgtagagaaagtgctcaagca

SEQ ID NO: 27457 - DNA, 401 bp, Glycine max
agctttatttttatgtgcttaagatgtgtatcaacagcatcatcatcgtcattctcaagaaccttctttataccaacagtaggttgggcatctcctaagtttgtaattttcaagccctttgaactgcatgagcaaaccaaaaaaaattgtttatataactataaaaattagttgtatgtaaaatttggcaatggaccaacatttacctgataaattcatacaaattgtggtactcatttctctgaatattacgaaagagatgttcttgttcagattttagtctgaagagaaggtcaaaataatgcatattggaaccaccaccagcatgccactcaaattccacatagtcaatctgataagaaaggaaaaaaaacaattaagatctccacggtgtaaatatc

SEQ ID NO: 27458 - DNA, 368 bp, Glycine max
  unsure at all n locations
tcagctattctttaaattgaagctataagaaatgattacaatttatttgttttgcaggttggcaatggtttatcaaaagattatagagctaaaaaaggttttaagtttaaacctctgtccttccttactaaactctccatgggttttaattntatctttttttaatacataggtagaagctcttagatttatgttttgttaagctctctggttgctttgtcaagtttaaagaaaagcattttgcttcttcagattcttttttttttttttgcttcttcagattcttttaaattttaagctgtaaggaaatgatttgttgacagtacgagttttttttttttgcttgatcaggttctgagggtaatttc

SEQ ID NO: 27459 - DNA, 399 bp, Glycine max
  unsure at all n locations
ttgcttgcctgtccgatgcagcagtaatgatggcccgagttatgttggggaacggttacgaacccggaatgggtttaggcaaagacaacggcggcataactagcttgataaatgccaaaggaaatcgtgggaagtatggtttaggctataaacccactcaggcagatataaagagaagcatcgcgggaagaaagagtggtggtcaaagctcgcagttgagacaagaaagtgaaggaagtccgccctgccacataagtagaagctttataagcgcgggtctgggagacgaaggtcaagtggtcgcgatatacgaagatgatgttccgagtacattggatttagtacgaccatgccctcctgatttccagctangaaattggctagtggaggaacgccctg

SEQ ID NO: 27460 - DNA, 438 bp, Glycine max
  unsure at all n locations
tcttatccaaggcacatcttggtggtgaagctccttcttctatgtcttattccttaatggatagcgcctcctctcacctcctttcctttgtcttccgctgcatctccatggtggaaaatcaccattaaaggaccccattgaagctcaaagatccagcctccatagaagccccacaagcaagcttccatcaagtggtatcagagcacaagagcttcaagtaggtgctccttaaacctccattaattnttttctttaccttctcttccattgttgtttcttcatttatctccatgtatctcctcacatgtcttgttctaaatgttgctaacatgattctttagagtttccaccgattaaacttgctatagaagttagaaattgatttctatggttcanaattcttgttcttgttctttgaaccatgaatgcgttgagttt

SEQ ID NO: 27461 - DNA, 395 bp, Glycine max
  unsure at all n locations
tttctttgaggggttgatcacccggtgatgagaggaacgaggataagggctacatgggggtacgtgagcttagtagaaagtgggcaactggtgatggtgggttcatgtttgatttgtggatgtgggagagttgatttgcaccatcgcccgatcgccacctagtaccacatatgacgggtaccccataatcctactagcttgaagtgagaaagcgtggaagagtcagtcttcctacttttatttgttgaccacagagtggtacttggagatatgtcgcggngctcatgagaccttgnggacgccaggtggggtgctattgcccaaaaccaagcttgatcaatcccgacccaacccgggcatagtcagtcagtgagaacctgtgatgtacctaaata

SEQ ID NO: 27462 - DNA, 250 bp, Glycine max
taaactagctgacaacaatttataatgaccactaacctaattttaatacttatgcctaacctaggaatgaacaaactaaatgactgagtgtaactgaaattgttggcaaccaaaagtcacccccaacagccacaagtcaccccatttgtctcccaaaaggctgatgcctggttgcaattggcccttataaactagactaaaccctttagttgataaccaaaacatttttagtcaccaactttcaaggatt

SEQ ID NO: 27463 - DNA, 403 bp, Glycine max
  unsure at all n locations
agcttgtctcatagaggtccaggaaggacaaggcagccgaaggaactagttccgctccggagtatgatagtcaccgctttaggagtgctgtacaccagcagcgcttcgaggccatcaagggatggtcgtttctccgggagcgacgcgtccagctcagggacgacgagtatactgatttccaggaggaaatagggcgccggcggtgggcatcactggttactcccatggccaagtttgatccagaaatagtccttgagttttatgccaatgcttggccaacagaggagggcgtgcgtgacatgagatcctgngtaaggggtcagtggatcccgtttgatgccgacgctatcggccaactcctangatatccgttggtgttggaagagggccaggaatgtgagta

SEQ ID NO: 27464 - DNA, 282 bp, Glycine max
  unsure at all n locations
actcaagcttcccaccaacccaacaatgtcattactcagccaataaacaaacctcctccttacccaccacccagttatccacaaaggccatccctaaatcaaccacatagtctgtctaccgcactttcaatgacgaagaccacctttagcacaaaccctnanaaaaaaatattaataaaaataaaaaaatcccccaccaaaagggattttgcagcaaaaagccttgtgggtttaacccaaattccgttggcatatctaaacttgatcccatatctacttgat

SEQ ID NO: 27465 - DNA, 403 bp, Glycine max
  unsure at all n locations
agctttgtgtaatcgattacactaatttggtaatcgattaccagtgattgtttctgaataaatcaaaagatgtaactcttcaaatggtttttgactttttcaaattagtttttaagtttttctaaaagtcataactcttttaatggttgtcttgaccagacatgaagagtctataaaagcaaggctttgttttgcatttcaagtatcttgaacacttattcaatcaatcatttacaagccttaaatctctttgaacttcttcttcttctttgtaccaaaagctttctgaagttttctggttttccaaaccttgaaaacttgtgctattcatcttttcattctcttctccctttgcaaaanagaattcgccaaggactaaccacctgaattctttntgtgtctc

SEQ ID NO: 27466 - DNA, 339 bp, Glycine max
  unsure at all n locations
acacataatactcagcttacagcagatttagtaatgaccactaacctagaataaaatttctaatgccattaacctagggaattaaaaaaaacttaatggctgagtgtaattgaaattgtggcaaccaaaagtcacccccaacagccaacaagtcagccaccatttggtcctccaaaagggctgatcctangttgcccattgggcccttattataacctgaactaaaccttacttaaacccttttaattgattaacccaaaacatatttttggtccagcaactttacaaagatgggccattatttagaccaactaaacactctaaattgagacaagtggt

SEQ ID NO: 27467 - DNA, 402 bp, Glycine max
  unsure at all n locations
agctttattgtacttcaattnttgcttgagggcatatcctccccatccactagggtggaaattgctccatttaagggtcaccatttcctgaaatcccttgtcctgcagccaccaatccatgaccttgaaaggcttaggaccccaatcaacacttttggatcttagaaggatagggcgatgatctgaaaaatctctgtctagtacaaactgtgttgtgtcaggccactgaaatgatcctttgctaccctgcaatgagacacacacagatacacaaacacacacacatagagacaaacacacgcagacacaaacacaaacacaaacacacacacacacacacataaagatacacacacacacacacacacacaaagtcatgaattcccatgggtatggagtatc

SEQ ID NO: 27468 - DNA, 449 bp, Glycine max
  unsure at all n locations
actcaagcttgaaggcgtgtagtccaccatctnttcatagtagaatactggttatgttctactatcattatcatctttctccgtcattgaggtgccactngagctgccaggtctctccacctttgggcgtattctttgaaagatctgtgccccnttttgcacatgttctgttgttgcatcctatccggaaccatatcaaaatggtactgatactgcctaatgaaggcaacctttatgtccttccaagagtggactcgagaaggttccaggtcagtgtaccaagtaacagctaccccagtaagattttcttggaaggaatgtatcagcagttcctcatcttttgcgcatgcccncatcttccaataatacatctttagatggttcttgggcaagtagtccccttgtacttgtcaaagtccagcaccttgaacttgggaggggtgatgata

SEQ ID NO: 27469 - DNA, 407 bp, Glycine max
agcttttcggatttggtcttcgccagtgaaaggatcaatgtgggtccaaaaagaggcaaatttgatcatcctactaggacgactgagaaaactggggcaaataaagagggtgaggatgagggagaaacccatgctgtgactgccattcctgtacggccaagtttcccaccaacccaacaatatctttactcagccaataacaaactttctccttacccaccacccagttatccacaaaggtcatccctaaatctaccacgaagtctgtctaccgcacttccaatgacaaacaccacctttagcacaaaccaagaaacaccaaccaagaagtgaattttgcagcgagaaagcctgtagaattcaccccaattccagtgtcctatgctaacttgctcccatatctactt

SEQ ID NO: 27470 - DNA, 289 bp, Glycine max
  unsure at all n locations
gtaacgtttccatgagtgatttcgcgaagtttcgaccgttcttcgacgttcttcattcgttcttcatcgttcttcaatcttcaacgggtaagtacctcaaaccaagctttntaattcattctatgtacccgtggtagtccaccttttgttntatgtatttttattctcattgtcatttactttttatacccncttttgacgtgcttaagccatttatttaagtcatttctcgcttaatctnaaaataaaataaatttccaccgatcgtttgaatagtaatatccgttag

SEQ ID NO: 27471 - DNA, 404 bp, Glycine max
  unsure at all n locations
agcttgttcataaacgtgcatttatgtgcaatacacaattcccggtacaccacaacaaaatggtgtatcagaaaggcgtaatagaactttaatggatatgtttaggagtatgttagtcaattagactttacccgtatctttgtggatgtatgccttgaaaactgccatgtatttgttgaacagggttcctagtaaggcagttccaaagacatcttttgaactgtggacaaataggacacctagtataaggcacctgcatgtttggggttgtcaggcagaaataagaatttacaatccgcaagataaataattggatgcaagaacaatcaatgaatatttcattggttatccagaatagtcaaaggggtatantgtttattggtctaatcatagtatgagaattg

SEQ ID NO: 27472 - DNA, 421 bp, Glycine max
agactctatagagtacctctgcgcgcgcgcacgctgtgtgaacgattacactactctggagagggattactagcgattgtatctcaataaatcacacaatgtcactcttcggatggtttttgactttttgaaagtagttgttaacttgtgctagaagtcatacctcttttaatggttgtcttgaccagacatgaagagtctataaaagcaacgctacgttttgcatttcaagtatcttgaacacttattcaatcaatcatttacaaaccttaaatctctatgaacttcttcttcttctttgtaccaaaagctttctgaagttttctggatttccaaaccttgaaaacgtgagctattcatcttttcattctcttctccctttgcaaaaaagaattcgcctaggactaaccacctgaattct

SEQ ID NO: 27473 - DNA, 386 bp, Glycine max
agcttaatgaaattttgttgggtatatcggaggacaaatacatgagattgcaagagggagttaagcaagtgcaaagacattttgtggtgaataatcccccaaagaggtatgatgtattccatatgattattcattccatatggctaaggaggttgaatgtgcgtgtgaaataagtcatcaactctattatgttctctctctattcatacttttgctaatggttttaaagtttaattgtttgaccttcaatattttgatacttaaaagataatagattcgagtataattttatcttatatgactaataatttttaatcaagagtcatctcttttgtgacttaaaataaatataacaataagagagatgactctacgaaatatgaata

SEQ ID NO: 27474 - DNA, 428 bp, Glycine max
  unsure at all n locations
gatatggtcttcaccgacgaaaggatcaaagtgggtctataattatgcaaatctgatcatcatgctgtgataaatgccaaaaaaaaaactagggcaaatgaagagggtgaaaatgagggagaaacccatgctgtgactgccattcctatacagccaagttttccaccaacccaacaatgtcattactcaggcaataaccaaccttctccttacccaccgcccagttatccacaaaggccttccctaaaacaaccacaaagtctgtctaccgcacttccaatgacgaacatcacctttagcacaatccanaaacaccaaccaagaaatgaattttgcagcgagatagcctgtagaattcaccccaattccggtgtcctatgctgacttgctcccatatctacttgataattcaatggtagccataaccc

SEQ ID NO: 27475 - DNA, 380 bp, Glycine max
  unsure at all n locations
agcttgtacagagcaaatgagaaaaatgagtgacaaaggtgaaagcaagagccatttctagggtaaattgggtgttgaggggtcaaattttgaatcggtggagttttcgtcgtaaaaccagtttgagctagtttaaagtaatgttatagacttgtttgagatgagagtttactccaaaattaccccattctcattttcacttctcaaaccttgaaaatccactaaattgaggggttttagatacctagattttgaattgccttggtctgaagcttgtttttggtttagatatgatttatacatgatttangacttgtaggatccaatttgagaaaaattggaggtgggtaagatggatttcgaaatctgccaaattgtgc

SEQ ID NO: 27476 - DNA, 390 bp, Glycine max
  unsure at all n locations
tgtacggttaaagtctcacgattgtcatgtgctcatgcaactattgttagccgtggctatacgagacatcttgccaaacaaagtcaggttcacgataactcgcctgtgctttttcttccatgctatatgtagcaaagtgattgatccagtaatgtttgatgagttggaaaatgaggccgcaattatactgtgccagttagagatgtattttccccctgctttctttgacatcatgattcacttgattgtgcatctggtcagagaaatcaaatgttgtggtcctgtttatctacggtggatgtacccggttgagcgatacatgaagatcttaaaagggtatacaaagaatctatatcgtccggaagcatctatngttgagaggtacattgc

SEQ ID NO: 27477 - DNA, 404 bp, Glycine max
  unsure at all n locations
agctttgttctttttataaaatgagaagttctgaactcatcacgttatctaaaaaaaccttggggtggatccaagtgctccgatcattcatttgcatattcatgttttggtggcatactcaccgttgtttatttctttaggaatttcatcataactaaaaaagcacaaaggcacccctataacactcgatccagaaaaatggataatgaagagggcatgcaggaacagatgaaggccgatctatctgccttaaaagatcaaatggcttccatctcagaggtcatgctaaaactctagaaaactatagaggataaagccacgacaaccgcctccagtacagctagggaagcgaagccggtgctacagcccgccttanatctgggccgagacagaaatacgatagt

SEQ ID NO: 27478 - DNA, 377 bp, Glycine max
tcagaagtgaaattgagaatgagggtaaattggagcaaactctcacctcacacaagtctataacatcaatttaaacttgctcaactggatttacacctaaaattccaccgaatcaaaatttgactcctcaacacccaatgttaccctagaaatggctctttgttcactttggtcatttgattttctctcttgtacaaccccagctttctcataagtcctaaatgacatttcaagctaggattaactcactgtaacctccaaatgccactaaatccagatttggccttccaactctcaaaacctcactctttttccactcataacaccatattctcactttctaaccctaagttaactctacccttcatctctaacag

SEQ ID NO: 27479 - DNA, 400 bp, Glycine max
  unsure at all n locations
agctttgcaaaatgttgataacaagacaaacttcaattgcttcattttggtgacaactttattttcatccaaatgatttttttgcatgagaaggttttaaatgggaaaaaattaattttcatgagaaataacttttcaaaaaatatatgatgtacaactaacctcgtagaatattgtccaaaaattttccaaaattattataaagtgatatgataatatttggaaattttgttttgaaaatacggttgtgggacaacaaaggaacaataactatgaaaaatagattcttgtaatttgtttggcttgagaaaaatatgacatattattaaggttaaggaaactccctattaaagtttataaaattcagaggtgcgtaagtactttnttaaaatntaaaaat

SEQ ID NO: 27480 - DNA, 458 bp, Glycine max
  unsure at all n locations
agcttcatccaactcaagcatggaaagaagacagtatataccagtcattcgtatatttctaaaagctnttcacccttatcgatgattgaaaaaagcttttaatggaagtcaggagaatgaatgccccccggatgcattaaccggaaaccaagttcatgatcgcgtaaaggacattgtaactgtgtttggcaagtcccagaagaagacatcatctcccaacatgtggaagaagcgcttaatattctttgatcttccatactggtctgatctatatgtgcgccactgtctagatgttatgcatgtggagaaaaatgtgtgtgaatatttaattggtactcttcttaacattaaaaggaagacaaaagatggtttgaaatgtcgtcaagacttggttgacatgggaatacgagagcagtngcatcccatatcacaaagtctgcgaacatatttacccctat

SEQ ID NO: 27481 - DNA, 399 bp, Glycine max
tagctttataagcgcgggtctgggagacaaaggtcaagtggtcgcaatatgcgaagatgatgttccgagtacattggatttggtacgaccatgccctcctgatttccagctgggaaattggcgagtggaggaacgccccggcatttatgcaacgagcataatgtaaacctttacggttttaaaagctctatagttgggcctaggctttagagtttttccttttgttaaggctttgtgtcttttgtttttgaatttataatacaaggatctttcttcatctgttcctacgtctctacccattctcattcatttgcatgttcacttctttttctgaaacggcagatccgatgacgagtcccccgaaggtactaatacctgggacccgcctatcgacttcga

SEQ ID NO: 27482 - DNA, 235 bp, Glycine max
tggtctgcaccgactaactgatcggtcccttctttcttgttcggagaaacactacttatgatgcctgctacagtggtgccattctcttctggaattaaattaagtagatgcatgatgttaattattaatggcttaaggtatataaaggttatgtaatacggctgcaattctggatataggacccattaagggatatgaatgtgttcttaaaatttgggtgttgaacggttttaaa

SEQ ID NO: 27483 - DNA, 385 bp, Glycine max
  unsure at all n locations
tttcttattaacaacatacaattcgacaaaattcaattcttgattttggacaattgtttccagcacgcctctgagatcatcgttgtcgtgtagttgtgttgaaataaaacgtgtttagccatgatgaaatgaaatagggacatgatataacaactgaatgtctgtttcagttgctcgagtagggagacattggttaattttccaaatcaattgtgttaacataataaacctactcacgtatagaaatattgggtttgcacataagtacgtcaatccgtgaaccgggttgtttgcaatctgaccatggtggtgaataacaattgatatttttttaggtggagccatgggtggtgtttggnggatataagcggganaactatgagag

SEQ ID NO: 27484 - DNA, 388 bp, Glycine max
agcttggtggtagtgaccgacactccattgaattggcaaaggcccgtgaccaaagcaggaaacccgagtgccctgttggacttcttcgggtccattgggtgtctaggaggcgtgatccctgcaaattgatatatagcgtctgagaccaactgggccacatggatacttacctgagttaggatggtgtagactagctggcactttggccgggggaggtcgaaattatggtcgctggggaggatgttgctgagtagcaacatcatccaaatctgtgtgagggtggtcatgctagtgcacatgatccgcacccatctccccaccacgctgtgggcaaagtccttccccggaacacacatgagctggctgatggcctccttgtcaaaccccg

SEQ ID NO: 27485 - DNA, 223 bp, Glycine max
  unsure at all n locations
aatcaaaagtgattcaaagatggtttgatgataacattgatgataacaaaagatgataacaaaaggtgatgacaaaaagctcanaggtcaatcaaaggatgagtccaaaatgttcaagaggaattcaggaccaatttcaagactcaaaaggaaaagttgaagaccacttcaggattcaggaggaggattgatttcaggattcttgattcaaggatcaagcttc

SEQ ID NO: 27486 - DNA, 401 bp, Glycine max
agctttttattcaatttcgagcgtctcaatatattacgggactcaatcagacatccgagtaaaaagttatcttcgtttgaattagctctgaggttcagaattcaatttcgagcgtctagatatattacgggactcaatcagacatccgagcaaaaagttattgtcgtttgaattagctcagaacttcataattcaatttcgatcgtctcaatatatttcgggactcaatcagacatctgagtaaaaaagttattgtcgtttgaatttgctgagagcttcaacattcaatttcaagcgtctcgatctattacgggactcaatcagacattcgagtaaaaagttattgtcgtttgaattcgctgagagcttcaacattcaatttagagcgtctcgatatatta

SEQ ID NO: 27487 - DNA, 272 bp, Glycine max
tatatatgtaggactgatgatcgctgtgattgacatattcctcgggataaaggtagtgttgccatgttttcaaagcctgtactaaggcatacaactccttatcataagttgaatagttaagggtaggaccacttaacttttcactaaaataagcaattggatggccttcttgcatcaacacagccccaatcccaacattggaagcatcacactcaatttcaaaagatttttgaaagtttggcaacacaagtatggggcattaagtaaccttt

SEQ ID NO: 27488 - DNA, 405 bp, Glycine max
agctttattttatatatactatttacatcatagaggatgatatggccatcgatatctgtgtaatttttgagtaaaaaacattacatagataacgtatataaattatttgtttatattttaaagtctttaaatatctatataattatgcaaagtcactatttgtatagatattttttttgctaacaaaaacaggtagacttgttgccgtcctagctagatgaaactcataaaacgaccattccatgaaaaggcaaaatttcctaactgaaaggagcaaaacgatatgaattacctatacccatggacattaaaggctataagagatataagtataattatgatatgtaatgatgtgataggaagaaagagatctagagacatatctcatatgttaaatgaataagt

SEQ ID NO: 27489 - DNA, 393 bp, Glycine max
agcttgttattgaacaagggaagctctcgagaaactcaaatgatcataacttatcacacagatgttcgattcaggcgcataatattccgagacgctcgaaattgaacaacgaatgttgttgagaaattcaaatggtcagaacttgtcacacggatgtccgattaaggcgcataatatatcaagatgctcgaaactgaacaacgaatgctcttgagaaattcaaatggtcataacttgtcacacggatgactgattcaggcgcattatatatggagacgcttgaaattgaacaacgaatgctctcgagaaattcataaggtcataacttgtcacacggaggttcgattcaagtgcataatatatcgagacgctcgaaattgaacaacgaatgct

SEQ ID NO: 27490 - DNA, 210 bp, Glycine max
gcgaagagggtggaattcctagagcaattcctttatgttatcaaccataaaaggggaaagggtattatggtagccgatgctctttctcggcgtcatgcattacttcctatgctggaaccaaaatggatgggcctggatggttggaaaacctgtgttgaaatggaggaacctttgggggaaatttttaaaaatggggaaaaatttccaaaa

SEQ ID NO: 27491 - DNA, 391 bp, Glycine max
  unsure at all n locations
ttttattatatggatttccattccaattatatatatgaacatttctaggcttcctaaggttatttatgacaacaaattagtgcatggttcacaacatatagcagcaattcaaatttgataaagttgtcttcaccaattctttcacgcacactcagatctttcaagaagctagtttgattgtaaccaaaagccacttactggaggttatccacttcatgaaaggcctcactgcctttgcatgtcataggacatagagttacaactctctttaaagctagaaaatgagatactttcttctacggttcctgaattntcataatttccaatagggtttggttccacgagagtattagtattcccataatactgtgttgaaggattggtggacaag

SEQ ID NO: 27492 - DNA, 181 bp, Glycine max
caatactcaaacccgacacgagagagctatatagttgtattcttacactttgtgtttctgtcacgtagataccgccataccgggacatatttgtaggaccaacccttcctcattcacgtacgcataataattgcagtcgaaatcccatccaaattaggttaactggagcctggaaactaca

SEQ ID NO: 27493 - DNA, 395 bp, Glycine max
  unsure at all n locations
agtctatcattntttctgagtccctcatgacaacccaaattttacttcaattggtgttctttacagaacttgtcttttctgaatacacttaagaaaactcatcagtaggcataaattcaaaaggcttatgatttgtgttaagaaggtttgtcataattaaaacaacaagggttttggactgaacaaattgctcataaaataagatgtgaaaaacaattatcaaagagacattagagaacattcactagacagtaatagagagcacatatgaactaatcaaactaaatggtacaaatattgaaataataagggactaaacaataaatattcaaacttcatctaaccagttaaaattacctcctacaaaaaaatcnaatttggtgtttcatcgtgca

SEQ ID NO: 27494 - DNA, 412 bp, Glycine max
  unsure at all n locations
gactctagaccctagattgattggatcctcaaggtttgagaagggaaaattagaatgggataattgtggagcaaactctcatctcacacaagtctataacattaatctaaacttgctcaaacaggttttacaacgaaaactccaccgaatcaaaattagactcctcaacacccaatttaccctagaaatggctcttgccctcactttggtaattcattttcctactttgtacagcccaagctttcccacagtcctaaatgacanttcaagctatgattaacttactttaacctccaattaccactaaatccagaattggcttttcaaatccctaaagcatcacacttttccactcatatcactacgttctcactttntaaccctaggttaattctacccttcatctctatca

SEQ ID NO: 27495 - DNA, 393 bp, Glycine max
agcttcttctccatcacccacagccaccattagccactacaaaccaccattgttctccgttgaaaccccacaccgagaggaacccttcaaccgaagcggaatcttccaacttggcttgcggtttcggtagagaacgaaaccctaacctgacctttccttttccttcgaggtaaccatggttctatgcttgttccttgttagtttcagcttgtctttgcatcttttctaactttggaaccaccattgcatgttttacgcttcctttgaaaaaccctagagaaagagactttgtaaacgttatcttttcatgaaatgcatgttattttcgtaacctacactgaaccccggtcacattgttgtggtcggaatttccaaatgatgttcctttgtaaa

SEQ ID NO: 27496 - DNA, 494 bp, Glycine max
  unsure at all n locations
nnnnaaaanagcctgttttggttttntgagtngacncanttngcaccaacctgcgaatgcacataggtagatatatagcgtggttgatcgctgaatggacataatccgcgcgatagaggccgggtaccttgtggatgcaaaccgagattgagcatcctgaagaaatgccagccatgaggatagctggacagtaccatgcattccattaaacccagcttaaggttgaacctccctattaaaatgatatgacgggaatccctcatgaatccggggtggtggatattcgaaaaatggggtttctaaaaaatctaccccgtggcgtcgaacccttcaaatctcggttattgaactttaatccggggcggtgctgtgtgtgagcttgatgctgtaaacaaggtcccctctggttgcactggtgggaataatacctattggttcgaggcgaccaaatgtttggttgagtctcattcttgcctgactggtgtacaacttcg

SEQ ID NO: 27497 - DNA, 392 bp, Glycine max
  unsure at all n locations
agctttcttgagaaaacttccttaagaagcttctttgagaaaacttccttgagaagatagagcttagctacacacatccctctaataactaagctcacctccttgagaagctttcttgaaaagattcctaaagaagctagagcttagctacacacacctctctaatagctaagctcacctccttgagatgagaagctagaacttagctacacaccccctataatagctaagctcacccccatgacaaaatacatgaaaatacaaaaaaagttcctactacaaagactactcaaaatgcctcataatacaaggctaaaaccctataccattagaatggccaaaatacaaggcctanatgaaggataaaaaacctattctaatatttacaaaga

SEQ ID NO: 27498 - DNA, 468 bp, Glycine max
  unsure at all n locations
ggtannnccgttttnngcntntttaataccagcnaccaaatggtaancccaaataccaaattaatattgtttctattgtactaacccattttaggtgccactgtcgcggccactgccaaatggtggttatcctgccaaaggaccactaagtggccgggtttggtcaatggattaccaggccaaacacctcccttaagggaataattattaggtaagggttgtttccattccattggctttgtaatacctcattgaccacaaccagtttttaatggttcctcatatggaccagggctatcaagggtcttgatgatgctccacagcctaaatcaaaggctcctgctaggtggattgtcgccatggtacgtcattacataaaacttcaactatatatatttcttatgcgtctgacactagtagttattaatatccaatttcatatgtattagtgtatagacanaaagactg

SEQ ID NO: 27499 - DNA, 404 bp, Glycine max
  unsure at all n locations
agcttgtatgattatggggtacccatcacatgtggtactaggtggcggtcgggcgatggtgcacaacaagttttccacatccacaaatcgcgcataaacccaccatcccctgttgcccacctccaactgagctcacgtactcccacgtagcccatatcctcgtttctctcaacaccgggtccccataaatcctcccaagctttcccaacatccaagtaatacaacattcaaacagcacaaattatcacagccaagcaaaacagggcaaaggtagaaaactctgccaaaacaccaaccaaaatcacagcttttctcacttaaagaccccagtaacaattcctttgttccaattcgttaaccgttggatcgactccaaaattntactggaagtctctcgtacttaa

SEQ ID NO: 27500 - DNA, 392 bp, Glycine max
  unsure at all n locations
gttctagtttttatcccncccccctctctccctcgcgaagaggactcttctctctctctcctctctctcttcaattttccgttttaagtttaagcctccctcccctttctctttaatttccgtttttttccatttccagttcagacttttagttttatcaataaaatttcattctctatttgattaatggaaggctaagtccgcagcgttgttttcccttgaggatcaagcacagttctctttgaggttctattattactgttaaattctgtttatgttttcctcttcactaattactttgaanttgttggctttaattcatgcatgcttagtgcttgattaattggctctgcgcctaatttacgttcatgccttatggatcgttatgagta

SEQ ID NO: 27501 - DNA, 397 bp, Glycine max
tgctttataatagactttatcttcataataaaaatcacataagtgttttgagacataaaacacatgtcatacatatgattcgttcagataacggtcaatgtatgttgatgctctcttttgggtaatacaccaacacacaacatacaaacatgatgatgctaataaaattcttaacattatttgacaattaaatatgcaccgattagtagtacatatttccttctggtatataaataaaactaatgatacacacaaatcgcctacaattatattcattaattataagaacaactaatcaacctttgggcgatccataaatgccttataacaatgaatttcaattacccataaaccaataatcatataatgtagtgtcgcaacctacccttcggcggga

SEQ ID NO: 27502 - DNA, 226 bp, Glycine max
atagacccataaatgcgggggacaacaccatgtgacatattgtatgaccttatgctccataggtcctctgactcttatcttatacactaatggtggaagtagccaacagttggtaacatatccttccatcaatatatatggagggctgcaggacctaaggaccgattcgtccatgcctggaaatattggaaatccaaccactttctggtaatattggctagttttt

SEQ ID NO: 27503 - DNA, 393 bp, Glycine max
  unsure at all n locations
tgcttatgcgcatgtttccttacgaacgttcacttgcggaagacatcctattaaccgaaaaaatgcacccatatacaatcaaggcagctttgttacctagattatttacacgtacttccaaggtgtatttgttacttacatcacacacatctccttggctaaattcacatacatgcatactccaagcattttggggtaccaaaaattgcacatgtgcacatcttggtatttctaatacctatacatacacaaacttcatgatgaatcttgactatctacacaataaagtgctacatttcatgccctttttcaagtttttgctacctaaagccgcatgcaaattcaagcatatnttcctttgctgactaaaattgtattcaaattatatatata

SEQ ID NO: 27504 - DNA, 153 bp, Glycine max
acaacacacgagcatgggggattatagaaatatatgtgtatgcatcatcatgttgattagaaagacccaacttttctacctactactgcaacttttacttacttggcatttaatagttattagcataaaggttggttaaaatttggttggaat

SEQ ID NO: 27505 - DNA, 401 bp, Glycine max
tttcttctacttatgtggcagggcgggtttccttcactttcttgtttccaacgcgagctctgaccactgttcttccttcccgcgatgcttcttttcatgtccgcctgagtgggcttatatcctaaaccatacttcccacgattcccttgggtttttatcagactagttatgccgccattgtctttgcctaaacccatcccgggttcataaccgttccccaacataactcgggccatcattatcgccgcctcggacagacaaggttgcccaaagaaggagtccacggaggaaatgctgaccacctcaaaagactggaaagcggtttctaacgattcttctgcggcttccacataaggcatggaggatgggcagcttaccaagatatcttcctcgcctgacac

SEQ ID NO: 27506 - DNA, 383 bp, Glycine max
  unsure at all n locations
accgacgaaaggatcaaagtgattcttaatagaggcaaatcagatcatcatactgggattaatgccaaataaataggccaatgaaaggggagaatgatggacaagcccatgctatgattgccattcctatacagccaagtttcccaacataccaacaatgtcattactcaaccaattaactaacctttttcttacccaccgccccattatcgacaaatgtcatccctaaatcaaccacatagtctgtctaccacacttccaatgacaaacatcacctttagcacaaaccaagagcaccaaccaagaaatgaatnttgcagcgagaaagcctgtagaaattaccccaattccagtgtcctatgcttacttgctcccatatctac

SEQ ID NO: 27507 - DNA, 256 bp, Glycine max
  unsure at all n locations
agcttatcatctgggtctgtttcaagttttcaaatttgaaatgtgaggagctgtgttaaggactgcactctaatgcttctgaattctgagtaaaggagctaaccttatttccactccttttgaacttacctatgttgtgatttgcatttacaatgtatggttaggtagtaagatcaaactagtagttttattattctcagactangaatctntttttttttttgtgtgtgtgcgtgtggttgatttccaaagcttt

SEQ ID NO: 27508 - DNA, 228 bp, Glycine max
tgagaaacaagaacttaatgtatcataatgtgatccgatatgacctctgacctataggatctgatttaaaccgacatcgaatatcctctaattatgtgtaatcaatactacccgtttatattaacaagcacttattgtgtactctgacacacacttttcgtcccattatcctctatatatctctcattttacactaattataggatattagtgtcaagacaaataaag

SEQ ID NO: 27509 - DNA, 364 bp, Glycine max
  unsure at all n locations
atgtttatggtaaaagctttccttgatttgttcgattgctgcgaaatccataatggggattccggtctaattcttgcgaacctgatcaaactgaagaattgaaaatgaagatgataaaatggatcaacatatgaacccccgcctgggaaaaatgaaagggctgaaatgaaaaaacattgagttttgacttcatggatgcgcctctttatctgagatgaaacatattcatgtgcccttttgatatcattntnttttataattcttttactaaataaatattttgccgtgtgaaccttaaaaatctcttgatcgatgctccacttcatacaaacatcatttttattatttataaattcccacaacg

SEQ ID NO: 27510 - DNA, 301 bp, Glycine max
  unsure at all n locations
aaatggacttaccttgaattaatccctttgatagcccttttgagccttgtttccctttccttgtnttgaagctcactactagccttaagtgaaaaaccatgatattaccatatccttaaggaaatttggagctttggaatttgtttgggaataagtgtggggggtttttgtttattggacaacttgttttgttggctatgctttatgatgcattttgggccatacttgatgtacattgtatattggataaactgtggacatgctgaatgacatagtgtttctaaagcctataaacaaaaaa

SEQ ID NO: 27511 - DNA, 453 bp, Glycine max
  unsure at all n locations
cgcgaattgggcctgtgatgcctttggaatcacggcaatncagctcgnccccgggatccttagagcgacctgccgcttgcttctttttattgtaacaggtgccttcaccttctatgactcgttcgacgcttgacacagagaactcacacatcggcgtgtggcccaagcgtgctctgaggcgttctgattcaaattgggtcatgacggcttagctcggaaacaaacctgtactaattatgagactccttatgctgatagttgcacttatagatctctttctttttctctcctttttctaacatcacccccatgagtctccttattgagtgtggcagtaattactttttatccatgccaattattacgtcttcctattacaaatgatagctgggacgatcaaattgagacttgttcttctatcctttttcttgcaaccactgaatcatctatatc

SEQ ID NO: 27512 - DNA, 373 bp, Glycine max
  unsure at all n locations
atgtcagctnttctaaaacttcatcaattgttgaattcatcaacctagctttccagaatagagattgacgggcttctacggttacctagaaatggatagaaggaagaattcttggaatatgattagaacacttatagaagataaccttttcctttgtgcatatttggtgattataattatttgctcccaatgataaaagatgggcttggtaatcacccatcgtggctaataatggctttaagagactatattgattgcatttcatgcacatcaggatacaatatacttggcagacagaaagaaacatgatcattgaaagaaatagacaacggttgtgacttgattgttgactatgtcaacttaactatcatgc

SEQ ID NO: 27513 - DNA, 247 bp, Glycine max
tatatgtcactcttgacttggattgctggaatgttgtattcatgtctgatgctattgcatttaatgatctaattttgtctaattcaccattgaaaacaaactattcagcttcttattttattcatttcatatgaccatacttgcttcttcgctttcatcaacaaccaatctatacttagtaaattactgcagagtgagattttatttacttagttcaagattgcctaacttgagcttatacaacata

SEQ ID NO: 27514 - DNA, 316 bp, Glycine max
  unsure at all n locations
agcttctgttgttcaatttcgagtgtcttgatatattatgcgcctgaatctgacctccgtgtgaaaacttatgaccatttgaatttctcgagagcttccgttgttcaattttgagtgtctcgatatattatacgcctgaatcggacctccgagtgaaacgttatgaccatttgaatttctcgagagattccgttgttcaatttcaagcgtctcgataactcatgcgcctgaatcagaactctgtgtgaacacttatgaccattttgaattctcgagagcttcnncgtgtcaatttcgagcgtcttcatatattatg

SEQ ID NO: 27515 - DNA, 165 bp, Glycine max
agacgatggggggggtttgaagttgagtttggggatcacgttctgcataaagttggatgttgctagagcttcggatcttttgctccttggatgtgatcctccagtgatccatggggatatctagccaagcactggtctgattgatactcatggggtgggaagaat

SEQ ID NO: 27516 - DNA, 198 bp, Glycine max
  unsure at all n locations
tttgatcaacgactactggccaaccctctcgctattcatgatgcacagagattcatcgactcatggaggcttatatgtggatacactggtgagttcaatggaatgactggactttctatgggacgttctttactttctttgnctgagcagtcccacttatactcacttcatttatttattggacgcttaacctgaaac

SEQ ID NO: 27517 - DNA, 310 bp, Glycine max
  unsure at all n locations
agcttgttatagaaccaataacaacttgatgaagttttgtgttttacatgttcaactctcttgagtgacattcgtattgattgttatattttgtgttgcatcttactctctatcttttcatatgtgcatcatgcatcatcatgtaggagttagaagaaaagctctaacgatagaatatttcttctatagctaaaactctctattntaatcgattacaggctgattgtaattgattacacaagctgtttgaagcttgtaaaagactgtctcgtatcgatttaatccattacttacttatagtaatcgatta

SEQ ID NO: 27518 - DNA, 263 bp, Glycine max
tgcttgtttgtaaactttatgcctcgggtaacctggcaacccaactagccatgaatataaattcacctgtacacatcatggttttgctctctatcgccaccaacagaccttgccttctgtgcaacaatctgaacaattgaacagcctgaagcttatgctgcataacatctaccaatatgatcctcctcgaatcttaggagccataatccgccacaacagaacaaatatgaccttctccgcaataggtgcaatccccggtggag

SEQ ID NO: 27519 - DNA, 490 bp, Glycine max
  unsure at all n locations
agcgcgangtgangccacgttgattacacttgaatnantcacnggcgaatnccagcgcggcacctgcggatcctctacagtcgacctagctgctattcttacttgttttaacgaccatgcgagagggagaccagcatgctgtctatcatagacaagtacccacatcaattatgcatacccccagcccacgatcatataatctcggatgactatgcccaattatacgcggatccctaggctcgatgagtgacgacctacattttatgcacacgagggcactacttaccatatgatctgatggccctgacctgatgcgggggacaagaacttctccgagtgttacccaaggccaatgccataggtgataactactcagcctcggaggagattacgggctcctgggtgtctgcgctctgatcacttatggtcgcgtcatagaaatcgtaggagcttgttcgttccatacctgacacatatactctatattccg

SEQ ID NO: 27520 - DNA, 221 bp, Glycine max
  unsure at all n locations
agctttgatggtgcgtagcccaccatcttttcatagtagagtaccgataatgtgtctaccatcacgaatatcgcctccctttttgcacatgttctgtagttgcatcctatccggaaccatatcagaatagtactgatactgcctaacgaaggcaaccattaggtccttncaagtatggactccggaaagttccaagttagtgtaccacgtaacagctaccc

SEQ ID NO: 27521 - DNA, 340 bp, Glycine max
agcttctctaaatacttgtgttatcgattacgaatagaaggtcatcgattaaaactgagagttgtgcattgaagatgtttcttacctaagaaacaatcttcctacttctacatggggatgcatgatatacacataggtagatttaaacttaaaaacaaaaatttatacaaataccaccgaataatgagttacgcatgtaaaatgacaaaactcttcaaagtttgatcttcatgttactttccctatctctaacagaattgggttttgaaacttttttagtggttctttgaaaacaaaagatttctgactatagtttacaataagtgagttcagaatgaaa

SEQ ID NO: 27522 - DNA, 484 bp, Glycine max
ccgagtgagcactcgacacattgtgatacactggaaccgcgatccttaagtcacctgcgatgcagccattttatataatttgatgagtttttaacaaacgaaaactgctgtaagttgtagtacaatctaactaccggaataaatatggaccccatagaaaatttagctacttttacctaaatatgcttgtgcgaattcgaagaagatgtgactgcgacatccctaaacgatcgaatgcaatgattattttttgctttttccttgatgtaaccctctatctatttatggcgtgtctaaattccataataaaattcaatgtgttatttcaactggcccaagataatttatttttaattgtttgaccttcagaccttacgcatacttagaagggtccgacttcaattttcttggaatttctgccgcttctcttacgcattatctgatcggaaccacggaactgaaataattttttcgggtcttgtcc

SEQ ID NO: 27523 - DNA, 534 bp, Glycine max
  unsure at all n locations
atacttccttactcccattctcacgcactctctaatcctnaaaaaannnaaaaaagcgcgggtgagcatgtgatacatcgaaaacacgngaanncaccancccccggacctctaagccgacagcagcttgcaactcgttgttccagtttgaggagcaaccccctggatggatcctaaaatcaaccaattcttctagtatcacgtgaccccggagcatgaaccgctgacgattgccttcttctacatggatggtcctgctctggcatggtttcaactggatgacgagcaacagacacgttatagtccagccactcttcctttaagccctgaaaaccagattcacgccttcaccattgaagattctatggcacattatttaaataacccagacagaaacatttaacgcttacttctcggagtttaacgacctggcaaatcgcattggtgggttcgcatctccctttctcctgaagtagactcgctcgtgactattcccgcaatacacgcacacaaagtcaagtgccctcatcttcg

SEQ ID NO: 27524 - DNA, 254 bp, Glycine max
tcttcttgttttaaaattagtaactaatgtcagtaaaggtagaaattacgtgggaataatttaggttaattaatggtgatttacagtctctagaattagaaaaggggtcaataagttataacacgttaaagtggacgacattttcatacatgactatataactagtctaacaatccaattttaatttaattaactggtgactaattcaagcgtctaattatacgatgtacaataatctaaataagttagaggtg

SEQ ID NO: 27525 - DNA, 185 bp, Glycine max
ggcaattcagctcgcacccgggatacttaagtcacctgcagttttttctttttattcggcctgacaagggattgagggtgtaattattgatgctgcaacatagaacacaaatgtcatgattgactagagaaacatatttctatgcatcagcttatttgcttcagagacccaacatatctacctac

SEQ ID NO: 27526 - DNA, 263 bp, Glycine max
agcttctctatatattatgcgcctgaatctgatcttcgtgtgaaaagctatgaccatttgaatttctcgagagcttccgttgttcaatttcgagcgtctcgatattttatgcgcctgaatcgggcattcgagtgaaaagttatgaccatttgaatttctcgagagcttccgctgatccattaccagggtctcgattattatgtgccgaaattggaatcccattaaatgtatgacatttgaatatttgaagcttcgttgtaaat

SEQ ID NO: 27527 - DNA, 224 bp, Glycine max
agcttaactttcagcgttatactattcatcaaaacaaaaaactacacaacgcaaattaaataatacattattcaacagcagggcaagacgaaaatttgttccaaccacttgtgcatttttataattataataataaccctaatcagtgtgaagactaaaactagtacagtaacgtaaattccttttgtcatccgaatcccacaggttatgcatatctaataatg

SEQ ID NO: 27528 - DNA, 364 bp, Glycine max
aagactttgcctttgatgttttgatgatgccatatgataatgatgttttgatgccttatgaaaattcacttttcaagtttaattcaagacaaaaattccagaatacaagataccacatccagaagatctctagtgttttaagaggggaatttcaaattgaaacaacaaaaggtttggccaagaaatttaaaccaaaatgtctttttcaagagatttactctctggtaatcgattaccagaggatgtaattgattaccagtggccaaaatgatttataacagctattagaaaattggatctaaattttacactgtgtaatcgattacacatggatgggtatcgattacagtagttataaacgttt

SEQ ID NO: 27529 - DNA, 315 bp, Glycine max
agcctgatttatattacgtgtaacgctacagaagctgctaccgctgaccaactaaacacctgagcccccttagatgtaatgaatgagtttatcgcaattaggggtacaatgaacatgtgcttggatctttacagaattaaaatgagaattattgtgggatatttattgaattataattcttcctttaccaatattaatacgattttggtgtatttgacggatccattgatattctaatgtgaattgggtgagtaaattgaatgatcttgatgtcttaataattttggcctatgaatttgatatgaatatatgaaa

SEQ ID NO: 27530 - DNA, 379 bp, Glycine max
  unsure at all n locations
cactngttttgaatacgcaaggtttgagtttggctcattacctattataggctatttttcaaagctcgacatgggttacataaaaacctaacttggcctaccagcatatttaaaagcttgcttacagacgcctttgatcacataactattttaaaacctactgatatactcacctaaaaaaaacttattacaatttcgataacgaatgtacaatcccaaaataattgataaaccaaatcatattgattcaagtcgtttaacacaaagtttatccaatggaatcaaaacagagagcctatttaaaaaatgctggatatacatgattatttaatatagccaaccaaattttaactgctgaaatgtttacaaaaatctttct

SEQ ID NO: 27531 - DNA, 323 bp, Glycine max
agctttatgttacatataaaaacgagtctatattacctattctattatgtataaccaaaaaatattatccgcctaacatttaatactttatttatctgtaaattacattcaatttatttgcatcaacgatttttacatgcatgctatccacgaatatgatgcttgttccattggaactctcaacatatattttacattacaatcgatggaatttaattcagctaattgaaccacgacatataacatattactaacttctaatatctgattttattcttacatgtaaaaaacatatttcatatgatattacattgattcaaatg

SEQ ID NO: 27532 - DNA, 327 bp, Glycine max
gtaggacttggcaactgccttcattaaggagtaccaatacaatacggacatggctcccgatcggaaccaacttagggattgattaaccaaaaccttaatcctttaaggatattcccaaaaatgaagaatctcacgcccaattttcccccttaccgaaggagataatccatttggtaatacgtaccacttctatataaaactatagctcatccccttaacttgcgatctctcttccggaaagattaatctgcttcaaagcaattaaaatctgcatatggcccacacataaaaccccatatggcccagaaaagaagaatccccccccct

SEQ ID NO: 27533 - DNA, 566 bp, Glycine max
  unsure at all n locations
agacgctccacaacgcatantaggaccatcactcaacacgctgagccgagattatnttaaanaataanaannnaaaaaaaaaaagcgcganagttgaagccctgtgaactacactggcgaaacnaactcggnacccggggaaaccctanaggcgacctgaaagcatgcaagccttttccagcgggttgctccactcaaaacatgcatcataccacccaccttagggacccggctccaacaaacccaacttgggcaccaacaaagcacaaggatttaagcccctgcgaaccaaaccctcatccaacaacatcttgacctgaagaataaactcaaacccaacacgtgtggcaatgctagcaagtgcctttctacaaaagacaaaaagtggaggcaggacacaaaggaaagcccttaaatgcttgccctcactgcaaaagaaaccccctcttaactaactctngaggagacactaacctcctacactactcttaaccaataacggttgccctctattggacgaaaattccttcctagaatctccccgtatgctctcaacttcacaaaaa

SEQ ID NO: 27534 - DNA, 234 bp, Glycine max
agctttgttcgtaaaagtttcttaaaaccgttttaaggtccaacgccttaaacggtcctctttgcttttatcggctaacatggacccgtcaaaagcataaaatcaacccataactttaccgcttttgcaagaactacgtagatctgaatttcttatcgcaattgaggatgcctatgagccaaagccccgcttttgtcgaccaccccaagaaatccttaatgatccaacacctta

SEQ ID NO: 27535 - DNA, 348 bp, Glycine max
  unsure at all n locations
acggattagcctgatactgaancactcgacccgggatcttaagcactgagcatgcagctttttctacttccaaattagcatcaacccctcataaggatttaagtctaaaggaatgaaatgggtaatcgggcaactctcctaccaagttatacatcatgaactgctcaacggattacacctaaattcacgaataaattgatctaacaccaattacctaaaggcttttgtactctgcattgctttctttaccacccaaactttatagtctaatgacatcagctgataatatttactcaaacataatcaattgcttcacctaaactcttttcatataacctattactttac

SEQ ID NO: 27536 - DNA, 379 bp, Glycine max
  unsure at all n locations
tattcaagcttgtttcaactgtgctcgtaacaagaaggacacccaagacaaaaacacgaatctcataggaagcatccttggttatttcacaagtacataaactgtctcttttcatgttatataaacttgcaacttgggatactcataaactgcgacgttgactttattttactttcataacttgttgttccttgtttcggtgtaaaatangaagcacgctaaataaagagagagaaaacaaaaacactcaaattgcgttattcatggaagagactacagagcgtgttgctcttcaagagagaatgaggatgatgtcttccgatattgtggaacagggtcatagcagtgaaagcaacaagcaaatactgaggtcaacact

SEQ ID NO: 27537 - DNA, 215 bp, Glycine max
tcaagcttgttttgcaaagctaatgttggaggagagacacccgtttagatggctgaggccctaacggaatgaggcgactaatccgctctatacttagtcatgaactgggtgtacgtggtggacaacttacatgaaacgacgttgttgaaactcatagaggccgcctccagtgtagtccctcaacccaacttcatggtaggcatcatccaagaatc

SEQ ID NO: 27538 - DNA, 211 bp, Glycine max
tctaagctcttttattcattctatgtacccggagtgggccacattgtgtttcgtgcatttttattctcggtttgtctactttctataccccctgttgaccgtgctaagccattttacttaagtcgtttctcgctcaacttaaaagtataataattttcaccgaacgtctgaattgtattatccattaacttcggttaaaataaatttcgac

SEQ ID NO: 27539 - DNA, 201 bp, Glycine max
agctttgtttatggcattcacagattcaccttttagaattcactgtacggtggttccacttcttgcaaagggtccttcctgtgcttttcaaataaattcctagggatactactttgggtgttctttttatccttacacttttgaaagttcctacaagctaatgttggtgtaacctgatgcaatcctacccccaacggtatt

SEQ ID NO: 27540 - DNA, 302 bp, Glycine max
  unsure at all n locations
tcaagcttgtattgaagttttttaagaaagcttctcaaggaagctacctattctataaatagaagcatgtgtaacacttgttgtaactctgatgaatgagagtcttgtgagacacaactcatacttcaacttctctccctntttcttccttcaatttcgtgctccccactttctctttctctccctctatcttttcctccattgaagcatcctctccaagcttattatcccaggctcatcttggtggtgaagctccttcttccatggcttattccctattgaatggcgccttctctcacctc

SEQ ID NO: 27541 - DNA, 217 bp, Glycine max
aaatatagggaatcactggaccgggatcttaagctactgagcttctctgtttcctgaaaaagcttgaccgctgatgacaactccaatgtatgttctataattccttgttcatcatatcggctacatttgagggagtatttttttacctacacccgttgattggttcgagaaatggcaacccaatgaacaataatttggcttcctcagttgatattcg

SEQ ID NO: 27542 - DNA, 380 bp, Glycine max
  unsure at all n locations
tcaagcttatcatcttgcttttgcttgtatttttatgactagtctcacaactgttgatgtcgatattcgtatgttcttgtacgccatcaatgtaattngcaatataaacaactgttgttcatgctgagtgaaccttagattcccgtttgagactgaatgcaatgattcttgtagacattttgcattagtcattgtatttagtcttgaattatccgtttggatagtttggggagactagtatttttatgttagattcattcgttaacgttattattattttgattaatttgatcaaattntggtacaaggcatctcacgttgttctctgagtgcatacttgattatcgagacattaatttcatcgatgtcatgtcgtgtac

SEQ ID NO: 27543 - DNA, 568 bp, Glycine max
  unsure at all n locations
tcctanttactctctatagcgctctttcgtccnctcgcgtactcgatcaaagttgactctacacanttccaccannccacanaccgcgagcncgttganagccttgtgttaacactgttaattacagctcgggacccggagattctctacagtcgacctgtaagcatgcaagcctaactctgatgactttcccaacatanccacagagtatggaatcagaagcatagcaactggtccgctttctaaaaatggagaaaagaaagcgtaattggggcagttcccaaattcaccttgttcgcagnagtggaaaaatatgttgatgtctaaaacctggaagggaaaaacatgttataataaggaaacgcttgatcataaattatagacccatcttcattttatggctttaaacacttcaaaaaagtactttggtgtatccacatcctttataacattttgtaaagattaccattgataaattcccgagggaggaatactcagtccttttctctctatgaggtgcttttgccaccaatgcattacctccattttgatactgaccaatattttg

SEQ ID NO: 27544 - DNA, 294 bp, Glycine max
  unsure at all n locations
agcttgattttagggggtctgatgaccttgctggggacaacatgcaccccgtataaccgacagaggtccgtaatcagagttggcaactccaagaccctgttggacttctctgggtacactgggtgtcttgcgggcgcgatccctgcaaacaataggtgacatcataaatcagttgagcgaaatgcatacttacctatgtcatgatggcatgaccttgctgggggggacgagcaccctgtangtctgacagaggcccgtaaccagagctggaaaccccaggaccctgttggactt

SEQ ID NO: 27545 - DNA, 304 bp, Glycine max
tcagcttattatgcatctactgctttaaacaaaagagtgctccactacgcaacttttggtttcaacttatagttggctacgtcttatgtaaactcaacccatgtatgttttggagcattccagttaataaaaaatgtttctatacatatgtctgttgtttaaaaaaattattaagaaaagagtatgaccatagttatcaactgacatacagaaaaaaaaatggttcattggtggatcaattctataatcttataatattataataagcgagtatttaaaataggactaaaccttagcgtatgat

SEQ ID NO: 27546 - DNA, 276 bp, Glycine max
agcttgtgtgattcgtgaaattccataatgcggcggaaatcgaaaagagatgttcttgcgcaatccatgagtttccgtaacttcttcgaaagctaaaaaagagtaaatacataatccgtaaggattcgtaaccttgcggaaggaaaataggtatcgttacgaaattcataaagtttcgtaacgttacggaaaaagaattacaaaaaaaaaatacgaagggggtgcatttagtaaacaggggggtgtaaatagcaatctggcccacttgggccctcc

SEQ ID NO: 27547 - DNA, 350 bp, Glycine max
agcttgtttgtggagcttctatggaggctggatctttgagcttcaatgaggtcctttaatggtggttttccaccatggagatgcaccggaagacaaatgataaaacgggagaggaggcgccatccactatggaataagccatggaagaaggagcttcaccaccaagatgagccttggataaaaagcttggaatgatgcttcactggatgataagaacgagggagagaaagagagacgggggagcacgaaattgtaggaagaaaaaaagggagagaagttgaactttgagttgtgtctcacaagactctcattcatccaagttacaacaagtgttacacatgcttctatta

SEQ ID NO: 27548 - DNA, 308 bp, Glycine max
agcttgtctactgagtttaattttcaatagtttagtgttgttatatgttagtgtttaatttgtcgtttgagtggaaattgtgaaataagatagtggagtgtgtggcgagatagtggagtctgctagccacatcttcaatactatcagtgtgttttgtatgtgtctttccaaagtttgtctgatagtgacatttatgtgttttttggtatgcaataaagttcccgtggatactcattattcatgaagtacatatataattcctttttttggagaggatggtccaatagttttttgtgtaacacaatctg

SEQ ID NO: 27549 - DNA, 307 bp, Glycine max
tctttagagccctcaacgttgttacatatggtctccattttctaaacaaacttctcaagattttgtcaatatgatcctaagtatcataagttctacctagagaccttaattcatttagaatggtttggaaacatctttacatactttgtatgtcttcgccttcctccatagtaatgagttcatacttatgtgtgaggagacttagtttggtcctatttacctatgacattacctcatatgatatggctaaaagtgtccacattttcttggtactcttaaagctatgaactttgttgtagtcttattc

SEQ ID NO: 27550 - DNA, 319 bp, Glycine max
  unsure at all n locations
agctntattagtgcgggtctgggagacgattgtcaagtgttcgcgatatgtgaagatgatgttccaagtacttcggatttgggccgaccatgccctcctgatttccagctaggaaattggcgagtggaggaacgccccggcatttacgcaacaagcataatgtaaacctttacgggtttaaaagctctatagttgggcctaagctttagagttgtcattttgttaacgctttgtgtctttggattttgaatttataatacaatgatctttcttcatctgttcctggtctctacccattgtcattcattcgcatgtttac

SEQ ID NO: 27551 - DNA, 247 bp, Glycine max
tgtctcgatatactaccggactcaataagacattccagtaaaaattattggcgtttgaattagctaccaacctcccctttcaatttggaggctctaaatatattacgggactcaatcgaacatccgaggaacaaggtattggcgattgaatttgctaccatcttccgttctcaatttggaatgcctggaaatattacaggactcaattatacattcgagtaaaaagttattgtctattaaatttgac

SEQ ID NO: 27552 - DNA, 269 bp, Glycine max
ttgttagccttttatatgggtgaaaggctgaccttcactgtcttctacatcatattccaacttgtacaaatacataataaagtcatctcgactcaatgaaagccatataagtgtcataccatgaacatagaacctatatcctaatgtcacatcctatcatagcgtggtgttcccgtgttctctagcatgatgttcttcatagtcatccacctattcatctgctcccccgaacacaaatgtcaagatcatcacaggatccatacacaaac

SEQ ID NO: 27553 - DNA, 281 bp, Glycine max
ataaagatattacctttcccactttgttagtatcacagagattacacaacatacaaatgaattgttacatagaatgatatagccgagttaaataatctgacaaaaataacttgaaaacattttcaagtaagctcacaaaaaggaggtggcaataattcaacatgggctttgaaaacttaaatcatggacattcactgccgaaagagttatataaagctatcgccatgaacttgtgaacatacacaatcactggcaaaacaaaacacttatcattttacatg

SEQ ID NO: 27554 - DNA, 316 bp, Glycine max
taagcttttcttatatgaatggtgctcagctaaatcaaatccagtttaaatcgcaagaatatccgcttatccagcagattacatgctcagccccatggccctcaattctgactgcaatgaatagcgcttggcgacatatggtcgcgcttagccaagggaagccatcgctcagcgatcagtttgtcgcttagcagaattcaactcgaattgattttggcttagctaaaccttggctagcttagcggaaataaccttatgtgtcaaagtggtgtgctaagagcttaaactcgtggcttagtgcatgagtgactatgcg

SEQ ID NO: 27555 - DNA, 349 bp, Glycine max
  unsure at all n locations
agcttattgtcgnttgaatttgatcaaagcttctgtattcaattttgagcctctctatttataaaggcactcaattatacatttgagtaaaaagttattgtcatttgaattttctagggtcttatgtttttaatttcaagcatctcgatatattacgggactcagtcggacatccaagtaaaaagatatggccatttgaatttccttggatcatacagttttaatttcaggcgtttcaatattttacgggactcaatcagacatccgagtaacaaattattgccgtttgaatttactgggagcttncattttntaattcgagcgtctcagtatatgacgggattcaatc

SEQ ID NO: 27556 - DNA, 322 bp, Glycine max
agcttgttctattgtcaatgaggactttggccataacatggtccatgcactcgaatgagacgtgtagagccctattgtgcccccgcccttcggcaggaatcttctcctccgtgaaggtaagatagctattggcgggactgatgctaactattcccttgaaacctttcacggagatgtcttgggccacctgggcctcatttatcactttgaccaacaatgcccggtgaggctcagagctcatgagcaattgtaagagggagaccctacctggggtattggtaagctgttatattatcttgcattctctttgttggattatacg

SEQ ID NO: 27557 - DNA, 285 bp, Glycine max
  unsure at all n locations
cgctttcaagcttgttctaatcanatcactcctacatttcatctctagcatgcatgttttctttacccactcctcacgtttggttttttagggaaaaacaccataactaaacgcgccacaaggcatccctatcgcaccatatccaaatctataacgatgggtgatcaagaagagacacacgaatagatgaaagccgacatgtcggctctgaaagaacaaatggccttcatgatggaggccatgttaagtatgaagcagctcatatagaagaacgcggccaccgct

SEQ ID NO: 27558 - DNA, 479 bp, Glycine max
  unsure at all n locations
cgcggnatttgggcatgtgaagcccgtgatgcactcgaaacacacggcgaatncaagcgacgttcgcggcgatcacctagagtttatttgcacgtatgttatctattgtttatacaagtggaacgctctttagagacatgtgtattctttgatatattataagatgcctaccagcccttatgataacatacgtgcatcacgcatcatcttgtgtgagtaaggaacaagccctaaagttagaaaaatgcttcatagcgcacaactctttgttgtaaccgattaccacatgattagacatcacaggtattacatcggacaataatgacactctacattatttgtggaccgggttcgaatattactgaacgtgaacttanaagagtccacggcgcccctcattgacattgcaaaatacaatgtttctacatcgggctctactaccaccgatgagaaattataccttttagtcgaagcgaacg

SEQ ID NO: 27559 - DNA, 285 bp, Glycine max
agcttctatccaaatggtcttaccttgaattaattcctttgatagcccttttgagccttgtttccctttccttgttttgaagctcactacaagccttaagtgaaaaaccatgatattaccatatccttaaggaattttggagctttggaattgttatgggaataaatgtggggggtttttgtttcattggacaacttggtttgttggctatgcttcatgatgtattttgggccatacttgatgtacattgtatattggttaaatgttggacatgctgaatgaaat

SEQ ID NO: 27560 - DNA, 292 bp, Glycine max
gcgaatcgacaacgattttaccacaaatcttccgtgttacaaatcctgtctcatttttgtcaatatcactaaaattacaactatgctctttaaaaaagaattctaagcctgattttgaagacaatactttggagaactgttattgacatccctaattcaaagaccatgattgaaaatcatcttttgaagtcaagtgttatggctcttatactcgtgccctttctttgcatctcacttcgtctcaatagcttgcacccctctcagagtctctgtatggcctctctcactcacg

SEQ ID NO: 27561 - DNA, 370 bp, Glycine max
ttgtttttctatagaactaactgtgtgattcgggagcagaggcaagtatcattacctaaaagctcacaactgaattgtaaacgctaaaacccatgtcaaaatgggctaatgggctccaatagctcacgtatcgataaccagcccgttccaatgccaaagatcagatccaactgttaagagtccaatgccttctccaaactgctttcagcatccactgccgtagctcggccatctaccagcactgatatgctttgaacacaaagcaaaaacgcaaccttcccacggttagcagccctccgaagcgcaaaatctgctcagcgttcctggcccacgcacaggcttaaagaggacctcgttgcttaaaagaccc

SEQ ID NO: 27562 - DNA, 357 bp, Glycine max
  unsure at all n locations
agcttatgaccattcgaattttcgagagcttccgttgttcaatttcgagcgtctcgatatattatgtccccgaatcggacatttgtgtgaaaacttatgaccattcgaatttctcgagagctatcgttgttcaatttcgagtgtctggatgagttatgtccccgaatcggacattcgtgtggaaagatatgaccattcaaatttgtccagagggtccgttgatcaatttcgtgcgtctcnatatattatgtccccaaatcgaacatccatgtgaaatgttatgatcattcgaatttttcgagagcttccgttgtgcaattccgagcgtttagatgagctatgtccccgaatcgacat

SEQ ID NO: 27563 - DNA, 245 bp, Glycine max
agcttgttactcttaactgctgtaggggtgatgacaagacccaaagcaatagtcactttgggagaaatgaaattgtggctcgcaccactatcaatcaacaccaataaatccacattctgtatcgtcccttcaaccttcatggtgtgagactcgcccatgcttcccaatacccccatcagtttacattccacctccacttcttcttcacttttcaccgtcacatccttcatacttacaatttcccc

SEQ ID NO: 27564 - DNA, 373 bp, Glycine max
  unsure at all n locations
agcttgtattttgctattgaagaaaataaatttaaatatgcaatgataaaataatgaaaacaaattcagcataatcatgtttggctgcaaaaagtaaaaacaaaaagaagtttaatccacatgtgttgaagcaaaggaactacataagatttataaaagatattcgcatattcaagtgtcgtttgtgatatttctacacacagatataaaggaacaattacaaatatttgttatgttccatgcttcaatatttgattagatacataatagtatcaatcggtagagtttaagcttgaactaccctcacaatacaatntcaaagaaatggaataagagaaaaacaaaacatagaacanaataccacgtctaaatg

SEQ ID NO: 27565 - DNA, 399 bp, Glycine max
  unsure at all n locations
agcttttttttctcaatcaacctatctaatgactaacaattctaattgcaagctcacattattgttctttctttttctaacatacatacttgctcaaacttatgaaaagaaacacagtctctatcacaatcatgcattcaatccaaaatcaattcataacatcaattttcacaaaaagataaaagtgttttactgcataatcatcaaagtcaagttaaactgttccatatgcttcagaacaagcataccaactatccacaaaanaaataagtatataaacataaatcacaatcactaaaaacaatgtactgaaactaatatagttataatcattaatccaaaagcaaaatcatcacgatattanaagtcctgagatagatcttgtgtatcctgagtctg

SEQ ID NO: 27566 - DNA, 324 bp, Glycine max
  unsure at all n locations
agcttggtttccaacgctctgttcaagctctcccaaaatctagaggtaaatctaggatctctatcagatactatgctagattgcacaccatgtaacctgacaacctcacttatatacaaagtggtcaacttttccatggaaaatctgatattaatgggaatgaagtgagcaaacttagtcaatctatcaacaataacccatataaaatctaaacctctcagggttctaggtagtcctaccacaaaatccatggaaatgctgtcccacttncactatggtatctctaacgcttgtaacttacctgaaagtctctgatgttctatc

SEQ ID NO: 27567 - DNA, 281 bp, Glycine max
agcttgtcacccagctcgcctaggcgagctaggttgcttcctccagaaagcggtgccttctggggaactttctggaaggcccaagtgggcctggttgatatttgcaccccctgtgtactaaatacaccacttgctttttttgctgttatttttccgtaacgttatggaattttacgaattacgtaacgatacttgttttctttccgtaatgtcacgaaaccttatggattatgtaatcatcccttctttggcttccgggatgttacagaactttacagatt

SEQ ID NO: 27568 - DNA, 336 bp, Glycine max
ctgaagacttccgcttggccttgatcttccaccctatatgcattctgctgcttgaaataaacggagctatgtgcacttctgctgtgaactactccagactaaggacgtttgtcttgatcaataagtgccacatggactgaagcagcatcgctactgttactgcatccctgtgagtgatacagaccatcagataaaacgctatgagccaagaagtcatatatgcactctcccaagcaatagcctaagggtgctacatgtggtgaattgtatgcatcagaggtatggcgtgtatgtatgacacaaaatgtgtatgaaagcataggggcaggatagact

SEQ ID NO: 27569 - DNA, 408 bp, Glycine max
gcacttgcatgacctctggattatactatttatgctattgaaggcgctatgaggatctgcactataagattgtaccaacaatgtgtgaatgtgcgtgagtataaagagagacaactatcaagttaaaagcgttgggaagagtgactactaaaatactcttgctatataaaacgtgtgcttgtctatttaacgtgatactagagttcttacactaagaaattactcataccatgattcctcacatgaaggaacctaactctctatagcctttgttcttgattactcaacaaacttgatctaaatgagttgcactaagtctatagtgtaaaatggactagatcactacactccatttgtagacatacagattactagcttgctctatcaagtgctaaggatgtaaagcat

SEQ ID NO: 27570 - DNA, 316 bp, Glycine max
  unsure at all n locations
attgatgattaagatatacagcctacttgtactacatggtactaccctacatgtaatcataaagcanttatcatcaacagagatgtttactatgctgcctctataattgtggtgcgccttacccatgagatccttgttaccctacagaattcacatggagaacctgccctagtgtcaaggatggcgccatgcgagcatattctacagacttcccgagtagcactgctcaagtcacatagtgattgccgaactatggactaagctttagagatctactcttgaatgataatgaagcgcagctctgatgatctatcac

SEQ ID NO: 27571 - DNA, 388 bp, Glycine max
agctttttcggttgtcgaggacactgacagatcttttgaggcgttacactcgttagtgatcaaggctcaagatatgttcgccactgatatctcatcataacatgatgccccctttagtgtgactgacttatcacgtcatttacatgacctgtacgcatatgagcgaatagcccggacatgccgttaacacctgttattgttgtatgcgtacgcttcatataattaatcgatctagtatgtaatgaagcttgacttggaccttatcttgacaagcttacactcacaattctcacttgcctacgtgcgtgaactcactgtggagcatgcttcctgatgcacattatcgtcactatgctacaacttgtgactcctggacatatagatgatg

SEQ ID NO: 27572 - DNA, 406 bp, Glycine max
tgatctatctgcttgcatgcagtccttttatactgactatcgcccaagcttatgctatgcaagaccttggagaataggctagaagaggtgccgtcctgtagggtataaacactggccagcgaggcgccttgaccttggagagcctatgatactaaacttagataggcctttggtttggtgaaccttagtgaaagcggccagtgacgtgtccgacctggattttggtgagattcaccaagggcagatgttagtcgtcttatacgactaacttttgtataaaaaacttttacagaatgtatataaatccccaatttatagttcttttgtaggattgtaaataaattttgctttgttttgatctatgttcattacaagcctctttatatggaattaatgttacattctc

SEQ ID NO: 27573 - DNA, 390 bp, Glycine max
cgctcgaagagcacagcacgtggatcatcgaccattcctatattcattactcgcaaaccactagcctaccagcataagaatgtgacatattagaaaaaatgtatgctgctaaagccagcgcctatatatcatgacctatctatctgcgaatgctaactctttgagatgagagagtagaaccaccatacgcattctatatactaactcagaaaatcgtcgcgccaacctggcttgaggaagcatatagcggtctaactacacagactgcgcaaaatgcacccaaactcaaggctctatcacgatacgctccgattggccataatacagagagcagacgataggaaacattactctattaccatataaataatgggctcgaacacagtgatg

SEQ ID NO: 27574 - DNA, 407 bp, Glycine max
gtgaggattttcaaacgacaataactttttacttgtatgtctgatagaggcccgtaatatatcgagacgctccaaatagaatgttgaagctctgaccaaattcaaacgacgataactctttactcggatggctgattgagtcccgtaatacatcgagaccctcgaaattgattgttgaagctctcagcatattcgaacgacaataacattttactcggatgtctgattgagtccccgtttacatccagacgcttataattgaatgttgaaactctcatgctattcaaacgacaataacttttttactcagatgtctgatagagtgctcgattatatcgagactcctctaattgaatgttgaacctttgacctatgtaaaccacgataaatcttactcgaatgtatat

SEQ ID NO: 27575 - DNA, 339 bp, Glycine max
ctacactcgcccctctcatgactacgctctcctatcttgtgaggccccttattagattgcttggatgctagagcttatctgctcatgcactcctattagctatgctatcctccgtgtgacgaaactcttgagcttagctactcgccccctctaggagctaagctcctcctcatgacaagaaaacatgagagcaaatttaatggtgcttactacgtagactactcatggtgctcccttttgctacggtagaccctctgactcctactatgtgtcacatcccttgcccttccgagggaaatccctattctgggatttggtacgagatgtggtctcatactt

SEQ ID NO: 27576 - DNA, 267 bp, Glycine max
tcctacacggcccacctgaagcctgccagttgagagtacccactttcttgtaaaacaccttctacctttctgagccgaacatggactacccttgcctcgggtacataagaactctacaacgagacacgctcactttcttaattgcttctgagacttgcgagaaacataataataccctttctgacttacggaatgttgcacaacgatgaccaattctgcatgcttattgactatgcgtgtgactgaccacagaatattgttgatacg

SEQ ID NO: 27577 - DNA, 341 bp, Glycine max
acctgcgaacgatgaagtttgaatgatcaccatcgccaagcggtgaagcacctattgtaaaccgctgatatacgacgacatctgaccagacacagatccgcctcggcataacatcaccctgtcgctgaaacttccatgccatagctgatactaaagacagagatcctgtctaagtgggctgaaccctgttcctgactgcctccctcctctagtgacagctggatatgggatatgctcgtgctctatctcacatcatgaagcacgtgagcgtgcatcagagacgacaaacttcttgagggccccctatggactggcggcgtgttggccccacatagctactc

SEQ ID NO: 27578 - DNA, 389 bp, Glycine max
aggtccaagtctcaaaactagctacaagcactttattattattattttttataaaatgccttattcaataattgtcttctattctcactccaagcaagcaatacatgaaactagtgacccatgcatgtaggcctctaaatgttaggtcccctcatacaattggattgccctcagattagccaatatttgttgcatagcttcttagctctttttagcccttgctattgtcatgggcccccctatgccttgcattgtgtcttgagcttccttctgggcttaagtctggtctttgatatcctcatcacttattcacaaaggaccctaaggttgggtacctaagtttctttttctggggtatgaactgagactgtttgagaatccttgtatag

SEQ ID NO: 27579 - DNA, 362 bp, Glycine max
gatctgctgattctcgatctgttctctcaaagccatgcgatcccagcctatcctaatgcctgagatcgtcgaccgatcactatccacagccctttaaaagcgttttctatatagactacggatatcttcgattgtattaggaaaccgttgatgcgacacacattgtgctatgagacacctggggagaaagttgactaagagctggagcgagtctcattgataaagtgcatgaagtgatgagctttactactttcagatattgataagatgtcctcaactcaaaatatttatgtatgatcatcttgcttgatccgacacactatggtgatccaattggcccatagtgactagtctctagccta

SEQ ID NO: 27580 - DNA, 201 bp, Glycine max
tgtcccatgctctagacctgatttccacactatgaggccgagatcctctatggagatacgcgtgcagaaagacacactttgagtggccttttgcataaggcgaatccccatgctagcttgtcctagcgtggggaaatatctgcgggaactgactcgaagggtatggtgagattcacatactaacctgagcatttgggactg

SEQ ID NO: 27581 - DNA, 358 bp, Glycine max
tagagggcgggatgaggcctgcccacattaggctcctctacgtccgaccctaggcggatatcaacattctaagcctgagcctgctctacactcgatcaaagaccttcagcttggctatgccgagcctattgactaccctcattagctatggtcacctatttacaaagctcattcagattaacctcaccctactcctacttacaaagaccctccttatataccacacctattatctgaggctgcactaggtcgtattatatattatgacctaccttataatgtaacgtatattgattaggctcctcatataatctagcatacatataactcatttcctcccggagatgacttcttctat

SEQ ID NO: 27582 - DNA, 331 bp, Glycine max
ggctgcgcccttttacattatatcacactaaaaaccgatatgctggacaacgccttatgcggtcctatacgattgcatgcgacaagatggaccgttcgtgagcctcataccaacacctcaccttagtgccttcggccagatctacgtctgcctccaatgcacttagatggacgatactgatgatccttggccgccctgtacctgatctcatcatatacaacaaagtgcatcgccgcatcttgctcacccaataagacggatcgttattcagtaccacaacatgtcatgagctatggctaatgcttagaataccttgaggattcatttcatc

SEQ ID NO: 27583 - DNA, 333 bp, Glycine max
gacaacagacactaacattttgctatcacagaaaaaaagagatggctaatgcatcccactttagacttctttggctcacttgcttcatgtaccctttaggtgattatgttgtgatcagatacatatggtcatatccgaatatgctatttaggtagggggtggagtgatgacatttatactgacatttggaggctaaactgctatacgttacatataatatgcaacgaatctgatacgaatggctaaatacatctctaactccggaggttcctctatactgtctcgtagcgtagatgagagccagatctatgaagattgatgactgtgatacaa

SEQ ID NO: 27584 - DNA, 245 bp, Glycine max
tgtcatctactaatacgatgatgctagaggactagatctgccacgactatgccctacaaacttacaggtgagcaatggacaaggggatcaactccttgcgcttaacaccactgacgtggatggacacgttcacgttttcttagcatgatagtcgagagtatgctctacagctactccttgccttagcgctgggagatgataactgcacatcctatgatgctcagatgcttcttaattattgccta

SEQ ID NO: 27585 - DNA, 441 bp, Glycine max
ttattgattgtacctgcattcggacctttaaactcagctttcaaagtgggcttcggcatcacattctaacttgattcatagaggataagtacctttgcgacaacatggtccatacatctcaccgacacatgtagagccatgttgcgttctctcccctcaacgggaatctcttcttccgcaaacgcgatataattgtcggaggttatatgattaacgatgccttcaaagccctacactgagatatcatgagctacatgggcatcgttaaggacctttatcagcagcgcgcgatgatgctcggtatttatgagcagttcatactgagagatccttgctggagtttattcaaaagctcgactaccttatacttgctttgttggatgacgcggaagaactcatgggcctcttacaagtcactgattttctagaaaacctctatcg

SEQ ID NO: 27586 - DNA, 309 bp, Glycine max
ggatcctgtaagactacctgctagctgcaaacttcatatttacgttgtttggctacacagtgaatgagagactcattcttctttcctcattgctgacataactgaaccgcaacggtcgaccatctctttttgagatctcctgggaagacgaagaactgactacgttgctattatttggacccactatatgagcggtgtcgctatcattgtattctatccactcctaacgtatctggaattacgtgattgtagattgactgaaagacttagccttcaatacaaaagaatcgtctaacttactcttagagg

SEQ ID NO: 27587 - DNA, 219 bp, Glycine max
gaacagctctgcatgatgatattggcgatattgcaggacatgagtatcgcgaccctagttattcctctaactataatgtataccatgtgcgctgaggacaccgatgaatctgaccttatcatgatatatatatcatatcatatctatccttccatatctattcatcactttcatggagactagcattggccgggtaccactctatatcatgttcgacgt

SEQ ID NO: 27588 - DNA, 391 bp, Glycine max
  unsure at all n locations
tcgtgaaattgaaatggtcataacccttcacacggatgtccgatttatgcgcataatatatcgagacactcgaaattgaacagcggaagctctcgagaaattaaaatggtcataagttatcacacggaggtccgatacaggaacatcacatatcgagatgctcgaaattgaacaaccgaagctntcgttaaattgaaatggtcataacccttcacacggatgtccgattcaggcgcataatatatcgagaagcctgaaattgaacaacggaagctctcgagatattaaaatggtcataacttctcactcggatgtccgattcaagcacatcacatatggagacgctcgaaattgaaccaccgaaactcttgagaaattgaaatggcatacg

SEQ ID NO: 27589 - DNA, 270 bp, Glycine max
cagcttcttaacattcctcacggatcatttttcaggaacgtctccttagcgccgatcacttaaatcttgttcacagaatcgcttgattcactcttattaaagagatatagaagtgcctattgctgtccgcccatttgcttcttgcgatactacgctatttatatctcaacctgggagagtgatgccactcaactcgcccgtaccaccatgtctgctttcttcagaaacaagctgctgctctttgagacttacgtgggacgcgctagtacc

SEQ ID NO: 27590 - DNA, 443 bp, Glycine max
  unsure at all n locations
nttggtcgtgcattcggacctatgatactcaactgaagctcaagaaagctgaataagtttgaagaattttgacttttacatgcccaactctcttgagtggcatttgtattagttgttatcttggctattgcatcctagtacatttgatacctgtattgcatcatgcataatcatggtttgtgtgaagaaaagtatctaagttagaaaaatttctttagaggcaagagctctctgtcttaattgattacatcctcatttgaatttattacaacaagctgtctgtaacttgagaattgagtctcgtattggattaattgattacaactatctcataatcgattgcactattgtttgagacaatgactaatatattccagagttttttctctaatcaatgaccaagtggattaatcgattacttctctctcatctaagtgttagag

SEQ ID NO: 27591 - DNA, 282 bp, Glycine max
  unsure at all n locations
tagactagataccgatgaacatatattgagatggacagatagccgttgcactattggcttctcttacttaggaggggggctgaattgagcagcacaacttaccactattatcttttatcccccttttcaacttattaggagacgctgctgatgcttaacattattaagctctttctaaaagactgttctcccccatgtgctagagcaaatatgcctcgatccatatgctctcataaagtctgagcgaggtactangtcattatcttctggagtgcacggttc

SEQ ID NO: 27592 - DNA, 293 bp, Glycine max
ctctgttgcatgcttgcttgctctatatcatcatgaaagctcgtattgacagtagggggctggatgccttattggtaatactgttaccgatgattggtgctttcttgcagctcctatataatgactacacatgtatggccctgacctatcttgcctctatgcggtcctatatcgtctacgccatcatatgaacgaacgtcgctccggtgctctacgataaccccttgaggaccgctatacccttataccactacgaggccctctagggtatgacatcattcgcggagcaactc

SEQ ID NO: 27593 - DNA, 386 bp, Glycine max
ctacttatgtggcagggcgggcttccttcaccttcttgtctccaacgcgaactttgaccattgttcttccttcccgcgatgcttcttttcatgtctgcctgagtgggcttatagcctaaaccatacttaccacgattaccttgggtatttatcagtctagttatgccgccgttgttttttcctaaacccatcccgggctcataaccgttccccaacataactcgggccatcattaccgctgcatcggacagactaggctgcccaaagagggagtccacggaggaaatgctgaccacctcaaaagactggaaagcagtttctaacgattcttctgcggcttccacataaggcatggaggatgggcagcttaccaagatatcttcctg

SEQ ID NO: 27594 - DNA, 360 bp, Glycine max
agacgctactatgacaccattcgatccatacactgcttacagacacacacagataccatctcttcatcactatactagatattcgaatcctacaaagaaatatcttaccttagaaactttccacgtgcattatgcggtatcatgactgagtggcgatgacctctgaactttatacattcatggatcacatcttggcgacgactatgaccatgccacggaggtcgcgtatcttgtggatccgaacgcgtggggacagaccaagttccgcctgcgatcttatcacggaggcgatgggcgccgagatcccgatgtgggagcaccgctgcattgactgattccaccatggatcctacgacggat

SEQ ID NO: 27595 - DNA, 287 bp, Glycine max
cgacgtggttcactgaaggcggagggacttggctccgaagcagacatctacatacgcgaatatgctaccacgatacgcgctacatatgggaggctgcttagcgagaacgatcactctatgagccttaaattagacgatctaagactgacacaactatggactgctcagcgggcgactcgccaacatgaatgtttggcgatgcgacacgtgctgatgcttgctcgatgcatcgcatgcaacacgatattatgcatatcaatagcactgaccctatcgataggatcatt

SEQ ID NO: 27596 - DNA, 523 bp, Glycine max
  unsure at all n locations
tcacccagcacaccatcatcaaaatgagngtgtgatagggatatatacgatagaagtattgcactcaacannaaccaaacagagncacgttgattcgttcgctgcatnacggaccttanaaactaagctcgacacagcctaactcaatacgcgacacttgagtttttattttaatatgaaatctcattttgcactaaggccctgggtaaataattgctaatactataaccgatgaatgttgctttgtcggagctcttatataattagcacaaatctaagatgctggcctttatataacctaaacaggaatatttgctatacaacattatatttctggacgtcactaaacttctatacgagaatacaatgagaaccacaaaaaccttatcccactaagtggatctttaacatatgatatcatacgcagagtgacttggtatcctggtggcaacaattataaaaccctggctgtaaattgcctttggagaagggctgtatgtcccattctaagaaaaaggagaaa

SEQ ID NO: 27597 - DNA, 212 bp, Glycine max
cacagactgggtaggaaagactgctcttccgatgcctaatccctagcgaaatgagcctcctctcacactaatctcccttagatgactccgcttcctcatggtgcataccatccatcgaaggacaccaggcaactatacatccatcctttatagaagcttaacaagccatcctccatcatctgctcctgcatatgcatctgaacctgcacctc

SEQ ID NO: 27598 - DNA, 453 bp, Glycine max
  unsure at all n locations
nttgaattcaatgtcactggcaagacactatacactactcaagctcttcattgcatacaatgtagaggatgaaaagccctatctttactataacataagacganctcatatctttccataaggcatgcagtcttactatgtatactggcggatcatagaaaatgttgcatatcctttaactgctaacatatccaaatctctgctagaacatatatgaagttacggtttaacattattattctgttgtacgaaattggaatatactgctccccacgcatgtcatcacttttgtgtctggtgcaaagatggaaatatatcgggggagcacttctgacgatttattccaataggcacaaggggcatttcccatgctgcctgaatctatgaattctagccacgctagtcattattaaaatgctcaaacttcctgtacatgtaatagaacatgatcct

SEQ ID NO: 27599 - DNA, 351 bp, Glycine max
ctctagagctggctgctgcttgcgacgttttgtattgggaagccaaacataagagcgacggctctgagcttcttaagactccgttcattatgtgcttgaccttcgcttccattgtgggaccttccttgatctcctatgagtagcctcacagcgcccatgctgctaaagtgcagactactatgaggacgctcagatctcccctattataccagctatagaatcgacatttgcctcactatcctctatacggcttgttgatgagggtgctcatgagccatgagtcgtgtggaggactggtgccgctgaggctgcactggaggatgaacgtatctgatgcctagaccatcaact

SEQ ID NO: 27600 - DNA, 194 bp, Glycine max
cgtggatatcatacttcttaagaagagccgtgtctgggatatccttctctttgtgcagacactatgcgggagcggcctgtagcggccgctttgatgggaaacactgaaaactttgtgatacctccctgagaccgcgtgtgcttcttgcttgggactttgctatgggatgagatcggcgacgacatctgccatga

SEQ ID NO: 27601 - DNA, 286 bp, Glycine max
tgctgcatgcgcgctttctttttatagacatgaagaccatgatgtggcacttgcaagattacccatgggcttgagtgtgtgagccgaaaagacggccatgaattctgcgctttatgctcctatttgcggagctactgagacacataatgaatcgtggacgcataaaaaagctatgatatggtgcctgtcggatgaggagtgccaagtctgaattgggagttagtcttcgcatcacacaggactggatgcatgcacatgcactggatacttccttggatattctcaa

SEQ ID NO: 27602 - DNA, 460 bp, Glycine max
ttgataccctgtcattacgtgacactatacagtactcaagcttcttattttcagtagatgtagatgaattcatggccacatcacggactcctctaaggacaatagcatcattggactttaaaaagagtattacagaatagccttggagacttatgcagtgtctgggatgccatgaacaacatgatgacactacatcacacggaaattaaagcatcatttgaaacaagtacacatgtcattggacatgtcttcaaaaaaaccttatacaagaggcttcttggaatggtttcaaggtatgcttttaatcaaattgttgttgaatttaagcgtgttcactatgctggcaagaatccttccacttgtggttgtgtcatgagaagaactcacggtctctcttgtgcttgtgagctatcgaaatatgttggtggttgcatcccactggatacaatccatatgttcg

SEQ ID NO: 27603 - DNA, 409 bp, Glycine max
  unsure at all n locations
ataataagatagtgaagtcaaaaactgttaatatcgtttattagtgtggaaggttatcctgcccatggatagtaaggatcgagccttgggcaaatggtccccaaattgggaaggaccgttcaaaataattcagatctattcgaatggtgcttataagttagaggagctaacccctcagaaacgtactttgagcataaatggtaagtatttgaaaaaatataaaccaacactgctcgaagttaaaataagcatagaataagaaaaatactggaaacataaaaatggcgataacagtaaattgccacaaaagggccattgtcaatattacataaaaagtagaatcgaaatacagaattcgaaataaagaaattataagttctactaatgcatgacccagtcctcatatatn

SEQ ID NO: 27604 - DNA, 400 bp, Glycine max
ttgcttgtgtgctaagtgtgtgatgggatgtgttgatttttcgatggaacctatacttatagtatttgagcgtgactattggtccttgtttgtaggggctattatagtttctgtagataattcctaacttgcagataatagctgggagcttacagataatgttagagataaacattggcttgtagattaaaggtataagataatcgtaccttgtagataatgtgtgaccttatagataattaattacctgccaatagataagatattcaaacacatttgaatattacttggttagagataacctgtttgtttgggaaccaactgctaagggctaagtggtcgctctcttgggcatggttgacctggaggtggacatgtgtctttgaatgtatgtaggatg

SEQ ID NO: 27605 - DNA, 168 bp, Glycine max
tgctctggagtggacgctgtacgcaggcatgcattgttcgtcatacgatctggctgttataccccgttcccatcaatgtatataccctggagagcatcctacgtccatcgaaccttcatagctccaggacatggatccgtcttactgtcgtctgccttaatccattta

SEQ ID NO: 27606 - DNA, 290 bp, Glycine max
gagagcatgcagcaccatagaatgtgtgggcatgaaacatacggtggtccttagggggagatgcattgcttctgtaggggtgtcacttgactctctttcatagcctatgtagctctcttgagaagctagcgagagaagtccttttggcatgcttgcttggaaaactatattgagaatctagtgcttacttacgcgctccccttgaataccttacctcaccttcttgagaggcttccttggtatcattctcttagaatgtagagcttatcacacacactgctctattatct

SEQ ID NO: 27607 - DNA, 349 bp, Glycine max
  unsure at all n locations
ctctgtagagacctgatgcttgcttacttattatgacaaggttgcatattgggatcaataacactaatgtgatccttttatgccttggaaaaaatggtggaactctgattccaagaggctggtacttaatatttgaatgattttttttattacgatatatgtgaggggtaaagggtgtcacacgaagcttctcccttaagcttttgaaaagtgatttccatttagggatcaagaggagctagaatagtcattttgcttcttgttcctagcatgtaagcatatactgaaaacttgtcttaggtgcgagcatagcggtcagtctacttangttagacacaaaactcaagat

SEQ ID NO: 27608 - DNA, 401 bp, Glycine max
  unsure at all n locations
tatccatgtaatgaagtcccactctctttttcatctttaatgaacgttattcaaaatctttctcatcccatatagatgtatctatcatctcatccacaatgattttagaggaaggcatctcatgcatatacaactctcaacataatgcatacactggtgacacttcccaaaagatgataatcattntacgcataattacaaaacatcattttaaataactaccacatagatactctaatttcatgcgcattaatagctcataaaatcacacctgtgattatagcatcgtatgaatcaacctatattttattatgaaatacaacacacatgtgtatcatactatttttactcgatgtataagataactaaacacaaaactcaagcagactaattcatgaatn

SEQ ID NO: 27609 - DNA, 386 bp, Glycine max
cgaagggaagagagagaccagtcacgagcacatagcatggtattgaaagaggagttagctgcttgctcaaagtccaagagaaacttgtctcagcatttatgcgagacaaagaccaacatgttagccatcgtcagcaagtaccaagaagaattaaatctagccatggcccatgagcacaaagtggcggacgagtatgcctgagtgtacgcgaataaggaggctagaggaagggtgattgactcgttacatcaagaggcagcaatgtggatggaccgatttgttcttactttgagcgggagtcaagaacttccccaattgcttaccatggccaaagcaatggcggacacctactccgcccccgaggagatccacagacttctcagctg

SEQ ID NO: 27610 - DNA, 443 bp, Glycine max
  unsure at all n locations
aacagacttgaatcgcttgattccttacctataatactaagcttgcgctttacttgagacaaactatatgcacaaccgacttttgttctttatnctaaatagccataaaaagatatataataaacctgtttcataaaaggcttcctcacaatggaggctgcttcaatctactaccgttgttgacttactaagtacaagacaacacattattaagttgatgattaattatacatgattttaaatacttacatatttattcacttgtaactataaagattcagactgagcttaaatagcaaatgatgtcataatatatactttcaagtttaatataatacaaatgcgtatgcataatagaaatataatataaagcgtgactcacatgtttttcctagacgtataattatgttattacacacttaaatggttttgaaaaccttccg

SEQ ID NO: 27611 - DNA, 81 bp, Glycine max
gacctgcacgcatgacagttttttcttcttagttgactctgaacggatatctctgctaaatagagtcttaatatcatccgc

SEQ ID NO: 27612 - DNA, 388 bp, Glycine max
  unsure at all n locations
tcctaggtgaaatcacgtgcagccatttcccttagagttttctcactgcgtggaggatgagccatgtactcagaatgtgcaaaatcagaatgctcaaaatcataaaggctcaagatcacgatgctcaaaatcaccaatatcattgcgcatattcaccaatgatggaacgctcaaaatgataaaaaggtttaaaatgaggcctaactaatctatgaaatgccctatctatctcaagagcaaagggtcgaaagtcaaatggattgcctctaaaatacactacattcagcatgcgcacaactagttgcctaatatgtaaataaagagtagggttaactacagggaccctcgatgacaccaattgacctacaataagtgagcacccaaaacn

SEQ ID NO: 27613 - DNA, 295 bp, Glycine max
tattaccatgagcgaggatgcgctcgctccgaccatccatacgattactcgcgtgccagaggcatactgacctgagcacattgggttaagaacttattctttcctacgagtgctcccatgtctctatattacattgtaccgagaagaacggataatgataagggagagctcgacctaataaacgccgacttaatctccttagacgatcagggggccatcgtctcataggtctgggtgcaactccttacccatatgaaagataaggacaccgcgatggcctctctacttctatcgg

SEQ ID NO: 27614 - DNA, 238 bp, Glycine max
tatgcttgtacgttcgagtcccagcgtatatcgataccatcgaactcgatcgtacatccgctgagccagttattgccacttgaactgtctaagcggatgaccgatcgattcccaggctataccgagacgctcgaactcgaacgctcatgctacgagccagttatagccacacgaactgtttacgtggttgcctgatcgattcccaccgtatgtagatacgctgggactcgatcgtaca

SEQ ID NO: 27615 - DNA, 186 bp, Glycine max
gaaagagtgatacgatcatgatgccacacaacatactagccttgaacctcatgcgcctatcctgaggtggctaaagagcgaacaagctcacactgatcgcccttcgctcactgtgcgctttctgaatggcaaacggtgcctgacgcctgctttaatgaatacgcctatgcgaagctcttgcagccg

SEQ ID NO: 27616 - DNA, 361 bp, Glycine max
gctgaagcgtacactgacactctctgcttataactactgtctgcttgttgacatgcctcctttgtgtgattcctagataagacttatctcatcgtcacacgccttgtatacttctaatcggatctagcttggatgaaacactgtatgtttgctcctcacaccctataatggctaatgtcttcctgctgacctccttcttgaaaatccagaaatcgttcctactaggttgactactttaaacgatacgctattaccctatactactagatcttttagaggtacaatgtgcttatgcacatttagtcatcctttgatccgtctatgaaaggtaggatgtcaacgtttctctcctacgtgaaca

SEQ ID NO: 27617 - DNA, 397 bp, Glycine max
  unsure at all n locations
ctccgcgaagagatctacgaaggacgacgcggtttgggtcccacaccgccctccattntgatagccaccggcttatgagcgtcaagcaccagctgcgcttccaggccatcaatggatggtcctttccacatagagccgcgcccaccttcgtgactatgagtacacaaactcttttgatgagacaccaccccgacattggacaaaccgggtgacacgcatggcaaagagcgaccctgtagtgatgaacaccttgaccagatgtggatgacgtcgatgaccatcattgttctgctaatgatcatgcctacgatctccctctgactatactgatcctgtgaatggcccaggagccggtgatgacctcctgctctttgggagggagccatgaattgttgcn

SEQ ID NO: 27618 - DNA, 519 bp, Glycine max
  unsure at all n locations
cccccccaccgattcatatcaatacctcgtaacgaatcgcatcaatgaacgattgataagaannaaatcaaacaagagaactttattgagtcgtgcgttgcagtcgtgacctactgatactcaagcctgcttgaatactgctccagatacccgcgttcctatcttttaaaacacctataaagaatccattaacaaaccatgtgaacgctaatatacaacctcgtgaaagggaacaccctggcgctacccatctacatcggctagacatacactccactttcaacagcaggcgaaatagcgtagaggaccgcaccgagtgaccttatcaacacatgcaccagctgaacggcgagaagctcctgacgctgtatgatcaacttacggctacgtgcacgtgttcacaccgaacatggtggacacccaccacaataagaagcgatccccaaaatttaacactacctcataaccggcaacaactgtgactctaacacagtatgacataaaaaacaaccttacacg

SEQ ID NO: 27619 - DNA, 354 bp, Glycine max
attttcacctacaaagatacggtctccaccggaatgcaaatgatataggactctcgcactgcaccaactcagcagccatgatcgttagctcaccatctgctggtgcactcaaaattagtgatctgagtctcaatgcctagcattagcttatcccacatatcgcctataatctccataacactgctagatatggcagtgagcacttgccttttctgagataggaagtggaatgagactgtggggacctaaggttacatagagacttatgaggctattctatgggcactctgatgcggacgccactctatgatacaatacctccttactattttcttcaatggtaaggagaacact

SEQ ID NO: 27620 - DNA, 128 bp, Glycine max
cgggctgagtactctattgcgccctatagagagctggatgacaatatggtggtcgctgttttctgagggaaagagtgatacaatcatgatgtcacacaacatactagccttgcacctcatgcgccttt

SEQ ID NO: 27621 - DNA, 353 bp, Glycine max
cccctttgatacactggtgccagtctcctcactagatgcgagaggattagtatccttctcaaccaaatgagacacacacatagacgctctccatagagtgatagataacggcgccactcctcgagctgctacgcctagactctgacccagcgacgcccggtagccatactgagactgaatgcaccaaacatgtgccagctgcatctgatcgacgacttagtgtctcgcctgtcaccttcagattgccgttcactttcctccatactacctcacctgcttatgaccgcatgatccttgtctattacgagggagggaagctattagtctctcagctcattaggtccatgctttgt

SEQ ID NO: 27622 - DNA, 246 bp, Glycine max
gcaggctacagctttttttttttctcaactgagactctgatctacttgttacacgaaaggactcaaagatctgattacagagggggtcgacataaaataggccacattactttacataattagtctgataggtaaccttcttttggggagctacatatccttatctaggaccctactacatattgattcccctactgctgtttgaatatgagtgtcaagctattatacccttgagtagtttgtgga

SEQ ID NO: 27623 - DNA, 283 bp, Glycine max
acactactgtacattcttctatgaccatgcatatacgtttacactcatgtatagagccacagatctcattttaaccttgctttttattgagggctccgcatccattcattcttcaaaataagtgaactattttactgcttcacctactagagattgactaaaactgaaccagatgcttgggaatgacttgtctcctactcatgcacagacctatctcaatctagataatgctcgatgacgctagctctcctcattgatcgctaagcgcggatgattctgtgag

SEQ ID NO: 27624 - DNA, 418 bp, Glycine max
cgagctcgagcctgcagctcgggatgatcctatgcacttctcggggctttttttatgggtttcaaacgagcttgatccattcaaagtgctaggcggttgctgccttaaagatcaatacagcccttactatacacaactttaccacctgagacgtcatataccattcctgtgttggcgaattagcgaacagacccgaaccaatatgggaaaacgaacgtgacgcatgtataatgccgaacggtacctgaagcgatcttgtaatgtttcgcctatgcgaacaatttgagattggataaggagaactcttaaggacatgtgctatggttccagcataaaagttcagcagtgatactcttcttcactgtatgacacgatacagactcaggatgttgagttctcccaaacactggatagacat

SEQ ID NO: 27625 - DNA, 318 bp, Glycine max
tcgccgcatgctatgcttctattctgaatatgagaccccgtattccttgtttgtacccattaatggttgggacccctttctcgtgtaattgagctcctttccttgagaaggcctgtactagtcttcctctgtgatacaccatttggttgtgcgcgcatgagcggtcgcgatgatcttgtgaatacaacaagtgggctctggagctctggacgggagagaggatcaccatctatggattcttctgtggttcacgcagactaggtgtgctgtggctgcatgaccctaattatatgctggacgatcactacatggtccata

SEQ ID NO: 27626 - DNA, 399 bp, Glycine max
  unsure at all n locations
ntgacctaaatttgaacaaaaggaaatcgtaaaataacttttatggtcaagattagatggtgatgataaagatgaagaagaagcggaaaggttattattaatgtangttccggggagggaaatcaaagtaaagggtccaaaaacaacgaaagtagaagcgtcaggaagagtttggcagaaagtggcttccaagatatacccacatgcacattgcactgtgatgctaacttgacaatggcgcgcaaattggaccacggcctcaataacatcagaatttttcgggactagaatgaagatgggtttcaaggcaaagatcgctatcttggttaataacgaggggtatttttggcttgttcttggattcaaagagcctaccaccacctttgtttgaagatggcn

SEQ ID NO: 27627 - DNA, 65 bp, Glycine max
ggagcctatgctactactgcgccttgaatgatggacgaatgccattgatgtcgtggacgatgaca

SEQ ID NO: 27628 - DNA, 105 bp, Glycine max
catgccatgataaccatactgcactggctgctacctttgcgcttactatcacagaagacagcgatgaacatactaaatggtatacacaggacttacaacgctggc

SEQ ID NO: 27629 - DNA, 473 bp, Glycine max
cacaccatcaacccaccaaacgaaggaaccaataaccgccacaccgaaagaaaacgaaacaccacaaaggacgctttgaccgtgtgataccctagcattcagacaaccaaaaactcaacccgggatacacaccccctcacaaatatacatgaaccgccctgaagagggacaaccaacacaactctccgaaaaaaacccacacatcacggcggccggcgacgcccacaaaaaaacacccccacaccactacagggcgcatccgctcccccaacgaagggcacaatcatcataggacccaccacaccgacaaaaaatggagggcgagctatcaaaaagaaatacaacaccccccagacaaaattagcacgaagcgctagcgagaaccttaaccccacaagaaaccccgccgacaaaactcaaaacaagcacaacgttgcataataaagaacacagcccaaaagaagcggcacacg

SEQ ID NO: 27630 - DNA, 90 bp, Glycine max
gcgggctgagtactctattgcgtcctatagagagctggatgacaatatggtggtcgctgttttactgcggaaagagtgatacgatcatga

SEQ ID NO: 27631 - DNA, 294 bp, Glycine max
tctacagctcgaacgtgtgcaggctggcttgctcttgacaagagtactagaggggacacgcattaggctcgacagacgcagtctcacgagttcagtgccgaaagcatattggcgctgatcgtctgtcgttcccttactgtcggataatgcctcagaggacagagtggctctggggcttttgactggagcgcgcgctgaacatgcacacaactctatgcatacctgagactaagtggcgctcatcgcaacataccacgtggcccagatgggagaggaccatgccgcaaagatgtg

SEQ ID NO: 27632 - DNA, 401 bp, Glycine max
cctctaccgtaaaaaaaatattatcggccagtgttttttttaataattgcgcaatgtcggcagaaaaatatcagtcgtggctatataacgaccgatgtcaggtatttttgtttcaattcaatccctgaataattattggatattgtccaataggaaatgttcgatcggcgtcatcaggtgatgcttgctttttattttagacctgctggatcggtcatctttcctggccgacatcgactatcattttttttatcagtgtcggtgaataatgttttttggccgaggtgggctgatgtttttctagccgagtaaatgagaacacgccagtgtcggccgaaacacagcttcggttgagctcgcacgataaaacaaagccgacctacattgtaagttgtgtaggc

SEQ ID NO: 27633 - DNA, 395 bp, Glycine max
gactcattaattttttgttaatcaacttgtcaacatgcccgcttcgctagaatctctcacatcacacactatacaacagaattttatcattaaatgatatcaggcactttaataatttgactaagctaacttgaaatcattttactactatctctcaattatgaaggggaaatgcttacacatacactgtgaatatttataacatggacgatctctggggtaagagacttagtaagaaatcggcttgaacttacgatcgtacataatcgctgccgatacatattcactaatcatcacacatgatgactgtatccgcgcatctatcttgagaggagagctagtagctccccttattattccttactaatacgatgacatcatggtgaagatctatg

SEQ ID NO: 27634 - DNA, 154 bp, Glycine max
agcaccacaaatcccttagacctccaggccacatcactcgtagctgtccgcattcaacagccaagatgaccgagcaaatgcactccctgacttgctcagataaccacggaagacgattacttgacgctcccttgtctatagctgaccttcttac

SEQ ID NO: 27635 - DNA, 214 bp, Glycine max
cattcagcctgagctgctgatctatgagtgaaatgacgcgtggttacttcatacacgcctcggaagaatgtggcattacttccggcgctaacaggttgagacattaaatgctggttcatcattgaatttatggctccgaccagcggagtgtctcagagggcttcatccatggcatcatagatcctacgcagctcaatgatatctgcgctactca

SEQ ID NO: 27636 - DNA, 395 bp, Glycine max
cataagtgactcatattgaacaaattgtattatctgttgtatacatctattttaaaattagaattttttaaattaaaaaatatgattaaagataaatttagacgtctgagccctaaaatttgtttagttactttcaatatatacttttttataaaagcctaatcctcaaaatattttttttataaaaagtgttgaaagtaattaaaaagaattagagttcatctttaatcatattttttaatttaaaaataatagtcaaggaataattttaaaaaataattaatgagaagatcacatataatttgattgattaaaaattaataatatcaaaatctctacagctcacaaactatgtgattcagcttctctattcattgatagttgcataactctcg

SEQ ID NO: 27637 - DNA, 154 bp, Glycine max
gagcgtgctatgctttgatgacacgatcatctgacttctttacacgattcataacataccttgattgcctgaatctatgatatgatactgagagatccattgatattgcagaacgccactgttggcatcttaacaaagtggacgccactttccg

SEQ ID NO: 27638 - DNA, 294 bp, Glycine max
ccatgtaacgctcatggacgtgggactggtatcacgctcgatgtgacctcctcttcctatcacgcccatctcctctttatgttgcaaacactacatatgcacattagcctctatgactacaacctgcacctactgtgcattgaccttgctataaaatccccactgaagatatcaacgctcctatcactggatcgctgggccagtactacgcccctcttgtgtagctgatcgaccctaatgcgctcgttgcccatggagcttgagatgatactgatgcatacatctctgatgctc

SEQ ID NO: 27639 - DNA, 190 bp, Glycine max
gcactatgtggcggatggcagatagcgcagaacgagtatttacccctacctcacaggcgcagatacactccatctcatgtggccaagctcattctgtgctaaactactaacacgtgtcccatactctgcattctatctactgtggtacagcattgatcataccaaacgaatccaacagacttgttattct

SEQ ID NO: 27640 - DNA, 162 bp, Glycine max
tagaaagatcggacgacaagtgcctactttgattgactggcctcaagactctcatgtatcagccactctccatgtgtctcacctgcctctatttgatgcctatggaggatccttgaaaatcaggactgatactcttctataaggaggctgccttgaggacct

SEQ ID NO: 27641 - DNA, 142 bp, Glycine max
ttcagatctctcaaactgctcaaagatacgtactgcttgatgagcgtgaaatgcggctctgatatcgaacatatcacagcgccggacacaacatcattgtgtgacattctgagcctacctcatcgaatagcacttgatgtac

SEQ ID NO: 27642 - DNA, 382 bp, Glycine max
cagtcctcactgcacgcatgcacaactcttatgttttgattcttaacaccatagaatacttgcgcatcattggaacattatgatattttgcgcgcgagctccatgccatataactgtacgctacaactctaagtcttgtatccaacgcttgtcaatgaaagaaatgatatagcttgtgatctaatgacatacactactctacattgcctgtgaaacaaaatttgctttaacatgcacatgataccctagcctacttgtcgtaccacatgtcttctattattgatatattatacctacgtgtacatgtacactttattcccccttgaatttgctggatgtattatatccaacaaaatcctcgagtatttcctatgagactatc

SEQ ID NO: 27643 - DNA, 355 bp, Glycine max
  unsure at all n locations
tcgcattgaagtagcgacattctatgaagtctcctcaatgatatctcaagcatagaagcgactatgggacctgagaccatcgacatcaggcactcggtactggagcaccatcaatgcgtgaacaatgacacagcataagatgtgactcttcattataaagactgaagaataaagcgatgagcaagctctangaattgattaccttaatacgtgtatgcgataacgacatagctgggtgaatatccacaatatgattctcgggaaagttggtatcttatcgctccactacactggtgatctatgactaccttacggatgtagagtaccagacactctaactctgtgacattgagta

SEQ ID NO: 27644 - DNA, 342 bp, Glycine max
ctgcatgcgtgcaaccttcatgatgtttgaactactggatcaacgttgtcttgcatcatgactcatgggatgtccattggccatgaacattgatggctagacggtgtctacatgctcgggatcactataagctcagcataatatatgacatcgggaggaatctctactttgagagagatgacttccttctggttgatcgtatagacattttcatggccgagcttatgtcaatgatggtttacgagataagttattgtctcattttctaagttaccagagtaattactcattggttgactgataccacttctctgttagtgattaccaacggcaaagatagat

SEQ ID NO: 27645 - DNA, 179 bp, Glycine max
taaatacttgtatatgaaaatacagaggctacaagtgctcactgagctgacagtatcacacttatgtgcgctattgccatgatcactaacatgcatgctatagacaagataatccaaacataggataccgtattgattcctcaaacttgcgttgacaggcctttgttatcctattatca

SEQ ID NO: 27646 - DNA, 263 bp, Glycine max
ttgctgagaacacgacatagacaatactcagagctatcctatatatacaaagggaagatagtcgctaaaccacattgaccacaaacaactaagcaggatctgtcaaacactaacctgccatgcactatatctcaccgagtatacacgggacaagacaacctataagcagcaggctacgtcctactcatgtgtataatttcattccaaccaagtgcaactgactgacacgctgtgaacaagaaggagatggtctgatcataaca

SEQ ID NO: 27647 - DNA, 390 bp, Glycine max
tctagaaattcgaatggtcataagttttcacacggatgttcgattcgggaaaataatatatcgagaccctcgaaattgaacaacggaagctctcgagaaattcgaatggtcattacatttcactcggatgcccgattcgggaacataatatatcgagatgctcgaaattgaacaacggaagccttcgagaaattcgaatggttataagttttcacacggatgtccgattcggggacataactcatctagacgctcgaaattgaacaatggaagctttctagaaattcgaatggtcataagttttcacacggatgtccgattcgggaacataatatatcgagaccctcgatattgaacaacggaagccttcgagaaattcgaatggtattg

SEQ ID NO: 27648 - DNA, 405 bp, Glycine max
  unsure at all n locations
ntaaagcacagcaacacagaatctaggtgtccatctcccttcaattcaatgggttttctaggtttgagaagtgaaattgaggatgaggtatatttgaggcaaactctcacctcacacaagtctataacatcaatctaaacttgctcaaactggatttacacctaaaatctcaccgaatcaaaatttgactcttcaacacccaattttgccctagaaatggctcttggttcactttggtcatttgtttttctctctagcacagcctaacctttctcataagtcctaaatggcatttcaatctaagattaactcactctaacctctanatactaccaattccagatttggccttccagccctcanaaattcactctttttccactcataacaccacattttcacttt

SEQ ID NO: 27649 - DNA, 296 bp, Glycine max
agtgacattgaacaaacactaaaatataaagtcatacataatctgatgccatgttaaagacgaagaccctaatactatatatgacatgggtacagcaatgctatacttcacagatgctagatttcaagaatgatctaataatgccagattggatagcagcctactagagactataacgggagctaaactctcgattcacatcgatgcatcatacgaaatcactaatcatactatacgttgacgagtcagaggatgattatcatactatatcggagtagaccttctgaacattacgt

SEQ ID NO: 27650 - DNA, 407 bp, Glycine max
  unsure at all n locations
cgccacggagttttccgactatgctcttgtgtggtggaacaagctacaaaaagagagagcaagaattgtggtttgaaagaacaagggtgatgatgaaaggaaggaaagaatcactctttccagcgagggcaacacacaaaggttgagaaagtcctttgatacagccaaggtgttcttgaatcactcaagaatttaggagaatcactctcactaagataaaagagataaactctaattttctgaataaaactcaacttgtgtttattgataaaatggttcagcttatatagaagctgtacagcagattttagtaatgacccactaacctagaattaaaataacttaatgccattaacctanggaattaaaaaaaacttaatggctgagtgtaactgatattgtggcan

SEQ ID NO: 27651 - DNA, 254 bp, Glycine max
cctgcacttttgcgacctgtccctatcccactactaagatacttaggacagagatcggctccttatctagaaggactagcaccctagtcgtgaatttactcccttgtgactgaggagactatagatctacggacttgacgaggggttagtactagccgctcatttgacgactacgccataactatcatcatgaggacaaagtgtgattctagggatcgggacgtaagaaagcatcgcggaccactgaatacgac

SEQ ID NO: 27652 - DNA, 323 bp, Glycine max
tctgcccacacttagaacctcgtgaggatcttatccaagtgagcttgtgacttcaccagacaattgtgcatgatcagcacgttgcgatgttgcttaatatgtctggactgctgtgaatgctgccgttcacgagaacagttctcattggtgctttactacttttggtggggtgtcgcttacgaagctcatcattgatgtcttgatgcttatatcgactatggttatcgagtaccaaggggtgtcttcgtctaccatacgcgacatcaacctccagaaaccttcggagcctttcgttgtaacccaacatcctgaggaactcttta

SEQ ID NO: 27653 - DNA, 397 bp, Glycine max
agtttttatgatgtgctcatttgtataaacatctatatattggtagtagttcaggctcacgtaaccataagctgcaataatatgtgaacatgcatagtgaaacgctgaataccttccgcattgacaataatgaccattcaagttaactgcccacttttgtccgccacgttgcgtaataagattgaaggtctcctctacttcaaaccttgtggagtggatgtcatacacgcgaatgatgtgtgaacaagcttgttcttgattttttctaagttctttaacaagctttgaacaatatacttgcccttcatttaactgtctctgggcttggtggccacgctcaacaaagtactttcgacacctactgtacgttgatttgaccaatgctgttatgggaatg

SEQ ID NO: 27654 - DNA, 379 bp, Glycine max
  unsure at all n locations
ataagcgccagctcgacagctaatatatgatttgacgatcaaaagtattgcgaggttagatgggtgctttttaacggaggggaaaacttatcatggcaattacataaaaacggacaatgatataatactagttagagtagagaagcaaattatacactgaagtaattagccacagcaagtcttactgctcatcaaccaggaccgctatgccttangcaaaatttacatttaagttctaatttattatcattatcttatttatttattctaagttcatctttaatatttaaatattttacttttaatatttaaaacaacagattcaatcaaacttatttttgacatangtagtgttatataagatttaaataattataat

SEQ ID NO: 27655 - DNA, 289 bp, Glycine max
  unsure at all n locations
agttatgtatgttgtaggngatcatgaatggataatgcgatggagagcctgtaactggatacattgacgggatggaaaaaaatgctgaagctgaaggtgcacacaatccttcacatcactggagtccttttgagtcactaatgattaagaagatggacgatatgcttcacctctatcatgagcactaaggagaaggtcatagttcattgaacaatataactacccggatggaaaacagtgagactatgctgacccttagtaacctacttaaccctgacgaggatgaagc

SEQ ID NO: 27656 - DNA, 478 bp, Glycine max
  unsure at all n locations
cctgtanttgaactttgaacatgagaacgctcgaatacngagacacttcgggccatcagctgacaaggcaagcatctgttacganagttgtccctttgggacacaagcgcgaagacatagattgggaacatacgcgtgccattatatcatacattacagtgaattgagagcctgccgatgcacgtatttccttactaacgatcgcttgaacaagtacgcctattatactatacaagagcacatgtatagtgaccaagtcataggcttacctacaaggtttgcatgggctcccaacgtggaaatggacactacttagacaggacactgtgttggatcacataactgcgtactgaatggaatccgtggaacaatgcagtgtacacgctctcatctggggatgttaatgagaatacagatgacaactttatgatgaatcttgactaagtactcaatcttgtgcttgattacaagcttgttn

SEQ ID NO: 27657 - DNA, 398 bp, Glycine max
  unsure at all n locations
atcttngtatgatttagttctcaccggcgaaaggatcgaagtgggtctgaaaagaggcaaatttgatcatcctgctttgacaaataaaaagcctgcggcaaatagagaggatgaagaggagggaggaacccatgtcgtggctgccattcctgcatggccaaattttccaccagccctacaatatcaacacttcgccaatatcaacccttctcattacccaccaccctatcagccaagaaccctaaatcagccacaaaggccacccctaaatcattcaataccaaacaccacccttaaagaagccaaaatgccaaccagggaaagaattttccagcatagaagcttatagaattcaccccaattccagtgtcatatgctgacttactcncatatctact

SEQ ID NO: 27658 - DNA, 436 bp, Glycine max
tcgatggagaacaaccttaggatgcagagggaacactttcagagatgtataaattgtgcaagcaaaataggtcacgtctaatataatttaaattgtaagttcaacatcggttttcaataaaaataaacaaaaaccaatgttaacaacttgatgttaacgttaacatctattttattaaacaaaccgatggtaacgaactaaggttaacatcggttttatgaaaacccgatgttaactaattaatgttaacatcggttattccaaaaccgatgttaaagtcacttcattaacatcggatttcttctaacatgatgttaacgtatacacattattcacaattatgccaccgcgttatcttaacatcggattctaaaaaaccgatgtttataaagtctcattatttatcatcttgccaccgtgattctgcaacatagat

SEQ ID NO: 27659 - DNA, 404 bp, Glycine max
tgtcttttacttttaatatataacctatatactaatgtcacatcctatcagagcgtcgtgttcccgtgtgctctatcatgagggtcttcatagtcatgcacctattcatctgctcccccgaacacaagtgcaagatcatcacaagatccaaacacaactacacacagggagtgagatatcacattcctagctaatagagaaacaagacaatttaatatacatattatataactgacataccacttgcttaaacatagctcacgtaacttcaccactgcgtcattcaaaattcactgttcaatcatcaatcacattacacaagaatcccacccttcgatccagatataataacacatgctttattaagcatatgcgacaagtatgctgagactcaatactatatg

SEQ ID NO: 27660 - DNA, 445 bp, Glycine max
actcaagcttatgctgcaaacatttataatagaccacctcagcagtaaaacctttctcaactaaataattatgacctttcaagcaatagatacaatccaggctggaggaatcatccaaatctgagatggacaagtcctccataacaacaacagcctgcccctccttttcagaatgttaatggtccaagcaagccatatgttcctcctgcaatgcagcaacaacagcaacagtcacaacaaagacaaccagcaactgaggctcctcctcaaccttccttagaagagttagtgaggcaaatgatcatccagaatatgcaatttcagcaagagacaagagcctccattcatagtttgacaaatcagatggggcagatggctactcagatgaatcaagctcagtcccaaaattctgacaaattgacttcacaaactgtgcagaatccta

SEQ ID NO: 27661 - DNA, 397 bp, Glycine max
ttagtttatcttccaaattttggttaagctttattgcgaaataacatcagcttcacgccatccccaaaatgagcacaacatcaagcagggtaagtgacttaaatattttccaattgcttagcttttgtttgacgacaatccgatatcatcataataactatttaagaatatttactttccacgtattattaaaactacaagtaattaataatcacacgaactatttttgagatttgatccaataattttgaaattaatcattcacaaattaaaagttgtttgataaaatgtttgaaaaattaaattcgtttaaaactaattgtctcacttgataagagattacatgtataaaaataataaattaatgtaatcaagctaaatgtatttcagagataac

SEQ ID NO: 27662 - DNA, 267 bp, Glycine max
  unsure at all n locations
aactcagcttacattcctatatggaaaaattctttccattttaaccttatatacggccgagatagagcatataagtgggggcaatcctcatcatatgagctaagttttggggtcgaggccccaactcacattctaagatcgcatcagagtctaatataaatccattcgaaaggccaccccccatgttattcatgctctacacccaaaagtgctaggcatgaggggggcttattggaaaatccccaantaccacattgcctacaaaaa

SEQ ID NO: 27663 - DNA, 406 bp, Glycine max
  unsure at all n locations
ttagttttacacattcaatagacatatgccaaatggccaaatagccaaatagtttggaaaggtcacagtcacttagtgcagattttatatactcatataatcatgattcattcttaacgaaaagataatttcttctataacatcaggacttttttgtcaaaatctttttggagattccaaaataacttattaataatcttatactttagttgcaacaagagagtctaactcttgagattgataaatactattttgataaaatgaaacgactgtacagttttcagaaataataaatatatattaattaattattattattatattaatacgtagaaagagattacgtanataaatacgagagaataaatcactcttttaagacatcataataatcatttactgaaag

SEQ ID NO: 27664 - DNA, 427 bp, Glycine max
tgcttgtggttgtttagttcggaagaatttcagaactttatctttcagtagaattcccatgaatttcataaaaagggttgttacataatgaattttgatatgaactaattctttgaacaattcccatgaatccgctaattagaatgatcatgtgttattctaagtgattatgacttggtttactctatagaatgatcatatattctaagatagaagcagtctagcagattttgaggaaatgacataaccttttagattttacgttataaggatatcatcaactatccattatacaagaagctcaagtacaagaggaggaagtcagcgaatatattgtactatgcaattaaattttcatcctaaatcttgtttgtggtctatacgagtcatctattgatttaagatgcttgtttaacgatagattaat

SEQ ID NO: 27665 - DNA, 428 bp, Glycine max
  unsure at all n locations
aattcagctcggacccgggatcctttaagttacctgcagcatttagtcntttttcaagtcccaactcaccatataccttgccctctaaagaaaacatgtaattatgaatctgattagatgagaaaaggagaataggagaaaatgagaaaattcccgatcaatagaataagatgaaagcaaaaagggaaaattcccaatcaaggaaaatgggggaaaacaaaataagaaagagaattctcgatcaaagatcggaagagaaaagaagatatatgcagaaaggtcttatgaccagacaatatctgaacaatacagatttgtcaccaagtaaacaagattagaatggaaaccacgacctanagtggtcctctccctttgattgccaaccaaaatcctgtgtgtcagcgactttttcgtcctgcactatacaa

SEQ ID NO: 27666 - DNA, 420 bp, Glycine max
  unsure at all n locations
atanagcacagcaacacagaatctaggtgtccaacatccttcatttcaatgggttaactaggttggaaaagtgaaatatacaatgaggtaaatacgaagcaaactctcacctcacacaagtccataacatcaatctaaacttgctcaaactgaatttacacctaatattccaccgaatcaaaatttgactcctcaacacccaattatgccctagaaacagctatttgaacattttgatcatatgaacttctctctagcacagtccaagctttctcgcaagtcctaaatgacattttaagctagtattaactcactttaacccccatttaccacagaattcagacttaaccttacaactctcaaagcctcactctttctacactcataacataacattctcaccttctaaccctacgttga

SEQ ID NO: 27667 - DNA, 442 bp, Glycine max
cgatcagctcgtcccgggatcttaagcacctgcggcatttagtttgccgcccagctcgcccaggcgagcaaggttgcttcctccagaagaaacaaccttctggaggaatcttttggagggcccaagtggacctggttgctatttacacccccctttttactaaatgcacccccttatatatttttctgtaattctttttccgtaacgttacgaaactttacgaatttcgtaacgatacttattttcctttccgcaaggttacgaatccttacggatttatgtatttactctttttggctttcaaagaagttacggaaactcacggattgcgcaaaaacacctcttttcgatttccgccacattacggaatttcacggattacgcaagcctgcttccttttggatatctgagacgtctcgggacttcatttattgcatgtcat

SEQ ID NO: 27668 - DNA, 416 bp, Glycine max
  unsure at all n locations
tatgcatggaanatgtaattatgaaattgagatgcctgaaganacaccatttcctagttaaccatgcattangtaccatgttcattattttgttttaagtgaaatgggtttatgatcccaacatggttggctcgtggtgcctaacacatgaaactaagaatgtaatgtgaaatttcacgcttcccccttctttgtttttgttttgtagaggaaaacgcaaggatgagcaaacatgaaaacaaatggtatgcaattttgcagatcaaaaagtttgttgaacgcatatgcatgatgatgccatgactcatgcaaaatgtgaggctgaaatatgataacggacaaatgcaggatatgtccattatgatgttatgaagagatgcttatgcgatgcatgatatgaatgcattttacggaca

SEQ ID NO: 27669 - DNA, 376 bp, Glycine max
  unsure at all n locations
ttatgtctgtttggncntncttgnctctggaaaattaattgtttggtcatttgcattccaacagttccttatgatataagctaaggcaatggccgttcttacgttttcataagaggtaagggcatcagatcccactcccctcgatctacacaaggttgtgattaaagctgggaagcctaattgagaagagttggactgagcgatcatggtcatttgtccagagatcaaaccgacaatgttcatgtccatccttgtgattaagccatagaccaacctatctctatctgtgttcaaatntgaagtgcacgaggtaagagctaggttagagtatgagaagacgcttcatctctgagccagggtggtaagatattttctg

SEQ ID NO: 27670 - DNA, 403 bp, Glycine max
  unsure at all n locations
ctataaaactcaagctttgggcgtgaacagagcttcagaactaagagtttcagcaaaggcttaactttctcatacaacagactgagctgtacagccactttatgcagaacaagtcaagtgtacactcttcagatgctttaccctcggtagatgaaaacacaaatgatcaagatgtactgtttgactcttcaaacgctgggcataatgaagaggaagatccggaagaggctgaattaaagaatgaagctntgaaggctgctcaaaaagcagtctctaaacagagaatgttgactaatgcttttgacagtgcatgcttgaggttccgccaggtggatgatgccgattcacttacacggcaattagcaggatgaagtaacattgatttgcaaaccccgtgagcttt

SEQ ID NO: 27671 - DNA, 320 bp, Glycine max
  unsure at all n locations
gcgatgtgttttatcttatgnggctcgcatatagcatatcctcagcatataacaccacgaatgagcacttactcccactcaacttgtggtatacaccatcatcacctgcttttgcctcacaatcatatgacggaacgacctgacgaaacctgtaataccattgatgggaatctcgtctctgacaatacatgaatccatctaggctgcacaccctacactttgagtcacctgtaacacagctctatggatgcatcacatcaattgtgtgtacaatgtcaccatttataaacgtacacctaactacaatctagcagttccta

SEQ ID NO: 27672 - DNA, 299 bp, Glycine max
tctcatatgtttacacgtttggacatttacataagctgacccttattcctggtctagcaagctgaggatcctactcatcatattagcgctgcccatattgttagtatacacgatgcacccccctagtgtccaatgctgatcatgatatatataaatgctatgcctcattctctgcatggagtggtgaaagaacggctatgccacctagctcaccagtacgttctcacctatgatgaccatggcagggtgatattgcagagaaccttcactgtctctacgaccagcgacatttgataata

SEQ ID NO: 27673 - DNA, 410 bp, Glycine max
agtatgatagatacgctggatcagacctaagctcttcctcagaagcaatcccattcacatccttcgttcctcgaaactctgaaaaggcagcaggagcaccaccaccaccaccaccagcaaacaaccctcctacggcactcaaagaaccgtccacagttggaggcgccgatccactcctaaaaatattaagctctcgctcacgatcatcagcctcttgtctgcgttgctcacgaagtaacatccctatctccttctccaattcatcaccaaaagaaccctcgttactcccaagcataggtcttcttcccaattcagacaacatttttcaaaatctcaatttgatcaccacccacaaatcatcaacctcatatagcagaaactgatcactacccaccaccagaaatcaaacc

SEQ ID NO: 27674 - DNA, 433 bp, Glycine max
  unsure at all n locations
tgcatacgttttcccaatttagtttgngaatcatctttctctacctagntaattctctcttttcataatcctcatatcccctgagttgttacagggattagagcacatatcctcaatgatctcgatggcatcaatagggggttttaacatgaggttacccttacaagcaacatctaaacttgtcctattgtgtgaggacactctaccatagaatatatggatcagtatctattgagtaatgtcatggtgtggacaacttctggtaatttctctacgagccaaaaaccttgtttgcgacattccccctgttatagaaggtataaaaataataaataatggaattctttgtaagagctacaaaactgacaactctattagaaagtagaatcttgcaacctttctcaagcgctctcttgttctctatgtacaaagt

SEQ ID NO: 27675 - DNA, 376 bp, Glycine max
  unsure at all n locations
tgttttatatatttatattatgnaactttttgcaattttaaatcaattattaattctagttatatgacttatacttaatgatgcattgtatcattaattattttttatttgataaatgatatatacttaatgattaacactgaatattattaatcattcttcaagaatatacatacacattcataatctctagctcttctgtgtatttgatctttaaagctcacaaaaaatctttctttaatgtaattgacatgacatggacttgatttcggcttatatatatataagttaatttggagacacgacgattgtcttctgtttaatcatcaaatttagttcttaccaccaacattttttaatgacttgagttgatata

SEQ ID NO: 27676 - DNA, 362 bp, Glycine max
tcgagtaaaataaaagattaaatggtcttaatctattacaattttttaaatgataaactaaaaaaagttgacacattaaaattaataagggaaaagttaatcctgatacttttcttgtattaacaaaaaaaaatttgacactaaaataaatgagattagtaactatgcacagtaaaaaattcaatcacaaatattttttaaaataattattctaaactattaacatccgtttagtagagtaaacataaatgaaaaataaataaattaagatgaaaatttagaattaaagtatacaataaaagtatgaatccccatatcatgtatattctcttaattttcatcttcttttattttcaaacgaa

SEQ ID NO: 27677 - DNA, 404 bp, Glycine max
  unsure at all n locations
agtttgtatgattatagggtacccatcacatgtggtactaggtggcggtcgggcgatggtgcacaacaagttttccacatccacaaagcgcgcataaacccaccatcccctggtgcccacctccaactgagctcacgtactcccacgtagcccatatcctcgttcctctcaacactgggtccccatcaatcctcccaagctttcccaacatccaagtaatataacattcagacagcacaaattatcacagccaagcaaaatagggcaaaggcagaaaactctgcccaaaacaccaaccaaaatcacagcttttctcacttanagaccccagtaataattccttcgttccaattcgttaaccgttggatcgactcgaanattntactggaagtctctagtactta

SEQ ID NO: 27678 - DNA, 434 bp, Glycine max
tgtgcattcaatatcctgatgagggtgttccatatgttctcaagattggactatatacatttgctgcccaagtttcatggtcttgcaggtgaagatcctcataagcatcttaacgagttccatattgtttgttccaccatgaagccccctaatgtccaagaagatcatatctttctaaatgcttttcctcattctctggagggagtggcaaaagattggctatactaccttgctcccaggtccattttcagctaggatgaccttaagagggtgttcttggagaaattcttccctgcctctaggaccactgccattagaaaagacatttcaggcatcaggcaacttagtggagagagcttgtatgagtactgggaaagattcaagatattgtgtgcaagatgtcctcaccaccagatttctgagcaactccttct

SEQ ID NO: 27679 - DNA, 405 bp, Glycine max
  unsure at all n locations
agctnggtgnattagnngnaacgancttcaagagtgcatccagtctcaagggtcacgacgaagctcgattagtagtcatactaaagagcagattgaggatattttaaattcaaagcagagattaaagggggaaaagaatatgcccaaggaagatctacatattaagcaggctgcagcgctggttgtcaaacttgaaggaaattctctgttctcatctggaagtattgctggagctgcatcaaaatactctgaagctttggcattgtgtcctatgagatcaaggaaggagagagttgttctatacagtaatcgtgctcaatgccaccttttgctgcaacaacctttggctgccataagtgatgctacccgtgcactatgtctccataaacctgtcaatcgtcatgc

SEQ ID NO: 27680 - DNA, 427 bp, Glycine max
ttgaagggaatccattcgggtgctgagttgggagatgttgcgaatttaaacatggagagactcgaagcagttgttgttatggaattcttcagtggtgtttggcatgtggttgggttattaatctgtattctgtatgtatgtggctaagttcttgttgttgattgttggttggtgtgagactcagtgatttcatgagtaagatgatccagcaaatatatactacttttatatgtggtatgacatggggtgagcttaataattataaaataaatatttattttcacaaataggttttgaaataactgtgaatcataattgttgtacaaacttgaaaatataagggaaagttgcttttgtcgatacatgctgcacgtgttgattacgttatgtcaattgacacaaaacaaaacagcactggtcttgcaac

SEQ ID NO: 27681 - DNA, 400 bp, Glycine max
  unsure at all n locations
taagtttaagatttcttacatctttcccgaaatctggatacaaacgattaatcttcttccactggaaggaatcagccagatggtggagtattccatcccaatttatcccatgtgcatgccatgtaagttatgttgcataatctgcattagcaaacaaacgcctaaaccttggaatgatcagaagatactattacacctttgctagggggcctttctttgtgctttcatcactgctgaactcatcatcatccttcactttgtaccatgataccccacacctgnggcatttatggagttcttcaaactcatgtctgtgcaatatgcaatcattatagtattcatgtatnttttatactccatacccattagacacaatatcttcttcgcctgataataactt

SEQ ID NO: 27682 - DNA, 427 bp, Glycine max
tatggtaaaatctgtgacctagccatgttctaagtctctacagaggccattgcctcccttgcccagtattatgaccagccgttgaggtgcttcacttttggggacttccagctatcacccatggtggaagaatttgaagagatcctaggatgccctatagggggaaggaaaccatacctcttctcaggattctatccctctttagctagaatttctaagatagtccaaatctcggcgcaggaattagaccacagaaagcaagtaaaaaatggggtggttggagtaccgagaagatgtttggaggcaaaggcaataatcttggcaggtagaggcgaatgggccccgttcatagacatcctaacactattgatcttcagaggatttctctttccaaatgtggatgtgttagtgggcctagcagcgatcg

SEQ ID NO: 27683 - DNA, 401 bp, Glycine max
  unsure at all n locations
ttagtttgtttacangccaaagatctttgaatgccaaaaatgagaaacctttccatgtatcagagcaccaaccacatgttataaatattagttgaccaatattaggaaccatagtgccaaacttgttggtttaagtgcatgttacttttgacatccataaaaaatatcctaattttcaaacaaaatttgactttagtggcctgattatacaggtggatagggtagcagctgatgcaaacaatcatgctacataaggttgaagaaaacgctcactgaggtaattgacgttattaattgaatcctcctcctttctaaggaaatctgcaagtttacattaaatttcaattttcctatcctctacagataacgcctagtcgaaatttctgcatccacatcattct

SEQ ID NO: 27684 - DNA, 379 bp, Glycine max
atatcattatgaatcacgtcccaatatgttgaagaaaataggttgaaatctgtttgggctaggagccttgtgagatttcatgctcatgagagcatgcttgatttcctcctttgtgactggggcagtgagggcttccttagcttcttggctaaacataagaacattacgaatatgaatgacaacctcaaaggagttgtggggaaggcaaaagagattctagaagtaggattaagcctctgccttcaagatgtttgcatccgagcaccaggtgccatcatcgagctttagattgtgaataatgttacgatgcctacgcacaatagtttgagtgtgaaaaaacttagtgttgcggtagcccgatctgatccagtcctcacac

SEQ ID NO: 27685 - DNA, 399 bp, Glycine max
  unsure at all n locations
taagtttagggatggaatacttacttgttggtgatgaacaaaagcgcaaaacggaatcaaaaaatgcgaaaaaggatgaccctagggctgcaaattcgtcaatcccgtgggtatggcttttgaaaggggggaaaagaagtttttgaatgtaaaaacgccccccctttcgtcatttttataatttggtgcacgggtggctcgcccaggcgagctaacctgcactttnntttttttttttttttttttttttgaggggaacattaaccatgtcccctcccttctcatggattagcattttgcctaacttgaacttacttagggtaaaattaagcgttgattacttattntattattacccttttcctttntaaacaaacaaatagtaaaagaaagctgcaa

SEQ ID NO: 27686 - DNA, 421 bp, Glycine max
tcatcctcagatccctcttgttgggctttgcttaatttagatagccctcctaggtttagactaacttaaactaagcttcatcctcagatccctcttgttggactagacttagcttaaatagcttacgaaagtgtcataccctaatttcgtccggggattattatttgatgatatacaacctttgattggccgcttcgagacacttggcgtccttggttgcacaatgaatgaagccccgagacgtgtcaaaaatcaaaaggaagcaagcttgcgcaatccgtgaaatttcgtaatgtggcggaaatcgaaaagaggtgtttttgcgcaatgcgtgagtttccgtaacttcttcgagagctcagagagagtaaatacataatgcgtgaggattcgtaaccttgcggaaggaaaataagtatcg

SEQ ID NO: 27687 - DNA, 490 bp, Glycine max
  unsure at all n locations
agacacgagttagccatgttcatagaanacccanggcgaangngagcncgccacccggcgagccacnagagtcgaccngcaggcangcangctcgnttatccaaggcncaacnngagggcgaagctccnggcgccaaggcccaccccccacnggaaggcgccggcgcnaaccncaacacccaaggcaaccgcagcacccccaaggcggaaaancaccancaaaagaccccacnaaagcacaaagagccagccnccaaagaagcnccacaagcaagcagacatcaagccggaancaaagcacaagagcggcaaagaggcgccccggaaaccaccaggaagggcccggcacaccaacaaaacaacgagggccaccaaacaacgccacggagggccacacacgcccggcgccaaangccggcaacaagaggcaagaaagcccccaccggggagacgagcaacaagagcgagaancgagacccacggcncagag

SEQ ID NO: 27688 - DNA, 426 bp, Glycine max
tgcctgtccgatgcagcagtaatgatggcccgagttatgttgggtaacggttacgaacccggaatgggtttaggcaaagacaacggcggcataactagcctgataaatgccaaaggaaatcgtgggaagtatggtttaggctataagcccactcaggcagatgtaaagagaagcatcgcgggaaggaagagtgggggtcaaggctcgtggttgagacaagaaagtgaaggaagcccgccctgccacataagtagaagctttataagcgcgggtctgggagacgaaggtcaagtggtcgcgatatacgaggatgatgttccgagtacattggatttggtacgaccatgccctcctgatttccagctgggaaattgggagtggaggaacgccccgacatttacgcagcgagcataatgtaaaccttta

SEQ ID NO: 27689 - DNA, 408 bp, Glycine max
taagtcttgaggctcaacctaaacaacctaataacaccaagcaagcatgcaataacactaactacatagtacccaaacattaaattaacaagaaatcaaagcaacaaactgaaagaagcaaataattactcaaacatgtcttctaccctagggttttgcataaacagaaattaagaagagaagagaagacttacttgggatgaagataatggatgaggaatgcaatgctaataggaggtaaatgataaggacagaggtagaaatgtgcaattatagtgatgaaaccaaaagtaattgccttaagcaattatgttctctttttaaatttacgagttgcttggtaagcgcgagtgtcacgctaagcgagcactctgtgacatttgagttttcaaaatttaaaaccacgtg

SEQ ID NO: 27690 - DNA, 409 bp, Glycine max
  unsure at all n locations
tacttaaagattcaaatccagtttttctgttgatctatgtgttcattcggtgatgtgctactagtcccttgctttgctcacaaaaaagaagaaaagaaatcaaaatcaaaatcaacctcatccatcccaagaggggaaataataataattattgaaaaagaacacgcaatatattattctttattcttaataataataattcttaaatttgaaaaaacatttctgtccacacctccaagttgctacaatccaacaaaacatacaaagctggttgttctttatgtttctacaacctctttctttcattcccatttccttgcaaaaggaaccatcatacatagttacataccatgagtatctncaccactaccaccacccctctcttctgcttcaaccactacttcacaag

SEQ ID NO: 27691 - DNA, 332 bp, Glycine max
atcttcttatgatgcaaatgagtttgtagctacctcatgcactcctctaatgactatagcatcatttctggcgctaaactgctgggagttggaagccatctcctcaattaaatttctggcttcagcaggagtcatgtctccaagggctccaccactagcagcatctatcatactcctctccatattactgagtccttcataaaaatattggagaagaagttgctccgaaatcggatggtgagggcaactggcacatagttttttaaatctctcccagtattcatataggctccctccactgagttgtataatacctgagatatccttcctga

SEQ ID NO: 27692 - DNA, 424 bp, Glycine max
  unsure at all n locations
ntgccgatttagtgttcgctggagaaaggatcgatgtgggtctgagaagaggcaaatttgattatcctgctttgatgaataggaagcctacggaaaatggagagaataagaaggagggaggaacccatgttgtcatttccgttcctacatgaccaaatttcccaccagctcaacaatatcaatacttagccaatataagcccttcttattacccaccaccctatcagccaagaacacctaatcatccacaaaggccacccctaaatcagccacaaaacccgcctgctgcacatctgataccaaacaccacccttaacacgaaccaaaacaccaaccagggaaggaattttccagaanagaagcctgtagaattcaccccaattctggtgtcgtatgttaacttactcccatatctactcaataa

SEQ ID NO: 27693 - DNA, 399 bp, Glycine max
tcagtcttacacctctcattcttattactttttcaatattgaaaaagtcataacaatgaaaaatgaaaaggtcgtcttattcaaaaccccaaccaattatgaaatcccctatctcccacttcacacctcggaacgcaccgttcttatagagagaggcgctttcacatcttcttaggctggggagaggaaatgttcccattttttaggatactccggggaacagatatccagtggagatgacggggtggggcctgtagctcagaggattagagcacgtggctacgaaccacggtgtcgggggttcgaatccctcctcgcccacaaccggccaaaaaagggaaggatctttccctctgtgggtaggacaatcatgatcgggctagcggacccaaagctatg

SEQ ID NO: 27694 - DNA, 185 bp, Glycine max
cgatggtcatacaaatttattgacgaattggaacaactggagggaaaaaatgaagcagagaattatcacattcgttctagaaaagccaaacgtgtagtaattccgactaataaatctaaattttgtaagatgtacgatacttatgatcctacaggagatactgataacgctgaagaaaaaaaaat

SEQ ID NO: 27695 - DNA, 407 bp, Glycine max
  unsure at all n locations
agcttgctcactgttgcatgctccanatatcttgtgcatattggcgaacttctgaggctcttttggagggaaatatggggagaaaatgcaatccatcatgcattttcttaagaacttgcaggcatcacaaggagagttagagtagctagatgaggccatgatctttactgcaattataccaactatgaatcaagcacgtacaataaaacaatttactctcaaatgttggaataagtgcttacgatagattataggaacaattgactaatgctcacagaaacatattgatcttctttaatatttatataagcaataaggaaataattcattatagagagtacaaattgaatggtactctaattcatgagtacaacgtttaagataacattaaaatcaaaatacattac

SEQ ID NO: 27696 - DNA, 416 bp, Glycine max
cggaaaagctctgtcagcttcttcattccttgaaattgatccttgtctagtaaggcgggtagaggagcagctaaggacgcgtaccccttaatgaaacgacgacagaaccccgataatcccaagaaccctcgtagggcacacgtattccgaggagtaggccattgttgcaccgcggttaccttcgccggaactggttccaccctttttttcgataccaagtggcccagatattccacttgctgagttgcgaaagagcacattgataacttcatgacaaagctatggtcagctaagacttgcaatatctttcgcaggtgctcaaggtggtcggagaaggtctgactataaatcaaaatatcgtcgaagaagacgattacgaatttatgcatatacggtcccaaggtctgattcatagt

SEQ ID NO: 27697 - DNA, 406 bp, Glycine max
atttcgttttaatgtggctctggaccaatatacaaggtgataaagaatactggtatcctgaacttcttctattttcctttaaaactttctaaatatagcagaagattatttttcacggaacattgatagatgggaaagtgatagctgtgaaaaggctttcaaagaagtccaaacaagggctggatgagttaaaaaatgaggtggcactgattgccaaacttcagcaccgtaatcttgtaaagcttcttggctgctgcattgaacgagaagaaaatatgttaatttatgaatacatgcccaacctcagctgggactggctttcttttggttggaccccttacgattttattctaaacatcttagataatcagcatattgcgtatttgtagcttatacacttacagcg

SEQ ID NO: 27698 - DNA, 433 bp, Glycine max
  unsure at all n locations
tacttaattngatcacataaaataaaatccccaacttataaaatctaatataattgncttataatattagcccacattaattattggaatagaaaattccaacaatctcctacttgggctacatattgtaacaattatatcaaaaatccttaaccgtgcatctatatgctatttatctttagagttccaccttaacaacctggtccatctcatgtattaataatggaatcgttgcgcctttcgtcactgcaacaaatgtaactagaccccaatgaccatcacatcaatacactcaatgacataggtcaatatagataagcgggctcatacttaacccatgagctcataatataccctacggctcatgagaattctagggccttcccttggatctctggcccaatctacttggagtcttttatccaatgccctt

SEQ ID NO: 27699 - DNA, 405 bp, Glycine max
agtctttgtattctggaatcatttatcctatcttcgacagccaatgggtgagtcccgtccaggtagtcactaagaaaaccggcctcactgtcataaaaaattagaaggaagagctgattcctactcgggtgcagaacatttagagagtctgaattgactataggaggctgaaccaggttaccaaaaaggaccattttccactgccattcattgaccggatgcttgaatgcttggcaggattatataggcgctttataagagattttagcagagtagcccttccactatctaacttgttgcaaaaggagatggagtttgactttaatgataaatgcaaagaggaactgactaccacccctatcattcaggcacctgattggacagccccatttgagctaatgtgcg

SEQ ID NO: 27700 - DNA, 425 bp, Glycine max
tgagatgaggaagtgtagaagggtgaaacttcctacttttattctttgaccatagagtggtacctggagatatgtcgtgggggtcaggagaccttggggacgtcaggtggggtgctattgcccaaaaccaagcttgaccaatcccgacccaacccgggcatagtcagtcagtgagaacctgtgatgtacctaaacaggcgagctcctggcagtcaacagataaaaggaacaaagaccacagagcaaggaggcttgtggtggctggccagctgtgaactatgatcgatatgtgggttatggcctctggtaatcgattaccaagggtgggtaatcgattacaaggcttataaatgaagacaggagactaagatggtctctggtaatcgattaccagggggtgtaatcgattatcaggcttagaaatg

SEQ ID NO: 27701 - DNA, 167 bp, Glycine max
  unsure at all n locations
cggtatttcacaccgcatatggtgcactctcagtacaatctgctctgatgccgcatagttaagccagccccgacacccgccaacacccgctgacgcgaaccccttgcggncgcattaatataactttgtatcatgtatgctaaaccaagtatttccgagagctcacg

SEQ ID NO: 27702 - DNA, 407 bp, Glycine max
ccatcaaagtgttatcgattacacctcaacagatgtgactcttcatatttaaattttgaaaatcaaaacgtttagaaactctggtaatcgattacaagtattgtgtaattgattacacaagttaaaaatgatttgaaaatattttatcactagttgtgactcttgaaatttgaaatctaacgttttaaaacattggtaatcgattacatgattatggtaattgattacaactttgtaaatcagttttgaaaataatgctggctattggtaattgattactaccttctggtaatcgattaccatagagtaaaactctttggaaaagatttgtgaaaaattcttgtgctactaatgttttgaaaaacctttctagtacttatccttattgagtcttctcttgattcttg

SEQ ID NO: 27703 - DNA, 440 bp, Glycine max
  unsure at all n locations
tactaagctagtaatgctctntaatgtcgtatggtaatgtcatgttttttcatttgtaattaactctatttaaccgtttcaaaaaactttattcaattatatcttaatataattaatgccattaataattattttaacgtaacagaggaatttaaaaggtaaggctattaatactctaatatttctattcacatttaccattttttttcttttttctttttatttttaacatatcattattattggagattgattgaaacaaagaatgaaacttcgaacttaattatcgacatttcagtgaaaacaaatccgttactcatattgagtgtgattccaaaggttgaaattgaagtaaaaaaacaaagagagtaatacacacaattacaaatcanatcgagaaggtgaaagataacaattatctaggaggataaaaaattatg

SEQ ID NO: 27704 - DNA, 405 bp, Glycine max
  unsure at all n locations
tagcttcagcttcactagttgtctcaggagttttcttataggtagaatagatataccgagtagaaattccagcagaaagaatcaggcgagcacgaggagcatccgcttccaccgcggaaacctccaatccatttatcaaagctgtggcaacaacaagtggtgagtgttttcagaatttagaaaacaagttattggataaaagatgttttcaattacacaagatatgctagtgatgatatggcacatcaagtatgcaaaagctttccagaatcaagatagccaaaaaaaaaacctacaataataatagagaaacctggtatttaggtctcaaagatgcatagttcatcaagattaaacgcttatttaacatttgacccagctgtcttaggttntacttctctttaa

SEQ ID NO: 27705 - DNA, 392 bp, Glycine max
tcactagcttttgctagttctatcatctcaaaatacatagtggactgagctaagatagtctgtttctttgacttccaagaaacagccccaccaggtatgctaaatatatagctgctggttgctttggaatcatctgaaagagtgttccaatctgcatcgatgtatccttcaagtacagcgggaaaccttttataatgtaatccaagatttatggttcttataaggtacctcattaccctttcaatagcgtgtcagtgctccatactaggtctactggtaaacctgcataataatcccacaacataagctatgtcgggtctagtacaatcagtggcatacctaaggctgccaatgatacttgcttactcagtttgccgtataccttcaccagt

SEQ ID NO: 27706 - DNA, 402 bp, Glycine max
agtttgtatgagatacattctccccctttctcaagcaaattcttaatgcttcttgacatcatcaaaatcttcatgatatacattctcccccttgttgatgatgacaaccacctgtaggttatgagcaacaacaaagacaatatgtatctgcatatagtttactacctcttggttctacaatgattgcttatatgagacaattgaagatttcatatttttcatatataaaaagttgtctcataaaacaatagataatccttcttactattttatcttttatctttctctaacactttgtcaacatcaaaaacaaatcatgactagagaggagaataccacttgttggaatgtatgagagtaagtgataccaataggcattataacaatcattcaatattaatc

SEQ ID NO: 27707 - DNA, 416 bp, Glycine max
tagatcttgaactcaattatagcatcatggatgcctttaaaatattacactgccagttcaaggccacggacttttgatatcaagttgatctgattagcaatgtttcccggagacaactcatagttcctttcattgctcatccactccaacacctaacagagaccatatatccttgactctagatgataagggctcaagcgcaatatcaccaactatgtaactaaaagcatatttccatgactctatattttatagggatcaaatgcgatacaggagacataatgtgtgtttggtccgcagtggcaccacaaaaatcacattttacatagaaatctggaagatacaatgagaggcatggccatgaacactaataataattgcgtctctttcaccgcgccacaaaaccagacacacta

SEQ ID NO: 27708 - DNA, 349 bp, Glycine max
ttagtcttgttcttgttatctaactcatgcatgccacactcggtggttacttcccgttcgtcatgcttctatcaggcttggcatacctgattccaaaatttggacagtggttccgtctacatctaggccgcggatcactcagacagtctgtacatgctactggatgctgacccgcgccgactgtctgggaccttgtcaagggccagtgcttagacagcatggcttgtaagcgctgccatcgcgttaagactcttgatctgaaccgttgtgtgcccaacactgtccctaactatcttgctcatagatgacatggcaaatacctgtcatggtggacgcagtcatatactga

SEQ ID NO: 27709 - DNA, 375 bp, Glycine max
gctgtccatcgagattgaactgagctcttcgtcttttgattagccagcggatattgtgactaagtccttaagaggacccaccattccgactatatgtaccaagctgggcgcatatgatctatatgctccatctcgatggggagtgatgaatattcttgcaatttaaccatgtttggcaacttatttggcagccttcttctgaatgctatattgcattgtcactatcctatgcgatctgctctctgtgtatgtctatatctatctttcgcactctatatatatatgtagaaggactgagaagtcatgtcacatacctaaatgcttccagtgaactcaactcggacatctgagggctgattgtgcatatctttagag

SEQ ID NO: 27710 - DNA, 402 bp, Glycine max
atctagttcttaaagaaaacttgaagcagggctttgtttgtcgaagcaatcttgtattaatcttgaagcaatgcttatcctttgaagcagccttgaatgattcttttttggcatcatcaacatcatgtatacatacattcacagattacatacttgaatactacttcgatcactcagtaactataaaagttacgtcatttgaatcatggaagatccaaatagacacctgctaaatagaaacaatagaggaagggagatagagagagattctattatgaaaatatcagaatgaactaagagttgatacaatgacattacaagctctttagataaagctgagattacaattaagtcttgtgcctcagttgatatctgctgcaacaaacgtataattcactcact

SEQ ID NO: 27711 - DNA, 405 bp, Glycine max
tagaaggggactttattttatttttgaatatgaataacataagatttgcacgaattcaaacataaaatcattccaaacatagaaataacattaaattaacttcagcagagtcgaaagaaatagaattagcatcaaatacgacaactaagtgatgctaattttgtgacaaggacatattatcttccatttcgatgacatgcttactaaaaacaggtaaaatttctattggcccaaattttttccagtagttagaatacactaacaccttgaacacatcatcgctggttctcagttgaataatttcgaatttgataattgtttctaaatactcatagtgacttggttgcaaaaaaacaatcgccttaccgtttgtgtttaatgaataccataaggtggaatcccatg

SEQ ID NO: 27712 - DNA, 197 bp, Glycine max
gttgtgagttactaagccaaggatgagagtgatgacgtattgcaagtttcgagtagcagattacatctgggaacaatgaattgaatatatatgatgactagctgaggatcacgctattcgaaaattaacgggggatcacactggtatatgagaacatgaatatagaaaaagattacatcttcgacatacagcatatg

SEQ ID NO: 27713 - DNA, 173 bp, Glycine max
cacacgttgtactttgtgtcgcaccggcgatggcgcgcatcatacattccacgtactcaacgcgcgcataaacccaccattcactgttgcccacgtacatcagagctcacgtactcccacgtatcccatatgctcgtatctcgcagcaccgttaccacatcatatgtggcagg

SEQ ID NO: 27714 - DNA, 391 bp, Glycine max
  unsure at all n locations
agtcttaagcccgaggtcaaaccacgaattgaccaatcatgtcccttgtcccgcttcagctttctccctcttttccgaatcaaaaccccccaaaaagtactaagaaaaaataaaataaaaaacagagaaacttaaaccaaagattcaattcaaatcccgtcctcttcatttcagatctcataaagaacacgaaacagtgtaaaacacgcgctctctctttctcttgaactttcttcttccttttcgttttctcactctcttgttcttcattcacccccacacattattcttagggtttccaacattntctccatttccctttattttttcatttttataattttcgaattcggtgtttgaattgagaaagcggtttagacgattccgatgt

SEQ ID NO: 27715 - DNA, 391 bp, Glycine max
gttatgcaagaagcgtcttctaggcattctccaaatatcaaataatattagatagtacctgagccaaatagccccccaatgctgggccaatgatcaaacctatgccccaagctgcgctgacctaaaatcaaatctcactttcgattattattatggaaatgtagttctaaaatctactactataacagaggtggtgatgcttacagttgagagtcctataccttggtgttcttgtcgaaaaagttcataggcataggcctgttaaatagaggagttaggcacacagaagcttaaatggaagcgtgaaagcgatcgaacagttatatattcaattgtgcacacacattcaagacttgtattctgaaacatgagagtgctaactttgatacct

SEQ ID NO: 27716 - DNA, 398 bp, Glycine max
  unsure at all n locations
agtttccatgtttaattacgagcgtgtcgatatactacgggacacaatcagacatccgagtccaaagctattgtcgtttgacttttcttagagctatcgttttcgatttcgagcgtctcgatatattatagggctcaatcggacatccgagttaaaagatattgccgcttgactattcttagagattccgttatcaatttcgagagtctcgatatattacagggctcaatcgaacatccgagttaaaagttattgtcgttagatttttctcagagcttccgttttcaattacgagcgtctcgatatcctacgcgacacaatcggacatccgagtganaagttattgtcgtgtgactcttcttatagctgccgctttcaatctcgagcgtctcgatatt

SEQ ID NO: 27717 - DNA, 376 bp, Glycine max
  unsure at all n locations
tgcttgagcaaattcaaacgactataacttttgattcttatgtccgattgtgtcccgtattatatcgagatgctcgtaattgaaaatagaagctctgagccaattcaaacgacaataacttttgactcagatgtccgattgtgtcccgtagtatatcgagacgctcgaaattgaaaactgaagctctgagaaaaatctaacgacaataactttttactcggatgtccgactatgtcccgaaatacatggagacgctcgtaattgagaactgaagctgtgagcgaattccaacgacaataactttagactcggatgtccgatngagtcccgaaatatatctagacgctcgtaattgaaaacagaagctctgagaaaa

SEQ ID NO: 27718 - DNA, 437 bp, Glycine max
  unsure at all n locations
tatcaagcaagcttcagtgttagcgacaaaaggaatgtgcacaatcttaacctcttgaaatttcattttgcctctattatgtttgaattgctaacatttaaatttaagataaggacataaagaaaggaatgaacaaaggatattcctcttgggtcacttcctcaaaaagaagatacaaatgcagntgtttgtactttttttgttgttgtctgactctgctattcctctctctaaccaaagcatgccatgttgctctatgcctagatgtgagacaacggtcatatcaagaaagcgagcatggatcccacaacggatacttcactaaagtctatataaataaagactcaagttataaagtgaagtaaagaagtgaaatatgaagtgaagcatcaaagtgaaagaattgttntctacaagtcattggacaatacattcta

SEQ ID NO: 27719 - DNA, 385 bp, Glycine max
  unsure at all n locations
atcttgtctttattgggtttgtgaattgcttcctctcatcattctcttgttttgcttaagagtgcgtttgtttcactgaataaccattcatttgtttatttgtagttctctttttactataaaaaaattgagtttttttatgtgtgtgtgtgtgggcgcgcgttttattttggccatatcattatctccaactccccctcaagccgaagacctgatactaatagcgtgaattttgcaagactggacattaataataatcactatgatagactctgataccatcttaagaattggatttaagtctaacttaatcccaaaagctagctttatgaaagcagggtgtctcctacttctgtacaatattntggccggatcactagtcaat

SEQ ID NO: 27720 - DNA, 436 bp, Glycine max
  unsure at all n locations
nttatgtgggatacccaatgtaagcatagtttccagttcattattgtaaaattgacaaccgctctagtgttagttttgcctaacccgagagaaccctttgaggtgtattgtgatgcatcaaagatgggtttaggaggagtgttaatgcaaagtgaccaagtagtggcctatgcttctagacaactcaagactcatgagaagaattatcccacccatgatctggagttggctgttgtgatttttgcccttaatatgtggaggcattacctgtttggctccaagttttatgtgtttagtgatcataagagcatgaagtacttgtttagttagaaagagccgaacatgcgtcaaaggaaatggttagagtttcgtaaggattatgactttgagcttagctaccatcccggcaaagccaatgtattggttgatgccttaa

SEQ ID NO: 27721 - DNA, 398 bp, Glycine max
  unsure at all n locations
gggatgcgagcttttgctatttgatatatgaatcacttgtgtgaccactctccccaccatgccctgtttagcctctttttgtgcttcttcttcaagttaaaagaaataccatgcaccaggatacctactcgttttccaccttgtctgctgattaacatgatgggcgcttgctgatgacactaggatatgactgttcaattaccctagcactcggattccctctaatatcttatctctgtagcttcttcatcgcccctttatttgtggatcctgccaactcagtcttgctattatcgtctactgttttggcaaattctggcgtgttaacccattactctggatttccaatgaatatcttatgtaaggtgagacccattatcttagcatatntcacacca

SEQ ID NO: 27722 - DNA, 431 bp, Glycine max
  unsure at all n locations
tccaacttatgagctaaaacaaacaagggtgttctctctttcaagtgtgtgcttagaaaaatcagagagacaaaaggtgtagcttattgagagagagagagttagtaataaaatatagtagtaaataattctaaaaagttgcttttgcatgcgtgtggaataaaataaagcaagacaaatagaaaattctgatactgttgttaggtgatatttatgcttggcggctcacgttttattccgaccttagggatatactaaattttacggaaaccataaggttgttttaatgtggtaattattcttggagattaatgtgtattatgggcttttatattatagctacaactttctataaatattaaagtgctattcgtatctccttctttacttanagcaccttttctttctttcttcttaaatcttttttaatt

SEQ ID NO: 27723 - DNA, 379 bp, Glycine max
  unsure at all n locations
agctntgtttatattggctattaaatgcacctgaaattgagaaaagaaaaatgtggttaaacaatgtaatactatggatcatgactatatatcctattcaattatgctttatcttaatttttatcaaccaaacaattgaataagttatctcttcactccatcttcatccattccaccctctgccaccattccaaatgtagcctatatgataaaatcctaaattctggcttctttaaaaaaattaacattatattcttcatttgagcttgttaaattaatttacacttacatacatttttggtccttgtgatttagctttttcgctctttgtccttgcataataaaaaattgatggtactccttacaatttatgtttttt

SEQ ID NO: 27724 - DNA, 421 bp, Glycine max
  unsure at all n locations
atcttgagataagggtctatcattgaacctttgactatttatccatcttccttggggcttgactcaatggttcctttgaatcctttgtaccatggatccattggcaccattgtctccccactcaataaacgcctaacattggcaatgatttcccttggattataattgggaatgtaagaactgcagtctatcccaattcgttgactaccattgacaagaaccaatggtattactggtatgtacctgtaaggccagacaacaaaaattatgtttaagggacacatgcaaatgcagtagaaaagacaaacagactctatcaactgaaaaactgtgtntgaataccatacacaaacaagggctaaattgtagatgtttcactctcaaccgcaccatcaaagatactgacaaaaacatgttgatg

SEQ ID NO: 27725 - DNA, 410 bp, Glycine max
  unsure at all n locations
agctttcataagtgaaatcaggtgcagccatctccctaagagtcctctcacgaggtggaggttgagccatgttctcagtatgaaaattagtagtggaatgctcaaaatcagaatattcagaatcaccctcaacagaatgctcagaatactcaaaatgcacagaatgcacactatgcctaactaatctatgaaaggttctatctatttcacgatcaaagggttgtaaatcacctggattgcccctagtcatgcactatatgcaacaaatagtgtgtttctcaacaagcacctaacaagggggtaaaactacgactatactcaaacgatatcaaaatgagctgaaattntgttaggaacaccctaagatcatgaaaagatagcacanaanataggacaataatacttgaaaa

SEQ ID NO: 27726 - DNA, 429 bp, Glycine max
gtactatgttctacacgaataaaagctctgtattctctagatgtagtgcattgctcctatttgtatccatgctagtgtgctatcatggattccctctgaaataattattgttctctaaatctctccctttatgttagagtgctatcatggattcaacattatgttactgtgctatcgtgtcaaatactgtcaggagtccaacatcgcattgaaaaagaaacttactgtgtcacttaagccatgatgcttacccacctattggactagttaatcgggctgggctctcctctggtgcgtaaatcacaacaagtggagttactgttgagagtcacgatatgcaaatgagtctctcatctcttgcaggcttgctattgtgaatactatgccaccaaaagataccttatactatgttgagtagacaaagacatt

SEQ ID NO: 27727 - DNA, 392 bp, Glycine max
  unsure at all n locations
agcttcttttggaccttgaacaagcaatcaactcctctttcagaaccatgctatgtgctcgcgactggtccctttcttcccttcacaacttgagttcattattgctaccccatagagctccgcgaaatttgttccggccatactcttccttgcgagccctcttggtctcttgttcaagggctcttgcggtaattgcattctcttcccgtaacccggcacactccttccgaacgtgtgtagcagccaacttgaacttctccttggcgagttntgcctttcctaactcgcttttgagagcttggacttcttcgtcctcttccggtgcttcaaaattctcttcgctgacgacttttaacttggcgagccaatctaaacctcgtatgcgaactttc

SEQ ID NO: 27728 - DNA, 423 bp, Glycine max
taccgaaataagctaaaaataatgtattttaataattttttcattaagcttattgaaatagagctagaaagatcttataagaaagtcacaaaccacttctataaacccatgtaagcacttctaaatgccctccagatctgagattattgcagtgggattttgtttttcaaaatttctcttgatcctatttccagatgtattagaatctcctgcttgccttgctttagaatgtcgaattcaaacagttattaatgaattagtatctaaaatggtattattttctgcacacatgggcgttgaattgcattgatgtcaggcatgtaactttaaagggttttaatgagagaaccaaggtcatctccatttatagtactctaattttggagcagtataagtgaatctttctgcattggaattgacact

SEQ ID NO: 27729 - DNA, 403 bp, Glycine max
atcttatggtaaagctcgtacaggttcttaaacaattcaccgaatggatcatctccagcaacgatatttgacctatgactagattcaacctatttctttggacttttctatgaatcctaaatggataatgatgtcataaaattaaggtaatgttttagttggagttttaacataagaacattgtcttattactattaaacaacaataaatacctcatgggatacaagtttcacgtgatgtgttggccatgcaacaaaactgtcaagggtctgcctcacatattgaatcttggacgtcggaaatggaacttcagcattaccgtcataaacttttgtaacactcaccttcaccacatcatctccataaggcacactgtgtatggtggaagccccttcaaatactt

SEQ ID NO: 27730 - DNA, 422 bp, Glycine max
  unsure at all n locations
ttgataaaagaagaacaatgtatatatttacacttgttattagattattggatcataaaaaacaacaccccacttgaagacttatctacttcgctaaaacctgtaaattagcaacacttggatatcatgcaatgcaagattacaacgcgcgtcgtgaaattcaatagctagaaaaagccatacatcgccacgtacatattgatactagaaagttctactgaacacatcacttatcctctttactaaaaccagttaaacaacactttaaaacggtgcaatacgtcaaagattaaagcatgagtgacttcgaaagcacagctggaaagaaccttgaaattcgatgaagtgggcacacaaaatattaatggaatcaacaaaaacttgactgcactctaattagctaanactagttatgcaacaac

SEQ ID NO: 27731 - DNA, 396 bp, Glycine max
atcttgaaggtaaactagatgccttggttaacctggtaacccaactggccatgaataaaaaatatgcacctgtcgccagactctgtggtttatgctcctctgccgaccaccacacggacctttgcccttctgtgcaacaatctgaagcaattgaacagcctgaagcttatgctgcaaacatctacaacaaacatcctcaacctcaacagcaaaatccgccacaacaaaatagttatgacctctccagcaacaggtacaatcccggatggaggaatcatcccaaccttagatggtcaaatccttcacaacagcagcagcaacaacaacaaccttattttaaaatgttgctggcccaagcagaccatacattccaccaccaatccagcaacaacaaca

SEQ ID NO: 27732 - DNA, 424 bp, Glycine max
  unsure at all n locations
tgtcactgctcactaaagaanaagaaagccctaccttctaacactaagaggaagaagatgccattaaagtttttcagaaaaaaccagaggaaagaaaggctaggggacaaagatgttctatctgcaatcagtcaagacactttgcgaatgcaaagaattgtcccaagaaattagaaaaggtcgtcaagctaatttctcatcttcagattggtgaatatgatgatatagaatctatgtattcagaacagagcgatctacatgaagaaactgagtcggccatagatcaaatagattcttctgatgaagtgtcttcaacttctcctatacncatcttctctatccaagaagagccgtctatagggcctgcaattcctcaaccctgcgttgagattcaagtgctagcatacaagatcgaaatacctat

SEQ ID NO: 27733 - DNA, 235 bp, Glycine max
tgctagtttgttacgcacaccgccactatgcttatgcacactttccttcgaatatagctgagcatgcttgtgcgctcacacccttgaagtagcgtaaagctaaccccgctactgcacttgactcaactccctggctgcctcttcagagactagctgtaaggtaatcgcaccctgtgcgctaagccttactgccataatgatgaagctgaactgaccgcaccatgctacacctatc

SEQ ID NO: 27734 - DNA, 416 bp, Glycine max
tcttagtctcagatgatgcaggtgagtttgtagctactctcatgctctcctctaaagactatagcataatttctggcgctaaactgctgagagctggaagccatcttgtcaatcgaatttccggcatcagcaggagtcatgtttccaagggctccaccactggcatcatatatcatacttctgtccatattactgagtgcttcataaaaatattagagaacaagctgctccgaaatcagatggtgagggcaactggcacatagttgtttaaatctctcccagtactcatacaagctctctccactgatgtgactaatacctgagatatcctttctgatggctgcgcgcctagaagcagggacatctttttctaagaatactctcttaaggtcatcccagctcgtgatggaccatgg

SEQ ID NO: 27735 - DNA, 399 bp, Glycine max
tgctttgctgctattccttaagaaagggtcagacacttttccctacttctgggagcagaacaaaataatttttgttttaagagtttttctgacaatattgaatcttgatgttctgactgaagattaaggctagatctgcctgaatttcaagtagtcaagttcccttgagcattttagatgtttcatcttttctctagtttcttgtacgtataccaatgtgtgtctgaattttgtcttgccaccaggaattgcaattaagtaagtttttgtttttagtttgtaatttctcatgcattgtagagtggctactgtaattgagaagtttgcagggctcatctcgagtttagattataacttgatgatgcttggacattataactcgtagaataatataacatg

SEQ ID NO: 27736 - DNA, 426 bp, Glycine max
  unsure at all n locations
tgtctacatctagttcaaataatgacattgtaattttactgagtttcacagatatttacaagcattgaaattnttcctgcagcttctactaatcataagcaatagatttgaaaagagatcaaagcctttcaagcattctttcacatctatttctctaggatgacactgtaggttcaactacaattagaggctggcttaattccgagagggttaattcatgaacgaaactacaccttagacattctctgacaatggttgatccgaagactttgcattgttatgttcagtggagattttttgcaggatatagcaaataatgttggcacaggaagatgtcatcaaagaagatagacacctgccattgataagttacctcaatctttaaagaagacagacactctatctttgaagaagttacctcaatct

SEQ ID NO: 27737 - DNA, 380 bp, Glycine max
agtttagagagagtcatagcagaatacctggttcactgggtcttacgcatgcgcccgagcagatctaaaagatacttgatgacaaggttgaaccaaggatactcattggatatcatgcaactggtgcctacacactatatgatgctagaataatgatgatcgtgattagcaaagacgtgtcgatagagagaaacaaaagtgtgcaattagaaaataaatgtagttgactatggtgaaagaaaggagatgtgtaccttgatgacaaacaaagtgaagatgatgtaccatcatgtggagagcaacacacatggtcacaaagagagacaccagtaccatacacactcagagaatatgaattgtatcctgatacagcaatcact

SEQ ID NO: 27738 - DNA, 354 bp, Glycine max
tggagggacaaccacatattctacgcctagagagttttctaacgaatgttatattcctacactggaacagaccactcctttaacacacaattagaacaagtgaacgtcttcctctgctactagaatatgtgttagatatcattatcactgcattaaatacattctcatgggcaagtgtgcgagcccacagtataacatgatgatcagtaactaatacgtacaacgaaactctgacatattactttttatatgaaacgtacattcacacaaatgactcaaactaatgaacatgattacctgacaggtattagaaacattcgaacaatcatgtggatcattcacagcacattcttc

SEQ ID NO: 27739 - DNA, 393 bp, Glycine max
  unsure at all n locations
atcttatctacaaacacccctctaatagttaagctcactcccatgccaaaatacatgaaaatacttagctacacacacccctcaatagctaagctcaccccatgctaaaatacatgaaaatacaaaaaggtccctactacaaagactactcataatgccctgaaatacaaggctaaaaccttatactactagaatggccaaaatacaaggccaaaaagaaggaaaacctattctaatatttacaaagaagagtggacctaaccttggcccatgggctcataaatccaccatgaggttcatgagaaccctatggccttctttagccgctctagcccaatcctcttggagtcttctagccaatacccttgtnggggggtaggattgtatctcaag

SEQ ID NO: 27740 - DNA, 412 bp, Glycine max
tgcccagagaaggaatccacgtaggaaatgcttattatctcgaaagactggaaagcggtttctaatgactcctctgcggcctccacataaggcatagaggatgggcagctcaccaagatgtcttcctcgcctgatacgatgaccagatgcccttccactacgaatttcaacttttggtggagtgtagagggaacaactcccactgagtggatccacggacgccccaacagacagctgtagggggggttaatatccattatttggaaggtaacttggcatgtgtgagggcctatttgtactgggagatcaatctctcccctaacctctcggcgggtgccgtcgaaggcataaaccaccattgaactcggctttatgtgggaggcattgaatggtaatttctccaaagtgctct

SEQ ID NO: 27741 - DNA, 394 bp, Glycine max
agcttttcataatttgaaatcaggtgtagccatcttcctaagagtcctctcacgatgtggaggttgagccatgttctcagtatgaaaattagtagttgaatgttcaaaatcagaatatttagaaacaccagcaacaaaatacccataatgctcaaaatgcacagaatgatcaggatgcacactatgcctaactaatctatgaaaggttctatctattttaggatcaacgggttgtaaatcacctggattacccctagtcatgcactatatgcagcaaataatgtgtttctcatcaagcacctaacaagtgggtaaaactacaactatagtcaaacaatatccaaatgagcttaaattttgtgagcaacacccttatatcatgatcagatagcac

SEQ ID NO: 27742 - DNA, 308 bp, Glycine max
gaaacccacgcttcggaagatagtgatgatgtacaagccctaaacggcttattttgttttagccctttttgtcgaagagaagctcaggtccatagccatcaaagtctgaaaagactatgatgaactaagggacgtcaatatggccacagctgaagctttggaacgagaaacctagaatgccccgacggaataacacgaccaaagcaaagttttgatgggctttatattgcagcaatatgtgagctcaagctccgaaaaggtgaaacgaatcatcacgggtcataggcattgatttgaaggacgagcta

SEQ ID NO: 27743 - DNA, 151 bp, Glycine max
agctgaccccatgcgtggagacatggccatacaccaaggtcgctactatcaagactactcctaacgtcctgaaataccagggtaactgcgtagtctactaaaatgggcactactcacggtcaacacgtaagaagacctattatcatatttc

SEQ ID NO: 27744 - DNA, 339 bp, Glycine max
cgcccagagaacgaatacatgtgagaaatgcttactacctcgaaagacagcagagcggactctaatgactcctctgcggcctccacataacgcatacaggatggacacctcaccaagatgacttcctcgcctgataccatgaccagatgcccttccactacgaattacaacttccggtggagcgtagacggaacaactcccactgactggatccacggacgccccaacagacaggtgcttggcgggctaatatccattactagcaaggtaacttgccatgtgtgaggccctatttgtactgagagatcaatctctccactaacctctcggtgctgccgc

SEQ ID NO: 27745 - DNA, 377 bp, Glycine max
atcttgtatgtatttgttggtataattagcctgttccattatgcttttaatgtctctagaggttacttcctcgttgacatcttctgtcttgaatggaattgccatgacaggtttgttgctactgtctttgatatttggtaattgatattgtgttgtgggaggtaattccgactggattaactcaccatccttcacttgccaatttgttatgacatttgttgctggattacctatgatgtcttgtttccaagggtagtctatatcctttctgatggcataagcatgaaaccaattcaagaaaaggacattaattttgactctttcgtacaattcgtagaactctgcttggatttgttttctgcttgacccttgtaatg

SEQ ID NO: 27746 - DNA, 377 bp, Glycine max
actccgctgcactaccgcagtattgtattagctctggttatttgatttgggtaatatagataggtacaagggtgagcaggattttattaccacagatttatctattgaagttgtatttatttctctataaatactttaatttatataaaataattacgcatcatctttcttgtttttcgcactttagaactccatacagcgtagcagtattgttatgagaaaacatattaacatctgaattgttaaacattaaaaacatgtacacacgtatgaactttttgcgtgaaagtatattgatatttgaattgctaagatatatatatatatatatatactactatatatatatatatattttaattgtccaacctttctct

SEQ ID NO: 27747 - DNA, 349 bp, Glycine max
  unsure at all n locations
tcangtatgtcgcccagctcgcccaggcgagcaaggttgcttcctccataagaaacaaccttctggaggaatcttttggagggcccaagtggacctggttgctatttacacccccctttttactaaatgcacccccttatatattgttctgcaattctttttccgtaacgttacgaaactttacgaatgtcgtaacgatacttattttcctttccgcaagggtacgaatgcttacggacttatgtatttactctttttggctgtcaaagaatgtacggaaactcacggattgcgcacaaacacctcttttcaatgtccgccacattacggaatttcacggattacgcaa

SEQ ID NO: 27748 - DNA, 398 bp, Glycine max
agctttgttggtgcgtagctcaccatcttttcatagtagaataccggtaatgtgtctactatcattatcatcatttttttttctccgtcattgaggtgccacttgagctgccaggtctctccacctttgggcgtattcttttgaaagattcgtgccacctttttgcacatgttctgtagttgcatcctatccgaagacattatactgacactgcctaacgaaggcaatcactaggtccttccaagaattgactcgggaaggttccaagttagtgtgccaagtaacagctaccccagtaagactttcttggaaggaatgtatcagcaattcctcatcttttgcgtatgcctccatcttccgataatacatctttagatggttcttggggcaagtagtcc

SEQ ID NO: 27749 - DNA, 424 bp, Glycine max
  unsure at all n locations
ttaatcgattaccaggtggattaatcgattacttctctctcgtttatttggtcagaggggaacaagaacactttaattgattacttaagtcatctaatcgattaaattgttcttgagttgttttccagatgttggatgaacactttaatcgattacttcgataatctaatcaattacttcattgaaataatcaattaccttatagatttaatcgattacaaacggttataattattttctctataaataaccagcttgtgttcacatcttaacaatcaaaaaatcaagagatcattagaggatactcaatacatctcaaaaattacttcttagcctcagaatgagcaagatntcatgctgtcattataacatgagaagagaataaaagagctttatatgtatncacaacttaatcttttgattt

SEQ ID NO: 27750 - DNA, 379 bp, Glycine max
  unsure at all n locations
aaactaggcccaatcaaactctgcatcatgtcactgtacccccagcatgaaccttgagataccccgaagaggtctaaaaacacttgggaccgccggtggaggacaaaccgctcatgacaagctatatatcaaatccgacccaccctggagttactcattttgataaaaccttggatcatcctcgctatcgacgcactcagaccctcgacttatcaaggacactaagacacgagtcctggtggtgacgatggtgcctactgtgaatattgtgcccatctacatagcctcctgacccactgccatgatagatccaaaatcccacctgatgattatcactgcggtcccattaatcacctgataattctacccctggcgaccn

SEQ ID NO: 27751 - DNA, 464 bp, Glycine max
  unsure at all n locations
cgagcaaatggacctgatacctggctacnctnggaacttagaaactcagcttgcatatgtgtgggcacgagaattttgggatctcagtcttgcgcagacaacagtcatgatctactcccagtgacacaacggattatcgcatacaacggctacccagctgtcctgcaatggctaatgacaggacaagtaatctactcttctgctcataatatagccattggtttgaacgagcacctgttgcttcgaacggaagcatatacacatcgcaatatcaaggcctgggagggctattacacttgcgaatctatgtgtgatcatgaacattgtatcagtcgacttttgcctgcatatcatcaaacttgtgtgnctcctcatttacagaccacaagcaccctagaggctggattaacaccccatcatgatggagcggcgtatgatattgaagtttggatgctttgtcgacn

SEQ ID NO: 27752 - DNA, 387 bp, Glycine max
atcttgttcagcgtttatgcgagacagagaccaacatgttagctatcatcgccaagtaccaagaagagttaggtctagccacggcccacgagcatagaatcacggatgagtatgctcaagtgtatgcggaaaaagaggctagaggaagggtgatcgactctttacaccaagaggcaaccatgtggatggatcggtttgctcttaccttgaacgggagtcaagaacttccccgattgttagccaaggccaaggcgatggcagacacctactccgcccccgaagagattcatgggcttctcggctatcgtcagcatatgatagacttaatggcccacataattagaaatcgtatggaaattgtatggtctctcagaccttgactggata

SEQ ID NO: 27753 - DNA, 390 bp, Glycine max
tgtagaatggctagacatgatacatgttatggtttgttttggttcaaggataaaagggatgccccacattatttccatgacacaaatgcataaatgatgatttggaaacttcatgcaaaactggtcatgcatgcacctatgcagacactcaagtgtcaaatttttatggtcatgtgatgctagggctcaggattcatttactctattttagtcaacccaatgtttccaaaatatgttgttttatacatttgtgcattcatccaagaccatttcaggcgtccgggatgatttcacagaattcacccttcatgtgtacacacatttttttttgaaaaactagatatgatcaatgatttttttttcgcagaaaagttggaactcatatctttt

SEQ ID NO: 27754 - DNA, 143 bp, Glycine max
tcagttagtttgttaacaaagccaccggatatgtcttcgtctgtaccactattagcctcccttataacatggatcccttgacaatgttgactctggcatcaccagacatcctcacctgaccatgccatcgagaacgcccacat

SEQ ID NO: 27755 - DNA, 345 bp, Glycine max
  unsure at all n locations
atctttgttatgccctctcccctcgacggagatttcttcttcggcaaaggcgagatagttgttggcagtgatattattgaccagccctccgaaaccttttaccgagatgtcttgggccacatgggcctcgttcaaaaccttcactagcagagcccgatgaggctcggagctcatgagtaactccaacagcgagaccctggccggagttttgttgagctgctcgataaccttgaattcgctctgctgaattatacggaggaactcgctggcttactctagcgacacctgctttttaccataaccatcctttttctcccgaagaccttttaccangatatctttatt

SEQ ID NO: 27756 - DNA, 289 bp, Glycine max
  unsure at all n locations
atggaaagggctagacatgatacatgttanggcatgtcttggttcacggaaaaaaaggatgccccacattatttccatgacacagatgcgaagatgatgatatggaaagaatgtgcataactggtcatgcatgcgccgatgaggacgactaagtgtcaaactttgatggtcgtgtcaaccttaggatctagatgtattagctctattatagatcacccctatggtcccaacatatgctatttcatcactatatgcttttatcctaatccaagtaatgcgtgcggggaaa

SEQ ID NO: 27757 - DNA, 539 bp, Glycine max
  unsure at all n locations
ggatcgaagccgacgcggangagacgaaagggcgacgacgggaaaaaaaaaaaannaagagaggaattgatgcttcgatngccctagcanaaccngaaacnnagcaccggacggcggganccganagagccgccggcaggcatgcacgccngtccaacgacccgcgagacggagaccaacacgaaangcangcgcgccgaccaccaagaagagngacgaccagacacggcccacgagcaggggaacaccgacgacnacgcccaagcgccagcggaacaagacgcaagaggaagggggaccgacaccgaacaccaagaagcaaccgggcggagggaacagacagcgagaacgcgaacgggaaggaagaccccgacagcagganaccccaggcccacgcgacagcacacaccgacaccgcccccgaagacagacacgcgcaacaaggcacccgaaaaacaaganagacaaggggcccacagcaggagaaacgcgaggaaaaaggccgggacacacccgcggaccgaaagcagagcaccccg

SEQ ID NO: 27758 - DNA, 414 bp, Glycine max
gtgttcttacaatctcccattctttagttctgatatttccaaatctatatgatgtgcattgatgttttccttccacagtacctgttctacaacatgcttcacaaacatgttagtagcatcttttcaattcaaggcaagtttaatttcaattagtcatgataaacataaattttttcacagaaacataaaaaaatttctcccccttttggcatcacaaagcagaaaagagtgtgtatcatagagaatataaacaataatagttcaagaaacacaaaacattgaaaaaaaagatatcatgtcattaattaaaaagagattacaactgattaagaaaacatagaatagcatagtcaaaatgcagaaacaaataaacagagaacataagatcaagcctagattatatgcttatgagat

SEQ ID NO: 27759 - DNA, 391 bp, Glycine max
  unsure at all n locations
agcttcgtatgctttatgaagaatatgttaaacttggcaaggaaacaatccctaattccgaaaaggaacttcagcaacttaaagaagagatggatgacaaatctcaggctcttgatgatgtaattatcataatttcttttaagtagaaagttgaatccctccatacttgttacttcctttcttgaatgtttgctntgtggataatgatgattattattttttttatcaattgtttagtattatctatttccccccttttgcttggtgttaacttgttttagattacacaactactgcaactgtcaggttttatgcgttttagcacaagtaaaatctgacaaggatttggttgagacattggtgcaacctgttgaaaatgctgaccggattt

SEQ ID NO: 27760 - DNA, 436 bp, Glycine max
tgcagcggcagagagagagaggaaggttagtggtattcagtggtgaaagcaccacggcagtacgtagaagagaagagaagagaagagagtagtgtcgtgtggtgtgttttaacgtttaagaaatgaatgaatattcctgagtggattgtgaggaagattacgacaaagtgtcaagccccgtccaatgaaacgacaataatacctacctgtcttagtattactaacgtttacctctctggccagtacagtgactagtacccactatattaattatataagataaaaaggaaaagatgattgaaaataaaactctaattaaatatgaagagtattttggaagcattatctttgaatacaaagagtttatatatatatatatatatatatatatatatatatatatatatatatatatctcagtcaggagagagagtat

SEQ ID NO: 27761 - DNA, 400 bp, Glycine max
  unsure at all n locations
agtttttaatatgttggaaggcttataaatccaagctgcactacgattgcccggntgaactttaccctctctttaatctcttgggctaatatcatttttggttactgtaaatggtcttttgggctgttgtataaataaaattcttccgaagccatttgaggtttacctttcttgtccatgtttctagaatgcatgatgaaacaaattttccaaacgagcactcatttcttatttaatgaaatgtccaattctagaggtctctatgcattgaaatgttcaatcatttctctacaggattgccctagattacaagttacttgtctttattagaagtttctttgntaagcatgacatcattatattttttgcataatgttaacaatgctgcactatgggtact

SEQ ID NO: 27762 - DNA, 352 bp, Glycine max
atctgttcaattcagttctggcgaagctcagtttaaatcttctctttggaacacccctacaacgtatagcgttattgctgccataaaactctcatcatataggagactatatttaaacctgtgaatctaatccagactaaggcacaaactaccttttggatttgaagagacatattccagactctaaatatttgtaaaatcagaatccatgtgcatgatatcatatcctctattcaatttcatattctcgacaatctattcctcataattaggggtgggaataggccataccatgctgtaaaaggcctgagcctatcctactgatggatatcgaagactgagcctggcctat

SEQ ID NO: 27763 - DNA, 403 bp, Glycine max
  unsure at all n locations
agctcgacccgggatcttatatcacctgccgcatgcctcttttctttcataacctgctactgataacattctaatgcatgctcacattcttgtgcttcctttggctaacatacacactagctcaacttgtgaaaataaacactacttcgtcacaatcatgcattcaatccgaaaacaatctataacacccatttcacaaaaagataaaagtggttcactgcataatcattatgatcaagtcaaactgttatgtatgcttcgaaacatgcatactagatatccacaaacaaaacacaaatatatataaacgtagatcagaatcactaaaacaatgtactgaaatataatagatatcatacgttccaaaaagcangatcatcaggaatttaccagtcctgagaca

SEQ ID NO: 27764 - DNA, 433 bp, Glycine max
tctcggctcatgctgggaacgcctctagttcaacacttgtgcagttctaagcacccacccagagggaagctccccaagttccaactccgaatgcgactcgactggccggtaattccaacacgacaaggaacttccctccgaggccattgccggaattcaccccgctcccaatgacgtacgaagatcttctaccatccctcatcgccaatcatttggccgtggtaactcccggaagggtcctcgaaccccctttcccgaagtggtatgaccctaacgcaacttgcaagtaccatgggggtgtcccggggcattccgtcgaaaaatgcttggcccttaaatacaaggtccacacatttaatggatgccggatggctgactttccaagaggatcggcccaatgtgagaaccaacccgctcgccaatcatggagggg

SEQ ID NO: 27765 - DNA, 404 bp, Glycine max
agcttgtctcatagaggtccaggaaggataaggcggccaaaggaactagttctcctcctgagtatgacagtcaccgctttatgagcactgtacaccagcagcgctttgaggccatcaagggatggtcatttctccgggagcgacgcgtccagctcagggacgatgagtataccgatttccaggaagaaataggtcgccggtggtgggcatcactggttacccccatggccaagttcgatccagaaatagtcctcgaattttatgccaatgcttggccaacagaggagggcgtgcgtgacatgaagtcctgcgtgaggggtcagtggatcccgtttgatgcagatgctattggccagctcctgggatatccgttagtgctggaagagggccatgagtgcgagtat

SEQ ID NO: 27766 - DNA, 415 bp, Glycine max
taatggaagagaattgcataatgagtgtgctagcattcgatttcttagaggtcgtaaactgttcatcaatgactttcaacagatctctgaccttatcatgctggtcaactgaaccccggatactagcggatatgttggtttttatgaacataacggagagacgattagatctctcccacttttcataaagatcaacagcatctggttcgctagtttcagtaatagccggtggctcatccttccttataacatagtcaatatccatccagcccagatgaaggagaaatctttccttccaaaccatataattatcacctttcaaaatgggaaggtcacaagatatattcatagattgtgaaactgcaaacaaacacacatgctcattaagaaaatttgagactaaaaaaatgtcatg

SEQ ID NO: 27767 - DNA, 390 bp, Glycine max
agcttgtataatggctagacatgatacatatcagggcttggtttggttcacggataaaagggatgccccacattatttccatgacacaaatgcaaaaatgatgatttggaaactttatgcaaaactggtcatgcatgcgcctatgcggacgctcaagtgtcaaatttttatggtcgggtgatgctagggttcacgattcatttcctctattttaaatcaacccaacgtttccaaaatatgttcttttatcaatttgtgcattcatccgagtccattttgggcgtctgggaaaatcttcacagcattcaccctttatgtgtatacacattctttcagaaactagctatgatcagcgaatctttcttttaaagaagagttggaaatcatctc

SEQ ID NO: 27768 - DNA, 434 bp, Glycine max
  unsure at all n locations
ttcagacttaaataactacgttggtctaaatttctcatcgcaccttatgaattgtaggagcaagggcaacacccttgtcgaccccctaaaaaaatataaaaagggaaaagtaaataattctgaagtcacgttgcacacactcgattaaaggctgccatcccttctgacgggcgcgtggggtgctaataccttccctatgcataaacaactcccgaaccgccttattttcaaaattcgcagacctgtttttttaggttttctaacgttttccttgaataaacattggtggtgaatccgctcattttctcccttggagactgttcgacggccggcaagtgcaccggatcgcgcaagtagtataaaacggtaagtgaataccaagtatcaaactctcagggaacttgttntacttggtaaagctgtgattcagtaaa

SEQ ID NO: 27769 - DNA, 404 bp, Glycine max
tttagcttggatttccttttagtagggaatctatccttcctaagatggagccaaacccagtcaccctcattaagaactagctcttttcttcctctattgcctttagttgaatacacctttgtttggttctctatttggttcttaaccctctcatgcatcttctttacaaattctgacctagattccccttctttatgtataaaagaagtgtccagtgggaggggaatgaggtctaacggtgttaggggattaaacccatagacaacctcaaaaggggactgcttggtggttctatgaaccccactgttgtaggcaaattctacatgaggaagatactcatcccaagacttatggctgcctttcagaagagcccttataagggtggataaagacctattcactac

SEQ ID NO: 27770 - DNA, 402 bp, Glycine max
tccatcatttcttctcatgaaacttgaatttaaacttgatcttgaacttgctgactcaatcttgaaatcattcttactcaatcttgaaatcattctttgggctttttgtcatcatctttgtcatcatcaaaactacttgaatcaacttgattcatcatcatgaagcttgcttctacacattatggacccgctagtgagttaagtcatttgattgagtatgcaattttatcatgaccttttatttatttattttccctttctctttaattcctttgttgagctcatgttcgttaaagtttcattccgttaccattcgatatgtggtttagctttgaacttgtttcttttattcagtgtttcgctcatggttgtatataacctttgtcacatttgtacttcttg

SEQ ID NO: 27771 - DNA, 369 bp, Glycine max
ttagcttgtggtgcaaaagattacatctatacaaaggaattttttatggggcagcctccaagactccaccaagattccctgggtgaggtgggacatagtctgcctactaagagtaaaggtgggttagggatcaaagatttgattaaattcaatgaggctttgcttgctaaatgggggtgggagttggaaaataatcagaatcagttgtgggccagaattctattgtctagatatggtggttggagggatttgatttctgatatgaactgcagtttagactctccttggtggaaagacctcaaggatatcttcaagcagcagcatagcaacacaatttgcaatcacctgaagtggaagctgggatcggga

SEQ ID NO: 27772 - DNA, 411 bp, Glycine max
  unsure at all n locations
tcagaccaaagcaactcanaatctaggtatctaaaacccctctatttagtggattttcaaggtttgagaagtgaaaatgagaatagagtaaatttggagcaaactctcacctcacacaagtctataacatcaatctaaacttgctcaaactggttttgcacctaaaattccaacgaatcaaaatttgactcctcaacacccaatcttaccctagaaatggctcttgccttcactttggtcatttgttcttctctcttgcacaacccaggctttctcataagtcctaaatgacatttcaaactaggattaactccctttaacctgcaaataccactaaatccagatttggccttcccactctcaaagcctcacttttttccactcgatacaccatattctcactctctaacc

SEQ ID NO: 27773 - DNA, 403 bp, Glycine max
tgcatttattgtttgcccttaagatgtggaggcattacctatttggctccaagtttgaggtgtttagtgatcataatagccttagtacttgtttggtcagaaagagttgaacatgcatcaaaggagatggttagagtttcttgaggattatgattttgagctaagctaccatcccaacaaagccaatgtagtggctaaccccttaagtaggaaatccctacatatatatgccttgatggttagagaattggatctcctaaaacaatttacagactttatccttgtgtgtgaggttacccctaacaatgcgagactaggagctttgaggattactagtgagttgttaggagagatcagatatggccaaaaggctgatccttttctgaagactaagatagaagct

SEQ ID NO: 27774 - DNA, 429 bp, Glycine max
atgaaaagtatttgtgcttctacttttgtcaatgatctcttccatactataaaaaggatatttagacattcacaagttcatattaaagggcctaaatgactacactgaccttctaatactttgcttgcttaaactagagttcactcttgcttaacccacaactcacttaagctagaatgcatcttcacttaagctaaaattccattacatgatgtctttgcgttaaaatttgaattacattacgatttacgttggctaagtgtaaccgaataccaattataatactgaatagaagcacaagttgtctcccaagagaataatgcaaggataaacattcaaattaaaacctttcggataaatatatttttgtgtttttatattttaaactacctacaatcaaaactaataaaaaaaaatagaagatgtatt

SEQ ID NO: 27775 - DNA, 184 bp, Glycine max
tagcttgtttttcaagagagccatactcatgattagagcgcctggcagcacaacacatgtcggcatggtcctccattcccttgtgcggacatcgaaactgatacttgactagagacatgcgtgtatttggggtgatatcaccatgctacccgttccactatgacctcccctggttgaaacctac

SEQ ID NO: 27776 - DNA, 339 bp, Glycine max
ctaagcttgaggcttgaaacggcgggggtattcctcaattggaagaaatagactcttcagtgaatatgatccttgcggtgctgtttgccaacgctgagggcaatatacatcatcgaacggtgcgttttgatccatctttgttatcttcttcccatttgcaattctcatttttgcagttataccaaaaccccatcattttccccaattcccttacaacagctcgattctaccatgctgcgatctaaattgaggatcaaatcatgctatttagattggactcgaaatgggtgtttgacttggatcctgtggggataatatggtagtagatagcatatttgt

SEQ ID NO: 27777 - DNA, 389 bp, Glycine max
  unsure at all n locations
agttttccacattgaattcagcacctaatgtcatattagatgggaattgggtatcttaacataagagatttcagatggactttaatcctaatcccacagccgaccttttcacgagatctctacttaaccctttggttaaatgatcggccaaattatgctgagttctcacagccctacatccccaaattttgagataactcaaatttggtgtctttttgtgccaaagttcatatggcgtaaccttattccttttgttaggaattcggttcaacaagtaacaggctgccaacatagcctcaccccanaatccttcacttgaacctgaataggataacatgaaattcaccatttctttcaaggttctattcttcctttcggctacaccattc

SEQ ID NO: 27778 - DNA, 423 bp, Glycine max
  unsure at all n locations
tcacaaaagtgtgtatggcttgaaacattcaccgatgcagtggttcaagaagtttaatgagtttatgagcaactcaggattcaaaagatgtgacatggaccattgctgctatgttaaaaaatatactaatagttatgttatccttgttgtgtatgttgatgacatgttgattgcaggatctagtatggcagaaattaacaggttgaagcagcagttggcagaaaactttgaaatgaaggatcttggtccagctaaacaaatccttggtatgagaattctcagaaacatatcagaaggaattttgaagctgtctcaggagaaatatatacacaagttgcttgacaggttttaccttggagattctaagaccaggaatacccctttgggatctcatttgaagttntcaaagaagcaatctttgca

SEQ ID NO: 27779 - DNA, 388 bp, Glycine max
  unsure at all n locations
agttcccagtcatccaactgtgacagcaagaggtatccttattattgcatcgagttcatgtattatgaactaggggatcacatattcagaagcacatatgaaaatagtgtgaatagacgtagcacgttgcctagtacaaacaaaatcctatattatcttttcttggtataaaatgattggtgtgtctcacattaatatatagaattttagtaaccataaatctaatttacgtgaacaaaactgaattctaaattcataccttagagaagttgcccggtccatgctgttcatcaatggaatctatattatactttactacgctgttcaatnggctttgtcatgagtttttagtagaatggtgaagggagaaataccanaattctatcca

SEQ ID NO: 27780 - DNA, 408 bp, Glycine max
  unsure at all n locations
tatcaaacatcatgtgaagttggacgacctcactgttcagtaaaatgcttggctactagttaaataacttagagatggacgcatgaaaacaccctcctaggattcgaggtcttaatgggcaaaagatgacaaacaaaatcgattggaactaagttttttctgtcaacgtgaacctgtgttttgattatttacgacttatgccaggtaagttccaaatcaaaagctgctttcgctggtcacgaccaaattgacaacctgtgtttcatcggtttgtttgcgaccaaaatgatagttcaaattatgtttgaattaacgcgatcttttcctctgttgcttttgattaacactatttttattagtaagatgccggatacgacatttntcattctttgtaccatttgaataatg

SEQ ID NO: 27781 - DNA, 394 bp, Glycine max
  unsure at all n locations
tgtcttaagaaaacccattccccaacctcaaaatgcctgtcagccctctttctgtcagcttggttcttcatcctattctgcgctcatcgcaactgatacttcaactgtgaaattgcttcatctctgtcttgtaattccctcctaaccgcttccacgtgaacctcccctggtaaaaacctacggagcatcggtggtttgcgaacatagacaacttcaaacggggtcattccagatgacacatgaaaattggtattatactaatattcagcccaagatagccaaaggacccaaattttgggttggtcagctagaaaacatctaananatgtttctaatcaccacttatgtttgcccatccatttgaggatgatatgctgtgttcatcttcagagct

SEQ ID NO: 27782 - DNA, 352 bp, Glycine max
cttaatgacaggatcgtgtgtgaatctttggctaattttatggatgcttgtattatgaacatattattttatttttatataacaaggaactcaattgatccacgttgaatctattcgctcttgacgaggttattaggtttgggtagtacaggttcttaaacacatccagaccgactaaaacccacgaaaattggctgattaagatatttttgcacctattcaatctacatcaacccatgaatagtcccatatgataaatgatggtatgctgaaaaagaacattgtatttcaccctccgctaaaaccaaaatgacacatagttattttaccttttacacgtaccagacatgat

SEQ ID NO: 27783 - DNA, 395 bp, Glycine max
  unsure at all n locations
agcttaaccaatatgtaaagcgataattaaaagtacacatcagaaattaaagagtgtagggaagaagaagacaaaaacaatatttatactggttcggccacaaaccgtgcctacatctagtccccaagcaacttgcggttcttgagatttctttcaaccttgtaaaatcctttacaagccaaagatccacaagggatgtactctcccttgttctctttgaataaccaagtggatgtaccctccacttgaactgatccacaagagatgtaccctctcttgttctcagtataacaatccccaagtagatgtaccctctacttgtaccacanaggatgtaccctccaatgtgttgggacaaagaattctcaggcggttagtcctttgaatctttgtaa

SEQ ID NO: 27784 - DNA, 434 bp, Glycine max
  unsure at all n locations
tgatccttgaatcttgaaatcaactntcctcttgaatcttgaattgttcttcatctttcctcttgaatcttgaagtgttcttgattctatcttgaacatcttgaactcattctttgattcttgagatcatcatctttgttatcatgaagtgttcttgaccattgagctttttgtcatcaccttttcatcatctttgttatcattaaaacatctttgaatcaatcttgattgatcatgaagctttgcttctacactggtatctacggattttcatgaagggtgttgttagcgcagattttctcgctcagcggatggactgaagcggtgcacttagcgggatgacccttcacttatcgaatatgcacagctcatactccttccagattcttcctcgcgctcaaccgagaagtgttgcactcagcggatggctcgct

SEQ ID NO: 27785 - DNA, 403 bp, Glycine max
  unsure at all n locations
agcttctatttaagctgaaccattntatcaataaagaccaggtgaggtttattcagaaaattagaggttatctcttttatcttagtgaaagtgattttcctaaattcttgaatgattcaagaacaccctggctgtatcaaaggacattcacaacctttgtgtgttgccctcgctggaaagagtgattttttccttcctttcatcttcacccttgttttttcaaaccacaattccagaaaatccacctctgcccagaattatctcgtggccataactcccattttacgcactcaaattaagtgattcttgagcctaaattgaatttcaaaacgagacctttcacctcgttttggaatcacctcatttggagccctgtagcttcagatattgccatttctatatt

SEQ ID NO: 27786 - DNA, 406 bp, Glycine max
tgggttcctaggcctagaattgcattcgggcattcattttaaattcttcatgctgtccctatacatataaaacagtcccacaacccaaagctcacaaaaccatgctcatatgtcgttgaggcatttcaccgagcacttggtgggcgcatgtttaggcacgaatatcaagagaatggggacaatgtggcacgcgccattacttcagaatacaccctaggccaaggccatcccttacaacccctcaattcaacaaaaacaagcaacaatttgaggataaatccctcacgtttcttagcaaacacatgcaatttagagcaccaaaatacatcaatggaaagctagaaagcccaagaatgaggtacttacttgttggagacgaataatagagcataacggaatcaaaaac

SEQ ID NO: 27787 - DNA, 325 bp, Glycine max
agtctttaacttattgtcttcacaaataatcatcacacagcagaaaactaacaaatctacccatcatatctgccaaaaccccatacccacgacaatcaaaggagaaagaagtccacccaaacctgaaatttcgaagtcccactcgtagctcacgcacttcacgactccaaaaatgccctgctttcgcgatttggagcataaatgagcaccaaacgttggagctttgttggggtttcaatggagaatggaggagaaggataaagcaacgtcaggatgacggacagctgtctgaaaagtgtgggggctgagtgaagagagagaaaag

SEQ ID NO: 27788 - DNA, 431 bp, Glycine max
tcgaagggaagagagagaccaatcacgagcacatatcttgatcttgaaagaggagttggctgcttgctcaaggtccaaaagaaacttgtctcagcgtttatgcgagacagagaccaacatgttagctatcgtcagcaagtaccaagaagaactaaatctagccacggcccacgagcacaaagtggcggacgagtatgcccaagtgtacgcggaaaaggaggctagaggaagggtgatcgacgcgttacatcaagaggcaacaatgtggatggaccgatttgctcttaccttgaacgggagtcaagagcttccccgattgctagccaaggccaaagcaatggcggacacctactccacccccgaggagatccacggactccttggctattgtcagcatatgatagaattaatggcccatataattagaaacc

SEQ ID NO: 27789 - DNA, 402 bp, Glycine max
agcttatatacatctgcaacgtgaattctgttacaactgaaaagataactaactaattcagccaactaactaactatttctgttaaagctgtttatactgctaagagcccccctcaagctgggaatggatattcatcattcccagcttgttacaaaggggctgaaaggtggctggtggtaaagctttggtgaatatgtccgcgagttgcatggaagatgagaccggaaggagctttacgagacccgcaatgactttgtggcggataatatggcaatcgatctcgatatgcttagtgcgttcatggaaaacgggatttgttgctatctgaattgcagattggttgtcacaatataaggtggctggctgaataaatgctacaccaatgtcttggagaatatacg

SEQ ID NO: 27790 - DNA, 424 bp, Glycine max
  unsure at all n locations
tgttcttgattnttcctcagttctttaacaagcttttaacaatattcttggccttcatttaactgtctttgggcttggcagccacgctcaacaaagtactttcgacacctactgtacgttgatttcaccaatgctgttatgggaatgttgcgacaatcctttaaaaccttattgatacattctgagaggttcgttgtcatgtggccatattgacgtccttctctatcgtaagccatcgtccatttttcctttgagatgcgatcaatccatgttgctatggctggactcagttcacgaaatttttctaaattttgataaaaaatgtgcttgcaaggagtgtaggctgcataaaaatagttatgaataacaattttaagtataaatgaaagtaaaataaacgtgaccatcaaatatgaaatcttac

SEQ ID NO: 27791 - DNA, 282 bp, Glycine max
gagctcagctccgcgggatgcgatacagtcgagctgcacgcgtgccatctcgtttctattctcgaaatgataaccttcagtcctatatacaggtaactggcgcatctcacacacaagagtcataatggaaactactccgattcccgcggaggaccatacttcgagatacccactacacacttagaccttggaccgatcaattatatcctgtggacatgaatcatacacataccatctttaacttatatattatgagtgattaatatctcacatagggaatag

SEQ ID NO: 27792 - DNA, 411 bp, Glycine max
aaatgctcgagcttgttaattatggggcacttttcacatgtggacattgtggaggacgaacgatggtgcacatcaatgatttccgcattcacaaagcactcagaaacccaccatccagtgtggcccacctacatatgacctcacgtacttacacatagacgatatccctaattgtctcagcaccggtggctcatcattactcactagccatcacaacatcctcgcttaacaacattctaacagcacaaactatcacatgctaacttaacagagctttggcagaaaacgctgctctacgcgacaaccattatcacagcttatatcacttaacgaccacagtatccttatcttcgacggatatcacgcaccgttggaccgacaacacaattttaccggaagactgtactgtat

SEQ ID NO: 27793 - DNA, 396 bp, Glycine max
agcttgtatcctccattgaagctcatcctagcaaagcagttcaagttgtattgaagtcctttttggctaaaatttacatgaggcagaagtagagtcaacttatggcgaggaccaaaattgttgaccatgcaatagaaactagagttctgatttctatctagtatctagagcagtatcatgttctgtggcttgcaattttttaaaaattgatgttcttatttgacaatcctttatttgatgcagaaaatccattatttgataatgatctttcctcattttttttctcatttctactactattctttatatccataataatcaggtgctttttcatcaggtttattaataacttgaaccctttccttctttgttttcatttataatgcatctaatcta

SEQ ID NO: 27794 - DNA, 375 bp, Glycine max
tctaagctactgagaatgtaaaacaaattttgttattcttaacattgtatttacaaagatattcacatacttctatgatctagtatctaggagatcaagttcaaagcacaatctacagaaactttcttcatgtcatttacatgacaagcattttttgacagctaattacacttgtcctggagaagaaatgaaactttttaacttctgtcattgttctggccacagaattataaaagagtagcttcccagactcagcataatgattaaggctttgttaggtttgacgttgaatcaaattcaaaatcagtctcatagaaatcacgttcaacatgctttggaacacgtgattcaggtataacaaacgcacactaagta

SEQ ID NO: 27795 - DNA, 396 bp, Glycine max
agctttttcaagtggtcttcggcattacatttaaactcgatccattgtcgataagtacctttgcgacaacgtggtccatacatctcatcgacacatgtagagccttgttgtgtcctctcccctcaacgggaatctctttttccgcaaacgcgatgtagttgttggcggctatatgattaacgatgccttcgaaaccctccactgagatatcatgtgctacatgggcatcgttaagaacctttatcaacagcgcacgatgaggctcggagtttatgagtagttcaagcaaacagatccttgctggagttttattcagttgctcgaccaccttaaactcgctttgttggatgaggcggaggaactcatgggcctcttcaaagtcacggtgtttcttga

SEQ ID NO: 27796 - DNA, 412 bp, Glycine max
  unsure at all n locations
tctttgagaaaacttccttgagaagctagagcttatctacacacttcccctctcataactaagctcacctccttgaaaagcttccttaagaagattcctaaagaagctagaacttagctacacatacctctctaatggctaagctcacctccttgagatgagaagctagagcttagctacacaccccctataatagctaagctcacccccatgacaaaatacatgaaaatacaaaacaaaatccctactgcacagactactcaaaatgcctcaaaatacaaggctaaaaccctatactactagaatggccaaaatacaaggcccaaacgaaggagaaacctattctaatatttacaaagataagcggcttcatacttagcccatgggctcanaatctaccctaaggctcatg

SEQ ID NO: 27797 - DNA, 377 bp, Glycine max
tttgtcttgttcaatcctgacccaacccgggcatagtcagttaatgagaacctgtgacgtacctatacaggcgagctcctggcagtcaaccgataaaagaacaaagaccacaccgcaagtaggcttgtgtggaggctggccagctatggatcttgagcgattatggactctggctatcgattaccaagggagtgtaatcgattacaaggcttaaaaatgaagacgagaagtcaatatggactctggtaatcgattaccacaggtgtgtaatcgattaccacgcctaaaaatgaggtcaggaagttgagatggcctctggtaatcgatgaccaaaggagggagtcgatcccatgcttagaaatggatatgggatattg

SEQ ID NO: 27798 - DNA, 280 bp, Glycine max
  unsure at all n locations
tgtgcgaatcatatcactactgcattttatcaatattatcgtccttnctttctctacccactcgtcacgtttggacttcttacggaaaaacaccataactatactcgccacagggcatacctatggcaccatatccaagtctagaacgatgggtgatcactaagagacacatgatcagatgaaagctgacatgtgagctctgagagaacatatgtcttccatgatggacgccatgttttgaatgagagcagctaatggagaatagacgggtcaccactac

SEQ ID NO: 27799 - DNA, 256 bp, Glycine max
attctagttcttggcacaacatttatgattcacgtgcggagagttattgtgcatacctggaagcttcattagacgctgttgaattgtctatgagtaaaggtttgaacgcttaaatagctggcactcgcgagacatacacacgcgtgagtactatagacgcaagagctcgcgtgatatggaagcacatactatgcatacttcctatatcatgaagtatgcttattaggtctcttacatgatacgacgcatgataccc

SEQ ID NO: 27800 - DNA, 328 bp, Glycine max
  unsure at all n locations
tcatgacgatgaatcaagtcgagccgtgtggctttgtctatgaccttagatgangacgaaacgccgaacgaatgacttccatatcgagtcgacttgattaacctacggcgattcgagattcccgtggcggttgttgtcatgatgcgagacatgatgatttaccgagtcgagacatgcagtcaggaacactcctctggggacgtattgacatttttctttatcgacaacatagcacatttttgtttcgtcacacgagccatctcaggattttctaagttaccagagtctttactctttggtgatcgattaccagtatcgtgcagtcgat

SEQ ID NO: 27801 - DNA, 385 bp, Glycine max
  unsure at all n locations
ttcattttatgtttctactanaagaacaacagcgttacatattccaaactaccccaatcttccatatcagttgatgtgtcaagttcaagatgccatacttcatgtcagtgtgccaagtggaatcatcactcttcccttactatataatcacaaattgtatatactatacagttattgtaatgccaatattagtatgaccaatgcattatattcatcctttttaataattctaagaacatggttccatgggaaatactattcaatcttgtactatctttagcttcctttccaatacttggacaaggaggataaacttttagagcatgccaaagctcttaaagtacataccagaattgaccctgatatagaacttggtccattgatc

SEQ ID NO: 27802 - DNA, 412 bp, Glycine max
ggttcgtgaatcatcttcttcttgaagttgcatcttctatcatcttgctgtcttctgcattccgctgccattgaaattcaagatgcaaaggacttcattgatgaagaagatccaaggcctacaatctccacatggagatacatcaactttttcatgaaactttaagagatttagttcagctttccatagccaccaagaatagatcaattgcatttctgtaactctagatacattttccaaaatgaactcatcctgttgatgaaattccattttgagtgtgtagtaacaatgatgttcttcatgtcatgttcattgtttagatcttcatgtctgcaacattcatcttttcctttagttggtgaatatttcttatggcttgaattttttatcttcatctagtgagcatgtcgac

SEQ ID NO: 27803 - DNA, 338 bp, Glycine max
tgtttcaacctagaggagacggaccattccaagtgttggagaagatcaacgacaatgcctacaagattgacttgcctagtgagtataatgtaagtgccactttcaatgtgtctgatctatctctttttgatgcagatggaggagccttggatttgaggacaaatccttttcaagaaggagggagtgatgaggacataaccaagggcaaggaccatgaagcacttgaaggtcccatgaccagaggcagacttaaacaagcccaacacgtcatagagacaaggctggtcatttgtatagctgccattgatgatgattgaaggcccaagtggagaaagatg

SEQ ID NO: 27804 - DNA, 256 bp, Glycine max
tcaccggatgacgccgatctaacattttctaaccgttgtcatgcacaattcggacacggatcgaatcgaaaacctcctatgcgacgtctgacgtgaactaccgaccgatgttcctcacctcgacatcgaacaattctctgcacattacctcgatagtgcagtagggcctttctaacgctacattacttctcctgtccagcagctgcatcaacccctgacactgccctcaggtgaggcccctccacggacttccctc

SEQ ID NO: 27805 - DNA, 399 bp, Glycine max
  unsure at all n locations
agttttcagacatcattcttttgaaactggtccaactcttcttgcattgccttaacccatcattcatcagaataacatcatctatgtgttttggcttgatctctaaaagtagagctatatgcttgacagagttccttgtctggactttgtccttaggatcaccaatgatatgggactctatatgatgtttcctcagcaaacgtccagttagttctcttactttttcaagttgatcatccactggtgagttggatgcaatcttttcttaattggatgcaacagcaaacttaacaatattttctattttcatctctacaanaggacgtgtacaactctaacattgtggtgtcaagcttattctcattacatcttacacgaatggcctcgtacacagtcaag

SEQ ID NO: 27806 - DNA, 328 bp, Glycine max
tctacttatgtggcagggttggcttccttcacttttttggctgcaaagcgagctttgaccactgttgttccttgccgcgatgcttcttttcatgtcacgctgagtgggcttatagcctaaaccgtacttaccacgaattccttgggtatttaataagctaattatgccgacgatgactttgcctaaacccatcccggggtcataaccggatcccaacataactcgggccatcattaccgctgcgtcggacagacaatgatgaccaaaatggagtgcacggaagaaatgctgaccacctcaaaagactggaaagcgattctaacgattc

SEQ ID NO: 27807 - DNA, 406 bp, Glycine max
  unsure at all n locations
agcttgtatggtagcntaaggctatattcagaaggaaaaagtagactataatgaaatattctttttagtagtttgacacacctccacacgtgtttggctagccctagtggcaactcttgacatggagttaaagcaattcagtgccaaaactgtctttctccatggaagacaagaggaatacattatgatgttatgatttgaaggttttgaggtggaagcaaaggaaaattttgtctttagattgaagaggtctctntatgggatgaagcaatcaccaaagcaatggtgcaagagatttgatgagttcattatctcgcatgggtacattagaagtctttatgactcatgtgtttatcatagcaaggtggaggatggttcccacatatatctattactctctatggat

SEQ ID NO: 27808 - DNA, 423 bp, Glycine max
tatgctgcaaatatttacaatagacctcctcaaccttatcagcataatcaaccacagtagaacaattatgacctttccagcaacagatacaaccctggatggaggaatcaccctaacctcagatggtccagccctcagcaacaacagcagcctgctccttccttccaaaatgctgctggcccaagcagaccatacattcctccaccaatccaacaacagcaacaaccccagaaacagccaacagttgaggcccctccacaaccttccctcgaagaacttgtgaggcaaatgactatgcagaacatgcagtttcagcaagagaccagagcctccattcagagcttaaccaatcagatgggacaattagctactcaattgaatcaacaacagtcccagaattctgacaagctgccttctcaagct

SEQ ID NO: 27809 - DNA, 399 bp, Glycine max
  unsure at all n locations
cagcttgtgttgcaataagtggtggtattcatacaaagatgggtttgagcttaaatgtcattactagggggaattctacttttatgatgcttgagaagtgcccttgtatatcgatgtgctttttgtagtctggaatttgatgataggagctattcaagttgtcttattaatgaagaatgggagagaggacaaaatatgtgtgattttttgcgtccttttttttaaatcacagagttgatatctggttcctcttatccaacgtctaatttgtaattcatgcaagtgtggaaaattgaatgtntattgcttcaaaatttgagtaataaggatgagttgattagaacaatggaaattgatatgaaaacaaagtttgataaatattggagtgattatagcaat

SEQ ID NO: 27810 - DNA, 428 bp, Glycine max
tctgcaacaatcttcatcatcacctgcacatgatatctgaatcttttctcctcttcaaagggaagacacgtagccaagacaacgaggaggtagaattgaagagaaagagtgtcaaatatttcaaatgtggcagattgggtcatatcaaaagaaattgcagaactagactctttaaagtgaatgcaacatacgaagaaaatgaaggtgactcatttgagtaatttagatgggatcaatgcttcaccatcgaggatatgagggttggacagaaggagataccagtaaattacctagattaccaaaaagaatggatctttgactctggttgctcacatcatgtaacaggtaggggtgggtaagcgggctagcctgcctgtataagcccgcattggcagcgaaccgggccagtccaccccgtattcttacac

SEQ ID NO: 27811 - DNA, 404 bp, Glycine max
agctttgttagtcttcaccaaagaactaagctagccaagttcaacgcatcctctcttttcaatcatgttcttgcatatgcaaaactcgaatctgagatgctggttaatggatctaaactcccgttcactcgagccaacataacgctggttgacattcacggttcatatttatacctagaatgacccaattagaaagaatcataaatataatactaaaacatctattaattaagatattaaattatacagaaaaaattaaacaagcttaggtatacatgagtaatatctagaatattaataattgtttctattattgcacctttataataaacagtcagagacatgtacaaaacatgctcttgatgattaaaaatactactcattagaatcgataataaaacatt

SEQ ID NO: 27812 - DNA, 435 bp, Glycine max
  unsure at all n locations
taacaaacttagaaatcaagtgatcatgtattccgtatataggtggagaattacggatgcacattttatctatatacaattgtttgttgcttgcttgaaatcttgatttcaggtattgtattgtcatcatcaaaaagggggagattgtagatgcaattggctttgatgttttgatgatgatcatgatgatgtgttgcaattgatgcaaaggggcttttcaagattaaaattcaagacaatacttcaagattacaaggcacaacatcaagatgatcactagaatattaggaagggaattcctaattgaattagcaaaggtttggccaagtgatttaaaataaaaagtgtttttcaaaggttttactctctggtaatcgattaccagaggatgtaatcgattaccagtggccaaatacattntataacagctataaa

SEQ ID NO: 27813 - DNA, 408 bp, Glycine max
  unsure at all n locations
agctttcaccccacccaccattaactcaccacatggcacacctcaacatcctgccttaccttctcccgaacctgtccatgtttcatcttcttctcaatcacttgcaatggaatcactctctcggtcttctacgccaactatatctcaacattccatggtcactcgtggaaaagctggaatattcaaaccatagaaattattctctgtgagcaagcatccaatttttccagttgaagaaccaactagtgtatccaaagcactacaatgtcatcaatggaagcaagccatgtcagaagaatttaccgatctcatgaataatggtacatggtctctagtccncagtcaaccacattntaatgtcattggaaacaaatgggtgtttcgttttaaaagaaatccaaatggatc

SEQ ID NO: 27814 - DNA, 291 bp, Glycine max
  unsure at all n locations
tcttgcgtagccgctcttggtgctcagaaaatcccttaaacaaattcctcttattactagctatttttaattctttagttcctgaatgtacaaccttcaaattgtttctcgttcccctctttgagaatgtggaggatcttcataggacttcatccagctgatgtttgncaccaganncatcatccaccacccttttcttctatccttctcacgtttgaagtcgttaaacccatattgatgccttcttcccttcatgtctggctttatgacaactttatccgaattgactat

SEQ ID NO: 27815 - DNA, 375 bp, Glycine max
  unsure at all n locations
ttagcttctgcatgtctagggctttctagagagagaatggtccaagttccagagagttttgagattttgttgtgtgaagactagcggagaatcgagcttgaagaggaagtcgtcctgagagcataatatgagtctgtgagtgattgcgaggttctataggtggaggagacatccccaccacttgtatatcttcaatccttcatctttctcttctctttgatgtaaaggaagctctctagttatggagagctaatcctctgttggttcttccttgtaggtacttgatgtanatacctgtatatctatttaatgatgctttgtgtgttcactgtgctatcaaaacttcattctaccatgcttntgccttgatcacgt

SEQ ID NO: 27816 - DNA, 419 bp, Glycine max
tgcctaattaacctgaaatttataggaaatgattattaaacacacaaaatagaattactaagtatttgttacctatctttaactaaaagaacttatagcactacaaaataaccattaaatgaaggagtttaatacaatttacataagttttatacacaaaagttagttgtattcatcgactaacacacacacacacaatgtaagtgaaaatcactattacaccattaagtagcttcttactggatcattttatcccaaaatccaccattggatagaaatgtcttgtcatagacatcatgtgtataaagtgttccattaatccaaacttttgtggtactttattaatatacaattaaatattaagattaacatagtatattagaatcattttattacttttattgttcaatttatatgag

SEQ ID NO: 27817 - DNA, 403 bp, Glycine max
  unsure at all n locations
ttagcttgcattaggagaggtcccatcaaccgccccaactccttaaggctggtgacatctaggtccttaatcttgacttgatataatctttttccagtttgatttgttctcatgttttactaaagtgaaacaaaacccagtgcgaatcaaaactatgacatctatcatgggtggaatggatgaatgcatgaagaaatgcatatgacacagatgcaattttatgaatacgggagcccaggaaattgtccccttcttagatacaacatttgggcaggaatggcgctcgatgtatgtatntaagaaggcgacatggaccctccgttggtttgccaaagtgaggggatcaagacataacccgtgcatgataaggcacaacacgagaatgtacatagtacgataatat

SEQ ID NO: 27818 - DNA, 345 bp, Glycine max
tgtatctgtagctcagagaatcttgctgtgatcctgtatcgagccaattgaatgacatattaagttcagtgcgcaatcacaactagaagtgaggaaaagtaatgctgataccaaaatgaactagaaaaaacaacagcatcaatggcatcaaacaaaagcatagtgccaaaccaaataacttatagaacattaagaagcatgagtttctagattcatgataataccgtaacaaaagaagaaacttccctatttactaatttctagaaaagccatgagttttctattcagaatcccacactctcacgttctgtttataatgacaatataaataactaacaatgatat

SEQ ID NO: 27819 - DNA, 402 bp, Glycine max
atcttgtatgtctttgtaatttctttcacaagtaattggtgaaagaaaaaagagaaattctagtaacacacgcattgaaattggtttaaatttatagaaaataagaaaaattgtaggactcgcatcatatttaattagtctctcatgatttgtaattattctctcatgatttgttgaatagtgtgactcttattgatgatatgaaattgcaccaattcattcattgtaccagaagattcaaagttacttgttaataatcttatgatatgaatcaaaaggtgataaatcaaattatattgaattgtaggattactttatagcccaatagtaagattccaatatgtcgtacagtagaactactttattgctaaatttcctttatgcccctaattaattgagaag

SEQ ID NO: 27820 - DNA, 414 bp, Glycine max
tatcccacaacctctcttttcccccatggttagcacttggtctgtcctcatacgcgaaacccttttccaaggctccaatcctgctccaacaaccatgatggatattgatactctccaacaactccaaaaccgcattgcagaggtggagcgatgccatgaggaggagctcagaaagctaaaggctgaccatgatcggatggaggcttgtgtagaatgcctctagggcgacgagcactcttctaacacattgcctaagcgcactcaagggggaatcataccccaacacactgtcaacacccaagatgatcctagtctctctcacatacaccatcttgaagggcaaactacttgtcgacacccctttgtcaatcacatcatggaggctgccataccattaggttggaaaccactcag

SEQ ID NO: 27821 - DNA, 400 bp, Glycine max
tagcttcattaagaggcttcctccagaagcttcctcgtggcttctcagggtgttacaagctcagcttgcccatgcgagctaggttgcttcctccagaagcaaccgccttctagaggaacatcctggaaggcccaagtgggcctggttgctatttgcaccccccgtttttactaagtacaccccccttgcctttttttggtgattctttattcgtaacgttacgaaactttatgaatttcgtaacgacacttgttttctttccgtaaggctacggaactatacgggccatgtaattactccttttttagctttcggaatgttacggaaactcacggattgcgtaacaatacttgcttttgatttccgccatgttacggaatttcacggatagcgtaacaat

SEQ ID NO: 27822 - DNA, 409 bp, Glycine max
  unsure at all n locations
tcttatccaaggctcatcttggtggtgtagcttcttcttccatggcttattccctagtggatggcgcctcctctcacctcttctcctttgtcttccgctgcatctccatggtggaaaatcaccattaaaggacctcattgaagctcaaagatccagcctccataaaagccccacaagcaagcttccatcacatagtctgatatcgcataagacacaatttttaacctttgtatttatttgcatttaatcaaaattttaaggctcctgattcatcttaagacataaatgtcttttgacttaacatgcatgctagtatttttagctntccaagccattattctcatttatgaaactctatcagttaaaactaagtattctcaacttgccaggtgataatactatcttgcat

SEQ ID NO: 27823 - DNA, 361 bp, Glycine max
atcttgtctcacaccaaacatgacaagtttagcatgctttcaacaaattccttcacaaataattaccacaaggcataaacctagtaaaactacccatcatatctcccaaacacccaatacccacaaaattatgtgagaaagaagtatacccaaacctgaaatttgaagtcccacaacgtataggtgcgcttcacgactccgaaaatggattcctttcgcgatatggagcagatatggtgagcaaaggttggagctttgatggagcttcaatggtgaggaagatgaatactataacaacgtgagagagagagggagaaaagcttctgaattatcgggctgagggaggagagagaacgtggct

SEQ ID NO: 27824 - DNA, 418 bp, Glycine max
  unsure at all n locations
tttgaaaacaaactttgctactggtaatcgattacattaaactggtaatcaattaccagagagtaaaaactctttggtaaaagcttttgtgaaaacttcatgtgctactcaatgttttgaaaaactttttaatacttatcttgattgagtcttctcttgattcttgaatcttgagtcttgaatcttgatcttgattattcttgattcttgattcttgaaatcaaatttctctttattcttgaattgttcttgactcaatcctaaaatcattgtcttgggaattgttcttgactcaatcttgaaatcattctcttgggctttntgtcatcatctttgttatcatcaaaacaccttgaatcaatcttgattcatcatcatgaatcaatcttgattcatgactcaatcttgattcaatcat

SEQ ID NO: 27825 - DNA, 395 bp, Glycine max
ttcttctagagaaagctacatgaagctgcctcggtaaaaacgcttcctggccttcattaaccgttggatcgtctcgaaatgtggtctgcaacttcacaaaacacgcttccatgatctgaccgttgggatctttgagaagatgtctggagtgtgctagaagcctcttaatgaagcttctggaggaagcctcttaatgaagcttctatagaaaactacatgaagctgcctcggtagaaacgctgcccagccttcgttaagtgttggatcctctcgaaatttggttttcaacttcacaagacactttaccatgatttaaccgttgggatctttgagataatatctggagtgtgctagaagctttcgttcccgagagcatctcttatttaagcatttca

SEQ ID NO: 27826 - DNA, 399 bp, Glycine max
gcacgtatcacatgtggtactatgtggcggtcgggcgatggtgcacaacaagctttccacatacacaatgcgcgcataatcccaccattccctgttgcccacctccatctgaactcacgtactcccacgtagcccatatcctagtatttctaaacaccgggaccccatcaatcctttcaagcttccacaacatacaagcaaaacatcattcaaacagcacaagctatcacaggcaagcttaacagagcaaaggcagaaaactctgctcaacacatcaaccactatcacagcttgtgtcacttaaagaccccagtgacaattccttcgatccaattcgttaaccgctggatcgactccaaaattatactggaagtctatagtgtataagcctacattgtg

SEQ ID NO: 27827 - DNA, 393 bp, Glycine max
  unsure at all n locations
agcttgtaggtctgatcagtctgatctccaaatgatttgagtagcaaggaatagctctgaggcttgcaatcaaggcttagttctgagggtgattccattctttaaattcacgtgtatagctataaccaacttattagcaagttcacacagtgtgagagtgagatatgttcatgccaaagtacgaacaggttggtatgtgggaacaaacaagagcaaaagagggtctttggcttcttcctttgtgatatgagagagagagagagagagaaagggtggtaatgttgtttctgaaacacaaggaggatcgagggaggatcgtcttctttntagaggtgagttcaatgggaataaagcaccgttaagagagagatcagacaaagaatgggataaagc

SEQ ID NO: 27828 - DNA, 378 bp, Glycine max
tacaatggttgtatactagcacaaaaatgtgccattttaatcataatgctcattgattttcattttgatttctttgtgtgtgtttatatcctccattacaatgaattgttctactaaagtttttttttttttttttcatttgcaagcaagaatacatatgccttttataatttgctcgattatattttttgtgaccaaaacataggctaccatgcaagggttgcaaggtccccaaccttggagattgctactcttattgaagggacaatgtattttatacagaagacatggagatgtattggagccattcaaatatgccggctatcccatgttgctgagtgctgttactgtggacaaggatgacaacaattttctttc

SEQ ID NO: 27829 - DNA, 397 bp, Glycine max
tatttctaatttaagattaacctcatgcctagcaccccacgttgcctataataaattaaattaataattacaaaatattttttaaatacttaaattaaatattttatttattataagaaataaagatatttaattattaccatgcataaaattagaattaacttttcaaattatatattcagtataagatccacgtcattattgcatattattcaaaagatttatgaatattatggaaattggaaagcttcattgtttttatagtaaggagagctccattcttaacttaagttaggtacattggtcatttgatctttattagcatgatcacttatgtgagtatgcacattccttttattattatattatcgagatgagatattcataatattttatt

SEQ ID NO: 27830 - DNA, 388 bp, Glycine max
  unsure at all n locations
tatctcagaggacactgacctgaccttttttagngttctatgngatattctaattgctcttgtaaattgatatcttcatacctgcaaattaatatccacttataatagagcaatgatggatatataatgaagtactcatacatgtaggtaactgtaatttgaaattatttaaacgttctttatcatatataaagtaattctaatttattttttgtataaatatatatttcaattgttatgttatggtttacttcttaaaaaaaaatattttaataaatatctacgtacattcgtgaatatacatgaatagntgtactaatactagggaatgaccaaggattactatttactacccatttatatacaccgtcacatcttagtaaaaata

SEQ ID NO: 27831 - DNA, 250 bp, Glycine max
agcttgacacttgtttttagcggaccctaaacagtacaaggggccactattgtctgctgacaatgatgcacaacaatcaccaaatggagcaatacttagggaagcacactcagacaatcacaaatgtgtcaagctaactgctaacacaccactttaaaaatcatttgaagcctgaacaattatgcatgaacaaaaaccacccaaagacaacaccttcatcggacattatattaaacaccaaaccactgca

SEQ ID NO: 27832 - DNA, 432 bp, Glycine max
agcaaggtggataattattaatatccatcaaccagaaagggaggctcattccttacagaccagtgccttctccaactcctaatcatcaagatagagaccggaagagtagtcaaataagtaaaatcttatttatttactctttcaagaagttaaaacgcaccagagaaaagtctcactataaaaaaatatacatattgtttatctatcatgtctgagaatcacatatgtcaagatcttactaatttcctataattggtaatcttcaaaacccttacaacccttcaagacatgtataagaggtgagtctctgcaccacatgagtcgtgtaaatctatgcccacatcaatttaaaactaaatatctcaattgcaatgcatgccgaacagcaatatcaccgtacaaacacgtcagatccacagataaagatactag

SEQ ID NO: 27833 - DNA, 279 bp, Glycine max
cccgggatccttacagtcaccagccgcatgcaagctcaaattgttttttatgacacgtcaaagcgaaagcgccaattactgtgctccagtagctacgattgatgaaacgatgtattactgtttgcagagggcatgctcgcttcttaacctgactcttgacttgatgacaaagcagtgcaccctaaagcataacgacatcactaacgctgatgaagaaagttggtacaaagacgtcggcctaatacccatcactgatgcagtctctagagacaactgaca

SEQ ID NO: 27834 - DNA, 291 bp, Glycine max
  unsure at all n locations
gctggtcctaataaggatggttatgatcatagtgatcagcacgctgttctatcagatctgatcttattcagatctcattcggtctagacgctatctcactcggatgttattccatctagagtgtatctgcggcagaggaaactccattcaatcttatctgatgggatacagagcttattttatttcgactatgggcttgcactgaacatagacttgcgagttttggggctgataacctatatggcagcaccaaagctntagtctaggaagtcatatgtgggagagaagaat

SEQ ID NO: 27835 - DNA, 435 bp, Glycine max
  unsure at all n locations
taacactgaagatngagacactcataagagctctcgttcatttttcccattactacacatccattcctagacctgtgatagatgtgggattgtgcatgggctgggagaatgcactgttaatgatgagatacctacagccatgaatgagattaactntgtttggggaagcaactattcttataatcagtaccccaataatttcaatcaacgatagggcttcaataagaatcacagaatgtctaggtcttaacctatgcaaaattaaaggcctacaaaagatgagacaacccactcttcaagaaatcatgcttcaatatatgacccataatgatcaaagaatgaagtaagttgagtcctaattgaccaacatacaatctctcttgtcacaagacaactaagataccttccttataagactgaaccacatcgtaagag

SEQ ID NO: 27836 - DNA, 381 bp, Glycine max
  unsure at all n locations
agcttattttttcttgttggaaggaccaagttaaaaaccttttgaacatttnttccagcttgctgatctatctcctctggtttccttcccttctcttttggtttaatctcagccacccctgactcttcactntcagataaggtagctgaagttaaagaatcaccttttaatttaatttgctgaggagaattgccagccaaacgtctgacaaatcccaacccaagatcattatcagtcacatcagatacagaatctaaagcaggggagtcatcattacttgatacaatgggcacaaaattggttcttctggcagtacgggagctctttngtggcctctgccagtggacaacaggtggggaagatgatcgtgcggatgccaca

SEQ ID NO: 27837 - DNA, 399 bp, Glycine max
  unsure at all n locations
agcttgtccttggtttagacatgattggtacatgatttgggacttgtaggattcaatttgggcaaaattggatgagggaaagagtggttttcgaaatctgcactttatgcaccatcgcccgactgccacctagtataagggctacgtaggagtgtgtgagctcagttggaggtgggcaacaggggatggtgggtttatacgtgatttgccgatgtggaaaacttgttgtgcaccatcgcccgactgccacctagtaccacatgtgatgggtaccccatattcttacaagcttgagatgaggaagtgtagaagggtgaaacttcctgctattattcgttgaccacagagtggtacctggagatatgtcgcggnggtcatgagaccttgnggacgtcaggt

SEQ ID NO: 27838 - DNA, 427 bp, Glycine max
  unsure at all n locations
agcttgttcatcaagtaactaaatncgntntttgtgcaggatgaagtaactaactaactaactaactaacttccactaatatatacagttactacccagaaggaagagatgggccttgattaggctcatttaatctaattaaactaattatacaaaacaaagcccaaattcacagccctattatttaagtgcagaggttctgacttccaagcccaatttggccctcaaaatggcataattggcccaagcttattgtgacaatattaaagatatttttcttagctttctacggattactcacacgcaccattnggagttctttagtgtcttataggccttacacaagacaaatatataaagcaagcacatatatncaataataagccacaattatcaattgagctcaatcattttcctaagaccaaca

SEQ ID NO: 27839 - DNA, 422 bp, Glycine max
agcttcttttttttctacactactctagagttctccaggatgttctagaaaattctacactcttccagaaagctccaaaattttctagaacctctccaattaaggagggatcccaacaaatctccccctcccgacttaattggggggtagtagcaaaccggcaccttggataccttatgtcaatgtgctttggtcatcatgcaaggattgcttctcttcttacatggctcttctccactccaccaattcataggtgttattctcatgcaaggatttcatctcttcttgcatggctattctccactccaccaattcataggtgttattctcatgcaaggattgcatatcttcttgcatggatcttctccaccaccaattcataagtgttattctcatgcaaggatatcatctcttcttgcatg

SEQ ID NO: 27840 - DNA, 418 bp, Glycine max
agcttcctattttattaagttcttcctcaaaactgtcctaagcaaagttcccaaagtcctattaacaacttccgtttgcccatcggtttgtgggtgacaagtggttgaaaataacaatttagtgcccaacttgctccacaaagtcctccaaaaatggcttatgaacttagagtccctatcactaacaatgctccttggcaaaccatggagtctcacaatctccttgaaaaacaaatcagccacatgggaagcatcatcaatttttttacatggaataaaatgagccatcttagataacctatcaacaaccacaaaaatggaatctctaccattgcttgttgttggcagccccaaaacaaaatccatggataaatcattccaaggatactccggaattgcaatggatatacaatcatga

SEQ ID NO: 27841 - DNA, 434 bp, Glycine max
  unsure at all n locations
agcttgcttttcattcttccnctttntgatgatgacaacttctgaaatcaagaaacacacacacacacacacacactttttcctagtcgatcactcacataaatttccattctgcccctttgtttttgaatttatgcttctcttaaaattcagttgattactcatgtgagttcttgatttaatctctatttctctccccctttggcatcaacaaagagccaaagtgtgtaacaaatttgaagcaagcaaatacaactaagcatccacacaacattcatganaaatataaaccaaatcatgaagcacgaaccatgaagcaagaacaatgaatagatcaaatataaaatccacatagtcaaataacataattaatatttgttcaaacataccatgcaaataaagagatagtaaattgttcanatatcataataata

SEQ ID NO: 27842 - DNA, 431 bp, Glycine max
  unsure at all n locations
agctttagagatgcntcatgaagctgcctcggtaaaaatgctgcccagcctttgttaaccgttggatcttctcgaaatttggtttgcaactttaaaagacactttccatgatctgaccgttgggatcttggaaaagatgtctggagtgtgctagaagcctcttaatgaagcttctggaggaagcctcctaatgaagcttctagagaaagctacatgaagctacctcggtaaaaatgctgcccatccttcgttaaccgctggatcttctcgaaatttgttctgcaacttcacaagacaattgtccatgatctgaccgttgggatcgttgagaagatctctggagtgtgctagaagcttctgttcccgagagcantttatttttaagcacttcagcctttgcttttgtgtagcttagganaaacgtcatttct

SEQ ID NO: 27843 - DNA, 356 bp, Glycine max
  unsure at all n locations
agcttanaactccttgttcattactaaacaagctaaaattaatcacaatcacaagcaaggtatcctaattacatgcaagagataagaatganaaatagaaaagggaaagaatagctgggttgcctcccagtaagcgctcttttaacgtcactagctngatgcgtcatcttgttatctaagatccaacaaagttcctacttcaaggactntcttctgaggtctcttttcctccatcacatgcactntaagacagacantttggctangtggatctttgtcctcctggaacanatcanagctgatttnttaatcttctatgcccatctgcagtnatttctttcccatgtccaccacgt

SEQ ID NO: 27844 - DNA, 435 bp, Glycine max
  unsure at all n locations
agcttcaaagtctttatctatataaccataaaccaaaatctaccataacatgtttttaacatatcaatgtaaccactcatcatataatccactctagttntatttaaaatggaattcaactaaaaatatatatttctagaaaggaataaaaagttatagcaaaaatccaccataccaaaaggagactagggtagcagtaattctactactacatcataagttcatagcaaatagcaatattttaatgaaggggaatggtatttcacaccaacataggtcaatcctaatgatgaggcgaaacaatgcattanggaagactcanaagtatctcagattccatgaaatctggcatttaacattntgccattaaatataagaacaaatgtcacaatgcatttgaaattaaaactganaggaaaataaaataaactaaag

SEQ ID NO: 27845 - DNA, 414 bp, Glycine max
  unsure at all n locations
agcttatgttttccatcncttgaaactccctcanataaatctcatctgatgaccctccaatctgctccagtcgcctctgtagaacagaaacctgcttgtcaaaatttctgttcttcctggcccctacatccttgactttcgacctcctgtgcaatctctgaagtatcagtgtcaactcatgaatctcctcatccataaccatatcaacattctttccttcacaaatcttgattcttccctgcattccgcatcgcaagctaaagatcagaacgtccaaatcataagataagacaactaaaagccaaaccactgataactatagttatgatgcacaaaactcacanttcattcaacagaaagcttcagcttcaacacatgttgctatcacagtgtgttagtatgtttgacaactaa

SEQ ID NO: 27846 - DNA, 433 bp, Glycine max
ctctccagatggactcaccacgaaggccctcctgttcgctgcctatgagcctattgaaccacgtgccttgtatgtgagaacaattacaggccttacgggaaggaccatgaaccacgctaacactcatggaaatgagaacctgcggaattgtctcctgagtgaccggggcatagatggcgggcttagcttcttggctaaacatacgaacattacgaatatgaatgacaacctcaaaggagttgtggggaaggcaaaagagattctacaagcaagattaagcctctgccttcaagatgtttgcatccgagcaccatgtgccatcatcgagctttagattgtgaataatgttacgatgcctacacacaatagtctgagtgtgaaaatactagtgttgcggtagcccgatctgatccagttcttacacgatttctcg

SEQ ID NO: 27847 - DNA, 426 bp, Glycine max
  unsure at all n locations
agcttcttgncttantaaatgaatngaatacacatcggcatgagagatgtagaaattgtgaaagtgtgacattgtatcgttaaaggtggcttaaataaattaattagtatcgcctaaatcagaagatgcatctattttttaatatgattattaaatgaattgatgattgttatgagatactctattacgtgaatcctaaaatttatgcaatatgcatgatacttgaatattacattctatatatatatgatggccaatgattatgctttgattgctgagttggatactattttggtatgcttattgtttgtaagttgtgtgttgcaggtgcaatttgtgtctatgatgatctcatgcctaatgtatgtgcggaacacgtggtcacatgtctttcatagactccatggatatatgaatctggatgtg

SEQ ID NO: 27848 - DNA, 336 bp, Glycine max
  unsure at all n locations
taaaataacttaatgccatttacctacggaattaagaaaaacttaatggctgagtgtaactgaaatagtggcatccanaagtcacccacaacagtcaacaagtcaatcaccatttggtcttccataatgctgatgcctangttgccaattgggcccttattacaacttgaactaaacctaactaaagcccttttaattgattaacccaaaacatatgtttggtcaaccaactttacactgattgggccattatctagacaaactaaacactctaaaaattgagacaaagtggtgtcatatagtcctcctccatttgggccatgatacaactcacaa

SEQ ID NO: 27849 - DNA, 428 bp, Glycine max
  unsure at all n locations
agcttgtcactaattagtcactaaanaaggatttgaaagtttattatctcagttttccttaccaagtaaatggagcattattaaggtccaacgccttaaaattatcacctttcaagtaaaaagaatcgcttggttcactcttaaaaaagaactacgtaagtctaatttcctcttcgatggagggtacgtaggagcaaaagcccagcttttatcgacctcaaaatataaaaagatataaaaggtaagataacacaatttcacaattctaaaanataggctgttgtcctttgagacaaacgcaagaggtgctaataccttcctcatacataaatacaactcctgaactttgaattttcattntgaccggtttccttcgatttttctgacgttntccacacataaacgttggtgacgactccgcgcatctt

SEQ ID NO: 27850 - DNA, 429 bp, Glycine max
  unsure at all n locations
agcttattaatgctaagcactaacagtagttntgtcatagaagtcatgtctagtcataaaacttgtcacataagatttcttatcttgtgctgaattttatttttttgtttctttgtctaactcatttgttcatgagtgtatgaaattcttttagcctattatttgatttgagtcaaatctttcatgttaattagtccttaacatgttcatgcaaaattcttagagagtctttgattgtgaaccttttcttgaacttttaggtttccttatgattgtgtctattggtgaatttgagtttggtgattgaattgctggctgaaatgttgatcctaagtgaatattgaacttctaaaactgtggtaaacaatcctagtgagttcaacatacataggaaggttcanagtaagcccaatgcaatcaatataccat

SEQ ID NO: 27851 - DNA, 419 bp, Glycine max
  unsure at all n locations
agcttgctcttacaacaacttctactcttcgagtaacagtagggaatggcgaggagctgcagtgcaaccaagtttgcccggaagttgcggtacacattcaggcacacaccttcttggttgatttccatattcttccaatttgcggagctgacgtagtgctagaagtacagtggctaaagtcactgggacctgttctaacagactacgcaactctcaccatgaaattcatttataacgataaattgattaagctcaagggtgatcgtgatgcanatattgatcagatatcaccatcacagctgcgacgccttatgaacacaggtaacactagtacctattttcacattcagcttgactctcatcatcccaaacccttaccattgactcactcgataccggcaattcaaaccttactcacc

SEQ ID NO: 27852 - DNA, 423 bp, Glycine max
  unsure at all n locations
agcttcctcatgatgcatagttatttcaagtttcctgaanatatcaaggaatctcgccagatagcggtccttgtctttcttggaaggtaccatgggatatggtacttccgtatcctcattcgaagctttttctttcttcttctctcttgctttctcacttctactcttttctttcccttctttatttttttcaactttttatttttcttcattttctttttctacctctatttctttttgttggtcatttatttctttctcctcgacaattattggtttttcactctcctgacttgtcacatctattacctcctctntctttntctcaatgccatcctttacaacaatttgtttctccaaagccaccttatcctcatcctcaactaccaaacacttcttgtttcttgtcatcacaacattaca

SEQ ID NO: 27853 - DNA, 435 bp, Glycine max
  unsure at all n locations
agcttggatgttttgttttattttggaacaatggttaaagaaaaagaatggaaagttcttattacaaaatgtatcatttgaagtttcaaatgcatttctattgtgatattggataaaaaaacaactaggtgttttatccaatgcaatacataggataaatttttactttataaaaataaatttataataaataaatactttttaatatataaagtatattataattaaaatttataataaataaatctttttttgaactcaatagataagtatactttaaaatataaatcatattntaatatcaagttagtcatcttgatgataaatcaccttagtatatatcttatatctggaagaatggacnataatgttagacagatctataataatgtactcatcatgttcaataaactaaactagatctcttgataatat

SEQ ID NO: 27854 - DNA, 432 bp, Glycine max
  unsure at all n locations
agcttgcgtnngtaagggtgaatcgtgaaagtgggggtagtagatttccactaacatactgatagggttaaaagagctatggaatctgtgattagaatcccaacagcttattcgattcccactagggtcccccaaaaaatagaaatttggaattttatgtgtaaggatgattaattgggggattggtttatttcatctgaaattctgataagattatttagttaaacttaaatctaactcgattattgttaattctatggttaaaaatttaaacctatactgcaacttattatgtttgcatgactgtatgatgatattgtttatctatctcacattctcaatatgatatgattaacagatgattttgtgttttcttaatttctaattataagatatttctaattaatttaccttcctaacaaaatataacta

SEQ ID NO: 27855 - DNA, 280 bp, Glycine max
  unsure at all n locations
agctagctcgttgatattacatggcttangcnggagactcaagggggagacaccgnatggagccagcgttgtgtcgcctagatagagtaagtgtagcatatcagacataccttccagctacacgactaaatgagatactaataacatatctttcaagaccctgagagaaaaaaagcacccactgtcagagagcttgatagtattaactgagatgaattagaaaagcacaagctcatacagatatagataaagaaagagtgctctgtgccaataagcatgg

SEQ ID NO: 27856 - DNA, 429 bp, Glycine max
agcttgaagtgtttagtgtggaagagtcagtcttcctacttttattcgttgaccacagggtggtacctggagatatgttgcgggggtcaggagaccttggggacgtcaggtggggtgctattgccaaaaaccaagcttgatcaatcccgacccaacccgggcatagtccgtcagtgagaacctgtgacgtacctaaagaggcgagctcttggcagtcaaccgataaaaaaacaaagaccccaaagcaaggaggcttgtgtggtggctggccagctatggatcttgagtaatatttggaatatgacctctggcaatcgattaccaagggtgtgtaatcgattacaaggcttataaagtctcgaatcgatcaaacagttaatgaaccgaaacgaacaggatgttactgggtatttgagtaaggaaagttgt

SEQ ID NO: 27857 - DNA, 424 bp, Glycine max
  unsure at all n locations
agcttgttgatgatgctntaatggaggaaaagaaagagacaaggtggggagcacgaaattgaaggaataaaagagggagagaagttgaactttgaagtgtgtctcataagactttcattcatcaaagttacaacaagtgttactcatgcttctatttattgattaggtagcttccttgagaagctttcttgagaaaacatccttgagaagcttctttgagaagacttccttgagaagctagagcttagctacacacacccctctaataactaagcacacctccttgagaagattcctaaagaagctagagcttagctacacacacctctctaatagctaagctcacctccttgagatgagaatctagagcttagctacacccnccctataatagccaagctcacccncattccananatacatg

SEQ ID NO: 27858 - DNA, 427 bp, Glycine max
  unsure at all n locations
tctcttgctcgtcagcatcaagtgaccggcgtgtgtattatataacttggccagtcgaacgtgacaggcatacaagagttgctccatcctattaacgtcgtgaactttgcacagcattgcgttctcatcattggtgctgggagagagctcctatcttacccaatgtacataagaggacagaggataatgcctgaaacgctttctatctatatgtgactacacatggatatcttcactatggtatgtcgttacgaaccaagtatgatcccgacgaataacatcagtgttggatccactgtgacacatcaaaagtcgctgctctcatagagtgctgtcaggcacaacgaaaggctcggcctttcctcaatccatactggcgaccattaagattaccataatctgaggactactcttaacgactaacttn

SEQ ID NO: 27859 - DNA, 408 bp, Glycine max
  unsure at all n locations
agcttgttcctcttatctaacttatgcaagtcagccttggtggttacttcgagtttgtcatgcttctatctggcttgtcagacttcattccaaaatctggacatttcttccatctagatgtagcccttggctcgctcgcgcagtttttccatgctactgagtggtttcttgcacagattgtctgtgaacttgtcaaggcatagtgcgaggagcatggaatgtaatgctacctcggcgttgagattttggatctggacggttgtgtgcccaaatctgtccatgaaatttctgctcattgtttacttgtcagagactggccaaggcggtcgaggtcatatggtgagacctactggtggtgtactacgcactanatcatntgacgagggtgtcacagctatctatggacct

SEQ ID NO: 27860 - DNA, 397 bp, Glycine max
  unsure at all n locations
agctntattgatgattataangtcccaaagctgatggaaacccgaaccttgtgctatcgagaactgctcatctgtaataaggttgtatgcaaatctggtagagaagatcccattacgttcagctccccacagtcacgtgtgcttcagattgccacttattctgatgactgcgatatgatcaataaaaattaaagctacccccatctcactgtcgaacaaatgtcatctccaagagaaagtccattcccacccattttcagaaaaataacccatgtcttacacaatgtgtaatctttgggaagagattaggtataattatggagattgctctntaagatgtaacccgtcgtcaacccaagggtcttaccaaagaagaatatggtctcccctacccacc

SEQ ID NO: 27861 - DNA, 413 bp, Glycine max
  unsure at all n locations
agctttgttctctaatcctgactcaccataaaccttgacccagggtgagaatgtcaatccttaccctcggaagcaaaaaaagaatagaggggaaatttccaatcaaagaaaaagagaaggaaaatttccaatgaaagcaaaaaaagaaaagaaggaaaattccccaatcaaagagtgggagaaagcaaaaaaagaaaagaaggaaaattccccaatcaaagagtgggagaaagcaaaaagaaaagaaaggaaaattcccaatcaaagaatgagagaaagtaaaaaaggaagaagaagaaggaaagaaagctcctgatcagggatcgaagganaaacagaagaaatgtgcagagaggtctttggaccggacaatatatgaacaatacagaattgtcaccaaatgaacaaaaaag

SEQ ID NO: 27862 - DNA, 430 bp, Glycine max
agctttgtttgtaagagagagaccgatcacgagcacatagcatggttttaaaagaagagttagccgtttgctcaaggtccaaaagaaacttgtcacagtgtttatgcgagacagagaccaacatgttagctatcatcaccaagtaccaagaagaactaagtctagccaatgcccacgagcatagggtggcggacgagtatgcccaagtgtacgcggaaaaggaggctagaggaagggtgatcgactcgttacaccaagaggcaaccatgtggatggaccgattttctcttaccttgaatgggagtcaagaacttccccgattgctagccaaggccaaagcaatggcggacacctacttcgcccccgaggagatccacggactcctcgactattgtcagaatatgatagatttaatggcccatataattag

SEQ ID NO: 27863 - DNA, 400 bp, Glycine max
agcttgaattggacctcagtgtgaaaagttatgaccatttgaatttctcgggagcttccgttgttcattttcgagcgtctgtatatgtgatgcgcctgaatcggacatccgagtgaaaagttatgaccatttgaatttctcgagagctttcgatgtttaattttgagcgtctcgatataatataagcctgaatcggacatcagtgtgaaaacttatgaccattttaacttctggagagcttccgttgttcattttttagcgtctctatatgtgatgcgcatgagttggacatccgagttaaaagttatgaccatttgaatttctcaagagctatgcgtgttcaatttcgagcgcctcgatatattataagcttgaatcggacctgagtgtgaaaagtatg

SEQ ID NO: 27864 - DNA, 180 bp, Glycine max
agcttatgactatttttattttcacgagagcctacgacgtgcacggtcgagcgtctcgatatacgacgttccggaggcaaaccgtcatgtgataacgtacgaccatgtgaatgcctacagagcacacggtgctcactatcgagcacgacaacagacgaggagccggaagcggacatccga

SEQ ID NO: 27865 - DNA, 422 bp, Glycine max
  unsure at all n locations
agcttgacatgttctgtttcaagtgttgctactggtgtagggacttcaatttgcttgccagacctcaaggtgatggcactcacatttttcagattctgcaccgtttgtgaaggcaatttgtcagaatattgggactgagcttggttcaactgagtagccttctgccgtatctgatttgtcggactctgaatggaggctcttgtctcttgctgaaatttcatattctggatggtcatttgcctcactaactcctctatggaaggttgagaaggggcctcagatgcttgttgtctttgttgttgctactgcattggaggaggaacatatggccttcttggaccaacaacattctggaagggagggataggctcgtgntctactgatgttgttgtggaggattttcccatctcacatttggatga

SEQ ID NO: 27866 - DNA, 393 bp, Glycine max
  unsure at all n locations
agcttaacagtgctctcttggaatgatggtttcggtgagttcgaaccaacatgggaagaatctggagggggcgtttggcgttgcaacaaagttgtcaatgcttctgtgatgcgattgaacttggacacctttgccagttgcatatggtgcatcttttcttgtagattgatatatttttttctcaataatgtttgcatttttcttgacctcaacttgtagttctcttaggcgtgtattctctgccatgatgtgacaagagcaccaatgtacgatatgtaatacaacagaggaaaaaatggaaaaatgattgtacgttnttattgctatggcaacgcaatatcaactctcaactagtgtagctgagaagaatagtacaattcctatttgaaaact

SEQ ID NO: 27867 - DNA, 428 bp, Glycine max
agcttctcatgaatctacctagtctataaatagaagcatgtgtaacacttgttgcaactttgatgaatgagagtcttgtgagacacaactcaaagttcaacttctctccctttttcttccttcaatttcgtgctcccgccccccgccctatctctttctctccctctgtcttttcctccatggaagcatcctctccaagattcttatccaaggctcatcttggtggtgaagctccttcttatcatggctgattccttagtggatggcgcctcctctcacctcttctcctttgtcttccgctgcatctccatggtgaaatatcaccattgaaggacctcattgaagctcaaagatccagcctccatagaagctccacaagcaagcttccatcaatttgtgatgaggaactcagacctgacatagtcttg

SEQ ID NO: 27868 - DNA, 427 bp, Glycine max
  unsure at all n locations
agctntctcttttgtgcaactatctcatcctctttttcaggtgtagaatgaagcttgacaggttcaggtgcaggtgctgctactgatggaggcacttcaaattgtttgtcggacctcaagatgatggcactcacatttttcggattctgcacagtttgtgaaggcaatttgtcagaattttgggactgagcttggttcaactgagtatccatctgccccatctgattntttagactctgaataaagactctggtctcttgctgaaattgcatattttggatggtcatttgcctcactacacttctaaggaaagttgaggaggggccttagttgcttggtgtctttgttggtgttgctattggtgctgcattggaggaggaacatatggcttgctntgaccagcaacattctgganaggagggacatg

SEQ ID NO: 27869 - DNA, 429 bp, Glycine max
  unsure at all n locations
agcttgcatgttttacattctccccctttctcaagcaaattcttaattcttcttgacatcatcaaaatcttcatgatttacattctccccctttttgatgatgacaaccacctgtaggttaggagcaacaacaaagaaaatatctatttgcatatagtttactcccccttggttttacaatgattgcttatatgagacaattgaagatttcatatttttcatatataaaaagttgtctcataaaacaatagataatttttcttactattttatcttttatctttctctccccctttgtcaacatcaaaaacaaatcatgaatagagaggagaataccacttgttggaatgtatgagaataagtgataccaaaaggcattanaacaatcattcaatattaatcaagcaaaaacaagtacaataacacatc

SEQ ID NO: 27870 - DNA, 215 bp, Glycine max
agcttgatgttttttctcaagtgacggagtagttggatgagggtttggttcgttagagcttaactccttgtgctctgatgccgcccacgataggtattatgaggcacttaatgcctatgatacgtggtatgatgaatgtgtcgagtggtgcaaccacttattgtcacatcacccatgcattctacatcatcatgactgacatacgtagggactga

SEQ ID NO: 27871 - DNA, 401 bp, Glycine max
  unsure at all n locations
agcttgatgtgtatgtgagttatgttcgtcagtgcttcgaccttccacctccatcctcatagatttatttattattatattttaatcttaagccttgtatttggctatgtttttatgacattattctctgaacatttgggattgtttttagtattttatacttagttaattacgactgaacatggngattatatttattttctcttagatgtatatgattatgtgttagttattttgatgatatatgtatagtttcatgtacttacatttggtattatgctttgtgtattttttaaaactatttatgtatgattntattttacgcactttggccttttgatgttgccaaagggggagaganaatgggtattttagaaatcaagatattatatnttcaaagc

SEQ ID NO: 27872 - DNA, 420 bp, Glycine max
  unsure at all n locations
agctttaatatttgaattaaaacgttcagaaattgctggtaatcgattactatatatgtgtaatcgattacacagtgcaaactttgaattcaaattttaatagctgttgtaaatcagttttggccactggtaatcgattacatcctctggtaatcgattaccaaagagtaaatttgttgaaaaagactttntaacttaaaattcttggccaaaccttttgctacttcaattggaattcccttcctatttaatataccctttctaagactctagagactgtcttgatcatccatcttcaatatcttgaatttctttgtcttgaataaagctttgagactgtgagacgcatgtgaaactttggcatcatcaaaacattcagcttgatcctttgtctacaatctcccncttctttatgatgac

SEQ ID NO: 27873 - DNA, 414 bp, Glycine max
  unsure at all n locations
agctttcatctatagtcttcacaaataaccatcatgaagcagaaaactaacaaaactacccatcatatctcccaaaaccccatacccacgaaatttaagagagaaagaagtccacccaaacctgaaatttcgaagtcccactcgtagccacgcacttcacgaccccgaaaatgccctcctttcgcgatttggggcagaaatgagcaccaaaggttggagctttgttggggtttcaatggagaatgagggagaagaaaatggcaacgtgagggagagagagagctgtctgaaaaaaaaagtgtgggggctgagtgaagagagagaaaagctttttggttnttaaataaaagggttttctctttttctattattntatttgagcaatgccacatgtctccatttgagtggagcaag

SEQ ID NO: 27874 - DNA, 173 bp, Glycine max
ctacgctgggcactcatacaatgactatggcatcaattacaccacgcaactgttgagagctggtagccatctctgtagttaaacatctggggccactgggaatcaagtccatactgtctccaccaatgaccacatatatcatacgtcgatccatactactgagctcttcataa

SEQ ID NO: 27875 - DNA, 559 bp, Glycine max
  unsure at all n locations
ctcacacacatcacacgcgcaccacgactaaccagaataataangaggaangaaaggacgataaaataaatnnaaagcgcgcggggnctgagacgctgcattgcacgacacatagaatactnaagcttcacagagaagcactacgtgaaagcgagacaaggaggctgtttgatgccggccccggaagagcgcgtgcagacaaatgcaaaccggagaacatacatcaaaagcgggcggaaggagaacaacgacagatgctgatgacatgacagaaggtaaccgccaaaagtcgaccggagcgagagagacgctgcagtaccgacaacagagacacccgagagtcaacagaaccaatttgcgagcaagcaagaacaacaaacgagcgaaacagaatgatgctgccaagaacccgagacccaacgggacaagccctttctgacgaacgcaaacaccactaggcaaccaaaaccagcggagacacccactgaaacacccgaatgagacgacccttgaaacggaacacaaaagatacacaaacgagcacacaccggaaaagacg

SEQ ID NO: 27876 - DNA, 368 bp, Glycine max
agccttgatgtgactgatatacaccacgtagagagtcgagggcatgatattgggagacaagttgatcgcttgaaaaaaattcagaatgtgtgtgatcgaacaattgggcaagaccgaagaaaacatgtggaccatcattgaccaatacaaagagaagctatgtctagcggcatcccatgaacaacggctaaaggatgaatatgcagtggtatcaatcctgcgagcagaaatggaagcaagagatagagtaattgattcattacacagagaagcattgatgtagatggatatgttcgctttcaccttgaatggtagtcaacatcttctgagattgctagctaaatccaaggcaatgatggatgtatact

SEQ ID NO: 27877 - DNA, 551 bp, Glycine max
  unsure at all n locations
agcacgtaaaccacgaaagccacgtggagacggcaaaagacagaacagaaagaattnannnnnannnaaggaacagggaactcgagacccngcancnacgnganananannaaacnccagggggggnggcanaaggacaaccacgggccnacaaaatattcgtggaccccacacagggaccccaggagcggggcaagccctcaacgccacccccggaacaggagcacgaacgcaataactgatagacgacagcgaaccgaccaaaaagggaacacatgcgaaccgcgccacccaccggcaggaagacaaggaacaacaaagccacacacgaacgacaaggcaaaagcaacgactagcactaaccgacagcaacaggagaaccctaacaacaacagcaagctaacagccacaaacaacaagccaagaacgaccgggacaggcaaaaacaacccctacgaacaagacccgcaggcacacgcaaccctgaaaaaaccagagccagtgaaccgcaacacaaccaaacacactggaaagacgaacacacggcgggn

SEQ ID NO: 27878 - DNA, 264 bp, Glycine max
agccttagtttgatttacaagctcgcctgggcgagcaaggttacttctagaggaagcaagcagctcgcttgggcaagctattgtgcaacctccacccttcatttcatataaataagcatgagggggctgatgagacaggtccaatatcatatattacgaggtattcactgaaattaatgagaacaaggagacagaagaacacaaatcaaggccgaggcatttccgtaacgcatccttaacatttccgagatcgattctgaggtc

SEQ ID NO: 27879 - DNA, 419 bp, Glycine max
  unsure at all n locations
agcttataagtactaaattgcctcaatcatttccaaatatgcatgtgaattaggaagcatcaacaagaatcaagccaaggctattgtgcaagcaatcaatggggcaaaacacaccaaatgattatgatgatggatggctcanattctcacaaaggtaaactcatcactttcaaattgagctttcaaaactatcatgacatgtagaggagaatcaaggatttcaagtcacaaaatgtcaagaacttttattttcaaaacaattacccatttcttgaacatatcctataattcaaagaaaaacatgcaaagtcgtacatgcacacaaaattgacccaaaatattaaactaataatccgacgaaactaacaacattaacaaattaacacaactaacaaattaacanaaccaacaaaactagc

SEQ ID NO: 27880 - DNA, 396 bp, Glycine max
  unsure at all n locations
agctttgtanattgtcaagcaccattgctaattccgcgtgacatggcatgcagaggggtctcttataattgagttgtggtctcaaatcacaacattacctatgatcatttaaactcaagacagaacaagaagactacatgcatggaagataactttactcgcttgatggaaaactttacctatgatcctatggaaatctcttgatgtctacggattggttgaggcatgcatgagccactgcaattgaacgaaacactgagattatttgtcgatccagcctatacaataatcttatacgtgaatacttaagcttctatatatcattgacaccttatctgatactgttggattgtctttctattttaccactcttaatcaagacaagaaaaataaact

SEQ ID NO: 27881 - DNA, 306 bp, Glycine max
agcttgttctttttatagcctgcctgcgtccctacaagagctgaccttcggaagcttcactgcctgcgtaactcccgcaccccgacgcacccagccgccgtcgcgacaccaccccttacccgcagttcgcacatgctcgcttcgtgacgagccccggcaacgcacgaacggcggagacgagctccgacaacgcacgaacaagacgaatatgcgcgaatgaagaacacgaataagacgcgggtcagacctgagctttgtattgtattttgctctgagtttcctgctatttgacaccctatttctctg

SEQ ID NO: 27882 - DNA, 416 bp, Glycine max
agcttctctctttaattttctataaatagggggagaagtgaagttgaaaagggttcagccccttatgcacttctctctctttcgaatctgcttacgaaaattgtttccgtgaagaaaatccaagccgaggcgcttccgtaacgttttcgtaacgtttccgtgagtgatttcacgaaggtttttgaccgttcttcgacgttcttcattcgttcttcaccgttcttcagtcttcaacgggtaagtacctcaaaccaagcttttcgattcattctatgtacccgtggaggtccacatgaggtttcatcgttatttattctcgtctcatttacttattatacccccttttgacgtgcttaagccatcttatttaagtcatttctcgcttaacctaacaatactataaatctccaccgatc

SEQ ID NO: 27883 - DNA, 408 bp, Glycine max
  unsure at all n locations
agcattactgtatcgtangcttggtacaattgtggcatcccaggaagttagtgcttagtcttgtcttgttccttatgcattactttgaatgagactgattatagacttgttataactaaaatggtcattaatgaatatgattccccacttacagaacttcatgaataaattaacatgcactagatatcctgaattgtttgagaactactgttctaaaactttgcagtgagaagcatcatgttactcccaaagagagctgcataatggaagatttatctatattcaagttattacttttcaactntccattacctttatagtgatgatgggatggcaactacagcctcatgatactgtagatgcaagctcataaagagtcaataatccattccattctcatgtttttgt

SEQ ID NO: 27884 - DNA, 432 bp, Glycine max
  unsure at all n locations
agcttagctgtattcagatcgaatngaagttagcttagctcaacctcggccagcttagtggaccaaatcaacctcagatgcaagggttgggcgctaagcgcttgagactcgcaacttagcgcatgaacagagatacacttagcgcgaggcttgcgcttagcgaaaggaatattttttataaaaaaaacttttctaagttatttttcagtcctttttccaagaaattgaaacccttatgctaaacattcaaagattggctgatatactcctatgtacagattatatagcaagttccaaatgatttaaatgcatganaaaaaaaacaaanaaaatagaaattaaaagctgggttgcctcccaggaagcgcttctttaacgtcattagcttgacgctnttacctcactgggtgatcttatgtcttggttcttact

SEQ ID NO: 27885 - DNA, 404 bp, Glycine max
  unsure at all n locations
agcttcacgatgcattaccattggtagcagtatcaagcttcctttgtgcatctttgtttcatttttttcgcattcctttcatcccattcaagtaagtgccctctccatctaatttttaccttcgcctgtgatgattggtgctttgttggatgctttctttgcaatgtttgtgagatgagttgtgtgcaaatccatgatcaaaatgcttggattggtggctgtactggatggctctaggcctatgtttggttcttttacaaatttgcatgtcatgtcgctccttatccttcatttatacatgttttaacatgtgcacaccaactatntgatgaaatgtcacaatggctattctatgttatattttaaaacttaagtgggtaatgatctctacacatgttcatgtt

SEQ ID NO: 27886 - DNA, 434 bp, Glycine max
  unsure at all n locations
agcttgagtatgtctctctgagagagaagataaatagcttgggaagtctctatcctcaagcttgagtgagccaccgtagagtgagtcgatccaagagacaagaatgaatccacacacacacacacacacacacacacacacacatatatttaaatttagacaaataatttcaatttccatagagaaatgacatatgacaatcgtttaatgtaaacattaagtacaatttaatcatccatttatctagttattcatatttgtttggctaaattatctatatatataaagaaaggacaagagatggagtagtaagatatataaagtgtataatataaatgttgctaaggattgtaaatgtgtgatatccatttcttaaccacgataggggtgaatgcaactagctttgtccagagagtaactntaacaactctact

SEQ ID NO: 27887 - DNA, 457 bp, Glycine max
  unsure at all n locations
actcgtccgggatcttaagtcaccgctgctgcagctatccatgctttttggccgtcgttgcattggatattttctcaaatgtatcttcatccaccgattgataaatgagaaagagagctttcttgtctctctttcttgactccttcaacgtctcatttacaccttggcttagcgaggcttcatcttgctcctcgaagccattctctacgatatcccacacatcttgagctcctagtagcgccttcatcttgatactccaattatcatagttgttctttgagagcatcgacatttggaaaggaaaacctccattcgccatcttttgaggatcttgaagctctgataccactttgctggatataaggctctttatgtttacgacaaatgtttacgaatattggagactntgaatagacatttgataggaacgagaattctttatggagaagagaacttt

SEQ ID NO: 27888 - DNA, 426 bp, Glycine max
agcttcttttcatgtttaataatattatcttcatgacactggcccatggatttggccattggctacccagttgcttttgcttcatgtaaaaatcattttcacattaaatgacaaggcctctttcatttagtttaattcttgatgggagagtttttgataatgattgtgttcttttagtggtgttctccaatcagatttaatgtctcagcttcaaaacttatgctaatatttaatgtaaatgtttgttttaaggattattaaggtgaaactccaaaattctatttagagagatagcacgaaaacacttaagacactgtatgtatacaagttatgtccttttggtaactcaagataaaatatggaatcattcatttcaacatgtctgctactgctaatatacttatttatatcatattaactgcacat

SEQ ID NO: 27889 - DNA, 434 bp, Glycine max
  unsure at all n locations
gtagatatttatagctagcttttgcaaattgggaatctagctacaaagccaaagaaaatgtattaaacagtatttaagcaagtgacttaaaaaataaaagtttaaaagttgtataagatttgtttgttactcggtgaaacagttttcctcattaatatggcaatatcacttcccaaacatatcatccacaattttaatattgtgcaacttcaacatgatcttctgctccacctagatatcccaccaacttattgatgcatgtacataattcccttataacctcactatcaaattgcatatgaggattgtcattgaactctgcattcgaaaagtggacaaccacatgtaatgggtgatgaagttggatattccatcttcgttcaatgatttcaaacacacaagtgtgtgtgcttattggattagtcaacatatan

SEQ ID NO: 27890 - DNA, 265 bp, Glycine max
agcttgtatttcttttatatacatcctttaccaccttggggatccgtgactggatctaattgaacctcatgaccgcttggaactcctaagcatcaaaccttgcaccaacaaatgttggaataccatcagacctatgcacgattatcatgagaggataggaatcttctccaccatgtgctatgtcatcaacaagtcgatcaccctatttcacccaagaaccatcatgctgtttgttatatccaatggatgccatgacaacagcgcc

SEQ ID NO: 27891 - DNA, 388 bp, Glycine max
  unsure at all n locations
agcgtgtttatttttatatgtagaggcattacctattagggtactagtttgaggagcctagtgatcatgagagcctgaatactttgttggtcagaaagaagttaacatgcctcacacgagatggtttgagtgtactgaggattatgatcgtgaactaagctaccatcccttcaatgccattgtagcggctaaccccttaagtaagagatccctacatatatatgccttgatggttagagaattggatctcctatagcagtttagagactntatccatgtgtgtgatgtacccctaacaatgcgagactaagagctctgaagattactactgagtagttaggagatatcagatacggccaataagctgatccttttctgaagactaaca

SEQ ID NO: 27892 - DNA, 291 bp, Glycine max
  unsure at all n locations
agcttgatnngtgagtagattntagccttagtttcacttgggatattagtcacttcattcatggaaacttacaaagacaaacgcccgatcgaactgtttgatcattttattcgaagatattaggattattttattatgatggctgccctatttttatataaccgtggctacagcgtgaatgatcggctagattttactataagagtgattaaacgagattgctacgcagatgattggttgacattcatgttatcatttatcaggagagataaccgcttaaacgatcagtta

SEQ ID NO: 27893 - DNA, 409 bp, Glycine max
  unsure at all n locations
gcttcttcataattacataaaaacataaaaaaaggggaaaatacataatttcgaagtcatatttgcacacttgattgaatgttgttgtcccttgtgacgaacgtgtggggtgctaataccttccccgtgcgtaaaaacaactcccgaacctttcacacttaaagttcgtagaccacacctttccggattttccgacgttttcctcgaataaatgttggtggcgactccatgcattttcctttcttggaagacgcacccgtgagtctcgcgtcgccctcccgctgaaggctatgttgcgacagagaggaagagaagagcacgacattntgtgctctaaaagtgctctgaaatctgaaggttaattttcagatgatcaaatcttcaaaacaatgcacacacatgacatcta

SEQ ID NO: 27894 - DNA, 422 bp, Glycine max
  unsure at all n locations
agcttatattttttattcgttctttgagtgttgttgaatcgttgtattcattcaaacttttgtttgtgaaagtcaagagtgacttagtgttaaataatacttgggtgttcttaaatttaggaagagttcaagggtgtgtcagaagtgactagaagaatacttgtatagccaggagttgcaggacataatagttattttgtaataaaagttttgatcagtaaaatcctttacaatttgagtaaaggagaactagacgtatctctatttgaatgaaccagtataaatcaaatatttttaggtctcttttaagtagttctattaagtattctcttagcttactttgtcactattttctcatcaagtgtttatctaaaaacctttgtgacaatattgccttatatttattggaanatccacctata

SEQ ID NO: 27895 - DNA, 423 bp, Glycine max
  unsure at all n locations
agcttatgtttttaatcagattttttgtaatgatatcctatcaaatttccttcaaccatttctgtcaagttggacagacacaactacctactggaagccctattttgttgctgactagagggagtaaatttgatgatggcttcaatctcgggacaatgaattgtcttaggcaattatgactgacggttccaacaagagcaatcttgcttatgaagaatgataaaccgatgatcaacaactttggttgttgtttaacaccatgactganactcanatcacaagtttcacaacattcacaagggatcattgtagattgaggaatatatgatcaagatgaanaccttgacacaagcttanattctcaagatcccaatctcaacttttgagttgatcatacaaacttttgcgggaatggatgttgac

SEQ ID NO: 27896 - DNA, 430 bp, Glycine max
  unsure at all n locations
agcttgaaagtcatgtgagtaatacttatgatttgtgcaagttgttttataagacattntgttattttcttcttcttccttgtcttgagtaaataactaaacatgtactaaagacatgttgtgtatttggggttatatcaaaatgctacccgttccaatatgaagtcaaattcttgtttccaaggccaagagctaatcgagtgttgcatatctgatattgctttagtggtcgaaagattaagacaggaatcttatgtgagttagatatcatggattactgaaccttgtaaggtangaaaaaaaaatagagaggagacaggcagcaaaaacattcaatagggtagccctgttttctttggaatttatattcatagctaanactnttatgtaactgttgttaattntcattntcttgatccatgtttcatct

SEQ ID NO: 27897 - DNA, 425 bp, Glycine max
  unsure at all n locations
agcttatgaatttgttgccgagattcatatgtcctcttttgactgtactaagcctcctgaggaggttagctattcaaattgaaattgaatggtgattatatatttattttcctttccttctctaattacaatgcttgtatgctgctttgagggaagcacatgaaaaggcagttcgaatttcaatggcagcctttactgctagtgctgtaggggttggttcagtaagaacaaaatatgaaggcatgctgcagaaattcctcaaaaaggcatttgaggtattgtatattcaaaattatttgagtgcaattaactgattaaactntgattggtaaaacttatttgcatatcagagtagatataattgtttnttagtcaggtatcttacaaatccacaatttagtctgtgattctggatacggaaatga

SEQ ID NO: 27898 - DNA, 419 bp, Glycine max
  unsure at all n locations
agctttgcttctactttttatacccactaaacgtcaaacaagattcccttcatgacaaaaaaatgttctctctaatctctagtcatcacaaatgtagagagacccacataatagttaagggagtgaaatcttatttctctcatcttccaaaacattaaagtacatctgagagaagcttcactatgactcattatttatatatttattatttatgacaatcataggtttcaagatccggttgattttctatcattgatcatctaagaaactcttanaatttttacatgtgatatcggaacatagattatcaacattatgattctctaataatgatttattctttctcaattatgaatgaatcctaattatcaaatgtaaaaatcttattttcttctgcggctatgtatgatatgttatta

SEQ ID NO: 27899 - DNA, 428 bp, Glycine max
agcttctagctctatggacttaccttgaattaattcctttgatagcccttttgagccttgtttccctttccttgttttgaagctcactacaagccttaagtgaaaaaccatgatattaccatatccttaaggaattttggagctttggaattgttttgggaataagtgtgggggggttttgtttcattggacaacttgttttgttggctatgcttcatgatgtattttgggccatacttgatgtacattgtatattggttaaatgttggacatgctgaatgaaatgttgtttctcaaaggctaaagagtaaaaaaaaaaaaaaaaaaatctaaaaaaaaaagaaaaagaaaagcaataaagttgagtgaataagatcttaaatggcacaagaatgatgaaactcttggttctactcttcatgtttaat

SEQ ID NO: 27900 - DNA, 408 bp, Glycine max
  unsure at all n locations
agcttacatatttgttttactgtntgccatgattattatatcgtttgtctcggtaagaattcccccttcccgttctttgtctcagttttcatagattaactgtatgactgtgttgtgtcaacatttacctttatacgcccaccttttatgtgataggttatattttacctacctatggcattaaaatttacagacaattctatattctactatgaacatgttttttttggtgtgataaattcttcaggtagatatggcttgatcatgaatgtgtgtgctatactgccaccgtctggtgtttccttgaagtcagactactgagctgttatttctaatatattgtgttcattgtggctctgtgaggcttgaatagtacccacgaggtgtttgtactgactattgagactt

SEQ ID NO: 27901 - DNA, 314 bp, Glycine max
  unsure at all n locations
agctagttcatttgagaaagatgcattatgtaatgcatgacataatggaaagcaaactacagcatctttcanatgtgaaaatgtattttctgcctcatcggagggaattaatatgctttagttattggagattattactctacatatacaacgactctatccttatcttcaaaatgtaacacttttatagctattcaaatacttgccaagcttattcaatattgatgcaagctacattggagcttgtacgcctacgatcttcttcatcaatggatacctttgcttcttggaagataaatggcagcggaatggac

SEQ ID NO: 27902 - DNA, 431 bp, Glycine max
  unsure at all n locations
agcttgtttattttatctgaaattgagagaaaatgattattaaacacacaaaatggaagtactaagtatttattacctatacttaacagaaaatacttataacactacaaaataaccataaattggaagagtttgatacaatttatacaagttttatacacaaaagttagttgtattcaccgactaacaactcccccaaatttacagttttgcttgtcctcaagcaaaaagagaacaactcacttgtcctcaagcgacaacaacatgcagtgactatgtacaaaggtgtatgcaactaaagttactgattgcatgataagagaatgaagtaaaattccctcatcacttgtttttcacaaggtatacagttatccaaagagaanaataaaatgtaacctgaacaatttgatggagttaggcataagacaaat

SEQ ID NO: 27903 - DNA, 430 bp, Glycine max
  unsure at all n locations
agcttgttaattatattgaattagcgattacgacttaggagaatggcttcaactaaaattacaactttataggtagagcatatatatgtatcttggcatagacagcaacatctggcactatccatctttagctatcaataagaaataatttatgcactaagctatgggccaattataagattctttcatggtatatacaaagtttttatcaactttctttaaattcttaaccttctctcatatctttagttcacattaaataggaatgtaagaatgtaggaatggccaaaatctcatttggatccaacttaccaggtcaacaactctgacagctgctntatcatatcttgccttgatctcctctgccaatgcctgtaattaaaaatatattaaaaaatcacatctaagaatcacatacttctaacaagcc

SEQ ID NO: 27904 - DNA, 427 bp, Glycine max
agcttattagataattttgcctaaatcatttccaaatatgcatgtgaattaggaagcatcaacaagaatcaagccaaggctattgtgcaagcaatcaatgtggcataacacaccaaaagattatgatgatggatggctcatattctcacaaaggtaatcactttcaaattgaggaacaattacccatttcttgaacatatcctataattcaaagaagaatatgcaaagttgtacatgcaaacagaattgacctaaaatattatactagaaacccaacataactaacataattaacaaaactaacagaactagcaaaaccaaaaccaaagaactccctcccctcccatacttaaacaacacattgtccttaatgtagcacaattaacagaatataagcaattagaccatcaaatagaatcggacaaat

SEQ ID NO: 27905 - DNA, 433 bp, Glycine max
  unsure at all n locations
aataaagtccttaatgatccatatcgtgtgtgtgtgtttgtaattgcattgaatgagatgatgtgcaaagttgggaatcctaaattttgttgttttgattgaaatacacataaccaaaacacttgtgtgcttgagagaaacaatatacttgtgagaagtgaagcatgattgatgattgtcatacttgctaacctactttatctccaagtgagttcttgcttgcttctatcatgaaaactatgaaaaatgtgaacttgagaattggaaattgaagttgtttgaaaggtatgcaattgtctcagttattgtggttggttacattctgaacattgtcattgacttgacttattgaagtttagcttacttttgcttgaggacaagcaaagctctaaatttgggggacgttgataatctttatgtatacataaatcan

SEQ ID NO: 27906 - DNA, 414 bp, Glycine max
  unsure at all n locations
agcttgttgttaattcaaacaggaataactttgtactcggatgtctcattatgtcccgtaatatatcgagatgcttgaaattgaaaacggaagctcgtagcatatgcaaaacacaataactttttactcggatgtccgattgtgtctcgtagtatatcgagacgctcgttattaaaaacataacctcgtagcagattcaaacgaaaataactatttactcgaatgtttgattgtgtcccatagtatatcgagacgctcgtaattgaaaacagaagctcttagaagattttaacgacaataactgtttactcggatgtccgattgtgacccgtaatatatcgagacgctggaaattgaggacataagctcttaagaaattctatagacaacgactntatactcggatgtacgatt

SEQ ID NO: 27907 - DNA, 425 bp, Glycine max
  unsure at all n locations
agctttatgatgatactttgtacaacgcgggagtttctataaataggaaaaagtaaaattgttaaactggtaaaaatgtgtttaaagagattaatgtatgaaagtcaacttaccaggggttcaggagcatccagcatttcctgagtaagtcgaagagtccagatatgctttctggatgaatgtctctgcctgccacatgtttgtcgctccagtggtggtatgaaatgtatgtcaaatacgcagtgatggtcacaggcaaaaaagttgatggtggttgactcgttgattttcaaatctttcctgaagttntcgagtccatctaccaaatacactctttctttgtgtcgtttgacccgtatttcgtagatggctccattgtatctcagatgaacaaactcgggatactgtggtgcccattatgtatg

SEQ ID NO: 27908 - DNA, 432 bp, Glycine max
agcttaccaatatatattcaaatgaagtttatgtttctttgtgttctatatgtgtgccctaagcatttaaatttattgacctggaggatatgatcacttcatcatgtgttgattagcatatcaatagtttgcatatggtcactgacaatgctttattccaataactaaaatgaagaataacttcatatgacttgtcctgccagtattgttgatgttgagatcaagcctgtggaaggtgaactttctaaatcactgttggaaaacaacaaatgctatttactggactgtggtgctgaggtgtttgtctgggttggtcgtgtgacacaagttgaagaacgaaaatcagcctgccaagccgttgaggtaaggccattgtagaatctataatctaattcatttccatttgtttgttaaattggattcattaattct

SEQ ID NO: 27909 - DNA, 432 bp, Glycine max
  unsure at all n locations
agctntgacctcatttctattattctctattcttgggtcattgtatacaagttgggcaagcgtggtcttacccaacccgtccatgcccacgatagaaagtactgacagcttgttatcagtgttagaagtgagccagttaatgataatttctttatcaccctctctgccacaaatatcactttcaaccactgaagatgttgattgtggcactttaccaccagatcctgatccaactacaagatcactaggctttttcaaacctagattatccatccggcttgcaagtacaggtttgagattcagattgaggttgaacttggagtctggagtgttgtatttcatccaagacatcttctacgtcaagcatggcaactntgagcttaataagccagtctctcacttgcatatttccaaactgtttttgttcagcat

SEQ ID NO: 27910 - DNA, 294 bp, Glycine max
  unsure at all n locations
agcttcaatgtttcttatatcatgtggtatcaagagcatattcatctangtgatgttcttttgcttcctctatctttttgttcggtgaattctctttaattcctttttcttcatcttattcttcatgtatatcccccattgtctagtggttaggcgcttgttagaataaaatcaaaaaaaataaaccgattaaatcttagaattacacttgttcctgcatttctatgggttaaattttgtagaactactcttgaatcactgttttgtgttgattttaagctctatcacttttca

SEQ ID NO: 27911 - DNA, 433 bp, Glycine max
  unsure at all n locations
agcttcaagatttatttcttangttgttcactatgtttctcatgttgctccccttatctctaacacatggaactaagggcgacctctagccttagtttcatattcagactgaaactgacgagaacctctccatgaatttgtggagtgactcatcttcgtcctgctgaatgtttgtgagtgcaactataggcaagtggtgtgctttactcatcatgtactgngctccaaaatgcacaataagtgtcatgaaagaatctatcgagttccttggcaaacgaatgtaccagtggagtgttgaaccccttaggttcatcangaatacttggcacattatgacatcatcattcgtgaatagattcatttgtgtaaccgatgcatctatatgctcctctggatccgagagtccatcgtatcaatctattgtcaatgtctt

SEQ ID NO: 27912 - DNA, 427 bp, Glycine max
  unsure at all n locations
agctttacattatatatttcaattgtgttagcaacagaaatttagtctcactcgtttgttgacattcgaagtggtactattgctagggcattgtatttttttatatgtggtattggataaaatggattcttcccacatgtatgagttagaatgcttgccttatctttnggacctataatttctaaagtagttcgatatgtctgaagggtgagattgaatctgaatgctaatcttttgtgtatgcgtccttatcagcttggattaaaaagctcttgtgtcattggattggtagcaatctgacgacagaatgcaaataaattngacagttcttgtcactcgtaacatgacgaagaatgagtcaaaaccaaattaagcacatatgatacaggatgtagaattcagaagcccttgaccatgcctatgatat

SEQ ID NO: 27913 - DNA, 412 bp, Glycine max
  unsure at all n locations
agcttgttgtttatggngtacccatcacatgtggtactaggtggcggtcgggcgatggtgcacaacaagttttccacatccacaaagcatgcataaacccaccatcccctgttgcccacctccaacagagctcacgtactcccacgtagcccatatcctcgtttctctcaacaccgggtccccatcaatcctcccaagcttccccaacatcaaagtaataccacattcaaacagcacaagttatcacagccaagcaaaacagggcaaaggcaganaactctgcccaaaacaccaaccaaaatcacagcttttcacatacaaataccccagaaacatttccttcgttccaattcgttaaccgttggatcgactccaaaatattactggaagtctataatacataagcctacat

SEQ ID NO: 27914 - DNA, 428 bp, Glycine max
  unsure at all n locations
agcttggtaattatctaatatctttgaatggtaaaaaagagaaacctttccatgttccagggcaccaaccacatgtagtaaatatcaattgaccaagtatacctctagtgtttgaatctccatcttcaacattagtctaaaaataaacgaataatttattcaaacaattaacatgattatattctctctatatttttagttgaattagataaagccactgaggattataaatgtaccaatcacttgtccctggctaagtcttccattgtctcattcaagtcagcttcctcctaattgaacaacttcaattcaatgtaaccctcataagaataataattaaatagaccacagaacatgaatgaattaatttaataatagattcaacctgtatattgttcagactgataaatntgtcaattgtatctcta

SEQ ID NO: 27915 - DNA, 215 bp, Glycine max
agccttctttgttatccgctcttggagctcagaagattccaaaaacaaatgcctcttattactagctattttgaattctttagttcttgaatgtacaacctttaaactgtagctcgttcccctctttgagaatgaggaggatcttcataggacttcatccagctgatgtctgaacgccaactatcattcataactcttttcatctttgactgttc

SEQ ID NO: 27916 - DNA, 426 bp, Glycine max
  unsure at all n locations
agcttgatgtgtttctgtctcaatttatgcagatatccatgtccaactacaagagcacggagtcatccatcaagaacctggagatacaagtgggaaaattagccaaacaaatggctgaaagacccactagcagctntggagccaacacagagaagaagagcgccattagcaaggcaatgttgactagaagctagaggagagcacaaggagaagaagagaaagttgaagataaccagtttgaggaaggaagggcagacaaagaaggacagatagaggaagaagagaagaagatataagagaaagaggaagagaagaaggtcttgacttctaagaacaaaagtcagctagcccgagaggctangaaagaaaagccactaccccctctaaaggagttcccatatcctttagtgccatcaaagaagaata

SEQ ID NO: 27917 - DNA, 428 bp, Glycine max
  unsure at all n locations
agcttattgtgtaaattgttcttatttcttaccacatagatacaaggcatgggtggagtatggattangagtgtcaaactaatgaattggataatttttttgaattgaaatggatagccaatccatttatgatccattaataatgtattgcaaaaatctaatttatccataacttatttcatagaaaaaggtccatccattatattttatttttttcaaaacaatatttttctaaaacaaagtgtaatatttgtacaaattcttacactgaaataccatagaatccaatatttatctcataaagacctatgtccaagtaatgaacttggaactacttgattcactggattgcaaaatatgttggatggttcattatctatccaataacaaatggtaatccaattcaactaatgtanttaagtttattt

SEQ ID NO: 27918 - DNA, 423 bp, Glycine max
  unsure at all n locations
agcttgagtctttcanaagacttgcttattcatttagtgctaatttctctgccttcatagtttagtcagtttaagatctcttataactgtcagaaggagaaatggtcttttaatgagctcatttcatactgtgtgtaagaagaggaaagtctgaagcaagaaaggattggaagtgctcatgttgtaagtacctctaaagacaagggcaaaagacaaagaactgaggagcccaagaatgaagttgctaatggttcaacacataagatacaaaatcaaggtgacaactgtttcttttgcagtaagcctgacatgtgaagaagaaatgtaccanatatcatgcttggcatgcaaagaaagggttgcctaagctaccagaagccaattgattctgaaagatggatatatgttggagatggtaaatcg

SEQ ID NO: 27919 - DNA, 420 bp, Glycine max
  unsure at all n locations
gcttctatgatcagtgcttttggctgaggttgctgatgagattgttaacggttttcattgcttgtgttctcttcttgatgctttgtttgagttgtttcggtggtgtcatcactgtatccgagctttgaagctacaacatttttggcagtgatggctttgtcagctattgctgtggttgctgaggagattttatctgtgtaactgctctcgtttgatggttcttagtgtggctcctcaacttgngtggtggtgtangtttgtggngtattggtttgagttggatattctggtagaaattgatcatgacttccagctgaagcacanagagtatgtgttgaattcgttctaaattgttgtggcaagtgttggtcattggattttgttgaagtgtgctgaatgttangttcagtagagaaagat

SEQ ID NO: 27920 - DNA, 392 bp, Glycine max
  unsure at all n locations
agcttgcaagtgtattgactgtatattgaggattctttttttttagttttttatctttctgtcaggggagtttcactaggtcccatgtcaaccctctaacatggcaactaaaaaatatgagttacgtaaggataggtcattcaagtcttttttctaattgaatccagctagtatcactttcgtacagtatccttcttatcacggtaatgcgaagtgatgaataaattaagaggtttttgttttcttacaagggtgattaaattgaatgagtttataataaactaaatattattattttaattntgttttgtgagttgtacttcatatatgcaacttaacttttatcataaaaaatagataaattgtatttattaaatacagtttatgtattt

SEQ ID NO: 27921 - DNA, 441 bp, Glycine max
tgaagatagagtcatagatgcctttataaaatctatattttatattttgtaatcgcagcaagtattattgaactcatcacctcacgaacgaattctattaattattttaatacggttaattctttggacataaaacataataacttgcatttgaaggatcaaatcagtataaagtaaaataaaggaggtaaataaggagaaattgtttatctttgaaggacataatgagaaattgttaagaaaataatcaaatactactgcccagttagatactttgacttggtgcccaacagcaattagagtgcatcgacaatctctaatttgacttagtgtgcattgtgcaacagcaattatagctctcaacggtcaaggatcttactgccacattaactattgttgcccaatggcacttatatatctacaatagtattacacaatata

SEQ ID NO: 27922 - DNA, 390 bp, Glycine max
  unsure at all n locations
agcttattcacttatgtgttttttctgaaattcagttaggatgctattactacaaattcccagcttgctacaatgattcaagatagattttaaaaggaggttttcccatttcttactacattttcttttctatttaccctangatcaaggattgtcttcatattattcaataaaactcttcatggtagtcaaggatgggagataatataaatttatgggtggacaaatgtttatcagatttcaatgtgaatcttcacaatattccatatcatttacatagcttgttgaaagctaatgtaacatatcttatctcaggtaattcttcgtctcttctggcctctatggaagtttggtttccttatatggctatggagattcagaatacaatca

SEQ ID NO: 27923 - DNA, 373 bp, Glycine max
  unsure at all n locations
actctccccttaagaaaaagatatcttagatgactcttgacagnaaaacatttagcatagaaaagatcctccattattgctttcctaacatggcaaagttgaaagcaaataaatatctaaaacctaaccctaatttctccttcataacacataacctgtcccacaccatccaatttacccccttgctacctctttttcctaaaccccaccaatatgaattcatcatcttttgaagcttatcccccaacacttgatgtatacggaaactattcatgcagcacgtggggatatcttgcaccacatacttaataagaactttgctttcagccatatatatcaccataccactccaagaatgaatcttctatcccat

SEQ ID NO: 27924 - DNA, 389 bp, Glycine max
agcttttagaccttttttatcattgatgacgaaagaacacctcgttcagggagttctgattctgaggttccaacaatagaagtaatcttcataaaacagcttctctcttcttttgaatagtgcatcacattccaaagtccaaatagttttgctacaacatccttcatctgcatttttaaaaataatatacttttataggaagggaagaaattacaacaaccagtcttacgaattgcaattaagcatgctgtagaaaaatcaccttctgaaattatggttgtcctttctatttttaactcgagaatggactgctctagaccttcctatgtgctatcgctaatattagttgactgcaccaccttgagcccatgcaaacttcggtgaacatc

SEQ ID NO: 27925 - DNA, 357 bp, Glycine max
  unsure at all n locations
tattcagcgatattntagatataattacaatgaaattgaagatgttttatttaaaaaaatatttttagtggtatttaaaatttattatgaaactttatttttctaacaataataatgatgcaatatttatataaaatttataaataaaaatgtaaatataaaaaatatgaatatatgcatatatatatatatatatatatatatatatatatgtgtgtgtgtgtgtgagtgtgtaaaatagagtgttcatttttctattgcgaatattatattaaatatctggttttatctttaaaaacaaaagagatttttatacttatatagttattgagttttaactctatctatttgagcctc

SEQ ID NO: 27926 - DNA, 524 bp, Glycine max
  unsure at all n locations
ccccacccaaaaaacaaataattaaggaaagcaaacgcccggagaacatancannaaagaagagganttgagcctgaagtactggacacccgacncgnacacgggaaccccagagacaccagcagcacgcagcctgtcaaactttcagaacatgacgcccgcaaggcacagaataagaggcgcggtaagcaaccggagacccaaaaagacacactcggtacagagccaacaaaaccgcccatagcgcgagggacgcagacaaaagagaagcaggacgcaggcggaaccacatacggcgaggctcacgaaacaggccaacgaatacgcagtgaagaacacacccaacacacgcactatatgggacatccacagagacaaggacatacccaaagaggaagggcaagcggccagaatgggccctataaccaacaaggacagcggagatcgcaccctaacgagcaacacaccaaagaccaaagcggcacatctaacacgccgagccaacaaggaccaaatatcttccg

SEQ ID NO: 27927 - DNA, 442 bp, Glycine max
  unsure at all n locations
tgtagggttaaagtctcatgattgtcacgtgctcatgttacaattgttagccgnggctatacgagacatcttgccaaacaaagtcaggttagcgataactcgcctgtgctttttattccatgctatatgtagcaaagtcattgatcctgtcaagtttgatgagttggaaaatgaggccgcaattatactgtgccagatggagatgtattttccccctgctttctttgacatcatgattcacttgattgtgcatctggtcagagaaatcaaatgttgtggtcctgtttatctactgtggatgtacccggctgagcgatacatgaagatcttaaaagggtatacaaagaatctatatcatccagaagcatctattgttgagaggtacattgcagaagaagccattgcaatttgttcataatacttatagaatgctaaacctgtt

SEQ ID NO: 27928 - DNA, 392 bp, Glycine max
  unsure at all n locations
gcttctcttggtaagaatgtgggctctatttcgtagttttgcatggncactagcagccatgttctttattaattccatagctccttctggggtcttcaatttgatctttctccctgcagaagcatcaagaagctgcttggactgcggtctcaacccatcaataaaaatgttgagttgtatcagatctgaaaatccatgagtaggtgtctttctcaataagcctctaaatctttccaatgcctcacttaaagattcatctggaaattcatggaaggatgaaatggcagctttcccttcagctgtcttagactctgggaagtacttcttcaagaatttctcaactacttcatcccaagtcttgaggctatcttctttaaacgaatgaaaccacc

SEQ ID NO: 27929 - DNA, 365 bp, Glycine max
tctagctttaaaccacattatataactttttacacagggactctaaatataaaatcaataaacaagactctttttaccgtaaaaattcaatttaagaaattttgcattcctcatgcgttcgcagcctgttctgttccaatcaatagctatattttgtttcataactttagatatgcaattgaaaattaatagaataaggtctattgcatttaaatgaaataaaataagtctcaattgaaattttagaattttactgggtctcaagagttttgcatttgcctttcgtaaaaattgatcaatattgcagaactaaaatgttgacagattttggtaatattcttgcaacctttttaattcatctactt

SEQ ID NO: 27930 - DNA, 380 bp, Glycine max
  unsure at all n locations
tgaagaaagagtcatagatgctnttataaaatctataatttatattttgtaatngcagnaggtattattgaactcatcacctcacgaacgaattctattaattattttaatacggttaattctttggacataaaacataataacttgcatttgaaggatcaaatcagtataaagtaaaataaaggaggtaaataatgagaaatcgtttatctttgaaggacataatgagaaattgttaagaaaataatcaaatactactgcccagttagatactttgacttggtgcccaacagcaattagagtgcatcgacaatttctattttgacttagtgtgcatgtgcaacagcaattatagctctcaacggtcaaggttctcactg

SEQ ID NO: 27931 - DNA, 393 bp, Glycine max
  unsure at all n locations
tcaagcttttatgattatggggtacccatcacatgtggtactaggtggcggtcgggcgatggtgcacaacaagttttccacattcacaaatcacgcataaacccaccatcccctgttgcccacctccaaccgagctcacgtactcccacgtagcctatatcctcgtttctctcaacaccgggtccccatcaatcctcccaagcttccccaacatccaagtaattcaacattcaaacagaacaaactatcacagccaagaaaacagggcaaaggtagaaaactctgcccaaaacaccaaccaaaatcacagcttgtctcacttaaagactccagtaacaattccttcgatccagttcgttaaccgttggatcgacgcgaannatttactggaag

SEQ ID NO: 27932 - DNA, 426 bp, Glycine max
  unsure at all n locations
tgtagggttaaagtctcacgattgtcacgtgtagtattttataattgncagncgaggctatacgagacatcttgccaaacaaagtcaggttagccataactcgcctgtgctttttcttccatgccatatgtagcaaagttgttgatcctgtcaagtttgatgaacttgaaaatgaggccgcaattatactgagccagttggagatgtattttccccctgctttctttgacatcatgattcacttgattgtgcatctggtcagagaaatcaaatgttgcggtcctgtttatttgcggtggacgtacctggttgagcaatacatgaagatcttaaaagggtatacaaagaatctatatcatccagaagcatctattggtgagaggtacattacagaagaangccattgaatttgtttggaatatattg

SEQ ID NO: 27933 - DNA, 324 bp, Glycine max
atgatctcagcatcgttgtcaagaggttcaacaaatttctaagaaacataggatgttagagataagcaaatttcacatcaaagatcagagtagaagattcatcctctcttccaaaaggttatgactgcaatcaaccaggacatctaagagctgtttgcccaagtttcatgacaataatatagagatctgaaaagaaaactttcaatgataagagagcaaacgaggcctacattacttatgaagacaatgatatggactcatctgaagattcaaaaaatgatgctgtagacctgattctgatggccaagaattatgaaagcgatg

SEQ ID NO: 27934 - DNA, 391 bp, Glycine max
  unsure at all n locations
tcaagcnttaacataattatgcccattaccaataaatctaaaataataatagattataaataataatagattttttattaaaaagtgtagtataaattcttttgggtctatactatgatttaaattgttatatttagtatgaagtattaaccgaaaaaagaataaataaaaacttgttggaattttcctttcaaaaccgttataagagcattttctagacgggaacattagcttactgcatttctacacgggaacatattaacagttaggtagttttatatatttacagcggtaatttctaactactataaactttatgctttgcaaaaccgcttaagttcaccggttcttttattgtttcagcggtttgaggctgcttttcccggtttga

SEQ ID NO: 27935 - DNA, 415 bp, Glycine max
  unsure at all n locations
cgtgcacttatggagaagaaatttaccttgntctcaaagagcacatatataagagagggcatttattaagaacttaaaaaaaatcattagaattataaaattacattattcttgacgttttatacttttcaatcatttgacaataaatattatgattagcaagacccataatattaatatatgcatgtgtttctatttgtttattttctcttttcgttttcttgaatatgcttgtgacttgcaatgatatatatatatatatatatatatatataataactatgacatatatcctcataaggtgtaataaacaataaacattaatatgcgtctggtatacgtataggggtgaacagatgccgccagagccgtagattgagatggctgactatctaaacccaatattagaggggag

SEQ ID NO: 27936 - DNA, 275 bp, Glycine max
catcgtttgagaaaagaatgaagcttgcgaaagccttcgagtctgatgagtgaatcaatcatgtaccttgtggtgaagtcagacatccccgaaggatgttcaaccttgcatgcatccacgaaccccaatggtggttacgaacccccatggggactatggctcagatgagagtaccgtggcttgtcatgagggataaatgcaggccttgcggccgacggagaagagaaatgctttgtttgcgagactgagggcgagctgcattatatggatctggg

SEQ ID NO: 27937 - DNA, 256 bp, Glycine max
aataaacctagacacataagatctacatgaacattttctagaggagatcacacctcaatgatatctagataagatatagtctaaataagatatgacttgatagaatcaaatggtctgccctctttaagtccgagcccaattatggattcaagcccaatccttcattaattcctgacaatggattaaaaacatcaaattttccgattgagctcacctaataagactgcctagttaattcgacacttaagactaatca

SEQ ID NO: 27938 - DNA, 376 bp, Glycine max
  unsure at all n locations
tcgggcgatggtgcaaaacaagttctccacatacacaaatcatgtacaacccaccatcccctgttgcccacctccaactgagctcacgtactcccacgtagcccttatcctcgttcctctcaacgccgagtccccatcaatcctcccaagcttccacaacatccaagtaattccacatccaatcatcatggactaacaaaatcaagcacaacagggcaaaggcaaaaaactctgcccaaaatacaactcanattcacagcttttcacatgcaaataccccagtaacatttccttcgttccgattcgttaaccgttggatcgactcgaanattttaccggaagtctctagtacataagtctacaatttgaccgttgg

SEQ ID NO: 27939 - DNA, 395 bp, Glycine max
  unsure at all n locations
agcttgcaaagtattaatgacataaaaacatcttttgaaaaaaaaaagaagcttgcaaaagctcacaaaaatgaaaaaagaagcaaacatgtaccttgtgttgatgtcagactccaacgaaggatgttcaaccttgcagcatcaacgaaccccaacggtggttacgaaccccagcggcgacgatggtgaggaggagacgacggtgacatgtcgtaaatgacgatcacaggtcttgcgggtgagggagaagagaaaggctttgtttgcgagactgagggcgtggggaaaaaaagggttttgggttttaattcatgtacaacacatcaatttttttaaagaaaatcgatgttatcacctggttaacatcagttntataaataaccgatgttaacaat

SEQ ID NO: 27940 - DNA, 351 bp, Glycine max
  unsure at all n locations
cttctgaagaacctccagatggacatcatacattctgcttacttcatncnagatatgcagctcaaagccacattaactgcgcaatgtcttggaactacaaacaccttaagggcattgctaaagacaggtaagtcgcattacttgtaccattgtaagttcaatattcactacttctcttttgtctattccatggttgaccaaaaaaatattgcaaaatttcaggttgattacatattaggtgcaaacccattaagaatgtcttacatggtaggctatggtccttactttcccaagagagttcaccacagaggatcttccttgccttcaatagaagctcatccacaaaccata

SEQ ID NO: 27941 - DNA, 393 bp, Glycine max
agcttgtggttttctcgcgtgtcattagtcaactctgatttttattgaataaaacattattttgggcattagatcaaagtatctgtcgttcttaaatatttttaaactaaacaaattatacaataagttttttattttgtacagaacaagaagtggctaaaaatattattatttttttactaaaagaagttgttaaagtaatagaaatcaagttattatcattcagatgttaaaaaaaaatcttcaaattaaactcttgggaacatttggttgagttgagctgaatttttttcttatttgaaaattatgatttcagaagaatttgattattgaaaattatgattcatgtataaatatatttgattagttctaacataattattggaaattaaa

SEQ ID NO: 27942 - DNA, 419 bp, Glycine max
  unsure at all n locations
acactgtgctccgcccaattcgncaagcaattcatcattggtctgaatggggaagcggtccttgatggtgagtgagttcaacgcacgataatctacatagaagcgccacgttccgtcgtgcttcttgaccaagaggaccggagaagagaacgggctgttactangttgtatcagccctttctgaagcatggtctcgacttgctgctcaatttcctgcttttgaaaatgtgggtatcgatacggacggacattcaccggagtagcttgaggtaaaaggtgaatatgatggtctgttgtgcgttccggtggtaaggtttgcggttgtcggataaggatattatatctggtgagcaaagcttgaatggatgggtccacgggttcagatgaagtcgaatgttctttcgagaggactgtgatat

SEQ ID NO: 27943 - DNA, 342 bp, Glycine max
agcttattgacatatgtgcttgttacgaacttcagttatgatgctatgactactcaatcccagatcgctacgacgattcaagatagatatcagaaggaggttataccatcccttactacattgacttgcctacataccctaggatcaccgatagtcttcatattagtccaataaaactgctcatcggagccaaggatgggagataatataaatgaatgggtggacaaatgttcatgagatatcaatgcgaatcttcacaatattccatatcatttacatagattgtagaacgctaacgaacacattttatctcaggatactcttccactcttctgcactata

SEQ ID NO: 27944 - DNA, 408 bp, Glycine max
tggaacgatgcttgcatggacgacttgaagagggacttgtcgttatatgttggagcacgacactgcaggaatcatagagggagagaagtggaactttgaggtgtgtctcacacgactctcattcatcatagatacaccaagcgttactcacgctgatatctatagactaggcagcttccttgagaagctatcttgagaatactgacttgagacagctcttttgagaaaactctcctgataagctagagcttagctacacacacccctttcataactaagctcaccttcttgagaagctttcgttataagacccctaatgaagctagagcttatctacacatacctatgtaatagctgagctcacctacttgagatgagaagctagaacttagctacacaccccctata

SEQ ID NO: 27945 - DNA, 390 bp, Glycine max
agctttaacctctttgtctctcacagtctttagatttgggagccaatccaatccttgtgtccggactctcagccacttatgatagccgccgatgatcccattactgcttcccctaagctctctgtcctttcttcacgccgcatcccatgccttgcgaactccttggagtaaccttgcgttgtggacactgaaaccccgtgcgatgaaaggcgtgatgctttcgactgatggcactcctctcatgggacatccttcgcatgaagatagaatcctgattcttccttccttctagtgagggaaccaattaacagacgtccctccatgctagccaagagttggtcccaattcgcctttcccttttcgacgcacgagcggtgaccttgtagcgga

SEQ ID NO: 27946 - DNA, 438 bp, Glycine max
ctttcgtcttacagaatgcaaaaagtttatacggataactatctgttgtatttccgcccatcagcgggactcaaaagtcagtatgacagatcttttgagcacggaagatgacgtaaatcaccgcgtgtaaacgggcttgtcggccgcgattgacgaatggcgcagaagacgacgttagtctctgcgtgctagcaggcttttcgacttacagacagcaaaaagtttatatgaataaccactcaggtatgtgcgctcgtgagcgtgactcataagtctgtgtgacagatcttgtgagcgcggaagatgacgtcaatctccgcgtgccaacgggcttgtcgatcgcgattgacgagtggcgcataagacgacgttagtctctgcgagctatcaagctcttcatcttacagaatgcaaatagtggatacggataaccactcg

SEQ ID NO: 27947 - DNA, 394 bp, Glycine max
  unsure at all n locations
agctttctcgcttctaaattcacttcttggttggtgtttttggtttgtgctaaaggtggtgttcgacattggaagtgtggtagacagactttgtggtagatttacggatggccgctgtggataactgggtggtgggtaaggagaaagtttgttattggctgagtaaagatattgttgggttggtgggaaatttggccgttacatgaatggcagtcacagcatgggtttctccctcatcctcaccctctttatttgccccagctttctcagtcgccctaatacgatgatcaaatntgcctctttttggacccacattgatcctatcactggcgaagaccaaatctgcacagctatgaaggtgcgcaccccaccatcttttcatagtagagtaccg

SEQ ID NO: 27948 - DNA, 427 bp, Glycine max
actcaatcttgccacccagctcgcccaggcgagctaggttgcttccttcagaatgcttttccttctgaaggaactgcttggaaggcccaagtgggcctggttgctatttgcaccccctatttactaaatacacccctacctttttttgctgattctttttccgtaatgttatggaactttacgaatttcgtaacgatacttgttttccttccgtaatgttacggaaccttatggattatgtaatcatccttttttttggctttcagaatgttacagaacctcacggattgtgtaacaatgcttccttttgatttccggcatgttatggaacttcccggatcgtgcaacaatgctctcttttgacttctggcacgctatggaacttcgcatattgtgcaacaatgggtgccaagtacctcaaagaggt

SEQ ID NO: 27949 - DNA, 388 bp, Glycine max
agcatttatgatgttgaaaagaaatcacatgtttgtcatcatcaaaaagggggagaatgtgaatgtatgcatacatgattttgatgatgccaaagaagaaccaaacaaggctgcttcaaatgataagcatttgcttcaagaataattcaagattgcttcaacaaacaaagccttgtttcaagattcactaaagaccaagccttgccttaaaacaaagtgctttcaagacatgcaaggctctggtaatcgattaccaggaagtgtaatcgattaccagaagacagggttgagaaatagctgttgaaaaaggttttgaatttgaattttcaacatgtaatcgattaccaacaacagaactttgaatattcaaattcaaaagtcataaccc

SEQ ID NO: 27950 - DNA, 295 bp, Glycine max
  unsure at all n locations
acataaaggctcgaggagtatttcaggttctacagaagagacacatctttgtgaaattccgatcatgccaatgtgaccggtgttcaacgaatgccgcacaaacaacctcaaagttataaaaagatagctattacaatgtctcattctctaggatgtttcaaaggaagtgtaaaagcaccctattacggtacccaccacataagagacactaagaggaactcgnactacctagcagaatgctgacatgtctaggctacctcagagaaactttgaaatggatgattgacggattttc

SEQ ID NO: 27951 - DNA, 306 bp, Glycine max
agcttgtttgcgtggcatctatcggggctggaagttaatgcttccatggtttatctctcagaggacgtctccccctgttaattcttcgcttagaatggcaaagacgatactgcatgggctctccctttttgaagacgtcattgaagagcgaccttccccaccacgttgatcctcggcgaacatgctctcatagggtgcttcaatgaacgtaaatactcaggttagagatacatacgcctgtgcacattttgtgggataacatcgggacagatggaaatctttgatttgtgtctatccatactctca

SEQ ID NO: 27952 - DNA, 197 bp, Glycine max
  unsure at all n locations
tgacttagattctttggcatgtggagctgatataaaggaggaggaactaacagatgcatnagtcggatcctttatcaggggaacgacatgatgcaaccctccctacgaagggaccagtctctatagccatgagcggaaggctccacgaggattgtgctggagatgctgaataaggccctaaggttctcatgaccctc

SEQ ID NO: 27953 - DNA, 388 bp, Glycine max
tcaagcttgtggttgcgccacaacaaagttctgaaactacctgagggagcgacagaaacttgagacttacaatccctctggttatacagaattgtttggtattcatcatcagcatttctagtgaatttcagcatgaagaagtctccattgttagacatgcacaatggtaaaatcattgatttttcttcataaggacaaatattaagatgtaaataactaaaatttattaattgaatccaagacttgtcatctccaaacttcctcatctgccacaagcaaagatgagtgttgctatcttgccaaacacacagcgagtctctaaaaactccaatatttgtatcaaaatagcaaaaatcgtccggaagatacagtgatctgcaagtctcct

SEQ ID NO: 27954 - DNA, 405 bp, Glycine max
  unsure at all n locations
cttaacttaacataattcacatcattntaccaatcattgtgtaacatcacttgtcctaaggatttaatcacaaaatcatattctataccttcacattaatcacatgttcataacaaaacatctcaagtacaacacaacatctctcacacacaattcattacccacaatcacgtagcaagtcacaatgatcattacacagacgttatgcaacatatatactaagactcaatcctatattgaatgtggtatcttgtcagtgaaaaataacactagggcacctaagagtacataataaaatacaccacacaatgggtaagcaggtcactcttattaaaagaaatcataaagtgattaattanggttatntctgttagtgtgaatgctctaaccatatgagatcaacat

SEQ ID NO: 27955 - DNA, 359 bp, Glycine max
tcaagcttttcgaaattgccatgtttgggtgagttagacatacccattctgttttagggtttttgtgatgatgtttgtgatgtttatatgctgaaattgctgatggaaatctgttagagatgaacggtagaactaacccaaggttagatagtgacaatgtgatgttatgagtggaaaaagagtgagactttgagagttggaaggctatgtctgaattctatggtacatggacgttagagtgagttaatactagcttgaaatgtcatctacaacatgtgagaaatgttaggctgagctatacagataaacaaatgaccaaagtgaacaaatatccattgctatggcaaatttgtgtgttg

SEQ ID NO: 27956 - DNA, 421 bp, Glycine max
  unsure at all n locations
ctacgctcagctttaatttaagcgcncgaagatttcgggtgnttttctgacatccgaataaaaatttatagtcgcttgaatgcgctcacagcttctgttttcaattacgtgcgtctcgatatattacgggactcaatcagacatctgaatgaaaagttattgtcacgtgaatgcgcttagagcttttggatcccattgcgagagtatcgatatagtatgggtctcactcggacatcgcagtaggaagctaatatcggatgaatttgcttcgagctttatgtttcaaaatccagcgtctcgaaatactaagggactcaatcagacatgcgaggcaaaatttattgtcaggtgaatttgctcaaaggttcttctttcaatttccagcttctcgatatattgcggttgcaatatgctacaagct

SEQ ID NO: 27957 - DNA, 390 bp, Glycine max
agctttcatcagaaagtattttgaatttttgaagattaaagcaagaactaggcaatatatatatatatatatatatatatatatatatggccaaaataaaacattaagcatggccaaaaatcatatcttccaatgaaacatacccccccccccccctccccacacttattcctaaaacaattctaaagctccaaaattccttaagggtacggtgatatcatggtttttcacttaaggcttgtagtgagcttcaaaacaaggaaagggaaacataggctcaaaagggctatcaaaggaattaattcaaggtacgctcatttggctagaggttataagaataaaatgcctaaatcatttcccaacatgcatgtgaaccaagaagtatcaaca

SEQ ID NO: 27958 - DNA, 415 bp, Glycine max
tccatcacattcccttgttgttggtacccatttttgttccaactcaagtgctcgatgaaatgcctcaatggtacttttgcctaagtttgtgaatatggccttttgattggatttgggtatgtatgattaccatttttggatgcggacagcttgcgaaaattaggataaaagccaaaacatgacttatgcctagggggggtggggggcaaacctttgtttgttgaaaatacaaaaaggtatgatgagtgagagcatgttggtgaggtttcccctttaggctagcacttggtttgggctgcaccatgttttccttgtacctagatcatgtgaaaatgttgttcaccatgtacatgtgtatgctgaataggtagctaaatgctttgcataatgtgcatatatgttgaaaatggcatga

SEQ ID NO: 27959 - DNA, 362 bp, Glycine max
tagcttgagatgaggaagtgttgaagggtgaaacttcctgcttttattgttgaccacagagtggtacctggagatatgtcgcgggggtcaagagaccttggggacgtcaggtggggtgctattgcccaaaaccaagcttgaccaatcccgacccaacccgggcatattcggtcagtgagaacctgtgatgtacctaagcaggcgagctcctggcagtctacagataaaaggaaaacaagaccacaaagcaaggaggcttgtggtggctggccagctgtgaattttgtgtaatatgtgagatatggcctctggtacatcgataccaagggtgggtaatcgatcacaacgcttataaatgaaga

SEQ ID NO: 27960 - DNA, 396 bp, Glycine max
  unsure at all n locations
tagccctagaggggatggaccttntcaggttttggttatgatcaataacaatgcctataggttggacctcctagaagagtatggagtcagcaccacttttaacatttctgatttaattccttttgcaggtggagctgatattgaggaggaggaactaacagatttgaggtcaaatccttttcaaggggaagggtatgatgcaatcctccctaggaagggaccagtcactagagccatgagcaagaggctccaagaggattgggctagagttgctgaagaaggccctanggttctcatgaacctcagggtagatttttgagtccatgggccaagtttgggtccaattctctttgtacatattagactangatgtcattatatntgatccttgtattt

SEQ ID NO: 27961 - DNA, 383 bp, Glycine max
tcaagcttgaaactctaataattaatgaccattaccataattcaatgcaatatctatgaataagtagtggttggaagctcactgcactgtttttcggttaatgggacatatgacataccttaatgtatcaacaaggaagaggtggaccaacacgtcccacactgtagtcatcccactctgagaaggcagccccagcaaatgtttcagtcaagccatatccttgcccaataggagccctatcaacaagtaaatatagagaacttcaacactaaatggataataaaaggtgtaaatcaaatttatcaactccgggacagtgaaactcttcctgtatttctgtgaatcaataaagtccctatcaaattatcatcagtgttctatca

SEQ ID NO: 27962 - DNA, 367 bp, Glycine max
  unsure at all n locations
tagaagacctaagttctgaaaggcttgaatgcaatcaaaggtttcagcagaaaagaattccatatcaataaacttagggtcgataatggaacgagatgagaaaagattggagtaccgtttctgctgttcgtcggaagaaaacactagggaagatgacaatgaaggtggaattggtgctgtggatgcgctagtggctccagaacgatgagctcttgaagccgaagcggaggcggaagaaccctttcatttctttgacgattctgccattntagggagtttttgcagattntaatcggtggaatcaaaagaaaaatgagcaagaagaagatttgcatntacgggagttgatttgatgaagaaatgagtg

SEQ ID NO: 27963 - DNA, 385 bp, Glycine max
agcttctggaggttgcctcttaatgaagcttctagagaaagctacatgcagctgcctcggtaaaaacgctgcccagccttcattaaccattggatcttctcgaaaatttggccttaaacttcacaagacacttttccatgatctgaccgttgggatctttgagaagatgtctggagtgtgctagaagtctcttaataaagcttctggaggaagcctcttaatgaagcttctagagaaaactacatgaagctgcctcggtaaaaatgctgcgcagccttcgttaaccgttggatcatctcgaaattttgttttcaactttacaagacaattgtgcatgatctgaccgttgggatctttgagacgatgtctggagtgtgctagaagc

SEQ ID NO: 27964 - DNA, 434 bp, Glycine max
tgtgtaccaccattttcatatagaacactagtttatgtttactatcattgctattatttctttcttcatcattaaaggaaacacttgggctgtcagatccctccacctttgggcgcattctttaaaacatccgtgccccctttctgcacatgttctgtagttgcatcctatccgaagacattatactgacactgcctaacgaaggcaaccattaggtgcttccaagaatggactcgggaaggttccaagttagagtactaggtaacagctaccctagtaagactttcttggaaggaatgtatcagcaattcctcatcttttgcgtatgcccccatcttccgacaatacatctttagatggttcttgtggcaagtagtccccttgtacatgtcaaagtccagcaccttgaacttgggaggggtgatgatattggg

SEQ ID NO: 27965 - DNA, 387 bp, Glycine max
agcttgtgttattctatgatgtgattgccttttttcttgtttgagaagatgtgactgccttgtttccttttgtaatgtagtctctacttctagtgaccatttgttatccctatatatgtctgaatagttagctaataaaattaaaacttcctagatggtggatcccattctttaatgttgtcattttcctaacttgtgctcaaaacatcacaagtaaattagatcgttatcctcgaagaatgaggataaatgagtaattatgtaaatataataagaacgatgataattaattatgtaaatttgctattgatgatatactccttaatgataatggataagaaggaattaagctttgtatatataacaatgtaactctgattgtggtgc

SEQ ID NO: 27966 - DNA, 415 bp, Glycine max
ggtcctccgacaaacaatatatgaggatggccatgttattacactaacgaaaaattaaaagccgtttaacaatgtattttttttttaaaaaaacaaaaaattaaaagacattttcttccatacccattcctcatgaatgaataaaacattcaactttgaggaggaattccaagaatatatcccaacgcaaattaaaatagtgcttaagtttatcccttgaaataatgtgaatatatctttcatcatgcaatgaaaaaattaaatgatgcctacaattttttttatcccttgcaacaaatatgtggttaataatataaaaaagattattatcttatttattttcaaaattttgtccagccaaaaaaggttgtgttaatagaaacaaattacaaataaaataataattatgtaatta

SEQ ID NO: 27967 - DNA, 386 bp, Glycine max
agcttggactcatgagtggtaagttgaggtctaagtggatttggtccttttgttgttactaatgtttttccttatggtacagttcagatcaaaagtaactccacaaacaagagcttcaaggtcaatggacaccgacttaagtcattcctcacaaacccttctttagtggacgtagtggtggaagagacttccttactccaccctactcttcctccaccatgacttagggagtttttcttttcctatctccttctttacttttattacatttgtccgattctatttgttggtttaattgcttttaatcttttaattgtgctacattgagaatagtgtgttgtttaagtattgaggggagtgttctttggttttggttttgctaggtt

SEQ ID NO: 27968 - DNA, 453 bp, Glycine max
  unsure at all n locations
actcacgcttatctaattattttaatcaagtgttaccttactggatttatagtttagttttgnnatcaaaaaccattagtagttgcatgcaacacagcaatgcctactgattcactttcctgttatcacattaagaaacattacattgccaatacaagaatgtcccttgccttgatgcttgctaatccctgacatctaaacagaaatggagaatgtagagttctgcgtgcattgattctgtagataataaataggaaggtccaaaaagagagcacgttccacaaaatcggagttctctggctctgattctgatccctacttttttatagacgaaatgaaattaaatctaaacataacataatatgaataaataatacatgcatagacaatgtcaagaaattctatactatcatccaattttatactagaaagtttgttgacttttcagaagct

SEQ ID NO: 27969 - DNA, 395 bp, Glycine max
cgctatagagtaatcgattacacctcaacagatgcgacttttcatatttaaattgtgaaaatcaaaacgtttagaaactctggaaatcgattacaagtattgtgtaattgattacacaagatacaaatgatttgaaaatattttatcactagttgtgactcttgaaattacaaatctaacgttttaaaacattggtaatcgattacatgattatggtaattgattaccactttgtaaatcagttctgaaaataatgctggatatcggtaattgattactaccttctggtaatcgatgaccatagagtaaaactctatggtaaaagattttgtgaaaaatgcttgtgctactcaatgatttgaagaacctttttagtacttatccttattgagtct

SEQ ID NO: 27970 - DNA, 391 bp, Glycine max
gtaactaactctagataaccgatttaaaaaactgtattcactgatatcttaatataatgaatgccatttataattattttaacgtaacagaggaatttaacacgtaaggctattaatactctaatatttctatgcacatttaccattagttttctttgttctttttatttctaacatatcattattattggagattgattgaaacacagaatgaaacttcgaacttaattatcgacatttcactgagaacaaatccgttactcatagtgagtgtgattccaaaggctgaaattgaagtaaaaaaacaaagagagtaatgcacacgattgcgaatcatatcgacaaggtgaatgataacagttatctacgaggaacaaacatatgctattct

SEQ ID NO: 27971 - DNA, 379 bp, Glycine max
agcttgtgtgaagatatagacagaaaaggacttagaaattgttttgcaattgtctatctgctaagcgcagaccctgcgctaagcgctcagtcttcacgcgctaagctgagtttgctctcgctaagcgcatagacccatgattggttggctgaatagtttagctaagcgcacatcactgcgctaagcccaacatcttcatggtaattgaaccttaactagtgggcttagcgtggatgatgcactaaccgccacttattctctggaaaatttttattgtagcagcgctaagcacaccatcctgcactaagccccagatccattctgtaacttgagtttttaagctgggcttagcgggccaggaggtgctaagcgccaatct

SEQ ID NO: 27972 - DNA, 437 bp, Glycine max
  unsure at all n locations
tctanactttgtacaagaatgaagctctgataccacttgttagacaagtggcctcagatatcttaagaagggggggttgaattaagatattccaaactgtttcccctaattaaaaatctatttctctttttactcaagttatgaattcccttaaagacaatcttcttaaatattaattcaaacgaagcaacttgaatgtgaatataaagcaataataaataaaagagattaagggaagagaaaatgcaaactcagttttatactggttcggccacacccttgtgcctacgtccagtcctcaagcaacccgcttgagagttccactaacttgtaaattccttttacaagttctaaacacacaaggacaatccttcctttgtgtttagagatcctttacaacaagagactcacagtctcttaatccctttagagaatga

SEQ ID NO: 27973 - DNA, 372 bp, Glycine max
ttgtcggcttttatgagtgcgaacgccaactatcttgcatgacaaaatctgactgctttgtcttcttatgtcttgttctatcgaggaggaccgagcgtctggaagccctatgtgtgaatgaatatttagactcatacaatgagagttggtaaatgggagatcccatactttaatgtagacattttactaacttgagctcgatacatcgcaagattcttatatcgatattctcggcgattggggagaaatgaaatatattgtataaataatgagaacgatgataatttataatgcacatttgctcatggagattgacctcgtaacgattatggaagatagagcagtctcgtgtgaattataacatagacctga

SEQ ID NO: 27974 - DNA, 438 bp, Glycine max
  unsure at all n locations
tatattatcatcaacccgcaattgtattccaaccttatcntattattcgagaggacttanatcccttgaattaacataaacaaacaatttacattaagaaaaaaggtttactaatgactaatcctctttaccctttccctaggcataaagaaaattagttgtcttctttagtttgcaatccaaaggattttctcaattacaattgaaatcatagaatcatgtaaataggttgatcaggccaaaaacaagcattaataatggaagaagaacaataacgatgctttattaaatagaaacaatgtaggaattacacgaaagttgaatcaattacattaaatcccaacaaaagagaacagttagctactcatagccatgagatagaagtttttgatgtangaacaatggaggataaatccaaacatatctaaagttgtcaca

SEQ ID NO: 27975 - DNA, 391 bp, Glycine max
gtttctgcttgtgtaggactgcttaactggggaaaataatgagggtaagagagagataggggggagcgcgatattgatcgaataacacgggagagaacgagccctatgcgtagtgtgtcacgccagtctcgcccatcgaagtgacctcactcgcatcacatgcttctatctctctgctcggtatccagcttgaaaacatgtcttgccaactgtatctttgaatgcttctacgcgaacacttcgttgacaagctagaacttaattacacacacccctctcataactaagctcacctccttgagaagcttccttaagaagattcctatagaagctagagcttagctacacatacctctctaatagctaagctcacctccttgagatgagaagc

SEQ ID NO: 27976 - DNA, 413 bp, Glycine max
  unsure at all n locations
ntgagcttcgagcacccacgactgtttcagttttctttatcaacaatgtatgttgggttttctttgagccagacttcgcgaacagtgtagggggttctgtgggttcaagcgaggacaatgtaggttttccggcaatgtagggggatttgtgggttcgagcgaggacaatgtgggtgtcgagggagcggtttctggcagttttcaggcgggaggagaaagagaagagtgatttcacggtgacaaagagaagagggagggcaaggctttcgagcgcacgcagcttgtgagtttgtcgtcgacatgcccgtcgccggcggcgccttcagctacctccgcgtcacctttggtccgtgctttccaatgtcaccgtcgccagaagcttgacggcgtgcctaggcaccacaatcggaatc

SEQ ID NO: 27977 - DNA, 392 bp, Glycine max
tttagctttgttgatttacatctccccctttctcaagcaaattcttcttgatatcatcaaaaacttcatgatttacattctccccctttttgatgatgacaaccacctgtaggttaggagcatcaacacagaaaagatatctattcgcatatagtatactccccctcggatttgcaatgattgcttatatgagacagttgaagatttcatatttatcatatgtaaacaaatagtctcataaacaaaagataatttttcttactattttatcctttatctttctctccccctttgtcaacatcaaaaacaaatcatgaatagagaggagaaagatgttaccacttgttgcaatgtattagaatcaagtgataccaaaaggcattaaaacaatc

SEQ ID NO: 27978 - DNA, 421 bp, Glycine max
  unsure at all n locations
actcagcttctgggcctttctaaaagacaaacttttgttatgtttttntacaagataatgcttatcataacacaaaaatgacatgctaatccctcctatttagaatgaactcatgcacacttttaatataaaatatttatgcacatgcgtatgtgtagaatatcccactatttatgtcaacgtacaaggacatccaacacattctaattgccatacatatatatgcatttgaaaagaacacacattctcatgctcaaggcattgcgtcaaaattcacacctaatcacatcctanacacttgctatcacgaactacctacacatatttgaaacatatatcatacaacttttattgtttcactcacatttatttatatgcatgttggaaaactaattacgtcatgcatacaagtgcattcaaa

SEQ ID NO: 27979 - DNA, 263 bp, Glycine max
aaacgacaagaactttgtactcggatgtatgattgaggcccctaatatatcaacacgctctagatctaatggtgaagctctgaccagattcaaacgactatcactttttactcggatgacagagtgattccgtgaatatatggatacgctctaaatgaaatggagaagctcttagcaaattcgaactagaattactttgtactccgatgtctgattgaagcccataatatatctagacagctcgaatggaatgttgaagctct

SEQ ID NO: 27980 - DNA, 417 bp, Glycine max
actgtcaatttcagcgtctcgaatagttcggttttattcagacatccgagtaaaaagttatcgtcgtttgaatttggtcggagcttcaacattcaatttacagcgtctcgatatatgacgggactcaatcagacatccgagtaaaaacttattctcgcttcaatttgctctgagagttcagaattgaatttcgagcgtctagatatattacgggactcaatcaaacgtctgagtaaaaagttattatcgtttgaattagctcggaacctcaaaattcaattttgagcgtctcgatatattacgggactcaatcacacatctgagtgaaaaagttattgtcgtttgaatttgctgaaagcttcaactttcaatttcaagcgtctcgatatattacaggactcactcagacatccgagt

SEQ ID NO: 27981 - DNA, 245 bp, Glycine max
gatccaacttatgcagatgtgagaacatattgtcttacttaaaacccttgtatgtacaatttacgtgtgtcttgatcctctatgagaggatgtccatccggacgatgcatatcatgtgtagctgactactatggactatagtcacacgtccacatgccacgtgtaatgctctagtagcgaataatattcgacatatcaattatcataggacaatgtaaccatcatgatcaaccataggtggaacc

SEQ ID NO: 27982 - DNA, 408 bp, Glycine max
  unsure at all n locations
ntgaatccaagaaaaaccatgaatcctttgttatccctgccacgttacaagcctgataaagtccttaatgatccacattgtgcatgtatgattgcattgattgagatgatgtgcaaagttaggaattttacaattcaattgttgtaattaaaacacttataactgaaacacttgcgagattaagagaaacactagccttgtgaggaataaagattggtgactcattcgtgtgacttgtcattcttgctaaatgattcatctcgaagtgcatcattttcgtactcctttcatgaacttatgacaactgtgaacttgagaatangtcaatgaagcttttggaatgtatgtagttatctcatgtattgtgataggtaaactctaaactttatctcagtgtaattagtactt

SEQ ID NO: 27983 - DNA, 367 bp, Glycine max
  unsure at all n locations
cttttctcccactactttntgagtcatgattctgaaatctgaagctcttcataaagttacccaagtcctccgaagttctgagatcgaactctttctattacatgtgagaatgtgttcatgctctactcctcatttccactagacgcacacacttgagaatgactatgaggaatagggataaaaaaggaaaccagacaaaatacccactagaaaacaattttgtcgaatctataagctacttgaactagccgtaaagggtgacacgcgtatcttaagcaaaatcacataatctaaaatatcctatcattttgttcaacaacataatccacgcttaatccagataaacatgcgttcaatggatcataat

SEQ ID NO: 27984 - DNA, 267 bp, Glycine max
  unsure at all n locations
tgaattaatcttgaaacaatttttattcttttattgngcgangaagnaaccttaaacgcaaccttgttagatcattcttcggcatcatccaaatcatgtattcatacattcacacatggcacttcacaaatccacgtcttggcttatcctagcacgccactctatgagaagaatacgttggccccttacataaacatccagctcctgagctaacctccattgagataagcatgcacgagctctaaatagaatgcgagctccttccac

SEQ ID NO: 27985 - DNA, 392 bp, Glycine max
agcttctaagttggtatactaggtgaccaccgccccggccaagctttcttggaaaaaatgcattatgagcttctcgtctctggagtatgcccccatcttctaacaatacatttttaggtggttcttggggcaactagtccctttgtacttatcaaaatccggtaccttgaacttcagggggatgatgacgttaggcactaaacacaactctgccatgtcaacgaatgggtaatcaccaatcccttcgatggcccttatcctctccttgatgagatccaatttctcccttccttccacggtcggagggagtctccccactgagaagtgcagaggttgcagcgggcagtgttgaggagcccccgtggtattgggttggggcataccactacatg

SEQ ID NO: 27986 - DNA, 365 bp, Glycine max
  unsure at all n locations
tctccctctnttccctataatagggggaggagggattatcatttttgttctaccctcctggtatctgaggatcacttgaaattagtgaaaaanaaatcatttccgtaaagaaaattcaagccgaggcgcttccataacgcgtccgaaacgtttccgtgggtaattttgtgaagatattccgccgtctttcgttcgttcttcgtcgttcttcgatcttcaaccggtaagtgcccgaaattgaacttttcaattcattctatgtacccttggtggtccccacttgtttcgcgtacttttattttcatttaatttactttccgtacccccttatgacgagatctagtcattcattgaagacattttct

SEQ ID NO: 27987 - DNA, 391 bp, Glycine max
agctttagatgaggaagtgttgaagggtgaaacttcctgcttttattgttgaccacagagtggtacctggagatatgtcgcgggggtcaggagaccttggggacgccaggtggggtgctattgcccaaaaccaagcttggtcaatcccgacccaacccgggcatagtcggtcagtgagaacctgtgatgtacctaaacaggcgagcttctggcagtcaacagataaaaggaacaaagaccacaaagcaaggaggcttgtggtggctggccagctgtgaattttgtgtgacatgtggtttgtggcctctggtaatcgattaccaagggtgggtaatcgattacaaggcttaaaaatgaagacaggaggctaagatggtctctggtaatcgat

SEQ ID NO: 27988 - DNA, 432 bp, Glycine max
  unsure at all n locations
tggaatgggaagaagccatcaacaaagcacctaagggtctttggatctatatgctacattcatattctagacgtgaagaggcacaagcttgaagacaagactatacgaggtatcttccttgggtatagcaatatctctaagggctaccgtgtctacaacttgcaaactaagaaactcatcatcggtcgagatgttgaagttgatgggtacgctntttggaattgggatgaagaaaaagtggagaagaacgttcttatacctgctcgactatctcaagaagaagctgaggaagaagatccaggtgaaccaccttcacctctaccataacaacaagatcaagaactagcatcaccagagtttactccaagacgagtaagatctttggtggacatgtatgaaacctgtaactnggtcatacttgaacctggaagc

SEQ ID NO: 27989 - DNA, 386 bp, Glycine max
  unsure at all n locations
agcttcttatcttatgctcatcttggnggcgaagctccttcttccatggcttattccctagtggatggcgcctcctctcacctcttctcctttgtcttccgctgcatctccatggtggaaaatcaccattgaaggacctcattgaagctcaaagatccagcctccatagaagccccacaagcaagcttccatcaaaagggctacacgtcctcgccttcagaggactacacgtcctcgccttcaaagggctacgcgccctcaccttcaaaggactatgcgccatctctttgagagggctacacgtcctcaccttcagagggctacacgtcctcaccttcatagggctacatgtcctcaccttcatagggctacacgccctcaccttc

SEQ ID NO: 27990 - DNA, 443 bp, Glycine max
  unsure at all n locations
tttcttataagttgatgtctttgtctgcctagtttctttattcttttatcaagctagaaatatctctcaattaaaatgaattcaagcataattcaaattgaaccaagcaatcaattgatcactatgaaaggattaataaatctcacccctaatcccaaattcaatttctcaaatctcaacataatcatgcattaactcagaaaattaaaaaaacaaaaaagggaaaaaagcacaaatcataaaaaatgaaaattaaagcatagaggaactcanatttaccatagccttgagatcctaggattgaaaaacttagaactccatgagaatctttgttgaggggtttaattcaaaaattaagaagagagaggaaggngagaagaagagagagaagagaacacanaaacttagaattgaaattntataaaatgcaagtgtaatgtaat

SEQ ID NO: 27991 - DNA, 394 bp, Glycine max
agctttaaattttattcttcttattggttattttacctgcaaaatacattcaaactattttaatttgtttcctacttctttactgtccgtttgatccgttccgctgatctctggtgtatatatatatatatatatatatatatatatatatatatatatgtacaacttatattttcttgtgtaacggtagtttgccttacacttttatggaaatctttcaacgtcatattttattatttataatctaagaaattaaattagtgaatcataattttaatcgagccgtccaatttagaggtcgaagataaggatgctttcaaggtgtcttaacctaccattgagtcacttaggattgtattgagggcaactcagaccttcctttgagggactggat

SEQ ID NO: 27992 - DNA, 436 bp, Glycine max
  unsure at all n locations
tctcttggaagttcatcattggattggacttctactgtatgatcttcattgnttcctttatcatttccttttgaatcttgttcatcaatattcatatgttctaaagaatctgcaatatcatctagcatattctttcttgacaagatagcattagattcatcacaggtaacatgaatggattcctcgatattcatagttcttttattatataccctatatgctttgctttgtaatgaatatccaagaaaaatgccttcatcagattttgcatcaaattttcctagattatctttaccattattgagcacaaagcatttgcaaccaaaaacatgtagatgagaaatattaggttttctaccattatataactcatatggngttttctttanaatgggtcttattaaggccctattcatgatgtaacatgcagtattga

SEQ ID NO: 27993 - DNA, 399 bp, Glycine max
agctttatacaattaatatattacatatatcctaatgtcacatcctatcagagcgttgtgttttcgtgtcctctagtatgaggttcttcatagtcatccacctattcatctgctcccccgaacacaaagttcaagatcatcacaggatccaaacacaaacaacacacagggagtgagttatcacattcctaactaatggagagaaacaagataacatgtaggtataaatatcatataaacaaaatacaacttacttaagcatcactcacattatttcaccactttttcgcacaacattacatcacaacaccacacatttcgtttattttcacaacattctcgtactcaaggatcgaaacacaatatcatcaagtcaatcaatatcgatcaatacacaag

SEQ ID NO: 27994 - DNA, 446 bp, Glycine max
  unsure at all n locations
catgatttacattctccccctttctcaagcaaattcttaattctccttgacatcatcaaaatcttcatgatttacatttattgtagatgcaattggctttgatgttttgatgatgatcatgataatgtgttgcaattgatgcaaatgggcttttcaagattaaaattcaagacaatacttcaagattacaaggcacaacatcaagatgatcactagaatattaggaagggaattcctaattgaattagcaaaggtttggccaagtgatttaaaataaaaagtgtttttcaaaggttttactctctggtaatcgattaccagaggatgtaatcgattaccagtggccaaatacattntataacagctataaaaatttgaattcgaaattntaaaagctgtaatcgattacacaatattggtaatcgattaccagcagttagtaaacg

SEQ ID NO: 27995 - DNA, 382 bp, Glycine max
tctagctttgtatggtagaaggggtagaacacccgtatgttgggtagagcccggagaaggcctcaccttatgaccagaaatggtacagcaaaccactgagaaagttaagttaattcataaaaggataagaactgctcatagtaggcagaaaagttatcatgataagaggaggaaagatctggaattcgaggttggtgatcatgtattcttgagagtcactacatggactggggttggtcgagcattgagatcccgaaaactcacacctcactttaaatgtcctttacaagtcttaagaggactgtgcctgtggcataccaaagttgactacccccatctctttctaatattcacaatgtcgttgatgtgtctgaacttcgta

SEQ ID NO: 27996 - DNA, 410 bp, Glycine max
  unsure at all n locations
ttatanacgcgggtctgggagacgaaggtcatttggtttcgatatacaaagatgatgttccgagtacattggatttggtacgaccatgccctccttgattccagctgggaaattggcgagtggaggaacgccccggcatttacgcaacgagcataatgtaaacctttacgattntaaaagctctatagttgggcctaggttttagagtttttccttttgttaaggctttgtgtcttttgtttttgaatttataatacaaggatctttcttcatctgttcctacgtctctacccattctcattcatttgcatgtntacctctttatttctgaaacggcagatccgatgacgagtccctcgaaggtactaatacctgggacccgcttatcaacttcgagcaagaaacgaatc

SEQ ID NO: 27997 - DNA, 393 bp, Glycine max
agctttgtatgatgaagtgttgaagggtgaaacttcctgcttttattgttgaccacagagtggtacctggagatatgtcgcgggggtcaggagaccttggggacgccaggtggggtgctattgcccaaaaccaagcttggtcaatcccgacccaacccgggcatagtcggtcagtgagaacctgtgatgtacctaaacaggcgagcttctggcagtcaacagataaaaggaacaaagaccacaatgcaaggaggcttgtggtggctggccagctgtgaattttgtgtgacatgtggtttgtggcctctggtaatcgattaccaagggtgggtaatcgattacaaggcttaaaaatgaagacaggatgctaagatggtctctggtaatcgatta

SEQ ID NO: 27998 - DNA, 483 bp, Glycine max
  unsure at all n locations
acgcctgacttgtgtgatgccatgacgtgcctatnactactaagcttgagcttgtacaagagaccnacgaccggtattatatcatttgcaacaagagatgcaccacgaggaaagtctgaaggagaactcacgagacgatgctgaggactggacatatcgctagaaagatacataaggccactcagataagcgaagggcgaacaaagagactcatcctctttggatacgccgataaatattgcgtatgcacaaatgaagtccagctgagattctgccctgaaaagcagcagaactacggttaatccctatcttgcacatgctgtatgctaatattcgagagaatctcctatttgccatcacaaacaggctgatcaatggctatcaatatcccagctgactctgctacgagtaaaacatgtccaggtccagtgacagcccccctctaagtgatgctggagactcgaatagcatacatatcgtcan

SEQ ID NO: 27999 - DNA, 386 bp, Glycine max
  unsure at all n locations
agcntttggcggcaaagggtaagctatcaagcctcaagcatgttgatgttggtgcttatgaacattgtatccttggaaagcagaaaaaggtcagtttctcaagggtagggaagactctgaaagctgaaaagctagaattggtgcacacagatgtttgggggccagccccagtgaaatctgttggaaactcacgctattatgtcacctttatcgacgactctaccagaaaggtatgggtttattttcttaaaaataaatctgatgtgttctctgtgtttaaaaggtggaaaacagaagttgaaaatcagacaggtctaaaggttaaaagtctgaaatctgacaatggtggggagtatgatagtcatgagtttaaagacttctgttca

SEQ ID NO: 28000 - DNA, 302 bp, Glycine max
ggtgtcagcgtctatgcgagacagagaccattatgtttgctatcatcgccaagtaccacgaggagacagcgtctagccacagcccacgagcatagaatcgccgaagaatatgcccaagtatacgcggaaaaagacgctagaggaagggcgatcgactctttacaccaagaggcaaccatgtggatggatcggttcgctcttaccttgaacgggagtcaagaacttccccgattgttagccaaggccacagcaatggctgacacctacttcgcccccgcatagatacatgggcttctcggcta

SEQ ID NO: 28001 - DNA, 359 bp, Glycine max
agcttgtccactgttaattcgagttaccactcaggctccaaagtttgacctatctgagaagtttgattctgtggcatgtcccgctcatgaatgaaaggcttgacactttgatagtccgatgtatgatgcttcagacaattgatttgcttcactgcgctgaactttcccgtgtggagatctatgcggccgagcatagatatttcaagatagcgagaatagctgggtgtaataatatggcaatggttgaagttgttggcccaactcttgggtgtgagcactatcgttggcacggaccaagcacattaacattccacgcacctcgatggagtgatgccttggtcaatgatgtgcctgctggg

SEQ ID NO: 28002 - DNA, 362 bp, Glycine max
tatgcaaattatatcaaattctaggcaggttctgatttaggttttgaaaaatcaaagaaatgtttgaattgtaattttggttctcttaattttttaaattgataatttttgatttttgtaatttctaattataatatttgctgttcttagttgtataaatttacgactttgattctcttgatagattgtgaactaataattatatttacaaagaaaaataatactaatgattattaaagatcttacattaagtagaaattcaatataaattattactgatcagaaattctaataccagattattaactcaagcatgttattagagtaagtgaagtcgcgggtgcacgaccgaatatagaaaa

SEQ ID NO: 28003 - DNA, 389 bp, Glycine max
taagcttatgctactgcatttgaataagtacatttataagtttatttgcttaaaatcaaatgaaatgtatgggattatctcgcttgaggtttcctttattgtaactcatcactttgtataatgctagcaatttcataaaggtcaaaatgcttgtggttgaccataacttcttattgcagggcactatgttcccgatgttattgtggctgcattaattggaattgtaactggttggtgcacaggccctctaatgcccatatgtgggcattggttagccaggtcatccatcttgcaatttctgctacatcttagtgtgtttgctttggcattatcatctcagttctttccttacactatgtctgcgcctaagaggattgtttttcagcata

SEQ ID NO: 28004 - DNA, 419 bp, Glycine max
tgaagcaaagtgtaattgcatcataatgagagagttttattttagattgcccttacaatttgtgccagcatttcttctcttcccgttggcctatatatacacccgagcagagcttagccaaatgcttgcgcatggctttaggtttatggctgtttgggatagtagccaattgttatttgtcggctccaatatatatcgtaagatatgcaactttgtgtttaacataattgtaaagttatttttttcccttccttttttgtgggtaggccatttaatttgaggcaattggaggattgtgctcctcaagttgctccattcttgttatctgatttccattgagatgaagtgattcatcaatggaagtgtgaagtagaactcattcatattcgttaatattgtgaaaagcatactgatttctt

SEQ ID NO: 28005 - DNA, 372 bp, Glycine max
agcttttagagttatgtctcgtatcgatttaatcaattatagtagtattttaattcattactctgttgtttgagacaatgactaatttagttaggagtctctactttaatcaattaccaagtggattaatcgcttacttctctctcgttcaagtgtttagaggtgaacaataacactttaatcaattacttaggtcatctaatcgattacattgttcttgagttgtttttcagatattggatgaacactttaatcgattactttgataaaataatcgattaccttatagatttaatcgattacagatggttataacttgtttctttataaataaccatcttgtgttcacatctaaaatatcatgagatcatt

SEQ ID NO: 28006 - DNA, 379 bp, Glycine max
  unsure at all n locations
nntgggctgaggacctatataacagttccaatgtttttgtttanggagttttttttcggagaggagaataattctaggattttagaatttcagtttttattactgttcatgcacactgttcacgtagaataaaattcattttttgcaaatcatctctaatccatacattttttaatattatgctctttttattttcttttgatatactttgtgctttaacgacttgaattcaatatgattttgtttatcaattatttttggatttgtacattacttatacgaaattttataagtttctttttttagttagtatttcactaggttttaaaataattaattaatcaaagacgtctntaaatagacttttaaataggctcgt

SEQ ID NO: 28007 - DNA, 379 bp, Glycine max
agctttactcttctaaatgtatcaggtctttaacaagtacaatctacgcgaattcttcatacatttgttgatagagttctttaaccaatagtttgtcaatcttttcaacaaacatctaattgacatgtgagttttcaaatcactaagagaatgttcaggaatccgttgcaaaattatgttaggggtaaaggtaattttacgagcggattaaaactcttacttttgcatgtgttttatttttattggttggatttgcattgaatgcacaccacaacatttacaacgcaaaccaaacatacactagggcccgtttggtggccaaaatataataggataagataactatcatatcgtgctatgaaagcaacaagataagata

SEQ ID NO: 28008 - DNA, 425 bp, Glycine max
  unsure at all n locations
ntagagggttgaggcatgaacggttgtatgatcatattatcgtactcttcaatgatagagagctcaacacacatgaagtagaacttggagaaaggcaaatggacaatgaaggaatattcatgattagactcagccgaaaactatcttgtccatggtctaagcatgttgtcttcagattttgtaggaaagtattcatgtccatggtaaatgaagaattttccatattccttttggacactgtctataggaggtttctcatgatattctaaacctaagcaatgctccttgaaccattgcattctcctcaaaatgtaccaatccttattagaatgactggtattcctcttgatggcttcaatcttatgcttgaagggttgactangacatactntaatgaatctagttganggtgcatcttcatcttc

SEQ ID NO: 28009 - DNA, 392 bp, Glycine max
agcttttagtgtttaagtgtgtaagggtgagacttcctacttttattcgttgaccacagagtggtatctggagatatgtcgcgggggtcaagagaccttggggacgtcaggtggggtgctattgcccaaaaccaagcttggccaatcccgacccaacccggacatagtcagtcagtgagaacctgtgatgtacctaaacaggcgagctcctgacagtcaaccgataaaagaacaaacaccacaaagcaaggaggcttgtgtggtggctggccagctatggatcttgagtaatatttggaatatggtctctggtaatcgattaccaagggtgggtaatcgattacaaggcttaaaaatgaagacaggaagttaagatggcctctggtaatcga

SEQ ID NO: 28010 - DNA, 352 bp, Glycine max
aactgttaagcactcagaaagggacgaatcgtctgtgctgtatgtccttgctaaaccatgtttggtaaactcttcccaattagttggacaactatgacactgttctttatgaaaaacttattcttacatgatttgctatattatttatcctttctccacgttctgctaatatttccttagatttattggttggatattggcataatgtcatgcataaaagtatatactttgatcgacatctatgattgagctgctgggtgatatgagtcgcgtcgcattttagcatattattatgtggccttttacttaaattaaacagatgatgcgttgtatacgtcttagatccgcatat

SEQ ID NO: 28011 - DNA, 390 bp, Glycine max
agctttatgccttctttcatattcaaatcaaatcagtgtttcaaaagttgttcttttatcaagtccatgcaaaaatatctgagttcatttggtttttgggaaagtccttcattgtttttcattctcaaatgttttcaaaagaaatccttttgttgtcttctgatccaaaaataagtttcaaaaatactagttgttgattttttccaaaggatgttacattcaagaaaaaaaaaatttaagtcccagaaagagttataatctataactatactaatagaatataaaagcacgcacaaattagtcaaaataaactcgtgtaagcttttcaaaaaattcaaaacaagttcaaatcatggttgaagagctcaatctccttgacgatcatggttg

SEQ ID NO: 28012 - DNA, 355 bp, Glycine max
cttcaactgcacaaggctagcaatatttgtttagtattcttgtggagccttcactcgacgagacactctgacatatactcataccatccttcatggacacagtatggcaagctgagcgctagtggagcttattcccatcagaccttgactgcacatgagatgctatgcacatatcggctacatcttgacgaccatcaatccttcctgatgctagccttgaaagctaaggagcgtcctgctcacgctattacaaacattttcctcctcatgcactaacatcgacacactgtttgacgttctgatcagacgagcataggaagatcaatgcaattggacctcacataccatatgcatc

SEQ ID NO: 28013 - DNA, 386 bp, Glycine max
cgcttatgaagatacaataatactttttgcccaagcatgaagcccttcttaattatcatgctatcatggaacttcttggtctttacttagaagaacttggcattctcatacgcttctatgcggatctcatctaactcactcaagtgctactatctctcctcaacagcttgatccatcgagaagatgcaggtcttcactgcccagtatgctttgagctcaatctacactggaagatgacatgcctttccatagacaacgcgataaggagacattcctatgggcgctttgtatgcaatcctatatgcccaaagagcatcagccatcctagtgcgtcaatctttactgcttggctgcacaatcatctctaggcttctcttgatctccct

SEQ ID NO: 28014 - DNA, 371 bp, Glycine max
ccttcccctttctataatgggggaaaggatttatattttgttattccctcctggcaagacagaatcacttaaaattacggaaaacaatcggtttcatgaagaaaatccaagccgaagcgcttccgtaacgattctgtcgcgttcccgtgggtgaattcgctaacgatttcgaccgttcttctacgatcttcattcgatcttcatcgttcttcaggattcatccggtaagtttcctaaatcagacttttcaatgcattctatgtacccttagtgcgcctcatttgcttctacgcgctttcatttacattcgatatactctctgcaccctcttaagacgcgcttaacccttgatgggagtcatttctcgctta

SEQ ID NO: 28015 - DNA, 392 bp, Glycine max
agcttgtagagttgtctcaagatactactatgcaacttggaagaataagaaaatggtggtctcttcctccttgaagatctcatgcaagatggagaggatgaaggtccaagtttgtgattttttagaggaaattatgagaaataaggcaaagctagcgatgtgctcgattgtcaagcatgaatgaccattgtttatgccatgggggacatgcaagaggctgccacaaatgggtggtcttggttctgaattttagccagaaatggataaagtagacataagcaaaaaaggtaaaaattaattttgccaaaactgataaatcttatcttacatgtctagattaatgcattaacctcctagattattgtgttaatttgcctaaggatacatgtact

SEQ ID NO: 28016 - DNA, 419 bp, Glycine max
agaggcgagacggtgactccacgtcagactcgttatcactaatggcgggactatcttcacgtgagcttctcgccagtgggagcaacgagacagcttccacgtcagctgtctcgccattgacaatggcggcaccctccacgtcaccaagtttctcgccattgacaatggcggctagcgtttctcgccactactgctggcgacatccatggtaaaacagaccctgcttgtaaatactttgaaaaaagactctctttagtaattagtttataaatggacccctctgtggtaaattggtccaaataatatcaattcactagcaactggttcatttgactatattaacatatctcgacctttagataaagtaaaatagcaaataactaagtattttgtcataacttagttgaatacaaaacatc

SEQ ID NO: 28017 - DNA, 397 bp, Glycine max
  unsure at all n locations
ctgcagcttttagncattcttgtagnagcnccaacgacatggattctaaatctttggtttcctcgactgccataacaatgtgctcaaatttaggatctaacgagcatagtatcttccccatgattcttacatgctctaaattctcaccatgtctttatacttgaggtgaaacaacgataattcttgaaaggaactgggaaatggacgtcaactctttcatatgtaatgatatagactctgctatgagcacatgcacagaaacgctctttagttgacattggttatcccagcctaccattttacggtggcgcgaacaggccaatatgatgacgtcgaagcgttagtctccaagggagaaaactagcagagtcaccaccaacgtgtatttgacgaaaac

SEQ ID NO: 28018 - DNA, 395 bp, Glycine max
  unsure at all n locations
aatcgattacacatatttggtaatcgagacttgngtttgttttgaaaaacctaaagatgtaactcttcaaaatagttctgactttttcaaatggtttttaagtttttctaacagatataactcttctgaatggccttcttgaccagacatgaagagtctataaaagcaaggctttgttttgcattctgaatcaatcatttcaaatatttctaacaaactcttacaatcctttacaagccttgaaatctctttgaagttcttcttcttcttctttgtaccaaaagctttatgaagttttctggttttccaaaccttgaaaacttgtgctattcatctgttcattctcttctccctttgccaaaaagaattcgccaatgactaaccgcctgaattct

SEQ ID NO: 28019 - DNA, 361 bp, Glycine max
ttaagctttgagccaaaatcctgactcaccataaaccttgacccagggtgagaatgtcaatccttaccctcggaagcaaaaaaagaatagaggggaaatttccaatcaaagaaaaagagaaggaaaatttccaatgaaagcaaaaaaagaaaagaaggaaaattccccaatcaaagagtgggagaaagcaaaaagaaaagaaaggaaaattcccaatcaaagaatgggagaaagtaaaaaaaggaagaagaagaaggaaagaaagctcctgatcaaggatcgaaagaaaacagaagaaatgtgcagagaggtctttggaccggacaatatctgaacaatacagaattgccaccaaatgaac

SEQ ID NO: 28020 - DNA, 431 bp, Glycine max
  unsure at all n locations
cgggtgatgttgcgcgtactgatgggtacctttatgtttttgctggggtttgacccacgcggttgttgaagagacggcatgggcatctccttctttcctttttgcccctgtcgccccgattcttttggcattcacgtttgtggaggaaacgtaatcaaactttcctctcttcaatccaacctcgattctttccccggcaaacgccagatccgcaaagctggacggcatgtaacccactagcttctcatagtagaacactggcagagtgtctaccatcatggtgatcatctctctctcaaccatgggaggagctacttgtgccgccaaatccctccatcgctgcgcatattctttanaggtttcaccctctttcttgaacatattctgcagttgagtacggtcaggagccatatcagaattgtcctgatact

SEQ ID NO: 28021 - DNA, 359 bp, Glycine max
ttctgcttttatccaaatggacttaccttgaattaattcctttgatagcccctttaagcctatggtcccctttctttgttttgaagctcattacaagccttacgtgaaaaaccatgatatcaccttacccttaaggaattttggagcgttggaattggtttgggaataagctgggaataaacgtgggggggtatgtttcattggaagatataattttttgccatgctcgatgtatatactatatataaatatatatctatatatattgcctagatcttgctataatcctcaaatttgtactgttacacacaaataagagatgatgaaatataaattcaattgctgcaaatgctataaat

SEQ ID NO: 28022 - DNA, 413 bp, Glycine max
  unsure at all n locations
gttcatatacatgtcttcaaagcttatggcattttttgtcttcttcaacaaatgttctttgtctttaaatatatagatttcttcacttgagcttgtgtctaatgattgtgatcgttggaacatttaatatttccattgatacacatactccttcatgctcaaaaaaatcacttttgtgttgatcactttagcagaaaactaattgctctaagtcaaagtaggtttgtcattagccgtgcacanttttgtgatggtaattttcaactctcagatcttaaattttatttattcttcataggattcaacatatcttaggaaaatatcatacgaatctcacacatagagtaataaagaanatcttcaatgtcatcctttaatgctatatcaaatcatgaccttctctaaccatcgtc

SEQ ID NO: 28023 - DNA, 373 bp, Glycine max
ttagcttgtcatggtcttcttttcaaacggaaatttgaaacaaatgactgagttcaccaatctggattgttatgccatgaagatgtttcatagactgaaggaatgctgctttattttataacctgatgagaagccacttgcatatgcggttcaccatgaagttggacaatactatcagaccctgaaccatacttgtttcacccaagaaacatcattcaacatggtatgtacatggacataggagctctatgttgtgtctgattgcacctctccttcgtagagttcctgccctatttcaaattcttcttcacacaccatgtggatcttatcattgaagatgctcgacatgatgttatatatatactttattatt

SEQ ID NO: 28024 - DNA, 374 bp, Glycine max
  unsure at all n locations
aggcacctgctgagncattttaatttttacggctngacnggctcaaagacaatgatcatactaccagtgacacgatggataatcgcataaaagggcttcccagaggtcttgcaatggataaagacagggttaagaagcaaaacctctgcaaatcctatagccttctgcaatgcagaagcacttggtgcagtgaatagagtttttatgtcagtgccaataccaagggcagggtggtcaccaacactggggacagcatggctcaccatggtcagcatttcgggtgcgttctcactgtatgcaatgaccttgcatgttttctcatctaaggccaacaagcacccaagaagctgaatcatcttgcctttctgcatgtg

SEQ ID NO: 28025 - DNA, 386 bp, Glycine max
agccttctttgccacccacatcccgcatccatccggtttttcactgttcgatcctccgaccatatcgcccaccattgtcatccacagaaacccccatcttgctccctagttcagccgaagacaatcaaccaattattacccccctcaccatactgaccacaaaatggctaggctctggaagtcttcgacaattactggtgttagtccaatggtctggcctcctcccagaagacacttcgtgggagccatggttgaccctcaaggaaacttacatccttgaggacaaggttgttttcgatgcacacgggaatgttatagccaaagacatagaacaccaacatccagaacaagaatcaagcaagaagcaccaagaggcagaaacagag

SEQ ID NO: 28026 - DNA, 358 bp, Glycine max
aggaatccgaggacctctttagatttggttatgaagaccgcaaataggctgttggagttaataaattcaccactgatttctttggaatacagcttttcctgaacaaaatggcaatcaatctctacatgcttagttctcatgacatacaagattagacgcgatgtgaagagctgcctgactatcagaatacaacttcatctgtggaacatcaaaaaattgtaattcttgaagttgtttaatccacacgaatacacaagtaacaagagccatagctctatattctgcttatgcacttgatccagcaacaacactctgttgcttgcttttccaatagacaatattcccaaagaggatacac

SEQ ID NO: 28027 - DNA, 387 bp, Glycine max
tcaagctttccaccagtgatcaagtcgaagaacctaaagtcactgagaatggagtaccattctcagttgatgctcatggtaacaactccaacatggcttcagaggaaagtggcgctgtttcaaaccaaaaacattttgtggttcttgaggccaaaagggtttcttttattgcagggttaactgttgttgattccaggcataaggaagaggacagttacaagaataaaattgaaaacattatgttagcatttcgaaaaatttactatgggatatgattatgtaaatcattctcaaactgattgaatgcttaacatttatacttattggaattgaagtccctatgaagacattatgctagcattttcaaatacttacattacttcacca

SEQ ID NO: 28028 - DNA, 400 bp, Glycine max
  unsure at all n locations
tgctctaaatntacattgatggggngatttattggattaggttatatgccatttttgctttaagagtaacgtcccactggtaaaactaactttccaaatgtttgccttcgcaggaatggccccaaggaagcttgcctcaaagaggtccaggaaggacaaggcggccgaaggaactagttccgccccggagtacgacagtcaccgctttaggagcgttgtacaccagcaacgtttcgaagccatcaagggatggtcgtttctccgggagcgacgcgtccagctcatggacgacgagtatactgatttccaggaggaaatagggcgccggcggtgggcaccactggttactcccatggccaaggttgatccagaaatagtccttgagttttatgccaatgct

SEQ ID NO: 28029 - DNA, 359 bp, Glycine max
agccttctcgcttatcttcttatgcaagtcactctcgtggtggcgaagcctctccttccatgactcagtatctagtggatgacgtcgcctctaacctctcctcctttatctttcgctgcaattccatggctaaaaatcaccattgaaggaccttattgaagctcaaagatctagcctgcatagaagcttcataagcaagcttccaacaagtggtatcagagcacacgagcttcaagtaggtgctccttaaacctccactaattttcagctctactttctcctccattgttgttacttcgattctctccatgtatctactcacgtgtctagtgctgaatgtccgtaacataattttttat

SEQ ID NO: 28030 - DNA, 403 bp, Glycine max
tcattgcctaacaagccaactcacttctacattcctcttgagactcaacataatgatgcacggaccactattgcacttgtataacaattgtatgacctattctatggtttgagtaatacactatttgacttttatcgcaaatgtcatcttattctatgcaaaagacatagctcgtttccctttccaacagaatgcctccatactctacttattgcacactgtgtacacaggcagagagaatctcccattacttactgtgcactatgtacccttgatttgatcacctttcttcttctttgtgtatataaactcttctatctgtactaacattgttgctctgcatgatcttgctctgacctttcactcctattctcaaaataaaatgaaattcctacttccctta

SEQ ID NO: 28031 - DNA, 368 bp, Glycine max
  unsure at all n locations
cttgcaacacacgagaaaacaagacgacaccngacagagcaaaaaaaagaatccacctcaaccaacaggcatccaggtactgctatacacagcacacaaacagcactcaccaaaggtggacaataggaacgagcaacagggggcataacaaaaagaggaacgagatagggaaaatgggtcacaacaaaacgatcctacgaaaaagagcgctcgacatccagaaaccgctcacgcaaggatacatcacacagaaggacacgaacgcacgtacgagacgacagactaacgcccctcaacaagacgagcacactaagggaagcgcacaactccatacaacgacacgaaagacagcatcacaagaccacacc

SEQ ID NO: 28032 - DNA, 473 bp, Glycine max
cgcgcctttggttgtgtagatgcatggctatacggcgacacttagaatacgcagctttgagaactgagaatatacagatattgttgtgtaattttgtgaagaactaaatacctttcaattccttatcttgagacccaacacgaacctctcatcggtctcttcagacacttggacctaccttcttacaacgcaatgtctctcttggacgccaagagcacacacgccgatggaagtggcgacgccctgaaaaactgcgaacaaacgtttgctgacacgaattgtagtacggagcttatactgtgctgccataccagagcgtatgcacatcctcttgacagacgaccttgataatgcctcccaccactggtcctcgcactgtgaacttcgtgaactaaactgatctcgtctgacataccacttcctactgcttggtttttctgctgtacgcacaacctagcttaatctttatcctg

SEQ ID NO: 28033 - DNA, 392 bp, Glycine max
agcttcctctttaagcttcttatccaagtcactctcttggtggtgaagcttctccttccatgacttattctctagtggatgacgtctcctctaacctcttctcctttatctttcgctgcaattccatggctaaaaatcaccattgaaggatcttattgaagctcaaagatctagcctccatagaagcttcataagcaagcttccaacaagtggtatcagagcacaagagcttcaagtaggtgctccttaaacctccactaattttcagctttactttctcctccattgttgtttcttcgtttctctccatgtatctcctcacgtgtcttgtgctgaatgttgttaacataattttttagaagttccaccgattaagcttgctatagaagcta

SEQ ID NO: 28034 - DNA, 443 bp, Glycine max
  unsure at all n locations
taacgattatgtaattntcttcatactgcttctctggaagaaattatgcttagagacaaagatattagaattgtttcactattttacttttatagtaaatgtaatcttattctattgtttgagtaatacactattttacttttatagtaaatgtaatcttattctatgcaaaagacatagttcgtttccctttccaacagaatgccaccatactttacttattgcacactgtgtacagaggcagagagaatctcccattacttactgtgcactatgtaagtttgatttgatcacctttctttttctttttgtttataagctcttctatctttactaacattgtttttctccatgttcttcctctgaccttcaactcctattctcaaaatanaatgaaaatgcgtaattcccttaagctgttggcactcccctaatcccttctc

SEQ ID NO: 28035 - DNA, 392 bp, Glycine max
agcttttagcgaccccggatgcagcggccaaacaataattgctgctaatattgtcactaaaaactcaataattgccactaagaactagttttggtgtagtggttatacgttaaagctagactagaactatataaatgtcattctgagtggtggtgaaattcactactatgctcgttttactatgttactaggcctagacccatgtgatgcacggatgatttatttatttattatcatttttattggatgtcttaaatattatatatcaaaaaggcaagtacgataggaaaggaagtagttgtgtttaaaaatactaatactttagtcagtaaaatctgactaaatatttttagaattccaagagatgtgaaataaaagtcattcttattttt

SEQ ID NO: 28036 - DNA, 398 bp, Glycine max
  unsure at all n locations
cctgaattagatgccaggaacttcctctagatttaaatgtgagaagatagaagttctaaaatttcttattgccttccctttattcatttcatatatttatagtgagtgtatatgaaaatgataatgattaatcctaaaggtcttgccagcacacaggggacaagccataacagattggatcatgggggacaagcactagcagggataggcactaatgatactcagggaaatcaagcactacacgataaattcctatattgtcctttgatgttaattgcttagtgaatgaacttctcccatcctgagggccttttcgtgattcttcttggccttggattgttgctatcaatattactccctgtcttttcattatgatatganaaataatatgaacacat

SEQ ID NO: 28037 - DNA, 394 bp, Glycine max
agcttctagccatatggacttaccttgaattaattcctttgatagcccttttgagccttgtttccctttccttgttttgaagctcactacaagccttaagtgaaaaaccatgatattaccatatccttaaggaattttggagctttgtaattgttttgggaataagtgtggggggtttttgtttcattggacaacttgttttgttgactacgcttcatgatgtattttgggccatacttgatgtacattgtatattggttaaatgttggacatgctgaatgaaatgttgtttctcaaaggcaaaaaaaaaaaaaaaaaaaaaaattcgaaaaaaaaaatgaagaagaagaaaaaacaaaaaaaaaagcaataaagttgagtgaataagatctta

SEQ ID NO: 28038 - DNA, 432 bp, Glycine max
gctgtctctctcctaattgtatatatatatgttatttttatgatataaaactaagcaagtgagtgaaaagttttcctcctcacatattcaaagcttcaagttagtaccagagcgggtcgtatccgccgccgtccgccgccgtccgccggccgtttcaaccggcaactacagggttctgtgcgcctcgaggagcgcaacccagcccaactaaccgctgggccaggagcttccccacgcgccgtctccgtgcgcgccaaacgccggcgcgtgaccaccacgtgccgccctccccttgccggaaacgcgcgcatttgcttccgaccgtctcgtcgggctctcctgagtccatatcagccattagtttttgggttcggcacttcgttgagtgaccttgtgccttccttggctctctactttaagttcctttgatct

SEQ ID NO: 28039 - DNA, 396 bp, Glycine max
  unsure at all n locations
agctttatgaattttatanagcccagaaaagtaggaataattaaggaaattatagctaactaaggaaagatagctaattgaggaaagaatggctaattaaggaaagaagactaattaagaaaagcagaataattaaggaaatcagactaattcaaaaacctgctaatctacacctataaaagaagatgaaaaaagaaggaaaagacacacataaattccaatacaatttcttatagaagacaaagactaaaagaaggagaagtaagcaatggaattcattccttgcctctattctctttcttattttccccttttactaaatatttccctcttgcaattgtaaagtcttcatgacaatgagaggctaacaccctttntttgggaacttggcagcca

SEQ ID NO: 28040 - DNA, 440 bp, Glycine max
  unsure at all n locations
tcgaggcctcgaggaggggaccgaaacggtgttaagcgtatgatggagctcgaaatgataggctgggaagcccaggtgttgatcacaccagagaagcaatacttgcacatgtacacaatgctgaacaccacaaagcacaccacgagcatgcccagcaagaaggcgatcagtgccggcggggtgttgtatggcgctgcggccgatgatgacgacatatcgtactccgatgaagacacagttcttcgtagtgggttgtttgcatggatgagaggtgcttttttttatccgtagaaattgaacacagtaccaggagtttacaacgcagatgagtggtgtttgagaccatatacaaagcaggcaaatgaagctaactaattggtaatagtaaaggttgatcnagtcctaatggctcttcttttctttttcttggttttctctct

SEQ ID NO: 28041 - DNA, 393 bp, Glycine max
agcttactagcttatcttctaatataaagcatataccacaaactgtgaaccttaccccaaataacaaactaatataagcctttaatataaagcatataccaccaaattgtgaaccttataccccaaataacaaactaagtaaagaatttgtaaccaaagattactgaaacattaattaatctccagttgttaacaaaaagaagtgagaaaatggacctgcaaaaatggaaacatatccccaaactggattatagacattacctctacccttgcaatcacagcaccgagcagaactctctgtttaaagcaaaagatctacattgcttagaaaataagtttgtgatctgcacaacaactatatgcggaaaacaatcttgaatagtttgtaatatg

SEQ ID NO: 28042 - DNA, 441 bp, Glycine max
acctctcacaaaggagaagacaaagtaaataatgtgtgtctccaaactcttaagaggtgagtttgaatccttacatatgaaagagtcggagtccatttctgattatttttcaagaattcccgtagtttcaaatcaactagaaagaaatggtgagaagttaaaagatgtaagaattatggagaagatactatgctcgttagatcccaaatttgtgcacattgttgtgacaatcaaggaaaccaaagatttagaaactatgatgatagaaaaacttcaaggatcactgcaagcttatgaggagaagcataagaagaagcaaaagatcactgagaaaatcttcaagatgcaactaaaggagaacgaagatagtcgaggaaatgagagaagtcaacgaggtggaggtcgcggctgaagataggtacgacgtggaaacagtggacg

SEQ ID NO: 28043 - DNA, 250 bp, Glycine max
  unsure at all n locations
cactgacacactaatcaattgcgcactaaggaacttgaaatggcgaaatgcntatacattttatcttcactatcacatgataaatatcatgatgactggatgttgatttcgctactgtgcttatatgacatatgaactatggctgaaaccaatttaagggcgtgatacataacaatatattatcattattataggaagtcctacatataatatatcaaataggcatgtacaaaagaatcggtatctggtg

SEQ ID NO: 28044 - DNA, 236 bp, Glycine max
cttacctaacaacacattgcctatcctaagtggtgtcctatgatgttaggtgagggtatctctttgtatttgagaacaatactaaatggggagccggtacacgtaatctactactaactttagtgtagaatagtggtacaacacgtatatatattccccaatttatggctctttggttaggattcgctacactatcttgtttaatttaatctttgataggtaaatgctctccacat

SEQ ID NO: 28045 - DNA, 319 bp, Glycine max
ctcatgcttgtcccccagctcgcccagacgagctatgtcggttactacagacactaccgacttctggagggatcctctgaactgcccatgtgggactggctgctctttgcagtcctattattatcaatcacaccgccttgctgatttggtgtggaaatccactaccagtgccgttatgacaatgtaccaatgcctaaacccatctgatgcactgacgaaatgttactaaaccttactgattatgcaagcctcccttattatgtcttccagagcgttacacaacttgacaggtaccacactagcactaacttactattac

SEQ ID NO: 28046 - DNA, 322 bp, Glycine max
  unsure at all n locations
ctcagcttcttatccaagctcatttggggagaaactcctctgcctggctgannccncaaaggatggcgcctcctctcacctcttttactttgacttccactgcatctccatggtggaaaatcaccattacaggaccccattgaagctcacagatccagcctccatacaagccccacaagcaagtttccatcacaacacctattcatccatctttatcatctccaagatcatccacattgctttcttccgatgatcaacgtctatggtatatctctcaattttcttctaggatcatcttacacgctaagtacctatatgtaga

SEQ ID NO: 28047 - DNA, 376 bp, Glycine max
  unsure at all n locations
ttctgcttttatggcgacnagangaaagcacatgtttgtcatcatcaaaaagggggagaacgtgaatgtatgtatacatgattttgatgatgtcaaagaagaatttaacaacgctgctatcaatgataagcatttgcttcaagaatatttcaagattgcttcaaccaacacagccttgtttcaagattcactaaagaccaagccttgccttaaaacaaagtgctttcaagacatgcatagctctggtaatcgattaccacgaagtgtaatctattaccagaagacagggttgagaaatatcagctgaaaaacgttatgaatatgaatttctacatgtaatcgattacacatatgtctgtgatcgatcactagcatc

SEQ ID NO: 28048 - DNA, 386 bp, Glycine max
cttgtaagatgattgttacgattgttaaccatttaacagttatacctgataagattgtaaattaatagttcacgagaatatagtgttcttatataagttaaatccccgagtaatataactggttgcatattaagtgaaaaacagtaagatggaaactttggaacccagctaccccatgtatgctttatgactcttaatgggtatgaaaaaatacagcaaaaaaactggctcagttactcaagtgaggtacgcttggtgactagaaattacatatctcaaatagccgtcacagcagttcaaccttgatgtacgcaaggcaaagcattctcagaatgtgaacataccaacattaacatacatgatcaacaaaatcccttgacgaaaaa

SEQ ID NO: 28049 - DNA, 291 bp, Glycine max
tcaagcgtgtgccacttttatgagaaagcatcaactatgatgctatcagttccaggcgcttaccgaatcatgctagccttgaaacatcgccatctccccatgatgcttcatgcatcatacgatacagatagagcttaccgaggctgattatgaatagccacccaccattccctacttgctgctgaccgatgcttaatccattgctgatttcacacgcacatataaatgtcctgatagcactacccgtagctcctctaatacgatttctatacttgatgcctctgcgtcagg

SEQ ID NO: 28050 - DNA, 66 bp, Glycine max
gaatgaggctggcccagggcctttcggagccctaaatgacaacgccgaccttccagaactctgctt

SEQ ID NO: 28051 - DNA, 385 bp, Glycine max
ttaagctttttaatattattttcgggcgctcgagcgaaacccattcttaccccaagcttttaataatatggccgcgatctgtcattacgtgcgactatctccactatagaaagaaaaaggagaagaacaagcaaatccacacatactattgtgataaatactagaaattatggctttctacatatacatatatacgtcattacaacgatacttatcaactgtagcaaagaatgaaacttcttagaagtcataatatgaagaaatcaatatgtctagatacccccttttctatggacaaaagagctaattgataaaggaagcatcgtactgatccattaacgcgcgtttgaaccgatacgataagaactgcttacttatctcatga

SEQ ID NO: 28052 - DNA, 501 bp, Glycine max
  unsure at all n locations
ccgcgcccttgatttgttgtcgttaccantncngtgacactatagacaactcacgcttgactgtttcctgtgattggcttggagcgtgttcctgtgtagcttaagcggagggcaaagaacgcctgcttctgggggggccaaagccatcgacgagataccactctggaagagctagaattctaaccttgtgccaggacctacgggccgagggacagtctcatgtagacagtttctatggggcgtaagcctcccaaaaggtaacggaggcgtgcaaaggtttcctcgggccagacggagattggccctcgagtgcaaaggcagaagggagcttgactgcaagacccacccgtcgagcatggacgaaagtcggtcttaatgatccgacggcgccgagaggaatggccgtcgctcaacggataaaagttactctagggataacaggctgatcttccccaagagctcacatcgacgggaaggttaggcacctcgatgtcggctctt

SEQ ID NO: 28053 - DNA, 379 bp, Glycine max
agcttgactcacccaaacatggcaagttcaacatgctttcaacaaatttcttcacaaataaccatcatgaagcagaaacctagcaaaactacccatcatatctcccaaaacccaatacccacgaaaatttaggtgagaagaagtctacccaaacctgaaatttcgaggtcccacacgtagagatgcgcttcatgactccgaaaatgcattcctttcgcgatttcgagcagaaatggtgaccaaaggttggagctttgttgggcaacaatggtggatgagagaaaagaggaagaaggctgcgtgagagagagggagagagcttctgaaatttgggctgagtgagggagaaagaaagtgctttttggttttttacaaaaag

SEQ ID NO: 28054 - DNA, 437 bp, Glycine max
  unsure at all n locations
ccgcttgcctgtgcgagctgcaaccgggccttgtgtgtcttttgtctataaataggcatcctaggggtgttttaaagggttaggaggatcagaagtggagggaattgagagaattaagaaagaaaaagaagaagaaagaagaggaaacgaaaccgaggccttaccaaatcgcaactatgatcgtccctacgtcgtttctcgttcggtgttcttcgcaccaatcggttagttttatttttagggattgaatgtgatctatgtacccttaggggtcccctttgttattatgtgcccattcatcttctccatttattatgtgtcattattttctcctatttcttccccctttttgtcaccattntaattactaattagccttaattgtcaaattaattatgcaggcttatcatttgggcctacatgactatatttgtgtt

SEQ ID NO: 28055 - DNA, 384 bp, Glycine max
tctagtgttgataagcagagttgagataagcatccttcaatatgcggatgacacaatcttttttggagagacattaaaggagaacattaaggaaattaaggccattctcaaaatttttgaacttgcatcaggccttaagattaattttgcaaagagttgctgtggagcaattggaatgccagagagttggaagtctgaagcaaccagttggctgaactgtagcttgttgtccattccatttgtctacctaggaatacctattggtgcaaatccgaggaggggccaaatgtgggatcctattatagcaaagtgtgagagagcattatccaagtgaaaacaaagacacctgtctttcggggggagagtaacccttatccagtcagt

SEQ ID NO: 28056 - DNA, 339 bp, Glycine max
  unsure at all n locations
ngagttgttggatgtaagcttatgattgtgttatatatctaacaatatttaaaacagaaatcatctttcattttttttgtcaatgaaaaagtatgttaacaaaataaaaattctcttattcacttcattactacatgtaggttcaccactaaacaagatccagggttaaaaatggaaaaagaatgtgagaataaatacaaagataccaaaaagtcaaactgagaaagacactataatcatgagaagagtctcaaaagaaataatgtctggaagtcaagaaaacctaccgcggatgatgcttgctaagtaagctctccattaacttatcagaataactac

SEQ ID NO: 28057 - DNA, 391 bp, Glycine max
agctttgtatgcttactcaactgaggaaactttcaagaaagtagctgaagagattatgccatggatcgcttaaatttggatgataaaaaacttatattatcatcatgttggaaaactttttcttttttgcctaacttagacaattttggaggcaaataaataaatgctttcatatgtgtgggttttttttaatcagttttcatgttatggtttgtgtgtgtgtgcacgcacatcaaagataatgaggttcaaatctaagattttgtgtagggatgtttattggttccagcaatatgatgaattcaataatccaaataaaaccaattaaattgattaaaaaaaaattcctatttggattggacccaaatcaaaccaattaaaattcgatgtt

SEQ ID NO: 28058 - DNA, 413 bp, Glycine max
  unsure at all n locations
tgaccttaagaggagatcgatacgaaggagctttaattttcatctccgaagagnccaggattgccctcagaaactgtattcttctgctatccacttctttttcgtatgaatttccctcaatcctttcttggttttgttcgttttcattaaaatttggctcctttgctatgttgctgttatttttattatttaattctgaagagtgggttctgtcacaggggtgttaattcgtgccacaggcaaggaaattttttaacttgcgatagttgttgcggccttgatgttnttttttctccctgcagcgtctgggttacatgtttttactgatatctctcaagtctgctatggtggtttaatctgtatctgttggaagatctgaattttgctctttatgttagcatgtgattctcact

SEQ ID NO: 28059 - DNA, 391 bp, Glycine max
agctttatgattatggggtacccatcacatgtggtactaggtggcggtcgggcgatggtgcacaacaagttttccacatccacaaatcgcgcataaacccaccatcccctgttgcccacctccaactgagctcacgtactcccacgtagcccatatcctcgtttctctcaacaccgggtccccatcaatcctcccaagcttccccaacatccaagtaatacaacattcaaacagcacaaactatcacagccaagcaaaacagggcaaaggcagaaaactctgcccaaaacaccaaccaaaatcacaacttttctcacttaaagaccccagtaacatttccttcgttccaattcgttaaccgttggatcaactcgaaaattttactggaagt

SEQ ID NO: 28060 - DNA, 492 bp, Glycine max
  unsure at all n locations
ccacgccatatacgtaagantacaagacacttagaatatctacgcttatcgtcaattttttacctttgacacttaattaaaaattccactttcagacactcataataaacttgaatacaaatattaatatagcactgaatattagtaacgtagtctttatatatatatatatacacacacacacacacacacacacacacacacatttatgtcatttcaacgaggaacacacacacacacacacactcttacaatcacgaaaatcttcgttcggatcgcacactcttacgatggatacaacctttgttctctcttgattctgattgcacactctcttcatacaaggttggtttctcaactccattatctaaggtttcttttttatttcattaatttgcaatttgagcgttgctctcatttgcatgttacctggatttgaaatntacataaagtgtgtaaaagcaaatgcctttggtgttttgagatgatcat

SEQ ID NO: 28061 - DNA, 392 bp, Glycine max
  unsure at all n locations
agctctacaagatttaatgattaaaatatgtnggtgtagatgattcatcttcaagtattctttgtctcacaatagttggatttttcactctgctcttcatctaaagtcaagttcgttgaagaatttcatgtttacattacatgcacatcccttcttcatgcaaagttcatgatgataggttagtgtgtcttgtacttcgacacgaaagtcacttctttcgtcatagcaagtctgcaacaataaagtgcgcctttggatgaggattatcatctttcaaactatagacttcatttattcttcataggactttgaaaaatcctaaaaaaatattttttgtatgaaagaatcttcagacacggagtaataaatgaatgtcttanatgcactacttg

SEQ ID NO: 28062 - DNA, 381 bp, Glycine max
  unsure at all n locations
gaggatgcttcaatgtaggataagannaagggattgaagtaatatggggagcacgaaattgaaggaagaaaaagggagagaagttgaactttgagttgtgtctcacaagactctcattcatcaaagttacaacaagtgttacacatgcttctatttatagactaggtagcttccttgagaagctttcttaagaaaacttccttgagaagcttctttgagaaaacttccttgagaagctagagcttatctacacacacccatctaaaaactaagctcacctccttgacaaaatacatganaatacacaaaaaanaagtccctacgacaaagactactcagaatgccctgaaatacaaagctgaaaccctatactactagaat

SEQ ID NO: 28063 - DNA, 397 bp, Glycine max
agcttcttatcttttgctcatcttggtggtgaagctccttcttccatggcttattccctagtggatggcgcctcctctcacctcttctcctttgcctttcgctgcatctccatggtggaaaatcaccattaaaggaccttattgaagctcaaagatccagcctccatagaagccctagaagcaagcttccatcaattcaagctcttatgaaccataccctcatccaacaactcctttacttgaggaataatctcaagcccaagaggtgtggcagtgctaacaatgtctttttacaaagaagaagatgtagaggttttctaagaggggaagtttctttaatgtttatctttattgcaaaatgaatttctttcttagctaacctcttggaggagacact

SEQ ID NO: 28064 - DNA, 406 bp, Glycine max
tgcttctacattatggttatccacaccttttgtcagttctatgtcttcgagcccgttgacacacagagactaacgtcgtcatctgtacatttgtcaaccagagacggcgagtccgatgacatgcagagatactttatggttatctgcaccttttgtcagccagaggcaagcgagcccattgacacatagagacaatgtcgtcatctgcacctttgtcatccagagacggtgagtccgatgacatgtggagataccttatggttatccacaccttttgtcagccagatgcaagcgagcccgttgacacgcagagactaacatcgtcatctgcacctttgtcatccagagacggcgagtctgatgacatacggagataccttatggttatccgcaccttttgtcagct

SEQ ID NO: 28065 - DNA, 393 bp, Glycine max
agctttcctttgttttagatgtgatttatacatgatttacgacttgtaggatccaatttgcgcaaaattggatgagggcaagagggatttcgaaatctgcctaatttgtgcagcaaaaagctgtcaaattttgtgcagcagaatttggctcttgtgcataaaatgtttgtgtattgctggttgtggaaagggtattacatattgggttctggacatttctagtagatcccagcggtcaaaatgtagatttatgtactatggatctccagtataattttcaagtcgatccaacggttaacgaatcggaacgaagaaaatgttactgcggtatgtaagtagagaaagctgtcgtattggaatgtgttatgcgcgaagctttctgcctatgccctg

SEQ ID NO: 28066 - DNA, 447 bp, Glycine max
  unsure at all n locations
ttgcttgtggagcttctatggaggctggatcttagagcttatattagtccttcaatggggatttttcaccatggagatgcagcggaagacaaaggagaagaggtgagaggaggcgccatccattaaggaataagccatggaaaaaagagcttcaccaccaagatgggccttggataagaagcttggaacgatggtccactggaggaaaacaaagagggagagaaagagagaggggggagcacganattgaacgaagaatacgggagagaagttgaactttgagttgtgtctcacaagactctcattcatcaaagttaccacaagttgtacacatgcttctatttatagactacgtagcttccttgagaagctntcttgagaaaacttccttgagaagcttctttgagaaaactttcttgagaagctagagcttagctacacacaccc

SEQ ID NO: 28067 - DNA, 386 bp, Glycine max
ttctgcttttctcagcatttatgcgagacggagaccaacatgctagctatcatcgccaagtaccaagaagagttaggtctagccgcggcccacgagcataggattgcggacgaatatgcccaagtatacgcggaaaaagaggctagaggaagggtgatcgactctttacaccaagaggcaaccatgtggatggatcggtttgctcttaccttgaacgggagtcaagaacttccccgattgttagccaaggccaaggcgatggcagacacctactccgcccccgaagagattcatgggcttctcggctattgtcagcatatgatagacttaatggcccacataattagatatcgttaggaaacttgtatggtctctcagaccttgac

SEQ ID NO: 28068 - DNA, 373 bp, Glycine max
  unsure at all n locations
ttgggatatagcaccccaccngacagtcncattgtcttctgacccccgcgacatatctccaggtaccactctgtggtcaacaataaaagcaggaagttccacccttcaacacttcctcatctcaagcttgtaagattatggggtacccatcacatgtggtactaggtggcggtcaggcgatggtccacaacaattttttcacatacacaaagcgcgcataaacccaccatcccctattgcccacctccatctgagctcacgtactcccacatagcctatatcctcgtttctctcaacaccgggtcctcatcaatgctcccaagcttccacaacatccaagtaatacaacattcatacagcacaagctatcaca

SEQ ID NO: 28069 - DNA, 391 bp, Glycine max
tcaagcttatgctgcaaacaattacaatagacctcttcaacctcaacagcaaaatcaaccacagcagaataattatgacctctccagcaacagatacaatcccggatggaagaatcaccttaatctcagatggtctagccctcaacaacaacaacagcagcctgctccttccttccaaaatgttgctggcccaagcagaccatacattcctccaccaatccaacaacatcaacagccccagaaacagcaaaaagttgaggctcctctgcaaccttccctcaaagaacttgtgaggcaaatgactatgcaaaacatgcagtttcaacaagagaccagagcctccattcagagcttaactaaccagaatgggaaaatggctacacaattaaat

SEQ ID NO: 28070 - DNA, 392 bp, Glycine max
tgatgtgagaaagcgtggaagagtcagtctttctacttttgtttgttgaccacagagtggtacctggagatatgtcgcgggggtcaggagaccttggggacgtcaggtggggtgctattgcccaaaaccaagcttgaccaatcccgacccaacccgggcatagtcagtcagtgagaacctgtgacgtacctaaacaggcgagctcctggcagtcaaccaataaaagaataaagtccacaaagcaaggaggcttgtgtggcggctggccagctatgaatcttgagtggtatctggaaaatggcctctggtaatcgattaccaagggtgtgtaatcgattacagggcttagaaatggagacaggaagttaaaatggcctcttggtaatcgatac

SEQ ID NO: 28071 - DNA, 384 bp, Glycine max
  unsure at all n locations
tttagcctgataagctnttgncttatctagcgtctggtacgtgtcatataccatagtaggtaagaatataaattggatacaaataaattacccttatgaaaggagaggttatggggatggcagtaactagggcaggggtggtaacagaagcattagtggcagcgatggtattggcagcatcagaaaaggaagaataattgtgcgacagttaactcctgattgatagttttttttctacaatgttatttttttgtgtgggaaagagaatgggacatgtgatttggttctgtggagatgagggaaaaagggaaaaagttgtgtatcctatcataattcttcctaacctaactcccttttctgtatacatntaacctaatgaacgac

SEQ ID NO: 28072 - DNA, 343 bp, Glycine max
  unsure at all n locations
atatgatttatacatgattatatttcttgtaggatccaatcngagcaaaattggatgagggcaagagggatttcgaaatctgcccaatttgtgcagcaaacagctgtcaaatcttgtgcagcagaatttggctcttgtgcaaaaaatgtttgtgtattgctggctgagaaaagggtagtacatattgtgttctggacattttctaacacatcaaacggtcaaaatgtagacttatatactagggacctccagtaaaattttcaagtcgatccaacggttaacgaatccgaacaaaaagaatgttactggggtatttgagtaatgaaagctgtggtattggaat

SEQ ID NO: 28073 - DNA, 340 bp, Glycine max
agccttttgagaacggccagagaccagaccacttaggtactccaccaagcattccatattgcacgacgtgggactaaggcataccataacaccccagtccctatcactagctgacgactgcccaaactttttgagctatatataagccatatctcctatcgatgtgggactaaaccaccacacgtgcggttgcaattgaggcaaccgccacagaggccacaactaaggtgggctagggatgatagcaatgaacgctgatgtgcaacactctccctcgtgcacagagataccagcatggagagaggcacatgcaggaggcccaacaacagatctaggataa

SEQ ID NO: 28074 - DNA, 224 bp, Glycine max
  unsure at all n locations
tgtcagcgatgaggagcccactgcaacggttttttngtatactaggaaacagcgcctcagcgaccgacaaactccggcgctaaatcatgaaatacagacgggagtagcattaggaaccaaaatagcgaccgaggccattacggcgcgagaacccaagagactaaggatatcggaagcgaatatattagacgagtgctatttagcgaccgaactatccgacagca

SEQ ID NO: 28075 - DNA, 379 bp, Glycine max
tttctagcttgcgggatacctgaggtcccactaggaagccaaaggccctaatgagaatggttgaataaaaacaaaactaaagtgagtatcaaaattcgtgatgaagcacggctccacaatctagtatttatctgctctaaagtgaaatcataggtgaaattttgcttgcatccccatgatctcatatgcacagtgttgtatcatcttaccaagcaatagccaaaaaaataaagaataacagaatgaccaacttccccgctattttccatccatttttctcaaatcagtattgaagcggaggataaaaatcagaagagaccatgatgtgaagtgatgcacctgaagaatagaccatgcgaggttgaatagcgtaacgagc

SEQ ID NO: 28076 - DNA, 437 bp, Glycine max
tgttgtcttcacatctcatcgaagggatctgttcagttacagcctctgcatcaatagtagttgttgtcaagtttttttcttgaggatgatatgaatcacaaggatcgggaatattcccattctttctacagctaagtaaactataatctccaatactaccaaacttgattccaactccaatcaagttttcatggggcagtgccaagcctccctcctctaaatcaccccatcttgttttctgggctaagtcaggcttaacagtttggtataatttcctaacttcttcatgtttaccttgagaatccatagtaagtaatgtagacgatttctgactttcagtattatgtctaactacaccagtattaagacagtgtgtgccctcattttcatttgattcaaaaatagaactcgcaacactcccagggacagggttctgt

SEQ ID NO: 28077 - DNA, 357 bp, Glycine max
  unsure at all n locations
ctgtaataagtagttctatcaagactacctgcaatgtatcagatcttgcacatctgccacaactacagcaactcatggtacatataggatgtgcggccgtgatccaagataaagagtctgaaagcttggacaagttgtttgatcttgagaaactcagaatatcatggagcgtgtttgactcaacgtacagtgctatacatgtcactctgccttcagaattgagaaaagggcatcctgaagggtttcctggacgaaatataccagaatggtcgatgcctgacatgatgagtccgagtttgtgcgaactatctataacaagaggaagactcanagggtggatcttcaacactatgctca

SEQ ID NO: 28078 - DNA, 386 bp, Glycine max
  unsure at all n locations
tctcccccggtcgctctgctagagtttttaagtgttatataaaangagaagggattggagcttcaaattcaccgtctctattcgagggacatctctctctctctctctctctctctctacagatattattttacaaatcccaacaatgagaatgtgagaacatgagttccaaaggtagtaccaaattttcaggacgatccaacggttaatgagttcaatatcatagttttattaaaacaagtttgggtgtatgcgaganaaaagacagagttttgggataggaagaagagagaacanatttgtgagaaagatagaacatagaaacgtatcgtanatattaaaattgacctaatatgtctctatttatagctaaggtattctgagtc

SEQ ID NO: 28079 - DNA, 393 bp, Glycine max
agctttgctgctttagggacacgaaatggaacttatgagactaaaccaacatgaagaacatgacatgaaaaagaacggaattgcacttaaagcctcatcttctattcaagacgaaagtgacaatgaggacttgaatgaaataggagaagatgatgatttcagtttcttcgtaaagagattcaataagtttctaaggaacaaaggaaatcacagaagaacaaacttcaatataaagaaaagaggagaagattcatcttttgatccagagagctatgaatgtaatcaacctggacatctgagagttgatcgccctagtttcaagatcagaatggaaaaatctgatatgaaaacctttcaagataagaaagctaagagaagcttacatcacttggg

SEQ ID NO: 28080 - DNA, 355 bp, Glycine max
  unsure at all n locations
taagaacccanacattntagcttcatttcgattatacatactcatggctaggaatccaaaatttggttttagagttagaaaagcatgaaaattaggacttgcttgtgagagtttttactcgaatttgggctgccccatgatcgatactttgcacctaagtgacgtgggaaatgcttttcaatggtatgtggatatatgtggggcatgaaattccttgccaagtgtgaatgattattttcctaaatgaatgtatgatagcacgtaattcccttttgaatgcaagtgtgtgcataatgtaaatagcttgccaatatgaataaatgtgagtgatacaatataatttgtatgatatata

SEQ ID NO: 28081 - DNA, 392 bp, Glycine max
  unsure at all n locations
agctttaaacggttatttctccaaagtgctcttgggcattacgtttaaactggaactgttatcgataagcaccttggctatgacgtggtccatgcacttgactgatacatgtaaagccctgttatgccctctcccctcggcagggatttcttcttcggcgaaggagacataattgttggcggtgatattattgacgagtcctccaaagccctctacagagatatcttgagccacatgagcttcgttcaagaactttactagcaaagcctgatgaggctcagagctcatgagtaattccaaaaaagagaccatggccggngttttgttgagctgttcaatgaccttgaactcgctctactgaataatgcggagaaactcgcttgcttccttta

SEQ ID NO: 28082 - DNA, 444 bp, Glycine max
tgtaagattatggagtacccatcacatgtggtactatgtggcggtcggtttatggtgcacaacaagttttccatgtggcgtccctaaattaatgactggtttaatagtaataatttaaataacaaaaaccatggtaatttttttttctcttcgttttctttttcatttctttctcttttcaccataactaggtttagaagggaaatcctcactataaagtcctgaatggccagttcacaactttactcggagtcatttctttcttaccgctcataattctctaaattattttgctgtttcaaaaggaagaatataccagccattactttaggtcgtcacgtgaaaataaaaggataaagtacagtcggtaaattcttttacaaataaagttgctaatgctctctgttcaaataacaagatcgatcataaatgcattcatcattt

SEQ ID NO: 28083 - DNA, 384 bp, Glycine max
  unsure at all n locations
agcttgtctcataaaggtccaggaaggacaaggcggccgaaggaactagttccgctcctgagtatgacagtcaccgctttaggagcgccgtacaccagcagcgcttcgaggccatcaagggatggtcatttctccgggagcgacgcgtccagctcagggacgacgagtatgcggatttccaggaggagataggtcgccggcggtgggcatcactagttacccccatggccaagttagatccagaaatagtcctcgaattatatgcaaatgcttggccaacagaggagggcgtgcgtgacatgaggtcttgngtaaggggtcagtggatcccgtttgatgccgatgctatcggccagctcctgggttatccgttagtgctggaag

SEQ ID NO: 28084 - DNA, 443 bp, Glycine max
  unsure at all n locations
ntnataggctctgaattcacgacactgcgcttagcgttagtatttggaattggacttagtgctagtcttgcgcttagcctggctgaaggcacctgctgcgcttagcgcgcggctttgatgttgatgctctgccagattctccttcgcgctaagcatgctgaagctacgcttagcagtggatgcacgcttagcccaactgctgagctaagcccaactgctactttttgcaattcaaaacttagcctctttttcacctgaaaatgcacaaatttcatcattaaatccaatggatatgttctagagacagcgttaaccataaaattgtagaagtaaagactttgactntggtgttttgatgatgtcatatgatcatggcgttttgatgccttatggaaatgcgcttctcaagtttaattcaagacaacaatccgagaatacaagat

SEQ ID NO: 28085 - DNA, 394 bp, Glycine max
agcttcttacctctatgtctctgcattctatttctatccttgttcagaacaatcactatggggcctcttcctcaacatacactttcgttatcttcattcccttttcaatcttttttcttaaccaacattaaccgataaaatccacatgcaacacctacgtggagatgcccaaatggttggatacagatcgataatattttatgttatcggctttcttcgggttgagcttttgaagcccgaaaatgactgatgctcaaccctagatgtggagatgcccatcattttctagtcatcactgactttgttaaaactcggagaagacattgtcagtaaaaaaaatcaattaatccaagcattaaaagtaacaacatttcaatttctaataaaaaacacg

SEQ ID NO: 28086 - DNA, 447 bp, Glycine max
  unsure at all n locations
tgctacatcaactntatgtgaagaaacacatccttcatatcaatctccacttgtgcataacttcaaaatatcaagaaacaaatatgagaagaagccaaaaaaaaaacacccatgattccataactcatgtttatggactttttaagttgtttaaagctaaagcaataagctcaaagtttttagaaatagtcaatgactatgatttcattcttgatgtttttgggtgtctgtttgtcaccgcaattttaccaagttgacatctcttccttttggtagtgttgaggttcttcagcaatttgggacaaagcgtatttcctacgaaactaaaccctanaaagctataatttctttntgaaacaattcgtggcataatgaatttgaaatatgttaccctatcacaatcaaatccattgaaaacattatggttatcccaangtatgtaataca

SEQ ID NO: 28087 - DNA, 395 bp, Glycine max
  unsure at all n locations
agcttccttgatatgctagagggaggctactcacacccctccaatagctaagatcacctcatgtcaaaatacatgaaaatacaatgcgaagcttccttgagaagcaaggaaggtaacttccttgggaagcaaggaagaaagcttccttgagaagctagaggggggctactcacacccctccaatagctaagctcacccccatgccaaaatacatgaaaatacaagaaagtccctactataaagactactcaaaatgccctanaatacaaggctaaaaccctaaactactagggtatctttaacttgtacccttaatttgtagggtatcctacaaacctaaaatggtcaaaatataaggcccaaaagaaggaaaacctattctactattggtccct

SEQ ID NO: 28088 - DNA, 425 bp, Glycine max
  unsure at all n locations
tctaactntatacaggaatgaagctctgataccacttattggtttagtgacctcagatatcttaagaaggggggattgaattaagatatcacaaactattccccaattaaaaattctacttttaacttaacccaacaatccaagattccttttaaacaagaactcctagataataatgcaaattaatcttactaaataaaaaataataagcaataaacagtaaaggagtttaagggaagagaaaatgcaaactcagatttatactggttcggccacacccttgtgcctacgtccagtccccaagcaacccgcttgagagttccactatcttgcaaaatccatttacaagatctgaaccacacaaggacaacctttcttttgtttcagatttctttcaacaagaggccctcggtctcttaatccct

SEQ ID NO: 28089 - DNA, 338 bp, Glycine max
agcttttaaactttgtacaataataaagctactgaatagaagtggcctcagaaatcttaaagctctgataccacttgttggacaagtggcctcagaaatcttaagaaagagggggttgaattaagattttacaaactattcctgaattaaaatttctatatagattttgacccaagtcctaagattccttttaaaatgaatttctaaataataattcaaattaaacttactgaatagaaataataagcaacaataaataaaagagtttgagggaagagagaatgcaaacacagttttatactggtttggcaaagtccattgcttacgtccagtcccca

SEQ ID NO: 28090 - DNA, 419 bp, Glycine max
ttttggagtagaaacatgggaccatctcattttattttaaaaagttgtatctagtcaaggtcagagagaccatacaagtttcctagcgatttctaattatgtgggccattaagtctatcatatgctgacgatagccgagaagcccatgaatttcttcgggggcggagtaggtgtccgccatcgccttggccttggctaacaatcggggaagttcttgactcccgttcaaggtaagagcaaaccgatccatccacatggttgcctcttggtgtaaagagtcgatcacccttcctctagcctctttttccgcgtatacttgggcatactcgtccgcgatcctatgctcgtgggccgtggctagacctaactcttcttggtacttggcgatgatagctagcatgttggtctccgtctcgcat

SEQ ID NO: 28091 - DNA, 388 bp, Glycine max
tcaagctttttcttgatttttctaagttctttaacaagcttagaacaatatacttgtccttcatttaactgtctttgggcttgtcggccacgattaacaaagtactttcgacacctactgtatgttgatttaaccaacgttgttatgggtatgttgcgacaattcttcaaaaccttattgatacattctgagagatttgttgtcatgtggccatatcgacgtccttctctatcataagtcatcgtccatttttcctttgaaatacgattaatccatgttgctatagctggactcaattgacgaaatttttctaaattttgatcaaaaatgtgcttacacggagtgtagcctacataaaatttgtttggaacaacaattgtaagtatat

SEQ ID NO: 28092 - DNA, 410 bp, Glycine max
  unsure at all n locations
ntaggaatgacttggattatatccttggtgttctgcatttggtataatccatgcttcaatttagccaaaccaatcatcttcaaggacttcatttcctatatttggcaatgagaattggaaaaagtgagagagtattttagtgaagacaaaagcttggagattgaaataagattgaatttgaagtttggaacataaagaacatcatgtataatgaaatgtggcgataactgcacatttcctgaaatatgagcaaaaacaatggaaccattgggtaagtggatacgcacaggttgtattttggaaaagcttacaaaattatcaaaggaacatgtaatgtggtctgtggccccagagtcaataatccagggggtgcaattagaaaaacaatgtgcagtgtgtgcattagacaa

SEQ ID NO: 28093 - DNA, 107 bp, Glycine max
cggcctaaccttatgataccttgactatttcttttacattcctgttatggatctctaactacgctatgttttgactaacataaagggatgggcagatgtaacatgat

SEQ ID NO: 28094 - DNA, 385 bp, Glycine max
gtgttctacaacattagctgtaagcatatgttgttgtttccaaacgggtggccatatccctttctggagcttaataacaagtgggctcctatatggtgggtgacacacaatataaaattgctcaagtcttgccttattcgaattgccttttacttattaaactacatacaatgcaggtatttgtgcttggcagtaattcatgccccttgctatggcgtgtattatcttatagtgcgagacaaaaatacgattctccccagattgttccctcaagcatttttgtcacaggaagttccagagtatgaaggaatcctcagactatgaagcatgttgagaaaaggaaaatgtcggtggaattatacccaaggtggtggagacaatattc

SEQ ID NO: 28095 - DNA, 386 bp, Glycine max
agctttgagaagatgcttcaatggaggaaaagaaagagggagagaaagagagaggggggagcacgaaattgaaggaagaaaaagggagagaagttgaactttgagttgtgtctcacaagactctcattcatcaaagttacaacaagtgttacacatgcttctatttatagactaggtagcttccttgagaagttttcttaagaaaacttccttgagaagcttctttgagaaaacttccttgagaagctagagcttagctacgcacacccatctaaaaactaagctcaccttcttgagaagctagagcttagctacacacacccattttaaaactaagctcacctccttgacaaaatacatgaaaatacaaaaaaaagtccctacta

SEQ ID NO: 28096 - DNA, 357 bp, Glycine max
  unsure at all n locations
tggcatccaaaaccattgtggaagcaatatgttgagcttcagccattttggttttctgtagaaggtctcttatgtatttactttgagttagaagaatagagccatcaattagagtcttgacttcaaatcccaaaaaatagtccagcttcccaagttgtttaagtgaaaaattagaatgaagtttgataataaattgttggactaagttgatagaactaccagtgattataatatcatcaacatacaccaaaagataaatgatatgagaggtatctttgaaaacaaagagagatgggtcacacttgcttgcagaanaaccaagatgcaagagagtagattntagcctgtcaaaccact

SEQ ID NO: 28097 - DNA, 380 bp, Glycine max
agcttgctaaccaaaaagatctaatttcatgcaagatcaagatattatggaaaacaaagattttttctccagcatttggaagattaaggcccttccttctgtgctaattatgatttggagggaagctcacaatagattacctacaagatctaatctttgtaagagagatatcaatgtgctaggtaatttcttgtgcttgttgtgtggatatgtggaagagtctgttgatcacttgtttgttacatgctatgtgtcgataagaatatggaaattttgctacaattggttgggtattcaatcagtaatggcaaattccttggagtcattatacttgcagcttggttattctgtctatggcaaggagggatcataagcctagc

SEQ ID NO: 28098 - DNA, 437 bp, Glycine max
  unsure at all n locations
tcatccgcagattcttcttgtaagactaggtttagactatacaacattattgtaacaacataattaaaaccaaaacttaatccacagatccctcttgtaagactaagcttcaatcctgcttcaatcaaattctaaggcaacaatacatttcccaatgctatagtcacctaactatgcatacaaatggatgatcagaccaaaagcatacaaacattaagcattgaaggaatcattgaacacaaaaaacataatcaaatagatattaagtatttacatcagctgttcattagaaatcctcaaccagggtgtttagccaggcattacaaagaaaccctaacaataaatgagattaacagcagagaattatagttcgttacacaagaaggattcctcctcctcttctcagcatctcacactcactctncaacgaactaatc

SEQ ID NO: 28099 - DNA, 369 bp, Glycine max
agcttgttattaaaatattaaactaaaatatgaaaaactaaaaatgcatttcttttatgtggtgcggtgtattttagtctttttcaatctagccggcaaaaactaattgcataataatttaaacaataataaaatattaaagataaaatatgaaaaaaaatattgattctataatttagaaataaagttaacacataaaaactaattgtataacaattcaaattaatatatatatatatatatatatatatatatatatataatattaactcttagatcatttttttgttagagatccaatcaagtgagattaactctgaaggaataaagatcaccacataaagtttgcatctctcaatacattatcag

SEQ ID NO: 28100 - DNA, 422 bp, Glycine max
tagcgtgaaagaggcatactgagacttatctctctattgaatacatcataagcctgagtatctcattgttgggagcctgacagaccaacctcttgtaatataactcttccttactatctatttaatgcaatcctggtttttattggtcttttatgtgatttgttgttgctgattgttgtctggcaactcatactcatgcattgtttagaaaataatacattgaaatatggttattttctaaagaattgggaaaggacatcaatatgaaatcattgctaggaataaactgatgtttgtttagcctatttcatgcatctttattcttaatctaatttactattttatctttactaaggaattcgggaaagaaaatagataaattatgcttatcatgcggcgaacccaagatagagtatcatagt

SEQ ID NO: 28101 - DNA, 175 bp, Glycine max
catgatacaataaaggctttcaggacagatacaatttatgcttcgccaaggggagatggaccactttcaagggctggattgaatcactgacaatgcttactaagtctagctgccccgtgagtatgatgtgaatatcaccttcaacgtctctgacttatctctttttgatgcagat

SEQ ID NO: 28102 - DNA, 354 bp, Glycine max
tcttgaatactcgctaagtgactgtttctttttcagttatatatatcgtattgcgaggaccgctaagcgactgctattttgctaagcggcctttatctttctgttgacttgattcttgtaaatgttcacattcttttcttatagatggcctcaagaaagagagcatgagctgaagacatcccttcatcatccaacccaccttcttcgatagcgaccatggaaccagatgcccaacaagcaccacccataattcctatgttgcacagcttattcatgaggcagctggtgattgtatacaaccaggagtatttagctcacagtatgctaataatatccatggaacaatgtctggac

SEQ ID NO: 28103 - DNA, 376 bp, Glycine max
agcttgggaggattgatggggacccggtgttgagagaaacgaggatatgggctacgtgggagtacgtgagctcagttggaggtgggcaacaggggatggtgggtttatgcgcgcattgtggatgtggaaaaaaaaaactatttgtgcaccatcgcccgaccgtcacctagtaccacatgtgatggataccccataatcctacaagcttgagatgaggaagtgttgaagggtgaaacttcctgcttttattgttgaccacagagtggtacctggagatatgtcgcgggggtcaggagaccttggggacgttaggtggggtgctatttgccataaccaatcttgacctatcccgacccaacccgggcatagtcggtca

SEQ ID NO: 28104 - DNA, 388 bp, Glycine max
actcagcttctatagaaggtcgtcctattttctactttgcttacctctcaatgagctggtgaagaagaatgtggcatttacctgaggtgaaaaacaagagcaagcctttgctttgctcaaagaaaagcttactaaggcacctgttctagctcttcctgacttttctaaaacttttgagctaaaatgtgatgcctctggagtgggagttggagctgtattgttacaacgtgggcaccctattgcttattttagtgaaaaacttcatagtgccaccctcaactaccccacctatgataaagagctttatgccttaataagagccctccaaacttgtgaacattaccttgtttccaaggaatttgtcattcatagtgatcatcagtcactt

SEQ ID NO: 28105 - DNA, 149 bp, Glycine max
tgatgatctgagacctcataatggctggctcatgaatgatataacattatatatgttataatgttgctgaccaatgacctaatggtggactaggatcctaacatgtgagaatagttattcaagtcttggaaatataaaactaataacta

SEQ ID NO: 28106 - DNA, 338 bp, Glycine max
ctaagctgggttataagtgaattctcacatatggtcatatcatttatctatatttaatgatctgggaccacattttggctgcaacatcaatgaaaaaaccttaaatatgttttaaggtacctgataaatgaccgaattttgttcttggttcctaataaaaaaaatttgttaatttaagtctccgatatattaaaacttttaactttcgttttgagtggatgtcatcggttaagtgaagacactgttgataatattataatgtgacatgtcttcactaaactggcttaatggactccgtacaaaatgttcaatacattgaagattcaatataacaaaat

SEQ ID NO: 28107 - DNA, 369 bp, Glycine max
gactaaatctaagtctaaactgtagaccatgaattctttgttatcttctagcactactctacgcctgcaaccgtggggtttaacgcactgtatggaatttgctgccactaaagattaaaaacaatagtggtggcataagagaatcaagcattaacttctaagtccgtgatcatacagtttcttatattgtctgacatctttgtcttacagatcttagtatattatcttttggaatgaatatattgagttctgttttgactgtacacagcattgacttgtctaccacacctgtggaatttactttgtataactccaatttgaatatcaagatcccatatactgtcagattctcggtgactacccacattg

SEQ ID NO: 28108 - DNA, 333 bp, Glycine max
acagatgataaatagacaaataaatatcctctcacaaacactttatcacgtgtttacactgtcataccctaatttcgtccggggacctatgcttgatgacatgcgacttttctttggacctagcgaggagcttggcacccatcattatgcaatttgtgaaattccaggacatgccggaaaaccaaaaaaatattgatgcacaatccgtacgtttccgtgacacaccggaattcaaatggaggcatcattacataattaagtgaggatccgtaacattccgtaagtcaaaaaggggatgatcatagtatccgaactgtccccaacattacagaa

SEQ ID NO: 28109 - DNA, 276 bp, Glycine max
ctttgagctgaagcgcagtccttgcctggagagtttaacccttggatcaccttacccttaaagaggtatggaggtgagaagatgtcccgtgcattatctaggaatccatgtgggagggagcttcaccaccaagatgagccttggataagaagcttagagaggatgcttctttggatgaacagaagaacggagagaaagatagaggggggagcacgaaattgaaggaagaaaccgggagagaagtccaactttgagttgtgtctcacaacactctca

SEQ ID NO: 28110 - DNA, 213 bp, Glycine max
ttaatgcctttaccctttggaacgaaaataaccttataggctgattgttgatgaaagcgtggcatacattagtaacccccaactggcaacgtgtcactcaccatttgttcttcacaaaagctgatgcctaagctgacgattgagcgcttattacaacttgaactaaccctagctatagcccttttaatctatgaacccatcacatctttttgg

SEQ ID NO: 28111 - DNA, 640 bp, Glycine max
  unsure at all n locations
cccactatctctactcacacttctccacaatatgatactctgagtgtaaaacggacgacaagaaccactannaanannanaagaaaccggggtnnttttgacactgtagcnacnacgagacacnananaaaactcaagcggggagccaanncaaacgacaagaacgggaaacccgtatgtctgancgagaccggccatatatcgagacgctcgaaatcgaatgtggaaactctgaaccaactaaacgaacataaactttgtactcgggacgtaaagatatgagcgccccgtacaaataatcggaggacgcctcngaatatcngagacagttggaatgcctctcgcatgccatagttcaaatacgatcaaatacacatcgtataacatcgaggatggactagatatcgaagggcccctcgttactataatctgacgaccgcttcgcaagattcgacatgctggaaagcctcttgagaccaatatcataacgacaaataactctttctacctcaaatgtcaagatgtgaccgccccgtaacacatcagacaccgctccgacaatgaaatgattgaagctcccgagcaaagtacaaacaacaataacatcccaactcaggaacctgactcagacctggtaccg

SEQ ID NO: 28112 - DNA, 557 bp, Glycine max
  unsure at all n locations
cggaccggnnnnctggggcctttgattacgnttcgactctctctgtggacgatatacgagtctctgcgacctctgtggactactctcttatagtgcggactctgganangacatagtctaagcatttcttgtctatgtcattacatacgatatctctcgtgatgcggatatagcatatgagcacaactatttgctcaccacttaaaagtgagaaactctaggaggatatgctgccagatacagcgtgtatgacagctatctggtagcataatgagattcatgacctatacataaaatcatctagcagaatatggataatatgactgtgatacgttactcaactaattttcacgaatggaccattgctactatgagggtcaaagcctatcaaggtgcattcatggagcccttgtggtcaaatttcagggcatctttggataccaatcttaagagggcctttggttaacacattggctatatgtagtggagtccttggtgggagacctcgctgctgattcgaaggacgaactcctagcgcgtgtttccgctgatttctg

SEQ ID NO: 28113 - DNA, 413 bp, Glycine max
ctcaagcttgaggcatctatatcattgttaggaaaaaataaactatctttttttatacaactttattttgatcgaagagtgtgagaaactattgacaccatataaggaaaatctggtgggatgcaataaatattcgctattacgctactggtacataatggtttcttacctatattttttcatctgcatatatttctttctgccttctaacgttaccaaaatagtaaactgattgggccattgcaactattcgtttcagaagctagcacaatgcaatagctcatcaattttctacaattaagaaggcatcaataaattagcaaaaagagaggacaatttgttatcacattctctttctttccgtgagtattttgttggaaaccgcagtacggatgcacatgacaatttccagc

SEQ ID NO: 28114 - DNA, 387 bp, Glycine max
tgcatgcatgctagcttgtatgcattgattgtaaggcctttgccatgagcagactttgggtgtgaagtaagttctccattgtggtacaataggaggaaaaggacaatgatccttttaaaaaaagcttcattgtcatatataaatacaaaagacgaaattagtggaaaaaaataaatattatctaataaaggtaaatggtattttagtagatattatgtacctgcacaaagtgatttccatcgacaagtctaaaggaaatgagacgaggttgtgctggcacgggacatgctatgttgcaccaatcatgattccattgtgtgaaatttcataacagaatcatgattccatttgaccacgaaaatgaaaaaaaaaatggcagtgtaagtg

SEQ ID NO: 28115 - DNA, 243 bp, Glycine max
tacacaagtctgctattacctatgcaagaatccatgtgctcgtggaacgtacaaagatatggagactatatacccccaattatgagatcaaggggattatggacgaccgatgttagatattggcacatgtgctaactatcatgccatcgtcatgacaagatgtctgaagatcgagagggttgcatatccgctgaggagaatggcactgagcagctctaacgcctttaacttggaggagagtgt

SEQ ID NO: 28116 - DNA, 422 bp, Glycine max
  unsure at all n locations
ttatgtcaaattgctttggtggtatcaagttcaataatgatctttataggagtactagcacggtatctgtgcatttgcacagattattacataattntgtatattatttaattattaatttatttaaatgtttttcttataaagatttgataattttatacccacgataataattagtaagtgaattttttcaaccaatattagtaattgatataagttttagctcttataacatagtcattttaagttgtcataaaatcaaataagttacaatcacacttagaagaataacattgtgcgttcctaatccctttaaacagggatgacaataagaatccaacatgcatatacacgttaaatccattccaaactttaacgggaaaaataacctactntaataagggacggttcggatacttgat

SEQ ID NO: 28117 - DNA, 300 bp, Glycine max
tggggtttattgcacttcctgctcctaagtatgagagatcgtcacatctgtaaacactgttattgaaccttgcctcatataacacctatcataatctgtgtgagtggcagccctacagagactggctctattaacgttagctgcccgtgatgctggtacccccttactctgtaatatatgcggatgaggattcaccagatggatgcaggaatcgcttctttacctgttagtgtaaactgtcattgctgggaccactccggcacccaatgggatcctgatcctgcggatcactcccatgtt

SEQ ID NO: 28118 - DNA, 420 bp, Glycine max
  unsure at all n locations
tgtagaagcaaaaagccagttatggttntcaaggtggatttttatattgttctacgactcagtctcatggggtttcttggactacatgctgcaaagaatgagattctgtcccaaatggagacactggatttcaacctgcctcaattcagcaaccatctccattcttgttaatggcagccctacaaaggagtttgctcctactagaggcttgaggcaaggggatcctttagcccccttacttttcaatatagttggagaaggcatcacaggattgatgagggaagcagttcagaaaaacttatacaaaagttacatggttgggaagacaaaggaacccattaatattttacaatatgcagatgacacagtctttgtgggtgaagctgtttgggagaatgtcttagtttgatagctatgctc

SEQ ID NO: 28119 - DNA, 304 bp, Glycine max
acggtatgtggatacctccacctctggaataccattgaggagcgccgccttcataaccatatgaagccactcagaaacgatgtgagctatgagagcctatagtactccttgagtgtcatacttacaggtcgaggaatacgtcgctatgcgatcgatccctgctgttagagcgggacctatagcagcgaagtcttgccttatgtctgataatgaagactgctgagactgagtgtgacctgcagaaccatatacatccgacggcttttacaccatcatgcaaatctacgagatcgcgagcttgatc

SEQ ID NO: 28120 - DNA, 413 bp, Glycine max
  unsure at all n locations
tagaacaatatacttgtccttcatttaattgtctttgggtctttacgaccacgatcaacanagtactttcgacacctactgtatgttgatttcaccaacgctgttatcggtatgttgcgacaatccttcaaaaccttatttatacattcagagaggttggttgtcatgtgaccatattgacgtccttctctatcataagccatggtctatttttcctttgaaatgcgatcaatccatgttgctatcgctggactcagttggcgaaatttttctaaattttgataaaaaaaatatgcttgcaaggagtgtagcctgcatgaaattagttagcaacaacaattttaagtatatgtcaaacttaaattaaggtgagcatgatcaacgaaatgttacccaatntcttcacatttctt

SEQ ID NO: 28121 - DNA, 266 bp, Glycine max
tggtagcagaagacatgccggagaggacgagacactttggagacgtatcttgtaatgctacagtcactaactaagcctgaacagtcctgtgagcttaaccttcactagagtgtaagtgataaactgagatgaacctcttgattcaatcaccagtttctcttcccatttggtgtacacaaaccaccaaactgcgtatgaagacacggcttgacacatgcgctcctaatgatacatgagaagggtagcctatggcatacgtttactag

SEQ ID NO: 28122 - DNA, 353 bp, Glycine max
tgaaacttctgctttttttttgtttacatagtggtacctggagatatgtcgcgggggtcaggagaccttggggacgtcaggcggggtgctatagcccataacacaagctcgaccaattcctacccatcccgggcatagactgtcagtgagaacctgtgatgtacctaagcaggcgagctcctggcattcaacatataaaaggatcaaagaccacacagcaaggaggctcgtggtggctgcgcagctgtgaatattgtgaaatatgtggattgtggcctctgacaatccattacaatgcttataactgacgacaggaggctcacatggtctctggttatccattaccaaggggt

SEQ ID NO: 28123 - DNA, 348 bp, Glycine max
  unsure at all n locations
ctttgagctgaagcgtagtacttgcctggtgagattaacccttggatatccttacccttaaagagtgttggagctgagaagatgctccgtccattatctgataatccatgtgggagggagcttcaccaccaagatgagccttggataagaagcttagagaggatgcttcaatggaggaaaagaaaaagggagagaaagagagaggggggagcacgatattgaaggaagacaaagggagagaagtagaactttgagttgtgtctcacaagactctcattcatcanagttacaagtgttacacatgcttctatttatagactangtagcttccttgagaagctttcttga

SEQ ID NO: 28124 - DNA, 195 bp, Glycine max
tctagccaaatggacttagcttgaattaattcctttgttttccctttgagcctattttcccctttctttgttttgaagctcattacaagccttaagtgaaaaaccatgatatcaccttacccttaaggaattttggagctttggaattgttttgggaataagctgggaataagtgtggggggggggggacgatct

SEQ ID NO: 28125 - DNA, 312 bp, Glycine max
ggatacttcctattggagggcgaccttctgtcactgatatgtgcttctgtactctccgcgtgcatgtacatggcggaaattcataccttagaggacactacattgacgcgtcacatgatccagcgctactataactctctctaggtgccttccgacaggtggctatcagagcgtaggagcttccagtcagagctcgatacacctgaattaacttaatttgctggaccttctgtgacatagctattgctacatgtctctccgagtgtctactggcatgtcatgaggctctgcctgtctacctgatcatactga

SEQ ID NO: 28126 - DNA, 420 bp, Glycine max
  unsure at all n locations
tatctattgctattcagaactaagtgtttggagtggctaatcaagaaaattgtgatccaagcatgaaaggcagacaagtgttgatcctttctattcttgtcaaaaattctgtcttgatatggtttcttatcttctgtgtaggtagataacttcattcttagcttaagttcatagtttgactgctcatagtctttgaaactttttctctctttaggcgccttcagattgatgtctttagtttggaaggtctctccaaacaaagtttgatcccaaggaagaacaaaattgagggaacaaaggtgactcatcaattgttatacgtctaaaagagtgtagaaaggcataacaaaaggctctgcctctctagctntccagactgtggcaccaagaggatataccatcttcctgggacttgtgctt

SEQ ID NO: 28127 - DNA, 475 bp, Glycine max
  unsure at all n locations
gccctccccnttgaccttgatacttcgctactcgngaccatatcagctctgacctcgtgaacctcttatgcgacactgagacatgcttgctttttgtcatcgactacacccataatgatgagagactagcccagcccacagcatatggctctacagtatccacgtgatatcaccgaatactatgcctttctatgggtgatccacacttgaccccaagaagtatccacgaggatggagcggagtgatcctacctcgttcggcatgaaagagcttcaccacttgttgaccaatgtcttagtgaaggcgagacgcctacttcgcccgctactatattgacagacttgacttacattgtcaacataagagagaactagcggccctcatagttatatctatatatgaacctcgtgtggtctttgataccacgactacacgagactctattagtgctctgaatgaacttgactcatgtgcg

SEQ ID NO: 28128 - DNA, 422 bp, Glycine max
tgtctcagtgtttatgcgagacggagaccaacatgcttgttcatcatcgccaagtaccaagaagagttaggtctagccacggcccacgagcatatggtcgcggacgagtatgctcaagtatacgcaaaaaaagaggctagaggaagggtgatcgactctttacaccaagaggcaaccatgtggatggatcggtttgctcttaccttgaacgggagtcaagaacttccccacttgttatccaaggccaaggtgatggcggacacctactccgcccccgaagagattcacgggcttctcggctattgtcagcatatgatagacttaatggcccacataattagaaatcgttaggaaacttgtatggtctctcagaccttgactagatacgactctctttttgaaataaatgagctggtcccatg

SEQ ID NO: 28129 - DNA, 422 bp, Glycine max
  unsure at all n locations
ntaaaagaatggctaagattttgttaaaacataagctcttatacaatgaaggaaagctggagttgctgcacatgatgtccaacgttatgtcaaagaataagatcgggctgcacaatgcacaacgcatgataaagtgtcaaatgaagaattgaagctgcaggattcacgatgtcggatacaatgtccaggacatcctgcccgaaaatactggagttgctgaaagcattgaagctgcatgatccacgatgtcggacacgatgtcctgacatccggcccgaaaatactggacatataaatctgttatatctttaacagattattgtgcagttagcaagagatgagatgatctatctttaggaacgaattanaagataattaaagctcgtattacaaactacaagagtcgttcagggatgaaagat

SEQ ID NO: 28130 - DNA, 480 bp, Glycine max
  unsure at all n locations
nttgaccctgacaccttcgctactctgnggcctatcgagctctgagctcgggatcctctgatgcagctgcagcatgtttgctttctttctacagcgttatgacttgccgcaaaggtcatggtgatcttgactggatatatgcgacgtatgcgtgtacatgcatatgcgtgactagacactttgatgcttgcatattcgcatttatgcgccatgagagccttgtcatcattggtgccttaggaagttggagcgcgtgcctttgtttggtggaaatactacgtagtggtacgggggaaacattgctagcgactgtttgctggagcggtggtactatgccttgtctggcacaaggattcctactgggagacgatctgaagctattgtatccacgggccacgtgcatgatgaatactgaagacaattgctagcctatatgtgcatatgaacgtgccacgtcaaggactgcacagccagagccgg

SEQ ID NO: 28131 - DNA, 274 bp, Glycine max
ctagagcgatatgatctgacgtaaaggtgcatggagactatgaatgggaataaggactttggacctgacacgcatatgcatgactacgcactcaatgtgattcgcgacatactccgcagatctgcacgataacagccttagcatggaccgtgcctaagcggggtggagagcttgcctttgattgattgagatccaacagagtgtattgaatgagaccttgtgagcgatgtctacactatacgctgggacagtgcctgttctgccccaagcctta

SEQ ID NO: 28132 - DNA, 261 bp, Glycine max
cacgataggtgtcctatagagcccctcatacctatgctctggactggaccatactttacacccaccacggggtgacgtcccaaagctatataactggccctagcgacatggactacttatacatgacttttttagacagtgatggacctgtacgtgagaacttctatattagtacgcaaactctataacactctgcctttaaggctggtacacactcactgaattcctaagaattaacctcataccactgtcacagtcttt

SEQ ID NO: 28133 - DNA, 422 bp, Glycine max
  unsure at all n locations
taagaattgtctcactcagttcaatgcacacacgaaaatcactcaatgatatgtatttcaagataaaccaagtacataacaactcaagtggaccatacatcacacaaacaacaaggtgaggcccaaaacttatctaactggttcaagctcaagggacttctcatacgtgactttttttgctagtgttttacctctatggaaaagtcttatattgaagtggtaagttcaaaacaaaaagtttcaaaaagtgttttacacaaaatgaattcctaaaaattaacaacaaaccaatgtagagtaaaaaatagaaaatcacataaaggtcataaaaaaatatcatcaagttgtgagtgaagtgacaggtcacgaatgcccactgtattacaacaacccanatgcaatgtctagtgcatacatacaac

SEQ ID NO: 28134 - DNA, 311 bp, Glycine max
ttctcacctacttgatatgataagcaagaacatatctccacacgaccctctcgtacgctagctcatccgcgtgcttttacttatgagaactctttgaatatcctactacttagacgtactccaacgcggtaacagactgagctaacggcctgtactacttgtatgaccaatataacgggtcttacaagatcgaatgactagtgtaatattaacatatacttggggaccgcgacttggcgcatgggctcagagactaccctgatgttcatgacagtcctagggcgcttttgagcagatcttacctactcctt

SEQ ID NO: 28135 - DNA, 390 bp, Glycine max
  unsure at all n locations
tccttgagaatcttctttgagaagcttccttgagaaactagagcttagctacacatacacctctaatagctaagctcacctccttgagatgagaagctagagcttagctacacacacccctctaatagccaagctcacccccatgccaaaatatatgaaaatacaaaaaattccctactacaaagactactcaaaatgccctaaaatacaaggctaaaaccctatactactagaatgaccaaaatacaaggctcaaaagaaggaaaacctattctaatatttacaaagacaagtggacccaaccttggcccatgggctcagaaactaccctgaggttcatgagaatcttagggccttcttcagcagctctaacctacntcctttggagcc

SEQ ID NO: 28136 - DNA, 120 bp, Glycine max
tgcttgtagagggtgcttcattggaagattggaaagctggagatggtgagagatgagagtgcacgaaattgtagggcgtaggtgggagatgacttgttgtctgaggtgggtgacacacca

SEQ ID NO: 28137 - DNA, 432 bp, Glycine max
  unsure at all n locations
tccatcagaggagttcctaanaaaggcagaanaatacatttattatgaaaaaaatttagaagttggaaaactaaaaatggtagaaaatgagagtatacaaaaaattaaagcataggtgaaaaatgacaaattgtctaaggtggatgacaaaccaactcacaaagctaggtcaatgtatgacaagtacactcccttgaatgcatctcgaggtagaatattgaatgaaattatgaatgtagaactgaaggatactagtcttgatgttaagaaccgaanatggcaaaaaacaccagtaaaaatattttcactatcatcgagaaactagacaagataaacaattattttcaattgaaaaatgttattgaaagcctcattcatcgaggaaaactggatagatatgtctcagatcctaatttgtccaaggactatcat

SEQ ID NO: 28138 - DNA, 184 bp, Glycine max
tctgaaattaactcagaaagtgccttgtcttcttcaccatgctttagcttctcagccaaatagtcccttacagaaacctcattctttgtctcagttccaacaccaccagtgctagttccagtcactttggacttcaatggacttcctaccactgcaaccttatcataaactggagctaatttct

SEQ ID NO: 28139 - DNA, 488 bp, Glycine max
  unsure at all n locations
ntgggctatgctcttcgggacatatcgagctctgagctgatgagcctctatagttacaactcgcatcgcatggcacgctatattcatttatactgtagaagatagagcagggcagtatacanatgcaagtgcatgctctagctgacctactgttatttcacatgtgacttaaatgtgtatagcgttgcgtacatttcacacatggggcttgctagatgaacctacacgctgactccgatgatattgccgtacgcaagatagcacatgtgcgcaccttggagtatctgacgcctatacatacgactacttgcgagatgcatattgaccatctacaccctcgtgcgatacatttcatgcacttttcacgaacgggctcacataagcctcatgcgcattcactggttgtcttgtgcgctgactcatcatgtactacatcgtgtatattctctttgtgctgtatctacgatgcatatcatgcaatactancn

SEQ ID NO: 28140 - DNA, 425 bp, Glycine max
tatgcgcatatttccttacgaacgttcgcttgcacaagactttcttttaactaagaaaaatgcacccatatacaatcaaggcagctccgttacctagattattttacatgtacttccaaggtgtatttgttacttacatcacacacatctccttggctaaatttacatacatgcatactcaaagcattttggggtaccaaaaattgcacatgtgcacatcttggtatttctaatacctatacatacacaaacttcatgatgaatattgactatctacacaataaagtgctacatttcatgctcttttcaagtttttgctacctaaagccgcatgcaaattcaagtatattttcctttgctgactaaaattgtattaaaaggtatatattctttttgtaatgtatttctgtacataacatgcaaca

SEQ ID NO: 28141 - DNA, 182 bp, Glycine max
ctgcaggttagtatgaatgtgagagagcgtgtgactttgaagttcctgcgtgactattgatagaattgccttatcccatagtcctattggacggtattgactgatgcggatactataatgcactctccttgccagatggccctacatgttgcttaggcatgagttaggatctatgctatcca

SEQ ID NO: 28142 - DNA, 417 bp, Glycine max
actaagcttgcctacattggcggcagccttcttgttcccaagtgtttttttatgaaataacttttccaccatgccacacttgtcaacatttaaaaatattcttaccatctgggggttgttaagtgataatatagtggtatgggctgcatgtttgtatgtttgtttgtgagtgtgtgttaaagtggttaatgagtgaattatgaaagaaaaaatctatcggtatgtaatattaaactatatttgtagttgttgctaatttaatgcacaatccttccaagaactccaaacatgtttcatatgcaatgagtggttgtcttgcatcagtctgtcatgtacctatgttctatggtgttgtaattatgcttgacaaaatatatactaatatactattatttgccttcttcaatatgtctactc

SEQ ID NO: 28143 - DNA, 144 bp, Glycine max
attgtgaagcaaccgaccgactaaccctcatatatagactggaccgggactaaacttgtccgagctccaaaacggtacagccttccgatctagaacgtaggactcaacttggcccagatctcaaacctatctctagtgactctt

SEQ ID NO: 28144 - DNA, 402 bp, Glycine max
gcgttgcctttgatcaagcgaagaaagggtggtgatcctattgtatagcaaaataatgatgaacaagctcttttagagtcagctttgactaaacttgttggagctgcaaaaatctacaaactaccgatagaaaacttagtgcctcaacttcaatttatatcttcaaacttatctctagagtctctagttatcaatccttttgcgtcttatatgtctttaggagaaggcttaccagatgtaggctctattttggacgtatttaagttttttcctatacctatattaccatagtgaaactccaaatctgactggagaacaataccaatagtactgatggtatgtgtctaactttgttcctatacctatatttctttgaaggagtggcactgattacttttttat

SEQ ID NO: 28145 - DNA, 420 bp, Glycine max
gtggtatgtgaatacacgtgcaggcaatgcactctattgttcttatacggcgagcgaggaagggcctgttgctatagtgtgcataattaccatgctaacaatgttaattgtcaacaccataatgctcaagatcaagatgttctacatccccactaacattatgctctgattaccagacttggcatgctcagagcgatcaagcggcataacatgatgcgcaactaatccatgaattgccctatccttctcatgatcagagggctgttactcacatggactgcctccagtattagactaccttcagcgtgcacacaactagcggccttgacatgtattttaatgcgactggtgcactacagctcgctcacatgatctcaaatgaatgttatttatgagcaacctaaaatatcagatgacacc

SEQ ID NO: 28146 - DNA, 475 bp, Glycine max
  unsure at all n locations
ntgtgcttgctcctctggcaatcagcctgacccgggtcctctaagtcgacctgcaggctgcttgctttcttatttacccccgattgcttgcttccgagctgatgcatcgcgcgacgcataacacaacctaatctgtatatcggcttaaactgaccagtagtgagcggtccaccttgataactctattagtatataccataatagaatatagcacctaagctaatgctatcggattagtatgaatcattctatcatagatctgagcgcgtgaaatgactagtataagtgaagacacacggctcttagccttgatatttacaggccgcttaactgtaagaatgaactcacactacgtccctatagttgctgatccctatatatagacgatactcacatgccaaatatctcacgaggtcacacttgcatcgacttttgacgataacgatttgaaccgtgtgttgaaccctctaattat

SEQ ID NO: 28147 - DNA, 409 bp, Glycine max
gtagattttccccaactgccttcacgtgctaagcttgattctttattacccacgtattcttgcttccgtgctgatgcatcaagctctgcaaatcacaaccaaaactatataattcctaaattttattcatagtgaactaagaactaagaaacattgtaatacttaataacaaggcccaaactaagcatcagtttaggaacatttaagatgaagtgttgtgtgaaaataatgataacgtaatgactcacaacacttattattggtattttcaattgcttaactttaagaatcaactcacactactccactagaagtgatgagtcctatatatagatgatacatgagatgcaaaatatcttaagatgccatatatccatctgccttcactcctttacaatatttaacatgt

SEQ ID NO: 28148 - DNA, 236 bp, Glycine max
ttacagctatggtcttatttatatcttcctgagtgggctcctatcctatgactatactagagaaatatacctttactattaaacaaggaagacatcccgcctatgtctaagcctacaacgactatggattcgacactgtcactgaaccttactttaggtcaccacactgctggatcggaaaagcaaaacttctccagacaagaaacctactggggatatgcacagcttctcgaaac

SEQ ID NO: 28149 - DNA, 426 bp, Glycine max
  unsure at all n locations
tacctcanacccaataacaacaatggcagtgacactgtttttctaacgtacctcatgtgaccacgacactggcagcagaaaccaaaaaactaacaggaagcaaaatcacaaaaatctagtgactaattaagagtttccagtgaaaaaacctatcgaatgactaattaagagaaaaatacactgactattagacaatgaagacaccaatcttacctcgaacccaacaacgacaatggcaacgacactagcagtgaaacgtaccttatgtcaccacaacactggcagcaaaaaccaaaacaacaaaaaccaaaaaacctacttgggttaaccacgggttctcgaaacaaacacaggtacacgaaacgtacctaggtaagttgcagatggacaaccaaaaggcgagtttcacggtcttcagcgcaatgg

SEQ ID NO: 28150 - DNA, 157 bp, Glycine max
cttgctgcaaaagactgtttatgagactcccaataatctacttgatggcctcccttgacggccgttccaccttgtgaccgtctgtagacctcttcacattttgttttacccgaaatagccagttccatccaactgcctgtattatgactgactattc

SEQ ID NO: 28151 - DNA, 424 bp, Glycine max
tggctaaggctagactgcaatattcagcctctgtactggaccttgcaacaacagactgtttctttgaccaccaagaaactaaatttgagccaaaaatgatggctgcaccagaagttgaccttctgttgtcatcatcacagtaagcattaactgtaaagggaggtccagtagaaggagggagaatcttccaaccaaagttgatggtaccagctagatacctgagaattcgttttactgctgcccaatgctgctcagttggatctgacatgtactggcagactttgttaacagtgaaactgatttcaggtcgagtgatggttgcatactgcaaggctcccacaataaacctgtctagagtggggtcaggcaaaggctcataccctgacttagttaacttgaagcctcaaccattggagaagaaata

SEQ ID NO: 28152 - DNA, 473 bp, Glycine max
  unsure at all n locations
nnncctgtccttgctctctggctaggcattcaccttgacctcgtgtgctaagcagggacatgcaggcctgcttactttgtttcgttgaccaacctaaggaccctggtgatgtgccgcgccggacatgggaccttgtggactattggggggcgctgtcgctcgaaccactcttgcccactcctgactctgcccgtgctttgtcgaacactggagatctttgacggtcctatgcctgctagctcctgtccttctccaagatcaaacatcatctcaagggtccgaccccggtgtgggggcatgtcttgtattgatctcgatgtgtatcgcgaatttggactctggcaactcaaccccagtggtgttgctacagaaccacgtctgtctgattggcatcatataatagaggagagactgtggagcatgaggactcaccggggtgcgaccacattagcgggcttaatacttgaggcagg

SEQ ID NO: 28153 - DNA, 422 bp, Glycine max
  unsure at all n locations
tgatgtgagaaagcgtggaagagtcagtcttcctacttttttttgttgaccacagagtggtacctggagatatgtcgcgggggtcaagagaccttgaggacgtcaggtggggtgctattgcccaaaaccaagcttgaccaatcccgacccaacccgggcatagttagttagtgagaacctgtgacgtacctaatcaagcgagctcctggcagtcaaccgatcaaacaacataaaccactaagccaggaaccttgtgcggtggctggccagctatggatcttgagtggtatctggaatctggcctctggtaatcaattaccaatggtgtgtaatcgatnacagggcttacaaatggagacagaaagttaaaatggcctctggtaattgattactaacggtgtgtatcgattagcgggcttaaa

SEQ ID NO: 28154 - DNA, 313 bp, Glycine max
tttatactgcatgagaattgtcattttccgaatgatggaccagttgacactgtgcccttatatttgtggaatttctgatccaattcctgccttaactttaaaatatgagatgatacatatcttcactggtgttatccagacgcatgcatattcaatagtattactgccacatggctcagcactcaacaagagctgtatgattatactctatcgcagacgtatcatgagatgtaagctaattaatggggcattactgcacgctataccaacattggattcacacatacgcataacagagccgctcacactactt

SEQ ID NO: 28155 - DNA, 421 bp, Glycine max
  unsure at all n locations
tggaataaattcttgtgatggccatttgaacaattatattttccagcataatactntattcaccaatagaatagtcattaaaagtatgatggaccaattgacagcggacccagtcaaatgtggaaatacttatccaatacctgccataactttaaaataaaaatatatacagatcatcactgttgttctcccaaacccatgcatttccaattgcaaaacaaccacatggctcgggttcaacaggagctgcatcattatacacaatcacagacatcacatcaccaagaagcaaaatcattgttcaaaacaagcaccatatacgaacatcaaatccaacacatatgcataaaaataacgctaaaactacttgccctagattttgcataaacacaaatgaacggcctcaatcacatcttcagca

SEQ ID NO: 28156 - DNA, 329 bp, Glycine max
gcagctgtggctgcactttttgtaagagaggcagaccttggatgggttatgacgactgagttgtggccaatctgttatagagcttcttcatgagtattattatcattgacaaagacctgactaagatggtaccgttttcagatttatccttgtaaaggaaacatggactaggatgacacctttagacactgcctgtcttattttgtggatgtattattgtgaatcatctctaagccctatataggaaaatagaatgccttctgtcttgtccttttcttttgggatactgagtgtagaacttactagaagtccatatgatattgatggac

SEQ ID NO: 28157 - DNA, 402 bp, Glycine max
ggacaagccggcttgtttaaataataataatatcaataataataatcattattatctataccatttttatggaattatgaatgacatgatgaagtggcataaagtgtttagagagttcacttgcatgtgaaaaaattttaaaaagaaaaagactcaagttaaaagaataatgcaaccaggttaatacttctaaagaaaagaatgttttgtcaagacatttttagacaatttaaatatttttatttggctgtattagtataaatcatctctaatccatatattttttaatattatgctctctttcttttcattttcttttgatatactctgcgtttaaatcacttgaattcaatatgattttgtttaacaattatctttggatttgtacattacttatacaag

SEQ ID NO: 28158 - DNA, 261 bp, Glycine max
atctttttctacttcactctctacctaggatgaacgtttctttgcgaaggtgtctccacacttgacaatattgatcctgacgagaggcgggcatgactgcgtgagctacacactgctttgctagtctaaacagcacctgaataggttccgggcttatttacgcttcccacaccatacctacctcggacaagagacatggctcttcctcccgctgatatctgcagctgcttgagagcggtaacttcatgaccctattattta

SEQ ID NO: 28159 - DNA, 430 bp, Glycine max
ctttggtttgaggtctttcttctgtattatctagaaacattttctgataagcatattctacaaaacacactagcaaggctagacattccttaccggtggcatttccagacttgaaaattttcatcctgatgtgatccagtcttggctatgtgatctacacattgatttccttgtctcaagagtattccaaaggttcccccccttaatagccaataccagatcatttctcctttggtcttgagacatggtccattctcaattttctattacaagtaaattgagagtggtaacataatgaacctaatagcagtgataaaatgactcctttagaaaatgacaaactccaagtatgtttgtccccatgtttccccgatgtgcaaaattatgaaattattttcacctaccattgttctctttacaattaatgtct

SEQ ID NO: 28160 - DNA, 262 bp, Glycine max
tcacgactggatactatgataccttcacagcgtgtactatctattgtaacaacatatagttcatcaatataggtgtcactcaaactctcatatgctagcacttttgggcgctcgctcagagacactcgcgctcttcgttgtacatgccctgcacccgccacacatctgtagaacgagcctacctatcaactagaagacattcgtggcaagctttgacttttctaactctctctttaaagatagaaattattggtcttattgc

SEQ ID NO: 28161 - DNA, 427 bp, Glycine max
tcttttggaccttgaacaggcaactaactcctctttcattaccatgccatgtgctcgcgactggtccctttcttcccttcgcaacttgagttcactattgctaccccatagagctccgcgaaatttgttccggccatactcttccttgcgagccctcttggtctcttgttcaagggctcttgcggtaattgcattctcttcccgtaacccggcacactccttccgaacgtgtgtagcggccaacttgaacttctccttggcaagttttgcctttcctaactcgcttttgagagcttggaattctttgtcttcttccggtgcttcaaaattctctttgctgacgacttttaacttggcgagccaatctaaacctcgtatatgaactttcagccattcgtggtacccaccatgatgccattacgaatgc

SEQ ID NO: 28162 - DNA, 121 bp, Glycine max
gagcctgctagagccgatctagaggacttgcaggcttcgagagctcgattgcgccatatagagagccggacgtcaacacggtgatcgctgttttactgcggaaagagtgatacaatcatga

SEQ ID NO: 28163 - DNA, 281 bp, Glycine max
acttataaagaaggcggacgcatcaaaacacttatctgaggagagcacctatcacgaccaggcgagctcgggggccaccgcactctcccatcaatggtgaagaatgccgtaatgtgcggctgtcgtgccatcgtcacatccctgtgaccgcgtgtttgcctttttatctttgaataagaggagagggaggaagagaatcagagtcgctacgctgacgcactgccatcatgctacgcgggtgactctgcgaacaataggagacattcggaaacggggtgaag

SEQ ID NO: 28164 - DNA, 425 bp, Glycine max
  unsure at all n locations
taacacctatcgccacaagttccatgaggttttggaaagattttatcgaataacacaaaaagcggaaaagggggtgaacttataaaaaagggggatgcatcagaaaacttcctgaggaagccaccagttcgcctaggtgagctgggtggcatgcacctccacccaatttgttgaaaacgggtatctagggcttccgtaacattttcgtaaccctgggaaagcatatttcacttaagattaatgaagaggaagagaaagaggaggaaaatcaaggtcgatacacttccgcaatgcttccgtaatagggggtgaacttatcaaattaaggtgtacaataggaagcttcctgaggaagccaccaactcgtcggggcgagctgagctctcctgngcgagctgggcggcaaatcctccccattttggcta

SEQ ID NO: 28165 - DNA, 481 bp, Glycine max
  unsure at all n locations
ttgtgccatacttctacngacgatatcagctctgacctcgggagcctctacacataatgctgcggtgctgcgagcttgttgagatggatggacacacgcggtcgataggaacaaggattgggtctatgcttgattactttatctcaccgaaggcccgaaactgttgacatgcgcactatgggaggactcgggatctagctagtctacttgcaatattacctcgactgtatctacgacgaactgtgagggcggcacactagaccgactatctcctactgactaatcgtagtagaacgatacctactagtctaacatcatgacgaccaactgtctcttgaacatatgacgagccactcatgataccttgtcgacatcccgttgtgcgctatcgtcaaaggctaagctctgtctattgaagatattctgcagcttagtgcagatcgtgagacactgtgaagtactctgctagcgagctacgagg

SEQ ID NO: 28166 - DNA, 424 bp, Glycine max
  unsure at all n locations
tgggtgatgttgcgcatactgatgggtaccatgaggtgtctgcggnggtttgacccatgcgggcgttgaagagacagcatgggtatctccttccttcctttttgcccccgttgtcccgattcttttggcattcgcactcgtggaggaaacgtaatcgaactttcctcttttcaatcctacctcgattctttccccggcgaacactaggtccgcgaagctggacggcatgtaacctactagcttctcatagtagaacactggcaacgtgtctaccatcatagtgatcatctctctctcgaccatgggaggagccacttgtgctgccaggtctctccaccgctgtgcgtattctttaaaggtttcgccctctntcttgaacatattctgcagctgagtgcgatcgggaccatatcggaattatact

SEQ ID NO: 28167 - DNA, 193 bp, Glycine max
ggcgggcgatagggctctccaagtactccacattcacctgttacgcatcaacccaccttctgctgcggtcttactctacttggacacacgtactccaacgtagcccatatactttttcgtttccacaccagctagctatattgtcttcgcccctatctgcgcatgactacttgtgtgattacaacacctcttt

SEQ ID NO: 28168 - DNA, 426 bp, Glycine max
  unsure at all n locations
tgtaggattatggngtacccatcacatgtggtactttgttgcggtcgggcgatggtgcacaacaagttttccacattcacaaatcgcgcataaacccaccatcccctgttgcccacctccaactgagctcacgtactcccacgtagcccatattctcatttctctgaacaccgggtccccatcaatcctcccaagcttccccaacatccaagtaattcaacattcaaacaacacaaaccatcacagccaatataacagggcaaaggcagaaaactctgcccaaaacaccaaccaaaatcacaacttttctcacttaaagaccccagtaacaattccttcgttccaattcgttaaccgttggatcgactccaaaattttactggacgtctctagtacataagcctacatttgaacgttgggatctac

SEQ ID NO: 28169 - DNA, 111 bp, Glycine max
tgcttactgtcgtcgacgagtacgctataagacctacggcttgtcgatgtcggcgatcatgaacattgtgttgattgtagcccaaatatacgccgatttataagctggtag

SEQ ID NO: 28170 - DNA, 420 bp, Glycine max
  unsure at all n locations
tgtctcagcgtttatgcgagacagagaccaacatgttatctatcatcgccaagtaccaagaagagttaggtctagccacggcccacgagcataaaatcgcggatgagtatgcccaagtatacgcggaaaaagaggctagaggaagggtgatcgactctttacaccaagaggcaaccatgtggatggatcggtttgctcttaccttgaacgggagtcaagaacttccccgattgttagccaaagccaaggcaatggcagacacctactccgcccccgaagagattcatgggcttctcggctattgtcagcatatgatagacttaatggcccacataattagaaatcgttaggaaacttgtatggtctctcagaccttgactagatatgactntccttttgaaataaaagagttggtcccat

SEQ ID NO: 28171 - DNA, 220 bp, Glycine max
acctcggctgtatcataggactccacatcctttgcgggcagtcctcaatggatagaatgatacctcccttccttatatcgtcacccttgcgctttcaaaccacaattccggatgaggcagctctgcccagaattatcgcgcggccattacttccattttacgcactcaaactactgattgttgaggcctagaagaatgtcacaacgatacctttcacctc

SEQ ID NO: 28172 - DNA, 421 bp, Glycine max
  unsure at all n locations
tctatataagctgaaccattttatcaataaacacatgttgttttntattcagaaaattagagtttatctcttttatcttagtgagagtgattctcctaaattcttgagtgattcaagaacaccttggctgtatcaaaagactttcacaacctttgtgtgttgccctcgctggaaagagtgattcttcccttcctttcatcatcacccttgttctttcaaaccacaattccagaaaatccacctctgcccagaattatctcgtggccataacttccattttacgcactcaaattaagtgattcttgagcctaaattgaatttcaaaacgagacctttcacctcgttttggaatcacctcatttggagccctgttgcttcagttattgccatttctatatttctgccagccaccacttaacct

SEQ ID NO: 28173 - DNA, 206 bp, Glycine max
tgctttttattattataagaaaagtaaacatcgctgatctatgctggcttaaggaggtccccaagccataattattctgatgtaaaccttatagctgcagacagagaatgaaatcttcactattatttatagacaaaaaacttatgggttcatatatcataattactcagtatgttgtcctaatattaatatgcccttatgatgtg

SEQ ID NO: 28174 - DNA, 421 bp, Glycine max
  unsure at all n locations
tgtcactgaggtgttgaatgatatttgattctattggttttattcttctaaaataaataaaattcacagttttaataaaacataatgttatctttatgccggtattaattttttttttaccttttatcacctgaaatattttgttttttttatgaatatttggagactaataatttattgatagatttattttaatttctttgtttgttctcttaaaaataaaataccctagtcaagtgagagagagtagataaggatgaatcaagtgaacttcaagtgtgagcaaaggagctatcacataaaatagttttaaaattattagaaattcttgtatataagagaattgcattagatgtgctatgcaagtaatcaacatgtgttntgtctttataaatctctacacatatatcattantttact

SEQ ID NO: 28175 - DNA, 249 bp, Glycine max
attgctacaccttttctcttcttacgatcgtcaaagctcctaatggcccggatgtcaacgcaggcctctcaaaggcgttacctgatatacccattcatgatctcgtacaggaaaccgaaccgcgttcggcaagtacctcaacacgacatcatctccctgaacatggtggcagacacgctccatcctttagtgctttcatactggcccgagatatatgtgcactgtacttatgatattcatgtggagact

SEQ ID NO: 28176 - DNA, 422 bp, Glycine max
tcatccaacttaagcatggaaagaaggcattatattctcatacacataagatttctaaaaacttttcacccttatcgacgattgtaaaaagcttttaatggaagtcatgaaaatgaaggcccctcagaagcattaactggaaaccaagttcatgatcgcgtaaaggaaattgtaaccgtgtttggcaagtcccagaagaagacatcatctcccaacaacatgtggaagaaatgctcaatatttttgatcttccatactggtctgatctatatgtgcactgtctagatgttatgcatgtggagaaaaatgtgtgtgatagtttaattggtactcttcttaacattaaagggaagacaaaggatggtttgaaatttcgtcaagacttggttgacatgggaatacgagacagttgcatcccatat

SEQ ID NO: 28177 - DNA, 104 bp, Glycine max
gattcccagatgtgctccatatgtccaaccgacgcctattaccacactgtgatgggtaccccgatattctaccggcttgataagatgatatgtcgtttggtgaa

SEQ ID NO: 28178 - DNA, 412 bp, Glycine max
  unsure at all n locations
cgngaggattgatggggacccggtgttgatagaaatgaggatatgggctacgtgggaggacgtgagctcagttggaggtgggcaacaggggatggtgggtttatgcacgctttgtggatgtggaaaacttgttgtgcaccatcgcccgaccgccacctagtaccacatgtgatgggtaccccataatcctacaagcttgagatgaggaagtgttgaagggtgaaacttcctgcttttattgttgaccacagagtggtacctggagatatgtcgcgggggtcaggagaccttggtgacgtcacgtggggtgctattgcccaaaaccaagcttgaccaatcccgacccaacccgggcatagtcggtcagtgagaacctgtgatgtacctaagcaggcgagctctggcagtcaac

SEQ ID NO: 28179 - DNA, 345 bp, Glycine max
ctgcagcatgctgcttttgatggtgaatctagttgcttatgttaggaatgcgacgacctgtgcctttggagcacgacttatatattgagtgggcaacttcactatctgcattttgttcttgttctgcgatatgacaccttgagtatgctatacttcagagatagacgttctccactatctagagatatgatctttgtagattctatagatgatgactcccctattcatgagatgacttctggagaacttctcaaagtcatactcgaattgattggtgatacccaagactatctcaatactgtgtgttgaataagccgctttcactattttcttgatcaccatagt

SEQ ID NO: 28180 - DNA, 415 bp, Glycine max
  unsure at all n locations
ttagaagaatcaaccatgtttatacaataaatctcgacatagttggtaatagctagttccttatgttaggaatcccacatcctgtgcctttggggcacaacttatatatttattgggtaacttcacttaatgccaattgtttttaagctgaaatctaacaccttaagtatgctaacaagagtgtttgacatcccacactaactagtgatatgatcaaagtagtatatataagtgaagacacccctcatcataagttagcttttggggattaagttagactcatacccaaattcaaaggtgataccaaagtctattntaagacaatgtgttgaatatcccgcatcaactagtaatatgatcaaaatagtgtgatataagtgggggtaccctaaatctatgagctagctntttggga

SEQ ID NO: 28181 - DNA, 276 bp, Glycine max
gtggggtgacaccggataactatggccgtgctacgtcgctgctggtggttattgctggtgttaaccacgcttggacattggagaaggattgccagaagattgataaccatgtgtttgctataaccgctgcacgacaaaataaggcttgcattacgtccttgctggtgctctctggaaaagatgcattcctcacacgcctcatgacatatcgtagatcgaacgggcctatcatggtcctttgccctatgctcgtccagatccaagcttgagaagatc

SEQ ID NO: 28182 - DNA, 427 bp, Glycine max
tatccaaacaaggcattagttctcttataagtaagtctatcctaacaaggtctaacgcatgcaaagagaaaggttatcaactgacaccaattaactataaacgtgctacatcaaggtgatttctaaatacagaacttaaccccgcttaaaagattaagaataaagattaaccagtagtttggttaaccatgtatttacaacaacccccgcccccccccccccccccggcattttgacctaactgggttactttcacaaacttattcccaatataggtctcttcttaaactatttccaagctgggtctgttattctacgtaaccctagcctatcccgccagcatgcatggcggtatcactggcgttgcgacacgtggacgatgtcgccaggatgaatggcgagacagctgcacttggatgccgccagt

SEQ ID NO: 28183 - DNA, 522 bp, Glycine max
  unsure at all n locations
caccccccccaccccaaataaacgaatagaatttgatcaataataacaaaanacaaaaagcggagtaattgtgacctcgaaacactcgaanacanaacaccaagccagcaccaacacgcgacaaaaagacaacgcaaaggacattatatttatgtcagaaagctaacacctaactcgtaaggaggaagaccttgaccaccaaactaatgcccatactatctttacacactccctcccacactacgctatcgccctctctccatccccaccatcagcgtacgaatctaacgaacaacgaagaacgccaactaatagcaccgacaaaaaaaacatagaagcaaccacagggccaatccacaccaaacaggagagaaaccaagctaactaatcaataaatgtaggccgaaaccaagaactgcacaccatataaggacaacataaaattcacaccgcaaactcaataaagacccttgccgcagacaaataccagagtgtaaaacaacaaccaacaaatcgataaaa

SEQ ID NO: 28184 - DNA, 492 bp, Glycine max
  unsure at all n locations
aggacgaancctgangcctggactcntcgcgaccaatcgagcatctgaccctgcgagcctgtggagtctatgtgcaggcatgcaagcttttatccgttgttctaactaaccgtaaaacgtgtgagcgggtgggagagatacttcttgccctctagagcctggaaatcaatgaagggatgatatcggctttagatgagaacacggttaatgatttacgtacaggaaaccgaactcgcgtgcgtatatgtgccttaacaagacgtccagataccatgaactggcggcagacacgttccatatcttagagaagccctacgcggcccgagagatatgagcactggtcatacgttattcatgatgggacgaaagtacttgatcaccaatgcgctgctgttgttagaacaatcagtataagctaagacctcttaagaccgcagatggaggcggatgaacggagatgtgaccaatgtctggcatttctgttactgtgtg

SEQ ID NO: 28185 - DNA, 393 bp, Glycine max
actaagcttggtgatgttgcgcgtactgatgggaaccatgaggtgttctttgaggtctgacccacgcggatagggaagagacggcatgggcatctacttctttcctttatgcccatgtagcccagagtcttttggcattcacgtttgtggaggaaacgtaatcaaactttcctctcttcaatccaacctggaatctttccccggcgaacgccagatccagaaagctggacggtatgtaacccactagcttataataatataacactggccgagtgtctaccatcatggtgatcataactctctcaaccatgggaggagctacatgtgccgacaaatccctccatcgctgcgcatattatttaaaggtttgaccctcttacttgaacatattct

SEQ ID NO: 28186 - DNA, 185 bp, Glycine max
ataccctatcagttaggtgcatgcactagctacaacatgccaccatttagagctttgcttgttggtctgcggaaaaagaccagttcacgtgccctgtagcgactaccacatgcagagactattggcaagagtgtatgctacataacttactgtttgcgtgattccagattggatgacaatgccct

SEQ ID NO: 28187 - DNA, 418 bp, Glycine max
ttgagggtgcgtagcccaccatcttttcatagtagatgattttataatgtgtctaccatcacgatcatcgtctccctttccatcattgggggtaccacctgtgccgccagatccctccaccttttgggcgtgttctttgaaagatccgtccccctttttgcaaatgttctatagttgcatcctatccggaaccatatcaaaattgtactgatactgcctaacaaaggcaaccattatgtccttccaagaatggactcgggaagaatccaagttagtgtaccaggtaacagctaccccagtaagactttcttggaaggaatgtatcagcaattcctcatcttttgcgtattcccccatcttctgacaatacatctttagatggttcttgcgacaagtagtacccttgacttgtcaaagt

SEQ ID NO: 28188 - DNA, 473 bp, Glycine max
  unsure at all n locations
ttgcctgggcttgctcctctggccatcagcctgacccgtgatactcatgagtcaacagactgcatgttatcatgtacgatctatattacccatactaatatgatctgggaggggtatagaggtgatacacatgtaaactatgtcactttgacacttcaaacgttaaaataccttccccacataggcacgttgactttgagacctctcactaacacgtagcccataagatgaatcctctcaacacacgtgcttctatctacccatgctaggttccctcttatacccaagattcaatttgctctaccatgaaactatacgatgccaagacaacaggcgcctatgcagaaaaagatctgcccgaatgacatacacagatcagaactttcattactcatatagcgcagaaagaatatggtcgctacgatgtcgatatccgtttgaacgacttgaatactttatcgtaagcacgcaan

SEQ ID NO: 28189 - DNA, 416 bp, Glycine max
  unsure at all n locations
tgtatttaaaaatgtgttaaagatactctnaattaatatttgaattttcattcctttattaatatatatgtgaggggtagagggtgtcacacaaatcaactctcccacttccacaaatcaaacattaacgtaccatccccagttacccaccttcaatttgagctcacgcactcccacgtagcccttatcctcgttcctctcaacaccgggtccccatcaacccctccaagcttccacaatatccaaaaaattaaattccaaataccatgaaactatcctaaaccaagaaaacagggcagaggcagaaaactctgcccaaaacacattcacatatcagaactttccttactcatatatcccagaaacatttacttcgttccgattcgttaaccattcgaccgacttgaaattttact

SEQ ID NO: 28190 - DNA, 237 bp, Glycine max
cccatctccatgattatgattattacctgacgtttcgaacaaactaattcgacgttacatgacaactctaatggccgcttgagtacctcacccactcaagaggatcacacaataatggctattctctaatgaaacactcttgccttttaccactcttattcaccttgatatattatgcgattcaagagattatggccacatcgaagaacaattcacctatgtgtgtcaggtaacgct

SEQ ID NO: 28191 - DNA, 411 bp, Glycine max
tatagaaactaagctttgagcacattaaacgacataactttttactctgtcttccgattgagtcccgtaatatatcgagacgctcgtgattgaaaacagaagctctgagcaaattcaaacgacaataacttttgactcaaatgtccgcttgtgtcccgtagtacatcaagatgctcgtaattgaaaagggaagctctaagaaaatcaaacgacaataacttataactaggatgccggatagagcccctaaatatatttagacgctcacaattgaatacagaagctcttacgaaattcaaacgacaattagttctgactcggatgtccgaatgtgtaccgtaatatatcgagactctcgtaaatgagaagagaagctctgcggaaattcaaacgacaataactcttgactct

SEQ ID NO: 28192 - DNA, 93 bp, Glycine max
cagacatcgagacgaagttaaatcaaagataataactaagacttacttatatgatatgtataactaaagcctaataccggctataaaaataat

SEQ ID NO: 28193 - DNA, 377 bp, Glycine max
aatctcactacactgtgaggcctgcctgagacgatccctgcgagaccatgagcgttcgacgctccatattctaatgcataggccatccaccttgacaagatgtgtctagatcactactacccagcgctatctattatcctcttcacaaccctaggactcgatcctggagaatctggtaagtggctactgctgtcatgactactcatagtgccccgcttttcaaggctaaagttctatacgtctgatagtggcacaaatacctggccacagatgatgacgaacctattctaatatcgactaatagatgcagcatcatactgagcgcaaggcctctaaatcatcctcacgctcatgagagcctgtgtgccttacctagg

SEQ ID NO: 28194 - DNA, 380 bp, Glycine max
  unsure at all n locations
gagaaaatntctttgnnaagatagagcttatctattcacacccatctaaaaactaagcgcacctncttgagaagcttncttgaaaagattnntaaagaagctagagcttagctactnatacctttttaatagctaagctcacctncttgagatgagaagctagaacttatctacacaccccctataatagctaagctcacccccatgacaaaatacatgaaaatacaaatagacaatgcctactatagagactactctcaatgcctcgaaatacaaggctaaaatcctatactactagaatggccaaaatacaaggcgccgacgaaggagacacctattctaatatttacaaagatatgcgggctcatacttagcccatg

SEQ ID NO: 28195 - DNA, 359 bp, Glycine max
tgctgctaggtttggcagtgtagatagtgtctataatacagatgaggctcttgaccactgttattttcttctttgagcatgggaatgcctttattgactgcgcatgccgggaattatgatgtttgtactccctatgaagggaacacaatctcataacatgagagcatacatgtagttgactcaatcaactgtgcttcaaccactgagatctggatgtaatagagtgatcatctatttttagcaatttcacagactttcttgtgactataaaaattaatcttaataggttgagcatgtgtgaatagctcatagctactactattgaacatatatatagtaataataacttatgcttgtgt

SEQ ID NO: 28196 - DNA, 412 bp, Glycine max
  unsure at all n locations
tgaatcatgtgaaaataaatcaatcattctgtatatgtatcacaaattatatatattgataagaattacaaattaaaatcagcaaactcttaatttcgtttaattaatatgtgaaaacatttatgagctaagcttaacgtgaattaatctttttttaatccatataaattgaacacaataccataaatttataacattcatatattctactcaatcaactgaactaaaaccactgataactaattttaataaaatgatcatttatttttaccaatttcacagaaaaacttttgactaagaaaatttaacttaattggttgagcatgtgtgaattgctatanactactagttatgaacataaatatgtttataataacttatgcatgtgtgtccaatgtatctctgtataaac

SEQ ID NO: 28197 - DNA, 308 bp, Glycine max
ctgatagagagggagaatatcggggattctcgactcctatatcacacccttcaatgggaactccaatctatacgtgcggacagattaatcgcgaatcatgagacacggactgtgactgattactcgcgattataagagacgatagcatgagctctaacgaacctgataccccctataccacaatcacgaactctgatcttttaccctttagttgaacgcgcaagctgaatctgtagtaataagagggggatcatacacgatatggtgataacacacaccaatattggatcttccctatatctttctct

SEQ ID NO: 28198 - DNA, 412 bp, Glycine max
taactgaattatatcattgaccactaagactcttacattataagggacacaattcctgaaagagtgggagaatttcagggattctcgaatcatatatcacacccgaaaatgggaactccaatttattttccgaaggattttggcattcattgacagggactgggacttagtcctcaggattttttgtgatgaaggcttgaattttaacgacccttataccccctattccacagtctcgttctcttatcttttaccctttagtttaacgcgcaaacattttctctataaataagagggggtacatacacattagtttaatttcccacaccaatattttctcttccctctttctttctctcaaatagaaggtgcttagtagtatggaagacctggattggtgttcgtttaccac

SEQ ID NO: 28199 - DNA, 366 bp, Glycine max
ctggacgtatctcgcagtatttacattgatgagcctatccagccctggtgtcctgactttgattcgaatatgactaccggccatgatcgcattaccgtgatctctccacattctgatcgatcttcgcaccgtatgacatgccttgcgaactacttggaggcgctttgcgttgatgtgcactaacacgccgtgtgacgaatggcgagagagctatcgtgggacggactcgatgtacggtgtatatcggctgaatgatgagcatgacgagagaattgttgatactaccccgcggtcccgttaagggaacatttggaattccttcgcatgaagatcgaatcctgattctttcttgcttctagcgaggga

SEQ ID NO: 28200 - DNA, 424 bp, Glycine max
  unsure at all n locations
ntgcctttagggcttgtacctcatcactttcttccgaagctttaacctcattgtctctcacagtatttagatttgggagccaatccaatccttgtgtccggactctcagccacttatgatagccgccgatgatcccattactgcttcccctaagctctctgttctttcttcacaccgcatcacatgccttgcaaactccttggagtacctttgcattggggtcactaaaaccccgtgtaatgaaaggcgtgatgctttcgtcaaatggcgctcctctcatggggtagccaagctgtcttatggcaaggacaagattataatttatacaaccccttgttcccattaagggaacatttggaaatccttcgcatgaagatagaatcctgattctttcttccttctagcgaggaaccaattaacagac

SEQ ID NO: 28201 - DNA, 151 bp, Glycine max
agtgtatagactcggacggtctaacccatactaatgatggtgtcagtcgtactgtggatactaaccaggacgatgcgcgctccattccatagactcttggattgaatcgtatctttattacactagctattgtagctcgcaactaccattg

SEQ ID NO: 28202 - DNA, 424 bp, Glycine max
cggctcaacctgctttataatctcccgacccaagtctgtttctttagcattatatagcttaggttaggcctgacttattagtctgtataaaccttaaaggcctatttcatagtaagttttaaataggttgatcagtctatcctaaacagatcaattggcttacaacgtaatagactatactaaacaagtcaataatcagcttactagttagcaaacatacgaaaacagattgcattttatagccattgcaaccagctcaagtctgaaacaaaatgctttagttgataaaataatgatataatattacatgttaaatattaaaacgatataatattaccatgttaaatatcaaaatgatattatttacaaataagtcagttcgataagcccaacacgttctcttaaaagtcacaacctgacctgc

SEQ ID NO: 28203 - DNA, 451 bp, Glycine max
ttgggcatgcacttctggcctatcagcctgacccgggagctgctagtcggctgagatgcagctttttaggtagctttgcacgacctggcaagaagacaagcggagacagatcgaccttttggaattctgttacacgactcacagtgttggccacgccaaagcgctactcgtgcggccattcatataccagagtctgtgaactgtgaggcgagattgcaaaacctatggtagcaggcagacctaaccagtgttcctatagatcatgcagccgaacgacacatactcaacttgtacctgaacgccctctcctgtgctgcttgcttaataagaggtggttgacacgcgtgaggttgactacacgtacctaccttaagtcatgccgacgtccttgtgcaaataatcgagagcgtaactgctcgtgccctgtagatactacactccacacctgacc

SEQ ID NO: 28204 - DNA, 421 bp, Glycine max
gggagaggatgctcaatggatggaaagacagagggagataaagagggaggggggagcacgaaattgaaggaagaaaaagggagagaagttgaactttgagttgtgtctcacaagactctcattcatcaaagttccaacgagtgttacacatgcttctatttatagactaggtagcttccttgagaagctttcttgagaaaacttccttaagaagcttctttgagaaaacttccttgagatgctagagcttagctacacatacccctctcataactaagctcacctccttgagaagcttccttaagaagattccttaagaagctagagcttagctacacatacctctctaatagctaagctcacctccttgagatgagaagctagagcttagctacacaccccctataatagctaagctcac

SEQ ID NO: 28205 - DNA, 267 bp, Glycine max
gtgcacgcttgctcagtttttggcacatgaaccgtggctcgctgactcatctcatcctccacatgtgcgaactgggccatatgcactggttcagaatgcgtattgggcccttacggagctttaccctttggactgacctgttgataatgtaacacacgtaaccgacgctcagaactatcataggtgacagagctgatcaatagcgaacaacgctgactcttgctaagtgatgctgtaccttcctctctccgacatctttgagacctc

SEQ ID NO: 28206 - DNA, 423 bp, Glycine max
  unsure at all n locations
ntaagtgtgcaaacactccatgtgggtggcgctctatatatctttccgtggttcatgaagtgtgtcgcaatgtctcttttgttctttgaagcgtatgagctcacatatatgcacctgcagagatagcggaattgagccgaacatgcataaactgtctggattggaagtctacaaaggaaaaagtgaagctgccagcatgatctagctttgggtagagagctgaagaatagtgttaaatgctaacccttactaagtcatgctgtaacagcctcactccttcctatttggggacccagtacagtagtagattcttcaacaatctgatagacacacaacgcttattaagcataaggtaagaagttagtgggcatgagaagaaccactgttagcatcgtatattcctgcttattattatctgagatt

SEQ ID NO: 28207 - DNA, 451 bp, Glycine max
  unsure at all n locations
ntgggctgacacttcggcgcttgagctctgacccgagatccttagagtcgaccgtgcgggcatgcaagcttgtatactttcttaagacgcagacaacactgcatgagtaggaggagtggccacacctcgttgtccggagcgagatctttattgtcttaatcctgactagttgaatgcaactgcgtcataatcttcatgtagacctcgaagcctgaaggccgcccccgcgtatatactcaacgcggcagacggttcgatatgttaaaaaccacctaactcagtaggggtgattaggctcaacgtcgttacgcgtttcacgagatattacgtcgataatgcctacccttgctgcccagggagctcgcaggtatggcactgctgcagcggaagaactctgtcctccgctggcagttgcaagagtgttgcatacctgcttgctacatgacgaagg

SEQ ID NO: 28208 - DNA, 337 bp, Glycine max
ttgacaacgatagcgtatcttgtgcatgactcacgggggtccagacaccttcatgacttaaattggagagcgtttgccctgactcattgctatgaacattaatctagctctacctcatgcatagatcagtcactcgtaaacctactgatgactctatccttatgtatctcctgcaacactcttatagcttgtacaaaacaccccaagcttagaaggcatggatgcaggctccattgcagctgatatgcctaggaacttggttaatggcctatggctatccattaccaaagatgggtggctgcttacaaggctatagaataaagacaggaggctccca

SEQ ID NO: 28209 - DNA, 422 bp, Glycine max
  unsure at all n locations
tgnaaagaggaagtgtanaagggtgaaatttcctgcttttattcgttgaccacagagtggtacttggagatatgtcgcgggggtcaggagaccttggggacgtctggtggggtgctattgcccaaaaccaagcttgaccaatcccgacccaacccaggcatagtcagtcagtgagaacctgtgatgtacctaagcatgcgagctcctggcagtcaacagataaaaggaacaaagaccacaaagcaaggaaggcttgtgtggtggctggccagctgtggatcttgtgtgatatatgggttatggcctctggtaatcgattaccaaggatgggtaatcgattacaaggcttataaatgaagacaggaggctaagatggtctctggtaatcgattaccaaggtgtgtatcgattaccatgcttga

SEQ ID NO: 28210 - DNA, 415 bp, Glycine max
tgtatagttccccaatttatggttattttggagtattttttgttaataaatcatgatttatgtttaaagctgtctctataacattaccattggatttaatgatgaaatctgtgtattttcaagtgaaaaagagtctaaggtttgaaatgcagaaagtagcagttgggctacttgcatatacatcgtacgcgcgcttagtgcacaagatatctggccgagcatcagcatcaaacctgcgcgctaagcgcgagatcagtgcgcaaagcgccgtatgtgccttcaaccaagcttacttcaagactggcgctaatcccaatttcacttactcgcactaagcacggtggtggtgctaagcgcatagttgctaattctgtaccttttcaaagtctattttgagcagaattacgcacacacc

SEQ ID NO: 28211 - DNA, 415 bp, Glycine max
tgcatgggtgcgctccgtctggcccgtgcttatacctgatgagagaagatcatcaagtttgagggctgttaccatggccatgctgatccttttcttgttaaggcaggtagtggagttgccaccttaggacttcctgattctcccggtgtccccaaagctgccacttttgaaacccttacagccccctacaatgacaccgaggccattgagaaactcttcgaggccaacaaaggagaaattgccgcagttttcctcgaacctgttgttggaaacgctggtttcattgttcctaagcctgattttcatagtttcttgcgcaagatcaccaaggagaacaatacccttcttgtgtttgatgaagtcatgactggatttcgctcgtcatatggaggtgctcaagatattttggcataac

SEQ ID NO: 28212 - DNA, 260 bp, Glycine max
ctatatgagcctcctccattcctatgccatagtaccccaatatgccatagacttcgatgaggaaaaatatccaaggcctacttcctgcacatgtgcatacaggaaccatcactcgacccttactaaataatctccaagcgtatcttctacaccgagattggatcgcctgcattactgtgaccctataatcatattcctccatgatcatattcttgagaacatggttccttgggagagactagtcacactggtgctattca

SEQ ID NO: 28213 - DNA, 418 bp, Glycine max
tgttcttgaatcatcttctccttgaagtggcatcttctttcatctttctgtcttctccattccgctgccattgaaattcaagatgcaaaggacttcattgatgaagaagatccaaggcctacaagctccacatggagatacatcaactttttcatgaaactttaagagatttattcaagctttccatagccaccaagaatagatcaattgcatttctgtaactctagatacattttccaaaatgaactcatcctgttgatgaaattccattttgagtgtgtcgtaacaatgatgttcttcatgtcatgttcattgtttagatcttcatgtctgcaacattcttcttttgctttagctgatgattatattttatggctcgaattctttctcttcatctagcgacatgtcgacttcttca

SEQ ID NO: 28214 - DNA, 197 bp, Glycine max
  unsure at all n locations
ttgtttcccgcgagtccgttaatgacttttatgatgcctctcacctcgtggaaggaccctaacactgagtcgccaagtatcatagctgctttcattgcatccgtcggagaagaatggcggagagtccganatccagagatctttgatttgaagattcggtagaatattaatccaagtttgcagagacgatctcaaca

SEQ ID NO: 28215 - DNA, 414 bp, Glycine max
  unsure at all n locations
tcctctctttctctcgaattcttcttcttccctaagttctctcggagctcgagtcttcttccccgcgagtccctaaagtttttttcgcaggcctctcacatcgtggaggttccctagccctcgaaagctaggtatcattggtgctttcattgagcacgtggttgaaagtatggcggaaggtacgagatccaaagctctttcgtcggaaaaaatggtggaattatttgcgaaatttgcagcaacggtcgagacgaagatggagaccttatcggaatgcttagctcatctcgaagcanacaggtataatccgtagcaagtgcaaccggagacgacttcgtttccggcatcaggttcacacacagcaccgcatcgaatgaagctcgatgtgtcgagattcgatggtctgacgccact

SEQ ID NO: 28216 - DNA, 247 bp, Glycine max
aaaacacatggtactactacccaattattaaataaccttcaaccactactaacggaaaccgtgccctttaagagctacgtgagaaataactagtagaagcgacatccatctgagagtgtacgatgtatcacttcacgatagaagatgagatctccttgtagaatgactggcatgataaagacggagacatacgtgcattcatcgaaacattgaatctgcagtagctgcggaactgatcattcaagga

SEQ ID NO: 28217 - DNA, 357 bp, Glycine max
  unsure at all n locations
ttagttactatataataattctatacaacttattttatttatacgagaaataaaaatatgaaatataatgattgacacgatacaaagatatgtaaaaaccagtgttcatccagaaaaaaaaaaagtggtatatagattcatttattgtgtagtcttttttttttactacaattaaggcgtaatcttattgtatagggaaacagaacttggtgaggtgataaccaaatgagtgtatactttgatgacttcatttttgaaaattagattatcaatgtagatatacaatacatgaaaaggacggagtataggtgtatttatctagacattgaatctagtggtgctgcggangttatcatt

SEQ ID NO: 28218 - DNA, 259 bp, Glycine max
ggacgtggataggatatacgctactgtctgcacactatgtggtttatgcgtctacgccgaccgccacacgtgactttgtcctttggtgctagcatctgacactgttgtatatgttgacatatacgctgcaatcatctacctattgcgatggtatacctctttacataagttccccacttgacaacattaataatctcttcatgacgtatgacgattccatctggacgaatcatccccacattatatggatgaatacttc

SEQ ID NO: 28219 - DNA, 415 bp, Glycine max
tgaaggtaaaccagatgtctaggttaacctggtaacccatctggccgtgaataaaaaatctgcacctgtcgccagactctgtggtttatgctcctctgccgaccaccacacaaacctttgcccttctgtgctacaatctgaagcaattgaatatcttgaagcttatgctgcaaacatctacaatagacctcctcaacctcaacatcaaaatcagccacaacagaacaattatgacctctccagcaacaggtacaatcccgggtggaggaatcatcccaaccttagatggttgaatccttcacaacaacagcaacaacaacaataaccttattttcagaatgctgctggcccaagcagaccatacgttcctccaccaatctagcaacaacaacaacaacacagccccaaatatagc

SEQ ID NO: 28220 - DNA, 412 bp, Glycine max
ctgccttgatcttcggccctcgacttgacctggggactctgaactgcctgatgcatgcaagcttctaactttataattaagaagcagcgtaccatttgatagaccagtggctctctactttctgattggggtgcagcccaaacacgttataccagacacactctatgtatgaaatgctcaatacacatggctcctcaattgaactcaaataattttatctccctcgcttgtgattaaactatcaagtcccctcagaggttcctcacaaactcgcaggcataactcgcgacctttgcgatcatatagtatgtgatgtgactacagggttcactaatgacccaatctagtgcgacattatacaatcgtacacctcatgatctatacacccctgttacatggacagtccaatacg

SEQ ID NO: 28221 - DNA, 321 bp, Glycine max
cccccaggcctacactccgaagagaccgacagggccacaccttcctgagacaggggcaacccaggaaacatcagaacagacagactcgatggatgaaaagtacaaaacacatggctcctcagaaggactcaaaacaatgctatctcggcgcgctagagataaaactcatcagggcccctcagcggttcccatcacaataatcagcgcgcaagaactcgccacccttaaaggatcatatagacgcgtgagtgcccaaaccatggcccccaactcagagcacaccacaactcaacgcacacagataccacaagtgaaaacaca

SEQ ID NO: 28222 - DNA, 185 bp, Glycine max
tgaggtacgtccctgccttccttactctcagcgtatagagtgactactggaagagctccgatggcccttgactacgcccatctagtctacctattcggacttattacctctatcattgcccctatgcgttacagatcttattcagatgcggcgttatgtacttcctatccgaatttgtcccacaa

SEQ ID NO: 28223 - DNA, 421 bp, Glycine max
  unsure at all n locations
agctnataagtgcgggttcgggagacaaaggtcaagcgttctttatatgcgaagatgatattccgagtactttggatttggtacgaccatgctctcctgatttccagctgggaaattggcgagtggaggaacgccccggcatttacgcaacaagcataatgtaaacctttacggttttaaaagctctatagttgggcctaggctttagagttttcattttgttaaggctttttgtcttttgtttttgaatttataatacaaggatctttcttcatctgttcctggtctctacccattctcattcatttgcatgtttacttctttttctgatacggcagatccgatgacgagtcccccgaatgtactaatacctgtgacccgtctatcaacttcgagcaagaaatgatcatacggaagatga

SEQ ID NO: 28224 - DNA, 219 bp, Glycine max
ctaaacttccgtaagcgatttaagctgctcccattccaacactaaccagctgaggatcaagcatcgatcaaataactcttgacctacgacgaatgaccttctctgatctactcacacaagcatgatctgaacactacccttgccctgagcttgtatgctcttgatcaaagattagttttctccgctacttcctaaaacgcataagcgcgcggatctgga

SEQ ID NO: 28225 - DNA, 420 bp, Glycine max
  unsure at all n locations
tgttaaanacggaagacaataaaaccgaaaatgaacgatatgatgacgaaagctaaaaaacaagacaggaattaaaagtctcggattcgaaaacttacctgttgaagaacgaagaacgaacgaagaacgaatgaagaacgacgaaaaaccttcacggattcgctcacagaaacatctcggaaacgttacggaagcacctcggcttggattttcttcacggaaacaattttttcaccctaaatagctgaaatgcatagctaggcggatctgggatccttaccctttcgcctatttataggaaaaagggggaggaggttgtcgcccagctcgcccaggcgagctgcattgcttcctctagaagcaaccctggcttcaaaatactctagaaggcccaaattcaaaattcgaaaattgttattt

SEQ ID NO: 28226 - DNA, 199 bp, Glycine max
agcgtctttcgtatcttgacactagctatccatctgacattcttctgagatcctaccttcgtgaattttccaaccgtgaatgactctaacaccacctctgccattcattgacttcatgcctgtcaccatccgatgtccacatctttgatgccttattccgacctcatcttctgtgcagaatacacgtgctgctgaatta

SEQ ID NO: 28227 - DNA, 567 bp, Glycine max
  unsure at all n locations
agcgcgctatnnntttgatgaccccgtcttctacgtgcacctatataaataactcctgctttcggagtgttccaagctgccaagttcgactctcttcctttcgtctcattcttcgttctgaccttacaattcatcacgtggggcatttctctttctggtgtccacgcatactctgctgatgttacccatgccgtttgatcgatcagcttctcacaagcttctggctatcacatgtgagcttgaatgagaagcacacgcatctctctggctcttccaagtatctcataagcttggtctctcatacccagaatatgcgtggtgctgtgtcactcgcgtcctcacttactttactccatagttcattcagagatctcatctcccgtagagtctgcactcagtcgattttccagtgcactgctcatgataaccaagtgataattctgatacttggggacaagatgtcagtacattgatgtctacgacatcatcgctttcacaacaatgcagattataatttgacagtgtgtacatgcttatacaagaagatacgacacgagaattgttact

SEQ ID NO: 28228 - DNA, 472 bp, Glycine max
  unsure at all n locations
nccctgggctgatgcgatgcttctcgtggcgctatcagctctgagctcgtgctgctctagagccgacctgctacgcggctagcgtgttgtatgatggggtacccgccacatgggatgatgggaggtgggatgtcgatggtgcgcgctttctgcacacatctgctgatcactcagtgctgcccaattcccgcttggcgcacttcaagtgagctcacgtgctggcgcggacacagtatcctcgatcgtgttccggtcggtccctatcagatcctacaagctatcacgtcaatctatctgcttcagactcccagcatcatgaactagccgatccaaccgttaacgaggcggaggcagaaggctctgcccagaacgcgaactcgttcaccaacgtgtgttactcatatacccccttaacattggctctgtaacgatgtttgggccgttgatcgactcgaatagtgctgtgtaggct

SEQ ID NO: 28229 - DNA, 409 bp, Glycine max
tgtacttggtttagacatgattgatacatgatttgtgtcttgtaggattcaatttgggcagaattggatgatggaaagtgtgatttcgaaaatctgcactttatgcagaattttgctgtcaaataggtgcagccgaattttggctttgtgcataaaatgttgtgtatttgctggttgtggaaagagtagtacagattgggttctggacgttttctagtagatcccaacggtcataatgtagatttatgtgctagagactttcagtaaaagtttcgagtcgatccaacggttaacgaattggaacaaagaggaatgttgaaggggtgtaatcgattaccaaggggtgtaatcgattaccaggcttagaaatggaactggaatgttgaaggggcctctggtaatcattatc

SEQ ID NO: 28230 - DNA, 337 bp, Glycine max
tcagctctgagccggggcctctaaggcacgtgctgcatgccgctttatgctcttcatgcgctggaggatcaacaggagaagctatatcataatgcagatgatcgggagatattaggcagtgatggtgttactacacaatcaccgaattgataggcttaaactcgaccttcctacactctggagaaagacagatgcggatgcctacttggactgtgagacgaatatagagcatgtcatctcatgccgctactatgaggacgaccgaagcgcgaagcatgccgccacggagttatccgactatgctattgtgcggtggagcacgctacatatgagagag

SEQ ID NO: 28231 - DNA, 381 bp, Glycine max
ttgatgcaacatatggagagttaatgaaacaacgatatttgcgctccatgagaggctggatcaaatggagaatagagatcataatgaagaagaaaggaggagaagagggaatgatggtgttcctagacaaaaccgaattgatggtattaaactcaacattcctccatttaaaggaaagaatgatccggaggcctacttggagtgggagatgaaaatagagcatgttttctcatgccacaactatgaggaggaccagaatgtgaagcttgccgccacggagttttccgactatgctcttgtgtggtggaacaagctacaacaggagagagcaagaaatgaagagccaatggttgatacatggacggagatgaaaagatcatg

SEQ ID NO: 28232 - DNA, 489 bp, Glycine max
  unsure at all n locations
agaactttnntttganccctgacacgctctgcttctacgtgacgcatatcagctctcgacctggcgatcctctgtagtactatctgcacgcattctagctttgtaactatacaccactagagcccgaatgggcgaacaccaccaaacctagatctgaggcgctatatttggcagaaaatattgaactcaagctccgactatgtgccttgaatcatgtcttgcagagacattatcgtgaccatatagctagaggtgtcctataggaccaaggatggatgaacggacctttaaccgatactgaggacaagatgcttgccgtcattgataagtgccatgataaactgaaactagccgctagtcgctagcttgcgcttnaggatcaccatgccttgatatctgcttagagggatactatggataaggggattgactcattgttccgtgacgctacaacgtggacggacctagtagctcttacttcgatcactg

SEQ ID NO: 28233 - DNA, 420 bp, Glycine max
taacaatcagtgtcatactattgatcaaaacaaagcttgtataaatatgcaatactagactcaaaatatgcaacaaacactatacctaaatcagtgtcacagaaatcggaagaaaatattttatccaagcacaaacttcaagccttattccatgtattggggggaagttatggctggccatatgggtagaggtgtcatagaggagcaagtatggaggaagggaccttggactgctgaagaggacaggttgcttgctgagtatgtcaggttgcatggtgaaggtagatggaactctgttgctacgcttgcaagtaagaaacaccaaactttattcactgttttgtttcttaatatatatgattggattttcacatttataactgacaatatagcataaaaacactgatattgttttcaact

SEQ ID NO: 28234 - DNA, 76 bp, Glycine max
tccagagatctttgatctgaagattcgggagaagatgattccaagtttgcagagacgaactcaacaagacttgcca

SEQ ID NO: 28235 - DNA, 420 bp, Glycine max
tcctctctatctctcgaattcttcttattccctaagttctatcgtatctcgagtcttcttccacgcgagtccctaaagtctttttcgcaggcctctcacatcgtggaggttccctagccctcgaaagctaagtatcattggtgctttcattgagcacgtggatgaaagtatggcggaaggtacgagatccaaagctctttcgtcggaaaaaatggtggaattatttgcgaaatttgcagcaacggtcgagacgaagatggagaccttatcggaatgcttagctcatctcgaatcaaacaggtataatccgtagcaagtgcaaccggagacgacttcgttttctgcatcaggttcacacacagcaccgcattgaatgaatctcgatgtgtcaagattcgatggtgtgacgccactggttgg

SEQ ID NO: 28236 - DNA, 221 bp, Glycine max
ctgtagacgatagtgaaactcggagaccagtcgagagacaagcgtactcacataggttgatacgggccggtagaaatacaagcttcctatctatcacccttctttatgctatatgacacttggtatgcatgtgataaatgtcccttaaaaaagatacttcttacataatgatatcataatcagctgcctgtctatgagtgaaaacttgttatatgctttcg

SEQ ID NO: 28237 - DNA, 417 bp, Glycine max
  unsure at all n locations
tggactataagagttaaaattgacagtaaataatacttgtaacttgttgaagttagtggaacttgatgatttgtcaagaactaaacatagtttcagtggttgatacgaaccaatataaattcatgcatcttatatctcaatatactttatgctaattgacttagggtttgaatttgattttgttgtgaaaagaaatattttttacaaaatctattattatcaactgcctatctatttgtgaaaacttgttatatgctttcaaagctttattggacgataactttgtcttgtgaaaaaagatttaaaaaatttctaaaatcacaactcaatcctctttcttgtaatacttgtctttacacaaatgaatttgaccatcattaataagatgctntatgtgcatgacatcaacattaatat

SEQ ID NO: 28238 - DNA, 411 bp, Glycine max
cgcttctacagaaatgtagttgtcgtaacattatttccttataacagtaaaagtactgtcgactgaaacaataaagatctagccatattcagcaaatgctgatgctttctatccaccacaaaatactgcagtggtctatagggacaactgaattgatgcagggtaccctgctgttggagaaatgtacgcaatgccaattcaagagcattaacatatctgagctttttaatttgaaatccaaattgagtctttattaatgcaaaaaaatccttaaccttatgagttgcttcactcttagtatggagcaggtaaatccatgttaacctactatagtcatccacaatggtgagaacatagtgcattccttgacgtgtgactgtatgataaggaccccatactccacatgaatga

SEQ ID NO: 28239 - DNA, 313 bp, Glycine max
tgaagaggtaaatgatgatcctcaggctgaggtgtctctcatccttgggatatagattgtcaaagggcggagagatgtggtcccatgcgaaacgatccatcgtgctgtcatgaatatcttttcatgctgatagtcagctcgcccacatcgagcttcctgcatctcatttctgtgaggaaccttgaccatagcaccgtccttcctcctggattatcgtcttacgtatgtgaggctcacttaagtttgagataggcgttgatgactgatactcttgacaggcaaaagagtgagacactctgcaatgacaagtgat

SEQ ID NO: 28240 - DNA, 389 bp, Glycine max
gacgcttagggatggaatacttacttgttggtgatgaacaaatgtctaaacggaatcaaataatgcgaaaaatgatgaccctagggctgcaaactccgcaatcccgtgggtatggcttttgaaagggggaaaagaagtttttgaatgcaaaaacgtcccccctttcgtcatctttatattttggtgcaagggtggctctcccaggcgagctaacctgcatttttttttttgagaggaacattatccatgcccccttcttcctcatggttcagcgtcttgcttaacttgaacttacttaagtttgagttaggcattgattacttatttcttaaacagacaaaaagtaaaagagaactgctaatacaaaggattcggagctgtcttgcagc

SEQ ID NO: 28241 - DNA, 126 bp, Glycine max
tgcgtgtgttattatctaaactatggagcctgcacacaactgttgtccattgcctatccctgacactgcatggtgaacactcaccattgagagatctcataggagctctatgatccagcctacgta

SEQ ID NO: 28242 - DNA, 391 bp, Glycine max
tctaatccaaggcaattcttggtggtgaagctccttcttctttggctaattccctaggggatggtgcctcccctttcctcttttccttggccttccgttgaatctccttggggaaaaataccatggaggactaatgaactcaaaaacagcctcatagaagctcacaagcaagcttccatcatgttgagtggtgcacccctcttttgtaaaatcactcatgcacccaacatcttcatgatttgtgtacatagggactcattaggtaggtttgttcttattttttgtttcaatacaaacttaggtgctcatatgggacaccttatgtttgtcataatatcttgtaggaataatcaacatgaaaataaagaaaaaggtatgtttattcaattac

SEQ ID NO: 28243 - DNA, 453 bp, Glycine max
  unsure at all n locations
ttgcctgactctttggcctctgacctgacccgggatcctgtgagtcgtccagctagcctgcacgcttgtaccaattagttctgctatactcacttatgggaacggggatcttattgcgaatggtaatggcgcagatggcccgggattccgttcttaatgtgcgcacgttatcatgcattcaatcacggaacacctgagaactcaactgactggtgctatgtcgaataccggcctgtgaagcatagagatatctacacgttagttctaactcctatttgtggatttgaggagtccatgaagcgcgcacatttacaacgggggaccacggatttaatggcatggtggtactgaataactatcagtgtgtatggaagaagtggctgacatttcgtctccagtggtctatctatgtatgaancaacgatgcctatgtggactgtgtgtatgatattc

SEQ ID NO: 28244 - DNA, 408 bp, Glycine max
aatattttatttatatgtaagcagattatttaaaaaatctgtaaaaaataatataaaattacggatatttttatcattcgttaatcaacgcaaataaaaaaaattacagttattaatacgtggtctatggtttggattcacttacgggagaataaaatactaaattaatttataaaatttaaaataccaaaatgtaatcattgaatatataaacattattttaatttttatttgtgtatttttttgttctatcatttgtgtatttttaaaacgtaaataaccgttatttaattacgtgtcaataactaaataactataagtttctatttaaaaattaaaataatattgataatttaataatctaaattaataattaagtatcgatatacttttcaaactatataatat

SEQ ID NO: 28245 - DNA, 467 bp, Glycine max
  unsure at all n locations
ntgaacctggctcttatngccttatagagctctgnaccctgtcgacctgtgcagttcagactgcgtgcctgtcggccttgctgccgtgtctactactgatatagctctagcaccaagactcatgttgatgaagcgctcatccgtgatctgatccacacaacctctatgaactacatattgctctacttgggtcacacatgtctgttgatgcgtacgcatcggacaatgaggcatagaacctaatcactaatagatcattagagtcatctaacggtggcacaactattgtctgttgagcaccgtgtcgtaacatggccctaatgtcctttgtaccagcataacatgtgattactgttgaacacctaggccataggttgcgacgttgacattatgatggaacacgactgtatttcaacagatcctaggtgaagatttcataccaccgactatcgaagctcgatgaaggc

SEQ ID NO: 28246 - DNA, 431 bp, Glycine max
aagcttgtatagttggcaattcaaacaaggtgtctacgtcaatgttcccccctatactcatattctctagtctcaaaccataaaatgtttggtcagtgtggttgcataacaaacctctccaactacataaactagactcgttcacccagttgtttaaggcattgttattggacaaggaagctttgaacctcatcaaaatttgagcatatgtgtctcccaacaatggcacaaaacatatattggccaacaccaacagcataagaaggcaataatatgctcttctaagagccatagtaagtagatcacaggttgaaccaaaatgggatattggttgacgagaaaggaaataatagagggaataatgaaactaatgaagaacaaagaactatcgagaaactaattaagaacaagaactatcgagagtttgaaag

SEQ ID NO: 28247 - DNA, 121 bp, Glycine max
catgcacgcttacatcattgtgcaaacttagcacacaaactgttggtaggtgcttcgtacactcgccattgattatgtgcatcacctacattatggaagttgaaagcacattggtgaaaca

SEQ ID NO: 28248 - DNA, 415 bp, Glycine max
tatattattatgctagataacaattgaacatatacaagattccattgtcaaaactttgcgggcagaaagttggttgttacaaggttcaatgcaagtgaaaaggttaatcccccaaattatggaatttgaaagtactttggtgaaacttaatgttgtgaagttagtaagaaagtgggggaaaatagacaccatacgtaaacaacggtcaaagctgcacctcataaagcatacaatatacaacataattaaaagttttaactcatttttatgatccataatacctaaggttggatcttcaattatatatgtttgaatagctctaaataaagtgcattatttggtcttataaatagtagcatttgcagcaaggatgctcggccacatgaacatcatttgttagatgattactaggcta

SEQ ID NO: 28249 - DNA, 266 bp, Glycine max
tcttgtatgcaaacttgacaaatgccctcttactcttctacatgacaagcctatcttcttggtgaactcacacgctgacttattctatgattgactctaccctatcaagagtgtcgttggaacacttatgaggtccatacctgtgcgcgaatggtgtacagcctgattatgtcctatggcggactcaaacatatgaacctctacatacttaacatgagctgtgagacccaggaagtgctgatgaccttctctactctttacgctgg

SEQ ID NO: 28250 - DNA, 403 bp, Glycine max
  unsure at all n locations
tgagacttaattgcgttgttcttcccataagcagtagtcatcagtgcactctcacccatctccattacaagcctttcttcttcctgaacacacatggtcattaattcattgatagactatttatctttatgtgtgttgtaggaaatcttaaatggcccatattcatgcggaagggtgttcaaaatgaaatgcactatgaaggactcagacatatcaacctctagtttcttaagttgagctgaaatatctcgcattttcatgatgtactcacgcacacctttcacactggtgagccgaagagaagaanacttcatgatcaaggtgcttgctaaagtcttatctgaagtgatgaactggtcatcaatggccttaagcaagtctcggaccttttcatgctgtcaac

SEQ ID NO: 28251 - DNA, 347 bp, Glycine max
ttggtctctgcgcctacagataaccacgatgggttcaccaccacgccgctaaaagtggtacaggacgacctgcttatcgatactcctgaagtgggcgaacttgcattatcatctctcatgaaccagcgatgtgagcgcataattgttaaacttgctactttcattgtagctatacctattgatatccaaacacgtgacctacacatatgatgctaagcacagataagtcagatcgtagggtacttctactaggatactaggtgctgctttgtggacgagactacaactcagggtatacctgctaccgatgctcagagacatattacatctctgcgatgtccatccac

SEQ ID NO: 28252 - DNA, 415 bp, Glycine max
  unsure at all n locations
tgttgaattataacctccatctacctttctttaggttgtttgagagtgtttacgccccggtgttacttgttaatatggatgcgtagatctaaccggcaagtgtaccgagtcgtgcaagtaataataaaacggtaagaactgagtatcgaactcagggaacttgtctcatttggtaaagcatcattcggtaagcagccatgtgtgcaaagaattgattatcatgagttaaaaataattgtgatttctattctaatcaaaatagtaaatgtgagcaagtgggtgtgaaaacagatatgtaaaagcgttgggtcctcctactaaaatacttgatgcaattaaatgtatntctctattttaaggttattcctgcgttntatgctgagagctaaaataccaaacaccgtgtctcgtgagt

SEQ ID NO: 28253 - DNA, 190 bp, Glycine max
atatgtagtgggccggctgacatgatacattatcagcagccaccatgacgacacgcctggcggcacatgtatgatcattcagttacgaccctggaaaaactctaattttggttgcaacatagcatgatcctggcgccgccatatgaccgtgcattccatgtgaggggggaccccttgtgatagaacaatc

SEQ ID NO: 28254 - DNA, 420 bp, Glycine max
  unsure at all n locations
taagatggtacagggtagagttttcccaataattgcttgttgatagctttagttttctgttactcagtttggtcatgttttcaaattaaaaaaaagaagagaattttggaaacatttatgttgtttgctgccttatattctatattatcagtttaaaccctgacgacttgacttggtggacatatatggttattttgttttgaccctgatagatctctaattttggttgcaacatattaaattccttaagcagtaaattgaatgttcaattcatgtgatgggtgaagtcttatgttgatctatatagcttcgtcttttacaatgaatgcatgaaggatttatatgcctgctctgtggttgcagattcattgagattcacatcagccctttcagtcgcacttgagttngttttctagtcat

SEQ ID NO: 28255 - DNA, 422 bp, Glycine max
  unsure at all n locations
tctcaaggaagttntctcaagaaagcttctcaaggaagtctacctagtctataaatagaagtatgtgtaacacttgttgtaactttgatgaatgagagtcttgtgagacatacttcaaagttacacttctctccctcttttattccttcaatttcgtgctcccccctctctctttctctccctctttcttttcctccattgaagcatctttccaagcttcttatccaaggctcatcttggtggtgaagctccttcttccatggcttattccctagtggatggtgcctcctctcacctattctcctttgtcttccgctgcatctccatggtggaaaatcaccattaaaggaccttattgaagctcaaagatccagcctccatagaagccccacaagcaagcttcatcaagatccttatagaca

SEQ ID NO: 28256 - DNA, 280 bp, Glycine max
tggcgcctactataacctattctcctatgacattctctgcacacatatggtgatgaggcacctgtatgggtcttcattgcctctctataagccactcgacacacaaacctgacaagcgtgcttccatccattgaggacttatcctctaagtcagcgctgtcagattatccttttacatcgtccctgtcctttacacgtgtgatcccataacgatttatgtgagtgctcgaacacatacttctatctctttcgatagacatatcatcgtgatttgttgttt

SEQ ID NO: 28257 - DNA, 407 bp, Glycine max
tcttatccaaggttcatcttggtggtgaagctccttcttccatggtttattccctagtggatggcgcctcctctcacctcttctcctttgtcttccgctgcatctccatggtggaaaatcaccattaaaggacctcattgaagctcaaagatccagcctccatagaagccacacaagcaagcttccatcagttgggaattttgaaaatatgtcggagctgagagaaaaaccctttttatcgcaacttttttttccccgtagaaacccataactatatcagtaaaactacgatcacagactcgtcaaccgttggattgtcgaaaaattgtgatatgtggtttgagattcaattccgcacaccttcatcgttgagattcgcgaaataatgttcatggagagagaaaatg

SEQ ID NO: 28258 - DNA, 166 bp, Glycine max
aagagatggactgacaccttggcgtctgcgtattactcgcccatgatgagaatgtacactctgagatgcccctttggacatgccccacgtatgtgcttatacatgagcgggacttgctccttcacagggatgaccacgctactctcgatagacatgccatacaaac

SEQ ID NO: 28259 - DNA, 413 bp, Glycine max
  unsure at all n locations
tccagattggtataccatgctacagctgccccgtgccaagctgtcttgaaagaaatggactaacaacttttcgtctgcagaatacacccccatcttccgacaatacacccggagatgcccctttggacatgtcgtccctttgtacttatcaaagtctggtactttgaacttgggagggatgacgatgttgggtacaagacataaatctgccaaatccgagaatgggtaattgccgaggccctcgactgccctcaacctctcttcaagcacctcaatctttcccttatcttccgtgaagggaacaaattcttttacgggtgtgggtgaggccgggatatggcggactatgttcggttggggtatttcatgcggngacggatctttgaggtggagcanggggcaagatgggtatc

SEQ ID NO: 28260 - DNA, 198 bp, Glycine max
tgttgtacataccatggacggggaatggggactgccccgattaatgaccctcgccttcgcggtggcaaacaccttctacgaccttgacgacattcaggggctatggatctattgtcggcctatgatagacttgatggcccgcataattagcaatcatcacgaaactttgatgcgttagtgaaccttgactacatatga

SEQ ID NO: 28261 - DNA, 404 bp, Glycine max
tgtctcagcgtctatgcgagacagaaaccatcatgttatctatcatcgccaagtaccaagaagagttgggtctagccacggcccacgagcatagaatcgcggatgagtatgcccaagtatatgcggaaaaagaggctagaggaagggtgatcgactctttacaccaagaggcaaccatgtggatggatcggtttgctcttaccttgaacgggagtcaagaacttgcccgattattagccaaggccaaggcgatggcagacacctactccgccctcgaagagattcatgggcttctcggctattgtcagcatatgatagacttaatgacccacataattagaaatcgttaggaaacttgtatggtctctcagaccttgactagatatgatttctttctttaaata

SEQ ID NO: 28262 - DNA, 209 bp, Glycine max
ctatagagactaactcgcttacatgcactctagatatgaaactatgacgccttggactgcctaattactcagatagccctgactcttgaatctacgcctgatgctacaggatgtggtctatggactattacagatcaacatacccacttttgtgacttcctgcagcaatacggcgctaacgagcggcctgaagctcttgttgccgacat

SEQ ID NO: 28263 - DNA, 515 bp, Glycine max
  unsure at all n locations
cggggatganccattgtacttcaggcaattcagctcgtacccgngagtcttctagatcacctgcagcattccagcctgggcattttaattttccttggtggttaaaagaatatgacctattatgatgtcatggtgcttcaaatgaaaacaacaggttatangggttaagatggccatanaagaacttgaggtggagttggagtgcatggtcaactgtttgatccacacaagaagttttgtttcttaaacattttaaccaaatagaaaaactactttgggaaatgggagcccccacataccaatgacgaacanattgactagctaactagctcanaacacctttatctcttaattaaaattacctagatnngtaatcattcttttattctttgattgttttcaaatacactacattgtgaatgttgaatttatttgaacattgtctattccacctgagtacttagattacagccaatggacataagttggacttaaactaaacaattcatttcttn

SEQ ID NO: 28264 - DNA, 183 bp, Glycine max
ctgaaaactcaattggggaggaatgtggcaatattgtatggatatgtatctcacacacacaagaatctagttcaatagtaataataaaatcaaaaatcagtcattttcttggttgttgactcatgtggacttgagccttgatctcttataatggagtcttgctttttaattcatggcacgaat

SEQ ID NO: 28265 - DNA, 460 bp, Glycine max
  unsure at all n locations
gcgaatgagncatgnatacgcgggcnnaacagtcccgcgatgcttaagtcaactgccggatgcagcctggattatttaagttctttcaggggagnggnagaatggaaattcctctttttccgtaaaagcatgcctaaaatgcgttcatacttcaagtaggctgtgttttctatgaacgcataagtggggcgctctaaaaaatagatactgtggaccctgcagcattaatagattggagcatctgacggtgcataaactatctgatgaatatcttgtgggcttgggtgcttgctctgagctacatcaccttcatttatgctcttgctctcnggactatatgctatcgttcctgagtttttgttttgaccgagccatttgatgactaattcgcattaacgtttctaaaatgcacatgctgtgttgccgtggtgagccaaatcatctgtcaaaatagccgggg

SEQ ID NO: 28266 - DNA, 206 bp, Glycine max
tcggcactcatccacaactatgacctgagccgatcctatgagatattgagggatgctgggtggtttccggtcaaacgttatttcgaatggagagatactagttgcgaagtgaattgaggtgttgtaagacattctgcccacatcatgaaatttccccaagtggttggtttcgagtgaacataagcgcagaagtactgcttcactac

SEQ ID NO: 28267 - DNA, 231 bp, Glycine max
  unsure at all n locations
gcgatgttgtatgctaaagtgctgaggaaactgtttagatgaaatatgagttaacctaggttggaagtgagaatgggtgtatgaatggaagagagtgatgctctgaggttgaacgttagtctgaattctgtggatatggaggttaagtgagtaatcctacctgaaatgtcgttangactttgaaaacttggctggctaagagacaaaatgaccaagtgacctgagcctttt

SEQ ID NO: 28268 - DNA, 318 bp, Glycine max
gcccgttgcactcggagattgcgccatcttccgtgctcacaagatatgtcatactgacttttgagtcacgctaacgggcggaaatactcgagtggttatccgtataaattgtttgctgtctgtaagatgaaaagcctgataacacgcagagtctaacgtcgtcttcagcgcccttcgttaatcgcggccgacatgcccgttgacacgcggagatttacgtcatcttccgcgctcacaagatctgtcatactgacttttgagtcacgctgacgggcggaaataccccgagtggttatccgtataaacattttgctgtct

SEQ ID NO: 28269 - DNA, 304 bp, Glycine max
  unsure at all n locations
agccttggtgattatgtgaacaaaaaaagaacttggataatgttgtagttgttcactcgctaagcgcaacactngcgctaagcactaagtcttcatgcgctaagcaggcccttgctcgcgctaagcgctaggacccttgagtattggctagatggtagcactaagcgcgcttcattgcgctaagctcaattacctctgtgaaatctgaagttctcacattgcgcttagcgaggtgatgcgctaagcgcaattccctctttgttttggaaatctttggaataacgctaagtgccagataagcgct

SEQ ID NO: 28270 - DNA, 379 bp, Glycine max
  unsure at all n locations
ttatgaccctnggcttgcccaggctagcctctggcttgtctgtgtccccaaagagcttangggtgaagtaaccagctcacctgggcgaccaaggttacttcatgttgaagcaacagctcgcctaggcgagctacagataaatcaagtcccctcattcctataaataggtgtcaggagggctgaagaaagggttcaactttcaaacataaagatttntttagtgaaatttcaagaaaagaagaagaaagaagagaataacgatgccgatgcgctaccgaattggaccataatcgacttctacatcgttcatcgttcatcgtttagtgttcttcgttcgtcattcggttagtatttattttaagtatttgaatacaatcta

SEQ ID NO: 28271 - DNA, 325 bp, Glycine max
tttgatcgtctcgatatataatgcgcctgagtcgcacatccgagttaaaagttatgaacctttgaatatctcgagagcttccattgttcaatttcgagcgtctcaatatattatgcgcctgaatctgacctccgtgtggaaagttatgaccatttgaatttctcgacagcttccattgttcaatttcgagcgtctcgatatattatgtgcctgaatcggaccttcgagtgaaaagttatgaccatgtgaatttctcgagagcttccgttgttcaatttcggcgtctcgatatattatgtgctgatcggacatccagtgaaagtat

SEQ ID NO: 28272 - DNA, 307 bp, Glycine max
  unsure at all n locations
actcggaggcctatttggttcntatatatcgaaacgcttgagattgagcaacggaagctctcgtgaaatccaaatggtcataactttcaactcggaggtccgattcaggcgcttaatatatcgagatgctcgaaattgaacaacggaagctctcgagatattcaaatgatcataactnttctcacgtaggttagacttacgcgcataatatatcgagacgctcgatattgaacaacggaagctctcgaaaattcacatggtcataacctttcactcggaggtccgattcatgcgcataatatatcaa

SEQ ID NO: 28273 - DNA, 241 bp, Glycine max
agcttttttattttacaagattaagctctgatccacttgtttacaagtggcctcacaatcttaagaaagagtggttgaatcaagatattacaaactattttcccaattaagattctactttgatcttaatgcacgttccaagttcccttaatgacgaatttcttaatgatgattcacattaaacaatttgagtgtaaatttaaaacaacaatagataaaagagtgtaagggaagagaaagt

SEQ ID NO: 28274 - DNA, 284 bp, Glycine max
  unsure at all n locations
tccaagagcctacaacatgacttacctcaaattctattacagttaaacttgtacgtggtgatgtactatntttcctacgagattttttgttaaataggttttaacgaggcacacccaaattttacattgaataaagtactatttttatgagttttattagctttatagatctgagtagaccaattggtttctctgactaaacactcaatgctagggataaataagaccgaataaatatgtgacttactaaaggactgacacccacagtcagccaaagatagatc

SEQ ID NO: 28275 - DNA, 265 bp, Glycine max
  unsure at all n locations
agcttgagagttatatgtcccttgccttataattaagagcaacagcaacaacaaaatatgaacaattattagatagatgtgtacctagtgaggcgtgcanataagtacgatgtatatattgtgttgggagcaattccaaatccatacctatcttgttgttactatctagtggaaaggatagcacgagggatacaaactatagtatattaccgagtataaagggcattggtttggtctaaattcaagttcttctccacttggcaat

SEQ ID NO: 28276 - DNA, 464 bp, Glycine max
  unsure at all n locations
actcgaagattacacgggtatcttctagccaatatatttctttgtgattatatatgnggaaatgagagatagatntagtagttggttgatgaacgaggtaatattatgaattgagttattctccaccatttgtaattatatgggtaaattataaacttaatgatgatttattttagtaattagaaacacaattaattagcaaaacgtgtgagaaagtcacgtgtgaactttcctttttttaatttattctcctatttatatactatagatatagatataaatgttataagtatacaataagattatctgactgtacagtaaaaaacagattatttcgattcttttgttcggctttaatttagttgaatctagatttttttgaatcataatagtgtttatgttntgaaatggttctaacaccctataaataactattgcctctaaatattgaactaaactaaatc

SEQ ID NO: 28277 - DNA, 329 bp, Glycine max
agctttatatttgctggtttcagacatgaaggccaagtcgccgctatatgcgacgatgattccacgacgagatcggatttggtacggccatgtcctcctgcgttccgactatgagattggcgagtggaggaacgcccatacgtctacgcgataagcataatgtacccctttgtagctttagaactctacggttgggcctacgctttagagtttccttttgcttacgcatgatgtgctctgttcttgaagctataatataaagatctttcttcatatattcctgcacctctacacattctcattcctctgcatgtgtatgtctttacgca

SEQ ID NO: 28278 - DNA, 304 bp, Glycine max
tttcttgaccttcctcctacgagagaccatcttcaactcaatctgtgcctgtaaataattataattcatcacacaaattcaaattgcatataaaattaaaatacgttataattaaagatataactacctctcttgcccacactgtggctaccacatgactaacatatgatgtcaacactaatgtatcttgaggcccacctggaagaccctatgaatcaccacctacatcctttgtaattggatcatgacgtccctcatgagtctcatcaacagcatcatggatatgcgcactatcctcgacaat

SEQ ID NO: 28279 - DNA, 329 bp, Glycine max
agcttgtttgtattattgggtacccgacatatgtggtactaggtggagatcgggcgatggtgcaaatcaactctcccacatccacaaatcaaacatgaacccaccatccccagatgcccaccttcaactaagctcacgtacccgcatgtagcgcttattctcattcctctcggcgtcgggtcctcatcaacctctctaagctttcacaatatccaaacatcattaactaccctaaaccaagaaaaaagggcacaggcagataactctgcccataacacattccaataccacagctttccctactcaaataccccagttacattctcttc

SEQ ID NO: 28280 - DNA, 475 bp, Glycine max
aactcaagcttcaggctgctcaattgctccatgttgctgcatggaatgtcaaatgtctgtaacgtggtcagtaaatgaggacaaaccacagacccttgcaacaggtacaaatttctggttcaaggccagctgggttaccaagttaaccaatgcatccagttttccttcaagcttcttagtttcagatgatgcagctgagtttgtagctacctcatgcactcctctaatgactatagcatcatttctggcgctaaattgctgggagttggaagccatcttctcaattatatctctggcttcagtaggagtcatgtctccaagggctccaccactagcagcatctatcatacttcgctccatattactgagtccttcataaaaatattggagaacatcctgctgcgaatctgatggtgagggcacttgcacatagtttctaaatctctccaaaactataacggctctctcactgatt

SEQ ID NO: 28281 - DNA, 229 bp, Glycine max
  unsure at all n locations
agcttgttttggggcttctatggaggctggatctgtgagcttcaatggggtcctttaatggtgtgattttccaccatggagatgcagtggaagacaaaggaaaagacgtgagaggaggcgccatccattaaggaataagccatagaagaaggagcttcaccaccaagatgagccttggataagaagctnggagaggatgcttcaatggaggaaaagaaagagggagaga

SEQ ID NO: 28282 - DNA, 289 bp, Glycine max
ccatcttgacttgctccaactcaacattaaacattaataacagttcttcatctttttccttatctaattcagcataattggcatttttctcccaatcaagacactcatattgatagtgtcctaacttgtgacattcgaaacattcaatagcagctgtattgaaggattgtcttcatctttctctacctcgacctcctctggatgagtcgttacctctacctctacctgctttgtcttcgtgggagatcttcagaacctgctcgatcttcttttccacgacttctcatcc

SEQ ID NO: 28283 - DNA, 319 bp, Glycine max
  unsure at all n locations
atggcgaatgtgcaccgactacactaatctgaacagggcataccccacaagacgtgtaaccctctccccaacatcaatanggtggtcgatgaagcgtccgaattcaagtgctaaccttcttggatgcctacttcggatacaactagattagaatgcatcctctagatgaggagaanatgaaattcataactaanaatgtcaacttttgttacaaggtcataccattcggcctaaaaaatgcaagcgcgacattccaatgaccaatggaccgagtcttcaacaacagatcggacgaaatgtcaggtatatatggatgaca

SEQ ID NO: 28284 - DNA, 450 bp, Glycine max
  unsure at all n locations
tgaaggagatcccatggttaacttgtccagaatcatgtgttnnattgaaatangttntnggncaaacttgagggacacatttctaacacagatcaatcaaacttcacataacctaacatccacaccaagcaatcgcacaaagataattcacacaacacttcaactaatccaaattaatcaaataatcaaataatacaagaaatacatcaaacatctattttcagttatcaaaacttcagggcattacataggggatgttgtagagaatggaaatcacattccatataatggtgagttgaacaagatccccgaaagccaaaggatagaagaganaaaacaaagatgtntgctcaactccaaagcccgtaacactctgttgtggctctctctgaggaagntacacccaagtcacactccagagtgccaacagacggggaacctatgaatggg

SEQ ID NO: 28285 - DNA, 436 bp, Glycine max
ttcttgtgttttgtaatggactcttctattgcttgagtctcacaggttggctaggggtgtttaactcatctgaacgcacttggagtgttctttcagtacctccacccaagtgcccagagaatttttttgccaaaaattggtggaagggaaaattcatgacagagcatgagggagatataatagtaatttatacatgttctagtgaaaatcccattatttttaagctagatcagatgttaatggaatgggaagagatgacaacactggatggagtaactctttttgctagtttcttgtcttctcatgcaaggattgatctccccggaataatgagaaatagtgtctacttctctaaagttcgtctttatggaaagcgctgcatatcattctctcttgatgactgtagatactatcctcgtaagcagtggcatgactg

SEQ ID NO: 28286 - DNA, 471 bp, Glycine max
  unsure at all n locations
ctttaagctggtttactaaatcataaatgttcagtataactagttgttaaagcagttaanaaatataatgacatatttacaaaggatgttaaggaaactaaataaatattttaaggataaaaaaatatatataaaaaccataagctagtgttttaaaaaatgttacttgaaatagcattttaagaaacaatagaaggtacttaaaaaagtttgtttacgaaaaagtcaaacaagtttattaactagtaaaaaaaactagaagctaatggaaatgactgacctaacataacctaaatcaaaacttttgaatgtttcatcaagagggggaaaatagggtgaatggaataaaaatagatatgaaatacagtggaaatgagaaagtgttgaatgaaagagagaacaagagaanagattttntatccatacgaatcanacaaatatcaanaaatctacaataacttatgcatattg

SEQ ID NO: 28287 - DNA, 515 bp, Glycine max
  unsure at all n locations
agtggaaactgaactacgacnnatcgccaactgagctcgtacccgggaatctctaagtccaccgcagcatgcagcctggtttatgcttccttctataaaacccatttaacttttgctgttaaaaaaaatacaatcaaaactttttctttttcatcttggaccagtattttgattggtagaataaggaaacacttctaacactggattatggacaaaataacatattggagctatcagcataggctattcaaaagatactatattgatctaatcgcgtcacaaacaggttcattcagtcataactagacatcaatgaatctcccaacgaggatttacaattaagctagataacagttacatcatatgtacgtattcatanacacgacgagaattaatttaaaactttaattacttggatgcactcacatcgagagaaagaaataagtattatcgattaaggaaagctgacaaccaaagttcatacacaaatactattgaatgatgcccacatgaan

SEQ ID NO: 28288 - DNA, 233 bp, Glycine max
  unsure at all n locations
tagattttaatgcagatagtaaccctttttacaattgagatgaagaaaggacacacattaagataacacctatgcaatctaagattcaaataagatacctttttattactcgttcttacaaatcaattaacacactaaacagttgatgtncgatcaaaaatcaaggtgcataatattaccacataatataacacctaatctaagcattcttaatttctaatctatatgtcata

SEQ ID NO: 28289 - DNA, 394 bp, Glycine max
  unsure at all n locations
ttctggcctcggttcgaattaaaggcggcttgaacaaccgcttccgcttccctaactgtacttgaggcngntgccgtggctttatcctctatagatttctggagttttaacatgaccttcgagatggaagctgatcgaggccgtacccgaatcaaataaacatgaaaatgcagaattaagaagtgatcctatgttcgttccaccgaacagtgacaagccaaatggtcataatatacttgcagtaacgatggggggggtttggttgtttggtattaaagagcagaaacaataaatggaatacgaaactactaatataaaaacgggttgttcctctgatcagaaccatctcttatcctggtatggagaatcgtcctaacggcaccattaatcacct

SEQ ID NO: 28290 - DNA, 409 bp, Glycine max
  unsure at all n locations
catctaatggtcgtatccttcatcgggggtcaattgtactctaaagaattaattgcatttgatcaaactaagatagctttcgtcaattctaaatttctctaatattaaaattgggctttgaataaagagagcaatcattgatagtacacttagtgtaagatttaatgtctcatgtgagtggcatgtgggttattaaggattaataattaaataattaattgttatggactaagttgtaaatgggtcatgggcttaagtggagcagtttctagatacatctactatttgatgggagtagtggttataaagggatcaatacccgcttacatgaaataagatctccccctaacattagatattatttcatcatagtcttcacacanaagatagaaagaatganagaagagtt

SEQ ID NO: 28291 - DNA, 356 bp, Glycine max
  unsure at all n locations
tacacattatgttgatgcaaattggaagttgaatagtataatgcttaattnttctcattttcctcctccacactcanggcatgagatggctaaagtgatatantggtttttggaagaatgggggattgaacanaaatttttttcattaactctatataatgcttcttccaatgatataatgcacgactatntgaaggaaagactatctttgcatactaatggtttagtaagtggtggtgaattttctcatatccgatgttgtgctcacattttaatccttattgtcaagaagggttgaaagtagtcggtcctgctataaacaacattagagaaatcattaagtatgttagtggatc

SEQ ID NO: 28292 - DNA, 429 bp, Glycine max
  unsure at all n locations
tagactctgggattttcttttcatatttagaacccgatgatatttgaaatcctattgttgattataagtctaaaaggggatctanaaaaagcttctaaccaggtcaaagccacagatgcttcatctactcgaatcaattataaactccttgttccaggttccaccgttcgtgttctatctggaacattttcagggtttacaggcaccctcaagaagctgaatcgaaaaaccaaattggtgagcttcttccttaacatgcataaattgacataaagattatntntcagacacacacaagttaatctgattaanattgctggaatgccaatatgaaataaaaatgcttatgaaagctgtaaataatgtgtgaaatagcgggtcaaagtaatatgtgaattcttttctcccttctttgtagactcaaatatc

SEQ ID NO: 28293 - DNA, 494 bp, Glycine max
  unsure at all n locations
gatggatgaacatgagnaaccncnaatcagcacgacccgcgatcctctagagccaacctgaggcatgcagcctggtgggtggtctcccanaaagtggctgctttcaaacgagctacccatgatatgattgcacatgtagggtaagctcgagccggaaattggaagaacccctgaaagggtttcttgtggcttgattccttggaggaaggtaatacgaagctgaacaagttttacattggtcttattttgagaaatttacactcagattttgatcatgtgcgtgatcnatgtcttgcttgtgaccaagttccgtcaatggactctctcattactagactccttcgtgtgccccatgtgttgaagataanacttanctaaggcctngaatatcaccattgctcatctcgtgaagaagacgaggtcgcacaatagaagaggccgggtgaaggagtaatgcctcatgcactattgagacgatggccacagaaactgtc

SEQ ID NO: 28294 - DNA, 310 bp, Glycine max
  unsure at all n locations
tgagttcatttgcataatccttcatttcatttttatgaatttgaatctagttgttagtaaatcttactcagtagtgataagacaggccttntatctgtttcacgagaataaattactgatttgtactacgggcaactttgctacaataatcagtgggatcttcctccaggagaaaggtganaaatgaccaatgatgtgtntcggtttatgttctacagtgtatagacacatgtactgtatgggatcaactgccgacaccacgatctcacattgccttagtgacagcatgaacagtatgatccttactaat

SEQ ID NO: 28295 - DNA, 245 bp, Glycine max
  unsure at all n locations
ctgattaaatgtaatnagagcctatagatttcctttctcttttgttttctgaaatctacctcattaaataaacanagagatcttgtntcatctgttcttgcagttccaccttttctcatatcattttgcatgtntntgtttctttggtcttgtttggtatagatatgaaggtcgattctttgaggatcctaacaacgagggtntgacaatcgattttgatagagatataagccaaacgataaacg

SEQ ID NO: 28296 - DNA, 179 bp, Glycine max
taatccaaagacgatttttgaaaatcatctttgaagtcaagtgttatgggctctatactcgtgccctttcttgcatctcacttcgtctcaatagctggcaccctctcagagtctctttatgccctctctcactcacgtctctgtcaaaggtgcccagcactaccgttgaagcttccttc

SEQ ID NO: 28297 - DNA, 416 bp, Glycine max
tgcctttgatcttcttcatcaatggaagggtgtgcttctcgaatataaagcgcgccgcaacacccactgccgattcgctactggacatgaagacggttgcccggctttatcataacataaaataaggaaacataacatagcctacgatacaggagaaagcctaaggggtcatacgagcaataaagtatatctatgcctatgtgttaagtgagactcagcttatttttatcgacaccgacaagacagattatttttagtcctagatacacgactgcgggtgctgggcgtagaccactatacagcagaacataaaaccggagtcgtaactgctactatacaaaacggtggtatacgtgattagaacactactctgaaagggcagtgtgaatcgcccctgcgaaagaatcaaacactcc

SEQ ID NO: 28298 - DNA, 469 bp, Glycine max
  unsure at all n locations
tgcgggatggtaggggatcaagaaggaggtgtttactaatattgtttccaagaaggcgaaaaagatggagtgctatttacaaaatgaataccanagcctcaaataatgtattgngtcatgactctnttggattcacattttttattattattgttgtatatagttgtttcattgtccctaaggttttgcttcaattgtgtttaaattcaagctgccatgtcaaggaaaaggataaacacacgcagaggctcaattgtattaaatttggttttggttctcttgctttaagatttgacttctctaagtctgacaacatcaaaatatacaatggaattcatggatgcttatatcaagtagctatttgattttttaaaatttctaagtttctgattattaacgcacttgatctccttgtaatcttttcatatataaattttcatctaaataagttcatcttattctattttag

SEQ ID NO: 28299 - DNA, 532 bp, Glycine max
  unsure at all n locations
gcgatctagcgtcatgcattacannancncatnnggtangnnacggggccccnaganagccggcctgcaagcatgcaagcagtantttancattttgccagacacccgccgtgntgagggagtccggctatagattgacagacaacatataaacacagtcgaccctttgatctaacatatacaaagaacgcggctgacactgacttgatgctcaaatagatgtaaggatactgtagccgatcgttcgcgatgagatgcagatcacaggcacatccggggcgaacaacgtgactatggaatgggtatgatgtgtgtctacagacaacccctgcgggcacagcacagcaaaacgaacatataaatcctngcataacgcgtggtggggtctgcacgacctacctcaatgggacacaaccccctacatggtgccaaactacttgtttagacttgtgggctttcgtgctatccacaacacctctattagactgggttttcaaaacaacaccnagcccgtagtgctctaagtaccccc

SEQ ID NO: 28300 - DNA, 1082 bp, Glycine max
  unsure at all n locations
agggactanagcctttagnnngncatacngncnantnnnancnnnnnnanannanannannnannanngannacncccngcgcggnagggggttttctcntncangnacagcgcnncngangcnannaggcaataggacgagagacgannangcannangngatanngtantactnntanancancanancnacgncaccagaaaaaacnaccncnacggaggggggcgggntgcgatagtgcaaacgannantnncnnacgannacaaatcgacacccccagcancacnanagtcnacagggatgcnaagtttantgtactgcagtaaaatgaacccgcntcgacttagtcnccntgntntnannanacctagtgctgtgatctgtcgcataagacnntgagttcagaaccccangcgcncagtataaactgactatagccngataccgctanaggctaaatcnagactggtnntnttanantccttagagcgaagnattattcggctnncttcgcgcatcgaacnagananaaaatgctncagtcccagcggaaaancaaatctcantctgtaatagttggaacgtctacgattggtataggtngggtcagacgacnattgggcntgtagcctggganatggtcntntgggtnctananngaagaaaagtacganttattggcgatgatcattaacganagtcatancntctgncgagtaagcggtgacacntagnntntcccgaanangantaaactatagcnngcancncgtatcattgaagtccttgatantntacttgctcgcctcagcntatagtccactgctgntcacntagggaaactnccttcatcaatgactctaagtgacatcnangtntcancggcagnnagatgtatactangatcaggacttatnngttgaggtgtagggcatnatcgntcgtcatcgaaacattgtaacgtcggggacctagtgcgactactctaaattganntgcgacnanatatctggcagtatcgtggtgcaaggggtcgggctaatcagctactcgtcaatcggccagtgncacgaacccgn

SEQ ID NO: 28301 - DNA, 87 bp, Glycine max
agctgtttcttcattttacataactcggggcgcacgggcggtgtatgatgttcttgctctttcgcgcttatctctctctcaaatttg

SEQ ID NO: 28302 - DNA, 372 bp, Glycine max
agcttgtcttccaataccctgatgaggatgtcccatatgttcttaaaactggactgattcatttgcttccaaagtttcatggccttgcacgtgaagacccgcacaaacatttgaaagaatttcacattgtctgctccaccatgaaacccccagatgtccaagaggatcacatatttctgaaggcttttcctcattcattagatggagtggcaaaggactggctgtattaccttgctccaaggtccatcacgagctgggatgaccttaagagagtattcttagaaaaaattttccctgcttccaggaccacagccatcaggaaggatatctcaggtattagacaactcagtggagagagcctgtatgagtact

SEQ ID NO: 28303 - DNA, 334 bp, Glycine max
  unsure at all n locations
attgattcaaagaagttgtgatgttgataaaggtgatgacaaaaagctcaaagatcaagagcaattcatgataacaaagatgatgatctcaagaaacanagaatgagttcaagattgaatcaagaacacttcaaggttcaaaaggaaatttgatttcaagaatcaagaatcaagtttcaagattcaagttccaagaatcaaaatcaagattcaagactcaagattcaagaatcaagagaatgctcaattaagataagtattaaaattttttttcaaaaactgtgtagcacatgaatttttctcaaaaccttataccaaagagttttgactctct

SEQ ID NO: 28304 - DNA, 506 bp, Glycine max
  unsure at all n locations
ngcgcaatgaacctaactatcgcanacacgcaattnagctcgtacccgggatcctctnagtcacctgcngcatgctttcttaaatctagagacaaaaaggtgattttagcagagacgtggctttaacgagaaaggcataagggatggtcttcaaaatctcaattggagtccatggtgatcgcttacaaccatgaagaacattatgaaaggcttctagatccaacacctgatgagccataatcatccaagaagccataaaggaatcctcactctcagctagattgcaagattatgtcatgtntaatgacacagatacattctatgaagagattatcaattntactttatttgcagactgtgatccagttaattttgaagaagcctcaagtgacgagaattggataaaggcaatggatgatgaagatcgtgctattgagaagaatgacacatgtgagtnggtggacttgacaacaacaanangcatcattatantaaaatggtgtccg

SEQ ID NO: 28305 - DNA, 291 bp, Glycine max
ggcagtaatatcgtagggtaatgaatgacatattgtgattgccaatatcacatggctcaatgagcgctgatattagacagtaacaactattgattgacataatacgcatgccatgcttgaaatcatatgaataggattcccatatattcaaagagtgtcaataaataatgcctactaactatggtcattaggaaatgacaagccacactctcgagcacatgacagttcacactctcctgttttccataacttctgatatgctgaagaaaattaaaatctagcatacacatg

SEQ ID NO: 28306 - DNA, 381 bp, Glycine max
  unsure at all n locations
ggatccttaagtcacctgcngcatgcttctgtcttgtcagaatacggtacacatacctgagcatttttttacacattctaagcacaccacatgcctatatccggaaagactctggaggcagcacaggagcagcttttgcgagatacctatgctaacacaatatcactcttgtgggggatgcgaacgacaactgatgaattacttaatatgaattgattgcgttcttgtgtcaatgctttttcgtgctaaattctgatgctcttggctgatcaccatttgtgtcatattaggtgctttacattattgtgctttgacttgatgaacaaattgaactatctgacataggatctgcgataagtttggttaatatgctgcacatat

SEQ ID NO: 28307 - DNA, 388 bp, Glycine max
  unsure at all n locations
atcttagccttggtgtataaaggttcaacaagttcctgagaatcagaggaaatcaaaggagaccataatttanacctaaaagaaagacaagagattcatcctctactccaaaatcctatgaatgcaatcaacctggacatctcagggttaattgcccgatcttcatgaaaagaatggagaaatctcgaaagaaaaattttagtgaaaaanaggtgaagaaggcatacatcacatgggatgacaatgatatggaatcatatgaggattcggaaaatgaagagataaaactgtgtctaatggccaanagttatgaaagtgatgaagaggtaacatcttncaaataaaacttatccatttctttttgatgaatataagatgcatttgctga

SEQ ID NO: 28308 - DNA, 492 bp, Glycine max
  unsure at all n locations
ttgatcattgaatcaangtggatnncaattaggttttgatgattgccccaaaaagttcaagagaaatgggatttcaagatttggagtcaaccaaagttcaaagaatcaaagaattaaattntcacaggtttcattgaagnaagaaattcaangatnntcaaagaanaagttaagatntttaaagaaattcaagaaagaagaaatgaatnntcaaanattccaaggggaaagaannatcaagaaagaccttcataaggggaaatnnatntgaaaagattnnttcaaaaaacaaaccatagcacccagtttgtttttcaaaagaagttttctcannnatttctaagttaccagagtttntactctctggtaatcgattatcaattacctataatcgattaccaatggcaaagtttaatttcanaaacttttactgantntgaacgtttcaatgtntttaatgatgtatcgatacatatatggtatcgatacccg

SEQ ID NO: 28309 - DNA, 409 bp, Glycine max
  unsure at all n locations
ggatccacggagaacaactcgcgatgtagaggctgcanagttgtgttaaaaaaactgtaagtntcgctatttaaaatacaagaaatgaggtagaaaaagaccagggaaaagagtgctattaaattatcataccttcacattaagaanatataanacaccaatgttttaaagattaaatatttatttcccttttgaatgggatgtgttagaaagatatgaataatatattctgatgttatatagttgttatatctattagatntatctttaatcatatctttagctattaggtttatcttcagttttatagttggtatatctattagaattatctntagccatatctnntagctatatatcnnttagctggaatctngtatataagcgaatgatgcttaatgaaatattc

SEQ ID NO: 28310 - DNA, 446 bp, Glycine max
  unsure at all n locations
ctttgataatgaaacctagaactggcctaatctggctgggtgtgaggagaaaccaaagaacttcttcttctggaaggcctcttganattttaggatcagacaaccaaagaatatcataggggtagttcaacaaaaaccagaanattaaacttaaattttgactaggcactttagtgcagtaggctgggcttagtgcgccttantaaattntactcatgggctaagtgcagcagactcgcgcttagcctaaagacacagaaaatattnttctgcagattaggcctagtgcagcatgctgngcttagcctaagtctacaatnntcanaacagaaaagggtttgggcttagcgcagcatggtgcgcttagcttatgccttaccaaatgacccttatgcttagcgtagcanggcacgctttagctcaacctcatgaaacataactacggn

SEQ ID NO: 28311 - DNA, 531 bp, Glycine max
  unsure at all n locations
naattattttaaaancattgcagttactgccactatanaatactcaagcctggccattanaaatagggtttggaagttcttcattccaattcctctttttgtaaaatggatcattttcaaggtccaacgccttatattgatcacctcttaagtaaaaaaaagagtcgctggataaccaagaactacgtaggtctgatttcctcatcgcatttgaggatacgtaggagaaaaacccccgcttttgtcgaccaccccaagagattcgtaatggtccaatgccttaacgtntctctcctttcanaaacaagagatcgttaatggcccaacgccttaacgtttctcccctttcaaatcaaaagaccgtttaatggttcaacaccttanatgaccttntgttcaataaaaacatattntgcanaaaaagataaaacaactttaccaaacactttgttccgaaagactacgtangtctgatttcctcaccgcanattgaggaatacgtangagcaaagggaaacacccttgtcgacn

SEQ ID NO: 28312 - DNA, 351 bp, Glycine max
  unsure at all n locations
agttgattctgcattccacatanatagccggatcttgagcactgaggaggagcagattatttttccggcagaaaccacgggggtggagtaaggaactctcccttaccattggatgacaatggcactcactgaagtatattgcatgcaaaaatatggttcctacctgaccactatgacgtgggtactgactaactcttaataataatgcgtttccgacaccatttaaactctcgccatggggcttggaaaaacgttatctctgggaaacctgcatagcctgacacacatagcacaggggaaatccatgtataagaatggtggcgaccatgccccattatgtgcagggccccg

SEQ ID NO: 28313 - DNA, 564 bp, Glycine max
  unsure at all n locations
gccgcagagcacgtgaaccgagaccgctagcgaaaaaacatgactaaacataatantnacnnnannacacannnnnnnaagacggaacgaccctagacaacaccgnnnannnannnnncngcgngggtnnnnnnnngnnngnnggaaggaagganaanatttttttanganngaaaanggaaanaaagaggggggggaagaaaaaagggnaaaagaagaaaaannngagaagnaaaaaagaagaaagaaagagnngangaaaaggaannaagagaaaaaggagaaaagagaaggganaaaagggngaagggaaagaaaaaggaaggaagaaagggggagngangggaaaaaaggaaaggagagagangaaagagaaangagnganganaaggagaagaaaaagagggaaganggaagaaaaaaagagaggaaaagannangggaggaggaaaaaaaaaaaaggagagnaagagagggagagggagaaaaanggaagggganaanggaaaaaggagggagaaggagaaacgagagannggggaaaaaanaaaaaaaaagaggagn

SEQ ID NO: 28314 - DNA, 377 bp, Glycine max
aaaatggagggctgtgtattaatatcttactcattcacattcgtaaatatattcattatgaatttaataataatgcactagtgtaaaattatatatctacatgtaattacaaatagcatgacaacataacttataagctacttattataaaaattaataagcttattatatgataatttgtgattaaagctaatactgcatagtctttttttttcttctctagttatataatccttaacacatcctatattatttcgctagtaatgtaacagttatttatttatttcctgctaatccattttgcattttataatgtaacacgttgcttcctttccgcttgtcctgtattttcttcattatcaaaaagaaaagtatat

SEQ ID NO: 28315 - DNA, 502 bp, Glycine max
  unsure at all n locations
naatggccaggtgacgagtatcaagnactnatnanagccgcgctcaantttacactttccagagggcccanggctctctttggtttgaaaancaagaaannccacggggagaaattaggggacacatgcatgtncaaccctgataagtcatcgtgtcagggatattttccttcaaaattataaatccttagacctagggtngcctctggtctgacttccaaacggtatgggtaaaaattggatatactatattcactgcttataactgtgtctgtgtatgaagtttaagtcgagctgttagctaaactggtaaattaaagatttgtagtgtgcatgacttctaagctgatgcacagtgcaagtactctctctctctcggatgtcgaagatnggtcatgtccacttgtaatacacactctatctttcgaatattgctcacaaatttccttttcaattcaagaattaagtatcacaatagatatctatgtacagaataacaaat

SEQ ID NO: 28316 - DNA, 505 bp, Glycine max
  unsure at all n locations
acgagcctcngcctagngatntcggngaatanancnaggtacccgccggtcctntctatacagtctgcctgcatgcgtgcaagctggtaatgattgccgnangtgtcgcancgcccgcgggtgtatcanatatgcanataaactctctcttgaatggagtccgtcatgtgtgtctatgatgattcgcttcacgttgctattgagaaatgataacgactactctactgtgcgtattacaagaggagaaagcacttgaatgctctgtgcttgtggtaggccgacttatagattagtactatggagcccagctcaacaagataaaccatatgcgtacacagctttcgaaaaccttgtgcaacatatgcgtattgcagcaggctgtcatagccttagaatcaagttcatcacatatgtggctgagcattcgaagctagtctctcagttatcattcaaatgaccttcgttatttgtcttgccacttaaaaacctcttanggatagtcgcn

SEQ ID NO: 28317 - DNA, 236 bp, Glycine max
agcaataccattaacacgaaactgttgtgattcaagcatagaccgagtgagtgcgccaatggcagcgcgtggctagatatctgctgccaactactatcatcttgatggcgccacgaaacagatccaaaatcactccttgcgatgccacaagttcgctatcatgaggcgggagcgattcagtggcgcttaccttgcgacccgctccaatacgtgctcctaagacgaaccatggctct

SEQ ID NO: 28318 - DNA, 291 bp, Glycine max
agcttgttattatattaaattagcacccaactataatgcgtaagatgtcaaaaatattaatctaaataaaggctaagatgtatcagctaaactacaaggcttcatcaggaaagagtacatacgagctcttgtcaaacgtgcttaatactccaatgtcgggaatatcaccagaaaagaaattggttgacaagtttctaacacatggaatgagggtcagcacatactggaattatcactatcattatgccacggacgcttaggccatattgacttacataatttgcaaatgtg

SEQ ID NO: 28319 - DNA, 456 bp, Glycine max
  unsure at all n locations
atcattgcttcatctctattattgagttctgtctttcttgataccagtgctangggcaagctcattcaaatcaatgaagcgtctctttcctgtgctgctctcaacttcctcctgaccaggactacttaagttttcaggaggctggttgtgttcattctcttctactgcangatatgtaacagggtcatctactatcatttcttgttcttcattatcactgtcatctgaatcttcactatccatcatgtattcaccattctcattgggatctgagtgatcagctgatgaattagacttctcagatttgataaactctgtttctgattctgatacctcacattgtcggtaagttatacgatntttagttgccctcttactacgtcttatacccgattgtatctcacccacagacctgagtttggttctctccttgtcgaccatgcactgcaactgttg

SEQ ID NO: 28320 - DNA, 302 bp, Glycine max
  unsure at all n locations
agctttattttttctccctcaaactccttttaattatataagaatatattnttgtgaaaaagtatattattaataatatataacaataaatatattttntatagtacaaataaaattaaacaatatatactagttagtatataatgatgtcgcaacctacccttttgcgggcgagcgaggcgaggctctcgggagcgttttccaaaggagaaaaatgtgcggagtcgccaccaacgtttatttgtggaaaacgtcggaaaaactgaaggaaaccggtcataaagaatattccaagttcggga

SEQ ID NO: 28321 - DNA, 479 bp, Glycine max
  unsure at all n locations
gcctgtntggagtagaaacccatgggaccaactcattnntatntcttaatgtgaagtcgnnatctagtcaagggtctgagagaccatacnaagtttcctaacgatttctaattatgtgggccattaagtctatcatatgctgacaatagtcgagaagcccatgaatctcttcgggggcggagtaggtgtctgccatcgccttggccttggctaacaatcggtgaagttcttgactcccgttcaaagtaagagcaaatcggtccgtccacatggttgcctcttggtgtaaagagttgatcacccttcctctagcctctttttccgcgtatacttgggcatattcgtccgcaatcctatgctcgtgggccgcggctagacctaactcttcttgtaccttgcgatgatagctagcatgttggtctcccgctcgcataaacgctgagacaagcttcttttggaccttgaacaggcaactaact

SEQ ID NO: 28322 - DNA, 409 bp, Glycine max
  unsure at all n locations
agcttttatttcatgatgactaatagaatttcgtatggtcctcgactacctgtgttttatgagttcatgccaagtttatgggttatacaatactcaagtcctaggactattccgttgttaagaatgtaataagtaatatttttaaaattttgaaattataattacaattaaatntataatgtatttatagtgtcttcaatcgtcactatttatatntaaatttaatggtcattcatggtgtgaaagtcaacttgagaattctgatatgaatatcaattctcaagaacactataaatacatttaattnttaattgattgtgaattttaaaactacttacacggataatttcatgtaggcgttcttttatttggtggattgatacccatcaacatttgatatccgcccatg

SEQ ID NO: 28323 - DNA, 456 bp, Glycine max
  unsure at all n locations
tgagttgcatatcaatcttgccaaagagatactcgtttttggtctgattccccgagccanaggctttgtcaagggaaagagtgagaagatcgccgttgttgagtatcttggcacgaccatctccccaagttacgtcanaatcctggtagaagttgccagcagaggctgcgatggaagaggccaatacaaatacataaaggacagtttttgttgaaaatgtaatggaatgaagagaagccatgattggtttgaatganatgtagaaagaggaagttaaaaatgtagtagcttggtagaagtaatgaaatgtgagagaagaaggaagggatgagtgtggcggagaggtangatntgtactatttatagatgtgtggaagctgctatgactatcagggttacgcgtaggacaatggttagtgtgtctggaagagttggaacaaacattaaaatattaac

SEQ ID NO: 28324 - DNA, 368 bp, Glycine max
  unsure at all n locations
ccgcgatccttgagtcacctgcggcatgcaagctttgtttgttttggtgttccagttccagttagagccatgtccatgtcctttctctttacctntaccatcatcatcagctttggcttgtgcattctttatgcatctgcagaactccagagattatcacactcttccaaacatgatggtgctcttagcttcttggtgcttggtgactggggaagaagaggcgcttacaaccaatcacaagtttctttccaggtttgcttttatgttatgtcattcatgcaaatatataatatgtgaaaactgaaaacttgtattcctgcacattaattcatgttagattctttatataantcatgttcatttgagtc

SEQ ID NO: 28325 - DNA, 448 bp, Glycine max
  unsure at all n locations
acgtactgataaagtatcacttaccttcgttaagtttttcatatagtactttgtacgtatttgaatgtagattgaatcacctaaaatcatacattgaaacaacaattaatatgaatttaaataaatgttagcatatttctcccaggttaagaaattgattctgagtctaattatgtttgaattacctttgattataaataatttattgtactcaaaaagtaatttttacttaaaagtaattttaggtaacttttgtatatgaaaaattttataccaaatttgactataacttgcttttaagataaaaatatctaanacctaagttacttcacttcaaaatcattntttataaaattaattttatttgaattcaatttcgtagattgatcacgtgtaanttatagtacctcaaacatatatagtgggatactctangcagcaaacacaa

SEQ ID NO: 28326 - DNA, 400 bp, Glycine max
  unsure at all n locations
ttgtctattntcanatntactgcatcacagcacgccccgccccagntttctaatagaataaacaactctagagtaaataatttatgtttaatccatggtggggcctataacctaagaataagattattggaactttctactctgtacccaacttaatccattgagcccatgattcagggccctaatatcttttgggggggaaaacaatttgggaggccttgatgaaaaatcaatggagattcagacgcaagcctacaattgtatcaacatccaagcctttattataaaaaagcttgggtaattatttaagcgatcagtctgcgttcaatatttaaccttatatattagtgtacttgtcccctctataggaaatattttcataaactatcattaaggggct

SEQ ID NO: 28327 - DNA, 456 bp, Glycine max
  unsure at all n locations
ggctgacttacagttatggagcatccatangctttctgttggtttctgtctctntnnggnngacagattcttacaagttaatgagtgtgtggttaaaaaaaattctcttactatacaagagaggaaagtactatgatgcatttaatttggcttacaatattcagacataacttcattgaagatggctccctactataaagagaaatgaaaagtggtgtcacaattgcctggtgtcccagttacgagttgttgcttgtctgaagaagaattatggatagatttgcatatcttggcaagttgacctagtatgagcatagtctgggtttatacacagttaatcttgagtggttttagtgtaaatataaatccagggtatgctggatctgtttccttagttcctatatatgcaatcccctattcaggtattgtgtaccttttcccttagttcctatatca

SEQ ID NO: 28328 - DNA, 355 bp, Glycine max
tgctttcactgtcataagttagccatatgtaaagatgcaaagccagttacccagaggaagagaaagatggggaaagagaggtattatgtagtacaacaagaagtggtcaagttaatggccgcccaattcatcagagaaattaactactccacttggctttccaacatggtcatggttaagaaaccaaacgataagtggaggatgtgtacagactacacaaatctaaatcgagcatgctcgaaggatgcatacttactcccaaacatcgactgactggtcgatggagtagtcagacacaagaatgttgagtttttggatgcttattccgactataatcagagcaacgtatcaacat

SEQ ID NO: 28329 - DNA, 333 bp, Glycine max
  unsure at all n locations
tgcctanagaggtccaggaaggacaaggcagctctttgaactatttccgctccggagtatgacagtcaccgctttatgagcgctgtacaccagcagcgcttcgaggccatcaagggatggtcgtttctccgggagcgacgcgtccagctcanggacgacgagtatactgatttccaggagaaaatagggcgccggcggtgggcatcactggttactcccatggccaagtttgatccagaaatagtccttgagttntatgccaatgcttggccaacagaggagggcgtgcgtgacatgagatcctgngtaaggggtcagtggatccccgttgat

SEQ ID NO: 28330 - DNA, 217 bp, Glycine max
  unsure at all n locations
attcactntgatcatttgttttctctctagcacaagtccaagctttcttctcagtcctaaatgacatttcaagctagtattaactcactttaacctccatttaccacagaattcagacttagcctttccactctcaaagcctcactctttgtccactcataacaccacattctcactgtccaaccctaggttaactctatatttcatctctaacagt

SEQ ID NO: 28331 - DNA, 360 bp, Glycine max
  unsure at all n locations
ttataaaattgatgttatttttcctgaccttcgttgaaccccgatcacattggcgcgatcgggaatttaaatgacatctccttgagtagaatctgaaacactcctcagtcctttatgttttgacaggggtaatngatcctaaatgttgttattaaccttatnttttaaatatatactaaatntccttcaatttggtatatagaaccttgcgtttggattgacaaacgcgaatgagagaggcctctaagcgatgcaaagaggaactgacaaagacctcacgataggtaagggggagtttaatataatttatgggcttgataccataaattgggtctaggaatccaattattagaatgtatg

SEQ ID NO: 28332 - DNA, 269 bp, Glycine max
  unsure at all n locations
tttttgggttatacttatacattatacacaatatattatataatatatatatatataatgatggattttagactattactatcaattattcagcacgcatgcccagaaaacgtaccattgatgttgctttgataactgtctcttgcttatagccacanatactctctttgctcttcaaaactttgatatcatagcatccataaagtcgctgtcacatccaccatctcttttcacgcgtctctttcttaaatgttcttccaaacacttct

SEQ ID NO: 28333 - DNA, 444 bp, Glycine max
  unsure at all n locations
ctaggaatgacaactctaccagttttttattttgcattctttncattgtagtggaaggaacctactctattttttcttgttctataagaattctctaagattggtggatgttgtctaatggctgagcagtttagttgatattcatttttaattgggtgtnggggaagttgattgaaattcatttcagcacaatggggaanatttgtggngcaaanattcaaacttgtaagactgtttgagttaaatatgtttacataaaattagctcttttctgatacaataatatattcattgagaaagagaataatattacaagaacattggaggacatgggatcttttgtgaggtaaaagaggaaaataagcaacaaaaggaaatgttaaaacatgaatggagcanaactgtccaatccctctgcatatctctgttaatgaaacacttgtg

SEQ ID NO: 28334 - DNA, 259 bp, Glycine max
  unsure at all n locations
ttgagaagctagagcttnctacacacacccgtctcataactaagctcacctcccttgagaaagctccttaagaagatcctaaagaagctaagagctagctacacatacctctctaatagctaagctcacctcctgagatgagaagctagagcttagctacacaccccctattatagctaagctcacgcccatgacanaaaacatgaaaatgaaaaacaaaaaggtcttattacaaagacaactcanaatgccccgaata

SEQ ID NO: 28335 - DNA, 416 bp, Glycine max
  unsure at all n locations
cccttcttttgaatatgtttcacatttccttccaaaacatcgcaaaaccctacggattgcacgacaattggtgttaagcagctcatttcgactgacaagaatccaaatattggcaaacaatcatccccagacaaaaattanggtacgacagccatcatgaaaaagggttgttatgtttggacgaccattttcacacctaccttagaatttaatgattaaaaaagaattaaaattgttgataaattaatgagtttatgacaactaggcaggatcaactntactannaggactaactgttatctacatatattgtctacgctcgganggaaacatnctgtntactattaacangcgtccaacgcactatnaccatangtgtccactttgtatatnaaaccaatgtatacattgagtat

SEQ ID NO: 28336 - DNA, 362 bp, Glycine max
  unsure at all n locations
atttactgtttctttttgctaataatgtaaatataaatgggataaggttattccgtaaaaacctggtctatatttacttctaagaatgtaaggggtaaaatgaccatgttcctatggcatagccttatattaattaatanggtccttgatgatgctcccacagcctaatcanaggctcctgctaaggtggattgtcgtcaaggtacgtcaattacataaaacttccacttatatatatttccttatgtgtctgtacactagttgtntaattaatatccaaattcattatgtatntagtgtaatagacaacatggaactactgaatgcggctactatgtcatgcactggatgtccaccatcat

SEQ ID NO: 28337 - DNA, 436 bp, Glycine max
  unsure at all n locations
taataatcaactaaatatttcctnttggtatttttgacaggaaaacaaaattcactccttatatggggaaacaagtggatcttacagggagaaagttgttcaatattgagtgggagcatggagataggttgaaacagaaatgtgacttcgatggaagaaatttgtaagaattattttgaaagaatgttgtaattattaagcttttggtgggaaaattaatttgctcgttattgagatcgattgaagtccatttggaaacactttgaaggggtgggtgttgtcgacatcaccatggctttatatggtaaagtttgactttgcaaaggataaatagataatggntggaaatgtaccatgaataatctttgattggtaccatatagtttgactttggggtgtagactntgtcccctatgatgtgatgatcaatagcatg

SEQ ID NO: 28338 - DNA, 505 bp, Glycine max
  unsure at all n locations
gggatgccttaacatcgaacctccagtcccggatccctaggtcacccgacgctgcaagcatagtttctttgtttttattaaccatgccttcgggcatataggttattgacctttgcacaatcttataactctgatcgtgaattaagcataccagattcgtctcatataatcattttttgtccttgctaaaattcaaggttgtccattatcacttatggcgtaattattaaattttattgaaattgcattccttaggggctttaatgatgctgtaattaatgggtttgttgatgaaagcacgtcacttgatcgcactgatggtcgtgaagatgtgactatagccataaactcatctccaaacaaattgtgaactatgtcttccaaataatttattttcttgagggtatatgcaaatcaatatatgagaattcatggatcaataattcgtaaagagtttgtgtatattgaattacaatatcatgatacaatttgtctggatgatgcn

SEQ ID NO: 28339 - DNA, 360 bp, Glycine max
  unsure at all n locations
tccttaacctccatttttttgaggatacgactcgttgcacatgtgctaataatgggggacccccggggcattccattgagcattgtaggtccctgaagcataaggtacaaggtctatttgatgcgggctaggtgaaatttgaggagaatcgctngtgaatcctgacattgaccagcgacgccatacatggggaaattntgaaagttgttggagatgtctctaatgactcattangatnttcaagtntatgccattattgtaaaccacangtacaatggctattaacatggnataaatttgacatccttgtctctcatcctctcacaattacatctttgcttatntgacttccactggaat

SEQ ID NO: 28340 - DNA, 389 bp, Glycine max
  unsure at all n locations
agcttattttatataaaatngaagatgctnttattagacttttagagactgctcacatgttccatttggacttgtgtagtgttctctaagccctgcacaaggcagatatgtcaagtaagcataaaaatctaaaaattagctacaattctcaattaagctcaatcattntccaaagaccaaaactaagttaaggtgagaaaataaagatcaaagagatttcaattgagttaagaagaatagacaaatactaaattacaaatgctcagtcaaagatcatacaggaagagtcaagatccgatcctcattcanagatcttgcttcatgtgctctagtgtctgggatagaatccaagaccaatgatgaagctcttacagatgatgactggatca

SEQ ID NO: 28341 - DNA, 446 bp, Glycine max
  unsure at all n locations
aatctcagaactgcaaagacatgaccttatgatatttttagtaagaatgtcatacaaatatgagttacattatgaagcatgtcaaaaggggaaacaaattaaaaactatttttcaagcaaaaactttgtttccatctcaagaccacttgaactattacatattgatttgtttgcttcaactagaacaacctttatcactagaaggacataaggtctagtagttgtggacaactactcaagatggacataggttatggtccttgctcaagagaatgagtcctttgaagtcttctttaaattctgtaaaaaggattctaaatgaaaaaggagtatgcattacttcaatcagaagtgatcatagtggagagtttgaaatgagagctttcgctattatgtaagagaatgaaancttcataacttctctattgctgaacacctcaacaaaa

SEQ ID NO: 28342 - DNA, 346 bp, Glycine max
  unsure at all n locations
agcttctctcttttcttgtntaatnattatatnttgagtgtaagccttgtattttgctatgtttntatgacatttgaacacttagtatttcttttaaatatttgtttagtatgactaaacatgatgattacttgctcttggttgtttatggttatgagttttaaacttaattactttgatgatatatgattagtggtatgtactattatttggttattatgaatgactntctggattatatgacattctatgaagtattatctctctaagattgatgaatggttaagttatcttgtctgattgttctctattctcttgtatgaatagtaatctatgtatgtattat

SEQ ID NO: 28343 - DNA, 462 bp, Glycine max
  unsure at all n locations
catccaagcaattcagaatccaaacatcatgttctttctctttatcaagaaaacagggcagaggcaaagaactctgcccaaaacacattccaataccacaactntctctactcanatacccagtaacattntctttgttccgcttcgttaaccgttggatcgacccgaaacttttactggaggtccctagtacataggtctacattntgaccgttgggatcgcctaganaatgtccataataaaaaatacacaacattntctgcacaagcacaattttctgctgcacaaaatntgacagctttttgctgcataaattgggcagatttcgaaatccctcttaccctcatcccaatttgcctaaattggatcctacangtcctanatcatgtataaatcanatctaaaccaaagacaagcttcagaccanagcaattcanaatctaggtatctaacacccctca

SEQ ID NO: 28344 - DNA, 375 bp, Glycine max
  unsure at all n locations
agcttgtatttataaagtctcatgattgtcacgtgctcatgcaacaattgttggtcgtggctatatgagacatcttgccaaacaaagtcaggttagcgataactcgcctatgctntntcttccatgctatatgtagaaagtcattgatcctgtcaagtttgatgagttggaaaatgaggccgcaattatactgtgccagatggagatgtattttccccctgctttctttgacatcatgattcacttgattgtgcatctggtcaaagaagtcaaatgttgtggtcctgtttatctacggtggatgtacccgattgagcgatacatgaagatcttaanagggtatacaaagaatctatatcgtccagaagcatctat

SEQ ID NO: 28345 - DNA, 479 bp, Glycine max
  unsure at all n locations
actatanatactcagctacatggtaatttgattctcctattttgcttaatccatatttttgattcttccatcttaaaataaagatgtgggattcctctattttttttaaaagacccatcattatagtcccatatttcaaaatagagaaatttgttccttctattttagaaaactcacaattccggtccccatattttaaaaaatctataactttgttttcattttcagttttaactacattttatttcttacattatagttaattaaattttttttatgataccttanatgaatatgttaggcccaatgttcaactatatctaactgggtaagtggcctgagatagattgagttcttgatattntcaatccaatccaattaaacttaattatagtcgattatattgcgatttaccttttattctaccaattggattggatcgcgttggttattgggttgtacctttaaaaaatgccacc

SEQ ID NO: 28346 - DNA, 437 bp, Glycine max
  unsure at all n locations
agctntttatgtgttgctgtatccaatgaaaactctgggttctgcctttntatcaagtttgtcccttttaacctgtggaacataagagaaacaaacacaaccaaagatttttagaatttgtaaatctggtttgtaaccaaaccagccttcaaatggagtttttttgtgcaaaactcttgtaggtagtctattcagcaaaaatactacagtgtttgcagcctccgcccatagctcctttggcaactccttttcatgcagcatacaccttgtcatctccatgatacttctatcttttctctcactcacanccatttgttgtgggatgtaaggtacggtgagttggtgctcaatgccagcttcttcacaanaattatcaaanacatcattnttgtattccttcccattgtcagacctttattgttgcaacctgcaatcac

SEQ ID NO: 28347 - DNA, 427 bp, Glycine max
  unsure at all n locations
ctcactngaagtggtaaaccaatgcagaattttgtacttgcaaagaaaattaagccttaatctgtagaagaaattanggcagcaatgacagaaacnntcttgaccacttnntgcttggtcataagagcnncctaataccatctcaagggtcatttattggcgaaagccttaatcttgtgaggtagaaggctaatgaatgcttctatatctgacttgttcaaattatataacaaacaaattcaatttagaatctacaaaatcagataaaccaagggattaggtattgtactttgatacactgaaacattctgtgggctatgatatatattattatctntacctcaaggatggtaatcagtccatattcctttcgccacgtaagcattntcttccacatctgaatcgtcttctcaatggtaaagtccct

SEQ ID NO: 28348 - DNA, 351 bp, Glycine max
  unsure at all n locations
agcttgtcatgtgatcttatcaatagcattaggcatagctntgcatcacttctcatcatttcttaccatttcctctccgannaccaaaactntagccttcattntcttcttcttgcatgaggccttcaaggaggaagagatcgccattntcatcttcttccaaggtccatagtagtgtcttgagactccttctctcaaagctntggtaagaaggaagagatcaccattntcatcttcttccaaggtccatagtagtgtcttaagactctntctctcanagctttggtaagaaacttttaaatcttttcttttctactcatttcttcatcanttttgtgtaaaacccttatg

SEQ ID NO: 28349 - DNA, 323 bp, Glycine max
  unsure at all n locations
ntgaggatttggtcttcaccagtgaaaggatcgatgtgggtctgatttatgcaaatttgatcatcctactaggacgactgagaaaactggngcaaataaaaagggtgagaaagagggagaaacccatgctgtgactgccattcctatacagccaagtttcccaccaacccaacaatgtcattactcagccaataaccaaccctctccttacccaccacctagttatccacaatggccatccctaaatcaaccacaaggtctgtctaccgcacttccaatgacgaagaccacctttagcacaaaccanaaaaacaccaacaaaa

SEQ ID NO: 28350 - DNA, 318 bp, Glycine max
  unsure at all n locations
agcttgtattcctangatcttcatcaatggattccgtttctttttggaagatgaatggcagcagaatggagaacgaagagagagaggagacgccacttcaaggagaagatgagtctagaagaagctcaccaccataggaggccatggataagagcttggaggaagaaggagatgaatgaagggagaggaagagaatagcacganattttatgctctaaaagagctctgaaatctgaagtttaattttcaaattatcaaagttgaaaaaatgcacacacatgacctctatttatagcctaagtgtcacacaaaattgga

SEQ ID NO: 28351 - DNA, 453 bp, Glycine max
  unsure at all n locations
tctcatggttgagtggacttgtctgatgaaacctctactttatcttgaangattntatcaagttgcatatgatctttggacaaccttttgaaatctttttgcaagttgttgtaagcttttgaaataacgtatgagtntgatggtaattcatgataagcctttctaagagattcagggtcatcgagatttaccttatcctcttgatttgattcatattctttagaagttgtgtctaccattgaacatagattggcttcttcttcaccttcgtcagacgaggtgtcatccaaatcttcccaggtgctcataagacanttttttattgggtcttgtagtgtttcttcttgtcttatgacttctccaactctgggcattcagattttaagtgttcaggtttcttgcattcatagcatattatggagcttttgctntatattnttatccttgagtact

SEQ ID NO: 28352 - DNA, 434 bp, Glycine max
  unsure at all n locations
agcttttcatatgggtaaaaggctcacattcattttcttctacatcatatttaaacttgtccaaataaataataaagtcatctcgacacacagaaggtcatctaagtttcatacaattaatatagaacctatatcctaatgtcacatcctatcagagcgtggtgttcccgtgtcctctagcatgaggttcttcatagtcatccacctattcatctgctcccccaaacacaaagttcaagatcatcacaggatccaaacacaaatagcaaactgggagtgagttatcacatttctaactactagagagaaacaacacaacatatagtagccaaatacaatttacttagcatatctcacattatntcatcactttgtcattcatcaatcacactnttcatccatcagtcacacctttcaatcatcaatcacaatac

SEQ ID NO: 28353 - DNA, 460 bp, Glycine max
  unsure at all n locations
tactaagcttgcaactgaaaactcatctganaattatatatttactttactgatcgatgactttcttaatattctagtctatgtatatccttgtagctctttcaagtttcataagattacatanaagttaaaactcctattttttatattttaatggttttaaaatattacaataacactctntatcattctattttttctattntaattatttgaaaatattatattatatcctctatctatcctgtgcccttaacaccagaggatgttcttatatttttttatataatcacgtattttttttatcttgatttgttaattgtgcaaaccaaataaaatcatgactttgagttgtacaatanatcaagaagcaataacaattccatcaatcagcagataaattccctagtgcaataaatcattccttgtaaactatactganacacactaacaaatacca

SEQ ID NO: 28354 - DNA, 434 bp, Glycine max
  unsure at all n locations
agcttgtatgattatggtgtacccatcacatgtggtactaggtggcggtcgggcgatggtgcacaacaagtttttccacatccacaaagcgcacataaacccaccatcccctgttgcccacctccaacagagctcacgtactcccacgtagcccatatcctcgtttctctcaacaccgagtccccatcaatccttccaagctttcacaacatccaagttatacaacatttaaacagcacaagctatcacagtcaagcaaaacagagcagaggcagaanactctgcccanaacaccaaccaaaaatcacagcttttctcacttaaagaccccagtaacaattccttcgatccaattccttaaccgttgggatcgactcaanattttactggaagtctatagtgcataagcctacattgtgaccgttggatctact

SEQ ID NO: 28355 - DNA, 420 bp, Glycine max
  unsure at all n locations
agctccttgaccttttggtgctaacccttgtcataggtcctccaagtccttctaaaggttccttgccctttttccttgccttgtcctcatcactatctcagtataaaaatntatctacaatcatgggcatcatgtaacctcgaaaagtcaaattgaacaccagcccaaaatttgaagtttgggacgctaaccacccccttgctatttcaaactgtcaaaatgagtatgcaatgttgtttgtcgtataatgtggtcttgtttccatgttattccaaataatattttcaattaattatgctttcatcatttgcagtcacaactcgacaacctatgtgatacattggatgctgatggatgataatttgaagttcgaagtaagcctacatgtagatattatattcggccatctatccacataca

SEQ ID NO: 28356 - DNA, 318 bp, Glycine max
tgccaagatttcagtggagagtcagaaatacttcaaagacatgggatcaattctctgaatcgagtcggttggacacattttttggagctccaataaaattctgatcttggaggaattgagcttcaatctgacccatttcagcaccttgaatggttgtgcaagattcttcatgattatggaggtctttaacaggaagctcagattgtgagttcagcaaagatacgtcattctgagataaagcaactcagattttcaaatcttatataaaaatcttatcagcttttcatctgaatatggtatagatgcctgggatttcaa

SEQ ID NO: 28357 - DNA, 213 bp, Glycine max
  unsure at all n locations
atgcatgttttactatgaaacaaacaataaataaatacaattcttatantaaaaaagatgtaattgtacaaggtacaaaccatatacaaaacttgtgaaccacacacctactgtcacttactggtattaaatttgtcacacaaaaaaaaattttcttataataaataacgctatatattattgaatattttaaaataataaagaaacaaaata

SEQ ID NO: 28358 - DNA, 536 bp, Glycine max
  unsure at all n locations
gataaagaccacatctatcgagacagaactaagactacacccaccaatnaaaaactataaacactaacnacngaggggttgaatcgatgcactgcncgnnacccnagcanngnnccngnggagccngnagaggagaccggcaggagagggagacgacgaattttgtatctttgagtgctnngacagccatatatcgccgggtgcgacggccgcagcggcacacgatcgcaaccccgaacactatcgaagaatcccgacaccagcaaccttcggtaccaagaatggcccagaacaagagcatcttagcacacccagcacacaaactccggaacaaccgaaccataactgcacaccgatgatcgaacaacaaagccaagaggatcaaggaaaaagggaaacgacactacgactccaaacacaaccaccggcataagaaaatatctgactgaatataaggatatctatacatccggacgtgaacaaaaaaaccattgaaccaaaaatgaaacaatccaatcaaggcaagaaaaataaan

SEQ ID NO: 28359 - DNA, 314 bp, Glycine max
tactcacaagccacaggagtgggtatcagagtatctatcaacccttgaccctaacctagtcttattcccaaaagctcaagaatctaatggtgagattatttaaacccctaccccttagccttcacgctctttagcctttccttctcaaagctctcaactctcacccaaaccggcttcaccacccttgagcataaaataagttgttgcattggagaaagttaagaagaagtccttggcaacaacaatgaagaagggaaagctggataacccttggagaacaaggaggccttcgagatggacgacatcattctatc

SEQ ID NO: 28360 - DNA, 513 bp, Glycine max
  unsure at all n locations
cagcaacacacaccgaaaagcaagacacatagcatagatnacacnacancnaacaaannnnnnaacggatgatgatgngaccgcccanaaaaaagancngcgancannanancgacnnggaggaagacaagcanacngtattattaaaacacagcaacgaaccacaccgggggcgactatcaacgacccgaccccagcacaaatactttaccagaaaaaaccagaagaaaagcatcacaacaaaaacacgccaaacgccaggccactaagagccaaagacacccacaagaacaacaaaacccacgacagcggaccacactcgactcttacaaccaaagcctacaccaaggaccgccccaacgccaaattaaacgaaagcgcacacgcccagaaacaagaggcaagaaagacacaaccgaccccgaagccaaacgcacccaacgctacaaacaccgggacggaccccatacgaacgcaccaaccacggcaccaccacgaagaaacaaggccaca

SEQ ID NO: 28361 - DNA, 200 bp, Glycine max
  unsure at all n locations
tctataagccctcacggctcggagtgttatcaataaggctccttacgatcntacacatatcaggatgaatactttattctattgtggcccaaatggagtatcctgtctcccatattatctgagatagtaatgtatgcgctaactatggtgtagaattactctattatgttggaagataaactttgaatttggatgaggtg

SEQ ID NO: 28362 - DNA, 387 bp, Glycine max
ctcaccacactttttggatgaggcttccatggatagtgttgccttctctacactttcttccttttccaccgataatgtaaagctacaacaatgagtctcccaatgtttgatataagttttgtaagaccactcttaattcgaacaagtggcctaaaggtgtaaatgcacagtccttccaagcgagcaactcataggtgtaacaccatcttagaatttcgtatgagcatcttcattgacaatggaagacttgaacgaaaatggctggcttgctcctcattgttctgggaatagataacgatctatataatgaacaccatgtatgaaggatggaaatactccaattattgtatcccacggtaagacttgtagtcacactaatcaatgact

SEQ ID NO: 28363 - DNA, 539 bp, Glycine max
  unsure at all n locations
aaagttgatccgaagacactcgcaaaanacggncannnaantnnagncaangctgcngaggancctatanagncggcctgcacgcgtgcaagctttattttcttctactgcacaaggctcttaataagtgaggagtttattgaggaaacctctacctcgactgaagacactcgacataatactgtatcttactcctcttgtggacaaagtatgacaagctgggggcgagtacatattcttcccatcagaccttggatgcaactgagaatgttttcccatctcatctagatcttgatgggtattcaagccatgcttccacttgccctgaatgtaaaggtgcgttccaatcacactcgcacatacattgtaatctacttgcataaatcaatacaatgtcttacatctagatcagaccagactgatgatcaaagacattggaccctttcttccataggagaggctaactttattcttacttatgggctatcccaatacagactacaagcgttgaagccggttggattctctgcaaaccagcg

SEQ ID NO: 28364 - DNA, 232 bp, Glycine max
ctgagtaagctcgaataacgtccccttatgatcatcataacaggttggagcaaaacacgattccagaggttgcaacattgtggaccatgagctgattaacacgccgcgaaacatccattgaaaccagctgagtgcagggcactccatgtataaggaagtcacgtagcagttactcctgtagagcgaacctcaagcaagaatagaacctgacataattgtataatatagaaat

SEQ ID NO: 28365 - DNA, 387 bp, Glycine max
  unsure at all n locations
agcttctcttatgtcatggttatttccagtttcctgagaatatctaagaatcttgcttatgtgccatcattttcttctattttctatacccttttagcaccatgttaattactaattggtcttaattgtcaattaattacgcagttttattatttgggctcatttagctaattagatgtttttaatctaatttcaggaattaatgaaacattggacttaatccggattttggttgtggacttgaagagggcaaataaagcaacactaaccttagttaatctctaattaggaaatttcccaattttattttattgtggttagtgtatattccgttatgngccacagtattgtaatacgcttaatgactttgagtgactctttttaaat

SEQ ID NO: 28366 - DNA, 474 bp, Glycine max
  unsure at all n locations
tccatcactctcacttaggaaaactaggtagcaagtgtttagtgtcctctgttgtgcacaggcaagtccgcccatggtgatcagcttgagtcacaagggatttccaaaccgaatgacatacccctaagtacaggtattttccttcatgaaaaactacaagtacttactgaaaaagtttatactatgtccatacaatatgaagtatgaaacatgggcaccatcaatgtactgatcatggataattaaagattctaagccatcccccactagagatgcttaaaactctntaaccactctatttctcccaccagggatatccaacttggtcactgcatcncccatgtacatacatagcatacaccatcacaataacattatccacatcaacatcatctcatcagtaatcacattcaacacacacacatacacacatatgtgtatatatatatatatatatatatatatatatataaa

SEQ ID NO: 28367 - DNA, 403 bp, Glycine max
  unsure at all n locations
agctntatttttctaactggttatgaaactaatctatgtgttaactcaggcgaaaacaaacttacatatcattcatttttggtcggagggaataaaattcaataaataagaagtaaaatctacaaaacttaatgatttctaataaattctatttaataattgttatctctgttataaaaaaattatagtagtatttgagagaacataggcaattttcgatacaactatttcgataggaaggaataatgacaagataaattcaatgacaatacttgttatacagagataaaatgacanacattttattgaaatatttcgataaaatgatttttgacaaactattcgcacgtgaagaaagaacgcccggaagaaagtaaaattattaatattctcagccatatgg

SEQ ID NO: 28368 - DNA, 393 bp, Glycine max
  unsure at all n locations
ggggaggacagatatagagtgaaattggaggaaatgcgttgattatatttcaagtggcttcagaaagccctgtattctcangctttcataactctcatattctggagctcccctatatttgtctcggcggtcacttttgctacttccatattgtagggtggtcagctgactgctggtggtgtactttctgctctggctactctcatgatcctgcaagaacctttgagggaatttccggacttggtgtcaacaatggctcagacaaaggtttctcttgaccgattatctggtttcctgctggacgaggaattgcaggatgatgcaactatcgtcttgccacaaggcattactaacattgctatagaaattaaggatggtatctttctgtgggac

SEQ ID NO: 28369 - DNA, 373 bp, Glycine max
  unsure at all n locations
ntataatactttttcaaaagcacagaataaggcggggggataacgtatgccaacatcatgatatcattcggtagcatataccttaaggattacacctgctgtacgaaacataaattaccaacaggggattcacatgtagaccttcagtgtcaaaagctcacaatcaaggtataaacactactggtgagagaactgccaatgtcaacgagtacagtatcccctcaccataccaattacatagagaaatgcccactgattactgctattcatgaaaaatccagacaagcccactcatcctgatttaactataaatagggggagaccaccagctaacccctatgggccaacgctagcaatagcacatatattaacg

SEQ ID NO: 28370 - DNA, 227 bp, Glycine max
  unsure at all n locations
agctagattgcattattttagnngaaatcgtcaagtgtgcacatgcaatcttaattctcaacacactctttggatgagtcttccaaggattgtgttgccttctctaacttatcttcctttaccagcgataaggtaaagctacaaaattgagtctcccaatgtttgatatangtttcgtaagaccatctttaatttgaacaaatggcttanaggtgtaaatgcacagt

SEQ ID NO: 28371 - DNA, 193 bp, Glycine max
  unsure at all n locations
ccatcaagggatggaccttccaccgagagagacgcgtacagctcanggacgacgagtacacagattttcatgaggagatagctcggcggcgttggatgttgctggtcaagcccatggtcaattttgatccggatatagttctcgagtattacgccaatgcttgggtaatgggccagtggattccattctatgc

SEQ ID NO: 28372 - DNA, 565 bp, Glycine max
  unsure at all n locations
gaactacagcgagacggcaaattaaataccaagnacaaaaaannacttcacaaaacancaggannnnnannnnnnnaagcgagctgatcgagccaatcgnannnccannnnnaannnannnnngaancnggngaaaannnaaagaggaggagaagggaggcattcttatagttgngagagngaaannanaaagggggagagtgtgaaagaagagaagattagaaaaaaagaatgattagggaaaagaagaaaaaaataagaggaggaaaagaaaaaagagatgagaaaagaagaggggagtggaagaatgagaaggaaaaaaagaaatgaaaagaatgaaatgaataaagaanaaatanttaagagagagaaaagaatantaaaagaggaggaggagaaaggggaaggaaattaaaaaggaggaaaagaatgatagaaaaagatgaagaagataggggaaaaaggaaatagagggaagaaaaagagaaggggaaanagaagagatgatagaggngataaaaaggatagaaaaagagtgatgtagaaaaaaaaaagagagtgagcg

SEQ ID NO: 28373 - DNA, 515 bp, Glycine max
  unsure at all n locations
agctatctatcgtcgcacttcgnanaacgngaannatanagtaatagagctgggagagcaagacaaggagaaagagaggaggnttctgtccttcngaangaaggcagcgaacgagagcacgagtgctctgggcatacctaataactacacacactaaccctgtggaatgaaaacagacggaatcattctataccaggactgagatcggtcgtttatagacagatatatattattaacactgcttgattatgctcgcacaactaacctagagctgatcacaaaagcatatgtctctaccgctacttgatctaaagttgacaccgcgggtcacatgtgccgtgtcgagatctaataatcacagaaagctcgcggaacacaccagtattcatattcgatacgcatgagcggcacatcagaccagaagcaccatccagaggcaagtaaacaaagcggaacctccctgtatgcntgtggtgcttatacgacgaagagacctttgtatacattgaacaccg

SEQ ID NO: 28374 - DNA, 328 bp, Glycine max
tttctttatatgtgcgggtctgggagacgaaggtcaagtgtgtgcgatatgtgaagatgatgttccaagtacttcggatttggtccgaccatgctctcctgatatccagctgggaaattcgcgagtggaggaacgcctcggcatttacgcaacaagcataatgcagacctttacggttttaatagctctatagttgggacaaatggactgtatggtttgacggagcgtcaaacattctatgtcatggcgttggggcagtgatgatctcttcggacaatctatgtgtacctttcacagccaggctaggattcgactgcaccaacagcat

SEQ ID NO: 28375 - DNA, 422 bp, Glycine max
  unsure at all n locations
ngactttgcgctaaatgtgatttatacatgantttcgttttttttgatccaattcgggcaaaaggggatgagggcaatagggatttccaactctgcctaatttgtgcagcaaaaagctgtcaaattttgtgcatcagaatttggctcttgtgcataaaatgtttgtgtattgctggttgtggaaagggtattacatattgggttctggacatttctaatagatcccagcggtcaaaatgtagatttatgtactanggatctccagtaaaattttcaagtcgatccaacggtctacgaatcggaacgaagaaaatgttactgcggtatttaagtatagaaagctgtcgtattggaatgtgatttgggcaaagatttctgcctatgccctgttctcttcggtttggatcaattatgatgttaca

SEQ ID NO: 28376 - DNA, 420 bp, Glycine max
  unsure at all n locations
tttaaaattgcacatatatatggtaacagtttttgttgaattttgcatataataaacatagtttataggggaaacaggaagccacaccctaaacttctcgcgaaaagtagggcaagatcactagcatgatgaccatgtcagaggatctngcgtaacggattccccacacatagaataaaaaagtgacccatcttatgtaccaacgtgtttgaagggacagcacagttccaaacatgtaataataatattctaggcagtcaaagtnttcaaacacttttactctntnttgtccaaatacttggtattntcccgagtccagacattaacatggactaccccattgaaattcagaccgcatgtntataaaagtggtctttaatcanacctgctaacacaacttttcttttatatatatatata

SEQ ID NO: 28377 - DNA, 343 bp, Glycine max
  unsure at all n locations
gaaagtctcatttatttaaacctttgtgtctcattcagaagatcgacaacactttaaataaaacttggcggctaatttcttaatcatatccaacaacaaaatgtcacttgcaactatctggatctgctanaataataaataaataaaagaggacagggaacatcttatctgtgagttcccagcagaataganaagcccaacactcatttacaaatatgtatgtaattaaaacgattggaagaaaggaagatatggacaaacaagaaatttatctagatgagctttcttaattattattctttntacgttaattcttcaaagctatctctcttatgataaaata

SEQ ID NO: 28378 - DNA, 561 bp, Glycine max
  unsure at all n locations
agctaaaatgatggcatcgctannnctnncaanaanancnaagnacccngcgagcgctctatagancgcccgccggcatgcaagcannattttatcanattaatcgganacagcacaagagtggggtgttgataaagcataacaagactcttctgtgatcccggttaaaggatacacatctattgtcagaatgaagaaatgcnnttcanaacaccatttaagaaaaggctagccagatggagcctaagaagaaaatgttataaacctggttaaggataccaacatganacagtgtatttcatctttacaccataaggcacaaggataacaataagttccaatgccagaatagcggtcgtcaccctactggctgaatctcaacactatgcaagtgtcaatgacgccaatccctgtgtagcttccatcccttactttgtgttcattgatgacatatgggagcttaattatgtgaaatttacagtatgtgttttcaaatgtaaatgcgtcgacagcaacacccgtgggcgcaccgatgatataggatttaccctgtagatctag

SEQ ID NO: 28379 - DNA, 308 bp, Glycine max
  unsure at all n locations
tgcaaaatttggggggaatgagttggcatgttagactcttacatggcagagtgtgccttacttanttgacttatctagctaccacctttgaatcttgtcaaaagtctagttgaatcctataaaatatttcttggtgggacagcattattcgtgatctatgaatcttgtttggaatgaggtctacgagaagggtgtgggggtttcatgatgacaaactcttcagttcttcatttgctaaccttttcatgaatcctttctgctatagaaaatactgagcaatcactgaattggagtactcccctaaagat

SEQ ID NO: 28380 - DNA, 326 bp, Glycine max
  unsure at all n locations
gttcagacttagcgcaataggcgcgctaagcgcacttccaagaattcaaaanatagtaagagattggcgcatagcgcttcctttcctgctaagcccagcttaaaagctcaagttacaaaattgatctggggcttaccttangatagcgcgcttagcgctgctacaataaaaaattttccagagaagaagtggcgcttagcgcatcatccacgctaagcccactgcttataggtcaattacagtgaagatgttgggcttagcaaagtgatgtgcgcttagctgaactattcagccaaccaatcaggggactctgcgcatagcgcgag

SEQ ID NO: 28381 - DNA, 295 bp, Glycine max
  unsure at all n locations
taactaaatacattccactcaaatgatgacaaccngcatgacaaaaccatgacattaagggggaaacagaaaggctgagaagtaacactactgcacaaagacattgcagtacaggtatgggatggatgtccaacaatagcagactatatataattggctttttaactgctcaactctctatttgaaatattagctanggattcataccaaaatattcagtgtcagtgaatgacatttctcttacacatatgccatattttcttactacaaacaagaactttacgtgactggaaat

SEQ ID NO: 28382 - DNA, 407 bp, Glycine max
  unsure at all n locations
attaaccccattacgaatcaggtggatttgtaaggcttctacggatcaagttgatctataaaagacttacggatcaacttgattcataagccttttacggatcaatttaaaggtttaccgattaaggatatntcaattttattttccttaatgtngngtacaccaacaataatactagatacatctaacaacacccgtgaaatttcagtgtttaatggacacatatttttatgggtggaagaacattgatatcaatcatgctagttgtcagacttctaatttagagagaagaaatgataggtatgataagaattaccactaataacaaaaagaaaaatgtgaaatgttaataaaataattanaataaataantaattgtctatttttattcgtatattagtctcatg

SEQ ID NO: 28383 - DNA, 323 bp, Glycine max
  unsure at all n locations
tagttttggttatgataatatatcatgtacaaattccacaaagtaataccttacctcgaaggaggagccaggggaaaaaggaaatatgcacttattgacaccattttgagaaagttgcctcatatgctagtaagtaaatattattcataattataatattgaatgtagtgggtggacttataaacaaactcccaattccttatactttaacagctactggccgtgtaaactttcttgcattgccatcttttacgcgaggtgtattaatagagatataanatttcaccttaaaatttttaaacaatattttcatccttttaaaa

SEQ ID NO: 28384 - DNA, 269 bp, Glycine max
  unsure at all n locations
ttttgagcagctgagnatcattttcttattgatcccctacctgccttttcgttacctccatgtctgcttctcctcgaattggttactagctgcctgattactatagagcattaaaccagattctgcttgatggatacaaagtatgatcatggttgattgaaaatgtgaagatgaaagaaggcgaaaagaagactatgaagcaggaaagagacagcatacgtctatgtcatctgaatagcaaaatcttgtactgcgactttcatctctat

SEQ ID NO: 28385 - DNA, 368 bp, Glycine max
agcttgtgttaataccttcgaccaaacacggccgtgtgacaagagaacctaacgattcctaattatatgggccatcaaatctatcatgtgttgacagtaattgattaagcccatgaatctcctcggggccgtacacacttcggccgtggcttttgctttggctaatagacgcgggaggtcttgacttccattcaaggtcaaggcgaacctatccatccacatagtcgcttcttgatgcaatgcatcaatcaccctccctcttgcttctttctcggcatacacttgtgcaaaatccttcactagcttttgttcatgggccatagactggttcaattcttccttgtattgccctatgatagctagcatgc

SEQ ID NO: 28386 - DNA, 436 bp, Glycine max
  unsure at all n locations
tactcagcttgcatgatttacattctcccctttctcaagcaaattcttaattcttcttgacatcatcaaaatcttcatgatgtacattctccccttntttgatgatgacaaccacctgtaggttaggagcaacaaaaaagaaaaaatatctatttgcatatagtttactcccccttggttttgcaatgattgcttatatgagacagttgaagatttcatatttttcatatgtaaacaaattgtctcataaacaatagataatttttcttactattttatcttttatctttctctccccctttgtcaacatcaaaaacaaatcatgaatagagaggagaaagatgttaccacttgttgcaatgtatgagaatcaagtaataccaaaaggcattaaaacaatcattcaatattaatcaagcaaaaacaagtacaatta

SEQ ID NO: 28387 - DNA, 425 bp, Glycine max
  unsure at all n locations
agctntatttctttttnntatnactnnnntatatgggtatatcactctgtattaatttttataatttataccactatttaaaataaatatgtccctatagttactccaacattatttttttccctaactttaaaactatttctatatataagttctgtttgaaaacacttctgaacctttnttggtccttgtctttgaaaagctttaacattggtaataggcgttgactttgacgtgcatgtgtgttatatgttatagtgcatatgnttgcactatatctatgtttagtctatgtaatggcatanattntactttttagtttctacactaaaaaatcatatattttagttcttatacaaatactttcaattccatttggatccataccatntaagaaaaacttaatgtngttagcattgaattat

SEQ ID NO: 28388 - DNA, 470 bp, Glycine max
  unsure at all n locations
tataaactntgacatatttaactttaaatacgtttgaattcatttttatgtnaaaanataaaataagagagtgataatgatttttcgaagtcatgagacaatgtaagaaaaactatacatgcgaatatcatttctcaagttactattccccanatcatacantttgtaaactttanacactttctgttgatccctttgcanatgtaataagaaaggcagataacaagtttgaagatatggcaacgattccatgccaaaatctgtgggaatgttatgactcagctttagccattagcaagtcatcatcaacttatttggccttttctttntccaaactgaattattaattattaatacattacaaaccgtactntattttactaacatttaaaaatctaattatatcttaattaatttagcccggtctccttaaaaatgttatttagaaactttnttttctaacaataaca

SEQ ID NO: 28389 - DNA, 320 bp, Glycine max
  unsure at all n locations
agcttagatgcagtctcaccaaggcagcaagcctctagaagtcttccttaaagaagacgcctgcatgcgtcagtatcttcaagacctttgatcacttggtaagcgtgcaattccattgttccccatcattctgcttccatggattggggtttttggattgaactctacagcgtcattnttgcgattagatctgcctggattatggtttaataggtaatgagctagaagagtatggagttctaagtgaatcggtcaatcatggatagattttgtggctcgcatatgccactggtttgccagatggcgcttgatccttatgc

SEQ ID NO: 28390 - DNA, 404 bp, Glycine max
  unsure at all n locations
agcttcgctaactttttgatcacgcaagaatgagacgtggttttaatatgtttactcctcccatgtgccatgagatgctagactaaattaattgctgatttgttatcaatcaacaacctcataggactacaatcccttaagtgcagttcttccattaaagctttcagtcatagagcttgacacgctgccatagcagcaacaatatattatgctttacatgttgacaaaacaactacactctgcttctttgagcaccaagagattagtgttgttccacatttgaaaacatatncagcattgctttactatcatgcttatcactacaccaatctgaatcatttataccaaacactgcttcttttatattcttctgaccgtaaggatataaaatgccaatatccaat

SEQ ID NO: 28391 - DNA, 341 bp, Glycine max
  unsure at all n locations
tcttcttacctgctgcatgtatgccntatactcgtgagttgttactngnnnnaaagctatagcaggtgcagcaatgtggatattgtgtggcccnccttgcattgatggaaaaacagcaaaattgatcttttcttcaatgtcatattgatcactatcatgtccctgacttagaagtatccctctcttccttggctatgtacccttacgataaaaaattatgcctcaccttggacctcgaagactctagtgagttgtcgaagtaacaatgtcacaataatcaataggattcacacactcctgcggagacaacaccaccatactattaaagaaataatgagcat

SEQ ID NO: 28392 - DNA, 357 bp, Glycine max
  unsure at all n locations
agcttctcttgtatgttttctcaagaaagcttctcanggaagctacctagtctatanatagaagcatgtgtaacacttgttgtaactttgaggaatgagagtcttgtgagacacaactcanagttcaacttctctccctttttcctccttcaatttcgtgctcccccctctctctttcttttcctccatataagcatcctcttcaagcttcttatccaaggctcatcttggtggtgaagctccttcttccatggcttattccctagtggatggcgcctcttctcacctcttctcctttgtcttccgctgcatctccatggtggaaaatcaccatttaaggacctcattgaagctcaa

SEQ ID NO: 28393 - DNA, 446 bp, Glycine max
  unsure at all n locations
acaccaccaggcaacaaccagaaaaaaacacaaaataaactanncnntnaaaaaaagcggtgacgctccacgccacaaananaaaaagagannngaaangaagaagaagaggaatttaatttaanagagaaaagggggggggggaaaaaaaaaanaaanaaaaaaaaagagaaaaaagaaagaagaagagaaagaagaaagagtaggagaaaaaaaagaagagagataagagaaggggaaaaaaagagaaaaagagggangaggaagaaagaataaaatggaaaagaggaaaaagaaggatgagagaaatgagagagaaaggaagatggaaaaagaaaaaaagaagaaaaaagagaagagaaggaaaagagaaaaagaaaagaaagaaaaaaaagagaagagaaaggggaaaaagaaaaaaagaagagaagaaaaaaagaaaaggc

SEQ ID NO: 28394 - DNA, 379 bp, Glycine max
  unsure at all n locations
ttcttcttatctcaaggctcatcttggtggtgaagctccttcttccaaggcttattccctagtggatggcgccgcctcttacctcttctcctttgtcttccgctgcatctccatggtggaaaatcaccattaaaggacctcattgaagctcaaagatccagcctccatagaagctccacaaccaagcttccatcaatctatctctgcgcgtttatcactcattgagcctgcggataaccgcatgtcattgggcccgccgcctctggatgacaaaagacgcaacagacgatgttagtctctgcgtgctatcatgctntgagtcttatagatagcanaagtattttaaaagtgcgggacaaaacggttgtcgcatgtcatt

SEQ ID NO: 28395 - DNA, 352 bp, Glycine max
  unsure at all n locations
tcatcccacttggacgattgagaaaactggggtaaatgaagagggtgagaatgagggagaagcccatcctgtgactaccattcttatacggccaagtttcccaccaccccaacaatgtcattactcacccaataacataccttctccttacccaccgccaagttatccacaaaggccatccctaaatcaaccacaaagtctgtctaccgcacttacaatgacgaacatcacctttagcacaatccataaacaccaaccaagaaatgaattntgcagcgagaaagcctgtagaattcaccccaattccagtgtctttatactgacttgctccatgtctancttgatattcaat

SEQ ID NO: 28396 - DNA, 387 bp, Glycine max
  unsure at all n locations
agctncataaattctctttgataccagaggatggcatgagcttcaaacagcttgcaccccatcctctgtagagacccttcagaccttcttctctaataacttctgaaagtgccgctgccatgtttggcgggcacttaccttgcaaagcacccaccatcaggcgcttccttgctacctgcaaggggaagctaattgtactggcagtaaaacctgcgcgagcataaagaagtcagatagcacaaatcatttatattaccaagtataaaatgtgattaataagtgacacgctgctgtgaaaaccatgtccgcccatcaaatagtgaatggctattctttcancaaatatntcatgctatcatttgcttcatgcaacatgggtgtgtgact

SEQ ID NO: 28397 - DNA, 514 bp, Glycine max
  unsure at all n locations
ggcgactagcctagtantacgccatactnaaacnnagcctcaaggttggctgatgatagaaaggaaccaccttntnccagttcctttttttgatggagggacggngnatcgtgcggccgcaattttgggaacctaccccgtgtcctcccatgcgtccaaggactttaaaaaaggctacctattgaggggtggaccaaaaaggatgagggaagtgtcgtaaagtgcagtcattggcacgacgactcntaagggcgatgctatatgttcctatcatagagtgcccaagtcttacattaagtaatatgggatgcttggtgagcacttaagcgactnggttctacccncttcatagctggctnntagggaangttccncangtgcatgggtgcctttcaatttatggtagggacttggctgttatgggatgcctaactcccatagcgagtagtatgggatgttcagtggagtcctgaaacggcttggtttccccctgaaagccaacttttaatggagg

SEQ ID NO: 28398 - DNA, 231 bp, Glycine max
  unsure at all n locations
aaatttgaggaaaaaaaaggaaaaacactgaanagaaaaagagaagaagaacaaaaatccaagttgaggcgttgctgaatccgacccgtgattatntcctacatcatttatcttgctagccttgtaacctgtgcacagtcaagtagttttcttaagattttatgtaatctatgcacccttatangtcctnntgtatataatatgtgcatntatcttcttcacatatcgttg

SEQ ID NO: 28399 - DNA, 321 bp, Glycine max
  unsure at all n locations
aggacctcaactagggaccctacaactaatggtgtgaacatgtcattgtccttttatgggtgtgcatgttgtgtgcccatcagtttcccagaattgtttccagtattgaatttggtattattcttactgttattcacattttctggtttaaggccaaccaaatcaactgcttctttggcatcatctgctttggtaaggcgcagcctcttcttatgtctgataaaaacggtagtcatatgattttcatcaagttccangtcatcatctgattgcctggaactcccactagacttcgagtccaattgggtatacatgtacctg

SEQ ID NO: 28400 - DNA, 115 bp, Glycine max
aaccccaaagaaacaaacgaccgaaagaaaaaaaccaaacaacagaaggaacaaaaccgaaaaaccgacacaagaagcggacagcagcgggccaaagagaagaaccaagaaacaa

SEQ ID NO: 28401 - DNA, 353 bp, Glycine max
  unsure at all n locations
acatactgnaatcgattaccagaggagattttcagaaaatattctcaacagtcacatctttntgtgtggttcttgaatggctatcaaaggcctatatatatatgtgacttgagacacgaatatgataagagtgtttcagaacaacaaaggtcttatcctcttagaaagaaaaataaatttatcctcttacatattccttagccaaaactcttgtgattaaataaggaattatttgagtgctccaattgttcaatctatctctntatagagagaattcttcttctcttcttcttcattctgaaaagggattaagagactganggtctcttgttgtgaaagaattctaaacacaa

SEQ ID NO: 28402 - DNA, 497 bp, Glycine max
  unsure at all n locations
agaggactgaatcctttagtacgnacactatnnatactcagcctngcaggattgggtctttgccagtgaaaggatcgatgtgggtctgaatanaggcaaattaanccatcctgctgggacgagtgagaaaactggggcaaatgaagagggggagaaaaagggagaaccccatgctgtgactgcctttcttatccggccaagtttccaaccaacccaccatgtcattactcacccattaacaaacctcctccttacccaccgcccattatccacaaaggccatcccctgatcaaccacanagcctgtctaccgcactttcaatgacgaagaccacctttagcacanaccaaaaaacaccaacaaataggattttgcagcananagcctgtnggttcaccccaattccggtgcatatgctancttgatccatatcactcataatcaatgtaccatacccaaccaagttctcacctcatttttgagatcactcaaccact

SEQ ID NO: 28403 - DNA, 272 bp, Glycine max
  unsure at all n locations
tcacatccattcttcttgaactgtgtgtaaaattttccttgctgaaaatggaaattgaactactctaccttgttcctgcttcattgactagcacaatatatctaaacaaatacattaaacttaccttatacaaatcttgctatacttcttcacgagcatntactttattagattcaatatcccaagttactcatgtacgagatagcaagcttgaagattcatgatgttgaagcgtaagtgattaaacttaaccttcaacctatccacaccat

SEQ ID NO: 28404 - DNA, 353 bp, Glycine max
  unsure at all n locations
aatcaactactaggtgatataattgattacttctctcttaaaaagtgtttcagaagtgctcaagaacactttaatcgattacttctttgaaataatccattacattgtatatttgattgattacaggcggttataaatgttctctctataaatagccaccttgtgttctaacttttaacaacttttgtgcgtgctacaactacgagtngaaattagtcaaacaaagaagagaagaaaaagtgcttacatacaatgtgactcacaacttctaatctttgattatgaagatcatcttgtgaaaagtgagttgtgaatatctcttgagttcaagactgcactcattcattcaagca

SEQ ID NO: 28405 - DNA, 390 bp, Glycine max
  unsure at all n locations
ggatggaccttatcaggtcttggaaatgattaatattatgcctatangnnggacctgccgcgagagtatggagtcancaccacttttaatatttctgatttaattccttctgaggtggagctgatatagaggaggaggaaccaacagatttgacgtcaaatcctcttcaagggggaggggatgatgcaatcctccctatgataggaccagttaccagagccatgagcaagatgctccaaaaggattgggctagagttgataaagaacgccttacggttctcatgaaccttatggtatattgttgagcccatgggccactgttgggtccactcttctttgaaataggagaataggttgtttcttattttgggccttgtatcttggcattct

SEQ ID NO: 28406 - DNA, 433 bp, Glycine max
  unsure at all n locations
agctttttttatatttaataccattacgagaataatatgttcttatgangggatctanatggtcatgtacggagaacatctagaggatatganggttcatatagggtttacgatctangataaggaaatgtanaaggtaaatctatcctagatttcttattagctcatgacttcacaatagccaacacttatagcttcttttggtgttgctttgtctgcttactgtactaangaaattaattgtgttattgctggtgctggctattacaatacagaactgcatgtcatagatgggattccacaacttatctctgttcgctcaagctatactattgaggttgggttttatgacttctgccatcccttttcacantttaaatcattcgttctcangtaatttattcacttcatggattcccttctctctcctttc

SEQ ID NO: 28407 - DNA, 386 bp, Glycine max
  unsure at all n locations
ctagagatgtngctatggctaccgaactacacaagtgaaccccttagagtaagggatgagttattcacactttgngattagaatcaacatgtgtaacgatctataaggatcaatttgggttattttngggttgctttatgaaatcaatttttttctcatgcctttaatcacaaattaactgtgtttgatggaccaattgatgttccgatgcaaaattattgtgaaattgatgtgttctatttccttattttgcgctttagaaatttatatatgattataatgngtttctttcttctgttatcgtacaataaattgacgtatgatggtttatatcataattgagacgcttcagttatgtggtcaaagaatctattgatttatatata

SEQ ID NO: 28408 - DNA, 317 bp, Glycine max
  unsure at all n locations
agctaagatggtctcgaatggaacgagtcaagggtggaaagcatggtttcagaggataaatcgaacgcttgtcanagatcaaagagaaagttgaccgaacagttgagtataacagaagaaaatatgttgacaatcattgaccagtataaggagaaggtaaacctagctcctattcttgtgcagagactataggacgagcatgcaaaggtatcagctctacaaatggaaagggaagcaagagagagagtgatagaatcattgcacaaggagcctgtgaaatggatggatagattcgctctcactctgtatgggagtca

SEQ ID NO: 28409 - DNA, 458 bp, Glycine max
  unsure at all n locations
ctcagctgctcagcaagctgcctcatgcggtctccactngctagatanacttcgtacgatantatcaatgggtggatgattatcataatgtctacctatagagcataactcgntcagaatggtttacaaggtgtttcttacgtgtgagttgagaagacatctggatttattatcatctatccattggtccttgtggatctcgttcttctaagcatctagaggaatgtgattgcctttttctacaacatctcacatatcaatgtgattgcactcaaagaaggctatcatctgttccttccaatagtcatagttggctcccttgaacatgggattatctgtaataaatccttcttccatcatttcaggaatttcttttcccttctctatcaagagcttcacccagaagccaagctctgataccaactgaaacacactacgtaacgtggttgaataatgtg

SEQ ID NO: 28410 - DNA, 356 bp, Glycine max
  unsure at all n locations
agctattaatttgtatgtccgattcaagcgcataatatatcgagacgctcgaaattaaccaacggaagctctcgagaaattcaaatggtcataacttntaactcggatgtccgattcaggcgcataatatatcgagacgctcgaaattgaacaacggaagctctcgagaaattcaaatgttcataacttttcacacggatgtctgattcacgcgcataatatatcgagaccctcaaaatttaacaacggaagctctcgagaaataccaatggtcataacttttcactgagatgtccgattcacgcgcataatacatagagacgctccaaatcgaacaacggaagctctccaaaaat

SEQ ID NO: 28411 - DNA, 334 bp, Glycine max
  unsure at all n locations
ctgactcaccatangaccttgacccattgggttgattgtcaatccttaccctcggaagcagagaaaagaatagaggggaaatttccattcaaagaaaaagagaaggacaatttccaatgaaagcaaaaaaaagaaaagaaagaaaattccccaatcaaagagtgtgagaaagcaaaaagatnagataggatattcccaatcaaagaatgggagaaagtaaaaaaggaagaagaagaaggaaagaaagctcctgatcagggatcgaagganaaacagaagatatgtgcagagaggtctttggaccggacaatatctgaacaatacagaattgtca

SEQ ID NO: 28412 - DNA, 150 bp, Glycine max
gaaagtatttgaaatttgatatgtaccatggtgcatgtataatcctctaggcattggatacaaaacaggaataacgtgaggacacagcagatcatagaaagagtgatagatgactgatgtttcacaagcctatattgaaaaaagctaact

SEQ ID NO: 28413 - DNA, 248 bp, Glycine max
  unsure at all n locations
ctgccataacctgctctatcgtttcccttgcgcaatttctgtagaagaagtgattaatgaaacatctgataagaacattatccttgaaatgcgatcttcattctattatgacaagcataattctttataactattgaagacatcaaatnttgtttgttgtatatgcacaaatttaacacacaaaaactagccactggtgatgctacagatgtaccaggcaacaaacataagttatcaccattttttta

SEQ ID NO: 28414 - DNA, 338 bp, Glycine max
atcttttggttggacatcttgacttgctatccaatctgacattcaccacagattcttgccttcttctattttcagaatgggaatgcctctaacagctcctttgtcaatgaatttcttcatgcctcttaagtgcagatgtccaaatctttgatgccatattttcgacttcatcttctttggagaatatacatgtggaggagtaactggcttcttgaggtgtccaaggtaacagatgtactttgatctgctggcctttcttagaacttcactcttctcttttgcaccaacattcttgactttgtgaagttacattgaatccttcatcacacagtgactga

SEQ ID NO: 28415 - DNA, 368 bp, Glycine max
ataagcatcagagtattaaatacaataagccaaactcacaaacaagagataatcaaaccagattccaaataactgaaaatgtcaacaaccacaaaacatccaagactgaagtttaaattccacaagataaataagcaaagtacttagcataataatgttaattctaagaaactaaaagccaaaatacacggcttataaaagataaataatcataacctataatctaagaagacggaggtggtggtggaagatcgaaactctgacgaatgtatgcgacatcctcttcaagctgtgtaagacgaatgtccataccgcgcaagcgtgaatctaacgagtcgaagcggtcaccaacatacgaacgaagaccc

SEQ ID NO: 28416 - DNA, 401 bp, Glycine max
  unsure at all n locations
ttctttaattcattatggatgcataagcaaagagcattctaatggcttctaatcttgcaactggagcatatattcttcataatctataccttcttcttgattgtatccttttgcaactaatctagcctaatttctaatgattatgccatgttcatctcacttattcctaaatacccattttgttcctatgatggggtagtttttaggtttctctactagttcccacacattgtttcttttaaactgatttagttcttcttgcatagcaattatccaatgatcctctattatggcttcatttatatttttaggttcaatcagagacaccaaagccatattattgcatanatctttaagagaatgtctagttgttaccctttttgagatatcaccaataatgt

SEQ ID NO: 28417 - DNA, 275 bp, Glycine max
  unsure at all n locations
tattacagtcttcaagggattgtattacataacaccgcctcctgctaattacaactgcatactaacatttggggacaaaactgcacatgcgctcatttgtattctaaaccatacataacaactcacgatgaatcttgactacctacacaataggtgtcattcatgctttttcagtttgctactnaccactgcaatcaagctatttctttgtgacaaatgattcaataaaggatatatttgaaatgttctcacatacatgcacatattatttattt

SEQ ID NO: 28418 - DNA, 398 bp, Glycine max
  unsure at all n locations
gagctatgattatttattttctaacaatggaaatcataggacggcactgttcatggaattataacaagtgaattanaagtctcatgcgccaatgtcacatctatcatagcatttccttaagaaaggttaagcctctccatctccagcatgatcatcatcatagactggctcacctgacacaaaatgacattcaacccaaacataaacacacaccgggagtgagttatcacatttcatataaaatactaataaacanagacataagcaaatttcattaagtaaacatttatcacatagttcaacttaatacagtcctcgtcacttcaccatgatatcaatttaagtttactttgcgatcaccaatcacattacacatgaatcaacatttgacttcaaac

SEQ ID NO: 28419 - DNA, 524 bp, Glycine max
  unsure at all n locations
agaggactgaccttgtagtacnacactatanatacacagcctagncatttctttaaataaatntcttgtacaacatgaagttttgncttcatgtctactnntcacctttttttgatgaggaagtgcatttcttctttcttaactaccaataattggtcatcttaataatcccctacaaacccaaaacccaaaaagaaaccccttataaccccacatggtggacattgttaactttcaccaaacaagattaaaaaatatgtggtggtcgcgtaattaattgaaacttagctgagcagaaattgactaacgtaactccaacatgagttcataatctgaatgtttgaatgaaacaatctgatcgcagagagggatagtcttcctcttgaccttgtgtgagttctcaagttactacagaaagcacttgattggaggtgaatctaacctgaatttaataaataaataaataaaactgaatntgaagaaacaataaattcgccagataatattcgaaataaatgcttgtg

SEQ ID NO: 28420 - DNA, 361 bp, Glycine max
  unsure at all n locations
tgctggtaatcgattaccatatatgtgtaatcgattacacagtgcaaagtttgaattcaaaatttaatagctgttgtaaatcatttttggccactggtaatcaattacatcctctggtaatcgattaccagagagtaaatcttctgaaaaagactttttaacttanatttcttggccaaccttttgctacttcaattatgaattcccttcctatttaatataccattcctaagactctagagactgtcttgatcatccatcttgaatatctntaatctctttgtcttgaataaagctntgagaagcatgtgatcctttggcatcatcaaaacattcagcttgatcctttgctacatggatg

SEQ ID NO: 28421 - DNA, 399 bp, Glycine max
  unsure at all n locations
gggattttctacatagtctttagtagtttccttgattaactacagctccactgtccgtatgattaaatntagttacaaccatagatacctattaggtggtcattactatagntaatatgctctaataataccttactagtataaatgtatcctattatggtctttntatgtctcagctttctttaatactctataacttcaagttggcaacacaggccagcagccaattacatatggattagtctttttgacttgtttggagaatcacgggttttcctccacagattggagcagtttctcatgattaacttaacagtttttcaaggattgaatatgntaaataacttgcagcagatgaaacctaacanacccagaagtgatctatgcaatattccaact

SEQ ID NO: 28422 - DNA, 358 bp, Glycine max
  unsure at all n locations
aaaaactntttaatgcgtatcttgattaagtcttctcttgattcttgaatctttgagtcttgaatcttgaatcttcttgatgaatcttgaaatttatcttgaaatcattctttgggctttttgtcatcatctttgtcatcattaaaactacttgaatcaacttgattcatcatcatgaagcttgcttctacaggtaatataactacacccaatgtatgaccgaacgtagctctgataccacagttggtagtttattagatgatagttgatagttgtagagaattgttttagaagaacgctatgtcattgatttcttggatgatcaattacaacataccaatttcctatatataggctc

SEQ ID NO: 28423 - DNA, 450 bp, Glycine max
  unsure at all n locations
gaacttctctgtaacaaagtcttggagggggtaaacaattcttttatttaattcataagaacctcacctatattctcaaaggcatatacaaatttcccatcatcctttttaaccctctgattagattttacttttggcctctaagatccctttgggtggaaaaaagtgtgtttgggcatcgtgtattagccaatttgcacaagaacattgttctcacttattttcgtcctgcaacaagacatcatcaagagtatnnttcaccaactattattcagctaccacttcgttagtctacataggagtttgaagcttctcaatcattttcatttcatatcttatttgnttctccaatctttcatatntttccttgcccatattattgaagaattgttcctattttaataagatttcctaccacactatcattgcaacaacaagaatgcttaataa

SEQ ID NO: 28424 - DNA, 390 bp, Glycine max
  unsure at all n locations
cttatctncaaagtcactggaggagctcatattataaaatgacatacaaacatatgagtccagctagctatctntttaaacaatatgaaacttaagtttttgtgatggtcttcaaattacaacaatgattattattgttttttttaacanatctatatntttntattacaacgtagctaatgtggtttatcttgaattcaaatttctaatatcaatctttaggatgttttagaatttaaagatagtacccaatgtttttaagatgtttattttagaaaataatgtgttactttatgttaagattatgattttctataaaacagaggttctatganacaaaattaagcatggaatagaatacaaaaattacaacatttacatgaaatatta

SEQ ID NO: 28425 - DNA, 289 bp, Glycine max
  unsure at all n locations
gaacaacctgcagtncacatgcgtcggtggagatacagcagccctggaccaccaccagtaatgatcgtgtatcttggatcccaagtaagtagtttcttcttttgatgttctttttcaaacaaaagcttgtctaggctcccgtttggtacatagttgtaaacaatgaggagttcatccttcttcctgcaccacccatgtaactgcaccaaaattctatgctntagttgtgccatgcctgttatttctgaaacaaattctctgattccctgccttgaatcaggagcaactc

SEQ ID NO: 28426 - DNA, 343 bp, Glycine max
  unsure at all n locations
ttcttatgatcatgaaacctttctccaccaagcgagagagtaacatcaaatgattcctcatcctctaacaacatcccaaaatgttcaccaatatcagattcangaacctgtattgtgtntaactgagaagaatctatggacgacactaanaccgcaatagtgcaatttatcttcaagcaatcatccttgagaaaatttgacgtctcaaggtgtctccgtttgaaaaaccgcgtatagcccctattacacaacaagtgcatcattgatcactacctaatgtacaccaacaaaaatggataccagagctaataaatcatgatgatatccaatcatatcaccaaat

SEQ ID NO: 28427 - DNA, 188 bp, Glycine max
  unsure at all n locations
gattttcggccatggagttgcagcgaaagataaaggataagaggtgagatgaggcgccatctactagaggataagccatganaggagaagcttcaccaccaaaagagtgtcttggataagaagcttacagangaagcttcaatgaaggaagagaatgagagagatagagtgatgcaatcctacccctt

SEQ ID NO: 28428 - DNA, 434 bp, Glycine max
  unsure at all n locations
agcttgttgtacggctggacatgatatatgtcagggttgggtttagttaaaggataaaaggggatgtatcatgagatgtnctgcggggtttgacccatgcgggcgccgaagtgacagcgtgggcatctccctccttactctntgcaccagttgctccaattcttttagcattggcacttgtggaggaaacgtaatcgaacttccctcttttcaaccatacttcaattctttcctcggcgaatacttggtccgcgaagctggacggcatgtaacctaccaacttctcatagtaaaacactggcaaggtgtctaccatcatcgtgatcatctccctttcgaccatgggaggggccacttgtgctaccaggtcactccatcgctgtgcgtattctntanaggtctcaccttccttcttgaacatattctgtagctga

SEQ ID NO: 28429 - DNA, 447 bp, Glycine max
  unsure at all n locations
gagttcctagcttagcccataatgttttccagaagtggtaattgtcttagtatctttatctgacacagtggtcctatgcaaaccatggagtctcacaacttccttgaagaaaagtttgagatgtgagaagcatcatctaccatgtggcatggtatgaagtgtgccatcttgctaaacttatccaccacaacaaagatagagtctacanccttttgggttctaggaagcccaaggacaaagtccatactaatgtctacccaaggtgtagatgggatgggtaagggtgtgcatagcctatgaggcatcaccctagacttggcttgtaaacaagccacacatctagtgcaatgcttatgggcatctttctttatatgggaccaatagaacttttctttgagtaagacaagggtcttgtctatcccanagtggcccatgagccaccctcat

SEQ ID NO: 28430 - DNA, 298 bp, Glycine max
  unsure at all n locations
agcttctaataaagtctcgaggaagcttcttgaggaagcctcttaatgaagcttcttgagtaagctacatgagttgcctcgataaaaacactacccagacttcgttaaccgttggatcttctcgaaatttggcctacagcttcagaagacaattttccacgatatgaccgttgggatctttgcgaanatgtctgcagcgtgcttgaagcttccattttcgagagcatttcttatntaaccatatcagcctttgtattcgtgtagcttaggaaaaacaccatntctttctctttctttc

SEQ ID NO: 28431 - DNA, 445 bp, Glycine max
  unsure at all n locations
tcagctntgtccncaatacttcatgtagacttgtccaatatcttatattatacctcggattccctttggatacaatactggaaggaattccatgcaactntactacttccttaatatacaactccactagcttctccatcctatactntatattcactggaataaaatgagcagatntggtaagtcgatctactatgacccatacagcatcatgtccccaactagtcttaagtaaactagatacaaaatccatggatatgctctcccatttccattccggaatttctagtagcttcaattctcctgatggtcgctgatgctcagccttagccttttgacatgtcaaacacctcgctacatattcagctacatctttcttcatgccatgccaccaaaaacttctcttcanatcttggtacatcttagtcattcctggatggaaact

SEQ ID NO: 28432 - DNA, 423 bp, Glycine max
  unsure at all n locations
agcttcttttttcattttcaagcatctcgatatattacgggactcaatcgaccatccgagtcaaaactaattgtcgtttgaatttactcaaagcttctgtattcaatttctggcatctcaatatattaagggactctatcgaacatctgaggaanaagttattgtcatttgaatntgcttggagcttctgttttcaatttcgagcgtcttgatatatgatgggactcaatcggacatccgagttcaaagttattgtcgattgtatctgctcagagtttcagtgttcaatttcatgtatctcgatatactataagacttaatcggatttccgagtaaaatgttattgtcgcttgatttgctcaaagcttatgtattcatatcaagcgtcttgaattattatatgcctgattagacatctgagtc

SEQ ID NO: 28433 - DNA, 359 bp, Glycine max
accacaatagactttagctcatatatccgtgtgagtcccgtaatatatcagaacgctcgagattgaatacagaagctcctaccacattaaaacgacaataactttctactcggatgtccgattgggtcacgtaatatatcgagtcgctcgaaactgaatacaaaagctgagaacaaattcaagcgacaatgaattttaaattggatatcccattgagtcccgtattatatcaagacgttcgaaattgaatacagaagctgtgagaaaattctaacgagaataacttttactcggatgtttgattgagtcccgaaatatatcgagacgctcgaaattaaaacggaagctcgtacatattc

SEQ ID NO: 28434 - DNA, 351 bp, Glycine max
agctcctttgtgttttttaatggtgattttccaccatgaagatgcagcagaagacaaacgagaagacgtgagaggaggcgccatccactatggaataagccatggaagaaggagcttcaccaccaagatgagcctcggataagaagcttggagagggtgcttcaatggaggaaaagaaagagggagagaaagagagaggtgggagcacgacattgaagggaaaaaaatggagagaagttgaactctgagttgtgtctcacgagactctcacatgcttctaataatagactaggtagcttacttgagaagctatcatgagaaaacttccttgagaagctttcttgagaaaac

SEQ ID NO: 28435 - DNA, 330 bp, Glycine max
ttcgaggtacttacccgttgaagatcgaagaacgatttttacgtatgaagaacgtcgaagaacgggcaggacctttgcgaaattcctcacggaaaacgttacggaaacgtttcggaagcgcctcggcttagattttcttcacggagacaattgttttcagcaaattcgatagagagagaagtgcctaaggggctgaaccctattcttcttcatttcctcccctatttatagcaaaataggggagatggttgcctcccagcttgcccaggcgagctcagctcgcccaggcgagccaagttgcttcctccagaagcatcagaaactaagtgg

SEQ ID NO: 28436 - DNA, 318 bp, Glycine max
  unsure at all n locations
atcttgtattattatggngtacccatcacgtgtggtactaggtggcagtcgggcgatggtgcacaacaagtttttcacatccacaaagcgcgcataaacccaccatcccctgttgcccacctccatccgagctcacgtactcccacgtagcccatatcctcgtttctctcaacaccgggtccccatcaatcctcccaagcttncacaacatccaagcaaaacaacattcaaacagcacaaactaccacagccaagaaaacagggcaaaggcagaaaactctgctcaaacaccaaccaaaatcacagcttttctcactc

SEQ ID NO: 28437 - DNA, 361 bp, Glycine max
  unsure at all n locations
ttagcacatnacctactctgangcaggttataacttgtgctgcaactaacatactactggaaaatactgggaatgtcactggaatttgactgaattttactgatttctaacattggaaacattataaaaagaaaaagtattggataaattaaaaatctaaaatcaccaagttggcggaaaatcatgtcaggaaaaaaatgaaaggaagtggcttgttgtttgctcaaatttgtccataattggttatttataccatctagtctanattcaatgaaaatatgtaaaaagtgtcaaactaagttcttgatctatttttagtttttactctacttaaccatctagtttcttagcctacttttta

SEQ ID NO: 28438 - DNA, 504 bp, Glycine max
  unsure at all n locations
gaggcacgatcgattcgattgncncnccnancaaanacagcaccgagccgggaacctnggagacgaagcggaggagcatcatatgtttatccgaacaaacaccgcggcgggagacgcgaacagccgaacacactacaagcacccgctggaggaaggcaccaccaccacccggggccaagcgaagtcgacgcaaacggaacaaaaggcacgagaagacccccgacccccgagacagaccggacaggccccgagccaaaaagccagccgagccatctaagaggccaaaacccagaacgtagccgaaaacaccatacaggccgaaagcggcaccgcgcacaaggaaaacgccatagaccatcataacgcaccangtcagacgagaagagcgagcccagcactgacaacaacacgagcagaccgcccgaccaccaagaaaccaccggggcgaacggaacacatcccactctaggacgccattantggcgcgaatgagaacagggcggn

SEQ ID NO: 28439 - DNA, 429 bp, Glycine max
  unsure at all n locations
tgcttgtgatttgtgtgacaccctttactccacacatatatgtactaataataaaaggaataagtatgcannaattaattaaatttttaaaacacatntaaataaagcacttcaaaagagtgaaagactcacattcacttcactattatcaaataaaacttgtcagaaacattnttggttcaaaacatcatgtaattaaagaaaactcatgctccaatgtcacatcaacattgtgtcccgacgttcttcagtacaaggttccttaaagcaattcacctagtcatatgctcccacgaacacaaagttcaagataatcacaggatccaaacacanataacacgcggggagtgagttatcacattcctaactaatagtgagaaataagacaacatgtagatatacatatcatataaacgaaatacaacttac

SEQ ID NO: 28440 - DNA, 464 bp, Glycine max
  unsure at all n locations
nctatggaggttgaatcttggacctccaaggaggtctttcattggtgattttccaccatggagatgcagcggagggcaaaggataaaaggagaggggaggcaccatccacagggaattaagccanggaaataggagtttcaccaccaagaatgtgccttggataagaaccctgaaaaggatgctttaatggagggaaagaaagagagaaggggggagcacgaaattgaaggaatanaagagggagagaagtggaactttgaagtgtgtctcataagactttcattcatcanagttacagcatgtgttacacatgcttctatttatagacaaggtaactttcttgagaagcttcttgataaacttccttgagagcttctttgagaaaacttcttgagagctagagctagctacatacaccctctaataactaagtcacctccttgagaagcttcttgaaagattn

SEQ ID NO: 28441 - DNA, 353 bp, Glycine max
  unsure at all n locations
agcttcgtttcctcttctttcttcttcttctttntctctttcttcttttctctcaattctctcaattccctttagtgctgacccttctaaccccttaaaacaccttccatcatacctatttataggaaaatagtcaccttggggcggtttaagctcacgccaggcgagctgaaccttagcactgaagtaatgagctcgcccaggagagctggttgcttacctaggaggtaattccatggcctangcaaggcagatgctagcctaggcgagctggggtctagaaaaatcaagaaaaagacccttttgccccttcctttggatcctttggattcttgatcaaaacactgagtgat

SEQ ID NO: 28442 - DNA, 557 bp, Glycine max
  unsure at all n locations
nccgtgaagggttcagtnntcccaggtnngtcnnncnatnagnnannaagcngagagaaggccagnnnaggggcatnnngggatcatnanngcggtttantatnntgaactgcannnngntnngattcagtncttntagtagtatctcggcagtacctatanagggctacatccgagggcgacgaccaaatattgtgaataccattatccacacaatcgtgagaggaaatgtggctaaatgggaaacaacgacattgttataatgtatgtgtaatcttttgataagattcttctagttttagctatacttagtcgtcttgcttaagcttgtggtatcaagacaaccagtatgggcttgtcatgtcaaagctgtctctatcaccttttggtgggtatatatatatgtatcatatgaatgtcataaagtcagctagtgagtgaaccagtttcctccgcacatgatccaaacttcaagtntgcatgagagctggttatactggcaccatcatagccgacagtagcctgcggcccaggcactaacttaccgcgttcgaccg

SEQ ID NO: 28443 - DNA, 276 bp, Glycine max
  unsure at all n locations
gctcggtgcgaggcgatacagtagagctgaccgcatgcaagcaagcttgtgtcacacacgangcctacacactaccttgagcgcccaccataaacgaataacttatcaaacggctagattgatacacggcctatcacggtgaactgtgctaacgcgctgccatatacacttaatctaccagaggcatcctgcgtctcttaccacatatcttgacaaggatacgagctaaaccctggctgtacatagccactatgagacactggacactccatagac

SEQ ID NO: 28444 - DNA, 291 bp, Glycine max
tagcttgtttgtttttgtttctgaacagtggtggcgcgagaaagtctgttgtaaattgctgaacgctgtggtaggtttggtttatagtacaatcctactatatgctatcaaaaagaggattgctatcgaatggacagaaaaagcttagctcatttctaaggtgatgattgctggagagaaggtctctattgtcacataatgacatcttttaatcgttggtggagcctgaagatcatgtgtatgctgagtgaagtctataaaatcatgaattattgcttcattatcacgact

SEQ ID NO: 28445 - DNA, 308 bp, Glycine max
aattatgcactgtctgaatctactctttgtaattattggtattaactcttagcagctaattgggaattgttactaaaccaatatggagatttctggacgaaagatgtggctggacaacattgtatggatcatccagtctagtcccctaaactggaactttgactgctatatcatttttcagttgatatattggtggagtgtcaaactacgtctaatgcatggacagtctagcttatttagttagttagtcaattcaatcaacaatttatgttgtaaatggttttattttcaatgagttctctacccct

SEQ ID NO: 28446 - DNA, 335 bp, Glycine max
  unsure at all n locations
agcttcttatttcaagatcaccagcccaaacaaaattacgaagccagaaatccacatctttaagaagctttcatggccaagaataaatgtggaaagaatttatcaccataccattaatgatcgagttgatcaattgaactttccccatgaaggaaagaaaggaagttttctaggaataaatnttagatttgattttgtcctaggaataaatggtagagtcaaggcttacctacgaaaattgggactccaaggtaggaaaaagagaggttccccaccttgaaacccaagagggattcatttccaacattatgtaaggagtcatggaactggaaaat

SEQ ID NO: 28447 - DNA, 479 bp, Glycine max
  unsure at all n locations
actaagcttttgtcgacncacaattttagaggccttatagcttatattagtctcaaacctgatgagctatcattgcaggagagagtttaacatctgagcatttaggacggcacaacttatgccagaagttgtgattagattcctccatgactacgctagtgggcctttcacttgccaacaaacaaatacatttaaagacaggtgggcagtcaaatgtaccaaagcagctggggcatgacaatgactaacatccccaatacctgcaattattttatcacatccaatccaataattaatattagcttaaacatgttttaagcaatgtggcggatggtggaatatggcagaaggccaaaattccaccatataagctggtaattgcggcctatgacgccaccacagcgggctcaacatgcganacctgngtgtaaattaaaattggatattgcaacacagcagaagcaatataatgaacaccg

SEQ ID NO: 28448 - DNA, 317 bp, Glycine max
agccatgattgattgatatttttaacaataatattttcggagtaaaactattattattaatatgatctataatattataattatttaaaagaaattatcaaattattttagtggctttaatgattagaatcattttaattgtttgagataagttaattcctataaacatatatatgggttatatgaataaatgtcttctttttctcttgaaggggcttacaacgctttgataacatgtcattgtgatgtttgtcgaccagttttggccacatcttgtggtttaaaattatcttatatttgaatctttgacattgtaa

SEQ ID NO: 28449 - DNA, 413 bp, Glycine max
  unsure at all n locations
tcagctatctttcacgtcgttcctcgtgctgacaacgtcttcgatttcgaacttgcatctactggcctccactcatccncgtcgcatgaatcatgtgtttctaaaatggtggaaggagaccgtcgtagactggccagaggtttacgacgacgtctcattcaaagacggccgtgcaccgtcgttgaactccgagaagcaccgacgttgaacgcgttttttgtagcagtgaaacgagattgaaaaattgaccatctggctactattacaagttacaactaccgaaatgaagttctattagatggcttcattttatggcaatgtttttcttgttccttaagataattgtgagctcaacaacccattctcaacacatggtgtctatcatggatcacccacttggtgttcaatgatgc

SEQ ID NO: 28450 - DNA, 384 bp, Glycine max
  unsure at all n locations
agcttcctatagntccgttccttcctctctcgatatgagaccgagtctggcactccacattagtacattcaccaattataaaagcatcaactctgtcatacggaatgagggcaacctcatcatggtgctcagcattaccaaacttggtccaagtcaggtcagcaacacaaaactcctcctcaggtgggtcttgcaaaggaatcttccccacggattcaactatagccatatccaaaatggcacaaaaaccaaaaaacacaaaaaccttccttgctatatatacagaacaatctagaagtctctccacaaacactcacatgtccaaaacagttaaactgttaagcacataacaaaacaccctgaaacaacaaatacctttgagat

SEQ ID NO: 28451 - DNA, 390 bp, Glycine max
  unsure at all n locations
ttctaccatanagctgagaactctacacctctgtcgcagccaatattaaacacgagatatcagtagttgaagatgaacatccacagtacatgcaacagtatttgattgccactgagagaaagagtgagaaaagccctctgttcctaaccttcagagttgagccaggaccacgccagaaacttggtttcctctagcaatttatctccatcaaagctaaagcaattaaatacccaatcattcctatgacattatatactccaaactatgacacaccagataatcttccagatttctaatattatttgactcaatacgcaaggcaatgttgccagaagtgagtttccacggaggatggaanaactgtacagataccaaagagagaataccact

SEQ ID NO: 28452 - DNA, 326 bp, Glycine max
agccctgtatcaaatcaagcttagagaaataccttgcgccacccaattcatcgagtaactcatcgatcgtcgaaattgggaaccggtctctcacggtcaacgcattcagtgccctgtaatcgacgcagaacctccatgaaccatcctgcttcttaaccaacaaaacaggagaggaaaaggggctagagctgggctgaataaggcccttttgcaacattgaatccacctgagactcaatctcctggttttggtaatggggataacggtatgggcggacattgaccggaggtgcttggggaaggagatgtatgtggtggtccgtgtca

SEQ ID NO: 28453 - DNA, 407 bp, Glycine max
  unsure at all n locations
ataacaaacaagagtaaacatataanaacttctgctggttcatttcttcaccatgaatcgaagtcgtcgtgccaagaaggtaaatatactgtctcaaacatacacattacatgtacataaatatgctgttacaacctcaaataaaaatttgatttgattaaatgttttgaaatgaagaacatgtaaacaacattgtatgtggatttggcctttatattcctcctaacccccaaaatatctcatttcttaaatttctgttttctgtaaatagatctgtttttcagcaacaaagacacactntctaatggatgcaacacanagaaaacaatacagaaacaaattcccaccccaagtttgatgaggacaagcaagtacaagcaaagaaaaaactttttcggttcatcaca

SEQ ID NO: 28454 - DNA, 143 bp, Glycine max
catgcaactttgtttattgaatagtagatcttgcacggagaggtcatatctctttcttcaacacgctctattgttactcttgaaaagtgagaataagctctcataacaccttgttcactttgagagaaaaaatctaagcactt

SEQ ID NO: 28455 - DNA, 520 bp, Glycine max
  unsure at all n locations
cgggttgctgcgtctacgggctcccgtannnctccaccataganaanaaacccagccgngatacactctatgcagagtcggaaatgtattctttgactggacaccgacagaggggggcgtgatatagctgagcgggcattggaaatgaggcatatgctcctagtccctagagattctacacgctcctgatcataatgacactacatacttttcttgggagagagctcatggtattcaatgtgggtatattatcttgtcatggatactttggacaagccaatgtctttagattgcctgacattgcggggcaaatcgcacatacactacgtcaagtgcgtgcccttgaacatgagattcctccttcagatcaataatcggagacttgagatcgctcctacaattctaattggtaccgatgttatggctgatgcagacggcacaacatgtatccagcggtaagaatgagtcaaatgttctgaccgtactcgtatacagcaggatgcatacacatatcacttcg

SEQ ID NO: 28456 - DNA, 255 bp, Glycine max
ggttttggctaactcaacataacccaggcatgtcgtcgagacacttttttctcgcactgggggtgggcttcctaattttgtcataagtatgtttccctcctagtattttctgtacttctgagatttgagctcgttaataacacttgctaaaatgtttatgctccgtatggtacggagatccaaagatgctcccccgtcatttcttttagagttaagccgattctgtccatacgtataacttaagatgttcctggc

SEQ ID NO: 28457 - DNA, 348 bp, Glycine max
  unsure at all n locations
gggatttatagagcgacctgcggcatgcaagctttcttcagattttagtaatgatccactgacctagaattaaaagaacttaattccattaacctatggaattaaaagaacttaaaggctgagtgtaattgaaattgtggcaaccaaaagtcacccccaacagccatcaagtcagccaccattttgtctcctataatgcttatgcctangttgccaattatgcccttattacgacttgaactaaaccaaactaaagccctcttattgattgacccaaaacatatttttgatcagccacacttacaacgattgagcctttattagaaaaactaaacactctaaaattga

SEQ ID NO: 28458 - DNA, 417 bp, Glycine max
  unsure at all n locations
atgcgtcacgtaaanaccaaggttatggtgtactagcctttgatggcacttggcgggaagtgatgggggaaatccacattcccattcagataagcccctacacttgcaatgcggtgtttcaagtcatggacataaatcccgcctatagctgcctcttggggagaccttggattcatgcgctgggagtggtcccttcaacgcttcaccagaagttaaagttcgtagctggtggacttctagtgatatggtcgagtgaagaggatatgttggtgagatgttcctcttccgcaccatatgtataaacaatggaagaatcattgtgaacaactttcaaatctttctaagtggagagatgtgcctttgtggagatgatcccgcaactaccttttctctcttatgcgaccatagtgggggcac

SEQ ID NO: 28459 - DNA, 507 bp, Glycine max
  unsure at all n locations
aacagctgtcgcgtantccgatgnacatagcaanancnatnananntncgtgcggngagctcgtggatactctacagtgcgagcaggcagcctttgttctttgcttaagcncacgnacaaacgccggcggctcgcgtatgattacgttactcactcctcgttcacattctggtaacaggactttcaccgcttgcgcatgccatggattgttgttgatgcagaatacgcatggacacatgccgatcaattgacagagcatcccggatggagaaacaacggcaagaaacgaggctctacatgtgtcatattgcgacattgctcctctccccagactcaatggagaggttatagctattgactacacggaatcctgcgaacatagtcatgaatgccttgcggaatgacacaactgtagatgaatgctgaaccgtaagaagcgtgggtcttcgaatgtcactgcgcgattatctccgtcccaacacctcggtgctacagtcactgccgccc

SEQ ID NO: 28460 - DNA, 511 bp, Glycine max
  unsure at all n locations
gagtgatacgatacctagctangctngtctngcannnnccnanananagnaaanaaacgctgagggtgaggatgagcctccctgtatatacttatatgttgtcatatcccaacacgatgtgggaataaaccaccaaaccaccacctttcacggtgcaacttcatgcgtctcgcatacacgctacatctacatctagctactgtgtctacaccatataaacagttcttccgactctatgctctcacacaagaaggatgtccaccacttatatacttgaattgtgcatatctctctctgatacggaaataaactactaaaccagcaatctcgatggtgtacttcaagccaccccctaaacgagcacaactcacgctgtttagcggcgtcccaattaagcggtcttcccacaatacccccccatgttttaattactgcccaaaccaacataaaatactgcttacttacaatcttagtctcaactcaagagttactcagaaattggagtttctan

SEQ ID NO: 28461 - DNA, 228 bp, Glycine max
  unsure at all n locations
tcttgcttatcattaattcgagcatctcgatatatgacaggactcatcagacatccgagtaaaagttattgtcgctgaattggctcagagcttcaacattcgatttcgagcgtctcgatatatgacgggactcaatctgacatccgagtaaaaagttcttgtcgtttgaatntgctcagagcatcaacattcaatttcgagcatctcgatatgtgacgggactgaatc

SEQ ID NO: 28462 - DNA, 382 bp, Glycine max
  unsure at all n locations
ttcagccacttcanacganaataacattgtactcgtgatgttgattgagcaccatcgtatatcgagacgctggatattgaaagttgatgctctgagcaaattcaaactacaataaatcattcctcggatgtgtgattcacgcccgtcacatatctagatgctcgaaattgaatgttgatgctctgaacacattcaaacgacactatcgttttactcagatgtctgagtgaggcccagagcatatagagacgctcaacatggaatgttgaagctctcagccaattcaaacgacattaactatctgctcggatgtccgattgagtcccgtatagattctagactcttgaaattgaatgtacaagctctggcaaaatacacgaca

SEQ ID NO: 28463 - DNA, 213 bp, Glycine max
agcttgtttattataacctgttaacgaagacgaagaccgtattatgcactagtaatgctcattcttaatgatagaggtatcattcatgtagtatataatctacttactacaagacttgctgcaaatctgcaattgaatggatctatccttttcaatcttacatctttcagctggtagttaccctaagagaatatgaactactgtgtctcaatt

SEQ ID NO: 28464 - DNA, 370 bp, Glycine max
  unsure at all n locations
tgatcaaagncacaacaagaatagaattggggtgataagggatttagcatttacatttaacctcttatgattggtggtgagacaaggagacattgattaatgtggaataaagtgggatggggaacatgataagaaaaaatatttataatctaatggtctttagcatcctaaatcaaatttgtgccctaccaacccctctaaggagaatattttaatcaccatgggatgatgatggggatcgagagtacccttatgtggcgattccgcctctcaagttcggcttggtgggtccttatcctatttgcaatattatcattcgtgagtgaacaatttctgactatccaatcgtgatgaggctgatgcactaata

SEQ ID NO: 28465 - DNA, 230 bp, Glycine max
ggtgccgcctgaccaccatgaagcccgataggatggggagtttttttaaggaggggggttaaaagtcgaaagcaaaaatttagatagtagagctgggtagatggtagactatgtataggattttacgatgattagatagatatgtctgatctttgtgttgtatagaatgtactgtaggagcgagaaaggggtagatcccttattcagtaagtgtttgtaattttcatttg

SEQ ID NO: 28466 - DNA, 338 bp, Glycine max
agcttctgttccattgcaattcttggtggtgaagctcattcttccttggcttattccctagtggatggtgtctcccctctcctcttctcctttgtcttccgctgcatctccatggtgaaaaatcaccattgaaggacctcattgaagctcaaagatccagcctctatagaagctccacaagcaaagcttccatcaagtggtaatcagagcacaagagcttcaagtatgtgctccttacacctccattaatgttttgctttaccttctcttccattgttgtatcttctttttttctccatgtatctcctcacatgtcttgtgcctaatgttttaacatg

SEQ ID NO: 28467 - DNA, 432 bp, Glycine max
  unsure at all n locations
gtgctgttttcctgctagctacctattagcatctttcatatatataaaataaaatgactagtccttaatgtaatatttgtaatacataaacaaaacatctctacagccctatcctgaaagtttaaatccaattatgatgtgacagacaaatattaaaaataaaactcacagtgattcagtcttcaatcctcaaatccttttgctttgatcaaaggtgagaatcaagttctgaggttaggttaaaggaaaagagctttgagaaccacgtaaagcttgaaaaccacgtaaagcacaatcaactgccacaacaaaatgaaaccccacattacaattcttattgatacttttatatgagtagccaagtggacaaaatgacccaataattngataagaaccttcggacaatgccaccgcactgattaagaacttaat

SEQ ID NO: 28468 - DNA, 406 bp, Glycine max
  unsure at all n locations
agcttgtatctactttccataaataaaatataaaatagatatttaggtttcctatactgtatctggaggcaattagcgggcacttacggaagagagaggaacattcatcatattgatgcattaaatgttggcatgttatcttttccttttctcgggccaaccaatacaacactttcccctgtcaaaccgtctcatttttttgtacctttcttatttattttaaaaagagtagtttcttattctttaaaattattatgaagtctcctaaaatattaggattaatgtaaatattacaaacacaacataaaattcaaaatcatttatctttaanagattcataatgggtactcattttgatttaaagaattaaaataatctttaatcattcaaaatattaaaaatgatc

SEQ ID NO: 28469 - DNA, 325 bp, Glycine max
  unsure at all n locations
acctgtcgcagggtgggggtttggctcctctgctgaccaccatacagaccttngcacttccatgcagcaacctgaagcaattgagcaccctgaagcttatgctgcagatatatacaatagacctnctcaacctcagcagcaaaaacaaccacagcagagcaattatgacctttccagcaacagatacaaccctgcatggaggaatcaccctaacctcagatggtgcagccctcagcaacaacaacagcagcctgctccttccttccaaaatgctgctggcccaagcagaccatacattcctccaccaatccaacaacagcgacga

SEQ ID NO: 28470 - DNA, 347 bp, Glycine max
  unsure at all n locations
ccggtttacgcgatcgtagatgcaaaccaaanncggggngcacgagggcacgaggggggcggttgtttacttacaaaacaacagggggggcgggggagtatccgcaaacccagaaaaggagaacccgacgagcgagcgcgcaggacgcgacccccaaaggtcagcgcacggggaaaaccagcgcgccggacccgcgcaggcggagcggagcgacgggaaccagagacggagcacggaagagcggccacaagcgcgcgacggaggaagcaccaccgcaagggaacgaactacgcagaagagggaccaagagcgaagccgggggcagacaccaccatcgaaacagcgcc

SEQ ID NO: 28471 - DNA, 374 bp, Glycine max
  unsure at all n locations
ccgggatcttagatcacctgcagcatgcagcttgtttaatgaggtccaggaagacaaggcggccgaatgaactagttccgctcctgagtatgacagtcaccgctttaagagcgctgtacaccagcagcgcttcgaggccatcatgggatggtcatttctccgggagcgacgcgtccagctcatggatgacgagtatactgatttccangaggagataggtcgtcggcggtatgcattactggttacccccatggcccagttcgacccagaagtagtccttgagttttttgccaatgcttggccacagacgagggcgtgcgtgacatgaggtcctgtgtgaagggtcagttgatcccgtttgatgcagatgctat

SEQ ID NO: 28472 - DNA, 363 bp, Glycine max
ggttgcttcctccagaagaacagccttctggagggcccaagtgggcctggttgctatttgcacccccatttttactaagtacaccccattgcctttgtttttgtgattcttttttcgtaaagttacggaaacttatgaatttcgtaacgatacttgttttctttccgtaatgttacggaaccttgcggattacataatcatcccctttttgacttaccgaatgttacggaacctcactaatcatccccttttttgatttccggtgtgtcacggaaccttacggattgtgcatcaatattttctgttgtttccggcatgtaccggaatttacaaattgcctaatgatggttgccagcacctcac

SEQ ID NO: 28473 - DNA, 227 bp, Glycine max
  unsure at all n locations
agcttagttgcangtacgaacaggtgctaagcccatgatcgatcgatcatcatccggcgtccggctcatgacgctgaataagcactcttaagaggcatcctagtatctctaactttgctatataattacctgttgcatacttgtacattctcttgaattatatcctgaatgtgcctaagtgtatatgcaattataggattcttaaataatatatataacaatgaaca

SEQ ID NO: 28474 - DNA, 376 bp, Glycine max
  unsure at all n locations
ctaatctagagatncatgaaaggaccttaatgtttgatgtttatgggactaagatggtcattgaccagtggctattctatgatataacccaattgccaagcgaaggtgtaccatttgaaggtgcactgattgatgattggaagttgtatttctctgtacatgatgcccgccgattggtttgtaccaatcaagcagatatgaccggaaagcttcttgccagttcattagctcttgaaagccgcatcctccattaccttattgttcgcatcttgcttccgagatcttcaaaccttgctcacgtttctgaagaagatctcattgtcatgtgggcctttcataaaggttcacaaactgattggcacatctggttatatat

SEQ ID NO: 28475 - DNA, 340 bp, Glycine max
  unsure at all n locations
ggcatgcaagtcttgcatgtgtgatgnngtgctctaccattataagattagtgttcattggtacatgcgctggctatggtggcatgatannctccactataannaaaaaattggtcagtacgttattaatttactaacacgtttaaatattagaatcgcgcacttgtagtatacttccctccacgtacctctcgaacataagaagagacaaagcacacattattttacattaattaaaaaagttattgatatatgtaatntttattagacaaaatttgtatcaacggacgcagtcttgacattaacaattttgtacgttagcaaatgacaattttttaaa

SEQ ID NO: 28476 - DNA, 465 bp, Glycine max
  unsure at all n locations
ctttgagttgcanaagtgagagccttcacaagatatagagatatagagagttggaagacaagaagatccagtaatagacggccctgtctctgacctgttgtactacatcggcttttgtggaccacttccccgccccatataatgttaatcccttttgttacttctaagttccatgtgctatgtgctatgtgcaattattatccgtcttgtattgtaatgcaaaaaatctatcaaatttagcactaacgggcaaatcatgataagagaggagtttaacttccaatcaccctaatcatgctgccacatgattgtatcacacagtaatactacttcgttatagttaaattatgagagattaattaattattagagtgagtttgatagttcagaaatctttntatatagcttactactatacaaaangcattnttttatanaaaaataccatgttttaagagaatatca

SEQ ID NO: 28477 - DNA, 335 bp, Glycine max
  unsure at all n locations
agctttctctattgttcttgatanaagaagagcaagacggttaatcatggtactttgacatcaagcggtacgtagagtataaggagtatccacaaggggcttctgaccatgacaagaggacattggtgaagttggcaactagttcctttttaagcagaggtatcctatacaaatganatcatgatatgggcttgctctgatgtgtngacacttaagaagccgagcgaatgctcatggaggtaccatgaagggtcctttggatgcatgctaatgtgcatgtcatggctaggaagattctaaggcagactataactggctcaccatggaaaatgact

SEQ ID NO: 28478 - DNA, 475 bp, Glycine max
ctcaagcctgcttctacacaacaacccgcaagcaccaaggttattgaatatatattttaagagaatttatacaaaatcggaataaaagaaataattacaaaagtgaggaaaataacctatctaactaaaatttagatttgaaagacatgagtgggcgacttaagtccccatcaacgatgccataaacttgctataattttggcaaggataccaatgtcgtcttacattacagatttataataaagagattgtctccatagggacttgagttactcaattccttcggataaaggttatcagttgggaaaaactaaccgatcattgcatagagcacaagatcaacatgagaaacagaggatgcgatccacgatcataactctacagcgcctaggctccactttccacttccttctttcgtctggtgttgctcacattttttctatgctttctgatgtctctatcttcttcttttgca

SEQ ID NO: 28479 - DNA, 98 bp, Glycine max
  unsure at all n locations
acttttgtanctttttaagaacaaagaccgtgggggggacctagcaacctaacactcttatgctccctgacattcctacaatatgtgaagaggatgct

SEQ ID NO: 28480 - DNA, 163 bp, Glycine max
tttattttctttctccaatttctataaatagggggagaagtgaagtatataacggttcaaccccttatgcacttctctctctgtccaattagcttaagaaaattatattcgtgaagaaaatccaagccgaggcgcttccgtatcgttttcgtgagtgatttta

SEQ ID NO: 28481 - DNA, 440 bp, Glycine max
  unsure at all n locations
gaaaccacaggatgttcantatgggtttctagcctacatatgccgacaagagaagggtcaccatagatagaaaagaaagaagcctagcacatttacaggggcagggaccacagatggaaaggatccctatctgccacattagcaaatgctttgtcaacggcgggtggatgcatgaaaattangttgttgtgctagacgaagaaaccaaccaagagcagccaagttggatgcaatcatgctccccgggtttcgaattgaagaattggcagatcatggagtgacccaagattttggtgtcacatccaatgtaatccagtagttcgaaccatattgctgggcctatgctntacggtctgcttcttttgttgggcatacctctttctttaatgttcccgcaantataaatatacaacccttgtttattgatatgttgcctctca

SEQ ID NO: 28482 - DNA, 355 bp, Glycine max
  unsure at all n locations
agcttgtattcactttntcttcttttcccgacaattggttcagtttttttttttaaaaaaaaatagtctcaactttttaatgatgaaaataaaattttctttgttttccggagaaactcacgtacgtactctcgttatcatcactagacaccggtcaccaatattaatattgcccctcaccaccacttctaccggaagttaagttgttattaacctttactttcattatcatcaatagcttcgctgctattgacccctcccttcactgttggcataaattggctaattagagatcaatccaagtcaaagaatttttttttaagagccgtacgtgactgaaaataaatactgcttt

SEQ ID NO: 28483 - DNA, 443 bp, Glycine max
  unsure at all n locations
tagctnccgtttcatgagaaactaaggagctctgttaacaattttggtttcgatgtattgttttgtttcaggatattttaaagttcctcctttaattaagtgtcgggaagctattgttagcaattgtgaacgttcatgcttatcacggattgatcttgtaaccgtgattaatttgttttctatgacatnttggtcaataaagtatatcactttttgtgagttntgtccaacaagattttataaaacttttgacaaataagaaataggatgcgtattattagcatgatagcaagtgttgctgtatcatgactttgcccaaattaattaccatcacggaggtttcttttcctttactccaatagaagacaattaatgtaatgcataactcaatacaatgaagcttaaggcaaccacacttgtaccttacatgtatctgtttctta

SEQ ID NO: 28484 - DNA, 279 bp, Glycine max
  unsure at all n locations
ggctngtttcttttattattctctgacctacaaatccggatgtgactctaacacaaatcagaagacttgttggttggattgtacaatgactaacactatcattgtacagatgaataaataattttagtccttacacttttctctcaagatgagcaaagtgtgttcatagctttcttgaactttataagaatttacatatagatctttctatagacagaatcttaaataatgagcccttcaattcatacttcatgtcttcaaagtttcttctatttatat

SEQ ID NO: 28485 - DNA, 515 bp, Glycine max
  unsure at all n locations
cactcaccaggcctcggactagccataagcancccngancnaggagccggaccccgaggcaacactgaggccccttgttgttcctattgcttataaccagattaggccatctgaacacagggtccttccatagaaatcatacacacctatctcatgaggaagtggcgggtccacagatctgaccagatcctatctgcctcaatagcggcatgcatattcatcggcgcgcggatgcctgacaataatgtggtggtgcttgacgactataccatggcagagcagacaagatgctgcaatcatgatctccgggatttgatggaggaacagacacaacatggtgttgaccaaaagtttagcagcacactcgatgcaccccagcaacctgaaccatataagagtgaccantggtacaggattgcctcgctcagtcccgcatcacactatgagcantgtatccgctatcatacatatacatgccaatcttatcgatttgtcacctcgctcactagcaaccg

SEQ ID NO: 28486 - DNA, 400 bp, Glycine max
  unsure at all n locations
ncaagctttattactataatctaaacaattattcttagcaaaatttagtaaaatcgaaaataattntataatcaatattaatcacttgtatttaccaaaacagtctagcctagttaattaggcatgatgcatgaattatgtaaactccttaatatttgcctttgattntccacaaataaaaaatacttataactagaaatgagtgaaacattgaactagaaatgaatgaaacattgtatgacctcatccagtggttgaaggagatgaatattgaaaatgtgattgtcgaagtagattgctagcgaattgtacaagctngcatacgggaaaaaggatttgagtttgagagctacatattgcatgaatntgttatagtaccaaacgatcctattgctcatga

SEQ ID NO: 28487 - DNA, 474 bp, Glycine max
  unsure at all n locations
tcatgttaagtatgtatggcanaacttcattactgttgttcttgacatacaagtgagcttgtaacanatcttctagacttggagtgatcacatgcagtcctcttgaacccttaccactcactctatcattatgctgagactcaagaaggccaataggtttagccttctcaatgtattctgaacaaaatccaatggcttcttctacaatgtacctctcaacaatagatgtttttggatgatatagattctttgtatacccttttaagatcttcatgtatcgctcaaccgggtacatccaccgcanataaacaggaccacaacatttgatttctctaaccagatgcacaatcaactgaatcttgatgtcaaagaaagcaaggggaaaatacctctccaactggcacaatataattgcagcctcattntccagctcatcaaacttgacaggatcaacgactntgctacttatggcat

SEQ ID NO: 28488 - DNA, 244 bp, Glycine max
ctgcagctgtttttttttttctcattctttaacaagctttgaacatatacttggtcttcattaactgtctttgggcttggcggccacgctcaacatagtactttcgacacctactatacgttgatttcaccaatgttgttatgggaatgttgcgacaatcctttaagaccttatttgaacattcttgaaggttcgttgtcatatggccatatcgacgtccttctctatcgtaagtcatcgtcca

SEQ ID NO: 28489 - DNA, 333 bp, Glycine max
cctgactcaccatatacctagacccagtgttagaatgtctatttttaccctcggaagcgaaacataatagaacggatatttccactcaaagataaagagaaggaaaatttccaatgaatgctcaagcaagaaccgatggagaattccccaatcaaagagtgggagaacgcaaaaagacaagacaggaaattcctcttctaagaatgggagaaagtacaaagggaagaagaagaaggatagaaagctcctgatcagggatcgaaggacaaacagaagaaatgtgcagaatggtctttggaccgcacaatatgtgaacaatacagaattgacacc

SEQ ID NO: 28490 - DNA, 341 bp, Glycine max
gggatccttagatcacctgcagctgcaagcttactcttttgtctgtacctatattttgcctttaatttttaactcttacaattgtttgccctttcaatttcttgccctttctttaatatttttctttaattgtctccatttttatgtttgtgtaaaattatttcataatttatatataagtatttatttattataaattataaattttagttatataaaataaacattcactaaaatactagtaattgataaatgtacaacttatatttatagaacaacatcacatgatatgtgctttaagctcatagttaatttgtgacaaagctgaccaataataatga

SEQ ID NO: 28491 - DNA, 415 bp, Glycine max
  unsure at all n locations
ctcttcacaatatcggttcacaaggtgggggactatagacttcttcataagcaccctctatcgtagttcttggtttcttattctattaccaagatacatcaaatattaacatgtggaatccttgataggctcaacaaatatatggtggtaacaacaatgaggatgataaagaaactcaagcaagctgcataatgttaccttgccttcatattagatcatactattactattaaatcataccacaatattgcttgaaaatcattgcccattttttagtcttgaaatatattaagtcttttttttttctatgcttgcaagtaattnttttctttctaatcgtggaacaacaaatgctctctaattatttttctttctcaagatgataatgtagaaacgtatcagtgcaaggaaacta

SEQ ID NO: 28492 - DNA, 197 bp, Glycine max
tataaatggacttttacagcaattatttgagaagcctatggggacattaatattatcatcaccatcttagataaaacatctcatacaaatatggtttctgcactataactcaggatattcacttattattgtctccatacaatgcagttatacaaagtctagttgagctctaaacttattgaggaaattataaggaa

SEQ ID NO: 28493 - DNA, 395 bp, Glycine max
  unsure at all n locations
acttccagctggagctcatatactctcttgttcttgctctggtacgtataattgttcanaaaattgctgtctggttgtttgtttgcatatcctgtttttaactggcatgttcttttcttctgtaactgcaaaaaaatatttacttgttgagtggcttctaactntaataatctttaacaatttttaattaaggaatgatgcccattgctgattgcatgaacaaatgaattggaatccttccaatcctttgaataacttctcatgctatcatgcatgaggaatatagtgcaattttattcatatgccgacatatataaattcttgtcccaatcaagtatgttattaacttattatctattagtatgaagttctggtttgaatgttacatttcatgt

SEQ ID NO: 28494 - DNA, 307 bp, Glycine max
agctttctttattcatgccattgcaaggtaccaggaggtcatgctacagagcctgttagcgcaatgattttgccatccaactgcgtgtattattatgaacataatatgtgagtattgaattccatcttaatatcaattgacattacataaagttatacagcatgtatataacttggcactgggaattcacgtaggtaacatgagattctttaatatcccttattacaatatgaactctacactctaatatcatattaaaatttatctttaaaccaatttcattatattataattatgcttacagaaa

SEQ ID NO: 28495 - DNA, 201 bp, Glycine max
cggaggagcttaaaccacacactctcgcgacctgtgcacactttttattcatggccatctgggttaccagactcaccaaggcatctaggttacctccaagcttcttattctcggctgataaaaatgaattcttcgctactgtatgcactcctctaatgacgatatcgatgatattggcactttattaccgcgagtagaacc

SEQ ID NO: 28496 - DNA, 156 bp, Glycine max
agctttattttgagtggagagttggaacccgtgacacgaccactcttcctttgctcgaaccaactcctctcgtgacgatatctgagactctgatgtccttgcataaatggaacgggttacggtttgctccctcgcaacatctgagttacaacaaga

SEQ ID NO: 28497 - DNA, 327 bp, Glycine max
agctttatatatactttagagcttcgagccgttgagagatctcggctagtcgttgtctaacagtttgggtgctttactcatggcacgttactttgcagagagagagtgaggaccccaaacatcttctgcattgtatttttagagaagtacatcttgctagtgtcgccttgtgctcagagttgacttttagtgtataattcaaatacaacgttaatagtattggacaaaaggaataaagaatgtcaagacaagacaattcaaaattttctcttgtgtgctatgacacatattgcttatagaaccatggacgttactttctgaaaaagc

SEQ ID NO: 28498 - DNA, 428 bp, Glycine max
  unsure at all n locations
ttgtagaatggctagacatgatacatgtcaaggtttggtttgtttcaaggataaaagggatgccccacattatttccatgacacaaatgcaaaaaatgatgatttggaaattttatgcaaaactggtcatgcatgcacctatgtggacgctcaagtgtcaaatttttatggtcatgtgatgctagggctcaagattcatttcctctattttaaatcaacccaatgtttccaaaatatgttcttttatcaacttgtgcattcatccgagtccatttcgggcgtccggggaaatttcacagcattcactcttcaggtgtagacacattttccaaaaattggttatgatcaatgaatntttttcaaagaaaagttggaaatcatctcttttcanaagcatgtcggtttttcagctagacaacttaattttc

SEQ ID NO: 28499 - DNA, 379 bp, Glycine max
cgctgtaaatctcagctgggagcttgccagagaacaaattgtggctcaagttgagactagtgaagcttgtgaagatgatgaattgctttcctgaaaccccaccttccaatttctttctggtaaggtctatggaaagtacaattgttgagtcatcgatacacttgatgccggaccatgaacatgcataagatttacccagtaattttactccagaggggaccacccgattgtgcaagcggatgcatcatctccaagctcgatttaggctgaaaatgcctttattaggggcaattgttaaactgctgtgataccctgagaaggtacaagaatacaattttgatgtataccatttgaaatctccattggtacttgaaagccg

SEQ ID NO: 28500 - DNA, 440 bp, Glycine max
  unsure at all n locations
agggtttcttctgtaatggctgtttgaactttctagttggggatttcaaatgagcagctgatgtaaatacctaatatctaattgattgtgttttttgtgttcaatgcttccttcaatgcttgatgtttgtatgcttttggtctgatcatccatttgtgttcacagttaggtgactttagcattgggaaatgtactattgccttagaacttgattgaagcaggatcaaaacttagtcttacatgagggatctgcgggttaagttttggttttaattatgttgttaccataatgctgtttagtttaagcctagtcttacatgagggatctgcggacgaagcttangctaaattaggctaaactttcataagctacttgagctgagtctagtcttacatgaaggatctacngacaaaactcaatttaagttagtctaaaccaa

SEQ ID NO: 28501 - DNA, 341 bp, Glycine max
agcttgaattctaactggatgcattggttaacttggtaacccagctggccttgaaccaaaaatctgtacctgtcgcaagggtctgcggtttgtgctcctctgctgaccaccatacagacctttgcccttccatgcagcaacctggagcaattgagcagcccgaagcttatgttgcaaatattttcaatagacctcctcaacctcagcagcataatcaaccacagcagaacaattatgacctctccagcaacagatacaaccctggatggaggaatcaccctaatctcagatggtctagccctcagcaacaacaacaacagcctgctccttcattccaaaat

SEQ ID NO: 28502 - DNA, 453 bp, Glycine max
  unsure at all n locations
tgataangtgagaatgacttctcttattttcaagttctattgctctgtccatgccatcaaattactaatcccctttgctgttagcctgtataatttaaatttcatctgtgttatgatattttccacattttatgtccttgttatgcatttaacaaatataaacctaaatacccaaaaaaaaacagtggctccctgaagctagcttagtcataagatgatatcttagtttcttccagatataacagttcaccctgataagcaacaacaaagccaaaaaagggttaaactcagaaaatggaatacatagaacactagtaacacaaaccaaagtttctgcttcactgtaattaagagggcatctttctgacatgcatgctcgagattcttgnaggatgcacttanttattaaggtactatcaagaaataattaattaattaagatgtataaataaa

SEQ ID NO: 28503 - DNA, 404 bp, Glycine max
  unsure at all n locations
cattcttttngttctgnnnngnngagncaacaggcattccttgtcctgtaacccaatgattctagtcaagagaaaggagatgttctttgagtttacgatgatgtgcccaagcagtgacaatggctcttcacattgcaactttagggtgttggtgcaagttgaaaatgataggagtgcaaataggagggatgtcatgaatgatgcattggtaaaaatcgttatccttctcttgcctcgagaagcacatctgtcaatcattgaatctgtagatctttgttggacaaaagatttgcaccatacacatgtgattggatgtgtcttccttgtcatactctgaggtggacgcaagacgtgagttttcacacatgtcttcgaagtaaaagagcatgccatcattctgatca

SEQ ID NO: 28504 - DNA, 315 bp, Glycine max
atctctatatctttaaaggttatcatataagcttttaagatatctttgttatctctaaacatcttaataagaagctaaagtattatattgtattataaaggttattttattgagacccgcatatatcttggtagactaagatcaatacatgtggtaataagtttccaagtcttggaaaatattatactaatattttattgagttgtataaagatacttacttggtatgaaaatcatgtttcttatagcttacaagaataatatttcggctataattacatctgttaatggctcaagctaaataattgaactttga

SEQ ID NO: 28505 - DNA, 371 bp, Glycine max
  unsure at all n locations
nggtgattgtgactgtccctgcanacaaaaattaaaaagacccgggatctctaagggaggacagtttttttttttggtgcaaccgcggggatcgtgaaactaagggcggcccacggctggactgcccggacaccacacagtggtcgagcaaggcacgggcgacacctcggaggacaaggacaggaaagcaggatgacatgtcagagagacggctaactacaagaattcgtgcggtaatgcggcgagggaacgaatacgatgggcggctcgctctccgagcacagagcttggcacaagaagacctaacgcaacaggctcaagcaccacggtcccaaggtgcgtgtgggaatgagagcacggcgaggagcccg

SEQ ID NO: 28506 - DNA, 405 bp, Glycine max
  unsure at all n locations
naaatgactatctttttacttagattgcaancaaaaanncncggggatggaggctacggagaacagctcttttatattgaaaacacccgggggggctggtatactcaatccatcacgacggctgaaaaagataatgacttacactcgtctaatgccgagcctgcacctgttttgatgatgtactatgggaggaggacaatctcattctagggataccaccatatacggtagctctgacgcatagtgtaataagtagcaactatggaccacaaaacagagttcaatagagtatgcctatctcgagaacgcccatggtccaacacccccgtcaaggtgttccatcgacccgagggccgcaatattgactatgtccagttgtctgtgccacagtctctaagacatacg

SEQ ID NO: 28507 - DNA, 405 bp, Glycine max
  unsure at all n locations
agcttccttccttcgtcgccgactgcaacctctccgcgattgctccttccatttcattgcctttaataatcattaactagtgcatgttcccgtgcgggacaaattatgtgtgagaagtacaacttttttatttattttaaaaaagtaaatttaaaacttaagggtctaagtggataagtcatttgtaatttcgaattgacttaaatcaattcaaatagttntaatattngaattgtcaattggttgagccattaatttaaatattactgattattgattacatagactcatcgatttanattgagtaagcatcaatatgcattcttaatcttcngcatcaaaagtgataaagtttattgattagtagacctcagtaatgtccattggtttagtaaaaaaaatgtg

SEQ ID NO: 28508 - DNA, 468 bp, Glycine max
  unsure at all n locations
ctaagcttagactaagcaaacnaatctggtatccgaaccccttaattatgtatttctaggtttgagagtgaaatgagaataagtaaatttggccanactctcacctcacacaatctatacatcaatttaaacttgctcaaactgngtttacacctaaaattccaccgaatcaaaatttgactcctcaacacccaattttaccctagaaatggctctttgttcactttggtcatttgtttttctctcttgcacagcccaagctgtctcataagtcctaaatgacatttcaaactaggattaactcactntaacctccaaataccactaaatccagatttggccgtccaactctcaaaaactcactctttntccactcataacaccatattctcactttctaaccctatgttaactctacccttcatctnctaacagtntccataagcaatntcagcacataaacatcac

SEQ ID NO: 28509 - DNA, 400 bp, Glycine max
  unsure at all n locations
agctngtattccttatatcttcttcatcaatggagtcctttgcttcttgaagatcaatggtagtggaatggagaaggaagaaagattattggagacacgaattcaaggagaagatgagtcatgaacaagctcaccaccataggaagccatggataatagcttgaaggtaggagaagatgagtggagggaggaggagagaatgagcacganattctatgcctcaaatgaggtctgaactttgaagtgtaattctcaaatgatcaaagttgaaatatattgcacacataagacctctattattggctaagtgtcacacaaatgggagggacattgaattttacttgatttgaattgaattggggagccaatttggagccaaatttcactaatttgttaatga

SEQ ID NO: 28510 - DNA, 442 bp, Glycine max
  unsure at all n locations
aagaaagtgatgaggtacaagccctanaggcagagcttttaagagtccgattattcgaagagaagttcaagtccatagccatcaaagtctgaaaagagtatgatgaactaagggacgtcaatatggccaccgctgatgccttggaacgagaaaccaagaaggcccaaaaggaagaacacgtgccagcaaagttttgaggggctntatagggcagcaatagtaagctcaagctccgaagaggtgaaaggaatcatcacgggtcaaaggcatgatcttgaaggacgagctaaaggcttaccttaggtcgaaaagaaatttgtcccaacagttaagcgagactgaagggaatatgtgggccatcatcgatgagtgcaaagagaagctaaatctagcggcgactcacgagcaaaggctagaggatgagtacgccaagatatcagca

SEQ ID NO: 28511 - DNA, 213 bp, Glycine max
agcttgcattttttatttcaaagatgcactaaatctctagtacctttgagggttatgaaaggatgtgaattgtggcattaggcagcatagtaaaatctctattccagtgatttggtgatacctatgaagcacctacaccgacgcggacaccaaacacgactcggacacgtgaacacctgtgatgtgcaaaatatataacgttgtacgggtgtc

SEQ ID NO: 28512 - DNA, 466 bp, Glycine max
  unsure at all n locations
gctgacatatganagtcatctccatattctgaagaataaaatttgatgaattttcatacaaaggaganaaaaaggtatctccacgcaatagacaataggagagattaacaaatgttatcatcacaagtcaaggctaaaagattcaaacttttaatagtattatggaaagatcgagcatagaacaaagaagatagttatatgagaggcacatatacaaaattattttcagtaaaagtcaaagatatttgacattacagttgtcaccaattacatcattgaactggatgaaattccacaagccaagaatgttcagattagtaggtaaggaaacctaaggcagtattgagtatacattgtaaatggtttggattattggatattagtggaaccttattacgaatattacaaattgtactcacttaggtacaaatntcagctntttagtagtatagtcaaagaatactac

SEQ ID NO: 28513 - DNA, 293 bp, Glycine max
  unsure at all n locations
agcttcatatccctaatcttaaactaattctaacaaaacataaaaaccctaaaaatctaaagctacagttaaagtcttctaccctaaagttaagacaagaaaaagagaaaaagaatcaaggaacttacttggatggtgtaaaaatgatacttcaaagtcgaaaatgcacaaagagagtatagatgcaaaatgtgcaaatttttggagagatagaatgcagaggcaaggtttctataatctgacaaatgtgagtgtaactggctgtacactcacttaagcagttnttggatacc

SEQ ID NO: 28514 - DNA, 331 bp, Glycine max
  unsure at all n locations
gctatgtgcctgcgactggtctctttcttcccttcgcaacttgagttcactattgctaccccatagagctccgcgaaatttgttccggccatactcttccttgcgagccctcttggtctcttgttcgagggctcttgcagtaattgcattctcttcccgtaacccggcgcactcctcccgaacgtgtgtagcagccaacttgaacttctccttggcgagttttgcctttcctaactcgcttttgagagcttggacttcttcgtcctcttccggtgcttcanaattntcttcgctgacgacttttaacttggcgagccaatctaaacctcgt

SEQ ID NO: 28515 - DNA, 241 bp, Glycine max
  unsure at all n locations
agcttacttcttaggggatggaccttttcaggttttggagaggatcaataacaatgcctataggttggacctcccagaagagtatggagtcagcaccacttttaacattactgatttaattccttttgcaggtggagctgatattgaggaggaggaactaacagatttgaggtcaaatcatcttcaaggggaagggaatgatgcaatcctccctangaagggaccagtcactagagccatg

SEQ ID NO: 28516 - DNA, 376 bp, Glycine max
ttgagggtgcgtatcccaccatctgtacatagtttattatttataatgtgtctaccatcacgatgatcgtgtccctttccatcattgggggtaccacttgggccgccagatccctccaccttttgggcgtgttctttgaaagatccgtccccctttatgcaaatgttctgtagttgcatcctatccagaaccatatcaaaattgtactaatactgcctaacaaaggcaaccattaggtccttccaagaatggactcgggaaggttccaagttagtgtaccaggttacagctaccccagtaagactttcatggaaggaatgtatcaacaattcctcatcttttgcgtattcccccatcttctgacaatacatcttta

SEQ ID NO: 28517 - DNA, 314 bp, Glycine max
  unsure at all n locations
agcttatttatcagttagatncttacaacaaatatgctggggccttatctttttattgatcttgattgcttgaccttgaattaatctttgaagcaatctctgtttgcttaaccttgaatgtttgttgaagcaatcttggtttattatacttttggcatcatcaaaacctgtattcatacattaacagatagttcctcaaaggaagactccaaagaacactctaatgatgatgaaaataaacgaaacaaggattggaaaaccgataatgcctacctaacctgtgaagacaatgcgtcaatatctatttactcttc

SEQ ID NO: 28518 - DNA, 526 bp, Glycine max
  unsure at all n locations
cccgatcgatgtagtccgttganngttagtanctctcngancnatanaaanangacctngatgcttcgttgatgagccttgaacaagacattgctgcttttaatttattcgngagcgcaaggcacagggacgtgtcaaggacaaatgtctacctataacttacttcaatattaattatttatctttatattagtgccctcagttgtcccacgaaaaagaccatcatatctacaaagatctccaactacagctactaatctcagtaaaataatttcccaacgcttttttctttaataatgcgctcttgcacatgctaatctatagcctattttctaactgttcaatccaccttctagtacatcacatttggcccttttctcaaataatcatgacttgtctaatgactattgagttctcactcaacatcttctcaatctttaagcccttcacttactactcaatgatatctctacacccatagtattcatgctaacatcaacacccgtntatctacatctttagaacn

SEQ ID NO: 28519 - DNA, 328 bp, Glycine max
  unsure at all n locations
agcttgnatactcctcccctctngagaaggggaagacaggcttgacagaacaatctttgctggagtctgaagacgaattcacattctcatcctttcttgggcagggaatatctgtgaagttcacttcaagagatgaactattgaatttaaagttgcgatcaagttccctaagttctttgctttgcacaacagaggctttactactacttgcaggccacgtggatatattgtcagcatttcctcccctgacccagactttgaattaggattggctgcaattacatcaacaggttgacatttggatacagggggccttgacaggaccatt

SEQ ID NO: 28520 - DNA, 477 bp, Glycine max
  unsure at all n locations
aaacaggcggttgactgaaacctangncnctagcannnncantnnanntngtancccgngatcctctgagtcgactgcagcatgaagtttcttttttccaatcaactgaatgagaacattgctcagtcttttccctaatgaagagagaaagatgtcttcaacgttaaatgttgagtataaccagcttatttgctcattttgcataagcactaatactttttttatttcttttatgaagagttggtgatggatctaattagtagattaaacaaatttgtggtatcgccatgtcatattcgttgaggcgttgctctgtttaatttttgaatctaacaacatgtttgtgtctgatttggatgcttaagaagttgttgttaaaagtctgccatctgatttgacttatccatagaatatctgtcctgttaattcatttttctaatgcctattaatcaggtactatctccgtgaccgttggcg

SEQ ID NO: 28521 - DNA, 459 bp, Glycine max
  unsure at all n locations
agaaactcagcttgtgagttatgcttgaggagaggtcntgttgaaagcttagttattgattnttggaaagatggtgtatgggatcttcctaaatattgcggattccattagaaacatcattattctagtcccttaattatggggaagatcacattatttggaggccttcttaaatgggtactctctctttgaaagattcttatctttttttggtttctagatcaaatgaggttagttgggctaaactaattttcaataattntatccctcctttagaattgttttcctctagcatgctctttataccaagctcccaacagacgaaaacttgaagaaaagatgtataacaattgttttcaatgtgttctaattgttgcaatagcgacgagtcaacataacacttgttgtcttaatttaagttttgaaatacaataaatcacactagaaggggggtgaata

SEQ ID NO: 28522 - DNA, 367 bp, Glycine max
  unsure at all n locations
agcttcttttgtgttgaaacaatagcagcccactttgaaaagggacagtggcaatacaaatcatttgcatcttgtggaactaattttaagctatgtaagctaaaataaaccattagcatgtgtgcgtatgatatcttcatagattaggttggtgacctttattttgcatgatttggcaatgtctcactataagttgtagatcatccattaattaaaaggactgaaaggataagatgcactanataattatcttaagtcatccatgatttgtcattcatataatgtttctattttttttttttaaaacaagctgttgacttttcttatctccaataaatttatatgaaaattaccatgagttattaaa

SEQ ID NO: 28523 - DNA, 442 bp, Glycine max
tatcaaatataatatacttaaatattaaaaaactcaagtagttaccatattcaagccacagagaatatcctatgtacaaccattaaatttcaacaatcaagtatgaccaaagaaatattccacacaaaggtataactttgcaataatgataataatatcatgcaaggaaatgcatacttgactccatgaaaattttcaccaccacatgagctgttacggataaagatcaagctagctggtttcgaggaccatggcctccatagaagagaagagaagacgaaatatgtaggcaaggggtattttcattcatgattctggcttatttacatacttatttatactatcctctaataacagaattcttatctttgtgtgcaagaggaatatcacagaatcaattccgttaagcttgtcccctgctctaacagcatcatcacacaat

SEQ ID NO: 28524 - DNA, 407 bp, Glycine max
  unsure at all n locations
tcattctnggttagggtgcttcaatggaggaaaagaaagagggagagaaagagagaggggggagcatgaaattgaactttgagttgtgtctcacaagactcccattcatcanagttacaacaagtgttacacatgcttctatttatagactaggtagcttccttgagaagctttcttgagaaaacttccttgagaagctntcttgagaaaacttccttgagaagcttctttgagaaaacaacacacactcatctaaaaactaaactcacctccttgagaagctagagcttagctacacatacccctcttataactaagctcaccttcgtgagaagagaaactagagcttagctacacacccctattatagcttagctcaccccatgacaaaatacatggaaatacaa

SEQ ID NO: 28525 - DNA, 480 bp, Glycine max
  unsure at all n locations
gacacaagatactaagcttgaggattatggngtacccatcacatgtggtactatgtgttggncgggcgaaggtgcacaacaagtttcccacatccacaatgcgcgcataaacccaccatcccctgttgcccacctccaactgagctcacgtactcccacgtagcccatatcctcgtttctctcaacaccgggtccccatcaatcctcccaagtttccacaacatccaagcaaaacaacattcaaacagcataagctatcacagccaagcaaaacagagcaaaggcagaaaactctgctcaacacatcaaccaaaatcacagctgttctcacttaaagaccacagtaacaattcctttgatccaattcgttaaccgttggatcgactccaaaattntactggaagtctatagtgcataagcctacantttgaccgttgggatctactagcaaacatccaaaactcattctgtactactctt

SEQ ID NO: 28526 - DNA, 240 bp, Glycine max
tcttttttgagacaagggactacaatagcaggggtttctgtagaatggccataaaccatgatatgacacatatctctctcgtctatgtacgatgaaataaccactttggatcttattaggaggatctaggagcaattctatcaaaagagcgcagttatctaatagtatttcttaaaaacaataacgagaattattgagccatatgacgatatccagattgcggtagctagtctttataag

SEQ ID NO: 28527 - DNA, 500 bp, Glycine max
  unsure at all n locations
cgcctngnnnggtagtcatgaacgtacngcatagcanactcangaacatagaaccccacgcttcaaacctaaacgctggaactcatatcaacaatttcatttgtctcccaagcatgcacagcgaagcgaggtgcatggacatcatcccgacatcaaacggatcagattacacatatgacctctcaaatagaagatgtatcaatgaagttgaagaacttctagtacgtgcaagaaaagtatatacgatgtccttgctctaagtaggatgtaatacgggacacggaatctgagctgacatgcggacaaacagactccatatcttcataaactagacatactctaaagctctgaaccaccgagtttctcgcattgaggagacctaactacgcgagtctgcacgggtgttttacgtgaatgctcctcgcagaacacctgcaaagcacatatttctacgacaaattcaccacagagaccactaccgagacaaatgagatatatag

SEQ ID NO: 28528 - DNA, 357 bp, Glycine max
  unsure at all n locations
agcttggttgtcccgatagtatgtataatattttctttcatctcctttcatcctatcctataagttggtattaattaattagttggtatagttgtctcttcttagtgtataatgacgacaaagaaanttgaatctaaaactttgtgtaaattatccaaaccttcactatgccaaccttagtaggttgtatttgttggtgttgttgatacacaagagctaacttggaggataagtttttgttggaactgatgttgaaagaagggaagaaaaggtttaataatggggtgttttcataatctatatttacttgctgcaccatatgaagaaattggtctttcacaaaattatttattatct

SEQ ID NO: 28529 - DNA, 404 bp, Glycine max
  unsure at all n locations
gagaccaattcagagacaagagaataagactgatcaaaagggctaacaaagaagccaattgcaatctaccaaccctaaaaagctgtacctctttaatttctgtacttaacgaccccatggccagggatataacgttttcttgctttattcttcattntatcggagaaaaagcagaggtagtaaatgcaaagtttttattgagagccatanaaatttcctaacaagcacatagacaactcccttttgtttcctgtgacctttcttcccctctttntgttacttactaccatcatcaataatgatagcataacaaatctaaacatctcacatcataataatggatgaaatttactctcacttattatcaaatgggaaagccaatatacagaaaaaacacacaaact

SEQ ID NO: 28530 - DNA, 375 bp, Glycine max
acattcacgtcttttggaaagagccgctaaattaagttctcagttaggcgaatgacgtatgactgctttaccaatagttgaaactcaatccggagatgtttcaacttatattcctactaatgtaatttccattacagatggccaaatattcttatctgccgatctatccattgctggaatcagacccgctattaatgcaagtattttcgtatacagagtcggatccgcggctcaaattaagccatgcaacatgtagctggttaattataattggaataagcccatttccagaattagaacttctgcccaatcgcttctgatctcattaagctctcaaatcattaaccagatgtcacgatggcccaattgcttaac

SEQ ID NO: 28531 - DNA, 442 bp, Glycine max
  unsure at all n locations
ctaagcctcgcgaccaggggtcttcgtaatagaagagacatacggctattagcctgtgcttgttcggagagatcgtcatacatgattaaagtgtgacgttcacggtacataaaatattcagccagagctgctcctgtataaggggcgaggtattgtaatgtagctggagaatccgctgtctcagctactacaatagtgtattccattgctcctctttcttgtaaagtattcaccacttgagccacagaagatgctttttgaccaatagctacataaacacatattacattgtgtccctgttgattgagaatagtatctgtggctactgctgttttacccgttagtctgtctacaataattaattctcgttggccacgtcctatggtgatcatcgaatcaatagcaataagtcctgttagagaggctcatatacngaacgtct

SEQ ID NO: 28532 - DNA, 299 bp, Glycine max
  unsure at all n locations
aaatgtcgagatctagactgcntcggaaacnccanctgagaatgcgcagagtaatttttataccgagtgagggagtagggtagttaaccacaaataaggggttggacatcactacactgtataccgaattgataactgtcagagggtataatgattgactacgcatactagagaacctatactctttagttagaggaagtaaatgatggaagtatatatgaacgagtataattggagcggaacagaactattgaaagttgagggattaagtggaagtagaacagtaaaagaggccgaag

SEQ ID NO: 28533 - DNA, 406 bp, Glycine max
  unsure at all n locations
agctntgcttttattgactcttcatgtctggtcaagagaaccattagaagagttgtgactcttataaaaacttaaaaccaagttgaataagtcaaaaactatttgaagagttacatcttttgatttgttcaaaaactatcactagaaatcgattaccaaatcagtgtaatcgattacacaaagctttttaatgaaagaatgtgactcttcatatttgaattttgaatatcaacgttcacgcacactggtaatcgattaccaaaacattgtaatcgattacagcattttgaaatcaattgaacgtagtaaattcacgtgaaaagcttctgaaaaccattttgtactagtagtcgattacaaaatctggtatctataccagagagtaaaactctttgttaacatgttt

SEQ ID NO: 28534 - DNA, 476 bp, Glycine max
  unsure at all n locations
acactaagctagatgctaccgganagattaagaatagtggcaagctgtcctcattccagatttctgagcaactccttcaatgtttctatgagggacttagcaacatggagaggagtatgattgatgctgccaatggtggagctcttggtgatatgacccctgttgaggctaggaatttgattgagaagatgacttccaactcccaacaattcagtgcaagaaatgatgctattgttcttagaggagtccatgagatggccacgaattcatcttcatctactgaaaataaaaagctcgaaggataacttgatgccttggtcaacctggtaactcagctttccattgaataaaaatctacacctgttgcaagtgtctgtggtctatgttcttttgcagatcaccatacagatctctgtccttctttacagcaatctggagtcaatgagcaacctgaagcttatgctgcaaacatttat

SEQ ID NO: 28535 - DNA, 178 bp, Glycine max
cagggcactaccatgaacggctagcgggccgttttgacaacggaatgattgtcggaagtccatccctcacacaggaacggggagagacccttggctgcctcagagcgccgtagtgcacactggcccgaatagtacaccatgtacattatggaccgagctcgtaaaagcccttatggtc

SEQ ID NO: 28536 - DNA, 249 bp, Glycine max
agcctgaatggcgaatggcgcctgatgcggtattatctccttacgcatctgtgcggtatttcacaccgcatatggtgcactctcagtacaatctgctctgatgccgcatagttaagccagccccgacacccgccaacacccgctgacgcgaaccccttgcggtcgaagaaatataactacgatattgttgtcataggccgctgtatcgcagagcttgacattcattgatatttctggacactatctacg

SEQ ID NO: 28537 - DNA, 484 bp, Glycine max
  unsure at all n locations
nnnaaccgcggagaactggaccttgaagnacancangttaatannactccgacccgggatcctctgagtcgacctgaggcatgcaagcttcctctanangctgtagcttctggaggaagcaacctggctcgcctgtgcgagctgagctcgcctgtgcgagctgnngcggcagcatctcccctattntgctatatataggggaggaagtgaagaagaaaaggttcagccccttatgcacttctctctctttcgaatttgcttggacaaatgtttccgtgaagaaaatctaaggcgatgcgctttcgaaacgctttcctaacgtttgcgtgatgaanttcgcaaaaaggtttcacccgtctttcgcggtctccattcggtcttcatagtcttcgatcttctacgggtaagaacctcaaacaacttgtcgattattctatgaccccnggtggtccacattgcggtcatgaattcatactcggtttct

SEQ ID NO: 28538 - DNA, 452 bp, Glycine max
  unsure at all n locations
gaccatagctactcagcttcctcaagtggtattatagcacaagagcctctttgttgtgctccttatacctccatatattggttgctttaccttctcttctattgttgattcttcatttttctccatgtatctcctcacatgtcttgtgataaatgtttttaacatgattatttagagtttccactgattaaatttgctatagaagctagatttgattttctatggttcanatttcttgttcttgttcttgaaccatgaantttgttgagtttaggctcctttgagttttgtcttgttattttttgtggctgaaaccgaaaccataacattcttaccaaaatattaaagtataagacaacctcaaaaatctagagtgacttgttcacctattgtagttttgtcatagaagtcatgtctagttatgaaacttgtcacataagaattcttatgtt

SEQ ID NO: 28539 - DNA, 226 bp, Glycine max
agcttgtattactcttcaatggaaaatcaactgttagagctaaatgggtgttaatgaacttttaaagaacgtatagactatagtggacttcaaatcatgcaatcagacgaatgcatatacatacatcaaactaaatatgtgaatgaactgttaaagaagcttaagatggatgatgcaaagtatatgataacccctatgcatctaaccaatgtacttggattggatg

SEQ ID NO: 28540 - DNA, 435 bp, Glycine max
  unsure at all n locations
tagtaccttttggaagagcaacgaattaacgacgacttgactttgcncgatactccaaaaggggaggaattaattctattttgaattattatcgtcttagggtggaaacactaagtacaatgcctgttatacgttttatctcacaagagggtctaagtattgttatgttgagaaaattttatgaattgtatacggtaagattggatcatgcattcatgcataaactcacaattattgttgttgtgagcatgcgcgtaagtctatttactagtgtgggaaggtcagctgagcgaattcacgtgtgatcaaggtcattgcanacattatgccatagtagctactaccttgatatgcttatcctaacaatgtcactaattactccataatcagtattgatgttaatatccctcaatggtatatggcatgtcttgcatg

SEQ ID NO: 28541 - DNA, 317 bp, Glycine max
  unsure at all n locations
acttgtttctatacacacatactgaatcgattaccagaggagatttcagaanatttctcagcagtcacatttttcattggtcttgaatggccatcaaggcctatatatatgtgacttgagagaccttgttatcatgtgggcctttcataccgggcgtcaacttgactgggcacacttaatcggatattgcatgcataaggcattgcgattaaatggtccattgccatatccacaccttgtcactctctttcttcgncattntcaaattcttcttcattctgaaccttatgttccaatcaaaagatcctttttaattg

SEQ ID NO: 28542 - DNA, 428 bp, Glycine max
atattcatgggcaggaaaatgatctttgatcaagatagtctagacacaattgccaacaacaaagtccacagatcaatgcttctgtcagcctataattaacttgtatttttcagtggaagctatcaattgagcatgagtttgttcgtgcacctggcgaagttaggagatgaactcctcaatggtggtataggaacacacttgactagggaaacttagcaagtcaaagggggccacgagtaatcatgcaataaataacgtggaaaggactagcctggtactatgattatcgacattattgtgagaaaatatatcttgacagagtctaacatcccaagactttaaatgatcgccaaccaaaatgcatagcaagttaccaagggaacgattaagcacttcaatgtcactgttagtttgtgtattgtaagcac

SEQ ID NO: 28543 - DNA, 629 bp, Glycine max
  unsure at all n locations
acgacgagattgttcttatttccgatcagccactnngccannntncaantnanannttnctgtacaacacggtgcatcnctcntagnagntcggacccttgcagtgccatcgcacnagctctttatcttatgatanttgacncacgnatacatcanctctcgcacaatgaaacgagacattgtgtagccttcacanggttcgattagttgcccttacaaattgaaacggacgagtgacaagcatgttcactcacagggctatatgattgacgttagaaccaatctctatattgcctcatatttgccattangccacttagtacctctttttctattttcttcttattgagagtgtctgcgtgatcggaatctatgttctctaagatataatacacacttacgtgtgtcatcgctcactgctctatactcgtctctgagcgccgtatgcttctcgctttagatatttgaatactaacaaaacaattgtttgcagtttggcttcggatgctatcaagaagtctgttgatcaaaacgtctgcaatctgaatttgacttatacatggaatacctgtctgttaattcatttttctaaagcttattattgtctactatctcgttgacgtctggcc

SEQ ID NO: 28544 - DNA, 389 bp, Glycine max
  unsure at all n locations
gcatttgcaagctttattatggttnnttatgtttgcctctanttgcatggcacgatgctggtgagaatatacanccactcacaggtgcccagtttttattcnntggaaacnntccacgagtcnnncaggtttgaatttnntttggttcatgaattannaaaattttcattattcatcannaaagtntttgggttttcccatctcttcttttcccattgccattccatcctcattctgactccgttcaccctttcccattcccattctcttctgatccctttctctcactcctcattttttctaaagagagaaaagggttgtgacaacacaaagaaagaagagaaagatcagataanaagtggtaacgtaatttcatgagagaaataaag

SEQ ID NO: 28545 - DNA, 458 bp, Glycine max
  unsure at all n locations
tactcaagcttaagctgcttggacaacaacttgttctatgctaacaaagtatcctgtgatgacaactcaaccaaacttctcttggtgggaatatgtgtcctatcatgcaagatagcgtgatcactagcagccatgttttctattaattccatggcttctttaagagtcttcaacttaattttacctcctacagaagcatcaagtagctactttgactgcggccttaacccatcaatgaaaatttttagctgtataggctcaaagaatccatgcgtgggggtcttccactgcaaactacgaaatcgttctaaagcttcactcaaagattcatcgggaaactgatggaatgaagaaattgcagctttntcctttgctgtcttggacttanganaatatttctttaggaacttttccacaacttcatcccaagtccttaagctattaccttcgaatgaatg

SEQ ID NO: 28546 - DNA, 490 bp, Glycine max
  unsure at all n locations
agggatcggggtcgttgantcagttancntncntgcanantcaatnannantacgancncggnacnccggagagtactctttagtgcgagctggcagcattctattcttctttttatcaaggctcatcatcggcggggaaagctggcgganttcatggcaaacttccttaataggatggtgactttctctcagcctttaatcctttggatttcacagcatcttcatacgggataatcaccatttagggaccgaactgatgcacaaagatacatccgttatagatacccaacaacaacaatcatcacttactctcacaaagccacctgtgacgcagtattattggcttgtccctgatccagagctaactctcaatggcacacataagaggagtgtcacgatactctgcccaaccctgggataggtgattgcttgacaactccggttcaacaacattgggatgaaacacgatctagccctaaataatgcacg

SEQ ID NO: 28547 - DNA, 340 bp, Glycine max
  unsure at all n locations
attcttgtaggtgcgcagcccaccatcttttcatagtagagtaccgataatgtgtctaccatcacgattatcgtctccctttccattattgngggtaccacctgngccgccagatccctccaccttttgggcgtgttctttgaatgatccgcccccctttatgcacatgttctgtagttgcatcctatccggaaccatatcaaaattgtactgatactgcctaacaaaggcaaccattatgtccttccaagaatggactctggaaagttccaagttaatgtccaagtaacagctaccccaataagactttcttggaaggaatgtatcaccaattcctcat

SEQ ID NO: 28548 - DNA, 111 bp, Glycine max
tcaaaggagccataccaatgctggcttggtaactattgttgtaagtaaactcaatcaatggcaaacaatgcatccagctaccttgttgctctataatacacgcccgaagta

SEQ ID NO: 28549 - DNA, 286 bp, Glycine max
  unsure at all n locations
agcttagttactacgagtgggagagcgtanggtagaattggatcaagggtggaaggtgagggcgtgcatggtggaagggattttgtactgctatgattatttggggaaaatcaaagggttcaatgtggggcgcgaggtgtgggaagagttgaangggttggagaaaggtttgcccaagtttctgtgtggggctacgatgactgatttgggtgggaaattgtgtgtggnttgggagtgtcaggtgaatgggcatgaaatagagatttaatgcactgagattggagtg

SEQ ID NO: 28550 - DNA, 450 bp, Glycine max
  unsure at all n locations
aaaatgtttaaaatactttaataatattttgtttntattcctttattaatatatatgtgaggggtagagggtgtcacattgtggtatcttccaatcaaaacttgttaattaactattttttatcaacaagcagctgtgtctccagcaaaacctccaaaaagcctggatcatgaggtcgatgatcccctgtatctgatgacattgaccattccacatctatttttgaaacctgtccaggttatgtgggatgtttccctattcggactgtttaattcaaacttccccttgtacataaagcatgaagatctatctgaaatagcacacggtggtcaatgtctcagcatctctgttatacagttgtggattctataagtcaatttagattactattaattaccacaataattgctttaaatgcatacataattaactttgtcttaacaacacatg

SEQ ID NO: 28551 - DNA, 264 bp, Glycine max
cctgcggcatgcaacatgttatcttatatgttgacccgtatgtggcctcactcctaactagcatccatgtggctatgtaagaccaccaatatcgaggaggcctggtagcattgttgggccctattatttgtcgagtgtgatagttagttgtgtctagtgtgactatcaataatggtcagtgtagtatttgactatgtcaagagtgatagtcaatggtggtaagtgctataatcatttatggcaagtgtgataattatgccctct

SEQ ID NO: 28552 - DNA, 400 bp, Glycine max
  unsure at all n locations
ctaagctngactcctacaaagatcttgtagagcttgacacccatttgattattcctagcanacananctcgattcgtactaaggagttgtcgtcttgtttgtttagaaattaatctaataatctcatgtaacccgtcagatttatttataagataaatgaatggatatgtttgcctgttgtctacgggatgtgggagtatttaccaaaaataagatatttgataaagatattccacatgttgctgaggtttcccttttatggacacctgtctaacctattatgagtcgtgtctgcaacgaagtttccatcgtgttgcagaagacgtgtcgtcatccatttcatggtcctatcggcggttttagttgccaactctcttccatcctatcttcccccgggatt

SEQ ID NO: 28553 - DNA, 396 bp, Glycine max
  unsure at all n locations
agcttcttctctattttgctataaataggggaagaagtgaagaagaaaagggttcagccccttaggcacttctctctctctcgaaattgctgaggaaaattatttccgtgaagaanatccaagctgaggcgcttccgtaacgtttccgtgagttattatgcgaagattctcgaccgttcttcaagattcatcgttcgttcttcgttttcttcagacttcaacgggtaagtacctcaaaccatgcttttcatttcattctatgtacccgtggtggtccacattatgtttcatgcaattttattctcggtccatttgcttttatacccacttttgacggctaagccatttatttagtcattctcgcttatctaaaataaaataaattgcaccgatcgt

SEQ ID NO: 28554 - DNA, 479 bp, Glycine max
  unsure at all n locations
tcaagctggtcaaanagggaaaccaagttaaaactcatttcagagcatattcattatttctacttcaaaaccccttgatctacttcacattgatttatttggtccctctagaactatgagtttaggtggaaattactatggcttagtaatagtgggtgattactcaaggttcacacggactttgtttttgaaagccaaaaatgaagcttttgatgttttttgcaaacttgccaaggtgattaataatgaaaaaaggtcttaacattgtttcacttaaaagtgatcatggaggtgaatctcanaatgagtcttnttaaaacttttgtgaagaatatggaattcaccaatatttttttgcccctcagaacacctcaacataatggtgttgttgagatgaaaaatagatcccttgaagatggtgcaagaacctttctaaatgaaacaaagttacctaagtactnttgggctgatgttgtaca

SEQ ID NO: 28555 - DNA, 596 bp, Glycine max
  unsure at all n locations
aggcgtagttctgtatgtannccttanngnacatnacnnnnttnnatntggnanaccntgccgacancnactacgtgtatgacgcttgacagtctctggataggctcaatattttgctcacttattatacgtagtgctccgcacaatgaacggggattgtgtacatgtacttctttcgctctccggtagaccgcccatctctataaagattgatggtccttgctgattcattatggcgaactcaattacattgactaggatactcagccnatgtatgccattacggcgtatgtccactgttgaatattaatgtatcatcactacattactacctacgccaatatatgtattacgttaggtgtggcactgatgagtttcgggnactaattgtttcacctcatagctctggttagatgatactctgagtaccatttgctctcgtcgatccactacttactgtactaaagatcgatttcgcgagagttatcaactatactgtacgttcattactcatgcgtaagatcccgacgatacgattgtcgttctgattgtgacgcctaccttatcgtgacatagttatacagctcgtacattct

SEQ ID NO: 28556 - DNA, 426 bp, Glycine max
  unsure at all n locations
cttcagaggggatccctactcaagcactttccatctttttgcaccttaataggcctggacaacatgttgaccctgctcactcacctgtatggtctcccacctgattttatgccccccgtngcatacacaatagaacccactcagccaatggttgaggttttgataccgactaaccaaccagtttatttcatgcctccagtgaaccacaagatgacacgggtcatagaaggagttccaacgacctgttcaaatgagcaactacaaatgttggaggagaggtcgaaagctattgaaggtagtaattatggcatggtggaagctgcagatctttgttcgattcccgatgtaattattcatccgaagtttaaagcaccagagtttgaaaatactaaggaactagttgccctaaagtccctaagtattatt

SEQ ID NO: 28557 - DNA, 282 bp, Glycine max
attgaccggtctttatcactgagctgcacttgtttattgactacttgcgagttccaagcatgctcctgtcattatacagcttgaggttccttgggacttattacccacgggaaacttgaaaatctggatgccttggagaagaagctttttttaggtctatctctactaattctaatagtaaattaccagatgacgggagcaacaatgggggggatcagaatgtggacaagcaatctgcttcaacatggccgtcggactcgcctttactcgggggctttcatt

SEQ ID NO: 28558 - DNA, 453 bp, Glycine max
  unsure at all n locations
aacaagtaactagttctatcttgtaaaaaaaataatgtaactaattaactaacactaatatatagagtgactactcagaaggaatggatgagccttgattaggaccatctaatctacctggttaaactaattacacaaaacatagcccaaactcgcagcccaattatttaagttcagagattctaacttccaagctcaaattgaccctcaaaatggaagaatntgccaaagcttatttgtaacaaaattgaatttatttttctcatctttctagatactactcatacattccatttgaagttctatagtgtcctctaggccctgcacaaggcagataagtcaagtaagcacaaaatttgaaaattagctacaattctcaactaagctcaatcatttgcctaagaccanaactgagttaaggtgagaaaataagagtcanagagatgtcaattg

SEQ ID NO: 28559 - DNA, 385 bp, Glycine max
  unsure at all n locations
naaaggcgtaactatccgtagaacanaggtattagaatctacggggatcttagatcgactgcagcatgaagctttttctgacctgacatgcaacgcgtgcgagaaacctaacatcctaatctgtggccgaaaatctttatgtgtgcaataatggttatcccataatgtccaggggcgacacacttggcaggtttgttgaaacaagacgagattgcatcatcaggcaagcaaccttcatcacatatcattttgagcaccataataccctccatttggtcttgttgcataactggcaaatctcacttctttgtgagggcacaactgtctacattctttatgccagatactactgcttgtcggggtacagtgttaccaacttttcgcg

SEQ ID NO: 28560 - DNA, 281 bp, Glycine max
gacacatagatactaagctaggcgcatatgtaccacaacgatctccgttcttactttgattcaccgaaaaaatgccccattacaaacagagcaactcgcacctatatataacacgacttcaaagagatatgtacttacatacacgctccttggttaattcaatcatgcgtactcaagcgtctgaggaccaaactgacacatgcgcacatatcggtttgctatacctatcctacacaacttatgatgaactgactatcacctatagggctcatatatgctct

SEQ ID NO: 28561 - DNA, 237 bp, Glycine max
  unsure at all n locations
acggtctctcgactgcnctggagcccggcagaggatgggccgctatttttaaagaaccgggagcataacatctctcagagaagggctcccagcaggcataaacgaattcgacgaaaactgcgcatcacataatctcattgaaaagcaggctaaaaagaaggaagacggaagggaggaaagccgcgaagacgacatagaaacgcctttccgagttagaaccggagtgactagatctcg

SEQ ID NO: 28562 - DNA, 308 bp, Glycine max
agcttggttatgatgcttcaatggaggaaaagaaagagggagagaaagagagatgggggagcatgagattgaatgaagaaaaatggagagaagttgaactttgagttgtgtctcacaagactctcattcatcaaagatacaacaagtgctacacatgcttctatttatagactatgtagctctcttgaaaagctgttttgagaaacttccttgagaagcttctttagaaaactttcttgagatgctagagcttaacttcacacacccctctcataacttaactctccttcttgtaaaagcttcttatg

SEQ ID NO: 28563 - DNA, 437 bp, Glycine max
  unsure at all n locations
ctaagcttctctaccaccccatatgtctccccctttgactatatcaaatatgccaaagtntggagggaatcaatacagatgaaataatgaagtggacaaagatcaattataggttataaccaaccaaaattataaataagtcataaccaaaatataatccaaacagtcataattcaaaaccacatagaatctaaacataaaagactcaagtccaaatactaaaagataaataaagtgcagaaaatgataacttaactaccatagccaatatacaaggcttaaaagaaaattataaactaaactctaaaaaggtggaagtggtggtggaaggtccaatcactgactaatataacccacatcttcttcaagctgtgtgagacagatatccatgccggcaaagcgagtatccagagaatcataacattcgccaacataag

SEQ ID NO: 28564 - DNA, 603 bp, Glycine max
  unsure at all n locations
agcacgtggnttcggtagantcccgtcagcacttgcaanncacttnaaatnaagngcccngaggcaaccgngagnantacgacctgacaggcanngcgaagctttagctctattttttatgaagagnacaccggcacaactgcacgagcgcagttgcagtgcgtgacttgcatatttggctcgtctactctatatatgcctgtggaangacatattctacatatctctgatatctggtgaaagaaacttcgcctatggaatagacgttcctaggtgtcctctctatacgcatatgcagaagcacatacggggttgggtgtgaccatatcactactctggtctcttcttgcttgacgaataatatgtatctccatatgggagaatggacagaatggaatatggagtctttcctgtgatcccctgcatgcctgctgaacttcgagtcatagtgccattccactctttccatggttgcggcctctcaaggaggacttcccggtgatgctatccgggccccatgcaagagatggttacctgatgatatttggcgctttgcgcgacgcggattggaacataattgtgtggacattatgctgacgaacc

SEQ ID NO: 28565 - DNA, 400 bp, Glycine max
  unsure at all n locations
ggtgactctaggcaatgtctttaaaactagtctcttaaaattgttgtttctctngaaagaatcttcacaaacaagtcacttgaagaattgtgacttttggaaatgtattgtttgaaatcactcactggtaatcgattaccattaaggtataattgattacacatcaatagatgtgacttttcattctgaatcttgaatattaaaacatgtacaaacacttgtaatcgattacaagtattgtgtaatccattacacaagtgtaaaatgatttaaaactgctgaaatttgaaatctaacattctaaaacactggtaatcgattactaccttctggtattaattaccaaagagtaaaactctttggtaatgatcttgtgaaaacttccttgtgctactcaatg

SEQ ID NO: 28566 - DNA, 361 bp, Glycine max
agctttactttatttgaaaatccacaaaaaaaaaaaaaaagccaataaatcatcactccctgacaaagtctacacaaaaaatgggaaaagaaattaaaaaattacatttgtttgtctatgatcctcaatgcttattatcattattattctttatatttttatgatgggacaatcaactttactctatatatctcattgtcttgccaggtgctatgtaatcttacgattgtatcttgatgaacttcaactgaaatttggactcaaccaagttttggtgtcaaaaacaagtaaaacaattttcaacttcttggttcagctcacttgctcaccaatcaagtccaaacccattatgagaaatgac

SEQ ID NO: 28567 - DNA, 335 bp, Glycine max
  unsure at all n locations
aaaatggtgtatcaaagaggcgtaatacaactttaatggatatggttaggagtatgttaatcaattagactttacccgtatctttgtggatgtatgccttgaaaactgccatgtatttgttggacagggttcctagtaaggcagttccaaagacaccttttgaactatggacaaataggatacctagtataaggcacctgcatgtttagggttgccaggcagaaataaggatttataattcgcaagacagaatattggatgcaagaacaatcagtggatatttcattggttatccagaaaagttaaaaaggtatatnatttattgttctaatcat

SEQ ID NO: 28568 - DNA, 130 bp, Glycine max
ccgtaaacatttttaatttagacacgctatgttgaaattctgcattaactgattatttatattaatctagcttacatcattcgttaaatgcgcccattactgctctaaaatatactcccgccctcacccc

SEQ ID NO: 28569 - DNA, 400 bp, Glycine max
  unsure at all n locations
tagcttttatcanacaactcaaatctggtatctaagacccctcaatttagtggatnttcaaggtttgagaagtgaaaatgagaatggggtaaattttgagcaaactctcacctcacacaagtctataaccttaatctaaacttgctcaaactggttttatgcctaaaattccaccaaatcaaaatttgactcctcaacacccaaattttaccctagaaatggctctngccttcactntgggtcttttgtttttctctcttgcacagcccaagctttctcataagttctaaatgacacttcaaactatgactaactcactttaacctgcaatttttactgantccagaattagccttttcaacccttaaagcatcacactttttccactcataacactaca

SEQ ID NO: 28570 - DNA, 460 bp, Glycine max
  unsure at all n locations
cctntgaaagaagaaaatgccagtctccgttcagaagtgatccttatcaggagtgagtatgagcagctacgttctgagaatgctgccctcaaagtgattttgaaatgttgatatgttttgatttttgtcttttttgctaattggcaagcactgttgcccataccaagttatacctactatcaataacactcatatttgaaccctggtttggagagaaggaaaaggcctaaatggactaatatgaccattctagttttcaaattccgctcctactaccataaaaggttcattcaaagactgagccacctatctgattacaggatagacttggggagatacctggagtcacgacacctgtgaatgaggatcttangtctggccagaatgatcagcatgtgagtaatgacacttcacanagtggtcagacagatgtggtgcatggagttcattaagatcttgc

SEQ ID NO: 28571 - DNA, 238 bp, Glycine max
agcttctatactttggtttaccttgaatcaattcctgtgatagccctattgagccttgtatccctttccttgttttgaagctcactacaagccttaagtgaaaaaccatgatattaccatatccttaaagaaatttggagctctggaattgttttgggaatacgtgtgagggggttttgtttcattggacaacttgatttgttggctatgctacatgatgtactttgggccatacttg

SEQ ID NO: 28572 - DNA, 240 bp, Glycine max
gaagctcactacaagctcttaagtgaataaccatgatatcaccatatccttaaggaatcttggagctttgcaattgttttggcaataactgtggcgggtttttgtttcattggacaacttgtttcgctggctatgcttcatgatgtattatgggccatactcgatgtacattgtatattggttaaatgttggacatgctgaatgaaatgctgtgtctcacacgctataaagtaaaaaaaa

SEQ ID NO: 28573 - DNA, 470 bp, Glycine max
  unsure at all n locations
naaccctagtacgtacgtctcgtanacaanaanaatntaantccngcggtcctctaagtggacctgcggcatgcaagcaatgtaattgatgcagatatnacaacgctgaagcagggttcctatagattcaaaaatggggtcctgaaccttctgctttctcataccagataattcttaaaacatttgaacaggttaccatatattcttgtactcgtgccttttttttccctttaatagttaatactcttgagccactaatggcggggtcgtagattgcggtacttctggtttcctgtgacattctttgactaaacatcatatatgatcactgtctccttcttaaaaaacaaaatccctaatgggaattgaattgtggatttagacgatgaatggtacacacttgcgaaaaatataaactgtaataaaggccaatgaaggcatttactgcaaccaatcttgatatgatgtcg

SEQ ID NO: 28574 - DNA, 204 bp, Glycine max
gactgcgtaaatggactcataaaacaattataattctgatagaatagtttgtgcgcggtcttactgtagacaacatatgaatgccgacgggggtatgagagttcttatatagatttggcagatttctgattctggtgcgttaactaagagaatgcgaattattcccagtatatggtcaaactccaaaggtccagtcagtctact

SEQ ID NO: 28575 - DNA, 383 bp, Glycine max
  unsure at all n locations
naagcttttttatgttatgttgcctttaaaagatgttgacagcatatgaatagaccagcctctggccatatgttattaagtattaattacgagcatacttaggcctaccaaaatttaacctaatcaggcctatttcaaccggtagttataaatatgttaaattaatttgtaagtctttatattatttaataaatttaatcaagttctttaattatatatttcttttatatgagtctatgaacttgcatttatattctaaataagtcccgttattcttaattagttccttgctaagacctaattaaatattagatacaagtctaacgatctaattgataaaaaagctaagaattatttaaaaataaataatagttcaaagatta

SEQ ID NO: 28576 - DNA, 305 bp, Glycine max
atccattctctaacggtttctacaattacctatcgtacgtatacgtttgggccaattactgtcatttgggccttatggtctgacaatacccgccgttcgagaatggtgattgacctcaatgaggaagataaagaacggtatccacccgagcacatgtattgaggattttggaaatcgaagaagacactgagcaagtgggtttggaagttgtctctataggagacgtggctttcaatggcgatggagggggcaattctacaaggtgatgtggtgaggctgaatacactgcaatctactaaacatcc

SEQ ID NO: 28577 - DNA, 278 bp, Glycine max
acttgttctctttcctgactcaccataaaccttgacccagggtgagaatgccaatccttaccctcgaaagcaagaaaaaagaagagaaggaaaatttccaatcaaaggaaaaaggagaaggagaatttccaatcaaagaggaagcaaaaaaaggagagaaggaaaatttccaatcaaaggaaaaaagagaggaaaggaaattcccaatcaaagagtgggagaaagcaaaaagataagaaagaaaattcccaatcaaagaatgggagaaagattaaaag

SEQ ID NO: 28578 - DNA, 404 bp, Glycine max
  unsure at all n locations
actaagcttgtgctgagcttgtataccctaatttcgtccggggactttgcttttgacatgcgacctttgtttggtccttgtaaggtgcttggcacccatcattangaaatttgtgaaatttcgggacatgccgaaaaacaaaagaaaatattgatgcacaatccgtaaggttccgtgacacaccggaaatcaaatggaagcatcgttgcataattagtgaggttccgtaacatttcgtaagtcaaaaaggggatgattatgtaatccgcaaggttccgtaacattacggaaagaaaacaagtatcgttacgaaattcgtaagtttccgtaactttacgaataaagaatcaccaaaaaaaagcagaggggggtatacttagtaaaaataggggtgcaaatagcaa

SEQ ID NO: 28579 - DNA, 360 bp, Glycine max
  unsure at all n locations
agctntattatctctggtctgggagacaaaggtcaagtgttcgcgatatgcgaagatgatgttccaagtactttggatttggtacgaccatgccctcctgatttccggctgggaaattggcgagtggaagaacgccccggcatttacgcaacgagcataatgtaaacctttacggttttaaaagctctatagttgggcctatgctttagagtttttccttttgttaaggctttgtgtctnttgtttttgaatttataatacaaggatctttcttcatctgttcctggtctctacccattctcattcatttgcatgtttacttctttttctgaaacagcagatccgatgacgagtcccccg

SEQ ID NO: 28580 - DNA, 408 bp, Glycine max
  unsure at all n locations
tctgcgaagccacatgattattcatgtctatctgatgtaaccccttccttattgtagtgaggagccggatcttcaaaaggcaaggacaatccctggcctaggaaatccagtgcccatactctagtgtcacgccccagatctctcagttgcttctcataatggaaagagccaacaccaaaaccaggaagaaagagaacatgtggggaatccacgttctcacaccctgccttctcatagtacacgttaagcttaggcttccattcccaaaagcaactacttattggagcanccattgacccatctggcagacctggaatgacaactttgttagtagcaaggtcttctacccctgcaatatctgctacatnctcttcancaccaattacatatccatcgcaactttcacta

SEQ ID NO: 28581 - DNA, 333 bp, Glycine max
agcttgttttttggctagacatgatacatatcagggcttggtttggttcaaggataaaatggatgccccacattatttccatgacacaaatgcaaaaatgatgatttggaaactctatgcaaaactggtcatgcatgcgcctatgcggacgctcaagtgtcaaatttttatggtcgggtgatgctatggttcatgattcatttctctattttaaataacccaacgtttcaaaatatgttttttatcaatttgtgcattcatccgagtccattttgggcgtctgggaaaatcctcacaacattcaccctttacgtgtatacacattttttcaaa

SEQ ID NO: 28582 - DNA, 385 bp, Glycine max
  unsure at all n locations
tgtagtgaggcttggctacanaaataataggtttttctatgttcgaaaggctcggatnctaagagagcacagatcccaaacttatccaagtagtcttttcaatacaattagcttattcactagcctttcattttaacttgtatttgaccttattacaacgacacacactatctgtgattgctttttttttttcctcttcttttttattgatgtaattggtttgtaacacaacttatttggagtgtgtgctgatgtgctttgccttccactatacatcgcggttaactccgccatatttagggaaaattttcttgaaccatcttgatgcaatcctaccctcaaggacattggatagaagactccaagaagattgggccaaagatgc

SEQ ID NO: 28583 - DNA, 303 bp, Glycine max
agcttttattctatgtagttaacaaactctaacaacagtgtcgtgactactgcaactaactacccaacgacctaaccaactaacccttggtccatacaaggcatgactcaacttattcatgcatgcaactttacgtgagagatgtcttcctgcatcttctttctacacatgtgatcaacatgaacttaaaggagattccaaatcgtcgcactcttatggtcagaatcatacatcaacttaattcatgacctcgcttagtaaaattcataaacatcattcactttcacaatatatatgcacaac

SEQ ID NO: 28584 - DNA, 384 bp, Glycine max
tctgcaccccctacctatgaatgtaacatctaagtaaagctagtgaattttatcgaatactcatgcagcgcattaatgtccccgagactatattggctttgactccaacactggccccgtacatacgttcctcattacactcaagagaaagtatcgttatattcttaatcaaaaatagtagcccttctagatttcatatagtgataatatatgactatatgctctattctataaggctattttaaatcattatctttgcatctgtagagacataatatttctgctatatactacatattgtaaagtattaacaaagactgactaaacattattctttttaagctatatcattcatataacgcgtctttctctcttcatgtctat

SEQ ID NO: 28585 - DNA, 370 bp, Glycine max
  unsure at all n locations
agctttatttctcaaaacatagagccaaattactaacataccaattcaacaattccacaattcaacaaacttaggcatattcaacaattgtacattcacgaatatattattttataaatattctttcattacataccaattcatcatcattactttcttcctaactaattacaaaatgacaacatcttattgacttgcaaaccaccaacaccaaattacagacctcggatacataatgcacacactaactagcaaagacagacccaacacacaaccaanagaatccctataaatttttccttcctcttcatgtccctgatcctgctttgcaaatcttttttcctcaactcccattcttcaactttcttca

SEQ ID NO: 28586 - DNA, 456 bp, Glycine max
  unsure at all n locations
ggattnntttacaggagaaatatcatttagattttgtgtattananaataatccgaaaatctttgaaatatttacagttcaaataaaattacattccataaaatgatattttatgtaactaaaacatataagtaatatatttagatataaatatacaagtactcattcaagtgagtgagaacaatttgttatcccattaagattagatctaatatgttttatgactgtacaattatggatacaatacctcatccattgtcaatctaattatgattatttctctttgtattgttcacaatttgtatctntgcgaatgtgttatgtccttcaaaattattgatatattcccttccattgtaactaatctctaacaatagcacacccaattgaaactctatgttttgaaaattatttgaaacaaagaatgataattgttaacaaaaatatgatgacata

SEQ ID NO: 28587 - DNA, 435 bp, Glycine max
  unsure at all n locations
nacgcgttcgtttaagctacngcatacannncaatngantnggtcccgngatctctaagtcacctgctgcttgcaacttctttttcatctcattanacatatgaatgggtgtgttggtgcaatcanattactttgaacctgtgggtttagaacccaattagaatggtccaaactggctctactaaataactgaagttgaacctactgggatctttgataggcatttaactcttactctggtgggaccgaacttattattgcactctttttataggggagttacgtttgtgatcctggtgtttcctcttcgcattaagatattccaaattgggggaggcgcatgcaagtttttttatgaaacctgggaccctaaaacggctgatacttgtctaaggcatgggcggttgaagcaccaggtctgtatccttgtcaaac

SEQ ID NO: 28588 - DNA, 481 bp, Glycine max
  unsure at all n locations
gccccgattgagctaagatgactnantgtcggnaccatagaatantaagctncgacggccacatnatcttgtgagtgatgcatggctctgtatcatctcaagangccgngccgcctttgtgttggtcgcacgccactgagctcctgctgttgctcaaaataaacatgatgtccgcaaagcttatccaattacttttaagactaattattttgttagtatacccacaaaagaacaaaacgttgatttcactgtttataaattgacttttcaaaaattattacgaataaaacgagtgtcttatgtgttatcagtaggaatcttagatgcttntgaaacgtgtgcccaaattggaggaaatttaaaatcacaaattatgtcttaaactttttggaagaaatatttttctcaatgtagcaaactcactttttatcttatctaatgacatgttaaaacattattaatagaataatctattatcaag

SEQ ID NO: 28589 - DNA, 395 bp, Glycine max
  unsure at all n locations
ttcttgcttatacaagtaactacatttgtttttgtacaaaatgaagtagctgactaaatttcactaatatatacagtgactactcagaaggaaatgatgagcctagattatgcccatctaatctacctaattaaactaattacacaaggcaaagcccaaatttgtagcccaattgttcaagtacaaaggttctaactgccaagcttatttctgancaaattgaagctctttttcttagatttctaaggacttctcatatgcctccattggtgttctgtagtgtcctatatgccctgcacaaggcagataggtcaagtaagcacaaaaattcaaaaataagccataattatcaattaagctcaatcatttgcctaagatcaaaactgagttaaagt

SEQ ID NO: 28590 - DNA, 432 bp, Glycine max
  unsure at all n locations
agaaactcagcttagtcatggtatcgtaaaatagtatttcattaactattaaaaaacgcgactttcactaaatcaatgggagaactagcttcatatattctaanataatattctacaaccaattctctctttctttctctcccatgtattctaaatgaataacaaataaaaggaaatcagatactattactgtacaagtacactgtaaatacacatgcagacacatttagagaatgcaacaaattntgtaaatatagcaagcaacaactaaacattatattattatatcacacatctgttaatacatatcataattctgtcctggtccaaaatagagaaatataaccacgttgctgtattcaacagaaagtttcttcacatttgtcttcaactctttttgtanaacaagcagaacctatatggggcattatg

SEQ ID NO: 28591 - DNA, 485 bp, Glycine max
  unsure at all n locations
nnncgcggatgagtcatgaagnctngacaatcacggcaattcagctcggacccgggatccttagagtcgacctgcggcatgctagcttggttgtagtcatacctcacaaaatatatatatatatatatatatatatatatatatatatatatatatatacatatatatatatatatatatatatatatatatgtgtaggtggagagataccctggatatgcgtgtgtgtggcaaaaaaaatatcacacaatatatatatgtgtgtgtaggtggcaagatacctcggatatgcgtgtgtatagcacaaatatctcacacaacatatatacgcgtgtgtatgtggcaagatacctgtgacacacatgtgtatagcacaatacctctcacaaatatacgtgtgtgtatggagaaaaaatacctctgaaaaaaagagagcgcgcgcgagaagagtatgaagaaaaaatataatgagagagaaactttcg

SEQ ID NO: 28592 - DNA, 439 bp, Glycine max
  unsure at all n locations
tccttntagtgcgtcacgtntaanaccgagctcgatggttgtgcgagcctttgatggtactcggcgggaagtgatgggagaaatcgacattcccattcagataggcccccacacttgcaatgtggtgtttcaagtaatggatataaatcccgcctatagctgcctcttgggaagaccttggattcatgccctgggagtggtcccttcaacgcttcaccagaaattgaagttcgcagtgggtagacttttagtgatagtgtcgggtgaagaggatatgttagtgagttgcccctcctccgcaccgtacatagaagcggcggaagaatcattggaaacggctttccaatcctttaaggtggtgagctgcgcctcggtggaaccaagtccgtcgctactttctctctccaacgtggccataatggtggcgcgtgttatgctc

SEQ ID NO: 28593 - DNA, 664 bp, Glycine max
  unsure at all n locations
aaaaactagcttggttgacggattctngattgntntcntagcannnancanannnananaatncntancnnngngtcgcanngangnaagacgntcganccgagaatgtcgaagaacgtcttttattctttatttctctagaacgaccgaccagagacgggcatggtgttgtggtctgatacgaaagaaccatcactactccgtcatactcaattatcacacatcgcaggaagcgtcatgangcgcagacagagtactctgcgtaatctcgccgtcaaatattatatggctaatagtacggtcacctaccatgtctactccatctaagtaagtactacatcattgtagttgcacgacacaatgactattcatgtacatggtcctactctctctcattgtcggtgagtatcatctatgtatgatagacactataccgtaagttacgcatcgcgtcaatcaattatcatatctacttactaagaccttgtgaggccacacgactccctgntaatactttatactgcacatgaggtacctatgcgcatactatgtgactttaccgaggcacggtgatcgctcgctgtcaaagcatggtatatcgcactcagacagttaacaagccaccctacacgatctgttactcactactcgtactctcataccg

SEQ ID NO: 28594 - DNA, 359 bp, Glycine max
aaaaacatacttgacgatgttttctatgttcatttctacaaaggactagtctagctctgacattgtagtgtcagacttattgtcattaaatcttgcatgaatggcctcttccacagtcaagggtctacagttataaactctatatgccttggacaattcatagtactcaagtaagattccaaaatcacatttggaatcaaactttccaaggttatccttggtgttaagatgatacactaacacccaagtttcaattatggtgaaaccattctcttcacagatttttcaaagatcatttcaaactcgccccatgatcacttttgatgaagagatcaaatgccttttcatttgaatctttt

SEQ ID NO: 28595 - DNA, 520 bp, Glycine max
  unsure at all n locations
gtgcaaactatctccaaaantttcagaatngcananncncnagcnngagactcgcgagatagtgtantacccgccagactnaaaattagcttgttactttctcaagctttgatggtacgccgctggatatgaatgtacaacttgacttctccattcaatatgtacaactacctgtgccgtaagatggactgtcagtgactgaatctcaccgaggtgagctcttatccaagacacaaagctaacttcgctgggtgaggactcatcaggccgtgaaaggatcgtgccgtggtagtcaggtttacttgtatggaccttgtttgctgtagatgaatggttattcgagagacaatgcctcgtgagacactacataagcgtggtgtcagatacatgacaacagatatataactttttaccggggtgaggaccgcttttgcgaaacaaccaactgcggttcttgtttctagagacttgacgactctgtgctgcatgtatcgctagtaatatgcttgatgccgaaacg

SEQ ID NO: 28596 - DNA, 275 bp, Glycine max
  unsure at all n locations
agcttgatttgttgtcataccctacaaaatatatatatgtatgtgtaggtagcaagataccttagacatgcatgtatgtagcaaaaagatacctcacaaaatatatatatgtatgtttaggtagcaagataccttagatatgcatgtatgtaacanacagatacctcacaaaatatatatatatatgtatgtttacgtagcaagataccttggatatgcatgtatatagcaaaaatacctcacaaaaatatacacatgtttaagtagcacaatac

SEQ ID NO: 28597 - DNA, 323 bp, Glycine max
  unsure at all n locations
tcactctggnctctagctgaaatcttgagtccattggagcatttaatgcttgcatcaaacgcatgtcccttcttcacgtaaagttcatgctgataggtttatgtgtctagtactccagtaaagaggtaacttctttcaccataccatatatgcaataacagagtgtgcctcttaataagaatcaacgtctttcaaactgtggactgtaggaaatatgttttttggggaagattcatcaatggacaaagagaccacaaggtgagtgttttacaaaataatttggggaaaaagaatacgaaataggaattgatatatcatctacc

SEQ ID NO: 28598 - DNA, 338 bp, Glycine max
  unsure at all n locations
agcttagttatttatggtctgcttagcgcttctatgaccgcaaggaattgcgcttanttggcatgagtaacacttagctcaatgaaccccaattctggccgcaaggaaatgagcttagcggcgacatctcgcgcttagctagtgaatacgaggcgcttagccagtaaatacgaagcgcttagcgagaaggctattgcttagccatattcagatcgaattgaaatgggcttagctcaaccttggccagcttagcggaccatatcaacttgagatacaagggttgagcgcttagcgctataaactctccgcttagcgtatgacaaaagatgcacttagca

SEQ ID NO: 28599 - DNA, 472 bp, Glycine max
  unsure at all n locations
cctcaagctgagacataccttcgaccgacacggccgtgtntctgtttatgcccttattctttgcgggctgcagccccggctccgcttccctaactgtactggaggcggttgccgtggctttatcctctatggttttctggagttttaacatgacctccgagatggaagccatttgatcttttaaggccgatagatcggccttcatctgttcctgcacgccctcttcattatccatttatctggatcgagtgttatatgggtgccttggtgtattcttagctatgatgaaattcctaaagaaataaactacggtgagtgtgccaccaaaacatgagtatgctaatggatgatctggacacttggatccaccccgagggttttagataacgtaatgagtccagaacttctcattttataaaaagaacacagctgtcatctagccaagattatacaaatgtgttacaagagaacc

SEQ ID NO: 28600 - DNA, 393 bp, Glycine max
  unsure at all n locations
agctntctcttctctcagtctttgactctaggaaatatttcttcagaaacttttcaacaacttcttcccaggttttcagactgttacccttaaatgagtggagccaccttttggcttctcctaccaaggaaaatganaatagactaagtctaatggcttcatctggcacacctgcaatctttatagtgttacggatttcaatgaatgttgccaaatgtgcataggggtctgttagtcgctttatacgactaactntggtatagaaatcattttccaaagtttgtatagttccccaatntatggttattttgtagtgaattttgtaaataaatcttgttttatgggtaatgttgactctagaacatttccattgcatttaatgatgaaatttat

SEQ ID NO: 28601 - DNA, 354 bp, Glycine max
  unsure at all n locations
gaaagtttatcatttcagtttcttactatttaaaatggatcatttntaaggtccaacgacttanaatgatcacctttcaagtaaaaagaatcacttgattcacgcataagaaagaactacataggtctgatttcctctttgatggagggtacgtaggagcaaaagccccgcttttgtcgacctcaaaaaataaaaagaaataaagttaaggtaacacaatttccacaattctaaaaaataggctgttgtccttcaagacaaacgtaagaggtgctaataccttcctcaaccgtaaatacaactcccgaacttagaattttcatttttgatcggtttccttcggttttcccgaca

SEQ ID NO: 28602 - DNA, 291 bp, Glycine max
  unsure at all n locations
aagtactactcgtactttcaaacnnaaaaccggctggaacttatgacgcctttttttttatngaacaaggcagagtggttactcagaagaaagctatcggaaacgaagcaatatcgtctctaccctgctaaaccaatgccaaccatcggaaacatgtttccaccttaatctgcgaagtgtttaaaagatttgtgggatcaacggagcccacttatgtcgcctcaaatatatcttgtgtaagtcgctatctacacttcaaaaaatgcaagaaatggtatcaaatactcactg

SEQ ID NO: 28603 - DNA, 286 bp, Glycine max
agcttctctcttatttactttctctcaaactaagtgggagaataccaattactaagtccttattaactagacaattgaggtggtgcatgtttacatgtgcatccctacgaagcaatagtcaaaaatcatcaatcttatttttcaagcaactaagctcatgatatgatgcatgttcaatattaaacctgtagatattacctatttttctacctatgtgaacaacctcactagtatttgcttcacaaatgaaacaacaattcttgttgaatgcaatattgaagccttt

SEQ ID NO: 28604 - DNA, 185 bp, Glycine max
cacataaaactaagctgagctagtagaataatgatagcatgtgattttagccgtattcgtatcaaataaacattaagaatgcaatatctaggaagtgatcctacgtcgtctcccaacgagtaatggtcaaccaaatgttcataacagattgtaataaaacaataacgaattgcgggggggggttg

SEQ ID NO: 28605 - DNA, 356 bp, Glycine max
tatcacatgacgatgtgtctattgatttaacctctagatatgatcgtgatctcgtaccttttccagttaatggatgtctaatgttggctcccagtcgattcagaggaatatgctagtttataactaatcaatcaatactattatatgttgaaagaccgatcgccaatgggcttgccatgtagatgtcttgataatctgacatttcgcaaatattggtacaatttggaggcaccgctcgaatacttctaaccttttgttgtcgacctatctcaacaacttgcagggcttttactttcttcccaatactgttgtagtcaacatttagagatagatccactctattgttcacatacacg

SEQ ID NO: 28606 - DNA, 321 bp, Glycine max
agcttgtctcattgtttatgcgagacagagaccaacatgttagccatcgtcagcaagtaccaagaagaattaaatctagccacggcccacaagtacaaagtggtgaacgagtatgcccgagtgtatgcggaaaaggaggctagaggaagggtgatcgactcgttacatcaagaggaaacaatgtggatggaccgatttgctcttactttgaacgggagtaaagaacttccccaattgctagccacggctaaagcaatggcgggacacctactccgccccaagcttctcagctcgtgctagggactcttccaattcagcact

SEQ ID NO: 28607 - DNA, 331 bp, Glycine max
tataagtggtaattgactcactctattataatttactaattttttggtatttcttacataaaagttgaaacatcacaatcttaaaacgctcaaactttgaaatagtggtaaacaacaattattgatgtggatttatatgtatgtgatttcagggtcattggagctattctcatagtaatgggactttactcagttctgtggggcaagcacaaggagaacaaagagaaagaggcagagataactattgaggtattgaagtgttgtttacagaatgggatgacattggagactatggtaaaagatgtcgaaacaaacaatgacattgacatgc

SEQ ID NO: 28608 - DNA, 468 bp, Glycine max
  unsure at all n locations
agagtttgcgttcgtatgactgcaanncttnggaangncncgggctcctatgagtcgactgcagcatcaagctttttttcagtttttatatgaatgacactctgggagtaggacgttgtacgatccaactcgggccgccaatggatgaaagcaagagagatttctaaaatctgccctgtgatgcataaacttgcgtgggaaatgggcaccagaatattgtgcttgtgcataaaatgcttatgcacggtttggttggggaaagggttgtacatatttgggtcttaaacatttctatctcgatccatcagtcaaaatgtaacctatggacttaggaccttcagtgaattttgaagtgattcaccgggaacgaatggaatgattaaatgtttcgggggatgtgaataaaaaagcgtggaatggttgcgtttggcaaagatccgcctctccctgttttgctggttcgatacg

SEQ ID NO: 28609 - DNA, 265 bp, Glycine max
gtcttctcaacacgaacctctactgaggtttcaactgtcttatctgggatgaactcttacgctgagggagctggtggtgctactgctgctgattctgcatcagcagtatccttacgctcctctgattcttctttcacttattcagttttctcctcagatttctcttgtgctggatcctctttctctgtctcctttgccaccacctcctaggtctctactggaacttctttacgctcctctgaggctacttgtgtaggtgctttct

SEQ ID NO: 28610 - DNA, 300 bp, Glycine max
tcttatttattattttaactacaccaggcctctcacatagcaatttgtcaattgatttaaactctagagatgatcgtgacctgtcaccttcttctgatattggatatctcatgttggtttccagtaagttgagaggaattcctagctttttaacgaatcagtcaatattaatatatcttgaacgaccaatacctacatggatatggcaacttaaatatctttctatcttgaatatttccaaaaattttcttacaaacttggaaagaagtgtctgaatttaatgtcacaccttttgatggt

SEQ ID NO: 28611 - DNA, 493 bp, Glycine max
  unsure at all n locations
aaaagagtgtctcgtactngtaacttcngcananccntgngattngnacncggtcccgggatcctctaagtcacctgacgcatcattcttattttaagaaancagacgcgacaagggtatgcgaaatcactaggctacactcttaccacaagtcgaacgcgtatgatataaattgattctttcgggacaaatacatttaaatcttgataggatttctacatcaataattgccagccaactaagtcattcttttttagagaggccctctaataagatgatgcattgtatcagctacactatgtgagcattacaagcttgcttccaaccaatggtgttgtatgcgcactacaagtaaacatatttactattgatactctacatcattcataagttacgcaatcctatgcagaccactgcacattgatcaactttgtaatatacgctttcacacttgaataggtagaagagaaatattacctattcttacaccccc

SEQ ID NO: 28612 - DNA, 247 bp, Glycine max
  unsure at all n locations
taatctngtttggattgatggngaccccgtgttgagagagacgatgatatgggctacctgggagtacgtgagctcagttggaggtgggcaacatgggatggtgggtttatgcgcgcattgtggatgtggaaaacttgttgtgcaccatcgcccgaccgtcatctattaccacatgggatgggtaccccataatcctacaagcttgagatgaagaagagtagaagggtgaaacttcctgcttttattg

SEQ ID NO: 28613 - DNA, 433 bp, Glycine max
  unsure at all n locations
agcttagcacttatantcactactnggtctgcgaccattttatgtttagccagaactaagcttactgatttcaagatgatgatgtatctgaatctgatcaagttatgtttgttcaattggtgaccgctgaccatatacaaaataaggaaaagaaagtactattttttttaaccttttatacttgcatatggttcctgcctggttaagttttttgccacttacaaatgatttgattgaagccaaacttatgcatgacagctttctttagtggttgcaaggagaggaagtataaaaagtttatctttggttaaatgaatgttttctctctaatttatttattacgtaagtttgatgtagttctctaagtttttacatcgattcaaatttaattcttttgttttaataaaattaatcatgttagagaatctgtatt

SEQ ID NO: 28614 - DNA, 414 bp, Glycine max
  unsure at all n locations
ctagctccatgaactntaaacttaatatcggaagcgctttagttatcgtctcatcttgttgtccatcaatttcttggcctatatcactgtcattctagcaatntaatttaactcatttctatcctaataccttgtctaattgtcagcattattgcaccctgtaaagcctcacaacactcattgttgtttcttaccttttacattggacacttccattccataacatggataacgttggatttcattgttcatctatgatgctgtgtgccacacctgaacctatttggcaatgttattatgctctattctcttcggttattatatctgtgtcataattttggaggtcacattgagccttctttttctctcagagtcaaaaaatacagggctgctatatactgaattgacagtcaa

SEQ ID NO: 28615 - DNA, 186 bp, Glycine max
attatctgagtagtgtttggaaaatcatactatgaaactcttcatgcttgtttgaacaactctagacctgaccaatctgccacaggtattcatgaaaagcttagcatgatccaagactcttccactggccaactttctatacaaatagctctcacacgtcatgcgttgaacatactcataccacac

SEQ ID NO: 28616 - DNA, 406 bp, Glycine max
  unsure at all n locations
agcttgacgaactttctatattcatatagtatttgcctncagaagtcccattggcatctctgtgtttcaaatggtgtacgaaaaagtgtgctacctaccaatggagtaagaaattaaagctcattatgccatgatgttcctcaactatatctatatatcatccagagagaaaaggaatgtataactacaataacttacaaaaatatgccacaacgcatatgatatatccaaactctacaaacgaagaacccatatgaaccatgacaacacaatcctctacagagaatgtatgcccanactactattagtgctctacaactcaagattaaagatgtttcttggaaaataacaacaagacggagtgtgctctttactatccaagacattaagccatatggtggtatat

SEQ ID NO: 28617 - DNA, 288 bp, Glycine max
gctccttcaactgcacaaggctcttaatatatgaagagtttttttgtggaatcttcactttatgaagacactgacaaagactaatcttctacttttatgacaaagtatgacaagctgtgggcaaataaatgttcttcccatcagaccttggatgcaactgtaatcgtatcctcatttgagctaaatcttaacgaggattcaagccatcctttgtcttgcctcgaatgttaaagagcatcccaatcacactgtcacatacatatttctgtacatgcttaacatctatac

SEQ ID NO: 28618 - DNA, 355 bp, Glycine max
agctttgaccttctgaatttttatgacttactcagccagatgaggcaacactcttcagcttttgcggatggactccagcgtttggctcattactttgccaatggccttgagacaaggttggctgctgggaccccatcatacatgcccctagaaggaacaacttccgctgatatgttgaaagcttacaaactatatgttacatcctctcctttgcagaggttgacaaattatttggcaacccagacaattgttagtcttgtggaaaatgagggcagcggtcatattattgattttggcatttgctatggttatcagtggccatgccttatcaagaagctctcagaaaggcatggtg

SEQ ID NO: 28619 - DNA, 418 bp, Glycine max
  unsure at all n locations
tttactcatattgtttatttaatttattatgttagtaagaattaaatgcaagctactatgggtgagttcacttggttgagcaattgagctgaaggatcttcttanattaatgataatggctgctcatgatagtagaacaacaatttgactacccatanacactttgacagtcaaataagaaggtgaatccatttttatgtcatatatgtgagttgtgtcgacttgagaataacacattanacctcgatntgtctaagatntgaggcgttgaggtgtgacttcaattaatctatagtggtgtaaccttgttgggtcctaattagacataaacctgatttataatatatatttgtgtaaatatatgtgagtttggacgcctaanaggtgttttatgtcccacatcaattatgcgagttgt

SEQ ID NO: 28620 - DNA, 394 bp, Glycine max
  unsure at all n locations
cagcagagatcaaagtaatgggttggatggtcaacccaatgaagagccttctgctcacttggccacctatatatagatatgcgatactattaagacgttatgtgagcctgcggatgcatgcangttgagtgtactctcattgtctatatctgtggaaccgaggagatgacgtcattgatttaatggatacagtttgatgtcacggtatgaagcgatagaaaagttcttaaaaaagtacttcctcgactcgaagactgctagatgaagagctaacatctcttccttccaccactttccagaggaatcgctgagtgacgcactctgaagattcacaggtttattgcttacgactaccattcacaggttatcagaaccaatacaactcaacatattc

SEQ ID NO: 28621 - DNA, 292 bp, Glycine max
  unsure at all n locations
actcagctgcatgtgctgctgagcggcatgctagacaatggctttttgaccacattctagccttcaatgcgcgctaacgncatgcacgatgaactgattacacctcggctcttcactaaacagcactgggcgctgagtgtgtggtacaattcttatacatctttcattctctgatgagcatctcaaaatttacttaataaaacgcaacattgtgaaagaccaacgttacattcttaatataaaactcaaaaaaatcttaattcctatcttttaagtcaaaaaaatatcaaag

SEQ ID NO: 28622 - DNA, 405 bp, Glycine max
cacccacacgaaggggggaggagagatactgcactcgatcacccccggcaacgaatgtattatcaaagctgacaattgaatttacaacggttcaattaatttcacaatggggcaatccgatacaatctattggcaatctattaccaatgctgaagaacactaagagtcccagccagaggagaaaagtgccacctataactgaaatgcctgagcgtacacataacaatgacttggttatctattacctgcgacgtagtgaggatctaaaaggcaatatctggcaaattaatggatttctctaattcatacagaacgaaatctgatgtggtttctagccctaacagaggcagcataacacctatcgttacttgatttaaattgctcctcgactcactgtatacctcg

SEQ ID NO: 28623 - DNA, 432 bp, Glycine max
  unsure at all n locations
agcttattcactttgcactctatagaagtgttagattgttgaaatccaggagcctgagacaagtaaacagtctcattaagtaagccattcagaaaaatattattcaaatctaattgagcaagatcccactgatttgaaatggctaaagtaaaaataagtctaatagtaattggttttactactggagaaaaggtttatgaaaaatcaaacccttggacttgattcaatccagtggcaactagaggagctttatacttatntattgaaccattttcgattttttcatcctaaatacccactggccttccaattagatgaaagaggtactagtttccaagtatgattcttcatcaatgcttcacaatctagttgcatagatgacaaccagtttggataagtcaggcatgttcacattctttgttcacaacgagt

SEQ ID NO: 28624 - DNA, 375 bp, Glycine max
  unsure at all n locations
tgcccagagaaggagtccacggagganatgcttttcacatcatatgactggtttgcggttnctaatgactcctctgcagcctccacataaggcatagaggatgggcagctcaccaagatgtcttcttcgcctgatacgatgaccagatgcccttccactacgaatttcaacttttggtggagtgtagagggaacaactcccattgagtggatccacggacgccccaacagacagtctgagggggggttaatatccattatctggaaggtgacttgacaagtgtgagggcctatttgtactgtgagatcgatctctcccctaacctcccggcgggtgccatcgaatgcatgaaccaccatttaactcggctttaag

SEQ ID NO: 28625 - DNA, 141 bp, Glycine max
agctttatgattatgaatcaagtcgattcacgtagtgttgagcatgacaaagatgatgacataccgccctcagagtgatttctagatcgagtcatcaagttcgaaatctagtgtaatttcaagtttcatgatacgagatca

SEQ ID NO: 28626 - DNA, 306 bp, Glycine max
  unsure at all n locations
tgtgtgatgttgcgcgtactgacggagaccattatgagactgttgtggttngacccacgcgggtgttgaagagacggcatgggcatctccttccttccttattgcccctgttgccccgattctttaggcatgcgggtctgtggaggaaacgtaatcatactttccccttttcaatccaacctcgattctttccccggcaaacaccatatccgcaaagctggacggcatgtaacccactagcttctcatagtaaaacactggcagagtgtctaccatcatggagatcatctctctctcaaccatggg

SEQ ID NO: 28627 - DNA, 213 bp, Glycine max
agcttataatattattaatcgtctccatcatcaccaaataagcatgtgatttatgacgcataaacacagaataacccaaggctattgtgcaatcattcaatggggcaatacacaccagatgattatgacgatggatgtgcttagataatcacacaagttaacttatcactctcagattgatctttcaatactatcatgacatgtacagaagaa

SEQ ID NO: 28628 - DNA, 232 bp, Glycine max
taatgatgcatctaatatatgcaacagagaatttgtagcatctttacgtcgatgctcactcgaagatgtaactgtgtgtctttttcttgtcaagatcttatgtagtcgccatcaacatcatcagtggcatctacatagacgcctttggacagaaagtgaccctccatctctctctcatcattagaggatggtggctctggatacaagctcgacttaactctcctgttataaa

SEQ ID NO: 28629 - DNA, 292 bp, Glycine max
  unsure at all n locations
agtcttatcaactttatatgtnaaaaaacaaaacagaaattagatagttatgaaggccaaggccacgataaaccatcatttaagtggtccattatggatcataattctcaatccttggattaatctacagaccacgatcttactacagactatccatttaataaccccaccaagtgttggagcatataactctttagtcaccctgctcaagttaaaacctctcactcagttcttcaatttctttactatacctatgtacattttctaacttgataacaaaactacagatttt

SEQ ID NO: 28630 - DNA, 303 bp, Glycine max
  unsure at all n locations
tatgatactcagctttatnaaggttcgccctaatttctctactttttcctcacctctgaatgagctggngaagaagaatgtggcatttacttgtggtaaaagacaagagcaagcctttgctttgctcaaagaagagttcactaatgcacctgttctagctcttcctgacttttctaaaacttttgagctaaaatgtgatgctcttggagtgtgagctggagctgtattgttacaaggtgggcaccctactgcttattatagtgataaacttcatggtgccaccctcaactacaccacctatga

SEQ ID NO: 28631 - DNA, 528 bp, Glycine max
  unsure at all n locations
tgagtncggatgaaccttgtgactctcggaagacattagtagtttcgcgcgaattccgctaggacccgggatcctctcgagccgagcggcttgctgcattctcnctcgtttcagtcgagcatcttccgagggttaacgtgatgaggcgagaccaggaggtccatgacgatatcatatgaatgtattctttgctgaggcatatgatgagcaatcgcttatacaccaatgcattatagccatatcgaacttagtcttgaatgctgattcatcttagaccaaggcttgctctctaactcacagctgttaggatcatgcgcgctctggtaatcgatgaccgggagaggtgatcgattaccacatgacatggctgacatatatatgacgcacactgctttgagttcgatgatcaacgtgcgatctatcatcctatgtctgtaatcgatgatcagcaatcgaactttggacatgcatatcagtagtcataacccttgctattataactgtgttatcgattacactaacatagcn

SEQ ID NO: 28632 - DNA, 399 bp, Glycine max
  unsure at all n locations
ntgactntgagtcatcaagagattataaatatgtgaccatggtatgagtttcanagtaattacctctttcaatctctttcaatctatctttcaactttntctacaaaatttctgattcatttctcttcatctttctaaaagtttttgttaaacactttctcttccaagagaagttctttgataaaaaacttgtgctattcatctttttcattctcttctccctttgccanaaagaattcaacaaggactaatcgcctgaattgtntttgagtctctcttcttccttttccaaaagaacaaaggactaaccgcctgaattcttttgtgtctcccttctccttttcaagagaaatcaaaaggacacagtctgagaattctttagattcttccctttccctt

SEQ ID NO: 28633 - DNA, 267 bp, Glycine max
  unsure at all n locations
ttgttgctatcttgtgcattggcatgangtatngaagaaaattgaataagtgggtgatgaacaaggactttcaagtgtaactgttaaaataattaattgtggtgaacataatgagggtgagaattcctcagccctttatggagaatactaagttctacccttaatatgaaatatgattatatgaataattacgagtgtaagcaggtgcgggtcacctgcgaacctgaattgatccacaccaacccaaatagtctgggttgcgtaatt

SEQ ID NO: 28634 - DNA, 330 bp, Glycine max
  unsure at all n locations
tgcccagagaaagaatccatggaggaaatgcttaccacctcgaatgactgganagcagtttctaatgactcctctacggcctccacataaggcatagaggatgggcagctcaccaagatgtcttcctcgcctgatacgatgaccagatgcccttccactacgaatttcaacttttggtggagtgtagagggaacaactcccaccgagtggatccacggacgcgccaacagacagttgtaagggggttaatatccattatttggaaagtgacttgacaggtgtgaggacctatctgtactgtgaggtcaatctttcccctaacctctcggc

SEQ ID NO: 28635 - DNA, 443 bp, Glycine max
  unsure at all n locations
agctntgatggtgtcgagattatatcacatgtttgtcatcatcaaaaagagggagaatgtgaatgtatgtatacatgattntgatgatgtcaaagaagaatctaataaggctgcttcaaatgataagcatttgcttcaagaataattcaagattgcttcaacaaacaaagccttgtttcaagattcactaaagaccaagtcttgccttanaacaaagtgctttcaagacatgcaaggctctggtaatcgattaccaggagatgtaatcgattaccagaagacagggttgagaaatagctgttgaaaaatgttttgaatttgaattttcaacatgtaatcgattatcatatgtctgtaatcgattaccagcaacgaaactttggaaattcanattcaaaagtcataacccttcanattataactgtgtaatcgattacacaaac

SEQ ID NO: 28636 - DNA, 394 bp, Glycine max
  unsure at all n locations
gctcgttgagtcatccaaatcattntctttcatacagtttatgatgcatccagcaataagttcatttccaaattcacacttctattttaaccaaattcttgatgctccaaatgttgtgagaaagaactacagaaaacaatatcttccagggccaatgtttgggccctattcctttataaatgtagttggtggcattgaagagtttgatgatgctggacgaagccggacaaatatggttgaagtagcaattgtgatgaaaataattaaaaattgttttaaagggttgtgtgtgtatgcgaaatctcagtagtgatctatcattttagtgtattttcattctccttgagaaagactatacttgtcaaaagtgaaaattttcattatttccactact

SEQ ID NO: 28637 - DNA, 440 bp, Glycine max
  unsure at all n locations
agcttgnaggattatggggtactatcacatgtggtactaggtggcagtcgggcgatggtgcacaacaagttntccacatccacaaagcgcgcataaacccaccatcccctgttgcccacctccaactgagctcacgtactcccacgtagcccataacctcgtttctctcaacaccgggtccccatcaatcctcccaagcttccccaacatcaaagtaaatcaacattcaaacagcacaaattaccacagccaagataacagggcaaaggcagaaaactctgcccaaaacaccaaccaaaatcacagctnttctcacttaaagaccccagtaacaattccttcgatctcaatcggtaaccgttggatcgactccaaaaatttactggaagtctatagtacataagcctacattattgaccgttgggatctactagtaaaca

SEQ ID NO: 28638 - DNA, 409 bp, Glycine max
  unsure at all n locations
cactctacaatacacacgcttctcaaagatgtacttaaccaggtccatcttggatatcaaccatgtggtatggttcagcatgtattgtcttagacggtgggacgcccagactaaagcacaacacgttctttcgagcagggagtagttcatttcataggccgtgaactttttactcaagtagtagacagcgcgttctctcttcccggactcgtcatgttgccccaacatacatccaatcgactcatccaaaatcatcatatacaagatgagaggccttcctggtaccaacgacataagcacgagagggttcatgagacactgtttgatccttccanacgcctcttgacaatcctcattccaacggacgggatgggttttgcgtaagagttggaataacggctcacaatta

SEQ ID NO: 28639 - DNA, 435 bp, Glycine max
  unsure at all n locations
agcttagccactcagttggcaagtgtatcagctgcttcctgtgtggatgcctcagcatacacacgaacaacatcttcagtgccagatggtcgcacaaagcatcgaccttgggggtccttagctgtaaatgcagaagaggaaagagtatcaagctgcaatattagtaaactgaaattctgcactttaatctttcacactaaaaggctttcatggatggatgaaactgacaaatatctcgcagtcagtgaaattttgccaagccacttggacttgataacagtaatagtataatcccataaacaagacaccaacttttcagagatataacattcaattntggtattatttatgcctccttgcctccctcactctgcccattcttggtggttcacanataanagcaagcaagcaatgatataaccaaaaaacaatgtt

SEQ ID NO: 28640 - DNA, 535 bp, Glycine max
  unsure at all n locations
acgtgcgcantagaaacccttgctatatacgttacactatagcatactcaagctgtatagataccctcatagtcaagaggaagaaatngagatattggtgccaggaatgttagatgaaggcatcatacagcctagtaagagtctcttttcttctcccattatattggtaaaaaagaaagatggttcatggagggtgtgtattgattatagggctcttaatgcaattactatcaaggacaacttccctattcctactgtggatgagttgattgatgagctttttggagccttcttcttttctaaattggatctaaggtctggttatcnaccaaagtttgtaaatgcagatgacagacataagacaatatttaggactcatcatggccactatgagtggttggtcatgccatttggcctaaccaatgcttctgctacttttcagagccctatgaatgacattgttggtggaatactaagaaaatttgacctggtttctttgtgatattctgtgtatagcgctnatggaaaagacatn

SEQ ID NO: 28641 - DNA, 271 bp, Glycine max
  unsure at all n locations
agctttgagcatanatcttctacaataaccttttcactcggaggtcggattgagtcccgtaatatatccacacgctcgaaattgaatgttgatgctctgagctaattcaaacgacaataacctttttactcagatgtcagatacagtcctgtaatatattgagacgctcgatatggaataccgaagctctgatcgaattcaaacgacaatcactttatactcggatgttcgattgagtcccgtcatatatcgaaacgcaagaaattgattg

SEQ ID NO: 28642 - DNA, 182 bp, Glycine max
  unsure at all n locations
actcagcttaacattcaatatcgagcgtttcgatatattacgggactgaattatacatcctagtnaaatagtactgtagtgtgaagttgctcagagcttaccattcaatatcgagcgtttcgatatatcacgggactaaatcatacatcagagtaaaaagttaatgtccttcgaattatctc

SEQ ID NO: 28643 - DNA, 472 bp, Glycine max
  unsure at all n locations
agctgagcgcgggtctgtgacacacacgaacattttccaggatttgccaagacganacaccaaggccggcttagaagataatagcgtgccctccagactgccacctagggaaactggctacagcatgaacgctgccgcatatacgcaacgagcctaatgcacagcttggaaagaccatgcgctgtataattggacctaggcagtaaaagtgttactggttgtaaagcgttgtgactctngctacggattgatagacctacgagatttgatcatccgatacaggaattgcccagtcattgtcgtacgcgagaaattacctctgcgtacagcggattcgtgacaagtccctcggaggtgccaaacctgagaccgcctgtcgctgtgaggagaattgactctaaagctatcaaggcacgatgatctgaacttcccctgaccgagactgatggtcaccgagaggccggaaaagccg

SEQ ID NO: 28644 - DNA, 505 bp, Glycine max
  unsure at all n locations
nttgaaccttgagactctagtactaccggcgaattgcgctacgacccgggatactctcagtcgacctgcggcatgcaagctttgggtttctgatcacatgtaggaccacgaggccgaggagattaaagagccatcatctttctcgatactcgcaaatgatacagaatttacaattcttttggttaacatgattatcttttctcaataagtgacgcacatcctgtaaccaatttattagctacggcaggctccacattgtacacattagtttcggaattatataaatattcattaaaaaacctattcgacattcgacatgtctgtctacgaatcacagtcataatattatttcttaacacatcgtgaaaacgctactgaactctcttatagcactcngtttaattcattcgaaccatattgtttagggtgatcgtactccactattaatcccggttatatttactcaacttgatattgactgccatctatctttactatcaatacn

SEQ ID NO: 28645 - DNA, 538 bp, Glycine max
  unsure at all n locations
agacgcttgccccattgaaaaccttgagnngcttagtacantctnacactctagctaagnaacctacgccaaagaggaagaaagagtttttagatattcaagcagtcatgtgcataaggagtgattgatcaatgggtatacaggacgcgaacatttagttgcgtgagtcatgtgtgttacctctgaagcataattctctatatatatattctctcgtgcacactctatgtacaaagaactntgccctataccactcggatcatacgatggaaactaatgttgaactagaatggatgccctatttgatcgtgcctgtgaatccttaaactgcgagaaacatcttgccggatctacccgaactcattactcacatggctacgatctgcctccctggacgtgcgtcaaccagttgcgcttgctgtaatctggatcatgtgacactattatagttacttggtgaacacataatcaccatatgataatcctcacaccttccgttagtgcatgacttcacctcctgaggctgtatacactcccg

SEQ ID NO: 28646 - DNA, 358 bp, Glycine max
  unsure at all n locations
agcttggactgttctanggagaaaaaaaaacaaatgaccaaagtgaaccaagagccatttctagggcaaaattaggtgttgaagagtcaaattttgattcggtggaattttaggtgtaaatccagtttgagaaagtttagattgatgttatatacttgtgtgaggtgagagtttgctccaaatttacctcattctcaatttcacttttcaaaccttgaaaatccattaaaatgaggggttttggacacctagatcttgtgttgctgtgggttgaagcttgactttggtttagacatgattgatacatgatatgggacttgtacgatgtgatttgggcaagattggatgatgggaagtg

SEQ ID NO: 28647 - DNA, 302 bp, Glycine max
  unsure at all n locations
ntgcgaatntggtcttcgtcggggaaaggatctaaacgggtcttataagaggcaaatntgatcatctttctttgatgaatgagaaaactgggacaaatgaagaggatgataatgaggaaggaactcatgttgtggctgccattcctacatggccaaacttcccaccagcccaacaatgtcatcgctcagccaatatcggcccttctcattacccatcacccaatcatccacaatagccatccccanatcagcaacaaggcatgcctgcttaccacacgcccaatgcccaaacaccacctata

SEQ ID NO: 28648 - DNA, 353 bp, Glycine max
agcttctagctcttatggacttaccttgaattaattcctttgatagcccttttgagccttgtttccctttccttgttttgaagctcactacaagccttaagtgaaaaaccatgatattaccatatccttaaggaattctggagctttggaattgttttgggaataagtgtgggggggtttttgtttcattggacgactcgttttgttggctatgcttcatgatgtatttagcgccatacttgatgtacattgtatattggttaaatgttggacatgctgaatgaaatgttgtttctcaaaggccaaagagtaaaataaaaaaaaataatataaaattcccataaaaaatattc

SEQ ID NO: 28649 - DNA, 271 bp, Glycine max
ctagccttaggttgttcactatgttgctcatgttgctccccctatctctaacaatatgccttagtgtggtggaaccaagtgaggagtgatgttaagaggatgagaaggcctttgattcatactacgcaagacatgaagagagttttgagagagagatttgtgtcgtcctattataagagagaccttcacaacaagctccaaagactaattcaaggatataggagtgtggatgagtatttcaaagaaatggagatttccttgattatgactc

SEQ ID NO: 28650 - DNA, 169 bp, Glycine max
acctgaacatattgacactattcgggatctgttaatcattttttgtgagaatgtacctccttttactgcacgcacaaatggaattgtcaaacattctgaactgatccaaaatctatgtcttgtagacgccaacacgttggtgttctttggctgtggtcttgctattaca

SEQ ID NO: 28651 - DNA, 243 bp, Glycine max
agcaatctatcatatacgactctgacttgttctacttgactattcttgtaaggaatcagtaattacaggtttttattattattgaaaattactatgttatgggtgtattgaaaatcattgtgcacatgagttaataatgctctctaataaatatatttttattcttaattcattaacttaacatgtgtaagttttgcattttaatatcatggtcggagagacctaaactttcttttttacatt

SEQ ID NO: 28652 - DNA, 297 bp, Glycine max
agcttcttattcaaggctcatcttggtggcgaagctccttcttccatgtcttattccctagtggatggcgccgcctcttaccttttctcctttgtcttccgctgcatctacatggtggaaaatcaccactaaaggacctcattaaagctcaaagatccagcctccatagaatctccacaagcaagcttccatcactgtatatcagctgccaaaagttgttcgacttgtgaacaaggtgaatgtttatacgggagtattgttagataatccattggaataactaattaggtagttatt

SEQ ID NO: 28653 - DNA, 359 bp, Glycine max
  unsure at all n locations
atggctagacatgatatatgtcanggcttggtttggttcaaggataaaagggatgccccacattattggcatgacacaaatgcaaaaaatgatgatttggaaattttatgcaaaactggtcatgcatgcacctatgcagacgttcaagtgtcaaattnttatggtcatgtgatgctatggctcaggattcatttcctctattttaaatcaacccaatgtttccaaaatatgttcttttatcaatatgtgcattcctccaagtccatttcgagcgttcggggaaattntcacagcattcacccttcatgtgtagacacgttttttcttctaaaatcgattatgatcaatgaaattttttc

SEQ ID NO: 28654 - DNA, 313 bp, Glycine max
tatcttgaggtatagattgtctctgtaagagcaaaaagtggcaatgaaaaatatttgtaactcttgataagtccgtggatacttagcatgttgccaagaactagacgtaatctgagtgtaaagactaaccaatataacttcctctatttattctatacttcttcttttttgtgtcgaatgaaaaacggctcagattagttgttagatcttatatttgatgaagcctttcttaaatatctctatttgtttttagtaaatctacgtcagatgataatgtgtttcaatcaagaacaattttaaattcgaaaacata

SEQ ID NO: 28655 - DNA, 258 bp, Glycine max
  unsure at all n locations
tgaggatgtntgtcacacagttgttatatcactagataatcattagactcacaacgaataaagtgctatagcgctgtcagtttatatttgacgaaagaaacttgagcgaattgagtaaaccttagctctgccaagttagcaagtttcattgtattcaagcttattgtgtacacattctttgagttattagaatacattttttgtcaaacatctatggtttgtgaaagccacgagtggggtcgtgacaaaagatacttg

SEQ ID NO: 28656 - DNA, 442 bp, Glycine max
  unsure at all n locations
agcttggagatttctcanacgaagaccaagaccttgttattcggctccacaacctccttggaagtaggttctttcttaattagaccaattcttatatcaacaaatactatatacactatattaaatacagtactccatcagtgttttaaaagggtgattgcaatagcgcatcaaaagggtacggatgattcattaaagttcatttggtgaaggtgaaaatctcgtccatgaaaactccagtagtgatctaatcgacttctcaagcatgtatgaacggattgttgcagaagatgattttgggtgtaactntntcttttgctaatactgtgtttgatctatgcactccttaattaaccgagtcttttcagggtttnttttttgcctgtgatngggttgtctgtaaaacctgtatcctctgcanaaccttttgatttttgacaat

SEQ ID NO: 28657 - DNA, 349 bp, Glycine max
  unsure at all n locations
tttaagcataagttagttttaacttatagaagaatnttattntattataccatcttattttcttctcctataagtacttatgaagaagtttatccatagtccgattgaaatatcagaatctgcaaatttataccacaaacctgatgcctgcccggattccactagtccaatcttgtttgtagcacataagtcttcctttgaggtcattcttgatcccacgtaagggaacaaatgtttcttccatgaaggtattagaatatcaagggatgaatactggtctaagttttggtttatagaanatggagcagaagatatgagtggaagatggtgaatcacttcaagggagtct

SEQ ID NO: 28658 - DNA, 442 bp, Glycine max
  unsure at all n locations
agcttgaagggtcatccacatttcctagtcctagtgtctcttctaacaaattctttcttcctacacctatactcgccactcctttcacaaccaattaacacaaacgaagtccttcctctactaccagtgtttgtgtcaaaccttataatcaccgccacaaatcggttttcataagcaatggattgatcccaccgcanaacatcctctcggctatcaaacatgtacaaagcaatccacattatttcagttgtctacaacatattcattntattaaatcactcacaatcatcaacattattacctgagaagtattgaacgcttccgaacaatcgacatgtggttcattcacaccacattcttctttattntcataatccatattcactacttcagacattatacttgtatacatccactgatcttcgtctacgtccatcttaac

SEQ ID NO: 28659 - DNA, 431 bp, Glycine max
agagctcgctgttgctgccccacaacacccctcagaacttgtttctgctccattcttccttttgggccctctgtgtttcccattccaatgcttcgacggtggccacattgacgtctctcagttcttgacattcttttcagaccttgataactgtcatcttcaacttttccttgactgcttgctgtcataccctaatttcgtccggggattattacttgttgacatgcaacctttggttagccgctttgagatacttggcgtcctttgttgcacaataaatgaagtcccgagatgtgtcagaaatcaaaaggaagcaggcttgcgcgatccgtgaaattccgtaatgtggcggaaatcgaaaagaggtgtctttgcgcaattcgagagtttccgtaacttcttcgaaagctagaaaagagtagatacataat

SEQ ID NO: 28660 - DNA, 421 bp, Glycine max
  unsure at all n locations
agcttcgctgatttagttttcaccgacgaaaggatcaaagcaagtatgaaaagaggcaaatctgatcatcatgctttgataaatgcaaaaaaaactagggcaaatgaagagggtgagaatgagggagaagcccatgctgtgactgccattcctatacagccaagtttcccaccaacccaacaatgtcattactcagccaataataaaccttctccttacccaccgcccagttatccacaaaggcaatccctaaatcaaccacaaagtttgtctaccgcacttccaatgacgaacaccacctttagcacaaaccaagaacaccaaccaagaaatgaattntgcagctagaaagcctgtagaattcaccccaattccagtgtcctatgctgacttgctcccatatctatttgataattcaatg

SEQ ID NO: 28661 - DNA, 374 bp, Glycine max
  unsure at all n locations
ngaacgatctttcactccacatgcataagattccnccagctaagttatttgcctgcggcaactcccatganacatcangatctccccacattgtctgacaccacgnaatttctattgtgttcctcttgatttcctataaacatatcatatctgcattntcttttttaactagtcgccttattgctgcccacttgacccccctccctaatcctctcacgttgtaagtgataatattcatgatgtactggttntgttcccccctttctctgctaccttgctgtctctttcctccatgttcatgaatntctccaccattttcctctaattntctattccagatacccncagctagtttgctaactcccataattctt

SEQ ID NO: 28662 - DNA, 169 bp, Glycine max
catgctagctacatgtcttcgtgctgactgctactcttggctgacagataatgaatgatgacgatccatattaagcatgacattctattaatatacgaaatttggaatctgaaagaactatgtttcgtataaacaatacattaccgactctcgcataatatataatgac

SEQ ID NO: 28663 - DNA, 280 bp, Glycine max
  unsure at all n locations
tattgctaaatgctaatcaatcagcaattctcacagaaatcatcttgttcctgacaatgttagaaaccatcanaccatggccatatataactgtgcaagcatgatagaaaacaaattataaaactattagaaatgaatgaggaagtntgacaaaataataagacaaataccttttcattgtatatacgaaagccttctttgactactgctntagtatcatctgaccgagtaatgagctntgacatacagtgtgcaggaagaagaagtggagccatgacca

SEQ ID NO: 28664 - DNA, 307 bp, Glycine max
ttattatctttaatgaattgcaatcaaaggaactcaatacgaatgtggtcctagtcacatgataaaccaacctattagagcgaagatcgtatcatctcttctaccgacgacatattgcaaacacaatatttagaagacttccactgagtctaatagctagctcttaatgatcatttctaaatgggtctcttcaaatgatacatttcaaactcaatgatagcatgctggcatctatggagatgagcacttattaagatcactacctcatcgacgtcgttaagatctgtgatgaatgtgtgcctaatga

SEQ ID NO: 28665 - DNA, 357 bp, Glycine max
  unsure at all n locations
agcttcaatagacatctatagagagncaaaattggttaactatgctggatgcttggaagtaggaacacatcataatgtttacaacctattcccttcttggcttgatctcatacagatgtgaacatagaccaatttgtaacactttgtgattatagaaacaaacaataagattgcaacaatataaaattatattctatgaacaagaataaattcaagtcgaagacatgagaattatagcatggagaactatctaatagcaactaaccaaccaatctcttgaagcttcatacattagtagccttcccaactcagccattgcatgtcctacaacattagaaactagaagagtcagttcta

SEQ ID NO: 28666 - DNA, 305 bp, Glycine max
  unsure at all n locations
agctttagcttttaagatcccgtcacacgacctcgagtcctttggataacaatcagacaatgcataaccaccctccatacacatgaacaccacaccccaaacaccatanacccttccgaactgcagaaattagatggaataagacctactccagactcaatatcctgctatactacacatcatacgatcatcacaccaacatgccaaagaatacgtactaccgcctctattatttatccattgccaagacattatcttcaccaaatcaagatctcctctacctcttgatcctttcctgtgaaaat

SEQ ID NO: 28667 - DNA, 401 bp, Glycine max
  unsure at all n locations
ttcttgtgtcgagcagatagccctaanagagataatacacntgtattatgaaactaaagttaggcaaatgaaaatatgaaatagtggttattatggtacgtttcttggcattttgctatattaaatattaacaaaattaagttatgttttaaataataattcggttgaatgataaagtaaagcttatttttggaaacatataaatatcatatatttcgaacatacatttgagtaagacataaagtaaaacattaagcagcaaatgttgtntttttttacacaaaacaattcaaagagttaagtaagacaccactagttttacatgcgtaaaaacaattatgtaataggactttatgtttgattctattgtgtgttaaaatttcttggattatacgataaaa

SEQ ID NO: 28668 - DNA, 316 bp, Glycine max
agcttgtatattttcccaatttatggttattttgtagtgattattgtaaataaatcttgttttatggttaatgttgtctctagaacatttccattggatttaatgatgaaatctgtgcatttttaggtgaaaaagagactaatttctgaattgcaaaatgtagcagttacgctaagctcattagttgggctaagcacatattcaccgtcaagcgcagcttcagcgcgcttattgcaaaggagaatctggcagagcatcaacatcaaatttgcatgctaagcgtgagatcagtgtgctaagcgcagtaggtgccttc

SEQ ID NO: 28669 - DNA, 379 bp, Glycine max
tcgtccacagatccctcatgtaagactaagcttatactaaacagtattattgtaacagcataattaaaaccaaaacttaacccatagatccctcatgtaaagctaagtgttaatcctgcttcaatcaagttctaaggcaacagtacattttccaatgctaaagtcacctaactgtgcacataaatgggtgatcagaccacaagcatacaaacattaagcattaaaggaagcattgaacacagaaaacataatcaattagatattaagtatttacatcagttgttcattataaatccccaactagggtgtttaaccagccattacaaagaaactctcacaatgaatgagactaaaaatagagaatgataggtccttacac

SEQ ID NO: 28670 - DNA, 325 bp, Glycine max
agcttataatgtttaactatttagtatgacatattaaatgtgatcttataaccaccacagcataacaaaatatacagatcaaaatttacaagacattttttactgatgtaagaggtaagaatgtaccatctgactctgaaatgttatttagaaacctatagataaaacttattctttgcataagtaatgccattacacaaaaaaaaaacttggactaggcaacatctagtcacggaataagttcaactatcaaaataattccgaattctctaattgcctgtgctttagcacaagaatgtcttcacattatttctgccaaaaaaac

SEQ ID NO: 28671 - DNA, 361 bp, Glycine max
tctacctatatggaaaatatatagtcattgttggacacatatattctataataatatgagtatatatttttaaatgtaaaagaatgggttcgtgaattgaaaactgattcctaaagtatacttaagtaaatatatatcacatacaacattacaatctacaatgagttgttgcagccgcatcactaaataaatttataatttatactacgagtcaggatcttatctatatattaaaaacatgtatgactgtacactacatatattgaaaatgcacactacatggaattcatagcacaatttaattcaatatttataccacaatacaccacaattcaaccagaaattactacattataatttc

SEQ ID NO: 28672 - DNA, 428 bp, Glycine max
  unsure at all n locations
agtttataattattagtcttataatngcataattgtctaaggtaaaagttgtaagttactaagtcaacgttgtgagttatgaagtcttgtagttttccattaacatttagtatcttggaacaaggtattaagtatttatgtgattagtcaaatgatcactctattctagtataaataggggatcatactcttatattcgatatggtaaagaaataagactctttttttcaacatatgcatatatttccggtcactgctaacttgctaacaaaatgcttggctacttttatgatacctgttattactattatgggaacattatacttttgctcanatatgtaaatttatgtcagtgattatgatacactattttcactttacaactggtgtgatctgtatatcaaacaatctctcttccattcttatat

SEQ ID NO: 28673 - DNA, 258 bp, Glycine max
taagttctagaagagcattcatccttagatctttccttttctcttttattccagcttcaattacttgccttttacatttaaggcacttagcttcaaataacaacccacataacctttattcttgaacttcattcttttttcctttttttttattttagcagctgttatttgctgcttctttacaattttctatgtgggtgtaatttgtcttaccactcttattgtcacccaataatcttccccacatttgggacaaat

SEQ ID NO: 28674 - DNA, 259 bp, Glycine max
atcatttgatgtgatgtgacttttcagaatattgttcaaaaattctctcaccagtaatcgattaccacttcttggtaatcgattacacaattatgttttgaagggtcataacttttcaaagataacttttgaaatctcctcactggtggttatcgatcattgcatcagaaattcagattttcaaatccatctagaaacaatttttatgcaatgtgtctatagtaatccattgctatacttaggtattgagtaccactgt

SEQ ID NO: 28675 - DNA, 252 bp, Glycine max
cgtagaagaagcttgctgaggaatgtttagatagtttgagatgtatgaagcaatgaattgcatagaatgaatcaacttacaaagttagtcatattagtgacgttatatatgctagttaacaagagtcgactaagttataacgtaactcattaactcttgtgacatagagattagccaactaaaataactctaagttcataataatctatgctaagaacacctcatttgggtttacgatatactcatggctac

SEQ ID NO: 28676 - DNA, 250 bp, Glycine max
  unsure at all n locations
ttgctttactttatttagaatcaaaganaagggagcgagcagatggttaaagagttgatattaatcgctctaaagatccttaaagagaatgggcattatgttaactcgggcaaggcaatactgggcgctgtccctgaggttagagctcgtgatgaataacaatatatgggggagcttaatataataaggccttcatcgtcctattcacggtggcatctattatgtcaagcacaatcgtcatatccttgca

SEQ ID NO: 28677 - DNA, 467 bp, Glycine max
  unsure at all n locations
aggtgactcccatcttgtgcaagcttaactctttcagaaattttgaagaggcgaggaatccagtggtcccagggtagcaattgcttctgcaaagcgagatgaagcagcggcgataatatggatgaatagcataccgtatgacgagtgacgggaanaccacacaagcagcttaccaaataagatgagcgtgcttaacggcgcgattcgatcgcaattgaacgcactatatccgtatgctttggaaaccaggatgatgctaccgtctgcgccaaagagagggggcaacatctctgtcacccttgagccacagatcaccggagtggtgcgactaagcattccgtcatattacattaggggcgacactaataacaaggactggccatcggtgatgaggccctcttccattgtgtcgacatataagacatgccaggagtgcttgtcctaatctagaaacaacaaaggactcc

SEQ ID NO: 28678 - DNA, 376 bp, Glycine max
  unsure at all n locations
agctnttaagttaaaggatatgactcttcacatttgaatatgaatttcaacattcaagggcactagtaattgattaccaaaacattgtaatcgattatagctttttgaaaataattggaacgttgtaaattcagtttgaaaactttttcaaactcattttgctactggtaatcgattacaacaatatggtaatcgattaccagagagtaaaaactctttggtaaaaggttttgtcaaaaattcatgtgctattcaaagtgttagtgcttggctttactgagttttaaaagaatggctagcatgttgttaaaacataagcacttacacaatgaaggaaagctggagttgctgcacatgatgtctaacattatgtcaa

SEQ ID NO: 28679 - DNA, 273 bp, Glycine max
  unsure at all n locations
ntacatttagacgcacatacacaaatgacatgctcctgagattcactagttgatctcgcaagcaattaacttagactagcggttgtttaccaaattccagtgtaaacaacggaagaacgttcttccatatgaactcacggaagaaccttcttccgtacgaatgattgtcagttacggaagaaagttcttccgtaagaacatacggaagaaccttcttccatatgaagagaatcgtttgtacggaagaaccttctaccgtatgaagaattttct

SEQ ID NO: 28680 - DNA, 415 bp, Glycine max
  unsure at all n locations
agctttatatttgtntgttcctaatttctctacaattgcatcacctctcaatgagctggtgaagaagaatgtggcatttacctgtggtgaaaaacaagagcgagcctttgctttgctcatagaaaagcttactaaggcacctgttctagctcttcctgacttttctaaaacttttgagctagaatgtgatgcctctggagtgggagtaggagctgtattgttacaacgtgggcaccctattgcttattctagtgaagaacttcatagtgccaccctcaactatcccacctatgataaagagctttatgccttaataagagccctccaaacttgggaacattaccttgtntccaaggaacttgtcattcatagtgatcatcaatcacttaagtacattagaaggcaaagcaagtta

SEQ ID NO: 28681 - DNA, 462 bp, Glycine max
  unsure at all n locations
acactatncaagactcgagcttcccacaagcatgtcaatagataaagaataanattgcgaatattcataataagttgtcacacacaatcgtaacgagagaatttaacatgctacccaccacgtgcaaatgtctatcttccccagctacttcactttcacccaggttagccaagaaaatggagcataataattgaataacatccttccgaacctcctggtgcaagcttactgaggaatgtatcagaacactggctgctgcaagtcgtgatctgcaaaaaaacaaaagcatgcttgaaagaggtttcacaaatggcttactgggcattgaaattcattaagtctaaccacttgataggagatacacatcaagttaatcgagtttcaatattttatgcttgatagggtttcacaaatgcttgacttaattatcaactcaatctaccgacattatacttcatacat

SEQ ID NO: 28682 - DNA, 349 bp, Glycine max
  unsure at all n locations
agctttcagcctattcacctcgacaataactttntactcggatgtctgattgagtcccgtaatataacgagacgctcgaaattgaatgtagaagctgtgaactagttcaaacgacaataactttttactcggatgtctgattgagtcccgtaatatatggatacgctcgaaattgaatgttgaatgtcaaagccaattcaaacgacaataactttttactcggatgtttgattgagtcccgtaatataacgagacgctcgaaattgattgttgaagctctgagccattgcaaacgacaataactatttactctgatgtctgattgagtcccggaagatatcgagacgct

SEQ ID NO: 28683 - DNA, 341 bp, Glycine max
  unsure at all n locations
gcttaacattcaatttcgagcgtctcgatatattacgagactcaatcttacatcagagaanaacgttattgtcgttggaatttgctcagagcttcaacattcaatttcgagcatctcgatatgttacgggactcaatcagacatccgaganaaaagttattgtcgtttgaattagctcagaagttcaacattcaatttcgagcgtctcgatatgttacgggactcantcatacattcaagaaaaagttattgtcgtttgaatttgcacagaggatcaacattcaatttcgagcgtctcgatatgttacggngcttaatcagacatccgagaaaaaattatt

SEQ ID NO: 28684 - DNA, 434 bp, Glycine max
  unsure at all n locations
agcttgaagcccttagttttagttttggtttaataattttgaaatgtcaaacatgtttaatagatgtggcaattgtcttgaatgttttagactangcatgtgtgtgatatagtctaagtctttttaatacttagttttgatcaaatgtaaagtgaatgaagtattttatttctctaagtttcctaagtacaagcaatagaacttacttctacttgaaatttggttgtaaccatcgaattaattgattgcctagcttggtaattgagtgcctaagccagattcaaaagaaggaaggatgtatagcttangataattgactgctctgtttttggaaacaatgagaagttctctatgtgattctacaatctattaccacatgtgacaatcaactacccagatagcacagaagcaatagagatactcaaactgaaaca

SEQ ID NO: 28685 - DNA, 445 bp, Glycine max
  unsure at all n locations
tatcgtaaccgattacaccaatatttttgagacaatgattgatttttaggagtctctgctntaatccattaccagtagatataatcgattacttctctcttannaagtgtntcagaagtgatcaagaacactttaatcaattacatcnaaaatctaatcgattacatttgtctttgaagttttccaatntttgggaagaacactntaatcaatcanaatggtaataatcaattacttctttgaaataatngattacattgtatatntaattgattacaggcagttattacgagctggtataagctagaataacattattagaaaatatgttttttacatcggttatttatgactntcaacatcngtttttaaaatcgatgtgaaagtaccgaccgtgatagtattattggtaacatcngttttttaaaactgatgttacgtaaaa

SEQ ID NO: 28686 - DNA, 401 bp, Glycine max
  unsure at all n locations
agcttccattctcgagagcatttgttatttaagcatttcagcctttgctttcgtgtagcttaggaaaaacgtcatttcttcttctttctttcttccaaagtcatttctaaagttccaagaacattctccatcacccacatccaccattagcaaccacaaaccatcattgttctccattgaaaacccacaccgagaggaacctttcaaccgaagcggaatcttccaacttggcttgcggttccggtagagaatgaaaaccctaatctgacctttcattttctttcgagggaatcatggatctatgtttggtacttgttagtttcatcttgtctntgcatcttttctgactntggaaccgccattgcatgtcttatgcttcctttgaacaaccatagagaaag

SEQ ID NO: 28687 - DNA, 307 bp, Glycine max
atcttatgatgttgctaagagagtcatcaagaatgtaatgcttatcccagattcgaagagaaatgtgatttctctgagtgagtttgacaaacaacgctatgtgttctaagaggagaatggagttctaaaggttctaaagtgctccataatattcatgaaagggatgcataagaatggcttgtattctctgattggagaagtgatgactggatcagctgttgcagtttctgtcaaaaggttgtcatagactgaactatggcacagaacgtctggacatgtgagtgataggtggttgattgtactggga

SEQ ID NO: 28688 - DNA, 372 bp, Glycine max
tgccacaagcatatcaatagataaggaataaaattgctaataatcataataattgtcacaagagtgttaacgaagaaatttaacatgctacccaccagttgcaaatgtctatcttccccagctccttcactttcacccaagttagccaagaaaatggagcataataattgaataacatccttccgaacctcctggtgcaagcttactgaggaaggtagcagaacactggctgctgcaagtcgtgatctgcaaaaaaacagaagcatgcttgaaagggttttccaaatggcttactgggcattgaaattataaatctaaccatttggatggaaattcacatcaaggtaatcgagtttacaatattttatgctt

SEQ ID NO: 28689 - DNA, 399 bp, Glycine max
agcttaagattaatctcaaagttgcaaaagtacaaccttgtaagagactgagtatgtcatgcaaagatgatttacattttgaatcttgtcaaaagggaaaacaagttaaaaaactctttttccagtaaaaatattgtttccacctctagacctttagagttgttacatcttgatctgtttggcccaacaagaacaacctcaatatgtggtaaaaggtatgaacttgtcatagtgaatgattactttaaatggacatgggtaatgttcttagcccacaaggatgagtctttcaaggtcatctaaaaattttcaaaatagattaaaatgaaaatggagcattgtcgcaacctacccttcgtcgggagggcgacgcgagactcacgggtgcatcttccatgg

SEQ ID NO: 28690 - DNA, 310 bp, Glycine max
ctataagcgcgggtctgggagacaaaggtcaagcgttcgcgatatgcgaggatgatattccgagtactttggatttggtacgaccatgccctcctgatttccagctgggaaattggcgagtggaggaacgccccggcatttacgcaacgagcataatgtaaacctttacggttttaaaagctctataattgggcctaggctttagagttgttccttttgttaaggctttgagtcttttgtttatgaatttataatacaaggatctttcttcatctggtcctggtctctacccattctcattcatttgcat

SEQ ID NO: 28691 - DNA, 411 bp, Glycine max
  unsure at all n locations
agcttgtctatctatggaatttaacatcatatatcatcgaccatatatctgctaagaactaaggttttgtctctatgcctagtataaggataaagtcttctgcagtaaactacctcgtaatttagagctacatgacataatttatcaaattcgattaacaaataaaatattttgagagtaacactttgccttcattattcattttttttcattctctcctttttttctcttanaaaaatcaatacaccaatagccgacaataattttagaattgcatttggtttgttaaacatcatgatcaatctatgtgatcattgagcgttggttgaaattcgttaagaatatatatatatcttttattttattactcatttatctattaatgcaaaatatttattgatcttgtttatc

SEQ ID NO: 28692 - DNA, 378 bp, Glycine max
  unsure at all n locations
tgctagaataggtttaatcgcagttcagttatatcagaggcgcctcattntttatttntttttgctttcccattagtgtataatttattttcatcattgtgagatgttatatctgttttttggctgtaaaatatgcagatgatcgtgaggttagtgctgaggagtttgtcaggatggtgaacaataccagctaccctcactaatcgtacagaaaatntaaacttannaatttaaaagaaaaaatgaagctatactgttgctaattgtacgagctgtatgaatgattcccatcatgaggctatgacggtattgcctatgaaatacattgatgttacccatattaatttggtctattctactcattttactttgtctaat

SEQ ID NO: 28693 - DNA, 407 bp, Glycine max
  unsure at all n locations
agcttctcccttattttcctattaataaggggagaggtgaagggaaaaaatgttcagccctcctggtaattcaagatcacttgaaattagtgaaaaaaattggttccgtgaagataatccaagccaaggcgctttcgtaacgattctgcgggtgatttcgcgaagattatcaaccgttcttcgacgttcttcgttcgttcttcgtcgttcttcggtcttcaaccggtaagttcctgaaatcgaacttttcaattcattttatgcacccttggtggtcctcatatgttgggtgtactattattctcgtttcattacttttcgtacccacttatgacgtgttntagtcattagcttacgtcatattctcgcctagtcacaaaataaaatacatattcaccgatcatttg

SEQ ID NO: 28694 - DNA, 306 bp, Glycine max
  unsure at all n locations
tctaatgtatatttctagaccgaaatccaattattaacatctattgccttaatgagttgaccattatttgaccaaaggattntcattgaattatccttattctttctagactttaggttaaaaacttaagagcttaaccatgctttggtgtcctatggtaacatctctttttctatcatttcaatagtctaacaacactattcaatcacacaacatagcaataacattgtctaccacacacacatgataaattgggatgttacagatggctcgttcattctagcatttgctctactaagtaaatgt

SEQ ID NO: 28695 - DNA, 433 bp, Glycine max
agcttcgagataagttacgagacaaactaatttcgtcactcaagggtgacgcaatttaatgctagtcactaagattatgattacatatcatagtatgtcattgttaatgaaatgagttgagatgtttctttcgaaaaagaaaaaaaactatcttaaaacagacttagatttagattttgtacttgtgtgtttggataccttagagaatcgattttaacaacaaaaatcacggtgaatgataaaaaaaatcataaacaacaaagaatagcttcactacaaccatgaatacaaaatcgattatgcaccaccacatcgtgtattaactttgcttatatcgttgaggcggtactataattgcactacattaaactattattaatctttgtttatttgtgctccaccagatctacattatgtggcattggagacacca

SEQ ID NO: 28696 - DNA, 300 bp, Glycine max
  unsure at all n locations
tgaactactctctgtaaatagaagctagattgcatgctaagcctcacatcttatgctaagtgcatatttcagaaaattttgtgttgcaaaaagcactaagcgcagcctgttgcactaagccccagatgctcactggaatatgaaacttcaagttgggcttatcgtgaggttaggctaagcgcttggaatataaactcanatgtcacgtgggcgcgctangctcagctgtgagctaagcgcgccatacgaatttcaggttttaaaataaaaagctgaagcactttgggcgctatctttaca

SEQ ID NO: 28697 - DNA, 347 bp, Glycine max
  unsure at all n locations
agctttaagaatatttgcaacatcgttntggatatttaacaagaacattctatttcttgacattggtaccttggtaattagattatttctcccatctctgatggaaagactagaatctttcatgtgaatatcatagccttttttgagtaattgtcccaaactcacaatattgttcttcatatttgggacgtagtagacatttgatatgaattcatgtcttgcatccttcanatggattatgatcttaccttctgtcttttatacgaatcttggaattataacagattatgcattgccacttactgactcatcaagatccacgatcatgctttcttctcacacatatg

SEQ ID NO: 28698 - DNA, 379 bp, Glycine max
  unsure at all n locations
tcaatgttaatatcacatcagataatgtcaaaaaccgtatcatattatggatatcgtggtatggtattgtaagtgacatccttggccagagtgggtttgattgggatggcactaagcacatgatcacagttgagaatgaaaatgcttggagtgaatattgcactgtaagtattctttaatatgttgctatttgttattcaaagtagattggatntgatgtttattcttttttttcagtcgcataaatcggctaaaccgtntcgattcgaggtgcttcaaaactgggatgatatagtggatttgtgtgctaaagatagagccactagtcataaagctgaaatggtatggatgctgatgaagcgatgagtagagaaacaaa

SEQ ID NO: 28699 - DNA, 440 bp, Glycine max
  unsure at all n locations
agcttgttaattcgtggaagctcctaatatctcccacactttttggggtgggccattcttggatggccttgattttctcaaggtccacttggaccccatttctacctactacaaaacttaagaaaactatattatctacacaaaaggtacatttctctatatttgcatagagggtgtttttcctaaggactgaaagaactttcctaagatgtcctaagtgatcatctangctcctactgtatactaaaatatcatcaaaataaacaacgacgaatctacctatgaaatcccttaagacatgatgcataagcctcataaaggtgcttggtgcattagtgagcccaaaaggcatcactagccattcatacaaaccaaacttggtcttgaaagcggttttccactcatcaccctttntcatcctgatttggtgataaccactt

SEQ ID NO: 28700 - DNA, 384 bp, Glycine max
  unsure at all n locations
tctcccncaattntctataaatagggggagaagtgaagtgaattatggtaagtacctcgaactaagctnttcgattcattctatgtacccgtggtggtccacattgtgtttcgtgtatttttattctcattatatttactttctatacccccttttgacgtgcttaagccattttatttaagtcatttctcgcttaacctagaaataaaataaatttccaccgatcgtttgaattgtattatctgttaacttcggttaaaatgaattccgaccattcgatcgtgccgtaaccacgttggaaatcaaaaagaggtaaaataataatataataatgacaaaatgccttctagtaaaataaagcgaagaatcaattggacgttttct

SEQ ID NO: 28701 - DNA, 437 bp, Glycine max
  unsure at all n locations
cgcaagcttggagtttgctcataccaagtngagtctttntagtgtgaaggagcagaaatatatggaataaatagaagtatgtntaccttttgctaacaatttattgatacatgagtgtgcttttaacgttgaagtaaacataaagttgcctttgatttagggttttatgtcccttcttgcttatgagaatccagtggaatgcccaatgtgtcatctgattggcttagactatcggcaacaagttgtggatagtttgacataactccatatgctcgacaaatgtagtagaatattcttgtttatcaacaattcaattatgaatcaatcacaacgagttacttcacaatattgaatatattgtgggagatgatgatgtggtacaagttcaatatattgtagtaggtttggacattgtnttatgtgtagctcatatattt

SEQ ID NO: 28702 - DNA, 225 bp, Glycine max
  unsure at all n locations
gttaagatgtgctcatttgtataaacaacatctatatataggttgtagttcaagctcacgttaccacaagctgcaataatatgtgaacatggatagtgaagcgcagaataccttccgcattgacaataatgaccatncacgtaaactgcccatctttgtccgccacgttgggtaatatgattgaaggtctcctctacttcanaccttgtggagtggatgtcatac

SEQ ID NO: 28703 - DNA, 382 bp, Glycine max
  unsure at all n locations
agctaacaaaatanttattgtatttagctggctnaaatcaaggcaaggtgttgtgtctaaacaataatctatgcctgaatcaacttacaaataatcttacaataatgagaaaaattaataaacgagttctatatttaaaacaaatatactaacattttacaacagaaaaatagactatataccatacgagataattatcccagctctataatcatctaaaatatgggtacaattgtataacatataattataataatggtgtgagtaatccacacttatataattacacactcatgtaaccattacgagatatgaaagaaagaaatatgctcaaacatttctttatcatattcaagtaatatgttctacatgataagttaca

SEQ ID NO: 28704 - DNA, 395 bp, Glycine max
agtcttttgtttcctagaatacaaggtatgctgaatgtacctggatctttacattcttcagggatttggggaacagatttacgcggagacatttctgcccatactaattctttcacttcctttaagcttccgcttattagtgcacagctccttcaagaatttagcatatcttggaatttgctctattgcatccagcagaggtatgtttacctctacttttctaaatgtttccaatatcttcttctctgcctcttccattattttgttggaaattgctcttggagggaatggaagagggatatgctgcttctctttagaatcacctgcgtagaaattgttaggtaacttacttcttaaattcttgtcatcatctctttctagagtaaagtgacgtt

SEQ ID NO: 28705 - DNA, 625 bp, Glycine max
  unsure at all n locations
tcacagcgngtatcanaccaagtcccgcganagacatacgtatctgacgcacnctcaaccanccaccacncnccccncccaagcccagcagtgcattggggccgttggnanacccatgcaanatacgcgacacnatacagaacgcaagctgggaacgacgctggcaaaggcgggagcgcggattctcgccatgtcagcagcggaacacggatgcggacgtgcgcgagcccgccattgggtcctgcggcacaccttagaagagttgatggaggacgatgcgagaacgagaatgaggcggatcttgatattgcgctgagaatggaagatgctcaagagagagctgtggaaagcggacgttgctacgtgagtgacattctccgatgagagagatcatgacgccaaactagggcacaccggtacatctgtcgaataagacaacaggatataaccacgactagacacctgctaatgtcggacaccaaccacctaatgntttaggtgccaaaccataatgtaacaacactctgctcgaagaaaacaacaattacgacaacaacgtggatcaaggtaccaacctatgtcagtcgacatcggacgagcgcgataccccagaagaacatatacc

SEQ ID NO: 28706 - DNA, 461 bp, Glycine max
  unsure at all n locations
ttcactcttatgatctattcangcgcataagatatgggtgacgctctgaaattgaacgattggaggctcatcgatctgattcatatcggtcatgaactcttgcactctcgaagtcttgattctacgcgcattggtatagtggagacagctctagtgttgaacaactggaacactcttcgagcagatataagatggtcatcaacttctttactacagagcgtcgcgattgcacgctgcataatatactcgagtacgctcaatgattgagcaatggaaccctttcgtgcaattggaagggtcataacttgttactcggatgtccgatcaatgcgaataatatatctagacactttaaattgaacaatggaagctctagagcgattctgatggtcataacttgttcactctgaggcctgattcatgcgcattgtatatccacacgcctcatattgacaacggag

SEQ ID NO: 28707 - DNA, 328 bp, Glycine max
cttgatggtgtcgagaagaaatcacatgtttgtcatcatcacatatggggagaatgtgaatgtatgtatacatgattctgatgatgccaaagaaaaatcaaacaaggttgcttcaaatgataagcattcgcttcaagaataattcaagagtgcttcaacaaacaaagccttgtttcaagattcactaaagaccaagccttgccttagaacaaagtgctttcaagacatgcaaggctctggtaatcaattaccaggaagtgtaatcgattaccaaaagacatggttgagaaatagctgttgtaaaacggtttgaatttgaatttcaaca

SEQ ID NO: 28708 - DNA, 305 bp, Glycine max
agctttcaacttatgtctgctctaaaaatcatcacacagcagataactatacaaatttacccatcatatcttccataaccccatacccacgaaaatcaaaggagatagaggtccacccaaacctgatattgcgaagtcccactcgtaaccactcactgcacgactccaaaaatgccctcctttcgcgatgtggagcagaaacgagcaccaaaggtaggagctttgttggggttatcatggagaattgaggacatagaaagagcaacgtcatgaagagggagacttgctgaacaggtgggggctga

SEQ ID NO: 28709 - DNA, 207 bp, Glycine max
  unsure at all n locations
tcgaagggaagagagagaccaatcacgagcacatagctngatcttgatagaggagtaggctgcttgctcaatgtccnaaagatacttgtctcagcgtttatgcgagacagagaccaacatgttagctatcgtcagcaagtaccaagataaactaaatctagccactgcccacgagcacaaagtggcggacgagtatgcccaagtgta

SEQ ID NO: 28710 - DNA, 102 bp, Glycine max
agcttctagaggaagccacataatggagctacgagagatagctacctgaagctatctcggcaacaatgctttccagacttcgaaaaccgtaggatcttgacg

SEQ ID NO: 28711 - DNA, 249 bp, Glycine max
  unsure at all n locations
agcttccctatttatagaagagtggtgtggcttccttcaagagtgagtggtggatgtcaatcaatgcgttacattcacaatgctccttgtaactctaatcttcactttcctaagtggagtgtgtaagcctcaaggtcaaagaaaccaattacaagcctttggaaagtgcttcacaacttcctatgcatgcctnggaatgtgttcctcaatttcctgtgtatttaaatttgtatgtgtcacaacctaccc

SEQ ID NO: 28712 - DNA, 429 bp, Glycine max
tacatagattttaatacaaggactttaatagtagaagaatccatccatgttaaattcaatgattggtctgtctgttgcacctaaagaaagtgaagtcaaacaatatgatgaaatctttccccagaatgaaggatcttcaaatcaacaaccattgacaaaggactataagttagtccattatcatcaacaagatcagatcattggagatcaaattgaaggagacaaaaccatatcatcattcacaaatcttgtgtcttttgctcttgcagaaatagagtgatgatttgattcttcatcatcatacttaatagtagagaaaataaaattatttctctatgagattgacctaagaaatagacaaacatcactggtgatgactgggatcacgccgacccaatcaataacatatatgcataacttgaaggatct

SEQ ID NO: 28713 - DNA, 217 bp, Glycine max
  unsure at all n locations
tttcttcggatttaagtgangagggacaagccgctaaggcagagcttgaaagagcccgggtagtcgaagagaagttcaagtccatagccatcatagtctgacaagagtatgatgaactaagggacgtcaatatggccacagctgaagccttggaacgagaaaccaataatgctcgaatggaagaacacgaccgaagcaaagtnttgaggggctttat

SEQ ID NO: 28714 - DNA, 344 bp, Glycine max
tcctcggagccatttcctgcgaatgcaaacatttgtatagttatatttaccagtgggacactactcttaaaacaaagattgcatacaacctccccccgtaaatacaaacatcaatgtaaatttagagcaagcatatgcgcatatattcttacgaacgttcacttgcacaagacattctattaactataaacaaatgcacccatatacaatcaaggcagctgtcgtatctacattacttacatgtactatcaacgtgtattagtgactacatcacacacacctccttggctaaatttacatacttgattactcaaacatttggggtaccaaaaattgccatgtgc

SEQ ID NO: 28715 - DNA, 434 bp, Glycine max
  unsure at all n locations
agctagtgagactatggtgtactcatcatatgtggtactatgtggcgatcgggcgatagagcaagccgactgtccacatacacaaatgacacataaaggcaccatacccagttgcccaccttgaactgagctcacgtacttacacgtagaccttatccgatgttcttatcaacaccgggtccccatcaatacctccaagcttccacaacatgcaagcaattcaacatccaaacatcatgagctatccaaaccaagaaaatatggcagaggcagaaaactatgtccacaacacaatccagtgccagaacgttacgtactcaaataccgcagtaacattntctgagttgcgattagacaaccgctggatcgactcaaaacatctactggaggtacctaggacataaatgtacattttgaccgttgggatatgctat

SEQ ID NO: 28716 - DNA, 398 bp, Glycine max
  unsure at all n locations
tgtagagaggagttgctaagaaattganattctcttcattttacaaagaatntcaattctttcattctctgttgaataaaattctntattaaaatgactaaattcaatttctctttaaatgatttatccaaacatgtaattttaccttgaaatatttcaattacatgattaanatgaattacccagttaanagtcatcatctaaacacactcttagtgattntatccggctcgtctagtggaatttacctgtagtcgagacaaaaaaaattacaaaatacccaaaatgttggtcaaacaatatgaaatcgaggagcagaaaatcaattcgtgccccaattgttacccaatcatacaaagcagatcaatcaactctatagcgtagagcatcgtacaata

SEQ ID NO: 28717 - DNA, 402 bp, Glycine max
  unsure at all n locations
agcttgacgactaaagcaacctcccatggtgcacacaaaccttcaaaaatagagtcggctatgtgaaccattggcttcttattcccgacgaccttatctttgaatagaacacgtttatcgacacccccgccatctggtggctcttttctgaagccgccaccacccataccacttgcagagaaaacaaagtcctgagccattntaacttagcctgcgtggttcctcgttacatattagattgaggacaaaaatagtaaaccgaacttcaattaaaaaaaatgcaatactcaataagcataaacgaatgagataaaaatagccattaagtntctactaagttattcaaatattaaatnggatttgaatgtatacacttttattataattaaagtgaaaacttat

SEQ ID NO: 28718 - DNA, 385 bp, Glycine max
  unsure at all n locations
tcttatatagaccctcttcgggttgctntatattcttatagttctggtccatcatgttgaagttagtctccagttctttntgttgtttctccctcctccctcgactatntgtttgggcattcccctttcgcagtctatctacccctcttgtgacaagaataggccctaaatcctcaaccctcatccttcaataacaactccccttcctccttattctatatcctccctcttctacacttctcacacaagttgaaattatttttctcctatcctaatcctaccaccacctccaccaaacccaatgccccatntatgtttccaaaccccttttcaccctctcgcaagtcatcatgcttttctcatgtgctcaaatccctcattcttc

SEQ ID NO: 28719 - DNA, 435 bp, Glycine max
  unsure at all n locations
agcttgaaccatatatctgtgagagtgtgtatcttaaactgtgagtgaacgactagctgtgagtaataatctttgcatgagtctcgtgaatttagaatgaaatgtataaatgaggacatgatgaaggccatgattgtacatatacaagctcttttgaccaaacaacttaccttgaatgataattgcatcctttgctccctttttgagttgaatgatattgtcaaaaaattgaaccctgaacttaaataattatctcctgataccttgtttatattttatgagagcatatggttcaaggagaatatactctaaatctgcgggagggaattcaatcataatgaanagaaaaaggttaagcatcagcacacacaacaaataagttgtctgtcaaaatgataagagaaagaacagaatatattatgctgttacaataag

SEQ ID NO: 28720 - DNA, 304 bp, Glycine max
  unsure at all n locations
tattaatgacaaaactntgcacaatntaatcttgatctantttttcaatcactagaccacaatccatagtgtggtgtgaaaacttaagttctgcattggacgacaggtttaagaacttgttttggttgcaaaatgacttccattgcgaanatatntataattttatctaacatactatntaactcccccctttctagtgtgatttattatatttcaagaacttgggggcttgcataccggataggtattcgactaggttagtaactagtagaaagaatggatataacatcgttacgttaacatc

SEQ ID NO: 28721 - DNA, 438 bp, Glycine max
  unsure at all n locations
agcttaataacccttcttgtagagtatcaagatgtctttgcatggtcatatcaagacatgcccggtctggattccgacattgtgcagcataagttgcctttgaatcctgngtcttccccggttaagcaaaagttacgaagaatgagacccaagatgtctttaaaaattaaagaagtaaggaagcaatttgatgcagggtttttagctgtggctcggtacccagaatgggtagccaatattgtcccagtcccgaaaaaggacggcaaggttcgaatgtgtgtagactaccgggacttgaaccgagccagtcctaaagacaattttcccctaccacacattgatatattggtagataatacagccaaattcgtccttttctcatttatggatggtttctcggggtataatcaaataaagatggcacccgaagatgtagag

SEQ ID NO: 28722 - DNA, 271 bp, Glycine max
  unsure at all n locations
tgtcgaaattgccatgtntgngtgagttagacatacccattctgntttaaggtttttgtgatgatgtttgtgatgtntatatgctgaaattgctgatggacatctgttagagatgaacggtanaactaacccacggttagaaagtgagaatgtgacgttattagttggaaaagagtgagactttgagagttggaacgctaagtctgaattctgtggtacatggagggtagagtgagttaatactagcttgaaatgtcatttataacatgtg

SEQ ID NO: 28723 - DNA, 431 bp, Glycine max
agcttgtcaatttatagtttctagtccactagccattcccatctattaacatgtgcaaattaagaatgcaccaagttattggagagtaaaataatgatgattttgagcaagctaacatgtgagaaataattgatgaaaaagacagacttaatcgtactgagctaaataaagaagataaattgggctgtttggcccatcagacataagtgtgaaatggctattaatcaaataaaaccctttgggctgcaaatttgttgacctggaccagccttgtgtaaggctagcgggccaacaagtcaaatcattcctaattaagaataaccataaaacataaaattaatcatacttaatatacaaaatgctaagaaatgtatataaattaacaaacaaaataaactaaaatggttaattgagttgggtcataaaagcca

SEQ ID NO: 28724 - DNA, 233 bp, Glycine max
  unsure at all n locations
ntntataataattatatacaaaaatgtcacaattataatgatttcttattcattattggtataagtaaacaatgttactatgtataaaaattctaatttaacaaaatatgtttttattaaaaaattcatttcattcattactatgtatagatattatgtattatgccaaatggataacttcagttgtacatgcctgaagtggtgtcataaatgcttaagctacaatacacaat

SEQ ID NO: 28725 - DNA, 364 bp, Glycine max
  unsure at all n locations
agctttgatctatccaagattatacaaaggcgttacaagagaacctaacgattcctaattatatgggccatcaaatctatcatgtgttgacagtaattgattagcccatgaatctcctcgggggcagtacacactntggccatggctattgctttggctaacagatgcgggaggtcttgacttccattcaatgtcaaggcgaacctatccatccacatagtcgcttcttgatgcaacgcatcaatcaccctccctcttgcttctttatcggcatacacttgtgcaaaatcctccactagcttttgttcatgggccacagactggttcaactctttcttttattgccctatgatagctagcatgc

SEQ ID NO: 28726 - DNA, 436 bp, Glycine max
  unsure at all n locations
tatgcgcatatttccttaaaacgttctcttgttcaagacattctattaaccgaanaaaatgcacccatatacaatcaaggcagcttcgttacctagattatttacacgtacttccaaggtgtatttgttacttacatcacacacctccttggttaaattcacatacatgcatactcaaagcattttggggtaccaaaaattgcacatgtgcacatcttggtatttctaatacctatacatacacaaacttcatgatgaatcttgactatctacacaataaggtgctacattttatgctcttttcaagtttttgctacctaaagccgcatgcaaattcaagtatattttcctttgctgactaaaattgtattcaaattaaaaggtatacattttttggtaatgtatcttctttacataacatgcaacatatttatgt

SEQ ID NO: 28727 - DNA, 415 bp, Glycine max
agcttgtggagctgcgttgaggcttaccaaggatgattcttagatttcgtgaacctgtgacactcaccaagtatgaagctcgagcttaacgaaccttgcgtgtgtagcgcacgtgcaatgctcttgtatacatgttgtttggggtataccatgtactgtagtcatagcgtagagctattacatacgtgtcactcgcggagtgatacgtacaggagacatggcgctcttgaatacatggcacttatgaagtggcacatactgaacactcggtgtcatgctatagcatacatggcacagttgaagtggcccgtactggagacatggtgctcttgcatacatggcacttatgaagtggcattacacaatacgtggtgatgtgctcttgcatacatgacactcatgaagtggtcatact

SEQ ID NO: 28728 - DNA, 389 bp, Glycine max
  unsure at all n locations
ntccgccaatggtatttgaggtttaatgataccattatctcctttatatataaggaaaatattgtttatcggtgtatgtatctgaaggtcagtgggagtaaggttattttctaattttgtatattgataatatcttgtttgcagctaacgatcttggtcttcttcatgagactaagaaatttctctctataaactttgaactgaaagatatgggtgacgtaagctatgtgatacggatagaaatattccataatagatcataatgattgttacgcttatctcacaaagtacatatatccataaagtgctacagaaattcaagatggacaggtgtttaacatcgcctattctaatgtataaatgagacacatttattctcacaccaatgc

SEQ ID NO: 28729 - DNA, 381 bp, Glycine max
agctttatgtttaaccaaaatggtgcagttttattcagcattttgcaacactttagctgcattctctgcaactaatgttgctgcattaaacaacatttctgcattcttcaatcaaaacgtgcgaaatggtaaggaatgcagctggaggtgcaataaaaacatgcatgttgaaatcgagaataatcacacaacttctaagtcattgaacttcctaagactcactattcagatgaatggtgaagattgaagcaagaacgaaatggaaggcacatgtgcaattgaggaagtcgttgaagatcacatgacttcactattcatgttaaatcattttatataaattaatatattatacgtcgattgcacggctagtttagtttatac

SEQ ID NO: 28730 - DNA, 247 bp, Glycine max
  unsure at all n locations
tatgctgcanacacttataatagacctcctcatcagcaaaactctcaacaatagaataattatgacctttcaagcaatagatacaatccaggttggaggaatcatccaaatctgagatagacaagtcctccacaacaacatcagcctgtccctcctttccaaaatgctactggtccaagcaagccatatgttcctcctccaatgcaacaacaacagtagcagtcacaacaaagacaacaagcaactg

SEQ ID NO: 28731 - DNA, 397 bp, Glycine max
agcttctctcttttcttgtataattattatattttggttataagccttgtatttggctatgtatttatgacatttgaatacttagtatttcttttattattggattagtatgactgaacatgatgatcatatttacttgctcttggttgcttatggttatgaagttttaaacttaattattttgatgatgtatgactagaggtatgcatttttatttggttattatgaatgactttctggattatatgacattctatagagtattatctgtctaagattgatgaatgattaagatatcttgttagattgatttctattcttgcgcatgtcatttatgtatggtaattatatttcttacctctctaagtttgatgaatggttaacatatcgtgcttaa

SEQ ID NO: 28732 - DNA, 229 bp, Glycine max
  unsure at all n locations
tgccgctggagctgacccatcaactgccctatctctattagactggtgatccctaagctcttgagcttgacttgatagaacctctttntaagcgaaggcattcgacttgatcccatgttttactaaagtgaacaaaaatcggcgcgaatcanaactccaacatctatcatgggtggaaatggatgaatgcataaagaaatgcatatgacatatatgcaatttacgaata

SEQ ID NO: 28733 - DNA, 385 bp, Glycine max
agcttgagaagtggtatgtgttgaagggtgaaacttcctgcttttattgttgaccacagagtggtacctgcagatatgtcgcgggggtcaggagaccttggggacgtcatgtggggtgctattgcccaaaaccaagcttgaccaatcccgacccaacccgggcatagtcggtcagtgagaacctgtgatgtacctaaacaggcgagctcctggcacttaacatataaaacgaacacagaccacaaagcaaggaggctcgctgtggctggccaactgtgaattttgagtgatatgtaaagtaatggcctctggtaatcgattaccaagggtgggtcatcgattacaaggcttagaaatgaagacaggatgctaagatggtctctgg

SEQ ID NO: 28734 - DNA, 259 bp, Glycine max
atcttctaacttttatcctgaggtgaaatacactactgtcgaccactatatgaatgcgtttgtctgaagtccagataatgcgttatcatcaatatactgctctacctaagctgatcaataaaatcagagcatcttgtttattgctcacgaatatgtaccttgttccttattgccgttcgctacttcgcttaactatgcactgcttgaaagttcttctaatattaaaggtctattactatttgctacggtgtgaatgcga

SEQ ID NO: 28735 - DNA, 442 bp, Glycine max
  unsure at all n locations
atgttcatgctctgaagacncgtttatctgcttatgtacttacgtcnaatccaggcaacanaagcctatgggtgtgctgcattagggaaatgggatggattctaggtataatacagtatatactttataacctaacctatgatctgggaccactcacgattagtgggaaagcactgacatcattcttttttctttaacaaaatgtcgatgttacctaagcgataaggatagaaggatggccatactatatcttcatgaaggtcacgctcaatgcacagagtacgtaatgatagtaagcgctagagacatctttatagaacgtgctttgctcgtcaatctcttnggatgagaactctctactacggccagtgtcctacattctcgtcctaccttcactttatcccttacataatcgtgtgcgttagagtgagtttctttttcg

SEQ ID NO: 28736 - DNA, 312 bp, Glycine max
tttcatgctttcttgagatgatgaagtgttgaagggtgaaacttcctgcttttattgttgaccacagagtggtacctggagatatgtcgcgagggtcacgagaccttggggacgtcaggtggggtgctattgcccaataccaatcttgaccaatcccgacccaacccgggcatagtcggtcagtgagaacctgtgatgtacctaatcaggcgagctcctggcagtcaacagataataggaagacaagaccacatagcatggaggcttgtggtggctggccagctgagaatttagcgtaatatgtggattgtg

SEQ ID NO: 28737 - DNA, 358 bp, Glycine max
  unsure at all n locations
tctttatatatatatatatatatatatatattccttgggcggatcaaaatanataaaaaatattgtgagccttgtggacgagattctagagggtaatttgaagaacaagatcattgtaaacagttgtagcatttgttgctagagaaatgattatttggactcaccacgttcactagagcagactcggctctaactcttttagacagcttcaaattaattccattgttcattatcaaattgatatgaagcacatgatcnaatctgtcagcagttttattatagtacaaagattagcttcacatgaatggatgttctttttatatacgcatggattttattacatatatgtttcaaagtt

SEQ ID NO: 28738 - DNA, 437 bp, Glycine max
  unsure at all n locations
agcttaatgagtgctacataaaaattccgagaaattcatacaaaaacctagaatgcatgaactcgctaagcacgacatgccggcttagcgagttcatgtttccaaaacccataatgtatgaactcgctaagcgcggagatccggcttagcgcattcatcattttccagaagttcaactcatgaacaaacacaaaaagagagcagaatcatagatatattgactaattacaacatgtacatacaaaacctaaacatagtgcaaatcataacatagtaaataaataacatattataatagaacatgtatacattcaggagaaaaaaattatgaatgaggggaagaaagtgtgtacttgggagcaaggaatatgaattatgcacgagggaagagcggctcaagctcgaatntcacaaagagtgagtgagtgagaagagtg

SEQ ID NO: 28739 - DNA, 404 bp, Glycine max
  unsure at all n locations
ctttagaacttgggggcaatagtcattcttatgacgttgactagttaagaaatatattaattcctatcaaggataggataacaggagataacaacatgatctctacaagtgtttctaatgaaacactagcaatctttagataaaaaataaaccacaataatcatgaaatgtntaatactttaacaaaccatatgacctcaatcttaaatcctacgttaaagactaccaacgacagttatcaatagatgaatggtatcttaactcacacaggagatactttggccattcctagaaacgaacctgngaataaacatgcaattcaagaaatactagtacaagaggaacctattaataataataatcttgaaaacgaagttaatgtcccgtcacgaatagtgagtgat

SEQ ID NO: 28740 - DNA, 437 bp, Glycine max
  unsure at all n locations
agctntaaaatttgaattataacgttcaataaccgctggtaatcgattaccatatatgtgtaatcgattacacagtgcaaattttgaattcaaattttaatagatgttgtaaatcatttttggccactggtaatcgattatatcctctggtaatcgattaccagagagtaaatctcttgaaaaagactttttaacttaaatttcttggccaaaccttttgctacttcaattaggaattcccttcctatttaatatacccttcctaagactctagagactgtcttgatcatccatcttgaatatctttaatttctttgtcttgaataaagctttgagaagcatgtgatcctttggcatcatcaaaacattcagcttgatcctttgtctacacaaatgaataaatatttacctcatgcatacattntanaacgtactat

SEQ ID NO: 28741 - DNA, 369 bp, Glycine max
  unsure at all n locations
ctcaagcttcagcctgatcgctaagcgacaacttatccttggctaagcatgacctattgttgtatagcacaattccttacaaccataactgagatcaatgaagctaagtgccagtgagtcctcatcaactaagcgcatgctcctctgtacttaagatgcatcattntagctaagacagccagagtctggcttagcgagagttgcagctttttggatctgcanacctcgctaagcggtctgatcctcacgctaagccaagttgtgtgtaaaaaaaataattntgaatttgaaacgtcgactaagtgcgcgtatccgctaaacgagccttgttgagaaaccaaatgtctctctagctcgcttagcgcagtg

SEQ ID NO: 28742 - DNA, 266 bp, Glycine max
  unsure at all n locations
gagccntgcctgtctttctttcttaaagcacatgaatggctaaggcatctgacctcatcatcaactcagacgagtgttatgcctctgacatgaatagtatgatgcgccctgtgcttacagactggcggagtctgtcatgatgtacatagccaaccaacctgactgtattacacagacaactcgctcatcaggagcatacacaaagatggttcccaagagcttctttgcgtcggagaataataacactaaaaaatcaggacattcac

SEQ ID NO: 28743 - DNA, 177 bp, Glycine max
acatcacaggtaatccatcagagaatatgagaagatacactttcgtgcacatacatgaaacattatgcttttgtcatattgtacaactgttcctaaatagacaagaaaggccttacgcgtgtgaacctaaccaactatgaatttgggttgtcgaaatacatcaaccagatacatgtg

SEQ ID NO: 28744 - DNA, 409 bp, Glycine max
agcttagaacttaaactatgtcttctcttaattgactttgggctcggcgaccacgatcaacaaagtactttctgcacctactatatgttgacttgaccaacgctgatattggaatgctgcgacaatctttcaacaccttattgacacattctgataggttggttgtcatgtgaccatatcgtcgtccagatgtatcgtaagccatgctccatttttcctttgaaatgcgatcaatccatcttgctatggctggactcagttgacgaaatttttctgagtattgatcaaacacatgcttgcaaggagtgtacgctgcatcagattagtatcatcaaatgttgtacgtagacatcaaactcaaatcagattaatgtataaaatcaaccttacccaatctcttgaacatctc

SEQ ID NO: 28745 - DNA, 228 bp, Glycine max
  unsure at all n locations
gcttatggcagttgtagtatttgtatactctaaggcagcttctaaggtgtacatcttattctatgtggatgatatcataatcacgggaaatgactctaaactaattcaaacacttgtgactcaactaaacattntccttaaaagatgttggagatcttgattattttctagggatagaagtctctcattatacagatgggtctcttactctcactcaatccaagtatc

SEQ ID NO: 28746 - DNA, 428 bp, Glycine max
agcttaaatgatgttgttttatggttaacatgtcttgatagaaggatttatgttaattatgttagttgtaattcagtatattagttgtaaagtttggtagtttgtttagttagttgagtgtgataaggcagtgattgaggctgaacttgagttgtataaatggcctttgtgtaattcaattcataatgcaattcatcacattttagtatatgctttttcttggctttctctctttctccccaacatatttggtatcaagagcactaagtcttgggactaggtgggataagagaggtgtgaattgagaaagagtggtgagagattcaaacagtgtggatcctttgagtgtgaaacagttgagagttgtgagattgtgagtgaagcaatctgtgaggcattgagaatcaagatttggcgaatttggatct

SEQ ID NO: 28747 - DNA, 320 bp, Glycine max
  unsure at all n locations
tcctcaccaaccacactttatgatcttcacgccattccagtctntattacacgattcccatcacaacataacaaatcaccacgtcagaggagccataattgcagcaagtaccctaatgccacatcaacgtactcactgcatgtactctcaacccattngttttcccttgcacttactccaattcagcanactcagtttgcanactacttaacnntatttcaaaacgccaaatcagcaaatnatcagctcatttagctaataatcatttccccaatacttgttaaaaatattcttttacaaaaaaaaaaaaacagtccaca

SEQ ID NO: 28748 - DNA, 431 bp, Glycine max
  unsure at all n locations
agcttaagcttcttcaactgcacaaggctcttaatatttgaagagtatccttgtggaaccttcacccgatgaagacactgacaaaaacttatctttgccttcttggacaaagtatggcaggctgggggcaagtaaatcttcttcccatcagaccttggatgcaactgtgatcgtatacccatatcagctagatcttgatgggtattcaagccatccttcgtcttgccttgaatgttaaggagcgtcccaatcacactgtcacaaacattattctccacatgcataacatcaatacaatgtctaacgtcaagatcacgccagtacggaagatcacagaagatggacctcttcttccatatgcaacgctgactnttatccttcttttgggtcttcccaaatactatattcaggtgttgaacccgttgatatac

SEQ ID NO: 28749 - DNA, 386 bp, Glycine max
  unsure at all n locations
tgttntaatgtgttataagaaccaatgctcctatcaacaggcatattccatgaccccagtccccaaacatcagagcanataagtaagggaatataatagttgggtaaactataggatttgcttcttggtatcttgcaacactgccaagtaaaagggctaattangaatctaatcagttgtcatggatttattatataccgagaagaaatggatagtaagctagataatttgtatccaccctgganaaacaatgcactataaagcagtcctaaaatttacttcaagacatttaataattcatgttgctgctagtaaagtaactaaacactgtatgcatcaccaatttcttgataaggaattgtgaaagtgttggtcctaanatatgt

SEQ ID NO: 28750 - DNA, 242 bp, Glycine max
  unsure at all n locations
agcttgcagattatcagngcttatctaatgtagtggcttcaccctatacgcgtctatagctattagctggaatgtgagaattgctattttctattactttgcttactctttccatgcacgggcgattcatgatgctctgcattggttctttgccatgtagcttttccagctgctggatgagagaaaaagaacaaatgtcttgcggcttcttgcaacaattaatcagaaaatccctctacata

SEQ ID NO: 28751 - DNA, 370 bp, Glycine max
  unsure at all n locations
cttcattcagattgctctctattntctatccgaaccttccaatttaacttatgctaggactagatttattcattgattgttgtcaaaaataatttattttttacccaaataaatttttatattaaaaattaaaaacaatgtattttctaccaataagcatttcttatataaaatattagaaaatcactttcaacctaataagaatttcttatataaaagattgtcttatataaaattaaaaataatccagaaagaaagattataaagatacatgaatttatataaaagacatacaactaattagatatataattatttttaaaaaagagttgaatgagtgcaaaatgtatttgtattcaagagctataac

SEQ ID NO: 28752 - DNA, 422 bp, Glycine max
  unsure at all n locations
agtcttttattattcttggcccgcggntccttggccctcttgcaattatgagaatatggagcttctgtttgttctatgtcatggctgaattgtgggggagtgtggtgatttcggtgctgttttgggggtttgccaatcaggttgtttcattgtttgaactttgagcttactttgttagttggtaatttgtttctggctttaattntgttatagtatttgttggtgtcgttatcatcttaacattntttaattttggtatctgaacatggcttattgatttcatcatcatgaatggctgttgtttgntggattgtgtcacttttcagctattcgttntggtcatattcatttgtatgctgctcctttctctatagcttagccgcttagcttttgatgagtcccttatatgttattatttcttg

SEQ ID NO: 28753 - DNA, 332 bp, Glycine max
  unsure at all n locations
ntgtgaagagcaacgtaagagtagtccagatnttttgctattatcattcattatcccaatatctatccctaaattgtgaagagggaagtaactcacgtgagtctcactattatagttgtatatatagaatgtacataaaaagtcacacacctacacagtaacaatattgcactctcgttagcatattaagccacaatatctcattgtcttattattatccaattcctttaactaactcatgtcaatgatcacatgtaccgacaaaatcttttttgtgaagagtgatgtangagtagtccaaacattttgctattaatattcattatctcaat

SEQ ID NO: 28754 - DNA, 433 bp, Glycine max
  unsure at all n locations
agcttgtatgattatggngtacccatcacatgtggtactaggtggcggtcgggcgatggtgcataacaagttttccacatccacaatgcgcgcataaacccaccatcccctgttgcccacctccaactgagctcacgtactcccacatagcccatatcctcgtttctctcaacaccggttccccatcaatcctcccaagcttccacaacatccaagcaaaacaacattcaaacagcacaagctatcacagccaagcaaaacagagcaaaggcagaaaactctgctcaacacatcaaccaaaatcacagctnttctcacttaaagaccacagtaacaattccttcgatccaattcgttaaccgttggatcgactccaaaattntactggaagtctatagtgcataagcctacattgtgaaccgtgggatctact

SEQ ID NO: 28755 - DNA, 378 bp, Glycine max
  unsure at all n locations
tgacacctgtnccaattttntattntttggtcattntagatgttcaattcctactcctctgcttgtgccacgtgcttggtgcttaaaccagttntcattntttgggtgtgccacgttctttgatggttaaagctttccggtgggtatgtgctacagcgacacatgttttgctttttttcactgcagcaacacgtgnttttctttttttctccaaaattatattatctttccatttctctctttgcagtacacacgggaacctggagaattctaaatacgaaaaaaatcggagttgagattttttattgtcttgcattttttcacgtttctaaagttttactcacttgtggtgtgattcatggcacctttatccacatc

SEQ ID NO: 28756 - DNA, 272 bp, Glycine max
tttcatgcaagcttgaaccttgaaccttgaatcttgattcttgagtcttgaaatcaaatgttctcttgaaccatgaagagttcttgattcaatcttgaatatcttgaactcatgtctttgaatcttgagatcatcatctatgttatcatgaagtgttcctgacctttgagcatattgtcgtcacctgtgttatcatcccaacttcattgaatcaatcttgattcatcatgaagcgttgatctacaatataccaaactactgttagtaaatat

SEQ ID NO: 28757 - DNA, 240 bp, Glycine max
  unsure at all n locations
tgggctcttgcctcactcaccgccttgttgaggtcattnctatctatcttatacttatcccaagtttcagaattgctacacctagaccactccttgaaacactcgctttttactctaactctgctctgaacattatcattccaccaccacgattctttacccctaggtccaaaacctctagattcactcaacgtctctgtagccactttaataatctcttgggacatcttgttccacata

SEQ ID NO: 28758 - DNA, 253 bp, Glycine max
  unsure at all n locations
agcttgagtgtttacatgggtgcatgcacaatctgttttgcataattttctaaatcatcgttnttatatgcatgtcacggaaataatgtggggcattcccttttatccctgaaccactggccaaagcaagtaccctgacacattgtttccgcccctacgaatactacttgtttgtgtgggtgcgagatctatcgccaagtgcaccagatcgtcaagtaagtaattaaaacagaatgatccgagtatcatactc

SEQ ID NO: 28759 - DNA, 289 bp, Glycine max
  unsure at all n locations
tctagccaaatggacttaccttgaattaattcctttgatagcctctttgagccttgtttccctttccttgttgtgaagctcactacaagccttaagtgaaaaaccatgatatcaccatatccttaacgaattatggagctctggaattgttttgggaataagtgtggtggggttttgtttcattggataacatgttgtgttggctatgcttcatgatgtattgtgggccatacttgatgtacattgtatattggntacatgtcggacatgctggaatagatgctgtttc

SEQ ID NO: 28760 - DNA, 418 bp, Glycine max
  unsure at all n locations
agctntgcagatttggtcttcgccagtgaataggtcgatgtgggtccgaanagaggcaaatttgatcatcctactangacgactgagaaaactggggcaaataaagagggtgaggataagggagaaacccatgctgtgactgccattcctgtacgaccaagtttcccaccaacccaacaatatctttactcagccaataacaaaccttctccttacccaccacccaggtatccacaaaggccatccctaaatctaccacaaagtctgtctaccgcacttccaatgacgaacaccacctttagcacaaaccanaaacaccaaccaagaagtgaattntgcagcgagaaagcctgtagaattcaccccaattccagtgtcctatgctgactngctcccatatctactngataattcaatg

SEQ ID NO: 28761 - DNA, 404 bp, Glycine max
  unsure at all n locations
tattacaagtcagtgagacaacctcaaagaaggctgaatctaataatgaaagaagaagtaagataggaagtgctcaagttggtagaggcagggctcatttacctaatctcggatagttcatgggttagtcttgttcaagttgttccaaanaagggaggtatgacagtgataaagaatgatagagatgagttaattcctacaagaatagttactgngtggaggatgcgtattgattacaggaagctaaatgaagccactanganagaccattacctgctccccttcatggaccanatgcttgagagacttgcanggcaatctttctactgtttcttagatggatactcanngctacatcaaattgcagtggatcctcangaccaagaanaaacatctttcacatg

SEQ ID NO: 28762 - DNA, 424 bp, Glycine max
  unsure at all n locations
agcttgcattatttgttggtataatntgcctgtaccattacgctcttaatgtctttagaggttacttcctcgttgacatcataagccagccaatagaagaagattttcaagatctcttgtttgaagcaatcaattccatacctgacccccaagaaaagaaggtttttctggacaaactcaagaaaacattagaggtaaaacctagacaaaaggattttatcacaaacaacaaatctgatgtaagtaacatactcaagagagtggaanattcttcaaccaaaccaacgacaatccaagatctccaaacagagatcaacaatctagaaagataggtaacagaatttcgtcaacaacaagatattcatcagatcattctttctcagctcgagggagatagtgattctgagagtgccaacaacagtga

SEQ ID NO: 28763 - DNA, 461 bp, Glycine max
  unsure at all n locations
tataagaacanaattgccttaatcatttccaaatatgcatgtgtattaggacgcatcaacaagaatcaagccaaggctattgtgcaagcaatcaatggngcanaacataccaaatgattataatgatggatggctcanattctcacacaggtaaaatcatcactttcaaattgagctttcaaaactatcatgacatgtacagaagaatcaaggatttcaagtcacaaaatgtcaagaacttttattttcaaaacaattgcccatttttttgaacatatcctataattcagagaaaaacatgcaaagtcatacgtgcacacgaaattgacccaaaatattaaactgataatccgacgaaactaacaacattaacaaattaacacaactaacaagataacaaaaccaacaaaactagcataaccaaagaacactctcccctccccccatacttaaaacacaca

SEQ ID NO: 28764 - DNA, 440 bp, Glycine max
  unsure at all n locations
agcttgtatgattatggtgtacccatcacatgtggtactaggtggcggtcgggcgatggtgcacaacaagttttccacatccacaaagcgcgcataaacccaccatccgctgttgcccacctccaattgagctcacgtactcccacgtagcccatatcctcgtttctctcaacaccgggtccccatcaatcctcccaagcttccacaacatccaagcaaaacaacattcaaacagcacaagctatcacagccaagcaaaacagagcagaggcagaagactttgccaaaacaccaaccaaatcacagcttttctcacttaaagaccccagtaacaattccttcgatccaattcattaaccgttggatcgactcgaanattntactggaagtctatagtacatgaacctacattgtgaccgttgggatctactatcanacat

SEQ ID NO: 28765 - DNA, 418 bp, Glycine max
  unsure at all n locations
tcacgactntnttctatanataggcaaaggggggccattccaaagggtccctgacccctatgttatgaatntcagttatttttggtgaaaaaacgtgtttccgtgaagaaaatccaagccgaggtgcctccgtaacgcttccaagacgtttccgtgggtgattccgtgaagattnttcgtcgttcttcgttcttcaacccggtagttttcgaatccgagactttcanttcatttcttgttttgttggctttcatcttcatttcgtttactttcggttgtcttttctttcgtatttaacgagccttcaccgatncgttcaagccgtatctcgcctaattaatttgtaaaatgaaatttaaccgatcatttgtgttgtatctcgttaatcactgttaaataaaacccaccgatcgtcacg

SEQ ID NO: 28766 - DNA, 417 bp, Glycine max
  unsure at all n locations
agcttcttatccaaggctcatcttggtggtgaagctccttcttccatggcttattccctagtggatggcacctcctctcacctcttctcatttgtcttccgctgcatctccatggtggaaaatcaccattaaaggacctcattgaagctcaaagatccagcctccatagaagccccacaagcaagcttccatcacaagataccttggacacgcatgtatatggcaaaatagctcacaaaatatacgtatgtttaggtagcaaaatacctcacaaaaaaagagagagagcaaaaagagagcgagcaagataagaataagaaaaaaataataataacaagttgtctagctaanaaacaacatgcttgtgaaaagagataatttccaactattctttgaaagaatttactgatcttaacc

SEQ ID NO: 28767 - DNA, 196 bp, Glycine max
cagcttagctacacacacctgtctaatagctgagtgcacctccttgagatgagaagctagatcttacctacacaccccctataatagctaagctcacccatatgcgcaaaaacaagaacatacaaaagatgtccctactacaaagaccactctgaatgcctcgacgtacaatgcgtaaaccctatactacttaaat

SEQ ID NO: 28768 - DNA, 355 bp, Glycine max
  unsure at all n locations
tttcttgccacccagctcgcccaggcgagttatgttggtacctccagaaggcaccgccgccttctggatgaacttcctggaaggcccaagtgggcctggttgctatttgcaccaccctgtnttataaatacaccccctgcctcttttgctgattctttttccgtaacgttacaaaactttacgaattccgtaacgatacttgttttcctttcgtaatgttacggaaccttacagattacgtaatcattccttttctggctttcagaatgatacggaacctcatggattgtgttacaatgcttccttttgatttccggcatgttactggactttcatggatcgtgcaacaatgctc

SEQ ID NO: 28769 - DNA, 259 bp, Glycine max
  unsure at all n locations
cgcatgaattagtagcaacaaattcagagtaattattaaagatgaaaaactgaacagaatntatcagtaataatagaacctcaaagagaattgtgcttgatcctcaagagaaaacaacgctgcggacttagcctttcattaatcaaatagagaatgaaattttattgataaactaaaagtctaaactggaattgtaaaaaatgataaatagaagagagagagagagagagctcaactagaaccttggtgctggtatata

SEQ ID NO: 28770 - DNA, 251 bp, Glycine max
tgcaacgctatataagcgtatctgagacggtctttttggaagattatacaagggtcaacggtgacattctctcctctgtcgccgaactcctcggagagggctatggagagtgtggcaatgaggactgtgagaatggaagagtatgttgcttccttcttcatcaccatcatcatcttcttcttcgatagatagagactatgatgccagagagaaataattcatcaaagcccaccagattctctctctcgtct

SEQ ID NO: 28771 - DNA, 431 bp, Glycine max
  unsure at all n locations
agcttcctcggtgccatttcctgcgaaggcaaacatttggaaagttagttttaccaagaaatgctactcttaaaacgaaaatggcatacaacctcctccaataaacacaaacatcaatgtaaatttagagcaaactcatgcacatacttccttacgaacattcactcgcacaagatattcttctaactaaaaaaatgcacccatgcacaatcaaggcaccttcgttacctagatcacttatatgcacttccaaggtgtatttgctacctacatcacatgcatttcctttgctaaatttacatacatgcatactcaaggcactntggctaccaaaaattgcatacatgcacattcangtatntctaatacctatacatacacaaacttcgtgatgaatcttggctacctacacaataaggtgctacatttca

SEQ ID NO: 28772 - DNA, 429 bp, Glycine max
  unsure at all n locations
tgtaggattatggngtacccatcacatgtggtactangtggctgtcgggcgatggtgcacaacaagtgtttccacatccacaaatcgcgcataaacccaccatccnctgttgcccacctcccaactgagctcacgtactcctacgtagcccatatcctcgtttctctcaacaccgggtccccatcaatcctatcaagcttccccaacatccaagtaaaacaacattcaaacagcacanactatcacagccaagaaaacagagcagaggcagaaaactctgccaaaacaccaaccaaaatcacaccttttctcacttaaagaccccagtaacaattccttcgttccaattcgttaaccgttggatcgactccaaaaatttactggaagtctctagtacataagcctacattttgaccattggtatctact

SEQ ID NO: 28773 - DNA, 434 bp, Glycine max
agcttggctattactttatacatgcaaccaatgagagaaatatgtctatagtcatttaaagactgtggatgggttgctttacgaataagagccaagaaggaggcattgctgcctctagggaagctgccatgaatatggaattcatccacaaatctcctgaattcaggtttcaaaaccccccaaaattccttattaaaattgaaattaaagccatctggccctgagcatttgtctccaccacaactccaaacaacatctttaagctcttggtctgaagaaggggcaattttaccctccctctgcctctgatcaatcatagggaaatataccccatccagagaaggtctgaacaatgtatcttcagtaaatctatggagagagaatttgagaacttcattcttgactaaattatgctggtgaacccatacaccatc

SEQ ID NO: 28774 - DNA, 245 bp, Glycine max
tattggattatggagcacccgtcatatgtggtactaggtggcgatcgggcgatggcacaaatcaactctcccacttccacaagtcaaacataaacacaccatccccaattgcccacctttaaattgagctcacgcactcctacgtagcccttatccttgttcctctcagcaccgggtctccatcaacccctccaagcttccacaatatccaaacaattctatttcatttatcatgagactaccat

SEQ ID NO: 28775 - DNA, 401 bp, Glycine max
agcttaaacattcaacttcgagcgtctcgatatattacgggactcaatcagacatccgagtaaaaaattattgtggtttgaattggctcatagattcaactttcaatttcgagcgtatcgatatattacgggactcaatcagacatccgagtaaaaagttattgtcgtttgaactagttcagagattcaacattcaatttcgagcatctcgttatattacgggactcactcagacatccgagtaaaaagttattgtcgtgtgaattggaaaagaggttcaacattcaatttcgagcgtctcgatatattacgggactcaatcagacatccgagtaaaaagttattgtcgtttgaattggctcagagattcaacattcaatttcgagcgtatcgatatatta

SEQ ID NO: 28776 - DNA, 334 bp, Glycine max
  unsure at all n locations
ntgagccaactcanacgataataactntntactcggatgtctgattgagtcccgtaacatatcgagacgctcgaaattgaatgttgaacctctgagccaattcaaacgacaataacttttttcacggatgtctgattgagtcccgtaacatattgagacgctcgaaattgaatgttgaacctctgagcaaattcagatgacaataactttttactcggatgtctgattgagtcccgtaacatatcgagacgctcgaaattgaatgttgaaactctcagccaatacaaacgaccagtaacttttactcggatgtctgattgagtcccgtacatat

SEQ ID NO: 28777 - DNA, 306 bp, Glycine max
  unsure at all n locations
agctntagactcaatgttaagtgaatattatttagccgataaaatttaaacattacattctattaatatttgaaattttgtatctgaaggactattgtttcttttaaaaaaattattactgtattaagaaattataataatattcacctccctttgttagaaaagaagttattaaggaataaaacatgccaaaattatgaggtgccaacttanaattgacgtttatattccaacaatttcgtacaacaggtgcaagatgcaagaattcttaacaaaagaatgcttctcctttatattacagatctc

SEQ ID NO: 28778 - DNA, 308 bp, Glycine max
  unsure at all n locations
tgacacagcttctgcatggacctgctgtaattctagctagatatatatcttaataaaggttcatagctnttccaattgggtcttanaagtgttcacacttcaaagtagtagctggagatcaattgagctgtatattgagaagatagattgcaactttntagggaattaataaataattctgtagccattttcatatgttcacacacaattcatggttcccttgtaaacatagttgttgcttttgcaaatatctactgctanacaaaagnattactgcatggggatgttataatctcttttattttatc

SEQ ID NO: 28779 - DNA, 175 bp, Glycine max
cacacagaccgcaaagttagttttaccatgaaatgctactcttaacacaaatatggcatacaacctcctccaataaacacaaacataaatgtatatttagagcaaactcatgcacatacttccttacgaacattcactctcacaatatattactttaactaaaaagatgcaccca

SEQ ID NO: 28780 - DNA, 401 bp, Glycine max
  unsure at all n locations
agcttgtagaatggctagacatgatacatgtcanggtttggtttggttcaaggataaaagggatgccccacattatttccatgacacaaatgcaaaaatgatgatttggaaactttatgcaaaactggtcatgcatgcacctatgtggacactcaagtgtcaaatttttatggtcatgtgatgctagggctcangattcatttcctctattntagtcaacccaacgtttccaaaatatgttcttttatcaatttgtgcattcatccgagtccattttgggcgtctgggaaaatcttcacagcattcacccttcaggtgtatacacattntttcaaaaactagttatgatcagtgaaatttttcatagaaagttggagtcatctctttcaaagcatgttggt

SEQ ID NO: 28781 - DNA, 339 bp, Glycine max
  unsure at all n locations
taaagtatgcccgagtcattcattcctatgagatgttgttgaagtattggcgatcagaattgccattccttggattataggattgaaccaagctcatgcttttacaaaaaggttcatcaagtcaagttgaaatacggaagtaaccgtcttgcanaattgtggcaaaagatgaatcgagtcacatcactgcttcatctactgccaaacatatttaggattgttgatgtccttgttacttccagtttcaccttgacaaaagtgtcatggaccatgttgaanatctaaattgattcaaccccatattctgcgtaaaaatcgcaatacttcaacttacatcat

SEQ ID NO: 28782 - DNA, 413 bp, Glycine max
accgaaacgcccagtgcgcgcgagcggccctgcacgggctttaacactctcatgtttcgtgcaatgtcggccagcggcacaccggctgcctgggcgcatgacgcagcggccagcgcattgcgcacgttgtggcggccggcaatgtgcaagcgcaccggggcctcgcccccgggagtgaccagggtgaactgccaggcatcgcccagccacagcgcatcgcgggcatggacctgggcgccatctgcagactcgccgaacagcatgcactggcgcgcagcggacagctcgcgccacagcggcgtgtatgtgtcgccggccgggaacactgccatgccatcggcgggcagggacagcatcacgctgccgttctcgcgcgccacggtcttgagcgtgtgcataattcctggtgctcg

SEQ ID NO: 28783 - DNA, 115 bp, Glycine max
atgagcacgctctttggtatcctgatggagattaggcgcttaagaaccgtcttatgcccgctcgagtacctctttaggaagctggggcaaattgccctggtgaccctgcttcacc

SEQ ID NO: 28784 - DNA, 516 bp, Glycine max
  unsure at all n locations
cacccaacccacaccccagaaacgaaggacacacaagccacccaccaaacnaaaaaaacgaaaaatgaactgaacctcgaacaaaaaccaacagagcgacgcaanaagacagngcaacnagaaacttcagactccagccaagacgcgaaaccccaggggagcaagacaacccccgcancaacacaaagnaaggaaagcaacacccacacccacgcgccagaacgcaaaaccagacaaagccgccacgagcaagagaanccaaaccgaaaagagcagcgccacaagagaaaacgcacagcagaaaccaagcacaccaagcgacgacanccccaagcaacaaggccagcncaacaggacgcgaccnaaccaccngcaccaaacacacgcaggcaaacccaggaacaaccaacaggagagaaacccagcgaagccacaacaaaagaccatacgcgcgaagaccancaccgagccaaccccacaacacaaggcaacgcgccaccagcagcaagacaaacg

SEQ ID NO: 28785 - DNA, 564 bp, Glycine max
  unsure at all n locations
acaccgcatgacacacaaatggaaacacaagggaggatggtgaaagagagaggaaagcgacgagacacgacaacaccacacaaccncaatgaaacttgagacctgacacncccgagaaccananaaanncaancnngagaaaccncgcnaacnngcagggaaaggtcaagagttgaaatgagngcggcgcaccgagacggacgagaaagagaccacccccgccgcaccaaaccagaagaacgagatggcggtgcaaccaagccacgatcgagtggagacgaagcacccagagggagcccgggagacccgcgaaggcaacacgaggcgccaataacagagcacgagccgaaacacggctacgccacgggagcacccagaggaacccacgcgaacgcgacagcgcacggaggaacggataccacccacgccaacaccagaacatcgagaggagccagcacaagagagcgaggcaacgnncgccgaggaagaccccagagaggatctcgaggagcaaccaccggagccagccgcggaacaccctgaccacacagaagaagacgagcg

SEQ ID NO: 28786 - DNA, 427 bp, Glycine max
  unsure at all n locations
tggatattggatagcacgtggaatagccgccctatctgttcntttggagaaaaaagctaggcgtggtgagctagctttatatgttcttcccagagcagtagattcattgtggtatatcttggtgaacaggcaccttcttccaaatatcaggaatgctgaggtatgccctctagttactttgcactgaattaaaggaaactcttttctgatctgtttttctagcatcctccaaaaataattttctagaactctagtgacaaccataatttgctatgaaatgaaagtcagcttttattgttgatacctcttttgatgtttntaagttccaatatctatccgtgcagttagagaatgtgagaattttcttaaaagggaattaagaacagtatctctcaccatgtctcaaatggcagtatgcttgtctttg

SEQ ID NO: 28787 - DNA, 284 bp, Glycine max
  unsure at all n locations
gacttattccttattgganggcaccttctntcacgtctgatacattgtcttgcgctgctatctccatggaggaaaatcacccattaaggacctcattgctgccaaagatccagcctccatagaagccccacggggcgcttacatcactggctctgaggatcgacgatggaccaacacagcgactatcatggaaagcggttccattggtaaaggtgacctgcggacgcacatctggataatatggcacgtaggaattaaagagtcctatgccagccgcctatcca

SEQ ID NO: 28788 - DNA, 411 bp, Glycine max
  unsure at all n locations
ggctctaaatttacattgangnnngtatntattgtatgttgttgcacgncatttacgatttaagagtagtgtcccactggtaaaactaactttccaaatgtttgccttcgcaggaaatggccccgaggaagcttgcctcaaagaggtccaggaaggacaaggcagccgaaggaactagttccgctccggagtatgatagtcaccgctttaggagtgctgtacaccagcagcgcttcgaggccatcaagggatggtcgtttctccgggagcgacgcgtccagctcagggacgacgagtatactgatttccaggaggaaatagggcgccggcggtgggcatcactggttactcccatggccaagtttgatccagaaatagtccttgagttntatgccaatgctttgccaacag

SEQ ID NO: 28789 - DNA, 426 bp, Glycine max
  unsure at all n locations
tcttatccaaggctcatcttggtggtgaagctccttcttttatgacttattccctagtggatggcacctcctctcacctcttctcctttgtcttccgctgcatctccatggtggaaaatcaccattaaaggacctcattgaagctcaaagatccagcctccatagaagccccacaagcaagcttccatcactgcctttgaggatcgaggatagacgaacaaagcacctaagaaggaaggaggttccattggtcaaggtgacctgnggaggtacatcaggagaagatgccacgtgggaattagagagtcagatgcaagccgcctatccatccttgtttgagtcaggtaaatttcggggacgaaatttctaaaagggtaggagagttgtaacaccctgagatattataagttatatatcgatgtttaa

SEQ ID NO: 28790 - DNA, 368 bp, Glycine max
tatgcacttctcttatgacaacggcagcactcctagcactaaactgctacgagcttgaagccatcttctcaactaaatttctggcttcagcaggggccatgtctccaagggctccaccactagcagcatcgatcatacttctctccatgttactgagaccttcataaaaatattggagaagaagctgctcagaaatctggtagtgagggcaactggcacacaatatcttgaatcttacccaatactcatacatgctttctccaccaagatgcctgatgcctgaaatgactattctgatggcagcggtcctggaagcagggaaaagtttttctaagaatactctcttgaggtcatcccagctcgtgatg

SEQ ID NO: 28791 - DNA, 572 bp, Glycine max
  unsure at all n locations
acccccacaccgtcaacatctcacantatgctctctattacctactcnaagacancgacactgacccntccaacaacacaacccgcagaaaaatttgagacttgacgacctcgcaacaccgngacaactnaaganacaccgcctagagcaggcaagaagacaacaaccagcgcgaatacactcttcataacggagccaccaccaatgctgaggccgtcaaaaaaacaccctccgaacatacgagcccttcatgaccatgaagggctaaacaacccttgggtgaggagcgtaccactaaactctcgtgatggaaaaacccgaacaatctatacaatgttagagctaggaccaccgcgccttccggtgtgtatatatatgtacttgaggtgatcatccacctatatggcatggtagggcttaagcactgccaaagaggcgaaatccttagaacctgaaagagcatccaaaatgatccagtgctaagggaaatgtgcgctactgtgacacgctaagcgggcaggagctcgctaatcgagagtacagaccaatcccagccgcagaacacgctaacn

SEQ ID NO: 28792 - DNA, 438 bp, Glycine max
gcttgaagagagacaacaatggtggtgaagaaaacgaacaagtaacatgtttgaagttatagagaggcgcgctggaagtttctggagaaagagagagaagatttggcttttagaatggtttttcttttctttctcattttctttctaaaagcaaatccacatgtcatttgttaattggagcacaaagggtccacctttacctttgacttgaccgcgtactcaaccctcacacaagaagaaaattggaccttttcggacgctgaaatcctacctcggattgcgtgttgcctctccggttgcatttgttcgcgtttctctacacccgtccaggcccattttcagaggtaggcagtatatacatatgtatatgtatatagatatatatatatatacatactctcatctatatatatatgtcaagacgctcacaatgagacc

SEQ ID NO: 28793 - DNA, 271 bp, Glycine max
tgctcaaggatcgtagtgcgattgggcgccattgagtgtgttatgctcaaatctgggcccttctgggagaggttggtgcttgtctggcttgtgcctcttgttcgacttgtgtgaatcgttcttggtgcttccttctcgcttgtcgcgcttctgtctggcttggctgactttgatcttgaatctagacatttcctctatctagatgaaccctttgcccggtcatggcattccgtcctgctcctatgggttttttgcccaactggcttcaacc

SEQ ID NO: 28794 - DNA, 423 bp, Glycine max
  unsure at all n locations
tacccatattgatgagttattnttttaagtctacattctttaactgtttgtcaaaanttgatgcaatgtggcgaatgcaatacacataagatacatccggtccaatccacccaactcgttttgattgcaaagctgctagtaaagtggttcacctgtctaatataatacataaatttggttaaagtgtaacatatctcctcaaataatgcaagaaccacatccaaacttctttgatctcgctctcaacaattgcaaaagaaagtggaaaattatttctactaccatcttgtctaatggcagtcaacaaagtaccataatattttccagttaaaaatgtcccatctgcttgctcaattggcttgcaatattgaaagccttcaatgcatagcttanaagcccaaaatacacgattaagaatcacct

SEQ ID NO: 28795 - DNA, 427 bp, Glycine max
  unsure at all n locations
tgagctggaggaagaagacaatcattgngaatccattctttttccctgattcaccttcattccttatcccttcactttttacatcctttgtacatttgagcccttcatgaccatgaagggctaaacaacccttggttgaggagctttccactaaactctcttgatgtaaaaactcttactatctatttaatgttattgctagtttcattgttccttcctgtgtttatttatatgtacttggtttgatcatccatttatatgttatgttagggtttaagcattgtaaaatatggtaaatccttagaacttgaaagagcatctaaaatgattcattgctagggataatgtgcgctactttgtctcgttaagcgggcaggtgcttgctaatcgaaagttatagaccaatcccagctgtagaactcgctaa

SEQ ID NO: 28796 - DNA, 420 bp, Glycine max
tgtagggttaaagtctcacgattggcacgtgctgatgctcatttgttagccgaggctatacgagacatcttgccaaacaaagtcaggttagcgataactcgcctgtgctttttcttccatgctatatgtagcaaagtcattgattcagtcaagtttgatgagttggaaaatgaggccacaattatactgtgccagttggagatgtattttccccctgctttctttgacatcatgattcacttgattatgcatctggtcagagaaatcaaatgttgtggtcctgtttatctacgatggatgtacccggttgagcaatacatgaagatcttaaaagggtatacaaagaatctatatcgtctagaagcatcatggcagaacaagctagacatgtattttacgtgcaagacccttgtgatgaaa

SEQ ID NO: 28797 - DNA, 418 bp, Glycine max
cttaccatcagcaatgaaaagatcttgatattaaacagtaatctttcaattggcaaacgaggctcattttaccaaaacagagcttaaagaaagataagattgagattatagatatacatggaatatcataggatttgttactactgtgttctaattatcttaatagatatacaaatagggtgcttctcctagcacactttcaattcatattcaatagttcccaatggtaacccaaacaagaacttaatcttccatatatgcacaagcattaaaggagaaaagaatctgaaagttcattaaagtaatttgtcgttcagattgtgaaaggagaaagaaggtgacaccttccactctcttttggctttatagattataaaacagtgaaatgttcacttgcttaagcaaaacagatcttatt

SEQ ID NO: 28798 - DNA, 434 bp, Glycine max
  unsure at all n locations
acactataaaactaagctgatcaaaaaaatcaatattaaatccattaattttacattngctcaatcaattcattcacaaacacttatttcatacaaaacaaccactgaatcaaattcaaccaattcactgttcaaacaagctttttgtacaagcactcaacaacactaaaataactggaatttcaaaagactggaattttaatgaataaaacataaataaattaaataactgataaactaaattgttcataatttgtagaaattaaatcaaaatagaatttaaacatcctgctcatcccgtggttgatcttcattcatatccaatactggagctactgatgaatcctgaatggtgggctcaggctccaaaattggtactgatggcaaggtctcctcangagctggtgcaagggatggctntggcatgggatttg

SEQ ID NO: 28799 - DNA, 333 bp, Glycine max
actaagctgccgagcctaccggttcagggatgcctcatttagttcttaggccgactcccgctctacgaagcacgaaaccctccaaattcaccggtgggcatgtctaagcatatcagagtacagttggaattctgaaagacatttagattactttaatgacctaaggattgctttcaattcataaatattaactttgactatataacaggcatctaactgaacaagtatgcgacgggaatttgataaatggattctgacccagtcattcaaggtctgggcaatcgcgctgtactgaagtacatatgagtgatcacagttcaaatggagttattt

SEQ ID NO: 28800 - DNA, 431 bp, Glycine max
actcagctttgaaacaaactgccctggattcgattactatttattaaactctcttgtaaaagcttttgttaaaacttcatgtgctactcaatgttttgaaaaactttttagtacttatcttgattgagtctttttcttgattcttgagtcttgaatcttgatcttgattattcttgattcttgattcttgacaacttgaaacttgaaacttctcttgaatctttctcttgattcttgaattgttcttgactcaatcttgaaatcattctcttgggctttttgtcatcatctttgttatcatcaaaacaccttgaatcaatcttgattcatcatcatgaaggaatgaagcttgtttctacatttaagacaatacatgctgagccataccacctggctgatatccaagatggacccggtcaagtacatctttg

SEQ ID NO: 28801 - DNA, 455 bp, Glycine max
  unsure at all n locations
ntttgatcgctgnacaatcngnaaccatggaaaannaccgctctgagcgngagtatcagagttgctagcgaanaacctcttttttctcacaaaacaaactggaaagatatagactgcatactctcctattccttgtgatatgataacatatatcctcacttaaagaagtatcgttatgctacctttaatcactttaataataacacttggtggaaggaaaaaagacaaatgctgtcatatattaaataaaacacaaatattcctatacacacaatgtatcgatacccagatatagacaagaatcattataacctaccattagcgttccattacgcggaccattgttgccctactcattgattgagcttaatgtccaacaagaataaaagggtgaagccatatatggacaactagtctaccaattgctgtaatcacccaagcgactttgacgtcgg

SEQ ID NO: 28802 - DNA, 466 bp, Glycine max
  unsure at all n locations
attgaacttggacttgtgacttcgaaaacncaacntgaagataggcgagcgggggagacgacagagagttttacatttcnattcntaccaaggcggacaaagagagaaaggatcgctcacaccacgcctacatatggaacgaaaagagaatgcgatagtgagcgaaacgataaagcttgaagaatgactcaacactgtggagacgacatatcctaactatgcacaacgaggattagctaatgaagggacccactattgtatgatcaagctcaagaggcctacactaagtgtgcgtaggagtacagtggcaggaccatgagatacacgcacntaccgtaactatagtaccgcgacgccgcggtgagccagccacagcgagccgaaaacatacggtggaacaaaagccaacctgaatcgtgctgcccacacattgacttatactacacccccgccagactcaatcccg

SEQ ID NO: 28803 - DNA, 406 bp, Glycine max
  unsure at all n locations
gggatgtgaacgagatatcgcgggatatatacttgtgattgccaaacaataacgacatccatcgtctactacgaattagagagacatatgggctgacaggtatgtttgattctatcgattgcatgcatcggaaatcgataaatcgtctagctgcattacaaggtcaatattggacaagtgatcattgcatacccataataatacttgaatgcgtgccgtatcacgacttgtgcatttgacatgcattattatggagtggtggattcaacatgatgacattaatgcgtcaaaccacatcatttgtgtttaatgacattntggaaggttgagctctctactgcaatatacaatgaatcgaaccccatataatatgagatactatattgtagatgacgtttatcctgat

SEQ ID NO: 28804 - DNA, 422 bp, Glycine max
tgaactatagtattgctatctctgagctggtcatgccctttacactattcgcttaaatttagcaacagagttgccaatacgttcttccaaatttttcaacatttgttacaagagtgaaaaatatgttggaaaagaagagtgaaaaaccaaagatcatgcatgattgtatgttaagcaatgaaaaaaagttggtgggggaagtgagtatggcaaacacaacagcggtgtgttgataatcgatctagtttggatctttatagattttattttctgaattggcttgatcctctgctctagaacagaactgtgtgacatttacttagactaacaggctacatcttcattgtgccgataacacgtgatggatcagtttcgtgaacctcaacagaagccagttcatttgccattatgtctgctgggaa

SEQ ID NO: 28805 - DNA, 354 bp, Glycine max
caagccgcagaaatacagcatgtcctactccatgtttaaactcaccatataccacatatcttgactgatacatgtttcaagatgctcgactctagaacctagaacaagaaaactcggggtacgggagaatgaccatcttgactcatagtaattaatacacaaactctctatacacacttgaaatgcacacgcctctatcaagcaaaaacattctgggcctcctagtcgcatatccatgaacgaggccaacagcttgcataactcacggaccttgaccttgatagaccgacacgtgatactacgattaatacccttcatggtgatccacacgaactggctgatagccgacaagga

SEQ ID NO: 28806 - DNA, 426 bp, Glycine max
  unsure at all n locations
tccattttttagcatttgcatgaagggngtctttcacatttccaattttcagtctcatgaatgagagaagtccttcccccatcttctactatgaatattattgngatgaaaattatatttctgataaactagtcaaggctccccatggtttagctaaagcagtatcaagttttaacattttcaattagttgattgaaactttgtaatcagccatagcaaccgtgagtccgtgatttcccataatttcacagtgatactgcaaacattttagaaacctaatctctatctaatcttactgtagttaatccatatctgtggttatttgaaactttttaagtatgcacttttgaaatctccttttacactataattagttggatgaatatattnttgcccctcttcaacaaattacaaacactcttcatc

SEQ ID NO: 28807 - DNA, 192 bp, Glycine max
agagcatggtgaactaatggacgtcaatatggccacaaccgaagctttggaacgacaatcctggaaggcccgcttggtataacacgagctcagccacagttttgaggggcttaataaggcagcaataacgagctcatgctccgaagaggcgaaaagaatgatcacgggtcacatgcatgatcttcacggact

SEQ ID NO: 28808 - DNA, 563 bp, Glycine max
  unsure at all n locations
acacacacactctacanctcnactccacaagggaaatggtagatataacgtcaacgaaacggctattcgtaaaaaaaacacgagaacgaaaattgaaacttgagnacctgagnaccctcgaganaccgnnngaaaatcaaacacgcacgctgggcataggacgacaagacaagactgagcctttttgcctttatagncagacaagagagggaaggtggacataaactcaccaactgacggagacttccgtactaaaaggaacaatattgcgcgacatagaaggggagaccatgagatgctgcagatgagctagaagagcgccacatatggatggtggacgcaacaagttaggaacaaccatagaacggctagagaaacctcaaccgggatgattcccagacggtgtaaaacccagcaacgaccagtaaatatgcaagggaaccaatcgaagcaaaaatacgcaggctaacagtatcactctgtgtggtgcgcagaggagagctggatagagctaccatcgcatgagacgcaggcactaggcacatcaatgcgggcaaaaagac

SEQ ID NO: 28809 - DNA, 207 bp, Glycine max
acacgctaagcgcatcccttgcgctaaacgccatttacttcacacactaagcaagctgttgttcgcgctacacaccttgacccgtgctcattggttgcatggacgcactaatcgagtgcctcacgctaaacccgaaaacctgtgcggaatataactcctttaaataggtcataccgcgaatgcgcgataagaaccattgcttctctg

SEQ ID NO: 28810 - DNA, 403 bp, Glycine max
tctaaactttatacaagaatgaagctctgataccacttgttagacttttggcctcagatatcttaagaagggggggttgaattaagatattccaaactacttccccaattaaaatctatttcactctcttttcaagttataaattcccttaacaatgaacttcttaaatattaattcaaataagacaatttgaatatgaatatcaagcaataataaacaaaggagataaagggaaaagaaagtccaaactcaaattattactggttcggcccaccttggggcttcgtccagtccccaaccaacccgttggaaagtcccactatctggtaaattccttttacaagtcttaaccacataaggacaatccttccttggggttaaaaattccttaacaccagaaaac

SEQ ID NO: 28811 - DNA, 429 bp, Glycine max
tcttcggaggcagtaccgtcgctatcctcggcgccgtctttcactgtgacggcgacatcgccgacttggtccgcggcggcggcggaggacctgacggtggggtcgagggatggaggcggcggcgcgcacgagacggtggcggtggatcggcgaggcgagtactcagcgctgtgccgatggacggtgcacaatttccctcggataaaggctagggcactttggagcaagtactttgaggtaggcggttacgattgtcggttgctaatataccccacgggtgactcacaggcgctgccaggttacatctccatttacctccaaatcatggacccccgcggcacctcttcctccaaatgggactgtttcgccagctatcgcttggcaatcgtcaacctcgccgacgattccaaaaccatccaccgcgattcc

SEQ ID NO: 28812 - DNA, 300 bp, Glycine max
tatgagcacacatcgcccatactcactctccccatgaataatgaccttcaagaagaggacgaaaagatgggcacaggcttttggatagaacgaagactgcaatatcgtacggtttgaagaacactatgacacctgaaagtgtcgctctcactcctacgcttctactgtacacacaccaaccctatgtgtcatgacccatcagtcaatccatgcatgctctgacacgctaagcctcactctctcacttagtacacatgtaatcaagtccaccagcacattcgagactgaatggtatacgct

SEQ ID NO: 28813 - DNA, 434 bp, Glycine max
  unsure at all n locations
tggaggggttaatggggacccggtgctgataggaacgatgttnatgtctgcatatgagtacgtgagctcagttgaaggtgggcaactggggatggtgggttcatgtttgatttgtggaagtgggagatttgatttgagccatcgcccgatagccacctagtaccacatatgacgggtaccccataatccaacaagcttgatgtgagaaagcgtggaagagtcagtcttcctacttttgtttgttgaccacagagtggtacctggagatatgtcacggggatcaggagaccttggggacgtcaggtggggtgctattgcccaaaaccaagcttgaccaatcccgacccaacccgggcatagtcagtcagtgagaacctgtgatgtacctaaacaggcgatctcctggcagtcaaccaataaaagaacaaagtcca

SEQ ID NO: 28814 - DNA, 436 bp, Glycine max
aactcaagcttcaagaaaaagatggcctcgcaaattccttatttcctgtaggaattcttctataggctcttatgttcaatggtgagggttatcattattggaaaacccgaatgcagatctttatagaagccatagatctaaagatatgggaagccattgaatttgattcctttattcctacaatggtagagagaaatgcaactatataaaaaaaaactagagaagaaagaagatgatgatgaaagaagaaagaagaagattcctctttagccccaaaatgctaagtgcgatcaacttgggcacatgagattcaattgtcctgtgtttaaaagaagaatggaataatccgacaagatgaatttcaaagagaagaaagaaaagaaaggatatatcacttgggaagataatgtcataaattattcaagtgattcagaga

SEQ ID NO: 28815 - DNA, 506 bp, Glycine max
  unsure at all n locations
cccccccccacgaccgggaaatagaaaacacagcacaaaaacacacaaaaaaaaagaaatgaactgagcctgaaacggaacnaaccnaacngacagagcaacccgacaccgatgtacacattttgggctggaggccnaagaaagggggcgcggcggaagacaggccaaaccactaccccaagaaagaaccatagcacccgccactcgcgaagagaagccacgaacacgaacaccttaaataggacaccaaatcacacaaagggaatacgaggacaaggcgaagccgaacaaggagacgcagggaaaagaacgggacaacacagagttaaacacgggccgacacaccctcgagccaacggccagtacccgagcagcccacagtgagagctgcgccatcaggccaatggcaaggacacgctctaaacccaagaggacaaaactagcttggcgcgtagaaaccggaacaacaagagacacacggactcgcaccccttaggaatgaggan

SEQ ID NO: 28816 - DNA, 253 bp, Glycine max
agcccagccaccatttttcggtaagaacttatcactacgcctaaatcaacgatgtgcttgagctgtatgtcaccttgtagctatgacgctcatctgccaaccaactcatcatccttgtcatcataacggcaatggtgtcactgaggctattgcacgacaatagtttatcttgtaagctttgcagagcacgaattgtatatctaccgagcatatttatccacattggcattagcctgaccacattccagagcat

SEQ ID NO: 28817 - DNA, 427 bp, Glycine max
tatcactccaagggtcagctatgaagattcatgggatgttattaaaaaccttctatgagcacaatcaccaaaactcactctcccaatgaataatgtccttcgagaagaagaggaaaagataagccaaggtttttggagaaagtgaaatctggaatatcttatggtttagagtagtttatgacacttgaaagtctccctctcacacctaggcttctactatacacacaacaacccttcctctcataacccaaaagtcaatccatttaagctcaaacacactaaaactcactaactcacataaaacacatataatccagtcaacaagcacattaattaattaattttaaacacttaattaaatttaatttatcttgttattaaattaaatcacttataccacaattaataattaatctcgacattacat

SEQ ID NO: 28818 - DNA, 427 bp, Glycine max
tcttttgaactatttggaacaaccaaagccttttcagtttgtatgttttaagaacattgagctataaattcttattgaaatttgaaacatctacccttttaccaaataaaaaagaataaaattcaattgtatttggggctatgtgttttgttttgattattgtttctggaaattacactcattttgaaaaaattgtaacgtacaaaatttatagcttgctctgaacttgtaacagctactttggcacccatgtttcacatgcttggtttttttgtattttgtacgcttgagctgtataccttgtgagatcaaaataacatgtcactctctacttattctttctattattaaatattgcttataattatggcacgagaaattcttagtgctgaatcttcaattcgcaggaggagtgcttgcagagact

SEQ ID NO: 28819 - DNA, 421 bp, Glycine max
  unsure at all n locations
tgagatctcccttgacaattgaatggaagagatgacatgtattntattctatgggtntaataccttcctagcacagtgtccaagtttttctcctgttgctggttggtgatcctcattctcactctcactctcagctaaaaggcgcctagcagtgccagaaatatcagagaaagagaaaaaagtctgaaaatgtgatgtggcttttgttaattcttcctttccattatcctttagactgcaaggaagcatatggtgagtccaacccactggaacacaaattctgattatcccattttgtgttattgtcagtagcagagaaataaagcccaatagcatcaactctgaaacgaagacagaaaacagaaaaggaaaaaaatattgcgaaattaatcacatcccaattntcataacagaagtccct

SEQ ID NO: 28820 - DNA, 422 bp, Glycine max
tttgtaagggatgtgaacgagatattgtgggatatatatttgggaaggccaaacaataacgacatcaatcgtctactacaaattagagagacatatgggttgacaggtatgtttgattctattgattgcatgcatcggaaattgaaaaattgtctagttgcattacaaggtcaatattgtagaagtgatcattgcaaacccatagtaatacttgaaggcgtcccgtaacaagacttgtggatttgacatgcattattatggagttgtggattcaaatgatgacattaatgtgttaaaccaatcatttgtgtttaatgacattttggaaggttgagctctctagtgcaatttacaattaatgtaaccccatataatatgagatactatattgtagatgacgtttatcctgatttggatacttt

SEQ ID NO: 28821 - DNA, 347 bp, Glycine max
taaaacttgtttgcattctcttgaattcacgattgtcatcatcaaaaagggaaagaatgtggaagcaatgccctccaagggtattttgatgatgcccaagaatcaagagttaatccaatttcaaagattcaagaatcaagtttcaataatccagattctagattcaagaatcaagcttcaagaatcaagattcacggattatccagatcaagattcaagactccagatttaagaatcaagagaagacttaatcaacatatagccttaaaaagtttttcacaaccttgagtagcacaagatattttcaccaaatcattaccaaagagtttactctctggtatcaatta

SEQ ID NO: 28822 - DNA, 424 bp, Glycine max
  unsure at all n locations
gcgcgggtctgggagacaaaggtcaagtggtctttatatgctaagatgatgttccgagtacattggatttggtacgaccatgccctcctgatttccagctgggaaattggcgagtggaggaacgccccggcatttacgcaatgagcataatgtaaacctttacggtttttaaaagctctatagttgggcctaggctttagagtttttccttttgttaaggctttgtgtcttttgtttttgaatttctaatacgaggacctttcttcatctgttcctgcgtctctacccattctcattcatttgcatgttcacttctttttttgaaacggcagatccgatgacgagtcccccgaaggtactaatacctgngacccgcttatcgacttcgagcaagatatgaatcacacggaagatgaaggaaatg

SEQ ID NO: 28823 - DNA, 470 bp, Glycine max
  unsure at all n locations
atgaacttgatacttttgancnttgaaananctcgganagaancacnccaganagngtnagggaccaccacaattttcattttcaaatgnatgacgagccgacgagaccaacggtgtactaatcgcccaaaaaccacatcancnttatctaaaacagtatatatttagccgctcatcttaagagggtttttaaagggagtgtaaaaacatactatcatggtgcccatcacacatgagaccactaagagaacctcacactatctagaaaaacgcttcaagtcaagattacctataacataactactaaagatacgattgagagcttgttctactccgaatccttgaagaggattctcaagatatcgctccaataaaagcgttcctctccatgcgatggtctggttgcaatcaaccacagctcgctgcggccactgatcgtcatgaaactaggacgacgacgtctctatccg

SEQ ID NO: 28824 - DNA, 361 bp, Glycine max
tatatcgagacgctcgaaagttacaaccgagactagtagcaaactcaaacgaccataacatatacctcggagagacgattgggtcccgccatatatcgagacgatcgaaatttaagaccgaagctcgtagcacatacgaacgacaataacattgcactctgaagaccgaatgagtccggtagtatatcgagacgctcgaaatgtaaaactgaagcctgtagcagattcgaacgacaataacagtacgctcgggagtccgaacgagtgcacggatatatcgagacgctcgaaatttacaaccgaagctcgtgcgaattcaaccacaaaacattcactcggatgtcgattgagtccgtatata

SEQ ID NO: 28825 - DNA, 403 bp, Glycine max
ttttgggttctactacaaatttacgtcattttaaaattccgaccgcgccaatgtgaccaaggtttagcgaacgtcacaaaaataacatcaattttatataaaaaaatatttttttaacgtctcattttcaagggtttttcaaagggagtgtaaaaacatcctatcatggtacccaaaacacaagagaccactaagagaagctcaaactaactaggagaaaggcatataagtcaagattacctaaaaaaaaactacgaaagaaaggattgagagcttgttctccaccgaattcttgaggtggattctaaggatctcgcttcgattaaagtgttcctctccatgcgatggtctggtgccaagcaacgacagctcgtggtggccactggtggtcatgagtggtgga

SEQ ID NO: 28826 - DNA, 348 bp, Glycine max
ctaagcttctactttattgggattagaactttttggttcttttatgggaagtgctcaatatggggcatttgcgcgtttctggcttgattgggtggattggggttgatgggatggccctacgcctataatgattttgaacatggggcatgccacattgtcccgtctcttgctattgatgcctaacgcgcgcccaccaggttcgggaaatgcctaatggcattacgtggacttgtaaggaacaacccatggggctttggttgacatatttcatttttggacatgtatcttcccaaaagctaaatattgctccatattctatgctagaccaagtttatcaaaaacacaaga

SEQ ID NO: 28827 - DNA, 268 bp, Glycine max
gacgactggcttaacgtatttactctcggaaccttttcggaacgcagctgagctcggataatatacttgggactaatattccatatttaccgtaacagagacaaaagagtcctaggcgcgatcaccatattctctcatatacaagcccttatgtatatggacactacgcggcagatataggtaacaagattcacccctgacacaaagaggggccatacttcagctcctatctacataccttttatctgtgctaggatgagatgctaaa

SEQ ID NO: 28828 - DNA, 555 bp, Glycine max
  unsure at all n locations
accgccgccaacacnatagcatngaaaaaacagtgaacatgcacaggcacgcgaaccgatgaacaaaccacaaaaagagaaanattgaaaccctgaactgcagacccctgcaaaccgngaactanagaaaacncaagcgnctaccaaagagcccagcagcgattggcgaaacgagacataggaccaccacgccagaagggggagagggaccactgaaggcaaaccccgatgccgaatttcccagctgcgatacactgaagagaccatgccaccaccccgattagcaaccgacacaaacaccggaggaaaaagaggaccaacacaaaaatggacaaaaccgaggccttagacgacaggaagcactcgactgcacaagacagagaggacggagtacgagaacaccacagaaaaggagccgaagaacgaaactggaggagaccgagccaccacagaagacggcagacgacgaggaggtgagaaaccacgacaagaaggacagtgtgcggaaaccacgaaaagaaccacgcagggagcaaccaggacaggagacaaaac

SEQ ID NO: 28829 - DNA, 418 bp, Glycine max
  unsure at all n locations
tgccacccaactcgcccaggcgagcaagggtgcttccttcataagcaacagccttctggaggaatcttctggagggcccaagtgggcctggttgctatttgcacccccatttttctaaatacaccccctgcctttttttggtgattcttttttcgtaaagttacggaaacttatgaatttcgtaacgatacttgttttcttcctgtaatgtcacggaaccttgcggattacataatcatcccttttttgacttacggaatgttacgaaacctcactaattgtgcaacgatgcttcctcttgatttccggtgtgtcacggaaccttacgaattgtgcatcaatattttcttttgatttccggcacgtcacgaaatttcacaaattgcctaatgatgggtgtcaagcacctcanaatgac

SEQ ID NO: 28830 - DNA, 436 bp, Glycine max
  unsure at all n locations
tcaagaaaaagatggcctcagcaaattccttatttccagattggaattctatcaatagacctccaatctttaatggagagggttaccactactggaaaacccgaatgcaaatttttatcgaggcaatagatttaaatatctgggaagccattgaaatagggccttatatacccaccacagtagaaagagtttcaatagatggtagttcatcaagtgaaagcataaccatagaaaaatctagagatagatggtctgaagaggatagaaaacgagtacaatacaacctaaaagccaaaaacataataacatctgccctaggaatggatgaatatttcagagtttcaaattgcaagagtgctaaggaaatgtgggacactcttcgattaacacatgaaggaactacagatgttaaaagatctangataaatgcactaac

SEQ ID NO: 28831 - DNA, 436 bp, Glycine max
  unsure at all n locations
tcagaccacaacaacacanaatctaggtatccaaaacccttcaattttatggattttcaaggtttgagaagtgaaattgagaatgaggtaaatttggagcaaactctcacctcacacaagtctataacatcaatttaaacttgctcaaactggatttacacctaaaattccaccgaatcaaaatttgactcctcaacacccaattttaccctagaaatggctctttgttcactttggtcatttgtttttctctcttgtacagcccaagctttctcataagtcctaaatgacatttcaagctaggattaactcactttaacctccaaatgccactaaatccagatttggccttccaactctcaaaacctcactctttttccactcataacaccatattctcactttctaaccctaggttaactctacccttcttctc

SEQ ID NO: 28832 - DNA, 400 bp, Glycine max
cttacccgttgaagactgaagaaaattttacttttgatgaatctcgaagaacggtcgagaatcttcgcgtaattactcacggaaacgttacggaagcgcctcggcttggatcatcttcatggaactaattttcctcagcaatttcgagagagagagaagtgcctaaggggttgaacccttttcttcttcacttctccccctatttatagcgaaataggggttgtatatcctcaaataataatccccggacaaaattagggtatgacagttgcccctctttacttacctctcatcggagataagaggaaagcaaagataagacactgatttcgtccgtcctgcccttatccgtgatgacgactctcgtctatactccttcttttgttcttctgcaccaaac

SEQ ID NO: 28833 - DNA, 386 bp, Glycine max
cgcttcacaatctccacgcttttgatgatgtttacttttgtggtcatgaaacgcacacacacacactttttcctatgacgatcactcacatacatactcattcttcccatttgtttttgaatttatgcttctcttgcaattacggtgattactcatgtgagttcttgatttaatccctatatctctccccctttggcatcaacataaagccggagtgcataacacgtttgaatcatgcaaatacatctaagcatgcacacaatatttatgaaatatataatgcaaatcatgactcaggaaccatgactctatgaccacgaagagatcaaatatagaatccgcatagctaaataacataactaatatttattcaaacataccatgca

SEQ ID NO: 28834 - DNA, 88 bp, Glycine max
gatgggtgggccaagacggatatcaacgatgacgatgattccaagttgtctaacatgaagattgatgcatttgttgaagttcatgaga

SEQ ID NO: 28835 - DNA, 365 bp, Glycine max
taacagctttacccatctacttgtcgccttttttcagaatccctaaaaaagcggtgtataagatagtctctattcaaagaaactttctttacaaaaaccttgactaatatcaagcatcttataacttctaaggagttatttactttcaaaaaagcaaaattaattaacagatacgaaccttcaactatacagactattgaggctcttaatcagatagcaaagaatgaggaaatcgatctatccgccaattttgctgcaaaaatagctacaaattctaagcagaacctcaaaaaagcaatcatggctcttgaagcatgcaatgcacacaagtaaacttctgactgacaacatatttattttaacat

SEQ ID NO: 28836 - DNA, 58 bp, Glycine max
accgtcgttgttctctattgaacacccacaccgagaggaacccttcaaccgaagcgga

SEQ ID NO: 28837 - DNA, 429 bp, Glycine max
  unsure at all n locations
tcatgatgaatcaagattgattcaaagagttttgatgattataattatgatgacaaaaagctcaaaagtcaataacacttcatgataacaaagatgatgatctcaagaatcaaagaatgagttcaagattgaatcaagtacacttcaaggatcaagaggaaagttgaattcaagaatcaagaatcaagtttcaagattcaagttccaagaatcaagatcaagattcaagactcaagattcaagaatcaagagaagactcaatcaagataagtattaaaaagttttttcaaaaactgagtagcacatgaatttttctcaaaaccttttactaaagagtttttactctctggtaatcgattaccagattattgtaatcaattaccagtagcaaaatggttttcanaaaaactttcaaactgaatttacaat

SEQ ID NO: 28838 - DNA, 361 bp, Glycine max
gagagatgaaaaagaggaattttttttggaaaagtcaaagcagataacaaacaatttattctcatttaaaatatataactttaatattattccattttttgaaattcatttgtttgttatttccttattttaacaattatatacatagttgaattccaaaagaaaggcattccttaggtgcacatttttctatttatgcttgctgattcaagacatgttcatccagatgacattgataaaattatatctatagatatacctaaggcaaccaatgatcctgaattatttaaagtagttgcttgtttatgattcacggcccctgtggaactcaaaattacaaatcacctcacatgcaaaagtg

SEQ ID NO: 28839 - DNA, 347 bp, Glycine max
accaagaaaaaaccacttttacatgcccctttggtgtctttgcttacaaaaggatatcgtttgggttatgtaatgtccctgccacctttcagagatgtatgctagccattttgttgatctggtaaaaaaatgcatcgatgtgttcatggattatttctttgtctttggattttcctttgaccattgtttatccaacttggaattggtgtgaccacaagatctcgtctcgagggattgaagtggacaaggcaaaaattgatattattgagaagttgcctccacttatgaatgtgaaaggcatccaaagttatctcatacatgcccgacttctatcggaggttcataaa

SEQ ID NO: 28840 - DNA, 433 bp, Glycine max
tgaagaaactgtctacatgcagcagcccccaggtttcgtttatgacagtaaccttgtttgtaaactgaacaaggctctctatgggctgaagcaagcaccttgtgcatggtttgaaaagctttcagcaactctcatctctcttgggttcaaggctagcaagtgtgacccttccttatttgtatgtcatgtggaaacacaacttatgcgcttgtctatgtggatgacataatccgcactagaaataatagtgttctaattcagcaacttatttcatagctaaactctattttctctcttaaacatcttggcaagttggactacttccttgggattgaagtcaactataattccgcaggttctgtcatgctttctcaaaccaaatacatctcagatttgcttgaaagagtaaatatggaaaaagctaaaggaattt

SEQ ID NO: 28841 - DNA, 422 bp, Glycine max
  unsure at all n locations
acatcttaaatntcatgcctattaaccgaagtattgcacttctgactatctaggatccccatattttgtatgtaatataaactcatcacacaattatacattgatatgcccaaaatgagttattgctggcaaagtctatacacatgtttgggattacttatatttaacatacgcataatacaaatattggaagaagcaactgcaaatgccaaggcgcatatgttaatgaagttgtactacaattcatttcctcaaggaccttagcacttcacttgtatgacttgactctatagccggccacatatcatggagctttgcagagatgttatttatcaagtttgtaacttcattatacactgattgttgatgttctacctgatcattcgctacctcttctggcatccttgagatatgtgaatcaa

SEQ ID NO: 28842 - DNA, 410 bp, Glycine max
gctttctctaccgtaccacagatattatcggccagagggcattttaagatttgcgctttttcggcagaaaaatatcatgtcgggctatataacgaccgatgtcacgtatttgtgtctcaattcagtccctgaataatctttggatattgtccaataggatatgctcgatcggcgtcatcaggtgatgcttgctttttattttatacctgctggatcggtcatctttcctggccgacatcgactatcattttttttatcagtgtcggtgaataatgttatttggccgaggtgggctgatgtttttctagccgattaaatgataacacgccagttgtcggccgaaacacaactccagttgagctcgcacgataaaacatagccgacctacattgtcagttttgacgcgacac

SEQ ID NO: 28843 - DNA, 434 bp, Glycine max
actagctgaagcgattgggaaagtgaatgggttgagataggatttattgagaaagagaaaaaaaaaagtgagagagaaagagaaaaatcttgtgagagggaagggtgcacacaacaacacagtctatatctattggtcatctcattaaaaaaaaaaataataacccacttaaaaagacgggaagagacaacgtggcagacacgtgaggtgcatgtgcgttcaatcagggacgtgcatgtgttgtgttacttaaaaacacttcaaggttcaaggaaacgtacacaagagttgtaatatattcatattattaatatatcggcacattaattgatattgttaatttattgtcttgatttattggcttgattctctgtactgttctgattcatctcatcaatcttcttattctgtaattctatattatattgtgcgtt

SEQ ID NO: 28844 - DNA, 433 bp, Glycine max
  unsure at all n locations
tcaaaactcgctgactagtggctaggaataganatcatgttctgtatttaattatagaagactttttgtttgtacagatagtagcataagatcgtatatagttcgcatacaacggaaccgttggttttctgtgtatagctttaactacacgttgttggtaaatacttaagtagaatggtactatagccatttgcgtttgagatttacacgtcctgaaacactgggtgttgccattttgggtgtgataatgttcaggatcaagttgttacttactatctagtatcttcagtttgaaaaaataggtcacacagagatactttctgtaggctaaaaattgggagaatgaactatctagatatgtgcttattaaaattaggtaattcataccattatcttagtgtaaatatgtttaactataaacttgtaatatata

SEQ ID NO: 28845 - DNA, 429 bp, Glycine max
taaagtatgcccgagtcattcatccctatgagatgttgtttaagtattggcgatcagaattgccattccttggattatagggttgaaccaagctcatgcttttacaaaaaggttcatcaagtcaagttgaaatatggaagtaaccgtcttgcaaaattggggcaaaagatgaattgagtcacatcactgcttcgtctactgccaaacatatttaggattattgatgtccttgttacttccagtttcaccttgacaaagatgtcatggaccatgttgaaaatctaaattgattcaaccccatatcttgcgtaaaaattcgcaatacttcaactgtgcatcattcgcatgcatccatgcttttcattggttgcattgctcgttgcattctttcctttgaaaataaaataaaatgaacttaatcattgttat

SEQ ID NO: 28846 - DNA, 400 bp, Glycine max
  unsure at all n locations
tgtcgctacctgccctccggcggnggtgcgataaggcttttcgtatgtgccaagggtgcgtcttccaaggaaggaaaacgcgtggagtcgccaccaatgtttattcaaggaaaacgtcagaaaaaccaaaaatggaaaaggtcaagggtctacgtattttgaaaatgagggttcgggaatcatttacgcatggggaaagtattagcaccccacgtgcccatcacaagggacgacaacctctaattgagtgtgcaaatcatgacttcaaaattgtatattttcccttttatatgttttttgtgtatattccctttttatgttatttttttattttttggcctttctacgctttttacttttttgtggtccacaaaggtttttccctcacttctacgtattc

SEQ ID NO: 28847 - DNA, 358 bp, Glycine max
tcatgttgtattcacagaatcaaagtaaccttttttctctagattcgtgagaactaccaattgagaagaggaaaagaagataacctgtcacggaggatgaagagtgtaaaccgaactcagaagagaacaatagtgattctgaatcccttccatgtcattacaaccacacactttaccaaccaccacacactgccacggtcgcagaagaaacacacacttggcgtcttggacactcgcacttccacttcgcatcgttgccacgaccaccccgcatgcgcaccttgccttggctttcgcagtcgcatcatcgcacaagtacaggtgctgggatagagtgatggaacaactgagatggagt

SEQ ID NO: 28848 - DNA, 412 bp, Glycine max
gcctagtctcatcggcgacgactcatcggatttttgggtgggtttggaggtccaaaatcacatctgagtttcaatttttgtatcccttggctgatgctctcctcgccgattttgacggcgacatggtggaagatcgctgtgtttaaccgtagaggtggtggcagatccagacgctgattcgaataagaaaacgttattcatggacaaagatgatcaagaagatgaacgtgtacccataaatgtgattcttttttatttgtagaagctgaatattattgccaaatgaatgtggaagctgatatgcgtttcaatttatatgctttatattattgaaacattaagaaactgctttatatgcggtagtatatatatatctatatatacatatatatatatatatatagatatatat

SEQ ID NO: 28849 - DNA, 424 bp, Glycine max
  unsure at all n locations
tntaaaaatctattatggtatatatatatatatatatatatatatatatatatatatatatatatatatatatatatattttcgtataagagtttttagacataaagtattttgaccccctttcaaatctgttcaccctaagaattcattcaacacttagttctcctaaaatgttctctggtaatcgatcaccacaatgtgtaatcgattataacaaggcacactaagtgtaatcgattacaaaaaaatgtaatcaattacaacacgtccctgatgcttataaattcaaatttaagaattcacgaaactgcaacttcgtctttctcgcgaaacccttattcccaaattttctttctaccataactaactcatttcttatccaaatcacgtcccacaaagcccaaaattcatcttttttcattcn

SEQ ID NO: 28850 - DNA, 437 bp, Glycine max
taccattcttgtggcacgctatcgaccgtaccgagtcttgggtgtcactgtttatcatcgcgtgaccgtgcgtttacttcgtgtactggctggcatgactccgtcttcgacgagacacttgttcgcgatgcagcgataggaaacagtgctgagttgaacatgagtaagagcaaagttgactgctttacgactgtgcgttattctgggactatgcatatcgctgtatactcaccaaggacattcaccatttatagtaggtatttatcgataatggatgatgaatttgtaccacgcatctccgatgggatgagtcttgcgtgtcctactctagtgtggaagcaaaccctgtggcttcatacacgcctctcttggattacagattcgcatacttgtgctgaatatcaactgctagctctagatagtagtgatgtttatcg

SEQ ID NO: 28851 - DNA, 431 bp, Glycine max
  unsure at all n locations
tgagatgaggaagtgttgaatggtgaaacttcctgcttttattgntttccacagagtggtacctggagatatgtcgcgggggtcatgagaccttggggacgtcaggtggggtgctattgcccaaaaccaagcttgaccaatcccgacccaacccgggcatagtcggtcagtgagaacctgtgatgtacctaagcaggcgagctcctggcagtcaacagataaaaggaacaaagaccacaaagcaaggaggcttgtggtggctggccagctctggattttgtgtgatatgtggagtatggcctctggtaatcgattaccaagggtgggtaatcgattacaaggcttaaaaatgaagacaggaggctaagatggtctctggtaatcgattaccaaggggtgtaatcgattaccaggctagaaaacgaagtcag

SEQ ID NO: 28852 - DNA, 427 bp, Glycine max
  unsure at all n locations
taagctataagaacggactgtcacttgcatagaacttccggtttgtntattagccaaacattatttggcaaaaggtacgcaagtgaaaaataaaaacattagtgcaacaataactaaacaaatatgtattcctgtatcaatttctaatatatagtgataaataccatagcaacatataatttgattcaatgtttcatacatatagattgcaaacttgggggaaattgtgtaaggaatatgctaaatctgcaacttaagaacaaaagcatataatattggttatggaaaagacatagggaagtcctaacctgattatagatgaggcgttccagacataagtcaaataattgtaccatattttatcaaggcatttacattcacaagttgtgagttacacaaaaggatagtgagtatcacaaagtcctta

SEQ ID NO: 28853 - DNA, 436 bp, Glycine max
  unsure at all n locations
tccatcatagccgcaattgatgctttccttgcatatcaccttagcattgagagcccggnggtagctatcttggcgggcttattttacacatttgactgaagatgcgaaaagagtagcgcacggatcatctgttgtttacccgctctatccttgcatatcacttaaagttcgtagaccacgtcttttccggtttttctgatgttttcctcaaataaacgttggtggcgactccacgcgtattcctttcttggaagacgcatcccgcgagtcacgcgtcgccctcctgccgaagggtaagttgcgacacacgccctcaccttcagaggactacgtgtcctcgccatcagagggctggacgccctcacctttagaggactacacgtcctcgccatcagagagctgcacgccctcaccttcataggattacacgtcctcg

SEQ ID NO: 28854 - DNA, 413 bp, Glycine max
tattaaaaatcacgtatttttatatgttgcatttcatattattgaactttttcaataatatttgtgattataattaattctaaagattgcattagaaaaaaagtgttttacaaaaactattataccattttaattaatcatgactttggcgtaagatatttaatgattttattgactactaatttttgacgaaggatttgattgagtttttcaaccagtttttttttttttttcgattttgagatcttgattcaggattaaatttaattctacttaaactaattatgtaataaaaataaaaaatgagtagttttttttttttgttttaattcttctgttgaaaaaataaaacaggactaagaattgttttaatacagtgataagaagtgtcctcaactataaatggaggaaaa

SEQ ID NO: 28855 - DNA, 409 bp, Glycine max
tcaacattcaatttcgagcgtctcgatatattacgagactcaatcttacatcagagaaaaacgttattgtcgtttgaatttgctcagagcttcaacattcaatttcgagcatctcgatatgttacgggactcaatcagacatccgagaaaaaagttattgtcgtttgaattagctcagaagttcaacattcaatttcgagcgtctcgatatgttacgggactcaatcatacattcgagaaaaaagttattgtcgtttgaatttgctcagaggttcaacattcaatttcgagcgtctcgatatgttacggggactaatcagacatccgagtaaaaagttattgtcgttggaatttgctcaaagattcaacattcaatttcgagcgtctcgatatgttacgggactccatc

SEQ ID NO: 28856 - DNA, 389 bp, Glycine max
tgtaatcgattacacacatacttgaatcgattaccagattattttttcagaaaacattctcaacagtcacatctttttgtgtggttcttgaatggctatcataggcctatatatatgtgacttgagacacgaatttgacaagagtttttcagagcaaaaaggtcttatactcttataaagagaaatcgttttatcctcttacaaattccttggccaaattacttgtgattcaataaggaattatttgagcgctcaaattgatcaatctatctctttcaagagagatttcttcttttcttcttcttcattttgaaaagggattaagagaccgagggtctcttgttgtgaaataattctaaacacacaggaatgcgtgtccttgtgtgttt

SEQ ID NO: 28857 - DNA, 391 bp, Glycine max
tgagaagctctatgcgaagtgaaacaattgattaggattttcagattatagaaagatatgaatgagttaattgattacccaattagctaatcgattaaaattgttaatactataaatacctttgcttattctcactacaagaaaaaatgattttaacgagggttatttttggccttaaggagggtttaaacccccgtaaagtatgttacctattgttggtgttctcattggcaaaacatccacgataaatggtttaccaatggcttttgtgaaccctttaaaacacaagaattacttgatgttttgaaacccctggtaattaccaagggtttattaacccctattatcaccacaatcattgctggacgatttaaaacccttggttcttatt

SEQ ID NO: 28858 - DNA, 224 bp, Glycine max
gaccacagacaatggcttatagctaattcgagcgctaattctataaaaactaatgaatgtttatgaaatattttggtggattctgaacaaagcttgcttctactcagcttctgacttttaccacacgtcatcgaaattggagcactctctttttacccaagttgaaacattgacttttatgagttctaaggcaaggactgaatcctcagcatagaaagtctgtg

SEQ ID NO: 28859 - DNA, 420 bp, Glycine max
tctagccaaatggacttaccttgaattaatttctttgattgccctttagagccttggttccctttccttgttttgaagctcactacaagccttaagtgaaaaaccatgatatttccatatccttaaggaattttggagctttggaattgttttgggaataagtgtggggggtttttgtttcattggacaacttgttttgttggctatgcttcatgatgtattttgggccatacttgatgtacattgtatattggttaaatgttggacatgctgaatgaaatgttgtttctcacaggctaaagagtaaaaaaaaaaaaaaaaaaaaaatcgaaaaaaaaaattcgaaaaaagaaaaagacaagcattaaagttgagtgaataagatcttaaatggcacaagactgatgaaactcttggttc

SEQ ID NO: 28860 - DNA, 367 bp, Glycine max
tgatcaacacttgcacagtggtcgatgatgcatgggagatcctgaaaatcactcatgacggatcctcccaagttgaagatgtccagattgcaactgttggctacttaactcgggattctgatgatgatcgaggaagaatgtattcatgacttccacatgaacattcttgaaattgccaatgcttgcactgtcttgggagagaagatgacagatgaatagctggtgagaaagatcctcatatccttgcctaatagatttgacatgacagtcactacactagaggatgcccacgacatttgccacatgagagtagatgaactcattgattctcttcagacctttgagctaggactctcggatagggctg

SEQ ID NO: 28861 - DNA, 365 bp, Glycine max
  unsure at all n locations
tcttacgtagcctctcttggtgctcagaatatcccaataacntatccctcttattactagctattgtgaattctttagttcctgaatgtacaaccttaaaattgttgctcgttcccctctttgctaaaacatcaagagctgtaactacgtcactaatcaaaggtctggtatcagcttccttctgaatacacattgctgcaactgctatggcttggtgtagaccctatgttgggtagttccctttcatcaatggatcagccattgatgaaaatttccttctgtctctgaatacgggttgtgccttataaaaaaaaacattatgaatgtcaattgctgaacatttgtgcatattattggtcttagct

SEQ ID NO: 28862 - DNA, 426 bp, Glycine max
  unsure at all n locations
tattttagtaagtttcaagtttgtggttaagcttattatttttgatataagttctaatctgatatgcttattaaataggcgcctaattaaactatttacccaaatgcaccatacatgtaattgcacactgatattatttgcctatatttgatgtttagtgttttcttaaatatttttgttccttggtgacctttaaacattgatatgcagagtaaaaattgcatttttgtttaatgtttcaacaaaactctgttttttttgggggtggggtgggggttggtaaaatatattgaagctcatttttaacatggttccttatcattgaaccctgttaaacaagctaagtgtagatgttgacaatttgttntgattatatcangaaggtcatgaggaagctcacgaagagttgcctaaaaaagttaaaac

SEQ ID NO: 28863 - DNA, 405 bp, Glycine max
  unsure at all n locations
aacctcattgtctctcacagtctttagattgggattcttccaatccttgngtccggactctcagccacttatgatagccgccgatgatcccattactgcttcccctaagctctctgtcctttcttcacgccgcatcccatgccttgcgaactccttggagtaccctcgcgttgtggtcactgaaaccccgtgcgatgaaaggcgtgatgctttcgtctgatggcactcctctcatgggacatccttcgcatgaagatagaatcctgattcttccttccttctagcgagggaaccaattaacagacgcccctccatgctagccaagagttggtcccaattcgcctttcctttttcgacgcatgagcggtgaccttgtaacggatagacgtgcctaccttcttggag

SEQ ID NO: 28864 - DNA, 112 bp, Glycine max
  unsure at all n locations
tcanaaggagccataccaatactggcttggtagctattgttgttagtaaactcaatcaatggcaaacaatccatccagctaccttgttgctctataatacacgcccgaagta

SEQ ID NO: 28865 - DNA, 428 bp, Glycine max
cttctacttatgtggcagggcgggtttccttcactttctctctttcacgcgagctcttttcactgtccttccttcctgcggtgcttcttttcatgtccgcttgagtgggcttatagcctaaaccatatttcccacgatttccttgcgtttttatcaagctagttatgccgccattgtctctgcctaaacccatcccgggttcataaccgttccccaacataactcgggccatcattaccgccgcatcggacagacaaagttgcccaaagacggagtccacggaggaaatgctaaccacctcaaaagactggaaagcggcttctaacgattcttctgcggcttccacataatgcatggaggatgggcagcttaccaagatatcttcctcgcctgatacgatgaccaagtgcacctccactacgaatttc

SEQ ID NO: 28866 - DNA, 272 bp, Glycine max
tcttacgtagcctctcttggcgctcagaatatcccatttacttgtgcctgttattctaactatattgaatgctgtagttcccgattgtacatccgtaaaattgttgctcgatgccctgtttgctaaaacatcaagagccgtaactacgtcactgatgaaaggcctggtatgaactaactcctgaatactcattgctgcttctgctatggcttggcgaataacctttgctgagtatctgccttctcatcaacggatcaacctttgatgaaaat

SEQ ID NO: 28867 - DNA, 483 bp, Glycine max
  unsure at all n locations
aacgcgcatttgatgcgtcgatgnacgnccgncatagaatacacacgcacgcaaggagccatgccaacacaggacacgnaccgatttcttttagaaaacccaaccgagggccagcaatacatcctagctaccaagggccaccaaacacacgcccgaagtagatgcgcacgaggagaagagccgtaacggacgaggcagcagatccatggaaataagcagaccttcgccacatagaagacccctacgaatcacggtaagctgaccacaaaggcgcatgcgcaccagaacgaatgccctgtacaagactaaataaggatcactgccacgacactactaacacgatatacgactacacaaaccttaacatgccataccttcaatgaaaagaagaacaaatgagcacaaatggagagtcaaacagccatgacccacaccgcaacatgcccacgactcagcaaggatgaacacaagacgcacaccgcn

SEQ ID NO: 28868 - DNA, 421 bp, Glycine max
tgtactagtcatatatatgttacaaaacaacgtttgttattttgaatcgattattgcagatacagaaatacttaaacaaacctgccaattaggggttttgcggctttttgcaaattccgcccatgtttctggatcaaggccatacttgactgtaggatcagatatttgctgaccttcattgtcagcaaagacaaattttgaagtcaatgaagacttaaattgcctccatcttgctgcaactgttgacatcacctttttttttgcattttcaccttcagggatatcaaatttgcgctacacaacaaaaggagttatgtaacagtatgtaaatgaatcctttaaaagtaacttaacaacaaaatcatgaatacatgtgtgaattacttaccaaaatatctttccatattaagctctttagatc

SEQ ID NO: 28869 - DNA, 419 bp, Glycine max
tccgaaagtgtatagtaaaactatgaagacattcttatttgcattgcaatatttttcttggtttaatttttatattcacgggataataacaagaaacatatagaaggtttaaaataattttctgaacgtaaactgagctaggcagctctacacggctgtttctctacttgctcgctcgtctaagcttctgaggagtgaaacaatattttgacatagtaatatgaatatgacatggttactttccaaagaaagtgggccacaagggacaatggttcaaagaatatcacaagatcctgctatgttaatacaaattcatttcaatcattaacacccggacagaattactagaaacagtctacattgtaactgaaaaaagaaaaaaccactgttgcggagtcaacaaaatatggagtctcaat

SEQ ID NO: 28870 - DNA, 400 bp, Glycine max
  unsure at all n locations
tatatgcatgtnctgttttgttttaagccgcaccaattttgtatatgaacatgcnatgtnggagagccatacggcacaaggcattttcagttgcgtatatatatcatgcgatgtgttatttcgatatcttgcgttctagcattctggctttaaaatgcaaaaaaattactagtgctttcataattaaattaatagaagatttttaaatgaattacaataaagttattcgctaaaattaggtcttaattccatgtatggcgataggtcattatagtgtgtacttacatgcgccttgattattatattaacttgatcatatatgaatggttatggataagagtagaatgaaacgaataacacgttttcttattactctaactctaacttgacttttctcaat

SEQ ID NO: 28871 - DNA, 425 bp, Glycine max
aactataaaactcagcttgttgctggcggattcctgtaattacgtaatgttggtcggactctggtacattatgaagggattcttactcgctattggtgcttcttgttcttatgagctgctgaagattattcaactaaattaagtgcttattaaataagcgtttgtataagatatgtttctatgattgaagatgaaatatagttcaattgttttcatagctgaaaactgtatttacaaaaggagtctattgaaataagctgaaaacatcttatggatatatcgcacatgatttttattaggtctcccaaacaagtggtcacatcataagataagtcccaataagctgtaaataacttatttgaagaaccccttattggatttttgtgttactgtatttaagaatttggctttgcgcgaggatgtgc

SEQ ID NO: 28872 - DNA, 437 bp, Glycine max
  unsure at all n locations
gagttgccatcctcattntacaggccaaccagcaatcctatgatgccttaactctttaatggtgaattagcacaataaaggacttcagcatactaaatgctagtagtaccagttgcaacaatcacaatttgcataaacatatatgaaaaaactcaagtacattcttacacctcaaaaaggcaagaaggaaaagaacgcatatcaaagaaatcttaagttatggtaaattgcttagagaatatcctttataatgcatgaaactaaaaccagtaattacaggaagagaaaagaacatactgatccataccacagagcatgatagacagttccacaagaacctgcaatttagaataggaaacaagttacaaggcataaaatgcataacaaccactgctaacaagatatttgggtttaaaagcataggtttagtaaattat

SEQ ID NO: 28873 - DNA, 427 bp, Glycine max
  unsure at all n locations
agaatcggacctcagtgtgaaaagttatgaccatcnctttttctcgagagcgttcgttgatcaatgtcgagcatctcgacatgttatgcgctcaaatcggacatccgtgtgaagaggtatgaccatttgagtttctcgagagcttccatggatcaatttcgagcatatggtcctattatgtgcccgaatctgaccttcgtgtgagaagttatgaccatttgaatttctcaagagcttgcgctgtttaatttcgagcgtctcaatatattgtaagcgtgaatcggagctcagtgtgaaaagttatgaccattagaatttctccaaagcttacttggttcaatttcgagcatctagacatattatgtgcacgaatctgtccttcgagtgacaagttatgaccatttgaatttatcgagagcttacgctg

SEQ ID NO: 28874 - DNA, 430 bp, Glycine max
  unsure at all n locations
ctaagctatccttatggctagctccgacttactcccctgtcctctataagatgtaagccaagcccctactttcgaggggcagctcccaccttatgacgactatcccgggcaagacgatgaggaatgagatacccatctcggtcccctgctccacctcaaagatctgtccccccatgaactaccccaaccaaacatagtccgccatatcccgacttcacccacactcgtaaaagaatctgttcccttcgtggaagataaaggaaagattgaggtgcttgaagagaggttgagagcagtcgagggcctcggcaattacccattctcggatctagcggacttatgtctcgtacccaatatcgtcattcctcccaagttcaaagtaccagactntgataagtacaaagggatgacatgttcgaaatggcatctt

SEQ ID NO: 28875 - DNA, 428 bp, Glycine max
atttcacgtgacaacaaaattgacatgtccggttgtactaaagtaggtgaattgattgaaaaatttgaatcataggcagagttgtgtgaacttatacatttgcattctggtaagaccactacagtgagatggaacaacaagccaaaaagaagaatggatcgaaacaaggaaagaattcgttagttggtaggaatgcccacctctttgatgacaagtccgatggtaacgacattgccaaatccttcaactaacactatgtctaccatagtgcctactggtactacaacttatgaaatacccacaattatgactactttgttcctctgacaacaactagatttgggaatacatgatataatgtatcaactatcttgacaactaattgaaatagtcataactagtccgtggataaataggtaattaaatat

SEQ ID NO: 28876 - DNA, 430 bp, Glycine max
  unsure at all n locations
gtgtagctcgacgaagtgaccggataggtaggttgctagccctgcaagaagaatactatgaaatttgtggattttgaaaagaaagcatgaaatcgggacatggtgaacaataactgggttttgaacctcagcataaggctttttattacaaaggagaaggaataaaaaaatagcaaaaaatggaggagcctacacgtatgtgcctggtcattcttttattatatgacataagattatccagttgggagaccttcttgtgtgatttggaacttaagtttcaaccttcgcccttcgacaaccatcaagttattcaaatttggagtttgtcctttttagtattttaaattaaaatttgtattcttttagttcctcanattcaataaaagttatgttagtttttcttgtaataaaaaaactgttacaaaatttg

SEQ ID NO: 28877 - DNA, 419 bp, Glycine max
  unsure at all n locations
gctntgcggatttggtcttcgccagtgaaaggatcgttgtttgtccgaaaagagttatatttgatcatcctactaggacgactgagaaaactggggcaaatgaagagggtgagaaagagggagaaacccatgctatgactgccattcctatacggccaagtttcccaccaaacccaacaatgtcattactcagtcaataacaaacctcctccttacccaccacccagttatccacaaaggtcatccctaaatcaaccacaaagcctgtctaccgcacttccaatgacgaagaccacctttagcacaaaccaaaaaaacaccaacaaaaaggaattttgcagcaaaaagcctgtagggttcaccccanattccgttgtcatatgctaaacttgatcccatatccactcaataattcaatg

SEQ ID NO: 28878 - DNA, 420 bp, Glycine max
  unsure at all n locations
tgcttgtggagcttctatggaggctggatctttttgctttaatgaggtcctttaatggtggttttctaccatggagatgcagtggaagacaaaggagaagaggtgaaaggaagcgccatccactaaggaataagccatggaagaaggagcttcaccaccaagataagccttggataagaagcttggaaagatgcttcaatggaggaaaagaaagagggagagaaagagaggggggagcacgaaattgaaggaataaaagagagagagaagtggaactttgaagtatgtctcacaagactctcattcatcaaagttacaacaagtgttacacatgcttctatntatagactangtagcttccttgagaagctttcttaagaaaacttccttgagaagcttctttgagaaaacttccttgag

SEQ ID NO: 28879 - DNA, 427 bp, Glycine max
  unsure at all n locations
tatgattaaatacgctaacctcagcaaatattgtcttttcttaggtatgttctttcctttccgtttttcatattgatgatgaataaacatgaatttgataaattgttcttgtttgtgtttgatggagccctgcaacactctaatggtggtgtagatttacttatgcatagaaattaggaaaagaatagcattggtcatgaaaacatatctataacgtttagaaattagaatttgggtccaaaacaaaattgaggactagaagactaataattatgccggtttgttatcgatccttttgtttggaaaaagtcatggctaataaaggaatcacatggtgatctanatcaactacagatcatatatatcatgtatcanaatcatgaaaaatatatgcactgaatactctcgttggctgcagtttacaatc

SEQ ID NO: 28880 - DNA, 399 bp, Glycine max
  unsure at all n locations
tcaagcttcatgagagagtcatatatcaaatngagaggtttaattttagctatgctaaactagccaacaaagggagaaagaaggcagacttcgaaccccgatattgggtttgggtgcacatgacaaatgaaaggtttccggaacaaaggaaatcaaagcttctaccatggggagatggaccatttcaagtgcttgaaagaattaatgacaatgcttacaaagttgagctgcccggtgagtataatgttagttccaccttcaatgtctctgatttatctctttttgatgcagatggagaatccgatttgaggacatatccttctcaagatggagagaatgatgaggacatgaccaagagccatggcaaggatccacttgaaggacttggaggacctatga

SEQ ID NO: 28881 - DNA, 417 bp, Glycine max
  unsure at all n locations
taggcctaatcttaactctttttaagagccatcacttttttatttagatttggaccataccatgttntaaggagttgagtagagtgtgagcggttaaactcttcctccattctcccccttagttataactaaatacataaaagattgaaaagaaatcttatatggttgtttagaagcttgcaaagtattttgttgaagtacgatgaaaacattaaatatcaacagcatttcgttaatttgaagacattcaggattgtcttaatattctctttttcaccgcagaaactaaattttattacgttgaagagtgccagcagtacccctgcattgttacggcatttcaatatattcaatttgtgcaacaaaacataatgtcattggtaatattcatagtattcaacaaataaatttttaaag

SEQ ID NO: 28882 - DNA, 391 bp, Glycine max
  unsure at all n locations
nttactagcatcaacagtatccttagattattatnnctcattagaaactctcgctgctcttgtaaaaataaatccttctaagcttcatggaagtgcaaaaatggttggctgtggttcagtaaatagctatctcctgtccctggcacaagggtggggaagcaaggaggagggcatgggtttgtactcttgtattatggcaaatgagaaagtccaggatgaagcactgtgtttgtttccttctgatgctgagaatagtagtgaccaatccaattactgcataggttctactctttattttgaattgcatggacccattgctcanagcaaggaaccaattgtagatacagtttcctcctgtttgagagttatacacataccggatatgcattta

SEQ ID NO: 28883 - DNA, 431 bp, Glycine max
  unsure at all n locations
taagaacagaattgcctaaatcatttccaaatatgtatgtgattacgaagcatttcaagaatcaagcctaggctattgtgcaagcaatcaatggggcaaaacacaccaaaatattatgataatggatggctcaaattctcacaaaggtaaacttattactttcaaattgagctttcaaaactatcatgacatgtagaggaaaaacaaggatttcaaatcacaaaatgtcaagagacttttattttcagaacaattatccatttcttgaacatatcctataattcaaagaaaaatatgcaaagttgtacatgcaaacagaattgacctagaatattaaactataaacccaacaaaactaacaaatttaacacaagcaaaactaacaaaactagcaaaaccaaaaccaaagaacactcccnccccccccatac

SEQ ID NO: 28884 - DNA, 430 bp, Glycine max
acgacgcgtgaataaggacggttctactaaatttgttcgtaacaaatgaccggtggcattttttgtaaataacagtacacgaaccattcaatacgaagacggttattttccgaaccggcgtcatagattgggcaagtttaaaggtagcccgtgagccacagccactgaagaagttaagcttcaaatatgtgaagcttgctctcgatctcatctctcccattcacctttcactcgtgcactctataactccacgctcctatcaatgctcctctacggcatgttcctgaatgcccccattgggaaaagaggttctagtgctgggggcctagggttagggtttgtgagagatgttggatgctccatgcattgatgagtcttatcgcaagctggtggaagccattcgagcacagtgacgacgccgttaatgccg

SEQ ID NO: 28885 - DNA, 404 bp, Glycine max
  unsure at all n locations
attaacctagtgtataagacaaggctttgttcttgttgtcgcaatgttgcatgctcgtaatattaagcacgcttcattcgtccatccagtagtagggaattatgcttctcagaaagaattgacgcataaagatagccctgtctacaactatatagtatatgtattgatccatatcgtaatgaggggacccatctctatatataacagccgtggacatatatgttcttgacaagactagatgagaatagtacgtatacgcgggcggagctggtaccatcaggtatcgaagcgaaaggccaagtatgattctctatcaaggacccagaggatatcactgatgcctcttctaaacgcntgacatgcgataatggatctgtaatatctcataccgactgatgaacata

SEQ ID NO: 28886 - DNA, 403 bp, Glycine max
  unsure at all n locations
ntntggctaagtggctatttacaatcaaaacatggccttcatcattctcagattcatgcattcattccataaattagagattcatgcaaaagtcattacccaatgtcagtcgtttctttcacaattaagatcacactctcaccgggttacgattaacgcattccttcacaatcaatatgacaaaccgactaacattttcagtcataatcctaatttcttgttctttctcttttaatgactgcatgctttttcaagacaaaagatctatgcattccacttcactcaattcatacaagtgcttcgttcaattcaatcaaaaacattgaatatcacatcaaaagtcaaaccactgaataacattcaatcatgcttttcacaagctacaaacaactataaacatact

SEQ ID NO: 28887 - DNA, 432 bp, Glycine max
tgtttcactcacctcttgaaacacatagtcattcatgtgttcttcgcttattatttatcttctccatttattggtcaataagattttctttgtttcttctttcttctcaaacttatatgatctactaattctctatttctgagagagtttgtctataaagttctaggagaagagaaatttttacccttatacaatacaaaagtatacaatttaagattagatcacatgagatgtattctcaatagatttggctaataaaatctttctttatctttttcttctttattatctagatttatctaatttgaacctcacctaatattttattttctgtcaagatatatattaagataaaacatcacaagatttaaatcattctagaatatcacaaattcgaatataacacacatcttatccaaactagatatacat

SEQ ID NO: 28888 - DNA, 425 bp, Glycine max
  unsure at all n locations
tcttcttgtttctctccccatttgaaaccaacatttttcttgagcacttcattgagaggtgctgccaatgtgctaaaatccttcacaaatcgtctataaaaacttgctaagccatgtgtcgcaacctacccttcggcgggagggcgatgcgtgactcgcgggatgcgtgttccacgaaaggaatacgcgcggagtcgccactaatgtttatttgaggaaaacgtcggaaaaaccggaaaagaagcgatctacgaacttttaagtgaaaggctcgggagttgtatttacgcgtggggaaggtattagcaccccacacgtccgtcacaagggacggcagcctttaatcgaatgtgcaaacatgactttgatttttacgttcccttttatgtccttatatcctttataccctntntatanttttttct

SEQ ID NO: 28889 - DNA, 406 bp, Glycine max
  unsure at all n locations
actcagctgtcattggcgagcaaataaaatntttttcatgatagcatggatagtattaagaaagttgcaattgattcagacagatgttgtagggcctcaaagaacaccttcattgaaaggcaatttgtattacactatatttattgatgactttttctttaagttcaaatcaaaggtggctgaaattttttggatgttcaaagtcaagtagagaatgaaagtggtctcaaaattcaaattttgaggtctgacaatggcatcaagtacacatctgcaaaatttaatcaattttgggaggattctgacatccaacatcaacttactaatccttataccccacaacaagatggggttagtgagaggagaaataaatatatcttggagatgatgagatgcatgttgtatg

SEQ ID NO: 28890 - DNA, 312 bp, Glycine max
ttttatttcaaaagattctcatgaaacttgtgacattggtcatttagcttaacacaaacgaaagccctattctcttaattcgagaagaagccctaaaatttttgagttgatgcctatggatatttggggaccattttttaaatcatcaattcgtggacatagatatattgtaactatacttgatgatgatagtacatatactcgggcggctttattaaaatcaaaaagtgaagtgaaaacacatgttcaaaactttattaatctgatcgaaaatcaatccgaagcaaaaattaaatgcattcgattcgataa

SEQ ID NO: 28891 - DNA, 418 bp, Glycine max
tgtccttctcctctgcaatgccctccaccttgtttactctttcctttatctctatctgtaaatccttgtagcatctgaacaattcatcacaatccaacctggtgcacaacaacttggccaacacaccaccaactttggaagacagttgacagttcaaccttacgacctcaacaaaggcgatggtggtgttagccaccttatgacactccactctccaaacagtgtgagcagtaaccctccatttggcgatctctgactccatggacaccaccttgtgcaaaccctcttggtgctactgtccgttctcctctagaatttccaaacttctttggagaaagactttggtagagtccgtagcattttgtaccctaaccaaccgaatcatattttttgtcaaaggttgacacaaagccatatg

SEQ ID NO: 28892 - DNA, 425 bp, Glycine max
tgtatataattatcatttgttttggcaaataacttctttgtcgtaacattcttaacattagatagtgaatatatatcgacaagtgaatagaatgaaatcttattttaatttgttatttaattttacctttttcaataattaaagcttataatcttctaactcccgttttgtctttaaaatgtatctttaaaatttatgagtttaataaccattttagtatataaaaatttacatggtcaattatcaatcaattaaaagtcataaaatcattcttattataatttttaaaataattatattataaaaataataaatttatcatatgagatgctttgtcattgatttgtgattgaataattaggtgtgttatatttattctaacttatatatggaatgcttatgcaagtatatttcatttaaaaatg

SEQ ID NO: 28893 - DNA, 413 bp, Glycine max
  unsure at all n locations
tggtgactctntgagcatatttttatcgtagaattttttgcaatttattggttctttatttcgacagaaactgcgtaattaagctagacaatgaaagacacgtgggaatgggagatgtagtgatgcgatgcctgcacgactagcttgcaaacttgaagctgaatcaccatcacgcatcaaaagttgaatccatcagccacaccaaggtccttttccatagagtagaaataaatgaaatgaaagtgaattaagatgagatagtcttaaattaaagtaaaatgtagaagtgtaaatttcattgtagtttattatttatttctctctntttatgtttttttcaactcaaacaaacgaacactaaatcagtaaaaatattaatatatatatatntttttataantttaattaatata

SEQ ID NO: 28894 - DNA, 417 bp, Glycine max
  unsure at all n locations
ntagaatgttaaactcatcttgaatgagaggatgtttttgtgcgtttttcaaaagctttaggccctttttttttttaattttatcacggatgaaaacctgngcatatatatatatatatatatatatatatatatatatatatatatatatatatatatatatttcaggcttcccttttacgcttttgataccgtatacctcgtttaaaataaaataaaatactgtgcatctttcttttctattgaacaaaacacaatagaagcaagtcagaagcactcgaatgactctcataccaaatgtaaattaaataggtattgatctacacatacacatcaatttaaataacatatttagatcacacaacggaaattaaatattacgagcgtacctccagccattgtacatcgaacgcgaan

SEQ ID NO: 28895 - DNA, 431 bp, Glycine max
  unsure at all n locations
gtgatccttgtttcactaatatcaaaatctggctanccatttaagtgctcataaattccataagggtagaagcctgatgaaccacggagcattatgaatctgaaattgaccatccacaaatgttaatcctactgctatcagtaaaaaaagctactagtgctttaaatattattctttgagcaataatggaactgataagattgcaagtagaacttgtaatgaaaatggggggggggggggtgacaactagtncattcctgatcatgtgtgacatataaaaccactcctaatttgttagcagactcttttacgatgggtatatttctactcacgtgagacttcaaaaccactcccagcttaatcgcacactcaaatcagggaatgcattagaatatatatctgttgagaaattattagacttgatggaaccg

SEQ ID NO: 28896 - DNA, 403 bp, Glycine max
gtggaattcttggaaattggaatcatgatattagtaagcagtccaatggacctttagctaaatgctcaatacttgggttgttcatggaaggaacatcacaggttcacccacaaatatgtatagaatatgcacttgattcgtaatttcaagtatggctattatcatgtttttacagttttgaaaatgttatcattttgatgtcaaagtgtaaaagtgtttttaaaaacattttcaagacttttacactttgcaccaacatcatctaacttgtatccattcaactttttgtcaaaatcgagaagaaataaaactaacaaaaatcaagaggaatggagtttatttttcccatttcagatccaatgcagaatatttgtatgtaaaattttttcttgaacccaatagc

SEQ ID NO: 28897 - DNA, 349 bp, Glycine max
ttacctatacttaatagaacatacttatacctctacataataacctgtgttgggctgagtgtgatacactttacacgtgttttatacgcaggagctagttgtattcaccgactaacaactgccccaaatttatagttttgctagtcctcatgcccctatagaccagctcgctagtcctcacgtgaccctgacatgcaacgactatgtacaaaggagcatgcaacaaaagttactgattgcatgataggagaatggagtaaagatccctaatcacttgtcttgcacaacgtatgcaatcatccacagagaagaatagtatgcactctgaacgattagatggagctgatca

SEQ ID NO: 28898 - DNA, 439 bp, Glycine max
ctcagcttgaggatatggggacccatcacatgtggactatgtgtttgtcgggcgatggtgcacaacaagtttttccacatccacaatgcgcgcataaacccaccatcccctgttgcccacctccaactgagctcacgtactcccacgtagcccatatcctcgtttctctcaacaccgggtccccatcaatcctcccaagcttccacaacatccaagcaaaacaacattcaaacaacacaagctatcacagccaagcaaaacagaacaaagacagaaaactctgctcaacacatcaaccaaaatcacagcttttctcacttaaagaccacagtaacaattccttcgatccaattcattaaccgttggatcgactccaaaattttactgggagtctatagtgcataagcctacatttggaccgttgggatctactggcaaa

SEQ ID NO: 28899 - DNA, 429 bp, Glycine max
actcagcttctaattttgggattgatgctcttaaactgttggtatatattaaactgagttccaaccaaggctgtctcaaagacaccttttgagttattcaagggttggaaaccaagtttgcgacatatacgcgtatagggatgcccgtctgaagtaagaatttataatccacaagagaagaaactagaccctaggactattactgggtatttcattggatatcctaaaaggtttaaagggtataggttctattgtccatcccacaacactaggattgtggaatcaaggaatgcaaagtttcatgaaaatgacttgatcagtgggagtgatcaatttcagaacatttcttctgaaagggatcactatgaagctgaaccttctgggacaagtaataggttggtagtcattctcacccctcaagttaaaatg

SEQ ID NO: 28900 - DNA, 427 bp, Glycine max
  unsure at all n locations
ntgtatcttattcttgcatattatctataaattctttgaactgtaacattttaatttttcgtaaataaatttaaaaagctttttagtcaaaaataaataaataaataaatatagaacaaataatagactgagtaccctaggtataaatagttatgttaagtcagctgtctcatttttagtctcattttcgtttttcccattctcctctcaaaatcctttctttttcccgtagcccaccaaacctgtctcagaaaaacgacgatctcgaacccgttcaccgttggatcgtcgtgaaattttattatcatgttcgcaacccaattccgaacattctcaccgttgggaatttcaaaatcatatctgagcttataggagaacccttcgcattgtagcattttaatttcccgcagaaaccaaaaactgtctc

SEQ ID NO: 28901 - DNA, 437 bp, Glycine max
  unsure at all n locations
gacctataaaactcagctgtatcatacacacatctgaatcgatatcgtttagtttttcaganaacattctcaacagtcacatctttttgtgtggttcttgaatggctatcataggcctatatatatgtgacttgagacacgaatttgacaagagtttttcagagcaaaaaggtcttatcctcttataaagagaaatcgttttatcctcttacaaattccttggccaaattacttgtgattcaataaggaattatttgagtgctcaaattgttcaatctatctctttcaagagagatttcttcttttcttcttcttcattttgaaaagggattaagagaccgagggtctcttgttgtgaaataattctaaacacaaaggaagggttgtccttgtgtgtttagaacttggaaaaggaatgtataagatagtggaactct

SEQ ID NO: 28902 - DNA, 427 bp, Glycine max
  unsure at all n locations
ttccattctcttggaagttcatcattggatttttcttcttctggaggatctttattgtttcctttatcatttcctttggaatcttgttcatgaatattcatatgttctaaagaatctgcaatatcatctagcatattctttcttgacaagatagcattagattcatcaaaggtaacatgaatggattcctcgatattcatagttcttttattatatatcctatatgctttgctttgtaatgaatatccaagaaaaataccttcatcatattttgcatcgaattttcctagattatctctaccattattaagcacaaagcatttgcaaccaaaaacatgtagatgagaaatattaggttttctaccattaaataactcatatggggttntctttaanataagtcttattaaggccctattcatgatct

SEQ ID NO: 28903 - DNA, 437 bp, Glycine max
ctcagcttctaaggaggtgagcttagttatgagagggtgtgtttatctaagctctagcttctcaaggaagatttctcaaagaagcttctcaaggaagttttctaaagaaagcttctcaaggaagctacctagtctataaatagaagcatgtgtaacacttgttgtaactttgatgaatgagagtcttgtgagacacaactcaaagttcaacttctctccctttttcttccttcaatttcgtgctcccccctctctcttcctctccctctttcttttcctccattgaagcatcctctccaagcttcttatccaaggctcatcttggtggtgaagctccttcttccaaggcttattccctagtggatggcgcctcctctctcctcttctcctttgtcttccgcttcatctccatggtgaaaaatcaccatcaaaggacc

SEQ ID NO: 28904 - DNA, 416 bp, Glycine max
  unsure at all n locations
tcaacaacattctttcttctcttcaagtcttcaattttaatcagtgatcttcacctttctctctgcctcatctccctttaattcaggttggttaacttaaattcttctgaattattgctcagttagtaacagaattaaggtgcaacaagagtaggggagataattttcatgccgctccaaacattgataatttctttgtgacattcattgaggtgctatgtgatagaccccctggtcatgattgggaaactagatatgcttgctgagcaaacaaaacattggagatgttaagacaaagtacatgggagttcttagagtatgaatgctcttgcctcttgctcaaggaggaaaatgctttcgaggcanagaatgcatttcaacaagagtaaataacttttctctcttgagaaatattt

SEQ ID NO: 28905 - DNA, 408 bp, Glycine max
  unsure at all n locations
tgtaggattatggggtattcatcacatgtggtactatttggcagtcgggcgatggtgcacaacaagttttccacatccacaaagcgcgcataaacccaccatcccctgttgcccacctccaactgagctcacgtactcccacgtagcccataacctcgtttctctcaacaccgggtccccatcaatcctcccaagcttccccaacatcaaagtaaatcaacattcaaacagcacaaattaccacagccaagataacagggcaaaggcagaaaactctgcccaaaacaccaaccaaaatcacagcttttctcacttaaagaccccagtaacaattccttcgatccaattcgttaaccgttggatcgactccaaaattntactggaagtctatagtacataagcctacat

SEQ ID NO: 28906 - DNA, 423 bp, Glycine max
aagctacctagtctataaatagaaacatgggttactctcgctggaactttgatgaaggagagtctcgtgagacatacttcacagccccacttctctccctactttattgcttcaattccgtgctcccccctctctctttctctgcctctttcttttcctccattgaagcatccttccaagcttcttatccaaggctcatcttggtggtgaagctccttcttccatggcttattccctactggatggcgcctcctctcacctcttctcctttgtcttccgctgcatctccatggtggaaaatcaccattaagggacctcattgaagctcagagatccatcctccatagaagccccacaagcaagcttgcatcatcccgtttcagattctatacaacgattaatacagaacgttcgcattaatcg

SEQ ID NO: 28907 - DNA, 434 bp, Glycine max
  unsure at all n locations
cttgtagtggaattcttggaaatttgaatcatgatattagtttgcagtccaatggacctttagctaaatgctcaatacttgggttgttcatggaaggaacatcacaggttcacccacaaatatgtatagaatatgcacttgattcgtaatttcaagtatggctattatcatgtttttacagttttgaaaatgttatcattttgatgtcaaagtgtaaaagtgtttttaaaaacattttcaagacttttacactttgcaccaacatcatctaacttgtatccattcaactttttgtcaaaatcgagaagaaataaaactaacaaaaatcaagaggaatggagtttatttttcccatttcaaatccaatgcagaaaatttgtatgtaaaattttttcttgaacccaatagcatntaatttggttaatatttctaca

SEQ ID NO: 28908 - DNA, 439 bp, Glycine max
tactacgcttgctatttatagagaaaacatttataattgcctatattgattaaatctataacgttatcgattatttcaatgaagtaattgattatattatttaagtaatcgattacagtgttcatccaacatctagaaaacacctcaagaataatgtaattgattagatgacctatgtaatcaattaaagtgttcttgttcacctctgaacaacttaaatgagagagaagtaatcaattaatccacttggtaattgattaaagcagagactccaaaaaaaaaatcaatcattgtgtcaaacaatagtgtcgcaatctacccttcggcggtcgtgcgaataggccaaaatagatgggccgaagcatttgtctccaagggagataatgagcggagtgcccaccaacgtttattcgaggacaaagttagtgtcgcaacctac

SEQ ID NO: 28909 - DNA, 350 bp, Glycine max
gcgagtttgacacgctcagcccaaggcatttgatattttcatattcttgttgcaatgacttctctgatttagaatagggcttaacatgcctgtctcgctaagcacattaaggttacagtggtccaacctggtgagctcttactggcgttcatcttgtttaatgagtcacgctaagcgagccatgctcgctaagcgcaatgagctctctattagagaataacgcttaacgagccatgctctcttatccattgaggtatttcaactgagcgaaggtgactgccttagaccaagtgtttatcattagttgacacgctaagcgccttctgatgttttctgaacgcgcgcaaagc

SEQ ID NO: 28910 - DNA, 438 bp, Glycine max
tataaaactaagctattattggaacattacacccaaatttaatttgattcttactatatattaataacaaaacaatacagtttttttttaaaaacaaaacgtaactttttgagtgacatgtcttcaacgacaaaatacacaaaaattaaaaacttgaataataaaatttacaaaataataaaagtttcctaataaaatatggaattaaaccttccatcaatttcttagaaactagagtcatatagttgtcatggatgacattcagagtcctataactaatattaataatataagaaactaagaaaataaactttatatatgtaataataacaatagtttaaattaataattaacctagtaagcacaagtgaaaggatcgaagacaaagtgattggcgccatctcggggtagcgtagtacagctcttatggaattatct

SEQ ID NO: 28911 - DNA, 326 bp, Glycine max
  unsure at all n locations
catcangcatcatcaagaggaagggagaagaaacaccgctaangcaggaaagnnccgccagaaggcaaaactctctattttaatcaattacaaccttatcgtaatcgattacacaagttgttcgaagcttgtagagttatgtctcgtattgtgtcaatcgattatagccttatcgtaatcaattacacagttgtttttaagataatgattgatttatttaggagtctctactttaattgattaccatgtgttataatcgattacttctctttctataagtgtaccaaaagtgaacaacaatactcttatcgattacattgttcttg

SEQ ID NO: 28912 - DNA, 402 bp, Glycine max
  unsure at all n locations
aactcaagcttgtaggctacatttacaaccatacattggctnngatcactatgaggaaattctcacaaaaaattgaattagtgagacatggagttacaagatttgctaccactttcttaactttgcaaagattgcataagcaaaaggccaatcttataaggatgtttacttcagatgaatggttgaagtctaaggcagctaaagagcccaaggggaagcaagcaacagatgttgctcttatgccatcattttggaatgatgttgtctatgctttaaaggctatagggcctcttgtaagtgtgttgaggttggtggataatgaacaaaaacctgcaatgggtttcatttatgaagcaatggatagggccaaagaagcaattcatagagctgtcaataacaatg

SEQ ID NO: 28913 - DNA, 432 bp, Glycine max
  unsure at all n locations
gtgttatgtgtcgattntagctatggtttcatttggttattttcaaactcatttaaagaggacttgcaaagtaaatgactggttgaaactttatttttcaatggttaaccgaggttacagcataaacgattgattgaatttttattttaaattcattaaggtagattacgacacaattaatcggtggaaactcgctttacaatgataaaagggagattacggtacaattaatcagtcaaaacttgctttacaatgaaataaaattactgatggaagaagaatgaagatgaagatgtgaaaagcaagagtggaccactaagggtgcataaaatgaattcaaaacttcaaaaataaaaactaaccggtcgatcaacgaagaacggtgaagaacggacgaagaacgatcatggaaacgttattgaaacgttaccg

SEQ ID NO: 28914 - DNA, 427 bp, Glycine max
tttgcgggtatgattatgatattcaatacaaatttgtttcttcaaatgtcatttttgatgccctctagagacttgatcatgtaatgagaggtgaatgtttcatcctgtccattcctcacttcattttcctcaaagaattgaaacgtgccttgcattccagtccaattttcaaatcataatggatgtcacttcagcaggatttgactagctacccaaatttctagattaaagatggctttattttcttcaagggagctctttgggtgaaccccgacaaccctttcatctcggccttacttacaaaattttactatactctcattggtgaccatttgggcatcaaaaagaaccttcatcgtctttagtcaaatttcttctggaacaccatgacctatgatgttaaagaattcatctgacactctaacac

SEQ ID NO: 28915 - DNA, 417 bp, Glycine max
ttacgatttcaaactccacaaataagagatgctttattataattaggtgaatttaatgatggtcttaaaataaaaagcgaagcggattgtttagcaacttatgaacttgaaaattttgagtttttattaagtatgactatttggtatgacatattatttgctgtaaactccattagtaaaaagttacaatcaaaagatatgagtatggatgccactatagaacaattaaaaggtcttattttattttatttttgaaaaatatagagaaggtgaatttgaaaatactataatttatgccatagaaattgttaatgaaatggagatagaacctaagtttcatgaaaaaacatgtagtttgtagaaaaaaaacaatatgatagaaatattgataatgaagttgaaaatcgcctaaagaat

SEQ ID NO: 28916 - DNA, 411 bp, Glycine max
  unsure at all n locations
tgacactatgaaactcagcttatataagtaattgttatgtntcttaaattgtttttgtatgtttgtttttggtaagcttacccttgtgtgtggcacatgaggttgtgacagtgatgatcttaaactttgtatttgtgagagtagctagtttggaggttgatcatttccatggagacatcatggatgggcaagcttggatatgaaaatgcaatccttcttgtgttgctcttcgttacttttatttatattgctgattgacttagattttaggtagtttatctttacaaagttgtttatgcttatatgtaggttttgaggaaatttgagttattatggtgtagtgcgtgtgtgtctatatatatatatcatgtcatgttttaatttggagctgtgcattttagcctttgggac

SEQ ID NO: 28917 - DNA, 417 bp, Glycine max
  unsure at all n locations
tctaaattagtgtacctttctattcgcagctccggccttgctatcctgaaagaagtgtatcaacagcttttcatctttagagtgggcgcccatcttacggcagtacattttgagatggtttttgggacaagtcgtccctttatacttgtcgaagtccggcactttgaacttcgggggaataacaacatcgggtactaagcaaagatccgtcatgtctgcaaacggatagtccccaaatccttccacagccctcaatctttcctcaaggagatcgagcttcctcctttcttcagatgccgggggcggcccttccatggacaaaactattggcgaagctgcgatgttgggttgaggcaacgtgcctggcgccggcccttcggggatcggnggatagaactcgacatcccttcgagcata

SEQ ID NO: 28918 - DNA, 425 bp, Glycine max
  unsure at all n locations
gcacgtatcggtcaagtgtatggaccacgttgtattcatttgctcatcgataatggttccagtttaaacgtgatgcccaagagcactttggagaaattaccattcaatgcttcccacctaaagccaagttccatggtggttcgtgccttcgaaggcacccggcgagaggttaagggagagatcgacctccctgtacagatagaccctcacacctgtcaagttaccttccaaataatggatattaaccccccttacagctgcctgttggggcgcccgtggatccactcggtgggagttgttccctctacactccaccaaaagttgaaattcgtagtggaagggcatctggtcatcgtatcangcgaggaagacatcttggtaagctgcccatcctctatgccttatgtggaggccgcagaggagtc

SEQ ID NO: 28919 - DNA, 392 bp, Glycine max
  unsure at all n locations
tattcaattatcaataaaaatcctataaaaaaacttgtgaatgngcccacaaagacaatgtgataagcaattatcactcaactaatcactaatcatgcaatttaattaaaacacattctcttatttaaataaataactccaaattatatcacaaaatcatataatctttgagttgcaatttttggggtgttacgacctaggtctctagattcttgatggtcatacccgagtaggtattcgatcaacatacatacatgtacctaagtcctaataagagatttaatagggtaatgtagattcccctaagatgtgaaaaagatgatggcactcataaacaaagagggaggggggggggggtgaattcctataaaanattaatatggaattaaatt

SEQ ID NO: 28920 - DNA, 425 bp, Glycine max
  unsure at all n locations
cggctgattaaaaaacacataactaggagtggaaatatattaaaagttcgattatatttgttgttgacaaatagagaatagaggatagtacacactaatattacaataataggaaaatggaataattcatgtaccaaataaatgataactcatatttgatgtgaaaaatatgttacccaaactgtcgagcttgtaaatcaacatatgatattttaacttaatcaagtgaatttaagtttaatataattgtgttaaatattttgataaagaattttgatagttataatagttataatgtgatttttatataaaaataataaaaatcattagtcaatctgggtaaagaaagaagacaagacatagaggttacaagtttaaattctccaaaacgaatatttcanacaaaacttataataaattaacat

SEQ ID NO: 28921 - DNA, 385 bp, Glycine max
acatgaaaattgaggaaccaaaccaaatctatatgggagaggcgtgagagctaacgaagtttctctgctacactttgagatggaaattcaattgcagcatccgaagaagcacttgagagcgagcacatcacaaggaggccaagggagaagcaacaaccacatgtcccaaagcaagtatgttggggtgaggcaaagagcatcagggaaatgggttgctgagatcaaagacacaacacaaaagataagaatgtggcttggcacatatgagacagcagaggaagcagcaagggcttatgatgaagctgcatgcctccttcgtggatccaacactcgcaccaacttcatcacacgtgtgttccttgattcccctctcgcttcgcggatt

SEQ ID NO: 28922 - DNA, 432 bp, Glycine max
  unsure at all n locations
tcttttanactacacaaatttaattcctaaaggactttttcttgacaaacctatgaatgtgcatatttattaatataattcaatcatttcatgcatgctttcagttgtgtgtttagatcaatgttcccatttaatagtctttaaacttgcaaattttgtatcttgtctgtaggggtttggatcccctagccactctcttcttttcactaagtaatatgccttcaaatttatcagtgagatcctaaaccatattcaatctgtaatagtttaatgtgtgtatatatgtgtgcaactcttttattactacctctttgtttttgcctcttcacctttcaacccatccatctaatgttgcatgtactctgccctaaattggattatgcaatatgatatttatctatggtggatattgatctggagtctcttacctat

SEQ ID NO: 28923 - DNA, 433 bp, Glycine max
actcagctgcacatatgcataaatatgaaattggggatttttgcactactaagtgatgctaaggtgtgtagaataaacctttgtagttcgataccatttgatagctcgataccatttgaaaatcacaagtttgccatcatgcttagcatcatgagtagctagacatcaaaaatactagaaaccccgtgagatcaacattataagcaaggttctaatttttcatgataaacacaagtctagctatcatcctatgcatgctagttatcatatcatcattcaagttctataactagcatacaacacacaagcatgcatattaaatataaaacttatgcaatgcaagcaagcacatgaatatgcacatatcaaatataaccaaacaatgttcatgagcttgctctccctacttgtgtgcttcttttgtccaagaatt

SEQ ID NO: 28924 - DNA, 429 bp, Glycine max
  unsure at all n locations
tcccttgtgatgggatcaaaccttgcacttgatacttgtgtttctcctgtgcgaggtggacaaattttgtctttttacctatctgtatcatttcatttccctttctcttggctcaaatgtgtgtcattgtcctgaatttatatatttatttactagtcagacgctcagtttagttactttctttggtcaagaggctaagccctgtttaaaatgcaactctagtttagatcaggccaacaatgactaaagctaaatccaataaatctccttaacccttcaaagtattcattttgatccacaaattaaaatttaaaattactgaacacaaagtcccgaacagtaactataaaagaattatccctataaaaatattattttgtgaattattattaattntttggtataatcaaaatgtataattccattccc

SEQ ID NO: 28925 - DNA, 353 bp, Glycine max
aattgaggaacccaaccaaatctatatgtgtgagttgcgagaactaagggaggttctctgctacactttgagatggaaattcaattcccgcattcaaagaaacacttgggagccagcacatcaaaaggaaggtaagggagaaacaacaaccaccaaaccaaaagccagtatgttggggtgaggcaaaaaacatcagggaaatgggttgctgagatcaaagacacaacacaaaagataagaatgtggcttggcacatatgagacagcagaggaagcagccagggcttatgatgaaactgcatgcctccttcgtggatccaacactcgcaccaacttcatcacacgtgtgtccct

SEQ ID NO: 28926 - DNA, 426 bp, Glycine max
aggaatttggacaaagacgctagtatcatcgttcttttgtcaaggttagcttatgaacttctccaacgttgataggacagtgcatttctagtatcatcgtacaattgtcaaggttagcttcaattccccggtgggtgatcatgaaacccaagaattttctgcctctaaccccaaaggtgcatttttcaagattgaggcgcatgttatacttgagaatctctttgaacacctctgccaaatttgccacatgtttggccatgctatgagacttgacgaccatgtcattcacatagacctcgacattttgtcatatctgttgtttgaagacccagtccataagcctttgttatatggctcctacattctggaagtcgggcgcaccatccataagcttttcgatgatgggaaagggatatgcatccttgg

SEQ ID NO: 28927 - DNA, 419 bp, Glycine max
tataataagaaagtgaagtcaaaaacttttaactctgtatatttagtttggaaggttatcctgcccatggatagtaaggatcgagccttgggcaaatggtccccaaattgggaaggaccgtttaaaataattcagatctattcgaatggtgcttatgaattagaggaattaacccctcagaaacgtactttgagtataaatggtaaatatttgaaaaaatataaaccaacattgctcgaagttaaaataagcatagaatagacagaagtaatggaaacataaaaatggcgataacagtaaaattgccacgaaagggcatgtgtcaatattacatcaagagtagaatcgaaatacagaattcgaaataaaaaatcataagttctactaatgcatgactaagtcctcatatagtttcttca

SEQ ID NO: 28928 - DNA, 408 bp, Glycine max
  unsure at all n locations
ntatgatcaaatntttttctctctttntctctcaacctgttttcattcttcttcctcttttcacttctgttcttccaatttcttgcacaaaattttgtgccttttccattggtgatgatcatggaaggctaaacacttaatcaatcaaaggatccactccaagcaaggctaaatttgaatttttgtttagtatttctaatctttctgaatgttcatctttttcttcaatcctatttttgattttcatgagtatgactatgcttatgattataaatggattacgctatcgattcatttcctaatttcgaaatttaatcagagattgtgtggatgatcttccaacctaatatgcgatctctaacaatttaaggattgattcgattgaactatctctaatgtattagactg

SEQ ID NO: 28929 - DNA, 417 bp, Glycine max
  unsure at all n locations
tatcccaatgttgagaagtctatctcaatcaaatctttgcttacaaaagttaaggttgaagcttctacacatgtggtacatgaaaaactaagtgagatgaaaatggataacaataatgcagatgataaaatgcctagtgttgaacctgtgaaatatgatgaacctctaatttagataggcctgaaaatataaatattgagaaagaaactagacaagacaggcaagaaaatgttgtgcaaacatttgaaaatatagttggaaccaagtctagcaatgggttggccaggtaagtctttgtattcttatgccatcttttcgttgaaaaagtataatttagttcattagttaaataatactacattatatgtactagtgtattgtaaacatgttccattgtactttnaaaattatttaata

SEQ ID NO: 28930 - DNA, 429 bp, Glycine max
  unsure at all n locations
agttgtaatcaaccgttagttagttatagttagttgttgttagttacttatattttagttctacaaatacatgcaagtaaagcttctatcaattcagatcaaacacctttgtgagttctaaatctcttttcctctttgtcaagctntcttcaattcgtcattatgaatcaattcaatttcgttaacaatccattccccgcaacaatatgcttttgccttcttatattcctcttccaaccaacaacgtttatgactcctaatttttcaatgttgttaataaataaatgcaaattcctaaatgacgtttgcacacctcttcgatcttcgtgatcatcaatactgattacagataacgaggaaacacgacaacaactctcctttgtcttttgaagctccttctcattntctttntctcaccaatctcaaatc

SEQ ID NO: 28931 - DNA, 292 bp, Glycine max
aagaggaagcatatcaaggagagaatgcaaattttcaatccccgagaaagaaacgaagaagaaaggaaattccccatctaagagtgggagacagaatatagatatgaatagaaagaacactcccaatcaaagaatgggagaaggaaaaaaagaagtataatataagaaagctcctggtcaaagaaactataagacatgtgcacaaaggtcttttgaccggacgatatctgaacaatacagaattgtcaccacatgaacaataaaagaacgaaaggaaaccaccacctaaaat

SEQ ID NO: 28932 - DNA, 437 bp, Glycine max
  unsure at all n locations
tcaatacaatgattaatgcagactatccacaagaatctctgtattgaatctcaaacaggaatctaaggttcactcatgataaacattaactatatgcacaacaatagtcattaatcacataaaacaacgtaaaaataattgtaacataaaccaagccaagaaaagtacatgtgataatgctcagtatcaatagtgtccaacaacgaataccgtgaacgatgacgcaaacaacaaaatgataagggtctgcgagcttatgatgcaacaaataagggttcagtatgcttctatagaaatgactgacatatagataagacaaaaacatcaaattntccaatcataggaacctttgaactagaatggaataaacangttaataagaacgtagccaagtttctgagtgcagatccaataacatgattctgcatgagattatg

SEQ ID NO: 28933 - DNA, 430 bp, Glycine max
  unsure at all n locations
acacaacaacacagaatctaggtgtccaatactctcttttttcaatgggttttctaggtttgaaaagtgaaatttagaatgaggtaaatttggagcaaactctcacctcacaccagtccataacatctatttagacttgttcaaactggatttacacctaaaatctcaccgaatcaaaatttgactcttcaacacctaaatttgccctaaaaatggctctttgttcactttggtcatttatttttctctctagcacagtccaagctttctcataagtcctaaatgacatttcaagctagtattaactcactttaacctccatttaccacagaattcagacttagccttccaaccctcanagtctcactctttttccactcataacatcacattctcattntctaaccctaggttagttctacccttcgtc

SEQ ID NO: 28934 - DNA, 423 bp, Glycine max
  unsure at all n locations
ntgtatttaggttggatgggtgggtaattaacttgttgatatagcaggaacttattgttatgctttgtgtgagaatatatgtatcaaaaacaaatcatttctgatgttgtatgaatggaaaacattgatgtttcggaactaaacattgtttgtgtcaacaatgttagaactgaagacgtggaagatgcctaatccctcaaaatgtcacagttttgatgataacgaaaatattaaactttgatggtcaatctaatgaggcttattaagtgttacaggttttttttgcgtctaattatgatattggtattgtatttcttaccttagatgcaaaatctattntaattggacatatgctcaatgtaaccaaaagatggattcagtccaatattttctcaagttagacttagaatataccgttctata

SEQ ID NO: 28935 - DNA, 430 bp, Glycine max
  unsure at all n locations
tgaatataatgaaacttgctaacttaacanagctaagtttcacttattnctcttaaggttccttcatccattaaagttgatagcgctacacatggccgttactgtgaaaagagagatagtgggaactctaaacactttttgtagcatatcttcatagaactacaacttgccagtgtcgtcttgcgctcaaagttgacttttagtgtacaaatcaaatataacgttaacagcataagacaaaaggaattaagaatattaagacaagacaatttaaatcttcccttttgtgcgttgtggcacgagttgcttattgaacctatggacgctactttctgatgattgctttttgtacttaaggatagagtaattgtttcattgcctttgtactatgagcgaagtgtcaaagcacttttcttctgaggactggatg

SEQ ID NO: 28936 - DNA, 456 bp, Glycine max
  unsure at all n locations
actcggttgtgctcgtgcagcggaccataaaactcagcttgaccaaacctactctcataacctgttcctggtgagaatgccatccttaccctcggagccaaaaaaagaaagagaaggcaatttccatcaagaggaagcataaaaggagagaaagaaatttcccatcaccagaacgaaaagaagacgaaaggaaattcccaatctcagagtgggagaacgaaaaaagaacagaacagaaagaacactccccatcaaagaatgggagaacgaacaaatgatgcaacaaagaagaaagctcctggtcaaagaaactagaaaaaatgtgccgatagtcttttgaccggacgatatctgaacaatacagaattgtcaccaaatgaacataaacagaaggaaaggaaaccacgacctaaaatggtctgtctccttctaataccgacnncaaatccgtgcgcn

SEQ ID NO: 28937 - DNA, 428 bp, Glycine max
  unsure at all n locations
taatcccttgangactaacggtaggagatttgccctttattcagctaaggactactttccttagcacccttatgttcaatatgtcggatttgccctggagatttgccctgaattttctcctttgaaaactattttatttggaaatccttcccaagacaccattgaaccactgatggaggctttggaggaagattataacgatggacatgagataaatgactcacggcagtttattgaaggagtattggatcttgaaaagagaatcaatagactagatacatcgacagaaattaaatataacaaattntgtcattgttgaacaaattattagcttatagaccaaatctttaccatttgataatatgtgttacttatttctgatacgagcataataaagtgacatgaatgttcaaaaaatcaaactacaa

SEQ ID NO: 28938 - DNA, 415 bp, Glycine max
  unsure at all n locations
ntgagctcaatagctccaacctcatctataccccatatttagaatggccaaggtgctaccaagacgttcaaaggtacggccggagcattgacattatcggtgaaggcctggcacttgtggcacttcctcacatggatgcaacaatagttttccatagtgagccagtaataccctaccctcagaatcttctaggccatggcatgcccgttggcatgtgttccaaaggatccctcatgcacttctactagcatttgcttagcctccttggcatttacacattgaagcaaaaccatatcatggttcatcttgtacaagatatttccacttaggaaaaagcaggctgcacaaacattactcagctcagcaagaacaatttcttataatattcaaccaatttagaatcaagaactcaaca

SEQ ID NO: 28939 - DNA, 413 bp, Glycine max
  unsure at all n locations
taatcccctgaaaatggtgggtatgagatttgccctgtattcagctagggattactttccttagcacccttatgttcaatatgttcgataaataaaaatagtttttttttttttgctatgtgcatgagagtttaaatgctagttgtcacacaaatgtattacacaaaagtacctatcacataaagagtggctatgcaatttagaatgcatcaagaagttttagattgtgtggctacattctttggaaccaaaggcattgcatggaaaaattactacatacccatacctaacgggaatttctatttacccgcttgccttttttgagggagatgtcaccacatgttatgcangatggtggaagcagtcaatattgcatcatcatcatgattttgcaaagaatattactcagtgaa

SEQ ID NO: 28940 - DNA, 424 bp, Glycine max
  unsure at all n locations
gtactagtcatatatatgttacaaaacaacgaaagctttttcgaatcgattattgttgatacagaaatacttaaacaaacctgccaattaggggttttgcggctttttgcaaattccgcccatgtttctggatcaaggccatacttgactgtaggatcagatatttgctgaccttcattgtcagcaaagacaaattttgaagtcaatgaagacttaaattgcctccatcttgctgcaactgttgacatcacctttttttttgcattttcaccttcagggatatcaaatttgcgctacacaacaaaaggagttatgtaacagtatgtaaatgaatcctttacaagtaacttaacaacaaaatcatgaatacaagtgtgaattacttaccanaatatctttccatattaagctctttagatcgtcg

SEQ ID NO: 28941 - DNA, 430 bp, Glycine max
  unsure at all n locations
gtgcagtgttcatgtggccaaaagaagaaagtgcgtgtttttatatgggctctaattttgtttttattccttcaatttagattatttttgtttcatcttctanatttaaattattttttttaatttctcaatttcaaaaaatatttttcttaaaataaatttaaatttaaaaagccaaattaaaagttactcaaatttaaaagataaaaaatatatctaaatcttaaatatatcaatacgaaattgattttcaattatcatgattatttttttcaaaatatgtgtaaatttaaattaatataatttttgtttgtaaatggatattacactattgattcatagagaatgttgtttagaaacttataatcaaaactaattntaagtgcataattattcaaatgggttttaagaactatttanataaaagttt

SEQ ID NO: 28942 - DNA, 197 bp, Glycine max
gagtcatgactccacgctcatgtatctgcaagacactcctcgattcaagattcacgagcagaattctagatgcaacagagccctactacgtatacgatatgtctctatacagtttaccatataccacatgtcacagttatgacatacataagagagacttcacatccacagtgattactctctagaaatcgattgcc

SEQ ID NO: 28943 - DNA, 239 bp, Glycine max
cctgagtccccaccatagccgtggtcagcactttcaaaccagaatggatggttgcagcacttgtttaattccaccacaatattcataagagaaacctgatatttagcagaaaaagattagtgatgatctttgaagagaaccgaatctcgatacatgcattatgacgttaaacttctccgaattttgccagaccacatgatcataaacagaggcaagatttcattataatgtcttctccc

SEQ ID NO: 28944 - DNA, 399 bp, Glycine max
  unsure at all n locations
tgcctcaaagaggtcctttattgacaaggcagccgaatgaactagttccgctccggagtatgatagtcaccgctttaggagtgctgtacaccagcagcgcttcgaggccatcaagggatggtcgtttctccgggagcgacgcgtccagctcagggacgacgagtatactgatttccaggaggaaataggacgccggcggtgggcatcactggtcactcccatggccaagtttgatccagaagtagtccttgagttttatgccaatgcttggccaacagaggagggcgtgcgtgacatgagatcctgngtaaggggtcagtggatcccgtttgatgccgacgctatcggccaactcctatgatatccgttggtgttggaagagggccaggaatgtgagta

SEQ ID NO: 28945 - DNA, 426 bp, Glycine max
  unsure at all n locations
tcgacatctttntgtataagtcttgtgttcctatttttcctttaatttcctaaaattaattgtcttaagtctttacaaaacagagagcatggggatcatcaaattggcattattctttgaaaactcgaacaatacacacttggaggattcatgaggatatcatttactattaattaatttatactacatggcttcgataaaaagaaaaaaaaaggaaataactttcccacggaagcaaaacaatcaagcaacctttgtcaaagtttagcttaagaaaaggacaaaaatgaaaaatgttcggcgtgtggaagtgagatgttttgatccctcatctggttcagccagtaatttatttaaaggtagcaaatacttactcatccattgtaaattattaacttgataaatgaagaaataaaggtgttaatc

SEQ ID NO: 28946 - DNA, 428 bp, Glycine max
  unsure at all n locations
ggcacttcttcgctttcttcagggacttcagcttcnttcccacttgggccttttagcttcgggagccaatttatcccttttgtcctagaattcaaccacttgtgatagttgccggcgacgccattgctacttcccctaagttccttatctttcctttctattgtattccacgctttttggattctctgaagtatcctcgcattggcttcactgaaacctcgcgcgacgaaaggtgcgatgatctcctccaacggtgcacctcacatagggtagcctagttgtcttatggccaacatgggattataattaatacaacccctcgttcccatcgaggtgacgtatgggaatccttcacacaagcacaacactcctgcccctccttctttccatcgggggaaccagctattggacgctcctaccatacctgc

SEQ ID NO: 28947 - DNA, 247 bp, Glycine max
  unsure at all n locations
cgcgaagcttctcttcatatctgcctcagtgggcttatagcctaaaccatacttnccacgaatttctttggcatttatcaggcttgttatgtcaccgttggctttgcccaaacccattccgggatcgtaaccgcttcccaacataactcgggccatcattactggtgcatcggacaagcgaagcttgccagaaaaggaatccacggaggaaatgcttaccacctcgaaaaactggaaagcggtttct

SEQ ID NO: 28948 - DNA, 414 bp, Glycine max
  unsure at all n locations
actcagctttataagagcgggttcgggagacaaaggtcaatttcttgttatatgcgaatttttatttccgagtactctggatttggtaccaccatgctctcctgatttccagctgggaaattggcgagtggaggaacgccccggcatttacgctacacgcataatgtaaacctttgcggtttcaaaagctctatagttgggcctaggctgtagagattttccttttgctaaggctttgcgtcttttggttttgaatctataacacaaggatctttcttcatctgttcctggtctctacccattctcattcattngcatgattacttctatttctgaaacggcagatccgatgacgagtcccccgaaagtactaatacctgtgacccgcctatcgacttcaagcaagacatgaat

SEQ ID NO: 28949 - DNA, 413 bp, Glycine max
ctcacctttggtcctccttatttttgttgcatgagattacatgctctattttcatctcccactccaagtaggcctccggatcattctttcctttaaagggaggaatattgagtttaataccatcaatccggttttgtctaggaacaccatcattccctcttctcctcctttcttcttcattatgatctctattctccatttgatccaacctctcatggagcgcatcatctcgttgtttcattaacctctccaaatgttgcatcaaagcttgcatttggaattgcgaaagccccactccatcattaggatttgttcctgtcatctcaaacaaacaaatcaaacgtaacaagacaattatagttgttgtttgaatacctcacccactcaagtgtatcacacaattatggcttttc

SEQ ID NO: 28950 - DNA, 404 bp, Glycine max
  unsure at all n locations
tgcttgagaagcttctatggaggatggatctttgaatttaatgaggtccttcaatggtgattttcaaccatggagatgtagcgaaagataaaggagaagaggtaagaggaggcaccatccactatggaatcagccatggaaggaggagttttgtaacgcccagaaattttgataattgaaaatagatgtttgatgtttttcttgtgttatttgattacttgattaatttggatgagttaaggtattatgtgaattatccatgtgtgattttcttgatgtggatgttgagttatgtggacttttattgacttangttgaaattatgagatttcaagttttacttanacctgttccactaaaaccacaatcctgaattagttaaccgttggatcgctttcaaattt

SEQ ID NO: 28951 - DNA, 273 bp, Glycine max
taacttgcgtattgctgtgacttacagtcttcaccgggctcaccttatgtgtcctactgactgtgaagtcaccctcactggctgacagacccgcagggtcagccatacagagatttgacgaacgccaccatgcttgctctacaatctcgctaagacgatccatctatgatggccggtctgttcactgcgactgactattccgccatgacgctgagattttatctctgtacagctctctctggaactgccagagtgacctctgagacccactga

SEQ ID NO: 28952 - DNA, 173 bp, Glycine max
tcacatataactgaaagtttccgtatcctgcagcatgcatcatagtatctggaatgccatcagaatttgtatggtgctacgtaaacactgatatcttcctaacttatcaaaatttaaatgccgaccttttgacatcaacaaacacgactacacggtggagagatagatggtga

SEQ ID NO: 28953 - DNA, 310 bp, Glycine max
agccgtaaggtttggtccggcgacgcctttatcggctgacccggcgcggccatcgatgggcgcacccatgtggcctcggccctggagcgcagtgccatggcctgtctggtcgaagcgcacggtggcgaagccttcaggtattgacgcgagcacatcgcggcgctgcccggactcaaggccgacacgggcctgaacctcgaccactgtgtccagcatcccagacaccagatcgacgtgctggccgtgaccggtcccactaggaagaccaccaccgcctggcggctggaacacgcgctggccaagggaagct

SEQ ID NO: 28954 - DNA, 318 bp, Glycine max
gcattatgcatcatcgtgagtaaatgagaagaaaaatttctaagttggaaaagtttcttcagaaggaaaaactctatgttttaatccattatagccttatcacaatcaattacacaaattatcttaagcttgcaaagttatgtctcgtatcgatttaatcaatttcaaccttctcataatcgattacataattttttttgagtcaatgactgattcattcacgagtctctgctgtaatcgattaccatgtgatataatcaattacttctttttctataagtagttcacaagtgaacaagaacactttaattgattact

SEQ ID NO: 28955 - DNA, 240 bp, Glycine max
ccaagtacacactctatagtgcgactagttcggtcaggctgaccatctgtttcacgatgatatgccgacctatgcttccgctctgtcccgagggctacatgtgaactatgacacaatcgctaagggtaccttggatccctgtctggagcattactctacggaattccatgcatccttactacttccttggtgtaggactccactaactttacccttctatacgcgtgtattcactgagat

SEQ ID NO: 28956 - DNA, 364 bp, Glycine max
tataaatagaagcatgtgtaacacttattgtaactttgatgaatgagagtcttgtgagacacagctcaaagttcaacttctctcccccttttcctccttcaatctcgtgctcccccctctctctttcttttcctccattgaagcatcatctccaagcttcttatccaaggcacatttttggtggcaaagctccttcttccatagcttattccctagtggatggcgcctcctctcacctcttttcctttatcttccgctgcatctccatggtggaaaatcaccattgaaggacctcattgaagctcatagattcagccacctcttctcctttatcttccgctgcatctccatggtggaaaatcac

SEQ ID NO: 28957 - DNA, 448 bp, Glycine max
  unsure at all n locations
cgcgccttactcgtgcatacgngccatcaactctgacccgggatactatatatcaacctgcaagcatgctagctatatctttttattccaactatatccaggtgggcgctatagctctacatacacaccattcgcccgatcggcgggaaagaccgtcacatatgccgagagcccaaagaaacctcatcttcatgagcaccgtgggaaaagcacatcttctccagagagacatgcgctcttaatacagaacataggcgacaatatcactaaccgactaaagaggatatgtgactcactgataccctgagcaccacgcttctaacgcaatcatttgaaacaaacgcgggggaagctcctaaacggctaaaccttagcacctcgccgaggggtttgatgactcgctgagctatagttggcaggatcctcgcagccgtcacacatgctggcg

SEQ ID NO: 28958 - DNA, 355 bp, Glycine max
cttgattttctcacggtgcacttggaccccatctctaccaactacaaaccctatgaaaactatattatctacacaaaaagtacacttctctatattatcatagcgggtgtatttcctaacgactaaaataacttgcctgagatgtcctaagtgatcatctatgctccaactgtacactaaaatatcatcaaaataaacaactacgaatctacctacgaaatcccttaagacatgatgcataagcctcatataggtgcttagtgcattagtgagcacaaaaggcatcactagccattcatacaaaccaaacttggtcttgaaagcggggttccactcatcacccgttatcatactg

SEQ ID NO: 28959 - DNA, 336 bp, Glycine max
tatccgaatagcatgaatcatgtacttaggatattgtgcgaccatactcttctgctttactcctgacaaagctattatgcgagcaacccctggggctttacgcaccaagcgtttatgatgatgtgatacggtcttattcacctctatgttagagcctactctctaaaggatctttcagactatgctgacatgcttatgatattgaatgtattctacgtcagatcttgcttcgtacgtttatggtctctacccatactcattccttgaacatatcctataattcatcgaaaaccgtgcattctctgacgagcaccccaaatgtacccatacttgtga

SEQ ID NO: 28960 - DNA, 369 bp, Glycine max
tcttctacactccggagtgatcaccggtgatagcaagctcaacatctccaactttaacctctttacggtgctggaacaactaaaaaatatctcctccaccatggcctgcagcactatgacatacaccattcggagatcctctgtccgaatggcaaatgatagccactgccaaacatagatgtgctatgaatctaaagtatcaataatacggataaaaaaaatctgttattaatgattttgcatgctagaccagaggatcagagtctccttatcaggctcatactcaagtgaatcatgatgtcaaagagagcagggggaaaatacatctccaactggcatagtataattgcgggctcattatcaaactca

SEQ ID NO: 28961 - DNA, 364 bp, Glycine max
aactgcaaagcaagttatgaaggtagagcaattagagaaactagcaaaactggaagattggtgtaagcaatttcttattattactttcttgataagggtatgcattttgccgatgtttttaagtacatatctttttttatactgaagaaaaaattaaaatggtaaattagtaatttctttatatttgtaagtgtggttcaaagaccatgtcagcattaagaacaaacatgagctttagcttcatttgaaaagttacattaaaagctacccaaactagaggaataactaacatttcagagtggcaatatactcacaatattggatggatacttgcaaccagttatctagcctttacagctaacat

SEQ ID NO: 28962 - DNA, 180 bp, Glycine max
acacactctgaccgtgaaacccatttgacgcccgtgctaaccccagggagatctgatccacccccaccctctgttacccaacacaggtaactggactgctcattgtccatgagaaacccgtgcagtcctgccatgaacgcataacacacgctatagagacaccactcatgattaccccct

SEQ ID NO: 28963 - DNA, 362 bp, Glycine max
  unsure at all n locations
acacgtgtttccgaactctctgacgatgatgcttattacgcactactatagatctttgtttgtgagaggagtagaaatttaaaaaaatgtgaaaggagcaaggagtgtgtatacaatgtacataggaatgggacataaagtgacttggacgtcctaccgtgcgcacaaaatcaatgcataaacttcgacctatgttagggggaggaatcattaacaaagaccataagacagctctgctgttccttacatataagaataaccatgtgatgggattcaagccaaaatttgtgaatagtgttatgtcngcaataataaacactggctagtggcgactaactaacggacgcaaagacaattcacga

SEQ ID NO: 28964 - DNA, 182 bp, Glycine max
cttttacgcgctaggccgtgcttgcttcttgactttcatgaattgagtaaaccacctatcactactttgtctacactggtaaattttcagatcatgaaatccctcacgacatgtgctttattggattccttagagagagtatgaaaatatgggataccgttgcaagagctatcaccttcatg

SEQ ID NO: 28965 - DNA, 232 bp, Glycine max
catcctgatgcaatgaatctatgcaatgcctgtaattcgatatttttgatagatagtacctacattacacacaggtacctactttctatacttgactttggtaccgtcacactaacatgtataacattctctgctggttttccctattaggatggagaacgtctacataatgttgtatgaaccctacaatgattaccaggtctattactcaaacgtgacgccctacctagag

SEQ ID NO: 28966 - DNA, 297 bp, Glycine max
ctcatctaacatacctgcgcagcttcctctcaagactacaagacatgctacgaacattctggcgggcccctcagagcatcgatgctatttgcacaaccacttatactgatcacactgccttgtcttagattcagggataattgttcagtatgcttccggacacgcatacaattcatacccacagaagttcgtttcctaactgataccgcatcttgcggatcacatagactactacttgcatgataacgatatgttcatgaacctcactaagagtggaacgatgctctcatgtgactg

SEQ ID NO: 28967 - DNA, 368 bp, Glycine max
atccaaagaagaaaaaaaaggactcatcttatataccacaaggtgaagtttaacagctaagaactggagacaatatcacctcaatatattgttaattaaaagacatacatgagaaaccatactaccattatctagttttctagcaccaaccaataacttgagccactagatccctaattgatggcatcatattaccttgctctattattgataccaaacttcaatacaaaaccataagtcaagcaaaccttctttgatcctaaaggtatttttgggttgaaaattgtatgcaagatcaatttaccagcaagatcagctctaacattcttgggatgatataaaattggatcagcaaatatacagattgg

SEQ ID NO: 28968 - DNA, 275 bp, Glycine max
gtttggagtttaaagcatggacaacaccaggagaatggatcatgatcattgttcctaccttgtcggtaaatcaatggcaatgctaattacatataggctttctagtttttctttgatcatgagcaactactcatcttagtctagaggttatgatgtaagtgtccaattgtacctctttctctgttcttaatgaaattcctcagcattattatgttaattaattctcttccttgttcttattgttcaatcggaaactaatcaatcctattcttaat

SEQ ID NO: 28969 - DNA, 304 bp, Glycine max
aataggaagaagctgctcaattgttgcttcctgcaatgaagataaggtagaacagagatgcacatttacaccaaataaaactactactatcacaatggcctagaaaatagattttgttgattatcttttattggagaatggagacagaagatacaaatttctaggaaactaaagagacagggggagaaaggctaaaaattggtgatacaatattagttgcatcacaatctagtaaattcaatataagtgttcatacactactacaaaaagccctttttaagacacgtgctttacgtcggttgta

SEQ ID NO: 28970 - DNA, 150 bp, Glycine max
ttcgtatgactacttctttagctatcgaaaagttacagaaactgacggactgcatatcaatgctctcttatgattactgccatgttgcagatgcccaccgactgtatatcagagcttgcttatgatgcccgacaagtaacagagcttact

SEQ ID NO: 28971 - DNA, 365 bp, Glycine max
actttggatttggtacgaccatgccctcctgatttccagctgggaaattggcgagtggaggaacgccccggcatttacgcaacgagcataatgtaaacctttactgctttaaaagctctatagtcgggcctaggctttatagtttttccatttgttaaggctttgtgtcttttgtttttgaatttataatacaaggatctttcttcatctgctcctggtctctacccattctcattcatttgcatgtttgcttctttttctgagactgcagatccgatgacgagtcccccgaaggtactaatacctgagacccgcctatcgacttcgagcgagaaatgaatcagacggaagatgaaggaagtgag

SEQ ID NO: 28972 - DNA, 323 bp, Glycine max
tctaatagaaaacgtctctctggaatacgtatatattataccaaaaagatatttctctaacagataaaggattaccaaagaatgtatctctttaagaaaaaatgatataatgcgtaattaaaatataaaaaggacaaatgggggtatgaatagcaagtgttcaatataatttctacccataatttattattaaaaaattgtacccattattcctcctcctcaacctttcttccttttttatatttgaagaattatttcacaaaaataataatacatttcacaaactaatttcttaaatattactataattccaacgatgaata

SEQ ID NO: 28973 - DNA, 118 bp, Glycine max
caacaatgtgattcgaagattagatcatacacctcacacaggcaaccccttagataggagctatcatacccacgtgacaatcgcttacgcgagatatgactttcctgccattttacct

SEQ ID NO: 28974 - DNA, 359 bp, Glycine max
aacatcacaatcttaaaatgctcaaactttgaaatagtggtaaacaacaattattgatgtggatttatatgtatgtgatttcagggtcattggagctattctcatagtaatgggactttactcagttctgtggggcaagcacaaggagaacaaagagaaagaggcagagataactattgaggtattgaagtgttgtttagaaaatgggatgacgttggagactatggtaaaagatgtcgaaacaaacaatgacattgacatgcaaaagggtgaagcctcaagagagttaagggtagccattgttgttccaaaagtttaaagtggttaagattagaaaggaaagggatgaataataatag

SEQ ID NO: 28975 - DNA, 437 bp, Glycine max
agtccgtctaatgtcgacctgcaagcgtgctagctcgttttatgagctcgactatgggaggatgtgggagccagcataactctgattcttacagtccttattactgtaccgatgtacatggtatctctccttacgtatacggacctagaggagctaatcattctctgtatacaaggagatcatctattgagaggacaccttgctgacagctatgatcgttgtcactcttatgcaacgaatgacccttcctcatgagaataggacgggctggccttcaaaacccaaggaagataagggtaaggccatagagaaatacacccctaagactagttcccaagaaaggactagcaacattaaatgcttcaaatgtcttgggagaggtcacattgcctctcaatgccccacacagaaaaccatgatcatgaggggtcaagaca

SEQ ID NO: 28976 - DNA, 336 bp, Glycine max
ggttctgcctaggcatgtcatcgaaactacttccttgatcttgacttatgcttggatgacgattgtatccttgattgctgtatatgtggtagatcccttgccattgggtgttgatgtattgaacttctccttgattgttgtagcattgacaatcatgttctcaattatctgtatagcctctcttggaatcttgagagagattttcccagcagctaaagcatcaagcataagcttgctcagagctttcaatccctctagaaacatgttgatttggagagcttcatcaaaaccagtgagagttttcctaagagaacctctaaatctttcccaagcttt

SEQ ID NO: 28977 - DNA, 235 bp, Glycine max
gctatgatttttactacgcctgcgatctcttgtgctggccttctgaagcactgaacctatctactgtgagaagctagatatatctgagagagagcccccacataataaacaggtacaacgtttcgttacttgaccactttagtgtcacacctccatggataccattactatgcgcttttctactaccagcatggatagccacatgatcaacgtatgaaggaccctctaatgattc

SEQ ID NO: 28978 - DNA, 366 bp, Glycine max
ggatcgaaatctctctgtttcaatgtcaatcttccttcttttatgctgaggacaagaatgttccacatcataagtgaaacttttgggggaaattctgaaaatctggaaatcagttgaaaagctggtaatttttccatcactgtgcaatgtcttatgcaacacctcaccatctttacacaaggtaatgctattggggggctgttgtgccaaaccaacattaacatcatccataggagcagaaaatgggaacccaatagtgaaatttgtaacactttcatctgaggatttatgcagatcatttcccataactgcttcagaagataaatttgccaacttagtactacattcaacattgtctagtttact

SEQ ID NO: 28979 - DNA, 262 bp, Glycine max
actgcagctctcgtgacgagagtagagcaatatgactacctagaacatctgttacatggctgccagcaacatcttatcattactttcttgacaaaggtctgcattttcaccatgatcgcattaacatatcgtgagttctactcaagagagaattcaactgctaagacagtaattaccttatatttgtccccgtggaattcatcaccatctcttgcattcttatcctgcataagctgtagctcctttagcttggattcattat

SEQ ID NO: 28980 - DNA, 278 bp, Glycine max
agacgctcgttattgagctacggctgctctcgagaggatcgaatggtcattagttgtggaacgaatgtgctatgaggggacgtgactcgtctatacgctcgaaattgagcgacggatgctctctagaggtgcgaatggtcataggtatcaacacggatgtccgatacgtggacgtagtagatcgggacgctcgaaatggaacagcggaagctctggagactatggaatggtaataacattccactatgatgttcgacttgggaacgtaatatatctag

SEQ ID NO: 28981 - DNA, 590 bp, Glycine max
  unsure at all n locations
ccgccgcttggattttgatgtcgcatgactattgtacagngacacatatacgaatctctganagcctcggtgcatgccgtctagcagtncgatcgctgtcagcgcagtgtcatgagctatagacatattttcttcacttggngactcatactggcacatgaagctgagcacagaccatcactactgaccgacacgtaggtctcattacaacagacacattacataattatcacactctatgcactcgtagatgagcgtagatatgactactctataaactagatgcatattagtgagacactcgtatgcagcgtagcacatgtgtatctgatataatacggaacactactagagacttcgaactgtcctcctcttgcacacggaaccaagagctactctccttccgatgtccttgggatgaatcaggactaagaccatgagaccgctcttgtgttacttatatatgaccggatcccttgacttggatgacactcctatgtgccaatgccgttatctcagctgtaacatacactggatgaagccactatctcactgcagccaatcaagatcttgcgagtgaccatctatat

SEQ ID NO: 28982 - DNA, 365 bp, Glycine max
  unsure at all n locations
tgaattagttagcaagtatgacaagtcacacggaagattcaccaagcttcattcctcacaagtctagtgtttctcttaatcccacatgtgtctcggttataagtgtttcaattacaacaactgaatagtaaaattcccaactttgcacatcatctcagaaaatacaatcatacatacacaacatggatcactatggactttatcaggcttgtaacgtggctgggctacaaagaattcatgcttttttcttggattcaaagcatggttatcaaactctcgagttaactcgctaactcttacaagtttatgagtccacttaccctctacgagttgactcgtgtgtaaactctcttnttagtagactc

SEQ ID NO: 28983 - DNA, 276 bp, Glycine max
ctataaatacactcatgttgttacacttattcgttctttgatgattgagagtactagtgagacacatgatcatagttgaacattctatccacctttttctccttcaattctcgactatcccattattatttctttcactacattgagacaatatcatcatgcttctgactcaaggctcaaatctaggggctaaggtgaatcttccatatcttattcgctatagtatggagcactactccaccgatctgcctatatccaccgcagcatctacttggc

SEQ ID NO: 28984 - DNA, 327 bp, Glycine max
tcactgtaccaaaccctgtgtataacatctcaaatcttgcattggattctattaatgatacactaattgcttgtattgagagattgtatgcttgattcgttcgaattatggtagatacccttgacattcggccgatgatgtattcgaacaatctgctatgattcgtctccgcgtaccgcgttgatgcagatgatattctcgataccgaacgatttttaaaaccttgctacagaattagagacagctgaccggctctggaaaacatattgtacatactgatgcaactgatgcgctgtgtgcgttgaacatggaaagattatatctata

SEQ ID NO: 28985 - DNA, 353 bp, Glycine max
gctcattcacgaacggccactagctcatcacggtcctattgctcccaattacgcccacctacacactctaagaaccttatataactaaatcataaacatgacctttctatgtgtatatggcacctgcatctcacacagactcttagatctatcctgatacgtgcataactgaacacacttgctctatcatgacacgcatacatgctcatcttggtattcttcatatctatctatacacacacttcataaataatgcagactcttgacacaggagcgtgctgcattagatactctactttgcatcactagccattcatccacctaaagcctgatgctgatagcggtatatcact

SEQ ID NO: 28986 - DNA, 291 bp, Glycine max
cacaacaagtttgacacatccacaatgcgcgcataaacccaccatcccctgttgcccacctactacatgatcataggcttgcagaacaatcccattatctcagctgtgtctataacgaaaggcgtcgaacgatcgaactttcacaacgtcgcaaccacagaacggacaatcaggccagactatggcagccaagctaacaaggactaatgcagaaactctgctcaacacatcaaccgatatcacagcgtttctcacttaaagaccacagtaacaattccttcgatccaattc

SEQ ID NO: 28987 - DNA, 294 bp, Glycine max
cattcagctctgagctgtgatcctctcagtcgagctggtgacatgccacttttgtattgttgccttctactaccgtgcccatatgactactgcttacctgagatatccagttgcttagctccaactatgctctgtgtcggtgcggaaactggtctttcatatctacctgacgatcgtgtgcaaaccttatatcatagacgagtccgagatcctctagccgactggctcattgtatcctctgcctactatctatagtgctatgaacttgaacatcatgatttacggtcacgagac

SEQ ID NO: 28988 - DNA, 367 bp, Glycine max
tcttaaagcaaaaatggcataataacctcctcccataaatacaaacatcaatgtaaatttagagcaagcttatgcgcctatttccttacaaacgttctcttgcacaagacatttaaccgaaaaaatgcacccatatacaatcaaggcagcttcgttacctagattatttacacgtacctccaaggtgtatttgttacttacatcacacacatctccttggctaaattcacatacatgcatactcaaagcattttggggcaccaaaaattgcacatgtgcacatcttggcatttctaatacctatacatacgcaaacttcatgatgaatcttgactatctacacaataaggtgctacatttcatgctc

SEQ ID NO: 28989 - DNA, 523 bp, Glycine max
  unsure at all n locations
cgcccttgttggttttgatgcgtttgcaagtcgnggccatatcagctctgaccttgtgatactgtgaggcgccngcangtatgcttatcttttcaatacggacacagactatgcagattgagagctcgctcacattgttcgctatgctcgacaatgaaccatgacggacaacagtcagaaacattgactcacttatacgacatgacttgaagagcatacgtacctactcactatttggccataaacttattcattcctgaagatgatgacatatcatcagaatggagactgaagatgcttatgaccatgatactaaccatacccgttgataaccgcttaaactttgtgataccatagtaggtgcgaacatctatagccctgaaatctacttgctcatacacgactacctcatgctctatgtatcacacatgctttatgtgtgatgctctaagaacctctatagaaagaggtgcggctgctgttggtaaatgattgtgtacttatggcttattacgatgcacag

SEQ ID NO: 28990 - DNA, 127 bp, Glycine max
ctaattatagacatacctgcgataacttactaccctcatctaaaatattaacaccagccactttcttgtgccactagatccctactggatggcatcatattacctcgctctattattgataccaaac

SEQ ID NO: 28991 - DNA, 236 bp, Glycine max
aactttaccattgacctcaaatccaatactataataaaaaactatcgctgttgcccacctacaactgagctcacgtactcccacgtagcccatatcctcatttctctgaacaacgggtccccatcaatcctaccaagctttcacaacatccaagcaaaacaacattgaaacagcacaagctatcacagcctatcaaaatggaaccgtgcgttaaatgtgttcacacatcaagcgga

SEQ ID NO: 28992 - DNA, 313 bp, Glycine max
cacctctataatcgtgatggctgtctcagagcgatagttctctgatcaagaaacgagcatcaactaatgtatcgcgtcaacaaactaggctgttctctgttatggatatagccattggcaaagtggcgcgatgaatagccgtgctcgatctaatgtctacccattacatagttggaactcaaagcacccactagatctccacagaaacctcacttcctttgtgttatctgaaagtccatctcgctgaaagcctagtccgttccgcaatgtcatatcttagacctcactatatgcctcatcttgagccatgcat

SEQ ID NO: 28993 - DNA, 363 bp, Glycine max
  unsure at all n locations
cgagaaggaggaaaggtgattggagatgccacttcaaggagaagatgagtcgagaacaaactcaccaccatatgaagccatggataagagcttgaaagtaggagaagatgagtggagggagagggagagaagagggcacgaaatttatgcctcaaattaggtcaaaacattaaagtctaatttcttaaatgatcaaacttgaaaaaatgcacacacaaggcctctatttatagcctaagtgtcacacaaaattggaggcaaatttgaatttctattcaaatttcacttgaattagaatttgaatttgtggatccaaatttggagccaaaattntactaactatgagtaatgaatttcagctat

SEQ ID NO: 28994 - DNA, 207 bp, Glycine max
gatcctatatagactacctgtctgcaagcaagctatatattttgttattagaccacatcacgagcacataccttgctctcttaagatgagctaactgctagctcgaggtccacaacaatcttggatgagggtttatgcgaaacagacaccaaggtgataggcgctatcctcatgtaccaggaacaattctaagtactcgcgggccac

SEQ ID NO: 28995 - DNA, 226 bp, Glycine max
ctatctgacgacgatgcttattacacactactatgaatctttgattgcagaggagctaaagataccataaggacatgagcaggcgcgtgaagcacttgatgatacgaatggcacatgatgagagatagaccttacaatgagcgcgcaaaatcaatgcataaacttcgacctagcgtatggggaggaatcattgacatagaccataaacagctctgtgtccttaata

SEQ ID NO: 28996 - DNA, 384 bp, Glycine max
aacattgcgagaactccgtatatggccccaccatagcctttctgaccttcatctgtgaagaagctcattgcaggacctccccgacatacactcacctaaccttacgcttaccgaaacggggagcatagcaatatatttgtgactaagcttgagaggggggacatatgttacagcgtaggatctgatgtttatccatgcataatgcaaggatctgctcatgcctgatgctgatatataccgcctatcactcgcttgcatgttcagcttcatactggacactagaaatccgatgacgagtcccccgactgtactactacctgtgacccgcctatcgacttagagcgagaaatgtatctaacggcttgatatgagagactgagagat

SEQ ID NO: 28997 - DNA, 317 bp, Glycine max
tgaattcaaaaaaaaaacaaaaattacaattacaattttttaaaaatattgtaatattttattttagcttgtgctcacgtactcccacgtagcccatatcctcacttgtctcagcaccgggtacccatcaatcctaccaagcttccgctttcaatgagctcttttttaaggttgagagaagaattgatttggtctatggaggtggtagcgtgggtttgatgggtctagtttctcaggcggttcatgatggtgggcgccatgttctggggtttgacctctctctctctctctgtatctgtctctctatcctaatctca

SEQ ID NO: 28998 - DNA, 154 bp, Glycine max
ccacactttgacgtagggatccagtgtgtccgatcatgagtatccgatgtctgaacttgcataccattcgactacagaatccgactgttgactatcgataagaagaatccatactgacgcagcttcttgcaattttcgatagaagcttcatttc

SEQ ID NO: 28999 - DNA, 321 bp, Glycine max
catccaactatagagtatgatgcagttaccgaaaaaaggtcttcatcatgtagtaataggaacatattatgcagatgatttgttataagaagtgacttatgtgtgcaaaggtatggctaaactcacttataacatacatatataaagaattgaatagtcactaaggatgtatttaacaaatcacaagtttcaacaatcccgtttaagataacacactaaggaaaaaaaaagggattagtcaacacatgtattatggtatagaagacattaaggatgcaacacacattacaagcatcattcaatctcatttaatcatataaa

SEQ ID NO: 29000 - DNA, 220 bp, Glycine max
agcgtttatctttttcatacgacaataacgttgtagtcggatgaccatatcgagtagcttcatatatccgactctcgtatcgatatacatacgctctgaactagtatatacgactctaacgttatagtcggatgaacgagctgataacttaagatatcaagacccaccgacttgatatattacgctacgagatcatacatacgacaataactgttttgtc

SEQ ID NO: 29001 - DNA, 235 bp, Glycine max
  unsure at all n locations
ctaacaggccaacttactacagacgctcccaagagactcaccataacgatgcacanactacaatggccattacttttcaatcgaatgatcgattcaaagacctaactcatctaaacactcgaaacttaacaatggatgctctctagaaatgcgagtggtcgtactttatcacaccgatgaccgatcccatgacatatcatatgtagacgctcaaagatgacatcggatactcctg

SEQ ID NO: 29002 - DNA, 244 bp, Glycine max
gagagcacaaatccgagacttatccaagtagtcttttcaatacgattagcttattcactagcctttcattttaacttgtatttgaccttattacagcaacgcacactttctttgattgctatgtggtctacctcttcttttgtattttttttatttgttcttaacacaacttattcgttgtgtgtgctgatgtgcttggccttccactatacatcgcggataactcccccaaatttatggaaaa

SEQ ID NO: 29003 - DNA, 233 bp, Glycine max
tctatcgagatgaattacacacactggattgacaagtccctctggcgatgcgccttccatcattcctcaccagtctagagccactcttaatcccacatgtgtctaggctataagctgttgctaataccacaacgagaataagacaattatgccaaatatgcacatcattatgataagatcgtatgtacattcactacatggatcgacattgacttgagcacgctgggtacatg

SEQ ID NO: 29004 - DNA, 561 bp, Glycine max
  unsure at all n locations
ctcacctccaccgactcgtctattntactattgcaattcttatactatgtcatattcacgtatcatacattctattggttctcanagtacatactacacctatcagacacttcactctcctcacgtcgtttctctctatctaggtcacttactctatcaaacctaatttcacttttccacccagacgannnncccaagtaacactatgtagcttgcaccctgctctatgacaatctgaatagacaattagagttaaggatgtacctttaagataccataaaccaacattggttgtggccttatggcacttaatgtatcttctttcatctgaaaacatgagaattcacaccataagccgaaaatcttcacactagccaacaataagcataatatctggtctacttgcagttaagtaaagaagtgaaccactcctacctcaatatcttgacttatcaaattgaattacctttctcatttcattcacaaatcgtggatgatgctcattgagatgatgcttttttgcactttccctgctgcatacttactgagcactattcagtn

SEQ ID NO: 29005 - DNA, 227 bp, Glycine max
tttttctatatgatcgtgctacgcgtgtaatcgacactacgtacatgctcttgactactgctgagatgaggatagggtacacgccttccgctatggagtaagccaccttgcaatgagctgctgctgcattaatcgtcttctatcataggctagcagatgatgctcatgtgctcgattatatgtatagactgtctgagcaccatgttagaggtattcccgacggctag

SEQ ID NO: 29006 - DNA, 363 bp, Glycine max
tatgatcaaaagagtattccttatgaaatatatcttgtttcttatcagcaaaagtcctaatcatagcttgtgtccaattacttgtttcgttttgtttcttaccatgatgatgattagtgaatgacacgtgtctaattcgtttggttttcaatgtgttttttttaatcgctaagagagtaaagggatttgggaatcccttgtatctcatattatataagattttgtttgcccgaaaaacaaaacaaaaaggatcaaaactatatgttttgacatacacaatgctcatattgaagctgtcatatgacacacataatttagtgtttgattataaaattaactgacataaattaattttattacacg

SEQ ID NO: 29007 - DNA, 331 bp, Glycine max
cgcggcttcttagctcgaatgcgccccatagagagctgggcgtcaatatagtggtcgctgatttctgtctgtgatactgatacaatcccaaagccactcaacataatagccttgataataaaccacatttcctgagctgcctatatagcaaacaagcccgcacaaatcgcgctatgctcaaagtacgctatctaaataggaaacgtctcatgatgacgtaattaatgaatacgcagatgcgagagctttctccctgtaatggacactgtcagatctaatgagtccgatgcagcatattatgtccgctctcgacacccttcaacacgctctt

SEQ ID NO: 29008 - DNA, 229 bp, Glycine max
  unsure at all n locations
aaaccaacaattaatatttgccgatataaaaaaagagcatcgctaagaataagagatcacaaacaaccatactatctatgcaattaaggcagaacaccatattacaagcatacacagaattatatgggtcatattgaatggatctcgagtaggctgcaggtcacaccaccagaacttgcaactgtctacagcaatctactctcctgtggcttgtctntgataactagca

SEQ ID NO: 29009 - DNA, 502 bp, Glycine max
  unsure at all n locations
cgcccttgtttgtgtcgatgacatgacgcggncgagtcgattctcggacctcgcgcgggcctatatatgtcgatctgcagcgcgtgctaatcctttctgtatgacgctctatcgacatgaagtcactcactggtttgacaaggcactctggcgatgcacatagcatcgttactcacacagtctagagccactcttaatcccacatgtgtttatgctataagctgttcgctaatagccacaacgagaataagacaattaggcctacatttgtacattatctcgaaaacatcgtttgtacattcacgacatggatcgacattgacatgagcacgctgggaacacgacggagacactgagacatgatgcatatgggtcgaagtcagagcctggagatgaagctcacagactactctactagtgttacttggcaaaagtacactatcgctttagcaaacggctactgctgacgaactctatcttgacgaccttataagctacatgg

SEQ ID NO: 29010 - DNA, 522 bp, Glycine max
  unsure at all n locations
cctccctcctctcgcacattactacttaatattaactttactcatatacactctacactnactaatcgtgcatgtacattcaatgtgtataatctcaacttcatatacactatcacatcgacatcattccttactatctctcatcacatgccaccgctgcactnnnncctggctctagcacgagattctctatagtctccgacacatttatttgctttcacaaggaataggttatagtcttcacaatatgccaaacacacgtgctacatgtgggagtgatatcaaattcctagcattattagaaacacatcaatttactctccatattatgtacatgatataccacttgctctacagaaataggtgccactttctcacatcatatgttacaatgacagataccacatagatacgtgaancattagacatggctacgctctgatacttctttccagatactgcatatatgcccagcagtctatagccaccttatctcattgataacttcggatcataatctcg

SEQ ID NO: 29011 - DNA, 304 bp, Glycine max
tgcactctgtgatggacgcgcgatgtacctcaacatgttacatacatctaccttgcacccattaacgcgccatcccctgtagtacacatatatatgtgcagacgtactactacattacggactctacagttttatgagcacttggacgccatcaatccgaccaaactgatccagcatccatgccatctgcatgatcacgccacacctattgacacccgatctcaatggcgcttatgcctaatctctgttcagcccttttaccgctatcccatgaattgtcgatgcttgacctgagagcatcacc

SEQ ID NO: 29012 - DNA, 560 bp, Glycine max
  unsure at all n locations
cgctctcgcgctctcctcaacttgactaacttctcantaagttgctgaaacttaacttattcactngtatantattntganatatactacatgtttttncactctaatatcgnctctttgatattcttgatacccacgcgactgatatatactgtcaccattatccatctntcgttattgataccgaatatattccatatnnnnnnnnaacccgcactgacacgttaacttgaacgaatctttcatactagatacaagtaattcaccacgttatatggtctaaaataagacttgcctgccacatctgacattggagctttcgttcaatggcatgacataaagccatggcatccaactttgcagactctctaattgtaataatatatggttttttaataaggtttgatcataccacctcaatacacttattgatatcatatttatcacctttttatatatgcttgtgtaatcgatctatagattagtcctattttcatagaacactattctatctttctccgatttctctttgtattgtacctattgaatcgacaatgtct

SEQ ID NO: 29013 - DNA, 270 bp, Glycine max
aaatgactgaggatgagtcgtctatgaatgtgctaattctttgatgacattaaggtgcaactatcacctgaccatatgatacccttggggcgagctcgtagaacgataagagcagctatgtgcaaggatacagtagggcatactattatgccgcattatacgtgcactgactaaagaaggcattcgctatgatcttacttgaatggactcacacacgatgcctgtatgtgtaccctgtgtgagccacccagttggacgctcatggaagga

SEQ ID NO: 29014 - DNA, 255 bp, Glycine max
aacctctatgaccatcaggtactacaacgaactaaatatatcacatcatgctccgagagaggtaattgatgtctatacagatcatctttgaacctgcactgcctgctctgtgcacttattataccgacctataataactaggacttcctactgtgcgcacgaaatcaacacatacactcctttctatgtcctggtgatgattccgtgactaagacaatgagcaagctcttccgtaccatatatatgaccgtatcc

SEQ ID NO: 29015 - DNA, 314 bp, Glycine max
tgacctttctagctacaggtacaatcccacgtggacgaatcatcccaaccttacatggttgagtcttccacaatagcagcaacaacaacagtcgctactgcaatagccctataaatagcatatagctgaggcttcctccgcaccttcccttgaagaacttgtgaggaaaatgactatgcaatacatgcagcttcaacaagagaccaaagcctccattcatagcttaactaatcaaatgggacaattgcctacacagttaaatcaacaacattcctacaatcctgactgactaccttctccatctgtccagaatc

SEQ ID NO: 29016 - DNA, 410 bp, Glycine max
gcggaaagtttacactcccatgaggacgtcatgcctgagaccatgatataccacaggacttttatatcactactttactcaaattctattgcggatagatcattagacgcagtgaagctcttgaatcaattagaaaatcaccatgatgaagatacaatgctagactccattctcacctttcgggcattcatagggtacttattcaaggttacaagacaactagtagtggattaaatgagctgctacacttattatatgggtctaagttctatactatctcacgaaggtgaacagaatgatgtgcatgtcgaactcggtcgatcataacctttatgaacatctttctacactattatgaagctagatgttaacaaagattttgagcaacgaagttcctaactaacgtcact

SEQ ID NO: 29017 - DNA, 342 bp, Glycine max
ttgaactcgtttgtaaactggtcaaaataatttatataagctacgtactaaagcgacttttcaccacccttcttgctttgtttagatggaagagctttattgatatccctctgtttctcaatgactcactcggtaattatacctatcatataagaaattgacaccacatgtttaattaaattcacgtaataagagagaatatattgaaaagagagagcaagagagtattttgatataccatcatttctcatgcaggaacaaaattttaaaggtgcaggaagttatactcccgtgcatgacactcttctcctccagagtcaagactaataacaatcttggatt

SEQ ID NO: 29018 - DNA, 347 bp, Glycine max
gatccacataccatctcctttagctatatctcaccgttcttgagtacgagcaagctatgagcttatgatcacacctcctattatgacttcactcacccgcatgctatctatgctgttaatgccgaacaccatatctcatgcctacgcacgactcatatggctcctatatccagtgtttaacctccatacttctagaatggcctaatcactagggctggacgaaagaaatccctagtctcatctttaccgtgatagacggcctactactgagcccatggggtattaatctacacttgtgctcttgagtacactacggccttgacgtcgctctctataccagcctactt

SEQ ID NO: 29019 - DNA, 344 bp, Glycine max
agtagttctcgtcacgtatagtataatcttaatgtgatgatatgaagaataataataatctatcaatgaattacatattacaaattacccctctcgattgagtattaccattccgtgatgaacgttgtctttgacgccttgccaaatagttctcctacgcttccttcgttcaccatatatgtccatgagtagttctgatttctgcaacaactggcttataattgctaaacagcaggacaatccaatgttgcaactgagctaaataagttcgtgtagtacgctgactgtaaaatgataccaatattatagttatctgcatttgcttcagcgagcaaacggatatg

SEQ ID NO: 29020 - DNA, 283 bp, Glycine max
tcgctttctagcttatccttgaagaattatcatctgcttatggcgctgtccattgcgcgaacgagcatcacagtgtggcagcactcaaaggcccgagtaacagcttgttcaggccgaatcgggggcagtgggatggacggccctatgctacatggaagcattctagtacataagggacacagctctgaccgtcgggatctgctagctatatgatgcacaacccgctctcgtcctaccatgtccagcgacatgcctacacgggctttgcgctggacatatgcaa

SEQ ID NO: 29021 - DNA, 246 bp, Glycine max
  unsure at all n locations
aaccacagagtggttcctagtagatatagcttaggcgagtagcgagaccttgtagctggcatgtgacgttataacaaccacacacactctcgatgaatgctgacccatccccgtcatagtcggtaagtgagatactgtgatgtaacacaacttatgagttgcgggcgctgaagtgatttgccgatccactactcatcagcgatgacgctcgcagaggctgggcanatgtgaatgaagcgtgatgat

SEQ ID NO: 29022 - DNA, 359 bp, Glycine max
gctgaaattgagaatgaggtaaatttggagcaaactctcacctcacacaagtctataacatcaatttatacttgctcaaactggatttacacctaaaattccaccgaatcaaaatgtgactcctcaacacccaattttaccctagaaatggctctttgttcactttggtcatttgtttttctctcttgtacagcccaagctttctcataagtcctaaatgacatttcaagctatgattaactcactttaaccttcaaatgccactacatccagattatggctttcaactttcacaacctcactatatttcactgataacaccatattctcactttctaaccctatggtaactctaccct

SEQ ID NO: 29023 - DNA, 375 bp, Glycine max
  unsure at all n locations
accccttgtgactagcctatctagattgctgcctgcttcctctgagactggactgacgatcaggctttctggggttccttgaagatcccacacaccctcctatgtcgcgcacttgctgatcataccgatccctctaccacctgacaagaggaatgccttcgtttaatcccgataccttgcacccgcgccatcctttatcacgccgagtggtgctctcgcagccacaccatgatgtgtaccgaccgtacatatttattcctgcttatcaagangaccatcctcactcctccaataccacacatgacctcggctccacgacagatgccgtacttttgcactcatccattgcgggtctcttcattctacctatacaga

SEQ ID NO: 29024 - DNA, 310 bp, Glycine max
atgacgctctccagcaacaggtacaatgccggatggaggaatcatcccaaccttagatggtcgaatccttcacaacagcaacagcaacaacgaccttatttacaaaatgttgctggcttaagcagaccatactttcctccaccaatccaacagcaacaacaacaacagcaatagccccataaacaacagacagttgaggccactatgcaaccttccattgaagaacttgtgaggcgaatgactatgccaaacatgtagcttcaactagagaccagagcctccatatatagcttaactaattagatgggac

SEQ ID NO: 29025 - DNA, 366 bp, Glycine max
tgcggctgcttctttagatgtgaccttcctttgctgctcatgtagccagcttgatttacctgtgcgttgcgcatttatcttcaggagtactgagcattgcaccttccgaagactaggattcatcatagtgctgataagagcatattatgcagatgatgagccattgatgagactgatgctagccattggaatggctataaacactacatgagataagggattggggaataccgtgaatgttatatgcatatggaacttagagagaccgttagctaaacacttgggagcatcactttgtgttatgacgtgcgcaatgctcatagaggcgctgtgttatgactcacatgatagaacgaatgagtatca

SEQ ID NO: 29026 - DNA, 307 bp, Glycine max
catttactttccgtacccccttattacgtgcttcaatcatttatttaagacatttctctcctaatcaaacttatcagccacattcctctatcatattgatgtcttttattaattaaaatccatttgattcacatcccacccatcgggaattccccctcctcattggaaatcaaaacacacgtataataataatatcatcataaaaaacataccttttagtaaaatgaaacgaaaaaaatcaatcgcaccttctctctttgggatttctcattcttaatcaaattgactaataactaaagtgaaacta

SEQ ID NO: 29027 - DNA, 145 bp, Glycine max
acatatgcgtaacattctcacaagctttacatcgctgatctcacgatcctaccgagatatctatttgccgatgcaatatatgccttctaatactggccaccctgttcgggaaggggaccctacggactctggcgagacacataga

SEQ ID NO: 29028 - DNA, 322 bp, Glycine max
cttcataacggtattgacattttcaaatgggttttaagtttttctaaaagctatcactcttttgaatggtcttcttgaccagacatggagagtctataatagcaaggctttgtcttgcatttcaagcatcttgaattcttttccaatcaatcctttacaagacatgactctctttgaacatattcttcttctttgtaccaacagctttatgaagatatctggatatacaaaccttgaaaacgtgtgctagtcatgttttcattcaattctccctatgcacaaaagaattcgacaaggactaaccgcctcaattcttttgtgt

SEQ ID NO: 29029 - DNA, 296 bp, Glycine max
  unsure at all n locations
tattgttccctggctttntgtggtttcatgaaactcgtcacatgtgagttcatgattgatccgtatgtttaagatacacggtgctacttgcctgattataataagataattgcatgatataatcgctggtgagacattaaacatatgaaaaacctgggcccgtagcggatattcggatgaacttactggaatcgtagggatcgacttcatctaactcatacggaacagagcctgccatctgactcattcgggtcaagatgtataaacgacattttctctcattgacctcgtatgtt

SEQ ID NO: 29030 - DNA, 363 bp, Glycine max
agtactaagtatttattacctatacttaacagaaaatacttataacactacaaaataaccataaattggaagagtttgatacgatttacacaagttttatacataaaagttagtcgtattcaccgactaacaggcaccccatagaactggcagagactcgtgatcaaggccgaaaaccccagtgctctattggactttttcgggtccactggatgtcgaagaggtgcgatcccttgaaatcggtaaatggcatccgagattagttgggccacatgaatactaacttgagtcaagatggcgtagaccagctggcacttcggcaagggaatattaaaattatgatcgctggggaggatgttactg

SEQ ID NO: 29031 - DNA, 185 bp, Glycine max
ggtataggtggtagtattgacagttggccgaacacagatactgcaggttgcatgaaattcataggatatacatgatcattaaaacattgagatcacaccgtaacaagaaacacttaaaattcgtctgtccataatacagtgccagtttttcatatcctatgttccaatgaatgcataccacatac

SEQ ID NO: 29032 - DNA, 360 bp, Glycine max
  unsure at all n locations
tcaccgctttaggagcgctgtacaccagcagcgcttcgaggccatcaagggatggtcgtttctccaggagcgacgcgtccagctcagggacgacgagtatactgatttccaggaggaaatagggcgccggcggtgggcatcactggttactcccatggccaagttcgatccagaaatagtccttgagttttatgccaatgcttggccaacagaggagggcgtgcgtgacatgagatcctgngtaaggggtcagtggatcccgtttgatgccgacgctatcggccagctcctgggatatccgttggtgttggaagagggccaggaatgtgagtatggccagaggaggaaccggtctgatgg

SEQ ID NO: 29033 - DNA, 296 bp, Glycine max
gatgactaggagtgcacgtgaatttgcttctttgactgaaggaatgagcacgcttggacgagatacctaataatttatgtgtaatacggatctcattcgccgtgagatgagcgatacatgcaggaacacagaatcaagcttctagctccttggaagtgcgagattaatatctgcctgttatggaatggcgactctgcttttaacagatctagcctagtgaactattataactgtatgattaatagacaccttgtcgatactgatagggtatcgatactctacaccttattatgata

SEQ ID NO: 29034 - DNA, 329 bp, Glycine max
agaaacctttatgatgggcattttgatgtacaattacaatagtcattttgatgtttgctgagaatgaatccatacttgatgaaatctattaatgaagatcggatcgatatcccattctaaagtagcatatctttattagacttaacacttcttcacaaatccaagcattttgaagttgattacttcagaaagactaagagaaagtttatttgttggtgtgttagtgttttgcccagcgttagactgagtgatttacttcaatattggattttgatgcttctcatcagtgctttacatggacaatttcatctttcaacagaattgcatct

SEQ ID NO: 29035 - DNA, 465 bp, Glycine max
  unsure at all n locations
ttgctcgttcattcgtgccatcagcttgacctgggatcctcatagtctacctgcagcttgcaagccttatactgtatttcaatgcgcggcctagttctatagcatatcattattcatagtcctctatgtaattactgctgacccgtgcacgaggtttgatcatcactcgatccacactaatcctcagacgtggagggagttatgaccctactctctattataaaccttgagcaataactttacataccatatacattatgaatcctttgcttaaacatagctcgcacccttcaccactcatgacccatcgtactcttatcacccatctgtcagatcacgcaagaattccgcacttccatcttcatttcatatcgcatccctgaacaaccatttgcaacagttatgctacattctatcctataagcgatgtagctccatgccgtggataaaccaccctgcggcgcn

SEQ ID NO: 29036 - DNA, 360 bp, Glycine max
ttcatgaaaatacaaaaaaaagtccctactacaaagactacccaaaatgccctcaaatacaaggctaaaaccctatactacaagaatggccaaaatacaaggcccaaaagaaggaaaaacctattctaatatttacatagataagcgggctcatacttagcccatgggcccaaaatctaccctaatgctcatgagaaccctacggccttcccttggatctctggcccaatatactcggagtcttctatccaattccctaacgaggtaggattacatcactatgcatgcatcaactttgaataacacccacacggaaatgctcctgcgttactcaaatttctcaatttcagacacgttgat

SEQ ID NO: 29037 - DNA, 183 bp, Glycine max
gcaactcgctcacaccgaacatgatgctggaaggccacccaatcaacatttgtcaacttatcactctcaaattccccagacatagctatctggacattttgagcattaacaatgacttcttgtcacacccagactggctactattaccttcatgacatttacacctttgatgaacatactcta

SEQ ID NO: 29038 - DNA, 348 bp, Glycine max
aaagtgcctaatgaatcctcccgtgcttatgccaccagtacctggaaggcctctcattttgtacatgacaatcttggacgagtcgatggggtgtatgctggggcaacatgacgaatccgggaagaaagagcgcgctgtttactacctaagtaagaagttcacgacctgtgagatgaattattccttgctcgaaaaaacgtgttgtgctttagtatgggcatcccatcgcctaaggcagtacatgctgagccatactacctagttgatatccaaaatggacccggttaagtacatctttgaaaagccagctctcacgggacgaatcgcccggtggcaagtcctgctatc

SEQ ID NO: 29039 - DNA, 272 bp, Glycine max
gtactataatgacttatcggcgcacattaattgtatcatatacgatagtctatatattaatatatacatatatgatatatcatgccattagatatgatgatttaaactctatctaattacatatcatctaccacatgtttagttagattgacgtattacatagagaatgtgttgataagatatagcatgatagtatctcgatataccatcattactcatgcatgatcgaaattgatacgtgcatgaattattctcctgtcttgactatcttc

SEQ ID NO: 29040 - DNA, 364 bp, Glycine max
  unsure at all n locations
tcaaaggtgctattttgggaagacgggtgtaaggatgatggggtttcgttgatggaaaagtacccaagcttgtaccacatttctcaatagcaacatcaatatatccacgagcaaggggcgacatcaggtacaggttgggaatgacagttccagtggagattattttttggagggtgaaatagacatgactgcaaatttatgaaggatatagaaggtctgatcgtccaactgcagcgactagacacctagaattgggagcgagattcaagtgggggatatacaattgggaatgcttatatgatgcttgatagggattcgacaaatganaatcacgatggagagtttactacattatggaagttaa

SEQ ID NO: 29041 - DNA, 193 bp, Glycine max
ctgtaagtaggcggtgacgagaagggatgaaatgatcatccctcctgaatgtgatgaaatcactagtaattatagactataattgaatccctgattacaatccacaccgatgcgctaccgattcacatccgtgggtgaacgcgcgaagattcgccaccattcatagttcgcctaccctcgctctttgcacctt

SEQ ID NO: 29042 - DNA, 333 bp, Glycine max
gattgcctatataggttgatttagcataaaattgcctatatatatatatattattgagaattaatagcctctgatatgtaaacatttcctttccctgccgttgttcagggcgcgattgagacagcaacattagatactcgcattaaagtgtctaatccagaggatccagagccatcaatgaaactttatgtggaaaaccaggcagaccctgcaatgcgattagtctctgagatgatgatactttgcggtgaagctgttgccacatttggatctcggaatgacattcctttaccatacaggggacagccccaatcagatatgaatgtttctgaa

SEQ ID NO: 29043 - DNA, 272 bp, Glycine max
  unsure at all n locations
ttgctgaaacccgttactcactcattcatgatttcagattctcgtgaggatacgtgaggagactcgttgattcgcncgaacttcattaacgcctgcaggatacatctttgactattttgtcaacgcatagatggattgccgcagtttgccgaaagactctacaacgcattggctgactccagagcacatactgtctggagcttgagctccataacgcattggtcgactcgactacgcacttgcagactcatatctgctgacttgactacaca

SEQ ID NO: 29044 - DNA, 125 bp, Glycine max
tccccagccttcccttgatgaacttgcgatgaaaatgactattcggaacatgcactgtcaacaagagacctcagccttcattcttagcttaattaatcctatgggacacttgtctgcacagtcaa

SEQ ID NO: 29045 - DNA, 316 bp, Glycine max
attcattaacgcattcattgagcattcgtagcccatttcgacgcgcgctaactatctacctatatattatatcgccgaacatctttcttagacacatacccactaatcattacacatgtagaaaccgttacttcacgtgataatgaatcccgcccgatcggtcatgccgaaaccacattgtagatcattatacaggtctcacaatgatgtgcccattgaaaccctaccttttagtgtattgacgtgtgacaacttaatcagacgggccattatgtgatacctcttacgatgaatatctgactatatgcattactga

SEQ ID NO: 29046 - DNA, 367 bp, Glycine max
cctctatagcacacactgcgggcatgcattctctatgtttctctgattaattcggcctgtgtagctctgcattgcagtgccgagtttgcccaatgggttggacgtgctcctcagcgttagtgatgatcttgaatggtcttcttgaccatgacctggagactccattacaacaacgatcatctttgcatttcatgcctgctgacattttgatgatggagctctttacgcatgcttacattctttgagcgaccgacctattctgtgcaccatcatactgtatgaagtgcatctggaatgacaaatccttaccaaccacccttagtcatcttatcctacatttctgcctttgcccatgggactactccaa

SEQ ID NO: 29047 - DNA, 205 bp, Glycine max
ccatcacaccttaaccgagtagctgtgactatcttcatcacattgactatcccatatggacgactcatccacatcctagactgactactcttctaaacacctgtccatacaacaatctatacctctatatgtttgtgacatcaccagaccatactttctcttgctcaaaccagctactcaaacttcaacttgagttttcccaaat

SEQ ID NO: 29048 - DNA, 324 bp, Glycine max
ctcttgcgactccgatggaagtctgttttcatgtcccatcatcgataatccgacatgatgtgccttccgtcagccagagaaagtactcttgtctgatgctcagctgacaacgtgaccgtacttgatgaaatctatgattgagtaactggtcgttagaccattcttcctatgcagctcgccattagacttatgacttcttcacttctgcacatctagtgactgagatcactttagatgcagtaatagaaggatcatcatgccttgtgcactcgtatgagccagcgtcatacgcgccgattgacttcaatcatgtatgctgatact

SEQ ID NO: 29049 - DNA, 467 bp, Glycine max
  unsure at all n locations
nttgattcgatgacctcgacaggaccatatcagctctcgacctcgcgatcctatgagccgaccgacagctgcacgcttttctattttctctccgcagtaccacactgctggctatacgatcgcatatctccagcatcgcttacacgccgtccaaggatgagtccatacttcaatagcgaggcgtgctcattaaggaccactagtatactgatacctacctatgagaatcggcgaccgcagagggcatctcttggaactacacatggccaacttcgatccatgaacagtccttgagctacatgccttagcattgccctccctatatggcatgccctacctaagactctagagactgggtcgatgatacctctgaatatcgatactatcgtgccctactgaatcttcgnaaacatgtgatacgtgacgaatggaacatgccctagatgttcggccacagttcatccgac

SEQ ID NO: 29050 - DNA, 97 bp, Glycine max
attgaagtatgagcacttctgcttgaaaagtgaccatgctagtcccctattactcactatcatctgaacttgtgtccagagctagttctactttacc

SEQ ID NO: 29051 - DNA, 309 bp, Glycine max
acgtgatacatgcattcgttagatataggctactgataataggaatgcctatctattgtcgacttaacataaatgcgcctatgaagatatatattattgatacttaactgcccatgcttgcacctctgctgactctcatgccgttgatcatgacgcgcatgagacgctaagcctcaagactcattatctatattctaatccacacgatgcatacccatctgcgactctatatgtggaagcctacacccaccctgctttgcgatgagccgctaagatgatgatacttcgccgtgaaggtgtagacacatt

SEQ ID NO: 29052 - DNA, 519 bp, Glycine max
  unsure at all n locations
nctggangttggtagactcatttctgagacacatatacgagtctctcgaaccttgttgatctctctgagagctctacactgcgaaggcatgcaaaactctagtagtgttagatcctattaccagtcactagaatatcctactagcaactctgacagcagtatgacgagttgttaagacaatggaccttcatccatataccggttcatgatcaacgtcttaccttgactgtgactcgatggcaaagctcatttacatatgaagctatgtagaatatctttgatcatgataactattcatcttagactacaagtgttgatgaaagtgaccactagaacctcgtgatgtgctcttagtgcaagtcctatacattattatgtatataagctatctttctatatactatcgaccaattggacactgatcaaatctattccttcttgcacgagatgtagtgatcatgtcgctatgatatgaaacctagccttgtaatataatcacctggttgttttctaactatc

SEQ ID NO: 29053 - DNA, 304 bp, Glycine max
ctcctcgacaaaatttgagatcatgcttaaataagtgactactactcgagcttagcccgcttgccctcactttcaacggtttaacgctcttctacgagaatgggcttaatacatggtcttctcgattgacaaacgtactgtaataggtacacatatcaggatgctcctactttgaccatgcatgcacaatttatccttatgctcaagacatccttacgctcttctgttgaatgtctggctcaatgaactgggagtcttgtatccaagaccgtctcgatgagcgagtacatctctacgcttgcat

SEQ ID NO: 29054 - DNA, 330 bp, Glycine max
tctgacctgggagcctatcagtcagctgctgcatgcaagcttgtcactatgccataggactgatcagtaaatgccttatgtatcctatcgagcttatgcctccacggcctgattggtctatcattatgtacatgacgatcttggacgagtcaatggtgtgaatgcagtcgtctcatgacgattactggcagacagatggcgctgcacactatctatgttaaacgtacgatatctgtgacaccaatgactccttgctcgcatcaacaggttcagcttgaatatgggctgcccatcccttatagcaattcactcatgaccatactacctatg

SEQ ID NO: 29055 - DNA, 349 bp, Glycine max
ctgcatgcatgcaggctttgtttggcaggtagaagccctccggagaagcgctcctttccgtttctctgagtgactctatctgactctatttgctggcattgcatgatccacaggacctgcttgctcccttggacattgtgggagacgccttagattgtgatgcgacattgatgattgccatttactactgacccatcttatgaacgttctactgcccttgattcgtactccaccatgctacggagatcgaattcagactcctgcattggcggaactgctctgattgacttcgcaaacagcgccaggctggtgagagatcatgtgctcggaagactcccatgtgagggat

SEQ ID NO: 29056 - DNA, 504 bp, Glycine max
  unsure at all n locations
gcccttgatttcgtgccttgctgcacgagcaaatagagctctgacctggcgatgcgctatagctgacctgcaagcatgttggcttgttagctntagcgatgaccttactctccaagcattgatggcgtactagcttctcccatcatatctatactcaatgagaatggtccagcagcgtcaacgcgcacaataatactacagactgaactcttgtagaaaacactttaaccgaatcactgtttatcatatacggagctcagcacctccagcggctagagactgtgacgcaccgccactgccgttacagtacttacatgtcacaccctatccttgcttaattcaccttcctgcatactcgaggcagctatgaggcatcattaggtgctcatagtgcacagagtgagcattgcttatacctatatctagctcacctctctgatgactcttgactatatacacagtagggggccacttgtcactgctcgatgaatacatttctgcttn

SEQ ID NO: 29057 - DNA, 301 bp, Glycine max
ctgctgcgatgctatctgtgacctatgtagggactactccatactctgtgagtcattggcaacctctttgaccttggcttaatgccgaacagcatcttatatgacctgctctttgacgtgactactctgttacacaagtggcctcatacttcttaatgaaaggagttgaagttggatacactctcatatgcagcactaacacatatctctctgtctgatttacattgcgtccttgatactagaactactggtaaaacaactcgaaatccatcgtttatgtgtggccatgcgcaataataaa

SEQ ID NO: 29058 - DNA, 342 bp, Glycine max
tttccctcgttggggctgttgtacaaacattttcccagattagggctctttccaaagtatttcccacggggtgctgtttttgcacgtacccagcatgcaagtcgcaattgggagtgacaacttcatgcatggctgacatgtggcgaacgctggagggacgcgccagtactgttggcgacttcatgcatggctgacacgtggcgaacggtggagggacgcgccaacctcattggcgatttcagcacggtgacgccccagtgctgttggagctttgtgcctgctgtgtaaagtcccgtcaagcagtgtatcagtatcctaggtgcagctgcagaagctagctct

SEQ ID NO: 29059 - DNA, 410 bp, Glycine max
tgcggctgcggctttatgattgacgcactccctcgtaccatggatcggatggcgagactacagatgccactctacagcatccgactccttatcatcagatgatgagctttcgtcaggaccacgaatccatccactcttatctccgataggctggacttgatgctcctaccctgcccccctcgcaaccttagaagctgcacgctctctaccaaagaattatgcatagtacgactactccaggatggccgcattagtcagcctttgcttaacaacattggaagcatcttcatgttcatctccctatacgtcacctagccctctatgagagcactctattactaggcgctgtcattgtgctacatgatggactaattatgtacacgcactagatctctcatgatatctgctca

SEQ ID NO: 29060 - DNA, 388 bp, Glycine max
  unsure at all n locations
aaagagagcacgaattctagactaagccagatggacacatcgagatatggacagaaagccgtgggactagtgccttctcttaagtaagatgggggcttagcgttcctgtacaactgtatccatatagactgttatcccccataccacagcatcggagagggctctaatgcttaacacaatgagcctgacacttagtgactgttctcccacacgttccagacgcatagtgcctcgttccctaagctcagatcaagtgagagccaggtactagcgcaatatagcctgagtgggccggctctcatgcctacgtctaattccactgtatacaacgtgagatcgcaacgcaacattgtgccatgtgagctcttcggtcacacagcgtgattcn

SEQ ID NO: 29061 - DNA, 426 bp, Glycine max
ggccttcagctctgacctgggatcctctaagatcgcaccatggggcagtgcctcttgatgtacacctctagtgactatggcatttcctacggtactatgctgaccacagagtgatgcctgcatatctgtcacgtgggtgacgacaccttgaggactgtctgcgagggcttctcgactggcaccatccatgattcttccttacatatcactgacttcttcatacaaagatagcctacgacgctgctatgcaagctaactgcggacctactgccacataggatcttagatctctccccatagtcgctcgtgctgtctccgctgagctgtgtattacgtgagatatccttactaaagccgctggcctgcaagcacggtacatggtttctcaaattactcgcttaaggacgtacatactatggatggacc

SEQ ID NO: 29062 - DNA, 217 bp, Glycine max
tcatgcataccttatatggtccagctcttcacatcagcttcttcaaggacagacttattatcataacgcgccggccgggatccatatcacattacatccccattttaaccgatgcgtgatcaataggagacgcccgaacagctgcaagccgacgtggccgctctgaaagatcacatggactaactggtgagggccatgactatgctgaacctgctca

SEQ ID NO: 29063 - DNA, 469 bp, Glycine max
  unsure at all n locations
ntgactcgtgttgatgcgttgcttctacggcattagagcctgacctgtgaggctcagagtggaacgccgcatgctatctttaaagttgacctagtatcgtctgagagaccatcgaacctctagacattacantgtgtgggagacatgactagcatatgctggagtatcagataacccatgaccacgtggggggccgagtacgtgtctctctcgacttggccttgactaccatcagcgaagtaattgactactgtgagtgtctgatcgaaccgatgcatcctgatggattcctaattggtgtgaagaacaatctcccttactataaacattatctacgcgaatacttgggcgtactcatccgcgactctgtgcacgtgggtgatggctagacgctattactattggctctatgagatgacagcttgcgtgtcgctccctcgtcatcatacgcactcgtaactatctcgtn

SEQ ID NO: 29064 - DNA, 179 bp, Glycine max
tgcctcacattatcttgatgacgcaacagctaagatgagaatctaggagatttatccatgagcagtgatgaacgcacttatcttgacactcttgcgtcaacagtatctagggaggcgatggtccggctctggagtcattccctcgatacaacagccacacagtgattccaaactatgct

SEQ ID NO: 29065 - DNA, 237 bp, Glycine max
atgcttgtagcacaaacgaacgactgtaaccatacagtcggacgaacgagcgactaccgtcggatatagacatgcacggaattatatatctaagctgatatcataggacaacgacaataactgttatctgcgaagcccaattgattcccgccctatatcaagacgctcgcagtttagaaccgaagctggactaaaactaacatacgattgatatgtaattggatgtccgattggctg

SEQ ID NO: 29066 - DNA, 224 bp, Glycine max
gaatgctcaaacgattctaccacggacacatcatacatcgagtcttcacgatttcaactactggagcttatctacactgttcttgttatataactaaatacatattactcgtgcttaactgatgttgtctcaccacacgtctcatacgcttgaacctgtgcacacttctctcatatagaacaccgtatcttcttcttcatcaatatccaacagtactcgaacgt

SEQ ID NO: 29067 - DNA, 131 bp, Glycine max
gccaacacggtcttggataactagctctatatacgcctctcgagttacttctaatggatgcctgacgctctctacccagtcatgctgatctctacacatcatctttcatcgaagatcctgtgcccccactc

SEQ ID NO: 29068 - DNA, 221 bp, Glycine max
  unsure at all n locations
acccgttcttggaggatgatatgagaaggccagtgatggacaagttgctattggggccgacacttctactctgctcgcgtcttgtcacgcctttatgtgactcttttccccgaacgagacgaaacttcccggatgtggttaccatactcgtctattggccctgccgtgacggtacctgacggacttacctgcttatccatntaatgatgctgtagagtgca

SEQ ID NO: 29069 - DNA, 233 bp, Glycine max
tacgaaatacatcatctcacgttcataagagggagcctctgagagttccaccttcatagtctcgcactctctaccttcagggactagtgggatgtactctgactcatgcacgttgtgttgcgacgggacatacgctggtcgtgcgggcttgccttatgacgatatcaaagtgcctgattccttgaacctgatgatcaccgatgcattaagagttgtctatagcctttctatga

SEQ ID NO: 29070 - DNA, 311 bp, Glycine max
atatataatgcgccagaatcacactagcgttggctgagctatggccataggaatgatttgagagcctcctgagctcaactttgagcggatcgatattgaacgtgcgattatctgactaccgtgtgactagctatgaacatcggattgacttgaggggttccgtatttcgacttccagcgtgacgagatatgatgctggcagaatatcacgacctttcggtggttatgaccataggaattgatctagagcgcgctgagtcggacttcagcgtgacgattatgatgcgcggagaatctgactaccctgcgatg

SEQ ID NO: 29071 - DNA, 288 bp, Glycine max
gctcatacatacgactataatgttatggatggatgaatgatcgatgacggtcaaaaatccatacgctgcgacttgatatgattacagtactcactcatacatacgaccatatcgttattgtcggatgaatgagcttataccttcatacatcaatacccatcgtctcgatagattacgagactcactcatacatacgactataactgttatagtcggatgaatgagctgatagcttcataattcaatatgaaccgactcgattgattacggtactcactcatacatacg

SEQ ID NO: 29072 - DNA, 409 bp, Glycine max
  unsure at all n locations
ttcttctgagtaccacacagctggcgacatacatagaatgggcgaaccagaactagcggagtgccaaagtcactattctatgtctctgacaacaaatttataccgaaatgtgtcgtgttgatccttatccactacatgggtgcatgactccgtagggacgtgcgatacatcaagggcgcttaccggaggacgcgacgcgtggcctctgctgtatgcgtctctgccggctgcgcatacaccgaaggactcgccctagactcactcgctactgtatgcgacctgcgcctacgcccacctcactaatacaacaccgaggcgggacgattccagcatctttgtgcttgggtggaagaatgcgttgaataacagcactacagttaccttccacannaattatgtcactatggat

SEQ ID NO: 29073 - DNA, 217 bp, Glycine max
accttcctttagacgggagggcactgaagccacaacagatggacccccgaatcactttaagactgtacaacagcgagatacagtcgatatatatggctctctgaagactgatggtcatttgcttatctctctagcacaggcgaagcaccttcatatgatgtaattgacttttcaagctcatagagactcactatagcgtccgacctccacacaatct

SEQ ID NO: 29074 - DNA, 168 bp, Glycine max
tattgtagactattactatagccgtctctacataacatttatcacactcaccattccccttatgcagaaacatttgatactaattgacgcattttatccatcacttggagggcgctcgtccaaatatcaagcgcccgataaagctagcaaagactcgtgatccatggc

SEQ ID NO: 29075 - DNA, 265 bp, Glycine max
ttcttgacagataaccaccatcatgcgtgattgctatgataaagttcgtggcgataaatgaggtaccatatcgatgctctagactacatagacctacatgtacagacggactgctctgtaacctcatcagggagaggtcattcgtttatgacgattcatccacctgctctattcacttctagcctacctgattacgtggcgctaaatccgatcataccgatgaccatagtgcacataactaataggagaagcacctgggctaatg

SEQ ID NO: 29076 - DNA, 108 bp, Glycine max
actttcttgttcctttgaaaaccacacctgatgcttgagatcaaactgtgtccatctgactggtccttatcctctctctgaagctaaagctcgcttgctctgccccac

SEQ ID NO: 29077 - DNA, 346 bp, Glycine max
  unsure at all n locations
agcttctcttggtccttangaaaatcttcaactcatccttcaagatcaaactgtgtactcgtgattggtccctttcctctctctgaagcttaagctcgctgttactgccccacagagcccctcggaatttggtccggccatgttcttccctatgggcccttttggtctcttgttccaaggcctttgtggtggctatatttatgtctctcagttcggcattctcctttcagatcttaagagctgctgatttgaactcttctctgactgtttgggctgtctccaagtctgccctgatggcctacattcttttcgccctccttcgagcttaaactacacccccttaatg

SEQ ID NO: 29078 - DNA, 174 bp, Glycine max
agcttttacattctatttcgagcatctcgatatgttacgggactgaatcagacatccgagccaccagttattgtcgtttgaatttgctcagagcatcaacattcaattttaagcatctcgatacgtgatgggactgaatcagacattcgagtaaaaagttattgtcgtttgaat

SEQ ID NO: 29079 - DNA, 302 bp, Glycine max
agcttttatcatgggttatggaccatttcaagtgcttgaaagaatcaatgacaatgcttacaaagttgagctgcccggtgagtataatgttagctccaccttcaatgtctctgatttatctctttttgatgcaaatggagaatccgattgatgacaaatccttctcaagagggagagaatgatgaggacatgaccaagagcaatggcaaggatccacttgaatgacttggaggacctattgatgatgacatgaccaagagcaagggcaaggatccactggaaggacttggaggacctatgac

SEQ ID NO: 29080 - DNA, 400 bp, Glycine max
  unsure at all n locations
agcttcttccttgtgctaagttttgggacttagtttaccccatgctcaattttatctcggtacttcgtttttggtaagtcattagctcaatttttgactcctataatttagagaatgatgcatcattttctcaattaaacattttcaatgattatctttatcttatttagatatacatgtttatgctattaaaaaacatctgaattttttagattatgcagagaaaataggaagggagaagaagagagaaagatgatacacaatagattaacttaaaggctgtaactggtcgtccatcttagaatcttacaatccgtcaattaacaaaagcaaatagaacaattttttttattaacgggttgttntattttatactataaagaatatcaaataaaagaat

SEQ ID NO: 29081 - DNA, 425 bp, Glycine max
  unsure at all n locations
cttgggcatagaatcntgaagttgagggaactgaagtgnatatcactccccacaaatccttttagtagaacaagtttagaatcctgtgatttaacaagacaaaatgatgagtgaaactttacctaaactagataactcactcgagtcaatttggaattaacataagtaaagtacactcctaacaacaacaataataaatatatatatatatatatatatatatatatatatatatatatatatatatatatatatcttaatttttaaatattaaagtttgaaattgtgtttatttcattttacaaaactcgattgataatgtttattatattaattatttatagactataaaaatctctcattaaaatcagatatattgtattgacaaataattagaagaaagagagatattaatgacaatgagt

SEQ ID NO: 29082 - DNA, 302 bp, Glycine max
  unsure at all n locations
agcttattcttatgccttgcctccggacttcaccccccgtgccaccccgaaagatttaagccaagcccctactttcgaggggcaactcccaccttatgacgactatcccgggcaagacgatgaggaaggagatacctatcttggacccctgctccacctcaaagatccgtccccccatgaactaccccaaccgaacatagtccgccatatcccggcttcacccacacctgtaaaagaatctgctcccttcgcagatgataacgggaagatggaggcgctngaagagaggttaagagcagtcg

SEQ ID NO: 29083 - DNA, 291 bp, Glycine max
  unsure at all n locations
tatgttatacaacaaagataggagagtcagcaaaatactttcttcnatttaatctgccatagctactcagtttgccaatctccctcaaatgctactacaaaacctacaacaagctcagcaaaacatgttgggtgttgtcatccaaccacctcccattatccaacaacaaccaactccaagtatattgcttgcacctgttgaaggaaaaccatcatcacccacatcaacaccaccagttcagccaccaccaccaccaccgaccaatcaagagtgacaatgatgtcccatcat

SEQ ID NO: 29084 - DNA, 388 bp, Glycine max
tttcttgtttctacacgtatgtatcagctccaatagatctttcgctctccatgctctgcttgttgagaaagaaaatcggtgttgcttaccaaggagacatcctttacacacttcattgttctcctttatgcttggaagatctctcatcatgttcttctcatgtaacaacttcaaggcatgtgtgttgaagtggccaaatcttcgatgccatagccatgaatcatcaacttgtaccttcatgccaatggttggtgcatatttaaatttagagggaagcttctattgctcttattcatctttacttgggctatctcagacctttctatttgttgcctaagatttgcatacacctcctttaaagtgaagcgtgtcgcctctctcaatcatt

SEQ ID NO: 29085 - DNA, 214 bp, Glycine max
  unsure at all n locations
ttgcttttatgttcatcttcttctctttcattctccattttcatgattaggaaggactcacccttcaaggtcaacccacactattttctttgcttcattgagtcaacaaagaggtaaggaaggagtatttcatttcttacgacccgtactatgttgctaggcactagaacttcatctatatggngatttttcatggttaacacaaaattcttgt

SEQ ID NO: 29086 - DNA, 427 bp, Glycine max
  unsure at all n locations
ngtaggattatggggtacctatcacatgtaggactttgttgcggtcggtcgatggtgcacaacaagttttccacatgcacaatgcgcgcataaacccaccatcccctgttgcccaccttcaactgagctcacgtactcccacgtagcccatatcctcatttctctcaacaccgggtccccatcaatcctcccaagcttccccaacatcaaattaatacaacattcaaacagcacatgctatcacagcaaagcaaaacagcgcaaaggcagaaaactctgcccaaaacaccaaccaaatcacagcttttctcacttaaagaccccagtaacaattccttcgttccggttcattaaccgttggatcgactcgaaaatttactggaagtctctagtacataagcctacattttgaccgttgggatctact

SEQ ID NO: 29087 - DNA, 394 bp, Glycine max
  unsure at all n locations
tttcttttatatggaataacaacataaatacaaggtcgtgcaccaacaatgaataatggactcacacggtttctgtgtatctataccagcagcacaaatacagtttaaccatgatacccaaccatcatctgctgatgacccttactgcgtatattactaaatgtagagcatatatgcaagctatacaaaaaagcctacccataccatctactataacattcacgtaagacctgtatcatcatattaatcgatctcctttccttaacaaagagatcgaatcaatcataacgttatacaatacanacacgccctgggattcatctcccattcacaatacgagaattttcttcctctccctttcgcattaatcactgcccagactctatgttttgcc

SEQ ID NO: 29088 - DNA, 468 bp, Glycine max
  unsure at all n locations
ccgcctcctatnatcttgtagcaccnacgcgacacnanagaaacncaagcgggggaaccacnacaacaaacacngnggggnnccnntgtggtttcaagaccancacacagcaagagggagcagccggcnagggacncccaccgccagcgacgagaaaccngccgtaaccaaccaacccgcgatagacccaggcggggncnganatatccaccaacggataccctcacctcaccatggctcacacgaagaaaacaaatnacgcttttgacgcaaaacacaatgccttccccagttttggtatagaaagattataaccgtacttcctcaaaaaccaatggccctgaacaagcccaccacgcttcttttcgcaaatcaaaaaagccacgacaatagaaggttagttccggcccccccgacaaatacctgctaaccccgaagaggcgaaaacaaacagaacacaccagcgcg

SEQ ID NO: 29089 - DNA, 343 bp, Glycine max
ttgcttcttctttattcacgaagcataataacaagaaaactacatgattagtttccccttgccccccactggatatatactatgccaagacataaatacgtcaagtgcaatttccatatacttgatattgggtcaggaaccaaggacatgtgtgcacaataagattaagaaaatgacattgaaacggtggatcgtgttcgtgtgctgttaacatttcataataatgtgacggtagcaataatgacaatgagtcgagaatttgacagagcatcgcatgaacattcaaattagcatatgtactgtttgactgcttatgaatcctcataaaaacagttttctgacc

SEQ ID NO: 29090 - DNA, 303 bp, Glycine max
gagccttctgggcattggtaggagagggtacaagaaccggacacatcagctgaaacaaaagagaacaaatatctgagggctctgaaactttctaaaataacaaagagttccaagaatctcgaagaaaacatcaaatctgactctgaggtattgacagcgtgccaattttcatcaaaagaacaaagcaaacaaatttcaatacccaaatctggaatagacctgactgcaaacaacaacaggtaattctttcaatctttcaagatagagaacctccatgttacttaaaataagactgcgaatatt

SEQ ID NO: 29091 - DNA, 391 bp, Glycine max
  unsure at all n locations
ttgcttttcattcaacttcgagcgtctcgntatattatacgactcaattagacatccgagtataaagttattgtcgtttgaattttctcagagcttcaacattcaatttcgagcgtctcaatatatgacgggactcaatcacacatccgagtaaaaagatattgtcgtcttaataggctcagagcttctacattcaatttcgagcgtttcgatatatgacgggactcaatcaggcatccgtgtaaaaagttattgtcgtttgagttggctcagagcttcaacattcaatttcaagcgtctcgatatatgacgggactcaatcaggcatccgtgtaaaaagttattgtcgtttgaatcggctgagagcttcaacattcaatttcagcgtctc

SEQ ID NO: 29092 - DNA, 230 bp, Glycine max
  unsure at all n locations
aacacgctcgaaagggaaaggcgaagccccgagcaaanncaaacgacaananannnncaagcggagggcnaanggagncccagaacacaacgagacgctagaaggngaaggcngaagcgnngagcaaaggcaaacgacaagaacggnncactcggaagncnganagagccccgnaacaaaaggagacggncgaaacngaacggggaagctcngagcaaanncaaacgaca

SEQ ID NO: 29093 - DNA, 209 bp, Glycine max
  unsure at all n locations
agagcaanccgaaagaaagccagaaaggaaaacaaaagncacgaaccccaccaagaagaaaaagaaacncgagccaacacccacncgaacccccanggcgggccccacagaaaccccaccgaacggagnaaggcccgaacacggcancgaaaaagaaaaccccgagcgagaacccgaagaccncggcacngagnaacaccgagaagaca

SEQ ID NO: 29094 - DNA, 293 bp, Glycine max
ttcttttcacccttaccgacaatggaaaaagcttttaatggaagtcaagagcatgaaagtgcactgataccattaactagtcaatatgttcttgagcaggttgaagacatctatactatatttggaaagacccataagaaggataaaaagactaaaacttgcatatggaagatgaggccgatattgatcgatcttgcatattggttcgatctagacgtcagacattgtatcaatgttatacatgtggagacaaatgtgtgtggtagtgttattgccacactccttaacattca

SEQ ID NO: 29095 - DNA, 143 bp, Glycine max
acggacctgacttctatggcccccccataatctaagttttagattaaacagaggaaagcgccccggaaaggacctggacacccgccacccccactcggagacatcggtcccaagtcagccggcgaaacccccgaaagggaggc

SEQ ID NO: 29096 - DNA, 413 bp, Glycine max
  unsure at all n locations
agcttgtattattactactatcgcattgccccacaattcaccacagaaatagaacaaagatttatccacacaggttcaatgaatagtaaatagctgctgtcttacccgcgggctattatttcctcctttccaattcatttccatttattaaatttaaattgggaatttggatctcgggcttccaagtgcatctgtattactgtataaaatttgggatgataatctatgatataaatattagtcagtcataattgtcacagatctaattaaacctattaactttgcattaaggcaactttctatttatttggtttgaagattttaaacctatgcttcttccattgcaaggtcctaatttcattntatccaaaacaaaagtgagaaaatcattggttctttaatttctccaaata

SEQ ID NO: 29097 - DNA, 436 bp, Glycine max
  unsure at all n locations
tactaagcttgatccacatggcaccgtcttcctgatcgccctaattttcttccaccaacaagattattagtagcaaccaacatgacattcttttcagcttctatggccccaaatggcgcctccttcggcgtaacctcacttcaagaatccttcacccctcacaagttaagtcctattcacatgctcctgcaacgccttagatggttatttggttgctacttatgcctctgtgaatttcctggtagctgagatcgggagggacccaacagcttgggatgatcctttggcctttaagccagagaggttcatgaacaatggtgaacaaaatggaggcacaaattttgacataatgggaagtaaagagatcaagatgatgccgtttggggcagggaggagaatgtgtcctggctatgctttgngaaatttgcacttagag

SEQ ID NO: 29098 - DNA, 409 bp, Glycine max
  unsure at all n locations
agctttaattnttttaaaattaatttaaaaaataaattaattacaagagggaccaaactacaaaagcttcaaatttattaacttatcatgatgtggaatcaatttttaaggtggttgtaatctattggtctacataaatcatggttccaaaaccctttaaaatgtaaaggtttcattagaaaccacctaaaaatattgggtaactctttgatgctaaggaaacttatctcaagattccaatgactgaccaaataaattttattcattccaagaaaacatgattcccaggattcatgatttctagcaatcatgatttctaaacatgaaaaaacttattccccaccaaatgtcccataatatgtatgatcaacaatttcattaccataaattaattaattgtatttagtat

SEQ ID NO: 29099 - DNA, 429 bp, Glycine max
  unsure at all n locations
tgaggagacattgaatcaattcatacagatgtccatgtccaatcnatgagcacaaagtcatcaatcaagaacttggagatacaagtgggacaattagccaaataaatggctaaaagacccattagcagctttagagccaacactgagataaagctcaaagaggagtgcaaggtaattttcactatgagggaaactgcagagaaggaaaggagaattaaggaggatatgcgtgatgaggaaggagaaaaaaagaagagggaggaaaagataagagtaaggagagtggtaataaggtctcaaccactaagaccaagaccaagagccagttagctcatgaggccagaagagagataccaccagcctcatcaaaaaaaggcaccataccctctagtgccatcaaagaaggacaaggaacgctacttcaagtag

SEQ ID NO: 29100 - DNA, 407 bp, Glycine max
agcttgataaaattttaagaaaataagtactagctcaaatggttaatagtttctataattttgaaaagtataatgtacattaacattagtgacaaaatagtaaatggagtagttatacccgatccaagaaatatttagcaacattgggaagattatgtaattccttttttgtcttgtatgtttcttgaacagcaggatctttccagatttcatctaccataggagcatactcacgcgttgcagcagggaagaaggcctccaaatctccgatggccataatatccagtaatcagtcagaaaagtgcttgaatctttgattatagagtaaacactcaccttgttttcgtcagctgctgtctctgctaaatttattatacaattagattcattcacataactctagcctt

SEQ ID NO: 29101 - DNA, 424 bp, Glycine max
  unsure at all n locations
tctaaactntgtacaagaatgaagctctgataccacttgttagattagttgcctcagatatcttaagaagggggttgaattaagatatcacaaactattccctaattaaaaattctaatttgattttaacccaaatcctaagattccttttaaaatgaattcctaaataattattcaaattaaacttactgaatagaagcaataagcaataataaataaaagagtttaagggaagagaaagtgcaaactcagttttatactagttcggccacacccttgtgcatacgtccagtccccatgcaacccgcttgagagttccactcaatcgcaaaaaccctttacaagttctgaaccacacaaggacaacccttcctttgtgttcagatttctttacaacaagagaccctcggtctcttaatccctt

SEQ ID NO: 29102 - DNA, 408 bp, Glycine max
  unsure at all n locations
gctgtgaataatagtcatgttcataaagaagagaaaaaggtttttatttatacatgtatgtaaaaggaaatgtgtatagaagaattcttgcgtgtaaatgatgtgtggaaaggaattcttgtgtgtgtgagcaacgagtgtatatgaagaaacttttgtgtgaactataagtgtgtgttgaaaaaaatgaaaaatctttgaatgtgaatagggtttgtatatagactatatgacgtaaagagaagagttccaatgcgtgtacagaaaaagtttgtcatgtataagaatatagatgtacaaagaaaggttttcctcataaaggaccacaggtgtataattntgtgaatgaaacaaaaaggaaaaagaaagaaagaccgcgaaggtcgacatgttatagttaagaagtat

SEQ ID NO: 29103 - DNA, 425 bp, Glycine max
tgccgcccagctcgcccaggtgagttcagctcgcccagctagttttgttgcttcctcctgaagcaacagccttctggaggaatcttctggacggcccaagtggcctggttgctatttacacccccctgtttactaaatgcacccccctttctatttttttgtaattctttttccgtaacgttacgaaactttacgaatttcgtaacgatacctatattccttccgcaaggttacgaatccttacggattatgtatttcctcttttttagctttcgaagaagttacggaaactcacggattgcacaaaaacaccacttttcgatttccgccacattacggaatttcacgaatcacgcatgcctgcttcctttcgatttctgagacgtctcgggacttcatttattgcacgtaatcaagtaataatc

SEQ ID NO: 29104 - DNA, 381 bp, Glycine max
agcttgttctgatgcttggcaccaattcatgaccataaatcgatggcaacaaacacccacaaataaagggatttagttaatgcccacctttcacacataatcactcgggaaaacaccacccttccttaataagaatcctacaattaaccttaacgagaaaaaagttataaaggtatacattatctaattctacacactatttattcttataaaacactgactcgagcgtcaacatctttatgaataccctgccagagttcgactcatagtagatcatcataaatattgaatttcgcttcaaatactttttaaccttaggctataatgctaaacaagtattaccttcaaattcaaatcataatttattctaagtcataatat

SEQ ID NO: 29105 - DNA, 277 bp, Glycine max
acacttttgaggactaaattttgtatttttatctttcaggaatgtatttgtcagcagagtgaaaaaatgaaaaattaaacacatattatataacaaatatgcccttatactgacaattagagatgacaacaataattttagtaacaaattcatctctctatgtcatgtatgttattttattaatggtgacggacaaaagttaacagccagatatatttatcgcactttatacacttttttaaattctatatttttatttctcaaagacacatttatc

SEQ ID NO: 29106 - DNA, 396 bp, Glycine max
  unsure at all n locations
tatcttatgactgagtcaattcacctattggatcaatgaaccattgatctagtttgggtcaatttttatttaaaaaaaacaaaaatgatcttgattaatatacaaaaaaatgaccaaacacgaaggagatcgtctctgtctgtcaaattcacatgaaacttttgtttaatgaacctttgtccctaatataatcataattggcctccaaggaccaaacttcactagcattgtcgacctcaaaccaccatcactccaccaatgtcatccacctcaaaccaccatcattccactagtgtagtcgactatctctgtctctttgntggactcactcagttgaatgcagaaccaacatcaatcaactttgcatcgcaacctcccatggcctccactgagagc

SEQ ID NO: 29107 - DNA, 445 bp, Glycine max
  unsure at all n locations
acacaagaaactcagcttctcaggaagtttctcaaggaagctacctaggcnattaatataaagcatgtgtaacacttggtgtaactttgatgaatgagagtcttgtgagacaaacttcaaagttcaacttctctccctcttttcttccttcaattttgtgctcccccctctctctttctccctctctctctttcttttcctccattgaagcaccctctccaagcttcttatccaagacactctcttggtggcgaagctccttcttccatggcttattccctagtggatgacgcctcccctcacctcttctcctttatcttccactgcatctccatgatgggaaatcaccattgaaggacctcattgaagctcanagatccagtctccatagaagctccacaagcaagcttacataaaaaagaaataataaatcacaattaattaa

SEQ ID NO: 29108 - DNA, 408 bp, Glycine max
ttgtgggtttaatatagaagtgagggacaaggttgaactccttccatatagggacctagatgagctagtccaactttgtataagagtggagcaacaacttataagaaagtcttcttcaaaatcttatggcttttactcttatccaaggaaggaccaagcccaaggaattttggggactgcaccttcaaaacccaagaaagataagggtaagaccatagagaaatccacccctaagactagttcctaagaaaggactagcaacattaaatgcttcagatgtcttgagagaggtcacattgcctctcaatgccccacaaagagaaccacgattatgaggggtcaagacatttatagtagtcaagaggagactacttctcccccttcctttagtggaagtgaagatgaagt

SEQ ID NO: 29109 - DNA, 431 bp, Glycine max
  unsure at all n locations
tatagtgcgagggtatgaagagaaaatcaactaggattaatanatgttttatgagggggggggaaattgataaaggttaaagagacttcagtttaatactcacgcagtacatttttaaagaggaaaaaaattcaagtgtgattaatctttaaaattaaagactaatcctataatggatatatgaaagaatcaaaacaaaaagaaatgccttagagttttaatcaagagtcaaaaatttaaattaatatgttagttatatataattaaaaaaaaagagaactaaagtaaatgtacatggttggattttgtgtcaacacaatagtttgtgtacctagccaatattaaattatacttcattggttcctattgataagactcaagtttaaaataatgtttgttctttttttataagactcaatctaccatgtttc

SEQ ID NO: 29110 - DNA, 453 bp, Glycine max
ggcgaatcgagctcgggcccgtgatactctaatcagctgccgcatgctatctatattaatgagcataataaaatccaaatagatatattattgctatagggatgagaagaaatgatggtaaaccatattgggttgcaatagggaagaggagaaagaaatggaagccttattgagacgatcgagtaaggcactacaacacattataaacgatgagtagtagtcgatacagaagatacgtactactgtgtatatggatatataattgacctttgctgacgcattaatatgtctacacaatatgtatcaagaatgtgcttattttaagatatatagaagattacattgccagcgtcaacatttagatactaatttagtatatatatatgtatatatatctatatgtatatatatgtatatatctctatgtatatattgatatatctatatatatat

SEQ ID NO: 29111 - DNA, 378 bp, Glycine max
  unsure at all n locations
tacaaccataaaccccnngcaaaaggggcagnangcgnacacacgcgacgagcggcannccacaanncagcccaagaaggccaaaagcactagnnncctaagctgctccaagataagactccaagcatcaattgatcaccttagtctgaccatcaaatttgggatgtgtaaagaaactcattctcagtttggtgccctgcaaggagaataactcctgctgaaaagtgctggtaaagagatgatccctatttaataagaacagacaacgacaatttttccccttatgtttatcagaattaagctccttgaccaagcttttcctttaaggagaagaagaagccaaanattaggccaacgacaatctaatccttgtacata

SEQ ID NO: 29112 - DNA, 402 bp, Glycine max
tatcttttatcattctcaattaggtgttgtaaaattggctgcattgtttctttattaaaggaagagtaagcagaaaagaagggtgaataacacattattacctataatgtgtattgggccttccttgactatagtccatatccttgcaagattttaattttagtttacctgcgcacatgattgactttctatggaaaatggtaataagttatcataatagtagatagagtaacatttcacgacttattatgcaatgacaataagtgtattttctaactagaccattgttatttgatttgtgccttggaaagattagtattaccaattactgttaatgcattattctccatatgacagttatttatttgcaaccacagaagttacattatgatattaaaagtt

SEQ ID NO: 29113 - DNA, 421 bp, Glycine max
  unsure at all n locations
tcagaccacaacaacacanaatctatgtatccaaaatcctgcaantttttggatccncaaggccngagaagcgaaatcgagaatgggataaatccgaagcaaactctcacctcacaccagtctataacatcaatttaaacttgctcaaactggatttacacctaaaattccaccgaatcaaaattttacttctcaacacccaattttaccctagaaatggctctttgttcactttggtcatttgtttttctctcttgtacagcccaagctttctcataagtcctaaatgacatttcaagctaggattaactcactttaacctccaaatgccactaaatccagatttggccttccaactctcataacctctctcttttgtcactcataacaccatattctcactttctaaccctaagttaac

SEQ ID NO: 29114 - DNA, 399 bp, Glycine max
tttcttgtccagagaaggaatccacggaggaaatgcttaccacctcgaaagactggaaagcggtttctaatgacttctctacggcctccacataaggcatagaggacgggcagctcaccaagatgtcttcctcgcctgatacgatgaccagatgcccttccactacgaatttcaacttttggtggagtgtagagggaacaactcccaccgagtggatccacgggcgccccaacaggcagctgtaggggggggttaatatccattatttggaaggtaacttgacaggtgtgagggcctatctgtactgggaggtcgatctctcccctaacctctcggcgggtgtcgtcgaaggcacgaaccaccatggaacttggctgtaggtgggaagcattgaatggt

SEQ ID NO: 29115 - DNA, 420 bp, Glycine max
gggggagacgtgtagtgaagtgtgaagttggcattttctatcttaaatctaatggaatttcccaaattttgaaattttggtcttgtacgagttagaactgtgttcctttaggataccaccagaccaaagctcatttttaatacagacaagaaatatttagtttatatatgatatttttaatataaattttaaagagaatatgataaaaaagaataacaataaacataaacaatgaaaaactattaattaaaataataggaaatataggataaagaataaataaatatataacaaatacataatttaataaattaatgaattaataataaataatatatttcaaattgtaaatttattaactaattaattaattggtattattaatttataattggtgtaatctttgaagtaagcagagat

SEQ ID NO: 29116 - DNA, 291 bp, Glycine max
tctgcaggcgagctgcgggcatgcacgctgtatgatggttatgcttgacggaatgcccataatgtgtacaggatatgtcatatgcccacaccagtgtatctatagaacaatagatgatgctcttatgaacaataacctagttcttgtcttctgctgatttgttagcttatgcattctaaggcatatattaattgaagtcatgccttactattgaacgaatgccactacctcggaacacgcgagaatagtaccctgaacatccattatatacctctggtaccccatacctat

SEQ ID NO: 29117 - DNA, 421 bp, Glycine max
  unsure at all n locations
tgctccanagaataagtgaactacatcttgtttatttctttttgcaacatccccttttgtaccccaaaggtgaagatggctatagaccaaatattcttcataaggatcatccaaatatctatgttgcaaagaggaaaaaagttatcatgcgtgaatgcaatcaagggacaatgaagctcacacaatgctacattcaagaagattgtttcaacaatggattattaatgaatattgtatgattgagtctcaaaaactaaactatgttagaaaacatcaacaggaactcagagttaacaagtacatgaatttaaatgcatgtaataatgagcccctaacccaaggcaatgaanaaggtaagagaattatactaccaagcttttttgctggtagttagagatatatggaacaactgtatttcgat

SEQ ID NO: 29118 - DNA, 391 bp, Glycine max
tgtcttttcttgtttctctccccatatgaaaccaacattgttcttgagcacttcattgagaggtgctgccaatgtgctaaaatacttcacaaatcgtctataagaacttgctaagccatgaaaactcctcacctcggtcacagacttatgtgtaggccattcttgaatagccctaaccttctcctgatcaacttgcactccttttgaactcacaacaaaaccaagaaacacaacatgtgtagtacaaaagatgcatttttcaagattggcatacaatcgttcttttctaagcacagtcaagacagattttaaatgatcaatttgcaaatcaagcgaagtgctatagataagactatcatcaaagtacaccacaacatactttcctatgaac

SEQ ID NO: 29119 - DNA, 411 bp, Glycine max
  unsure at all n locations
actaactcttatctgtgggggaatctctcttttttgttttattagnaggngcctcttctcacctattctcctttatcttccactgcaactccatggctgaaaatcaccattgaaggacctcatcgaagcttaaagatccagcctcatagaagcttctcaagcaagcttccatcaagtggtatcagagcacaagaacttcaagtaggttgctccttaaacctgcattaatttttagctttaccttctcctccattgttgtgtcttcattttctccatgtatctcctcacatgtcttgtgttgaatgttgttaacatgattttttagaatttccactgattaaacttgctatagaagctagattngattgtctatggtacaaatttcttgttcttgttcttgaaccatgagtt

SEQ ID NO: 29120 - DNA, 412 bp, Glycine max
agtgtcatagtcatagcattattgttagtatttcttatagcccataatggttcggataatgtttcatgccaacacctgtgtttcttttcaacaaattttttgatttaatttacaataatcttgttagtggcttctgcttgtttgttagcttaggcatagaaaggcataaaataaatgatttcatgccaaactattgagcgaatgccactaccttgtcacatgtgaaaatagtaccctggtcatccattatagcctctggtatcccaaatctataggctatttggttttggatgaatttgatgatgtcattttgagtaacagagaccatcagttgtgcctccacccacttcgtgaagtaatgtgttgccacaataatataactatggcatttagaagaactagggtggatttt

SEQ ID NO: 29121 - DNA, 431 bp, Glycine max
tctctaaagctatggatgaggaaataacttagaaaattcttattcattcactcgctcagtgcgccctatgcgctaagcgagtcttacttcgtgcgctgagcaagttgtcactcacactaagcgcgccaacccccacccattggctgaaggggtctcgctaagcgagacagttgcactaagcccaacaagttccatatttcaatcttaacattgttacatatttcaatgaaagttgccaagtgtgcatagagatcttcattaggtaatccttcaaataagttcccttgcattaaatgaattaaggaatgtggatagttgatgttgttagcttgcacttcaaaacgtgcaatgctagtgaaaaattgtggtactgaactacttgagtaaccctcaagggtaatcctctggtcatgctcttctgccatggtaat

SEQ ID NO: 29122 - DNA, 406 bp, Glycine max
  unsure at all n locations
agcttgtacaacaagtaactgaatctgtttttggtactaaatgaagtaactaactaactaacttccactaatatataaagttaatactcagaaggatgggatgggccttgattangcccatctaatcttccttattaaactgattacacaaagcaaggcccaaattcgtagcccaattactcaagtgcggaggttctgacttccaagcccaatttgaccctcaaaatggaagaattggaccaagcttatttgtgacaacattgaagatattgtttcttatctttcaagggactacccactctccatttggagtcctttagtgtcctatatgccctgcacaagacagatagatcaagtaagcacaaaaatntgaaaataagccacaatgatcaattaagctcaatca

SEQ ID NO: 29123 - DNA, 433 bp, Glycine max
  unsure at all n locations
ggcttggggggcttctttggaggctggatcttcgagcttttattaggtcctttaatggnggntttccaccatggagatgtagcataacacaaacgacaagaggtgagaggaggcgccatccactagggaataagccatggaagaaggagcttcaccaccaagatgagccttggataagaagcttggagaggatgcttcaatggaggaaaagaaagagggagagaaagagagaggggggagcatgaaattgaaggaagaaaaagggagagaagttgaactttgaattttgtctcacaagactctcattcatcaaattacaacaagtgttacatatgcttctatttatagacaaggtagcttgcttgagaagctttcttgagaaaatttccttgagaagcttctttgggaaaacttccttgagaagctagagctt

SEQ ID NO: 29124 - DNA, 406 bp, Glycine max
  unsure at all n locations
agcttctatataagctgaaccattttatcaataaagacaagttgagttttattcagaaaattagagtttatctcttttatcttagtgagagtgattctcctaaattcttgagtgattcaagaacaccctggctgtatcaaaggactttcacaacctttgtgtgttgccctcgctggaaagagtgattctttccttcctttcatcttcacccttgttctttcaaaccacaattccagaaaatccacctctgcccagaattatctcgtggccataactcccattttacgcactcaaattaagtgattcttgagcctaaattgactttcaaaacgagacctttcacctcgttntggaatcacctcattnggagccctgtagcttcagttattgccatttctatatttct

SEQ ID NO: 29125 - DNA, 423 bp, Glycine max
  unsure at all n locations
ntntggagtagaaacatgggaccaactcattntatttcattaattcgtatctagtcaaggtctgagagaccgtacaagtttcctagcgatttctaattatgtgggtcattaagtctatcatatgctgacaatagctgagaagcccgtgaatttcttcgggggcggagtaggtgtctgccatcgccttggccttggctaacaatcggggaagttcttgactcctgttcaaggtaagagcaaaccgatccatccacatggttgcctcttggtgtaaagagtcgatcacccttcctctagcctctttttccgcgtatacttgggcatactcgtccgcgaccctatgctcgtgggccgtggctagacctaactcttcttggtacttggcgatgatagctagcatgttggtctctgtctcgcataaac

SEQ ID NO: 29126 - DNA, 399 bp, Glycine max
agcttatgaatttaaattggatatgttatgaatatatatgaaaatatcgttcttttgcagatacattcaagttaaaggtcaagccagggaagacataccttatgcgtttgatcaatgctgcactcaatgacgaactcttcttcagcattgcaaatcacaccctcacagcggttgatgtcgatgcaatttatgctaagccatgtgacactgacactattctcattgcccctggacaaacctgcaatgttcttctcaaaaccaaatctcactatcctaatgccacattcttcatgagtgctataccatatgcgactggacaaggtacttttgacaactcaactgtggctgctatccttgaatatgaagttccaccacattgtgttcactcaacaacttcag

SEQ ID NO: 29127 - DNA, 427 bp, Glycine max
  unsure at all n locations
ggttaaagaaaaataaaaaaagtaaccaaatattgaccnnataggttattcagagagcaatcaagaacatcttatgataccttgtggactttgtataattggtaataatttgacctatgctactatttacaatggtagctggagccatgaacatttgggcaatttcaaaaacttgctcactttctattatagtaccaatgcctccaattgctttcacaacagcttcactgccccaagtacttaatctacagtatacaagttgtcctttcaccttttttggctctaaggagtcttcatagcataatctgtcaatgcattgaaatggtactttgttaatatggaaagcttaactaggtgttgtcaaataaacaaaaagaaaattacttagcattntccttgcttccaaattgtataatcattccttatc

SEQ ID NO: 29128 - DNA, 404 bp, Glycine max
  unsure at all n locations
agcttagacaaatgtaaactacatccaaaatgatttaaaaatcatccagctttagatggctcacttgtagatttcgtacctatgttcttcctcacaaattcagacaaacttgcacaagcagcacgccctctttctaggcagtgaagataatcattcactagaaataaaaaaaaataaacagaaaactaattagatcattgtgaaaccactgaacactgtatttttcaccttatcattttctttattattttattatttataagtcaccaggtctagcccaaaaatatataataaggaaagaggaaacagtcagatccaccagaggttctttaatagattcatggcccaagcacaattagatcttgcacattntattgattntattctgcatatctcccattaaa

SEQ ID NO: 29129 - DNA, 409 bp, Glycine max
  unsure at all n locations
tagaagagcgtcgaggagaaggctttngttttttgtatacatcttaagaaaatcttcgagctgtactaggcatgatcgtaagaaaatataaaattttaaaattgtttttagttttcgtaacttaacgttttttcattttttggttctgtaatttttttttctaattttaatccttatatattgatgttttttcaattttaattcttgtaagttttttttttcatttttaatcattgtaagtttgtatttttcaattttagttttttaagattctaatttttttatttatagtttctataaatttgtgtttacagaaaataaaattgaaaaaacataaacctacaagaaattagaatgaaaaaattgaacttatgggtatcaacaataaaaaaaacatgagaaaaaaaac

SEQ ID NO: 29130 - DNA, 384 bp, Glycine max
ttgcttatgatcaacaaaattaataatctaggttaataccatttagttgaaatgtctccacaaggcatattttccatccgccggtgatggctattggattaaaccatcaacaaaacaattttttttcgcacttacagatagagcaatactcatcgatttgctccaagtagtgtaattatcaccattcaattgtttgttgactaaactaactcctgcatgatatgaggaatgaggacaaaacgatttgaacgatccataaggggattggtagtggctgtcatttgtggttaaattaaaaaaaaatcccaagacatattgctctaataccatttacaaatgacaaaagacaagacaaggaagatcagatgtattggctcatatagc

SEQ ID NO: 29131 - DNA, 437 bp, Glycine max
  unsure at all n locations
agatactcagcttggaaatcatggaatccaaatttgntngacccaattcgttcaattcttttcttagaaatgtgacctaagcgcttgtgccataatgctcctgagtttgtattatcaattctacgcttagtaccacacaattctgtattaaaggattcaccataggaagctacactatcaagtaaatatagattatcattaaccaagagtgaagcagttccaacaatatctgaattaaaaggtaacctaaacacattgtttccaaatgaacacaaataacccaatttatccaaataagaaactgaaaccaaatttcgtctaaatgacagtacaacaaaagtgtctttcaaatccaaataaaaaccaatacataataataatctaaagtgccttatagcttccacttccaccgatgtaccatctccaacatagatcca

SEQ ID NO: 29132 - DNA, 439 bp, Glycine max
ctcgtacccgggatactctaactcacctgccgcacgctttcttttacttattgtgaaggaattgagtaccttgagaccttctctcctgatgagaaaattgagacaattccagctattcttgcttaagactgcatcaattgctggaaacttcagctacttgatgttaacaatgcattccttcatggaatcgcatctgaggaagtctacatggtccctcccgctggcgtcaatgagtcacatccatctcaatgttgcaaactccttaagtctttgtatggcctcatacaagccaatcgagcatggtatgaaaaatatcccctttttctcttgtcttgtggatatcatccagctcatgccgatcatagcctgttcatcaaaactaatcagtccaactctatagactttatatatttattgttggcggcattgtgctaactag

SEQ ID NO: 29133 - DNA, 427 bp, Glycine max
  unsure at all n locations
gaaactaagcccgagagataaaccttcactggggcgcaactgtcttatctttgtatcncangaacnatncccacagcaatatgctattctgagagcttcaattacagccagcgagtacctagatggggtaagtgtacattcaatcaataccctttaaagcaaatgttttgattatttgtagttatagcgtctagatactgatggtggctgttttaagagacgttgtccaagtgctttgacttgatgcaagacatgatgagaatggaagcaaaggagttaatgatagatacaagctttttaagcacagaaactccagtgagtatgttggagagaaacactaaacgacaaagaatttagtggtttatatatgttgcagaagaaaaattcaattntctcaaacttaagaagaagaaagctgagggaaaag

SEQ ID NO: 29134 - DNA, 400 bp, Glycine max
  unsure at all n locations
agcttgtacactacaacaccaacaaagtccaagaatccctccataacaatgatgctcaataccaacacgctctttcccaccttctctctgtctctcaggtatatttgcaattcatgcatattgatatgctcatatgcaaaaactagtttcaaattttattcttgcgtatggtgtttgtttattatatgcatagtttgtcaatcttccttaaaactttattttaatattaatggtatgtattgaatgtttttaatggttgagataggtagcactgacacagaagtgctgaatttattggcagttgaaaggagaagagatacttgagcaattcgaagcttctagttcttctgagccggtcgcttctataactcanganacaganagtgaaaatgaggatgct

SEQ ID NO: 29135 - DNA, 423 bp, Glycine max
  unsure at all n locations
tcttgcgtagcccctcttggtgctcagaaaatcccttatttctattcctcttattactagctattttgaattctttagttcctgaatgtacaaccttcaaattgttgctcgtttccctctttgttttctgcaaaaaagaaaatcaatatgaaacaatttaggctgaattgttatcgttattattactcgaaccataaggaataacaactaaacaagtcatttaaaatgtaactttgaagttaattggtatttttttaattacaagtttacttcaatatctaattttttactctacttaggtcgtttttttaatatgaatatgaatttaaaggtgatatacagataatataaatgacttgctagtcacaaattgcgatacctatcattnttaattntaacttacttttataaatattaataaat

SEQ ID NO: 29136 - DNA, 403 bp, Glycine max
agcttttcttctacagttatgttcatatgactaatcatctcattaaaacaagcattttaaatcatatatttgctgccagttttaattatgcaatacacataactattaaattgttttcaaaatcattttaacttgtcgtgcctcaaagtgattagacttgttaggttcccacaatggatcccatcataaaactcatcgcgcattaactcgttgcccttaaagggtcttacagttgtgtgattgtacagttcatagctcacaactcaatgcgtacaagatctcaatacacatgtatcttacaattcaacacatactcaatttatcacatacacccaatctcaatcacaatgttataataccaacgcaccatgttatcacatctcataaattatatacacatcac

SEQ ID NO: 29137 - DNA, 276 bp, Glycine max
  unsure at all n locations
ntcaacccacttaatttaaaagagaatggttntgatgtttcctttttaattatntaagtgcctagatcttcaaagatggaagtcaaacttttacttttttcttaatcttcttgagagatgttcttattgctctcatagtccttggatagaaggttgacctctttctccaacccttcaaagaatccatggccttcccaaccattataccccttctggaatctccttcctcattggcttccctcttaatcctcccttgcccttaatcatttggggggc

SEQ ID NO: 29138 - DNA, 399 bp, Glycine max
  unsure at all n locations
tttgcatgtttgtttttncagcttttgaaatatgtatttttcctctttattattctgaatattctttttgggtacagccattatttataatatagttttttttttactaaattcctttgtaattttaaacagattcatattttcattgcatgggtcatgttattcaatctcatagagtgcattcttatttttaatgtgctaacatattctcacctttcatttctagtagactatctaagttatttgaatgaagaaggactagctatattcttagaatgcggctttgagcctaactcaactttaaaagctagcttatagggtgagggttgtgccctccacttatatagtccatcttggtactatctctagccaatgtgagacttgaattttctcatacac

SEQ ID NO: 29139 - DNA, 420 bp, Glycine max
  unsure at all n locations
ggancnanggcagggatntcaccagaaantaatgtttgttttttacacncnaaagacagccngccgcactcaccacggncactacgagcaccgggggangccatncgggctctgcaacgcaccgtcaatgtttcaagctgccatgaacaaccttctcagccctttcctgcggaagttcgcgacagtttttttttacgacattctgatctacagcgaaatcttcagtgatcaccttcatcatctcgaatgcgttttcaactctcttctgcaggctcattattatttgaagcaatcaaagtgcttcattggctaacgccagcttgattacttaggccacgttgtctccggcagcggtgtcagacctgatccaacaaatattcaggctatcgtcaaatggatcacgcctcgatcttccaagga

SEQ ID NO: 29140 - DNA, 275 bp, Glycine max
atgcttgttcttgatttttcctaagttctggaactagcttaaaacaataaacttggccctctcttaattggccttgggcctggcgaaccccaaccaccaaagtccttttggcacctactatatgtggacttgaccaacgctgttattggaatgttgcaacaatttttcaacaccttattcacacattctgataagtgggttgccatgtgaccatatcgtcctccatatgtatgcgacgccatgctccatttttccttagagattcgatcaatcca

SEQ ID NO: 29141 - DNA, 423 bp, Glycine max
  unsure at all n locations
gcttgttagacaagtggccttagaaatcttaagaagtgttgggtgggttgaattaagattntacaaaccattccccaattaaaaattctactttgatcttaatgcaagttccaagttcccttaaagatgaatttctaaatgatgattcaaattaaacaatctgaatgtaaatgttaagaaacaataaataaaggagtttaagggaagagaaagtgcaaacacagtttttatgctggttcggcaaagttcgttgcctacgtctagtccccaagaaacccacttgggagttccactatctcgcanatcctttacactttctgaaacacacaaggaaaaccctttctttgtgttcagatactttataacaagagactttcagtctcttagccctttgattagaaagagaagaagaagaagaagatg

SEQ ID NO: 29142 - DNA, 432 bp, Glycine max
  unsure at all n locations
acaccggaaagaaaagaaagacggagaggagaatcaaggaaaaagaaaacaaccaaaacaagcttgagatcgagcctgcaaaccaaannnnnagggncggggaaggagggagaaaaaaaagtttttgagtgagagaagagaaannaggggggggaaagaggaagaaaacccaccaaaagcagagcaaaggacagaaagaaaacgaaagaaagacgaagagaaaaaggaaaggaaaagaggaaagaagaaagagaaaaggaagaaaacagggaaaaggaagagaagcaaaggaaaaaaggaaaagaaaggaaaaaaagaaacgaagggaaaggaaaggaaagaagcgaagggaacaaaagacacggaggcaagagaaaggaaaaaaacaagaagaaacgaaaagcagaacaggaagaaaaaaaaaaagagagg

SEQ ID NO: 29143 - DNA, 322 bp, Glycine max
agcttactcagaatcgccaatcagtggactttgttgttggcgattttgtctgagctatcatgagtaaagatcgtttacccactcattaatacaactagcttattgctagaaaaatcgagtcatattcatagttctaatgctttcaatgttaatttccttattgtggtaatgcttcttctgatgatgagatggcttttgatctgtggatgaatcttctccaccccgaaaaggatcctgcagtgcaagattgaccaaagttgacccaaaaaagtcattcgtgtccatttttttacaaaggagtacacttttttgattggaaatg

SEQ ID NO: 29144 - DNA, 433 bp, Glycine max
  unsure at all n locations
ctataacanatctaaaacacatagtttgaaaccaaagggagtactattttctcgcctatcttttcctctttttaaaagaacaagaaaaatacagaggaagggaatccctggaggaaaccaggaagaacaaaaaactcagaattgaaagaacatgcaatggtcctcttgattgccccatatttcaagcgtaatatcgtttaactacatcggagttcacgggcgagggcaattcctcgccatccatgtgggtgagtatcaaagcacccccagaaaaggctcttttcaccatgaaaggtccttcataatttggggcccacttgcctcgtttatctttaacagcgtgggacatcttcttcaacacgaggtccccctcgttgaacttgcgcgggcgtaccttcttgccgaatgcgttctttatccttcgttgatacaa

SEQ ID NO: 29145 - DNA, 53 bp, Glycine max
ggctgattgctttttatttaatgagctcctgccagaatcgactagcacagagg

SEQ ID NO: 29146 - DNA, 260 bp, Glycine max
agcttctatctataggaggcggaccattccaagtgttggagaagatcaacgacaatgcctacaagattgacttgcctagtgagtataatgtaagtgccactttcaatgtgtctgatctatctctttttgatctctttttgatgcagatggaggagccttggatttgaggacaaatccttttcaagaaggagggagtgatgaggacataaccaagggcaaggaccatgaagcacttgaaggtcccatgaccagaggcagac

SEQ ID NO: 29147 - DNA, 382 bp, Glycine max
  unsure at all n locations
atccttatggcctgcctactgacttcaccccccgngcctctttggattatnnaagccaagctcctactttngaaggacaactcccaccttatgaagactatcccggacaagatgatggggaaggagatacccatcttggccccctgctccacctcaaagatccatccccgcatgaactaccccagctgaacatagtccaccatatcccggcctcatccacacccataaaagaatttgttccctttgcggaagataagggaaagatcgaggcgcttgaagagaggttaagagcagtcgagggcctcggtaattacccattctcggatttggcagatttatgtcttgtgcccaacatagtcatccctcccatattcaaagtacc

SEQ ID NO: 29148 - DNA, 402 bp, Glycine max
  unsure at all n locations
agcttttggatgtaatacttacttgttggtgatgaacaaaagcgcgaaacggaatcaaaaaatgcgtaaaatgatgaccctagggctgcaaactcgtaaatcccgtgggtatggcttttgaaagggggaaaagaagtttttgaatgcaaaaacgtcccccctttcgtcattcttatattttggtgcaggggtggctcgcccaggcgagctaacgtgcatttttttttttttgagaggaacattaaccatgtcccctccttccttatggtttagcatcttgcttaacttgaacttacttaagttagagttgggcattgattacttattnntataacaaacaaaaagtaaaagaaaactgcgaatacaaaggatacggggctgccttgcagcgacgttctccgc

SEQ ID NO: 29149 - DNA, 411 bp, Glycine max
  unsure at all n locations
cgagaagaggaagcgnngaagggtgaaactncctgctnttatttttgaccacagagnggnacctggagaaatgncgcgcgggncaagagaccccggggacgncagggggggngctatngcccaaaaccaagctggaccaatcccgacccaacccaggcatagtcggtcagtgagaacctgtgatgtacctaagcaggcgagctcctggcagtcaacagataaaaggaacaaagaccacaaaacaaggaggcttgtggtggctggccagctgtgaaacttgattgatatgtgagatatggtctctgggaatcgattaccaagggtgggtaatcgattacaaggctcaaaaatgaagacagggggctaagatggtctctggtaatcgattaccaggggaatgaatcgattacc

SEQ ID NO: 29150 - DNA, 385 bp, Glycine max
  unsure at all n locations
agcttctagctttatggacttaccttgaattaattcctttgatagcccttctgagccttgtttccctttccttgttttgaagctcactacaagccttaaatgaaaaaccatgatatcaccatatccttaaggaattttggagctttggaattgttttgggaataagtgtggggggtttttgtttcattggataacttgttatgttggctatgcttcatgatgtattttgggccatacttgatgtacattgcatattggttaaatgttggacatgctgaatgaaatgttgtttctcaaacgctatagagtaanacaaaaataatcgaaacatgagaaagaaaagcaatagagttgagtgaataagatcttacatggacaagaatga

SEQ ID NO: 29151 - DNA, 375 bp, Glycine max
  unsure at all n locations
gcancaacaagaancaagccaaggctattgtgcaagcaatcaatacggcaaaacacacaaaaagattatgatgatggatggctcaaattctcacaaaagtaaacttatcactttcaaattgagctttcaaaactatcatgacatgtaaaggaaaaacaaggatttcaagtcacaaaatgtcaagagactttcattttcagaacaattacccattacttgaacatatcctataattcaaagacaaacatgcaaatttaacacaacaaaactaacaagattaaactagaacccaacaaaactaacaaaattaaactaatttaacacaactaacaaaaccataaccaaagaacactcccnccatacttaaacaacaca

SEQ ID NO: 29152 - DNA, 233 bp, Glycine max
tgctttttgaacgcatactgtggatacaactagatccggacgaacgctccagatgaggagaaaatggaattcatcactgaagacgctaacttttgatacagggtcatgcccttacgcctaaaaaatgtaggcgctacataccagagattgatggaccagattttcaaacaatagatggtacaataagttgaggtctacattgacgacatggtggtcaaatcccatagcatacc

SEQ ID NO: 29153 - DNA, 402 bp, Glycine max
  unsure at all n locations
tttcttctggtatcaattacgagcgtctcgatatactacgggacataatcggacatccgagtaaaaagttattatcgtttgattaggctaagagcttgtgttttgaatttcgagcgtcttgatatattacaggactcaatcagaaatccgatttaaatggtattcattcggacatccgagtaaaaagttattgtcctttgaatttgctacgagcttccggtttcaattacctgcatctcgatatactatgagacacaatcggacattcgagtaaaaagatatcatcgtttgaatntgctcagagccttcgttgtcaatttcgagcgtctcgatatattacgggattcattcagacatccgagtagaaagttattgtcatttgagtttgctcatagcttctat

SEQ ID NO: 29154 - DNA, 277 bp, Glycine max
tgcttcttgaaaatgggagaattgacctaggctttggcttttaaaaaaacacttattgtaggtgaaatgcttggaccaatggaatagcaaggaatccttatcttcttaatataagcactttgaatgaccattaaaatgactaattggaagcttggacaactcttgatgtgctctccacgatctgcgccatgccttatatggcttcttgtacttttctaacactaactataaaacgataaagtagagtcttgccataaatggtaaaaattgtttttgc

SEQ ID NO: 29155 - DNA, 548 bp, Glycine max
  unsure at all n locations
cccaacgcgcgctacactcagcaantttgaatantcncactatagntatcatcgcgatctgatgatgacaaacaanaannacaaaaaaaaagaaaaattgagttgtntcaatgcnatatacaggcgaatngagctcgggacacgggatactctagagtcgagctgcacgcacgcatgcttttaattcttagtcgatgacgaagcacgatgaagtgaaccacgatcacaagcaacgtatcctaacgaccggctggagacaaaaatgaaaatacgaaagggatggaaaagtcggagggcctaacaagcatcgcacatgtaacgacgtcacctcgtcgcatcatcctgttatgcaggaaccgacggatggctacttaaggaccttcacctcaagttcctttgcgcgatccatgccctgaacaccacttgtgggatgggaatctgggcacatggatacatcaagcaatacgcgatgattctgacattacacaatcaattccaaagaaacaggcaacggcagaacgtgatggctacacaatgaacgaatgctg

SEQ ID NO: 29156 - DNA, 344 bp, Glycine max
tttattgtgttcactaacagaatttctcctggcgatttctctgaagtttgtcggaccttaaaaaaggtatattatgtgcatgttagaaatgatgtgacttggccttgggtgaactacaagcattatcgataaacattagttattagtttcttcattcttttataatataggttgatcagagtttgtgtgagaatatgatgaactacaagcatttaccacctgttactatttcatttcagcttcttaaacagctacttcattttttttatttggatatttttttgctcaaaaacatgttgataaaataaaatttgtttagataatatgatgagaatatgatgaac

SEQ ID NO: 29157 - DNA, 329 bp, Glycine max
  unsure at all n locations
aagggcaggagcaaaaggggggcccaaaataacaacatacaagnataggnatnaaactctcaggagaaaaaaaatctatgcactgatcgatatttacagtataataagatttatacaatcattcaattacaatcaatcatgtataatagatgttcggatgattaaaacaattataaagtaatacaaacgataattttgtgtttaactaataatataaaattgttttacattatcaatgtgtaggcattacagtctacaagattatatttagactgtatatgtgcatcttgagaaataatgagtctttaataattatggatattttgact

SEQ ID NO: 29158 - DNA, 318 bp, Glycine max
atcttttacctcatcgtctctcacagtctttagatttgggagccaatccaatccttgtgttcggactctcagccacttatgatagccgccgatgatcccattacggcttcccctaagctctctgtcctttcttcacgccgcatcccatgccttgcgaactccttatggtaccctcgcgttgtggtcactgaaaccccgtgcgatgaaaggcgtgatgctatcgtctgatggcactcctctcatgaggtagccaaacggtcttatggcgaggacgggattataatcaatacaaccccttgttccatcaagggaaccttt

SEQ ID NO: 29159 - DNA, 406 bp, Glycine max
  unsure at all n locations
ttccccagccccttctcatcaatggacgcctttttaagtgncttacaagcgaaagcgagggnaaaggggagatcacgccctctcctctcttgaatttctatcgctctccctctcactctttgactgcccttctaccttcttcagttatccctcgatatgtccttctttggaaccctcccttgcacaccatggttgctactccattcaccggtggtgactcttccgtaactgaacaccatcgatttgtcaagagcctcagattcacatctaagtgaaacaaaacgacgtcgtcctggaagatgcactcaattctgaattcgcaagaggtgtagatgatagtgatgctggggttgaactcgttgatgaaggattggaatgagttacaacacgactctgaggagttaac

SEQ ID NO: 29160 - DNA, 377 bp, Glycine max
  unsure at all n locations
agcttttctcccacgaagagtctctgcgggtctgacaaaattgggcccacttctccttgctaatgtcgtacttttcgcatagtgtcatcgacactttccttgtcggctacaagtgcttatttcaacgtcaaatcagacttaaattttctccattgctcccccacagtctgaagtattttcttttttgtcctcagatcagatgcttcagggatatcanattcaacctaacaaatggaaaatcacattctattgttactaaattataatttgattgttaatcaacaaaatgcanaatttaactaaaatactagaatatcctcccatatcaaatcctnttaagcagcagagacttgtttccatagtcgtatgtcacatca

SEQ ID NO: 29161 - DNA, 413 bp, Glycine max
agcttccatcattactccacctccttttgcaacagattggatagtggaagggccactttgctaaaatccttgataaagcgcctataaaaccctgcatgaccaagaaaagaacaaacctctcgcacgcaagaggggtaaggcaattgtgaaataacagctataccttgttctaccatgaagtgacatttttcaaaattcagcacaaggttagtttcaatacatctactaagaactctatctagactatccaaacatgtatcaaaagaggattcataaacagtaaaatcatccataaacacctgtatgcaactctctaaaaaatcattgaaaatgctaagcatacaccgctggaaggtaccaggggcgttgcattggccaaagggcatcctcctatagacaaaagtgccaaaggg

SEQ ID NO: 29162 - DNA, 424 bp, Glycine max
  unsure at all n locations
tggaaggtagtcatacctcacanaatatatgtatgtgtgtttatgtagttagataccttggatatgcatgtatataacaaacatacctcacaaaatatatatatgtatgtttaggtagcaagataccttggatatgcatgtatatagcaaaaatatctcacaaaacatatatatgtatgtttaggtagcaagataccttggatatgcatgtatatagcaaaaatatctcacaacatatatatatgtatgtttaggtagcaagataccttggacacacatgtatatagcaaaatacctcacaaaaatatacatatgtttaggtagcaaaatacctcatggaaaaagaaaaagagataaaaaagaaaaaaaaataataataagttgtctagctaaaaaaacaacatgcttgtgaaaagagataact

SEQ ID NO: 29163 - DNA, 410 bp, Glycine max
agcttgtacatatcacacttgtaaaaattactgagaattggttactttgaattctcgagctgaaagttttactgaattttctagacatctgaaaaaaagttataaaaaaagaaccaggtggtttggataaaaggaaaaaataataaaaatcacacaagttggcagaaaaatcagtatccaaaaaaaaaaagagtgaaagggaagtgtgcttgttgttttggctgaaaatttattctataattgctgcctatgttataccaatcttagttccgaaatttcaatagaaaattagtttgaaaacaagtgccaaagctagaggtttgttgagtcttttttttatagttttttttactctactctagagccattctaagtttctctttgagtcctagcttgcttctatgtccttt

SEQ ID NO: 29164 - DNA, 427 bp, Glycine max
  unsure at all n locations
tctcgcccaattntctataaatagggggagaagtgaagnagtaatggttcagccccttaggcacttctctctctttcgaatttgcttaggaaaattgtttccgtgaagaaaatccaaaccaaggcgcttccgtaacgtttccgtgggtgatttcgcgaaggttttcgaccgtacttcgacgttattcattcgttcttcatcgttcttcagtcttcaacgggtaagtaccttaaaccaagcctttcaattcattctatgtacccgtggtggtccacatttggtttcatgtatttttattctcgttttcatttactttttatacccccttttgacgtgcttaagccatatatttaagtaatttctcgcttaacctaaaaataaaacaaatttccaccgatcgtttgaattgtatcatccgttaatttcg

SEQ ID NO: 29165 - DNA, 408 bp, Glycine max
  unsure at all n locations
agcttcatgttttagttaagcattttctactaaaatattaatttggtcctctatttaattaaataatttaatttattattttttattattaaaatttttaatttaatcccataatttttaaaattattgcaatggcatccttttcgattaattacaaaaaacgacatcaacttcttgtatacatgatacaacaaaaataacaacacatatttatcacgcaagacaccttaattaaaaaaaattaaaggaaataatattaatggaataaatcgtatccatagaaaaaaatattattttgtgtgtactcaacttttcaatgaagatcagtcatcacttttaactaaactatttcatataaatattaagataaaaaaatattacatcagctntgataataaataaattcat

SEQ ID NO: 29166 - DNA, 429 bp, Glycine max
tgtgactgttcgaaagcaaaaagatgaaactattgcagcttattttattttgatcaaaactcaagaagaaactcttgcagctgcgaaaattattgctgcacctttagtagaacaattacagaaagagatctctccaagaaaatcaggcctagttatttgcagaccccaaagttttgatcaagaagcacaacaaaatgagacttgtctacctgccttgaacatttttgcttgagcaaattacactcgcatcccctgagggctagcgcttattacactcaacctcactccttttttttttatcatatacaagactccattgtatttttaccatccattacactgtgcccctgtttacgctggaatttggtaaacaaccgctagtctaagttaattgcttgcgagatcaactagtgaatctcaggagcatgg

SEQ ID NO: 29167 - DNA, 398 bp, Glycine max
  unsure at all n locations
agcttgactttggtttagacatgattggtacatgatttgggacttgtaggatttgatttgggcaagattggttgaagggaagtgtgattttcgaaatctgcacttatgcagaatttttgctgtgaaattgtgcagcagaattttgcacaagtgcagaaaaatgcttgtgtgtggttggctgtggaaagtctagtgcagaatgagttctggatgttttctagtagatcccaacggtcacaatgtaggcttatgtactagagacttccagtaaaattttcgagtcgatccaacggttaacgaattggatcgaaggaattgttactggggtctttaagcgagaaaaagctgtgattntggttggtgtttgagcacagttttctgcctttgctctgttttgc

SEQ ID NO: 29168 - DNA, 430 bp, Glycine max
  unsure at all n locations
ggtaagctgaaacatatcaagaaagttttccccaaaactttgattatagagaaaataaaaaacacaaaacattaatatagcattgcttcttcttagataacataaaccaatgaaaacaacttgctttgctgtccttttgacggtgtggttctttggattaaaaagcttaattttatttgtttctttcttacttttgatatatcgtagaaaccttgtttacctgcatgcattggcagttcatgttaatcttttatttgcttgtaaaaaattctgtggtctttttgtcatccccatanggaaatggagtgatggatgggctgtgataagagttgatattggataaactatntggatacagtagtttcagctatttaatcttgccgtcatgctgtggcacaattggtatctagtgcttgtttggatgacttat

SEQ ID NO: 29169 - DNA, 404 bp, Glycine max
agcttctcaaggtgtacggagactcgacattggtgattcaccagcttagaggggaatgggagactagagaccacaagctaataccctactaggcctatatcaaggaattggctggtttctttgttgggatctccttccatcacgttccccgagaggaaaatcaaatggtggatgcgcttgctactttagtgtccatgttccagctgacactacatggagacctaccatacattgagttcaggtgtcatggcagacccgcacattgttgtctggtggaagaagagcaggacagtaagccttggtattccgatatcaagcggtacgttgaaagcaaatagtacccaccggaggcgtttgacaacgacaagaggatgttaaggagattggcagatggcttcttcttg

SEQ ID NO: 29170 - DNA, 423 bp, Glycine max
  unsure at all n locations
tntgaaaaacctcatgacagaacattgacaaaggaatcatccttttactctaagaaaaccacaatctagtcggaaaattgaaatatggggaaaaaaatttagaaattagattttcatttaattcaactataaaaattaactcataaaataagtattaccccacttatatattttattttgatattagttaatgtaagactttatttttttcaataaaaacttatgtaaatctaggggatgatcctctccaccaaaaaaagtaatcttctctacacactttataacattggattacccaagtgcttttctctaatttctttctactatctctatgttaccaaaacaaaaaacataattatatttgaacacttttaaatcctaaatacttcattaaaaactntaatttctttttatctttttttt

SEQ ID NO: 29171 - DNA, 405 bp, Glycine max
  unsure at all n locations
agcttattcttataattcatgctaaaaggtgcatagaataaaaccaattaggacactaaagaattaaacatatagaacttcttaatgacctcaaaacatagactccgtggagataatgcttctcagtattggcggccacgccaagtgcaagactgcgaggttgtgttagggatgggagcgacggcttgaaatatgtgtatatcacctacgtgtcttgtacgacggacattatacctcactcatccaaacgagtagtgtatatcacctacgtgctntgtatatacaacattctttcatatgacacattatattccaagctatatattatcagcgagactctcgtaactgacttagctgctatgtagctctgtgttgacaataatacgatagcatctantacactag

SEQ ID NO: 29172 - DNA, 440 bp, Glycine max
  unsure at all n locations
agaaactcagctttctttcacaatcaatctgtctactaactaacaannncttantgcaagttctcattcttgttctttctttgcctaacatacacacttgctcaaactcatgaaaagaaacacaaactcaatcacagtcatgcattcaattcaaaaccaaatcatacaccaattttcacacaaagataaaagtgttttattgccatatcatcaaaatcaagtcaaactgttccatatacttcagaataagcaaaccaactacccataaataaaactagcagtgtatacaaacataaaagaaatactgtactgaaaccgtaatcataataataataatccaaaaagcaaaaagcatcatcaggaatcaacaatgtcaagagtgtataaattagggaataagtgagagcaacaacttctccagatgacgaataagaaagatc

SEQ ID NO: 29173 - DNA, 386 bp, Glycine max
ttgcttatgcatgtctagagagttcttgagagagaaaggtccaagtttcagagagtttgagagattttgttatgtgaagatctgcagagactagagcttgaagaggaagccgccctgagagcttgagatgagtttgtgagtgattgtgaggtcttagaggtggaggagacatccccactacttgtatttctgtaatgttttatctttctcttgtctttgttgtaaaggaagcttcccagttatggaaagctaaatcctctgttggattttccttgtaggtacttgatgtaaatatctttttatctatctaatgatgttttgtgtgttctctatgctatcagtatttcattatagtatgcttttaccttgatcacgtagatgcatgc

SEQ ID NO: 29174 - DNA, 432 bp, Glycine max
  unsure at all n locations
actaagcttaggctgctcgattgctccaggttgctgcatggattggtatatgtctgtatggnggtcagcagaggagcacaaaccacaaacccttgcaacaggtatagatttctgattcaaggccagctgggttaccaagttaaccaatgcatccagtttgccttcaagcttcttagtctcagatgatgcagctgagtttgtagctacctcatgcactcctctaatgactatggcattatttctggcgctaaactgctgagagttggaagccatcttctcaattaaatttctggcttcagcaggagtcatgtctccaagggctccaccactggcagcatctatcatacttctctccatattactgagtccttcataaaaatattggagaagaagctgctctgaaatctgatggtgagggcaactggcacatag

SEQ ID NO: 29175 - DNA, 404 bp, Glycine max
tagcttgcattgtgctaagcctaaagaactccctgttttgaaatattttgtatttgggctaagcgcgcaagggcagctggctaagcttgcatgtcgcgttaaacctaaaaacatctttgttttgtaatatctcaaattgggctaagcgtgcaggcacaggctaagcgagtcatgcattcccggtaagcctgtggtgctcgctaagcggattttgcaggaaatttcctcctgcaaaactctctaagccctatgtggcatgctaagcccaataatatctctgaagttgcaatttcatttttgggcttagcgcacaagtttgggcttagtgcgcaaaaaaaaaaatcaaaatttcttgtacttctattttggtatgtctcctacgcagcaagcttagtgcgcactta

SEQ ID NO: 29176 - DNA, 424 bp, Glycine max
  unsure at all n locations
tataagaacaaaattgccgtaatcatttccaaatangcttgngatttaggacgcatcaacaagaatcaagccgaggctattgtgcaagcaatcaatggggcaaaacacaccaaatgattataatgatggatggctcaaattctcacaaaggtaaaatcatcactttcaaattgagctttcaaaactatcatgacatgtagagaagaattaaggatttcaagtcacaaaatgtcaagaacttttattttcaaaacaattacccatttcttgaacatatcctataattcaaagaaaaacatgcaaagtcgtacgtgcacacaaaattgacccaaaatattaaactgaaaatccgacgaaactaacaacattaacaaattaacacaactaacaaattaacaaagccaacataactatcaaaaccaaa

SEQ ID NO: 29177 - DNA, 398 bp, Glycine max
agctttatcatcgtcaccttttaaacattgttgtgcaatctttcaacataaccatgcaagcagctgcatacctatgcaacttgtctaatgtgaaaaaataattgggattaattcatccctttcgcaactgttaaatgtatgttatgagtcatgacaagattctagtcagcatccttctcagagtttagtgttcgtctttttcaaaagaggttttctttctctcttttcctttttttgtggattcgtgaattttttgttattgattttttatgtttacttattgttatgaattaccaaattcgtaactaatgttatgatgggtcctatatatctcgatttcgttgtgtatctagtttaaatatataatggaatcatgattctattaggagtgaatacac

SEQ ID NO: 29178 - DNA, 390 bp, Glycine max
  unsure at all n locations
ntgagccaaaatcctgactcaccataaaccttgtctcagtgngttatgtcaatccttaccctcggaagcaaaaaaaaaaagaagaaaaggaaaatttccaatcaaaggaaaaaatagaggaaaggaaattcccaatcaaagagtgggagaaagcaaaaagaaaagaaagaaaattcccaatcaaagaatgggagaaagaaaaaaagagaaaaggagaagaaggaaagaaagctcctgatcaaggatcgaaagaaaacagaagaaatgtgcagagaggtctttggaccagacaatatctgaacaatacggaattgtcaccaaatgaacaaaagaaagaaaaggaaaccataacctannagtggtcttcttaccaaccaaaatcctgtgcgt

SEQ ID NO: 29179 - DNA, 393 bp, Glycine max
atcttgtagcaccacttcaccctaccttgccttttgagagcggcaacaacatccatcgtggtacctgtcttccatttaacatgctcagtgtaagtaacaaagtaccgcagaccatccctgagaaagttcttaaagactctacgagccaaacaacgaatcccgagtttcgtaatgttctgcatgttgtcgcacaacaccaccttgtgccccttggctcctcccctgcatccctcccatgaccaccgtatcggccgctgtcacctccaccaccaccaccgaagccatcgcctccaccaccaccacggtcaatgcgggtttgcacttcatgggtagtgatgtttggccatcaaggtcttcgccgtgcaaactgctgttcacaactctcgctccctc

SEQ ID NO: 29180 - DNA, 416 bp, Glycine max
tattccagggacatgttattattatgcaaagccttcgttggtagctcctccagggtccattctgtcagtagagcagttccttgagcaggtggccttgcctagagctcaacccttgattatgagaactggtggaaggtttgcagcccaggcacctcaacaagagagatccaacgaggctactgctcctcctgagcctacacctgcacaggttgaaccaatgctagctgatccacattcttcaatggcaaatccatcttctcccaaacttgaagtagctccctcatcttcacctattattatcatctctgaagactctacaaagtcatcgtctggagaagatgttactctctctgattcccctattttccatctaataaatgaggaggatgctcagactcgggatacccaggatctgt

SEQ ID NO: 29181 - DNA, 367 bp, Glycine max
agctttcatctagccaagtttatacaaaggtgttacaagagaacctaacgattcctaattatatgggccatcaaatctatcatgtgctgacagtaattgattagcccatgaatctcctcgggggcagtacacacttcggccatggcttttgctttggctaacagacgcgggaggtcttgacttccattcaaggtcaaggcgaacctatccatccacatagtcgcttcttgatgcaacgcatcaatcaccctccctcttgcttctttttcggcatacacttgtgcaaaatcctccactagcttttgttcatgggccatggactggttcaattcttccttgtattgccctatgatagctagcatgcttt

SEQ ID NO: 29182 - DNA, 420 bp, Glycine max
  unsure at all n locations
tcaacatcagaccacttccagggtgctggttcttttacttggatttgatggggcctatgcaagttgaaagccttggaggaaagaggtatgcctatgttgttgtggatgatttctccagatttacctgngtaaactttatcagagagaaatcagaaacctttgaagtattcaaagagttgagtctaagacttcaaagagagaaagactgtgtcatcaagagaatcaggagtgaccatggcagagaatttgaaaacagcaggttcactgaattctgcacatctgaaggcatcactcatgagttctctgcagccattacaccacaacagaatgggatagttgagaggaaaaacaggaccttgcaagaggctgctcgggtcatgcttcatgccaaagaacttccctataatctctgggctgaag

SEQ ID NO: 29183 - DNA, 391 bp, Glycine max
ttctttccaaccaaattcctgatagaggcccatttaatacctatacccagccctctaatgttataggataagatattcatgtatgagctttcctattacccaactccatagcttcctttttgtctctggattccatattagcatagtgttgaatacaatcagaatgttctgtttcagcctccatgcctattctttttcccaaattctatagttgatgagcctcctccatcacctctgtgttacatataatcttactttttaaccttctctctgcttcaagatggctctagttatgggccttgtcacatttatcaatagcggcagccaagtcattatcttcttcttgtagctgaagttgatcttccacaggttgcaacatacggagtttata

SEQ ID NO: 29184 - DNA, 414 bp, Glycine max
  unsure at all n locations
tcaagttgctaggatagcaacgtgancggtccttcagttcgtcctgagatgaaagctccaacaggcttcttttggttgggatgtgtgctctatctcgcaagattgcatggtcactagcagtcatattctcaatcaattccatggcttcttcaggggtcttcaattttatttttccccctgtagaagcatctaaaagttgctaggattgtggccttaacccgtcaatgaaaatatggagctggattggctttgaaaatccatgagtaggcgtctttcttagtaacccacgaaatctttccaaagcctcactcaaggactcgtctagaaattgatgaaaggatgagatgacagctcttccttcagcagtcttggactctgggaagtatntcttcaagaaattttcaaccacttcat

SEQ ID NO: 29185 - DNA, 408 bp, Glycine max
agcttttcccttcgtagcatatagataaatgatgtttatatacttgttaaattaggtatatgtatcccgcggtaagagatatataggaaaaataaaagaaaaaaaaatagattatgtgaaaataagacattaaattaaaatactatgcaaatataattataattgttaatagttatgactttttaaatctcctaaactacagggatatccataatcttaattagttggtaatcgacacccatatcggctattaactattgtcttgtttatcataattagacaatgacttgacatcatcataaataaagagaaaactagagccaagatttgggagggacacaactgatcttgacatttcatgatgcagatcaaatcatatggaaggggcacatgacgtcaataagcaat

SEQ ID NO: 29186 - DNA, 430 bp, Glycine max
  unsure at all n locations
tgtgacanatctcttgagaaaataaatatgctcaatnntttgttctttttgaatncaanagcaaaccaaatgcaccttctctaactccttgatcataaagatctacttcagaagtgcccccttttggatcaccatgataaacttctctgcccatccaatccgtatcaaacagaaagaagggaaaccatgacaactgcaggtagacaggattgaaatgaacataagaaggatttcaaatgggaagcaccaacactaggctaatagcattcacaacacaaccgacttgaaaacacaaatatcaacagaaacctttgcaaataaatactagtacatacccaagtgagagccattacaaccaggacagaatgcatagcaggtggcaaatgccttaaacttgtcaacaagtttaccaatactgctccaggcccat

SEQ ID NO: 29187 - DNA, 407 bp, Glycine max
agcttctagagttaactacatgaagttgcctcggtaaaaacgatgcccagccttcgttaacagttggatcttctcgaaatttggtttgcaacttcacaagacacttgtccatgatctgaccgttgggatctttgagaagatgtctggagtgtgctagaagcttccgtttccgagagcatctcttatttaagcatctcagcctttgctttcgtgtagcttaggaaaaacgtcatttcttcttctttctttcttccaaagccatttctaaagtcccaaacactttctccatcacccatagccaacattagccaccacaaaccatcgttgttctccattgaaaccccacaccgagaggaacccttcaaccgaagcggaatcttccaacttggcttgcggtttcagtagag

SEQ ID NO: 29188 - DNA, 417 bp, Glycine max
  unsure at all n locations
ggtagagttaagtctcgtactggtttaatctattacggtttattttntattcgatnacattgnnggntgagacaatgattgattttttcaagagtctctactttaattgattaccaagtagattaatcgattacttctctcttgtttaagttgctcagaagtgaacaagaacattttaatcgattacctgggtcatctaatcaattacattgttcttgagtggttttccagatgttggacggacactttaattgattacttcattgaaatatttgattactttatagattntatcgattgcaagcggttataactattttctctataaataaccagcttgtgttcacatctatacatcatgagatcattagtgaacactcaatacatctcaaaaattacttcttagtcttagaatga

SEQ ID NO: 29189 - DNA, 404 bp, Glycine max
agcttgtctcatatatgtccaggaaggacaaggcggccgaaggaactagttccgctcctgagtatgacagtcaccgctttaggagcgctgtacaccagcagcgcttcgaggccatcaagggatggtcatttctctgggagcaacgcgtccagctcagggatgacgagtatactgatttccaggaggagataggtcgccggcggtgggcatcactggttacccccatggccaagttcgatccagaagtagtccttgagttttatgccaatgcttggccaacagaggagggcgtgcgtgacatgaggtcctgtgtgaggggtcagtggatcccgttcgatgcagatgctattggccagctcctgggatatccgttagtgctggaagagggccaggagtgtgagtat

SEQ ID NO: 29190 - DNA, 408 bp, Glycine max
  unsure at all n locations
cgcttccttgattcctttggttcttctttactncctttttctcttngttttctgcagctngnaacttctaggtaagtntattttaattgataatacattctatgcatgtttaggttataaattttaagtgttatgtgttaagtatgtttacgttaggctcgttttgtatgttaatgttatgtatgtttaggtggtatttataaattttaagttgcaattcgaaatattaatattatttatattatatgtatatgttataattttagtcagtatgttcgtatttatattataggatacattacagctagtttatttgttaatattattagtttgagttttgtattttatatagtagattagattcacctaaaagattatgaatagcttaaatttttatatgcgacatta

SEQ ID NO: 29191 - DNA, 398 bp, Glycine max
  unsure at all n locations
agctttgttatgtcctctcccctcggcggggatttcttcttcggcaaaggcgagatagttgttggcagtgatattattgaccagccctccgaaaccttctaccgagatgtcttgggccacatgggcctcgttcaaaaccttcactagtagagcccgatgaggctcggagctcatgagtaactccaacagcgagaccctggccggggttttgttgtgctgttcgataaccttgaattcgctctgctgaattatacggaggaactcactggcttcctctagtgacacctcctttttaccatcctttttctccggaagacctttcgcctgaatatctttattcgaagtgaggggtgcttcgtcatcttgttcctccaccacttttgctttccncttgacgt

SEQ ID NO: 29192 - DNA, 429 bp, Glycine max
  unsure at all n locations
ctgatcaaatgactaaaattaattggcaaaaaagatatnnatcngattgccaaaccaacttcactattcctagttagaaattccaatattctatattacctgctcattagctgtaggaggaaggcctccaacatacacccgcctagcatgtcatgtagcctgtaaattcagtacatcaaagataggccataatcagggaaagtcatgctaaacttaaaatgaaacttaaataagactgtagtcagtctcagcaagcctccatactcggaaagactaaacttaaaatgttgtgttgacaaagttagtgtgtttctactctttttctataatgactctttttcttctcaatgaaagagaatattttctcccagcagcacagtgatactaaacaaacaaaagcgcaataaanagaaacacatgtaaaaagaa

SEQ ID NO: 29193 - DNA, 396 bp, Glycine max
agtcttttagaaaaatggccttagcaaacttcttatttccagaaggaaattcaatcaatagacctccaatctttaatggagagggttaccactactggaaaacccgaatgaaaatttttattgaggcaatagacttaaatatttgggaagccatagaaatagggccttatatacccaccacagtagaaagaatcacaatagatgggagcacaacaagtgaaagcataacaatagaaaaacctagagatagatggtctgaagaggatggaagacgagtacaatacaatttaaaagccaaaaacataattacatctccctgtggaacggatgaatatttcagggtttcaaattgtaagagtgctaaggaaatgtgggacactctacaattaacacatg

SEQ ID NO: 29194 - DNA, 410 bp, Glycine max
  unsure at all n locations
tagaagagcgtcgaggagaaggctttngtagtttgtatacatcttaagaaaatcttcgagctgtactaggcatgatcgtaagaaaatataaaattttaaaattgtttttagttttcgtaacttaacgttttttcattttttggttctgtaatttttttttctaattttaatccttatatattgatgttttttcaattttaattcttgtaagttttttttttcatttttaatcattgtaagtttgtatttttcaattttagttttttaagattctaatttttttatttatagtttctataaatttgtgtttacagaaaataaaattgaaaaaacataaacctacaagaaattagaatgaaaaaattgaacttatgggtatcaacaataaaaaaaacatgagaaaaaaaaca

SEQ ID NO: 29195 - DNA, 355 bp, Glycine max
ttgcttcttagtttcagatgatgcagatgagtttgtagctacctcatgcactcctctaatgactatagcatcatatttggcgctaaactgttgggagttggaagccatcttctcaattaaatacctggcttcagcaggggtcatgtctccaagggctccaccactggcagcatctatcatacttctctccatgttattgagtccttcataaaaatattggagaagaagctgctcacaaatctggtggtgaaggcaactggtgcataattttttaaatctctcccaatattcatataggctttctccactgagttgcctaatgcctaaaatatcctttctgatggccgcggtccta

SEQ ID NO: 29196 - DNA, 411 bp, Glycine max
  unsure at all n locations
aatactcagcttacggaacacctagcttggatttcttcactgttactaggtgttcactcaaaacagctgaaatgcatagcataggggtcaaggaccctttggaatagcccacttcccctatttataggagaaagggggaagaggttgctgcccagctcgcccaagcgagcaggtggcttcctttggaagtttcctgatgcacccccaaattcataagttccccccctttttcgtattttatggaaaagttaaggaagtattacggaagcctatcagacttgattntattcttttttgtccttcctctcaccaatcttaagtggaaaaggcttacccagggttacggaaattttacggaagcattacgaaagcctcggaggtccattttcagaaaaagcagggaggtgcttg

SEQ ID NO: 29197 - DNA, 403 bp, Glycine max
tgcttatatcctcaggtagttcagcaaatacttgcttcatttcctccaagctcatattttccaaaatggacggccttggggcaaccctcacaatctcgccgcctttaggttccttaactcgagcctcggctttaatgattagttctgaatttgagcttgctccacatttaattataaatggtgaggtattacccgtattgaattgaaggacgttccactgtgccacatcagttccagatccagagcctgtatccgttgatggcttgcgagaatgtgatagattctgaatgcggtcatcttcttcaggaattgactgcatcataaaagagggattaggaatcccaaaactcaattaaggtcacgctcagacacagattcagatgccagaaatgctgagacagga

SEQ ID NO: 29198 - DNA, 385 bp, Glycine max
tcttcatgagtatttataagataagaaaataagatgtatatttatttttcaatattaaactttcttactaaaattaaccctttacttttagagaagttaaataaataaataaataaatctataaaagttaagggcattagttgattttactttataaaaatttaatttattttaatttctcattttcttctcctacaagtagctaagtatttctcctagctagctaaatagtatgatttttcctttatttatttgtaatgtctgtgatatgttgcaagtttcatgactaatcctgataaaattcgaaaaagccactagccaagagatatcaagaatgatcatatgttgagtcctgcacataatgtttgaacggacaggcaaaagt

SEQ ID NO: 29199 - DNA, 402 bp, Glycine max
  unsure at all n locations
tatgctttacctgtcaggctaagcgccaatatgcttctattttttagtcctttgaataaggctaagcgtagctgttgcgctaagcccttgttatgtgttaaggaggttgagctaagcgtgccttgctgcactaagctctgttggatcaagtggcctcggaataattaagaagggggggttgaattaattattaacgaacctttactaattaaaaatctatccttcttaatgttaccaaaagtaaaagcaataataaactgcacaacaaaaattaaagagtgtagggaagaagaagacaaacataagagttntatactggttcggcaacaacccgtgcctacatccagtccccaagcgacctgcggtccttgagattcttttcaaccttgtaaagtcctttac

SEQ ID NO: 29200 - DNA, 300 bp, Glycine max
  unsure at all n locations
gaggattatggggtacccatcacatgtggnactttgttgcggtcgagcganggngcacaacaagntttccacatgcacaaagcgcgcataaacccaccattccctggtgcccaccttcaactgagctcacgtactcccacgtagcccatatcctcttttctctcaacaccgggtccccatcaatccttccaagcgtttccaacatcaaagcgaaacaacattcaaacagcacaagctatcacagccaagccaaacagagcaaaggcggaaaactctgtcaaaacaccaaccaaaaacaca

SEQ ID NO: 29201 - DNA, 309 bp, Glycine max
tttcttttcatatgatggccctgacaaccatgttggcatcaacataaacagcatcaattccattcaacaggatccattaatcaacactggggtcaatgctacatcacgtataaatgtaacattcaaaattcagtatatgaatgacatgataacggattttggttccatgactggttttgaagaatctatgacgacccttttggtatctccacgctcttaatctatctaactatcttcaagaaggggtataccttggatactcatcgtttacaactatctacactgagctgaaccgtgctagatcatggg

SEQ ID NO: 29202 - DNA, 423 bp, Glycine max
  unsure at all n locations
agtatcccattattgtatacaattaatnccagcattttgtctcttatcttttggncacaaagagaagggaggatttctaaactttgttgcattacgttatatatataagtgcctacacttgtctttagttatattagatatattaatatatgattagttattattgttatcattattattattattattatatatatatatatatatatatatatatatatatatatatatatatatatatatatatatatcgctcttatatacaaacattttgtgtgatcacatacgaggtacgcgtaaaaatatttatgaaggaattggaaatatctatctatggtgagggagacgcgtggtattattttctcatatgggggagacctattcgcctccgtgtgcgcgtgggcgcactcccgttatatagct

SEQ ID NO: 29203 - DNA, 395 bp, Glycine max
  unsure at all n locations
tgcttataaagaaaaatgatggcatgattttaacctaatcacactatattgaaagctattgaagaagtttaattattttgatgtgaaacatgtgtctacttcttatgactcatccatcaagttaaagaaaaatttgagtaaaggaatttcttcacataaatactctcaaattattgattctttgttgcatttgacaaacttctataggcctgacattgcatatgtagttggtagattagaaaggtatactaataattctgatcattctcattggattacattagaaagagtttttagatacttaaaaggaatcattaattatggcattcattatacatgttttcctgcagtaattgaagggtttagcgatgcanattggatttctaattctgatg

SEQ ID NO: 29204 - DNA, 410 bp, Glycine max
  unsure at all n locations
tgtagaagtgattgtgaatagtggggattgttttttatttgtttgcttttttgnttatttgtttgtttgttataacttgtattagctagcctaaaattgctcaaccagacgaatgtatgaggtgcttaaattaaggttaacaattgcaaatgttgtgacacacaattcctgttgggcaaagtgtcaagattacaccaaaatggctggctcgttctgatgtaattgtaaagcatataagagcatgctatgggttagttatataaccaatgaagtaaaatagcaaacacgtagaagttggaagtttggtcaaagaatataacaatccggcaattattctatgcaattgaatatacaaacaagtaagacaagagttatactttcaactctatgtcatgcatgcttgatgcttc

SEQ ID NO: 29205 - DNA, 399 bp, Glycine max
tatcttttatagatcaacaatgagctgtccgaaagacggccatcccggctcctctttactgctctccaggattggcatgtgcttctcattgcttgctaaccctttgaactgtttttgtgatggttgctgctgcatttgtgcagtgtaattagccaatcagcaagggctatgtactttcttaaaatgaacagcatcacataacaattaatatatacataccaaagcccaaagaaaaataagattttacagccaaaggatgaaatttacggtctgtctgttttgagaaaatgttctttgtttccatttcctcttttcacatataatttcaaggatgctacattctttcactccgtttccgattttacagatctatatcagtgatatgataaagacaacatg

SEQ ID NO: 29206 - DNA, 418 bp, Glycine max
tgccagaagttcttagttggggatgctggttctgtttgttactaagatgatgaggaggcggaggatgaagatgagctggtagataatgattctgaagaatctgaggagtataagttctttgaaaaagtgtttgcagaagatggtgaccttaggagatattatgagaacaatcacaaggaaggagatttttattgtttggtttgtgggggtattgggaagaaggtatggaagaggtttaaggattgtattggactaattcagcactccactgccatattaaggacaagaaggaagcgagctcacagagcctatgcacaagtcatctgcaaagttgtaggttgggatatcgatcaaatgccagctattgtgttaaaggatttggattcctcattggctggttcaaagaagcttttcgtga

SEQ ID NO: 29207 - DNA, 396 bp, Glycine max
  unsure at all n locations
ttgtcattctttcagagagatggtggacaaactactcaaggctcagtttatcagagaagtcaggtactctacctagatagccaatgttgtcatggtcaaaaaagccattggcaaacggcgtatgtgcattgactacaccaacctcaacaaagtgtgcaccaaggacacatatgctttgcccagcatcgacaggctactcgactacgtgcctgtgttccaagtactgagttttcttgatgtctatttaggatacaaccaaatcagaatgcacaccccagacaagagaacacaacattcttaactgaagatgataatttttgctgtagggtcatgccctttggcctgatcttcanacaacagatagaccataatcttgaggtttatgtgaatgatatg

SEQ ID NO: 29208 - DNA, 416 bp, Glycine max
  unsure at all n locations
ctaagcttcggctgctaattgctcatgnngcagttttttggttatagnctgatggnggcagcagaggagcacaaaccacagacccttgcgacaggtacagatntctggttcaaggccagttgggttaccaagttaaccaatgcatccagtttgccttcaagcttcttagtttcagatgatgcagctgagtttgtagctaccttatgcactcctctaatgactatagcatcatttatggcgctaaactgctgggagttggaagccatcttctcaattaaatttctggcttcagcaagagtcatgtctccaagggctccaccactagcagcatctatcatacttctctccatattactgagtccttcataaaaatattggagaagcagctgctctgaaatctgatggtgagggcaact

SEQ ID NO: 29209 - DNA, 389 bp, Glycine max
  unsure at all n locations
agcttgtagaggatgcttcaacggaggaaaagaaagagggagagaaagagagaggggggagcacgaaattgaaggaagaaaaaaggagagaagttgaactttgtgttgtgtctcacaagactctcattcatcaaagttacaacaagtgttacacatgcttctatttatagactaggtagcttccttgagaagctttcttaagaaaacttccttgagaagctttcttaagaaaacttccttgagaagcttctttgagaaaacttccttgagaagctagagtttagctacacacacccatctaaaaactaagctcacctccttgagaagcttccttgagaagctagagcttagctacacacccctataatagctaagctcacccncatgac

SEQ ID NO: 29210 - DNA, 341 bp, Glycine max
agctttctcaatatttaaacaattcgatctcatttatcatgaaactaccctaaaccaagaaaacagagtagaggcagaaaactctgcccaaaactaatccaaataccacagttttccctactcaaataccccagtaaaattctcttcgttccggttcgttaaccattggatcgccttgaaaattttactggaggtttctggtacataaatctacattttgaccgttgggatctgctaaaacatgcctggaacccgagatgtactactcttcccatgactagcaatgcacaaccatttttctgcactatgttaaaaaaactgctggcacaatttgacaacat

SEQ ID NO: 29211 - DNA, 450 bp, Glycine max
gcttatgttgcaaacatttataatagacctcctcaccagcaaaaccaacaacaacagaataattatgacctttcaagcaatagatacaattcaggttggaggaatcatccaaatctgagatggacaagtcctccacaacaacaacaacagcctgtccctccttttcagaatgctgctggtccaagcaagccatatattcctcctccaatgcagcaacaacagtagtagtcacaacaaaaagcaacaagcaactgaggctcctcctcaaccttccttagaagaattagtgaggcaaatgactgaaattctgatactgaggacagatgtcgtacaggatgtcacgacatcgcgcttcagaacatgcagaatgtatatgacagtatgaacagattaaacaagtaaataacacaagagaattgtaacccagttcggtgaacgtccctacatctg

SEQ ID NO: 29212 - DNA, 408 bp, Glycine max
agcttgtacttaactttgcttgcatattctgtgtaactctggccaaaagtctcaaccatcaaatcctcttccttctctgccttctgcttataatacaacaagcatactgccacaataaatagcagactcagaggtgctcgaagcgcaatgcagtatgttacaaacaaaagcattgttgatgaatatattggatgacggacccaacgataaggtccaaattgcactacagaagttggctccaccacattttctgaatacttagcgagatacaatgtagcattatactgcattagcagagttgtaatgattaaagcccagattccaagattgctccacccacccggtatgaggtgaagctcaggcccttcaaatgctgcaagccaatggccaaccatgactcctgtgctg

SEQ ID NO: 29213 - DNA, 464 bp, Glycine max
  unsure at all n locations
gcttaatggcttctcgacatanactattaaaacgtacagtgagaatttttatgtcaattgtatctgttatnttttcatcagttccaatatcagattttgcattccttgtccatcgtttcaaaatgtagtgcgatggaagggtaagaacatttgtaacagtgaagacagtcaatatatgtcaacaaagaacgcctgagtattcaaacatctggcagctgcaattcaccttcatttcagagatatttaatgtgaccatgtatgccttgtgatcatgtacatattttgcaaccctgtatttactgatcacaccatcatcctcaacattatttgcagtataagcaaaagtttccaccagttcctcctgagattctgcaaaaatcttcttagtgtacatatttgctgcttgttgttccattggtgatggagtcttcagtacaggtgtgttacaaatagtctcataatct

SEQ ID NO: 29214 - DNA, 404 bp, Glycine max
agcttttctatggattgactagcatatacattcattgagaagaaacgagagagaattcaagagaaatactactgagtgaaacacaatgcttattgagtctattctttgcttagcaaagattttgttccgagtcttacatcattgtaaacacattccttgagtgttaagatctgtaattctttgaactggtggtttatgaaaattaggagtgtcgtagtaacaaaacaatatttgggtgttcttaaattcagggggaatctaagaattaggctaatggtggcctagagagtacttgtaaaatcaagaatgtcagattaaaatactagttagaatattaattaatagaaccctttacaatttgagtgaactagtataaattaagtgtttctactattctccttaag

SEQ ID NO: 29215 - DNA, 341 bp, Glycine max
ctctcttacagcttataagcactccacttgctacataactctcggttgaaaaaaacataagggccaacttggttaatctcttgcgcaggcaccagcttcaagctttccaacacaacaacagtggcggctcaaacagcaagaacggtcttcaagactctcttctacttgcatttgctcctagttgcagccttggtgactttccttaccatatatggacctgtctctgattctcacacccacccattccaccccatgaaatggtaccctccacttcttgcatcaacagcatgtgctggaattgttggtctcacatggcaatggatcactgcgagccactccac

SEQ ID NO: 29216 - DNA, 406 bp, Glycine max
  unsure at all n locations
agctttagacatctttatttgatttctttgttcatctgagtatttttgtgtagcttcatcaaggtaaagggggtctttccactttttgaaccctgatcttattatctttggaagctagacttcattgcatgttgtgttgatgttccaaattcgtagctactgccttggttggatctaagtgatatgaggttttttattgaaattttaaggttaaaaatgtgttcattgagtgtcaaaacttatggttagccttaaatttcacctggatcaaagttttctagcaaaagttatgaacaaaacaagtttaaggatatttttataagattaaatctgtcacaaaattaactggtttaatggttgtatcattatttttcttaaagatttgactntaaatatgagtttgata

SEQ ID NO: 29217 - DNA, 469 bp, Glycine max
  unsure at all n locations
cactcacgcttctgtggttatggaataatcaattatcaaatgtggtaatcgattattntaacacacttagattttctaataaagtttccaaacaaaatctaattgattactaaatgtagtaatggattatctcgagccataaagtcttcattctactgaaacatacatatgtaatcaattattgaaactggcaattgattaattcggctattcttgccacatttcaagtagaagggagctatgctgcttattctaacactntgtaattgagtattaaactctgtaatcgactacattatattgaactcactgcttctaagaaactttgagatcaattcattaatctcccatgtttgatttctactaagcatggatataagaaaactaagactaaatcatccatcatgcctagtctaagaacatnccatacaaacaccacatcttttaaaacttggctgacattgtaaaa

SEQ ID NO: 29218 - DNA, 270 bp, Glycine max
  unsure at all n locations
agctagtccactgatactcgggatccttagaggaccgccgtttcagcttttgaaagacagcgaaaccgctcagaggagcatgattgccctgacttcatacaaaaagcagctgatctggccgtgacttcaacatgctacacaactatgtcatcattgcactcccatgccactccaccatcgtgacgagcgatattgatataacatacgtctgggtcataacgaaaggcttttattacaaaaaaatacattcccctacttanggatgggctt

SEQ ID NO: 29219 - DNA, 288 bp, Glycine max
cgtattcaagcttgtcacccatttcgcccaggcgagcaaggatgcttcctccagaaacaacagccttctgaaggaatcttctggacggcccacgtgggcctggacgctatttgcaccctcctttatactaaatgcacccccttctatttttttgtaattctttatccgatacgctacgaaactttacgaattgcatagcgatacttattctacttccgcaccgttacgaatccttacggaatatgtatatactcttatgtacctctctaacgatgtacagaaactcac

SEQ ID NO: 29220 - DNA, 379 bp, Glycine max
  unsure at all n locations
ntntacagtactgaaatttaaatgctgaaattttaagaactgaattataatttctgaaatttaaatgacataaatcataaaataacttanaataaactaaagtgttcaaaatgcaaaaatttaaacgtcttgctcctcctgtggctggtctttattaagatccagtgctggagctgctgatgaatcctggataagctgctctggctccgcaactggtgtagatggctangtctcctcangagcatgtgcagaggatggctgggtctcctcaagagcaggtgcagaggatggctccggtatctgatctgtgggggtacccttcttctgaggcatgtgtgtatatgcatcaaaataaaagggctcgggagggatgagctca

SEQ ID NO: 29221 - DNA, 391 bp, Glycine max
  unsure at all n locations
agctttgaatggangctctggtctcttgttgaaactgcatgttttgcatagtcatttgcctcacaagttcttcaagggaaggttgcgaaggagcctcaactgtttgctgtttctggggctgttgctgttgttgttgctggattggtggaggaatgtatggtctgcttggggcaatagcattttgaaaataagattgttgttgctgctgtttgggatgattcctccacccgagattgtacctgttgttggagaggtcataattgttctgttgtggctgattttgctgctgaggttgaggaggtctattgtagatgtttgcagcataagcttcaagctgttcaattgcttcagattgttgcacagaagggcaaaggtctgtgtggtggtctgc

SEQ ID NO: 29222 - DNA, 449 bp, Glycine max
  unsure at all n locations
tctaaactntgtacaagaatgaagctctgataccacttgtctctgttatcttaagaagggggggggggttgaattaagatattccaaactgtttcccctaattaaaaatctatttcactttttactcaagttatgaattcccaatgacaatcttcttaaatattaattcaaatgaaacaatttgaatatgaatataaagcaataataaataaaggagattaagggaagagaaaatgcaaactcagttttatactgattcggccacacccttgtgcctacgtccagtccccaagcaacccgcttgagagttccactatcttgtaaattccttttacaatttctaaacacacaaggacaatccttcctttgtgtttagagatcctttacaacaagagactcacagtctcttaatcccttanagaatgagaagaagaagaagaacaaatctc

SEQ ID NO: 29223 - DNA, 399 bp, Glycine max
  unsure at all n locations
cttgcactttttgtttccttgaggcttttggttgaatttcgagcgagaattgtccctaaaagaatcttctttagtgatgtgatagttctggaaactaatggaggaaagcatcaatagaggggaatatcaacctaatttggctaaacagtcttctttgagattaggtggcagttttaaatcaacattgtctggaagatcaaatcctcgaaattccccttcattccggcggcttaattctgtgcgaacgccaagaaaagaaggaaggatcagcgtaggcggtgcactgtggtttcggagcaatcatttacttttgtggctgcttctaatcaccctctgggcttatcttggatcttntgttcagtccaggtgggctcatagtgataagaaggaagaatttct

SEQ ID NO: 29224 - DNA, 459 bp, Glycine max
actaagcttgccgacgtgtgccaatatgcatcttgccaaactagtcaattcctaatacttaaaaaaaattaagaatatcacctttttgcgcttcttatttagcaccttccaaaagacatgcacatccaagatatataattttcatattaattaatgtatttttcaagcattcgttcatatcatgttccgtgtctttatgtattttgtttttagtacttttagcatgtcgtgttgtgcctaactccaatttgagaatataacaaacagtacttttaacctatatgctgcaggatgatcaacttgcactccacaatccacacctaagtttagtactgtagttaattaatgaatgcagcactataaatgcacccatcagcaagtaaaaactaattaaattaaacttaagatagtaaaataacaaagtcttatctcactaaataaagtaagtgttgatgcctc

SEQ ID NO: 29225 - DNA, 399 bp, Glycine max
  unsure at all n locations
agctttttacactgacaattatagaaaaattatgcttctgggttaggtaaaactacatgtaaaagttaataagaagtcagcctgtagcgtcaatgaattagtttcatgtaatgcatataattacataaaattaaaataaaacataaatcttagcagttgtctcaaactgatggatttttgttttgttcatgacatggctcgtaacaaagctagatgaaatcatgaagccaacaaatgagcttcacttataaccagaacttaatggcaagggcatttgaaataggacagaaccaggcaaatacaaaacgtgtaatgggaacttagtgagtactacttgtacctaacattttttatatatattaataggatntttcttatgcagctntaaacacttaatta

SEQ ID NO: 29226 - DNA, 424 bp, Glycine max
  unsure at all n locations
ttcttcctctagcttcccaaggaagctaccttccttgcttctcattgaagattcccatgtgctaggctataaatagaaacatgtgtaacacttgtcataactttaatgaatgagaaacacgtgagacacacttcaaagttcaacttctctccctaatctccttcaattcccatccccctctctctctctcattctcttcctccattgaagcttcctttctaagcttcttatccaaggcattctcttggtggtgaatgatgcaatcctacccccccaagggcattgtatagaggactccaagaagattgagctagagatacaagagaaggccataaggttctcatgagccttanggtagacttcgggcccatgggctacgtatgagtccacttatctttatacatattagattaaggtttcatta

SEQ ID NO: 29227 - DNA, 391 bp, Glycine max
  unsure at all n locations
atttangattatggggaacccgtcacatgtgtgactacgtgacggcctggcgatggtgcaagtcgactatccacatgcgcgaatcacgcatgaattcaccatccccagatgccaaccttcaactgaactcacgtactcctacgtagcccttatcctctatactctcaacaccgggtccccataaatccattcaagcttccataacattcgagcaatatcgaaatccagacatcatgaactatcagagccaagcaagacacggcataggcagaatactctgaccaaaacacagaccgataccacagcttttcttagtcatagaccccagtgacattctcttcattccaatacggtcgacgctggatcgactcagaaattatactggaagtcn

SEQ ID NO: 29228 - DNA, 302 bp, Glycine max
  unsure at all n locations
tcttatccaaggctcatctcggtggtgaagctccttcttccatgtcttattccatagtggatggcgcctnctctcacctcttctnctttgtcttccactgcatctccatggtggaaaatcaccattaaaggacctcattgaagctcaaagatccaacctccatagaagccccacaagcaaacttccatcatattcctccacccgggattgtatctattgctggagaggtcataattgttctggtggtggattttgctgctgagtttgaggaggtctattgtagatgtttgcagcataagctt

SEQ ID NO: 29229 - DNA, 392 bp, Glycine max
  unsure at all n locations
tttagcttttagaatggctagacataatacatggcggagtttggtttggttcaaggataaaagggatgccccacattatttccatgacacaaatgcaaaaatgatgatttggaaactttatgcaaaactggtcttgcatgcacctatgtggacactcaagtgtcaaatttttatggtcatgtgatgctagggctcacgattcatttcctctattttaaatcaacccaatgtttccaaaatatgttcttttatcaatttgtgtattcatccgagtccactttgggtacttgggaaaatttcacagcattcacccttcaggtgtacacacantgtttttccaaaaactagctatgatcagcgaattctttttcaaagaagagttggaagtcatc

SEQ ID NO: 29230 - DNA, 420 bp, Glycine max
  unsure at all n locations
tgtgtcgatcccacatattggagcattctcgcanaatatacttactctaactgggtctccctatgagtntacttagtgagagtgacttgacttacccattgtgaggcatgtcttgtcatgtactcctaagcgctaaacaaggtttttcaatgaaaatggtaccacattgcatgtaggcttgagtctagtgcatctatttcataactcttgtgtttgaatttcattgagttaatgattgaggttttggtgttaatttttggagtgtgtgaacttgaataagtgtgaataatgtgtgtgattttgtgaagtgatgttgtctgtgtacattcagctctaagtattatattctttacatgctctagtgttttattatatacgaatgtgataactcattcccggtgtctgtctgtgtttgggcta

SEQ ID NO: 29231 - DNA, 359 bp, Glycine max
agcttttaagcattgtcatacatgtaggattattgggatattatatttatctgctcaaatgagagcattcaacttcaggtcggggcgaagccagggtgtgattagggaatgccatggccacctccaaaatttaaaacttttttttatataaaactatattatgtttgtatcatcgtatatttgtttgatgttaatgtactatttttacttcctcatagtgatatcttgtacattattgtagtaaagctaataccttctaaagtgttacaaatttgactaacttctctttctctaccatatagtcttttggatgcaaatgatccttagtgaggttattgggaagatgtggtaaatctcta

SEQ ID NO: 29232 - DNA, 466 bp, Glycine max
  unsure at all n locations
tacaattaatatagaacctatatcctaatgtcacatcctattagagcgtngngttccctgttttctctagcatgaggttcttcatagtcatccacctattcatctgctcccccgaacacaagttcaagatcatcacaggatccagacacaacaacacacagggagtgagttatcacattcctagctaatagagaaacaagacagttaaatatacatattatataaatgagataccacttgcttaaacatagctcacgtaacttcaccacttcgtcattcaaaattcacttttcaattatcaatcacattacacaagaatcccacacttcgatcaagatataataacacatcaattagcaagcatatgcaatagttatgctaagacttaatcctatatgcaatgtggtaccatgtcagtgaaaaaccaccctggggcgcttaggagtacataacaagacacaccaca

SEQ ID NO: 29233 - DNA, 385 bp, Glycine max
agcttgtattgggtcttgatcggatttagcaaaaattgctcacgtttaattcggattcaaaattttaagttgaagtcctacattttagtttgggccaaccaacctagctagctaaacccattttgccacctcttatttgaccaaactattttagacgtggtaacaaatagtaagtcggcatggcaatgtatgatttattacctcatgatttatatataaatagataaactaaaatggttacgttttatgtgaatgttttttcttatttttcaatagaatcttctccatctgagtatcctcagcatagtctcgcttggtgtcaattctttaacacaagtgaacataacgaatataataaactcttgtagactgtgatacaatcaat

SEQ ID NO: 29234 - DNA, 436 bp, Glycine max
  unsure at all n locations
taacacatggagganntttcaatttgtggaagcatgctactgagttcttgcctgcattggtatttaggtcttttgagtttcctttaactgagactgaatgagtgaatgtacatgtttaatagatttgaaaaagaaaaaatgaaaatttcctaaattttaaatactttttattagtatattgtaggacatgactcaagcaacctctactcangacagcaaaggatcttcatggatttgagtggaagtttaagcgtgcatacacatacatatatgggtaaattggttttgatatgagcagtaaattttagttgcttgttcaaattctgaatgaatgaatgaatattgtgattngcatcanatgaagaatgctagagacatagtactcatatctgctttattactggtgaattttcttatccctttcattaatgtgata

SEQ ID NO: 29235 - DNA, 405 bp, Glycine max
agctttttggaaatcttgatgccttagtcaacctagtaactcagcttgccataaataaaaaatctgcatctgcatctattactgttgcaagagtctgtggtctatgttcttttgttgatcaccatacagatctctgtccttctttgcagcaatttggagtcaatgagcaacctgaagcctatgctgcaaacatttataatagatcccctcagcagcaaaaccaacaatagtagaataattatgatctttcaagcaacagatacaatctatgttggaggaatcatccaaatctgagatgggcaaatcctccacagcaacaacagcctgtccctcccttccagaatactactggtccaagcaggccatatgttcctcctccaatgcagcagcaacaacaaagacaac

SEQ ID NO: 29236 - DNA, 459 bp, Glycine max
  unsure at all n locations
gctgctttntgcaattctaagacactagagagcttncaagtatatgacttgtcccacgttgatcttttctatctaatatgcatcctgcaaaatcagaatatgaaaaacctgtcatgtttaaggaagtacctttaggataccacataagcaaacacttaccatgatatccaatctacttgcaattaagcaaagaagtgattcaatcatacctttgtatcttgaatgatgcactaatttacctttctcatcaaaggcaaggtatgttgatgtagacatangagcatatgcttctttgcatttcttcataccaaatttctttatcggntttatgcaatatctggtttgactgaagaaagttccatgtttcaatcgcttgactctgagtcctataaagaaatctaattctcccatcatagacttctcaaagtctttcagcatacaacatgaccattccttgca

SEQ ID NO: 29237 - DNA, 408 bp, Glycine max
agcttttctctgcttttgaatggggaatgtcctgaatataaatctgttcatagggaaaggaaataaccataagaaacttgactatttcaagtaaataatcaatatcatattcaatgtagtataaaatacaaaatgagagaaaaaaaaatcattctcatacacacctattcaaaacacaacagaatatagagtttggcataacattgttatatacatataaacaagattccaacctatattagtatcaagtatggaataagcctagtcaatttcaatggcaattatgggacgcaaatcattgtagttaacacagcttccaaaatcaggtacaagaagctcagtttttataaagaaattgaagaggttagtaaataactcgagaaacctcctttcaactatgctagacaa

SEQ ID NO: 29238 - DNA, 464 bp, Glycine max
  unsure at all n locations
gcttgctntanagctaattacaagaagagaaggtgcatggcatcactcttagcttgatattgtggttattgccatgaatttgcgggtgaacaaaagatatggctagttgtatatggatctagaaattagaaaaaccatataaaataggttatgaaaggactctagtagctatcttaggattatattttgaaataggaaactaatttgactgcacagctcatgttatttcgtgtgacttcagtcggagtacaatgttaatgagttcttttggcctgttatcttttattaatattgcccggtgtttcttggtacaacaatggtcggccttacggtttccgtgatttaaaagaggatagccgtccatgatccatgatccatgatgaagcatttattttaaagaagggtgcagtgtggtaaggtgaaagatagatggaaattttatacactaatatattaacacacca

SEQ ID NO: 29239 - DNA, 409 bp, Glycine max
agctttatgacaagtctatacgtggtatcttccttgggtatagcaatatctctaagggctatcgtgtctacaacttgcaaactaagaaactcgtcatcagtagagatgttgaagttgatgagtacgcttcttggaattgggatgaagaaaaagtggagaagaacgttcttatacccgctcaactacctcaagaagaagctgaggaagaagacccaggtgaaccaccttcacctccaccacaacaacaagatcaagaactatcatcaccagagtctactccaagacgaggtatcttcctttggtggacatatatgaaacctgtaacttggccatacttgaacttggaagctttgaggaagcgtcaaagtaggaagtatgggtcaaggcaatggaagaagagatacaaatg

SEQ ID NO: 29240 - DNA, 457 bp, Glycine max
  unsure at all n locations
tctcatagactntctgagatgtttagggatgcccgaaatgaaaattaaaggccatattggattggagatcgtgtctggaatgatctgttatcacattggcatgcacctgaatatcgttccaagtgtgcacatgccaaaataaatcgagcatcttaaaagggtaggtgtatgcacacaggtgattctatcagcttgcaggatcatgccatttgcttggtatgtacattagcaatataatacatagttgtttatacttgtttaacttaccacttaatgtttattttttaatgtttgttaatagttagaggaacttggtcgatctgtatatgtagatgaggtctttcagcacagtcatttacgaaaggatactggtcaatttgtcgatgatagatctaaacggacacatgtgagaccattatcttgcatatgttttctattcttttanatgtttattata

SEQ ID NO: 29241 - DNA, 399 bp, Glycine max
agctgtgaaaagtgttgttattcaccttctcgctaagccaatctgtcgtgctatacatctttttcattcctttctccctttcccgaagagaattcgccgaggactaaccgcctgaattctttttgtgtctctcttctcccttttccaaaagaacgaaggactaaccgcctgaattgtgttgtgtctcccttctcccttttcaaagaattcagaatgacacagcctgagaattcttttgattcttccctttcccatgaaccaaagatttcaaagaactaaccgcttgacatatcttttgtttccacttcacaaagtttaaaggactaagtgcctgagaactttgtcttaacacataggaggatacatcctgtgtggtataaggagagggtacatctactt

SEQ ID NO: 29242 - DNA, 250 bp, Glycine max
ttatacaatcaacatacaacctatctcctaatgtcacaaccaatcttattgaactgtttaaatctagcaagagcgggcagatgctgataactatgcacctatcactaacgtatacccgagcacttgttactgatcatcaccagatacattctcttcgttccacatggagagacgtaggatatacttagatattatagaggaggtacctagtacactagtctacatattgaccgtagagatctggtttgaa

SEQ ID NO: 29243 - DNA, 341 bp, Glycine max
  unsure at all n locations
agctttttagtcttatctgatgaagatgaattcgtggctacttcatgcactcctttaatgacaatagcatcacttctggcactaaattactggtagtttgaagccatcttctcaattaaatttctggcttcagcaggagtcatgtctccaagggctccaccactggcagcatctatcatacttctctccatgttactgagtccttcattaaaatattggagaagaggctgctcagaaatctggcggtgaggacaactggcacataagttcttaaatatctcccagtattcatataagctctctccactgagtngcctaattcctgaaatatcatttttgat

SEQ ID NO: 29244 - DNA, 457 bp, Glycine max
  unsure at all n locations
tgtaggattatggngtacccatcacatgtggttcttgtggcggtcgggcgatggtgcaaaacaagttctccacatccacaaatcatgtacaacccaccatcccctgttgcccacctccaactgagctcacgtactcccacgtagcccttatcctcgttcctctcaacgccgagtccccatcaatcctcccaagcttccacaacatccaagtaattccacatccaatcatcatggactaacaaaatcaagcaaaacagggcaaaggcaaaaaactctgcccaaaatacaactcanattcacagcttttcacatgcaaataccccagtaacatttccttcgttccgattcgttaaccgttggatcgaactcgaaaatttaccggaagtctctagtacataagtctacattntgaccgttgggatctgctagcanatgtccagaacctcatatgtactac

SEQ ID NO: 29245 - DNA, 390 bp, Glycine max
  unsure at all n locations
agcttttcangaatcactcatttcccatgcatcatcttttttaaccaaccattgctctttgccctcatcagcgctcaggatgttacacatgatgccactttcatacatggtcatgataggattactagataagaaaataacaaatgacttttcttgtaaaattcattctcagtcttttatatttttttattagattgaaaaacattagatttatcataaatttttagaaaagttacgttgttggaatgtaacaacgtctgtggcgttaacgtttctcttgcgacggaatgagatgacagccatgagacaactttcatacatggtcatagcaagaaggatcagtaaatataaaggaactttcttatagtaattcctaatcttctacataat

SEQ ID NO: 29246 - DNA, 375 bp, Glycine max
  unsure at all n locations
attcatataatatagtttctcgaatttcttgctgatgttgtatatgatcaaataagaggttatcatgcacggatatcccatatggctaacgcatgatatatgataataagtgacgatattattgttgctctaagatccaagtatagtaagagccttgctagattgaccagccacgtattgagaagccttgcacgcctttatgaggatgcattataacggtataggtcgacatcgaacttgtcgatgatcgtgactgttatccatatgctcgatacccatacaagcaagcccaagaggagtacggccgtgaaacaaagcatatattangcatgatactatactaagcagccttcctttgctcgactatatatgagt

SEQ ID NO: 29247 - DNA, 394 bp, Glycine max
  unsure at all n locations
agcttttcccccaattttctataaatagggggagaagtgaagtagaaaagggttcagccccttaggcacttctctctctttcgaatttgctgaggaaaattagttccgtgaagaaaatccaagccgaggcgcttccgtaacgtttccgtgagtgatttcgcgaaggttttcgaccgttcttcgacgttcttcattcgttcttcattcttcaacgggtaagtacctcataccaagctttttaattcattctatgtacccgtggtggtccaccttttgtttcatgtatttatattctcattttcatttactttttatacccccttttgacgtgcttaagccatntatntaagtcatttctcgcttaatctaaanataaaataaatctccaccgatc

SEQ ID NO: 29248 - DNA, 403 bp, Glycine max
  unsure at all n locations
ctcagcttgagctaaatccgactcaccataaccttgcccaggtgatatgtaatccttaccctcggaagcaaagaagaatagaagggaaatttccaatcaaaaaaaaaaaaaaagagacggaaaattcccaatgaatgagaacaaagaaatgataggaatttcccattcaaagagtgggagaaagccaaaggataagaaggaacattcccaaccaaagaatgggaaaagtaaaaacgaaaagaataaagctcccggtcaaagaaactagaggaaatgtgcagaaaggtcttttgaccagacaatatctgaacaatacacaattgtcaccatatgaacataataggagggaacggaacccacgacctanaatggtctcctgcctttaattaccaaccaaaattcc

SEQ ID NO: 29249 - DNA, 396 bp, Glycine max
agctattgagaggtgctaataccttcctcaaacgtaaatacaactcccgaacttagaattttcattttgaccggtttcctttggttttcccgacgttttccacaaataaacattggtggcgactccgcgcatctttcctcctttggaaagcgcacccgtgagcctcgcctcgatcgcccgcaaaagggcacattgcgacaaggtccaatgccttaatgtttctctcttctcataaccaagagatcgttaaagatccagtcccttaaatgtttctctccttttaaaaaacaagagatcgttaaaggtccaacgccttaatgtttctctcctcccaaaaaagagatcgttaacggtccaatgccttaacatttctctcctttcaaaaatcaagacatc

SEQ ID NO: 29250 - DNA, 440 bp, Glycine max
  unsure at all n locations
tagctacacatacctctctaatagctaagctcatctncgtgagattagaagctagagcttagctacacaccccctataatagctaagctcacccccatgagaaaaaacatganaataacaaaaaaagtccttattacaaagacaactcagaatgccccgaaatacaaggctaaaaccctatactactagaatggccaaaatacacggcctagacgaagganaaacctattctaatatttacaaagataagcgggctcatacttagcccatgggctcgaaatctaccctaaggctcatgagaaccctagggcctttccttggatctctagcccaatctacttggagtcttctagccaatgcccttgcggggtaggattgcatcacgagttgcttcaaggatttccttggtcttgtctttggatgcctgttccaagtctatg

SEQ ID NO: 29251 - DNA, 263 bp, Glycine max
ctataaatagggggagaagtgaagtgaaaaagggttcagccccttacgcacttctctctctatcgaatttgcttggaaacatcgtctccgtgaagaaaatgtatgccgaggcgcttacgatacgttggcgtaacgttttcgtaaagaatatcgcgaaagtctcgatcattcttcgactctcttcatcgttcttcggacttcgacgggtaagaacctcgaaccaagcttatcgattcattctatgtacccgtggcgcgccacat

SEQ ID NO: 29252 - DNA, 485 bp, Glycine max
  unsure at all n locations
ncggccgggcttacccatgttaatgatncnctgcatnacggacctatgaaactaagcttgccgcagctcgccagacgacattgttgcttctttcaatattaaaccttttggaggaagggcctagaacgcccaagtgggccagcattgctatttggcaccccttttttactaaatgcacaccttctattattttggtaattctttttccgtaacgttacgaaactttatgaactttgtaacgatacttatttacctttcctaaagttacgaatcttttccgattatgcatttactcttttttcacctttcgaaaagataccggaacccacagattgcgcaaaaacatctcttttcaattccgccacttaccgaattcacggatcgcacagccttgttcttttgattaccagatgttctggactcattattgtgcacaaaggtcctaacccatcaacctgntgccatcgttcatgcatcagtatact

SEQ ID NO: 29253 - DNA, 390 bp, Glycine max
  unsure at all n locations
agcttttcttcaaggcattgttagaaagatctagagttttaagcctagaaaggtttcctatttcatttgggatagctccactaaactagttatgactaagagaaatgtctgtgagttcactgaagccacccatgtggaagcaatgccttccaaggttattttgatgatgccaaagaatcaagagttaagcaaattccaaagattcaagaatgaatttttcaagaatcaagtttcaagaatcaagattcaagaataatcaagatcaagattcaagattcaagatttaagaatcaattaagataagtattaaaaaagtttttcaaaacattgagtagcacatgaagttttcacanaatcttttaccaaggagttttactctctggtaatcga

SEQ ID NO: 29254 - DNA, 437 bp, Glycine max
  unsure at all n locations
tccatcaagtggtaatcagagcacaagagcttcaagtaggtgtttcttaaacctccattaattntttgatttaccttctcttccattgntgnttcttcattttttttctccatgtatctcctcacatgtcttgtgctaaatgtttttaacatgattctttagagtttccaccgattaaacttgctatagaagctagatttgattttctatggttcaaatttgttgttcttgttcttgaaccataaattgtgttgagtttaggttcctttgagttntgtcttgttattttttttggctgaaacctaaaccataaaattcttacaaaaatattaaagtagaagaaaacctcaaaaatctagagtgacttgttcacctattgtagttntgtcatagaagtcatgtctagtcatgaaacttgtcacataagatttcttatg

SEQ ID NO: 29255 - DNA, 388 bp, Glycine max
  unsure at all n locations
agctattctttccctttagactttttctagcaagnagatgtaacatagttaaaaaaaggctaattaattaacaatgctgaaatgttttgtagcatagctgattaatatatggccctaaaacttgcgtttttggatttaaagccatcatcaaagaacttgctggctacttaaactagattgaaaatttagacacatatagctgtcctaaaacttgtattgcataatttgaaaaggatattacatatttacatcatattcctatgtgtattatgtaatggttagtttgtaccttcttttgcaggggaaagattacgagtctggcttgctctcttcccaactgtttatttgtcagcaggaactgcaacagctttgattcttataggagggg

SEQ ID NO: 29256 - DNA, 441 bp, Glycine max
  unsure at all n locations
tgaggatggtgtngcggagatgcgggatcaatatacggataaagttatgcnctctttttactataagngcatggcatatttatgttgctaaccaattatgtgacagactggtatttgaacctcctgtaattctctgaatggatgggtatcacctgtacatgggttcatatggttcactgatgaaatggattcattcaactctacttaatttaaaataaataaatagaactcattgataaacattgttatataataatattntatcactcaaagaagataatcaattctcatcataatcatttttatcaaaaataatataatcctctgaattaattatcacaatacgatagattttgaaaaacatcataataatgaataacctctattttaaaagacaatataatatatagtgatctcaaaacacaaattttctctttcagt

SEQ ID NO: 29257 - DNA, 409 bp, Glycine max
  unsure at all n locations
agcttttaagcagagtctatggtataaatcacattcacaagtaacatgggaaaggcaatatttggagcaaataaaccaaaatccactacttttccttgatatgactattattattaggctgtaggttgaatgatttgaaagctagactatcatcggtgatgccctgtcttttacacatcaagacaagaatttattatagcactagccaagctataaaaagaatgctatgatgccagataggcaattcaagggaatcttttgattacattcaagtgcatacaaaatggtacactgtagatccagatgatgcattattaatagttacatttctcacccagcttccacaaactcagcactcttacagannatgatatntangaatcctaaagttcatcactatgcttttttt

SEQ ID NO: 29258 - DNA, 452 bp, Glycine max
  unsure at all n locations
tagcatgaataagacaaaagactcaagacttgcttttttagtttgaatgattttgtgatggtgtcngnntnntagcgctagcaatcgtctttgcagcagtggatcgtgaatgaagattctcttgtttctttagagattncagcaatgaaattcaactctgaaggtggtgagtatatattaaatatggcagcaagttgtttaatttgcaacttttgcggcttctgtattctaataattttctttgagtctgcagatcatatatatgtttttggtgtaacgcaactgtcctagatttcaccgtctcttgcttgtaaagtcatcgatcaacacttgtttctcaccaatctctgcatataactcaattccttgaatcttctgcaagagaggtaagcttacgtttgctcatttcctatttgcatggatatgttcagtccaaaatccaaatcaatggt

SEQ ID NO: 29259 - DNA, 399 bp, Glycine max
  unsure at all n locations
agcttttaagctctgtttcgcctcttcacaatatgagggccttacgggttctcttttcaaactcatgcagaaaggaatagtaagccaatacctgtcagagttcgaggaactcatgaatcgcgtcattgggcttcctccatcctttctcctaagttgttttgtctccggtctctctcccgacatccgccgtgaagttcaaatccaccaaccgttgacagtggcccaggtttctggtcttgcgcgcctgcaggaggagaaactcctggatcatcggccaccaccaccgcgaccacaaccaccaccctcaaccataccaccccctcacaatccttccttgccaccactattaccctccccaccccggccccctccacaacaaccacccncaacactaaagcg

SEQ ID NO: 29260 - DNA, 398 bp, Glycine max
  unsure at all n locations
agcttgatgataaagtcatgccacatattctaattggttatcactcaactaaaggctacaagttgtatgatccaagaagtcgtcaagtgtccattagcagggatgttatctatgatgaaaatggaagctggaattggaattcaacctctagtgaaagtcagtccaggatactgttagaagaagaaacaccttcaactgcaccaactgttaacaaagttcctggcataagaagatcatcaaggagaagtcaactgccattacctttgagggactatgagttgtttcaagattcataagtcaacttagagggagaattggttcattntgcactcatagtagaagttgaacctattgaatttgacaaagtagtgactaatgagatgcggctgaaagctatg

SEQ ID NO: 29261 - DNA, 462 bp, Glycine max
gcttgaaggtgtgtagcccaccatcttttcatagtagaatactggtaatgtgtctactattattgttattattgttttctccgtcattgaggtgccacttgagctgccaagtctctccacctttgggcgtattcttttgaaagattcgtgccccccttttgcacatgttctgtagttgcatcctatctgaagacattatactgacactgcctaacgaaggcaaccactaggtccttccaagaatggactcgggaaggttccaagttagtgtaccaggtaacagctaccccagtaagactttcttggaaggaatgtataagcaattcctcatcttttgcgtatgcctccatcttctgataatacatctttagatggttcttggggcaagtagtccacttgtacttgtcaaagtccagcaccttgaatttgggaggggtgatgatattgggtactacgaacaac

SEQ ID NO: 29262 - DNA, 399 bp, Glycine max
agcttctgtattccttttcgattttctcgatatattacgggactcaatcagacatccgagtaaaaagttattgtcgtttgaatttgctcagagcttcgataatcaattccgagcatctcgatatattacgggactcagtcagacaaccgagtgaaaagttattgtcgtttgaatttgctcagagcttgggtattcaatttccagcgtctcgacatattacggtactcaatcagacatctgagtaaaaacttaatgtcgttttagttttcttagagcttcggtatttaatttcgagcctctcgatatattataggactccatcagacatttgagtaaaaaagttattgtcatttgaatttgctcagagcttcaacattaaatttcgagtgttccgatata

SEQ ID NO: 29263 - DNA, 440 bp, Glycine max
  unsure at all n locations
ntgagcaaattcgaacgacaataactntntactcggatgtctgattgagtcccgtaatatatctagacgctcgaactggaataccgaagctctgagataattcaaacgacaataactttttactctgatgtctgattcagtcccgtaatatatcgaaacgctcgatattgaatgttgaagctctgagcaacttcaaactacagtaactttttactcggatgtctgattcagtcccgtaatatatcgaaacgctcgatattgaatgttgaagctctgagcaaattcaaacgacaataactttttactcggatgtctgattgagtcccgtaatatatcgagacgctcgaactggaataccgaagctctgagcaaattcaaacgacaataactctttactctgatgtctgattcagctccgtaatatatcgaaacgctcgata

SEQ ID NO: 29264 - DNA, 360 bp, Glycine max
  unsure at all n locations
cgttgcacgcttgtgactcttgtcaatctctttaaaactagtcacttaaaaagctgtgacttttgaaaaaatcttcagaaacaagtcacttgtagaattatgacttttggaaatgtatttttcaaaatcagtcactggtaatcgattacacatcaacagatgtgactcttcattttgaattttgaaaattaaaacgttgagaagctctggtaatcgattacacaagtttaaaatactttaaaactgtttaaacataagttataactcttgaaatttgaaatcttaacgttntagaacactggtaatcgattactaccttctggtaatcgattaccagagagtaaaactctttggtaatga

SEQ ID NO: 29265 - DNA, 405 bp, Glycine max
  unsure at all n locations
tcagacgatacgcaaccttgcccatcctctccatcaccgcgaatgttccatagtacctctttgccaactttgagtatgatgtctcaaaagctgaggtttgacgatgaggtcgaagtttgaccaacacccagtccccgatgttaaactcttgaggtcgtctttgtgcgtctgctgtctacttcatcttctgctgtgccctgagcagtttccgactgagcagcttcaaaacctcgtcgcgttggttgagcacctcatccaccgtgttgatagacgatgtcccccccaaatattccggaatagcaggtggtttccgaccgtagatgatcttgaacggngtgatccttgtgcctgagtggcatgaagagttgtatgaccactcaacccataacaggaattgcccccacg

SEQ ID NO: 29266 - DNA, 441 bp, Glycine max
  unsure at all n locations
tgcacgcttttatatgngtttctgagcgcacaccatggaattcccgtgattcgtaggcgtgtgtggtttttcggaacctattcttggttcagtataattcatggaaagaaaattaaaataacattgggcttcaaaggccaaaggggttgattaagcttcgagcttcgcacaattggggagaaacaatgtattgctggaacatgtcatatatatattggatcaatgtcacatacagagaaagtcacttgggcactttgttaagacgagatctgcccttgttattaacattttcgatcagcagatctttccatctctttaanatcgagaaatacctgtataacacttttatctttaattntgatattaagctgaccactattctctttaactaaactatctaggtatggatatgttactccagatgatgtaccttctattttn

SEQ ID NO: 29267 - DNA, 435 bp, Glycine max
tctcctattaacatagtaacaacaaattacgccttgcctaaacttgatttctagaccaagttaattgaaatatacatgtgtgcatgtttgttaaatccctattcatcactttgtcaattgattaagctattacaatccaatgccttcaaaataaagacttagtacatgttatagggaagatggagttccttctttctttctttctttctttttttcttcttaaaggctggagttacttcttactgtgaaacataaatcaatataccagagacacgtttgagaatacctttatctaaccttgctttttattgcgttataattctcttaggttgtaacatattctatatgtcatttacttgtcaaacaacaaaccacctatgcatgtataagcaaaaccaaataatgctaataacttggccttaaatcatctttcat

SEQ ID NO: 29268 - DNA, 400 bp, Glycine max
  unsure at all n locations
agctttgacatcaacaatatggttgaaactggtccaacatgggcatcatcgttcttcgattcagttgctcagaggatgatgcagtacgcctcaccgacgaattgctattntgcatagattcaaaggcatctacatactcccagtaaaatggatcgcgctntgttgaccttgggttcctgctcatagctntctttggtgcccccttcgtgttaacctttgctggaggaggacacatcgaattctgatcagggtatgcaatttcccaaagtttagtcttcaaagtaaacttaccacaaacatcaagttcttcgaatcttttaaatattgtttccattacttccttgatgctcacctcgggctcagataacccttggtctgaanaacttagtctcctccagaa

SEQ ID NO: 29269 - DNA, 457 bp, Glycine max
  unsure at all n locations
ntcaccctataattccnccannattgggcaaatttgctttgaatttttttttcctttgatgaatgatgctctcctacaacctaagacaaggtagaaggagataaactgtacaggctcaaggttcaatcaaataatcatactttcagctcaaaatggatgcaagggataaatcaatcatgcacaaggtaagcgttttagctaagtggctatcttcaatcaaaacatggtcttcatcctcttcagactcaagtattcagtccatactcagagattcatgcaaaaaccattacttactactagtcgttctctcacaattaaagatcacactctcactgggttgcggctaatgcattccttcacaatcaacctgacaaaccaactaacattntcaatcataatcctaattccatgttctttctcttctaataactgcatgctcattcaaggcatatgatct

SEQ ID NO: 29270 - DNA, 398 bp, Glycine max
  unsure at all n locations
agctttttatntgttaaaccaaggtcataggctaatgtttcacaccttttctccatgcttcttgataagtcctatgtaaagcgcttccaggcaaaaccattagtaagaaaaggcaaaactattagtaagaaaagtctaacagacctaaagtctacttcttaaaagttcgttgtcattaagacatttctctcttaaagggttttgcttcaacaatgttactacttgaaaagaaacaatctaaaatttaaaaaaaaacaatatatatatatatatatatataataaactacatgttttcatatttatcatcaaatataataaattgaaaaatgtatgctaatatgcatctcttgaaatacaatctttataatatatttgttaatagatataaacatgtgc

SEQ ID NO: 29271 - DNA, 401 bp, Glycine max
  unsure at all n locations
tgctacaagtttagtagaaacatgctttctaaccaaaagaaaaatattgaatgtgaaggagttaatcagcacttttagttgtaccagttccctaagtatactctggttctagccagcaatatattttggtgctaaccagcatgtcctttggcttctaactgcctgacttaattagctccattcttttacgtatcaaaagaacctagctctgacacctagttagtgctggataatagaccataaatgctaccatgacatagccttacgacaaatgtatactattccaatttccaagttctaagacatattaaactctnttaacagttagtatagatagccctgattgtcatgttttcctttatatattgacttttatttcttatctaacttctattcgcagt

SEQ ID NO: 29272 - DNA, 410 bp, Glycine max
gcatgtgcacgctttcaagctattatcgaagttcaacattaaatttagaagtgtttacattattatttaaccaagtttaaattgagtttctattagttttaacacatatactgacttaattagtcttttatttatttatgtatttattttgctaactagaccttctcctataatgatttcgttttctgaaatactaataataatacattctttaatattccgtattttttttacccactctcttgttaaaagaaaatttgttcgggcttcattaaatatgagaatctcattattctatatgtatctgtggagtcttatttctaaaacggtggaattaattcacataaatttcaagagagttggtacattaaatgtaagggacgttgtggtgtgatttggctcgatattta

SEQ ID NO: 29273 - DNA, 383 bp, Glycine max
  unsure at all n locations
tgcttgtggagcttctatggaggctggatctttgagcttattgttgtcctttaatggtggttttccaccatggagatgcagcggaagacaaaggagaagaggggagaggaggcgtcatccactatggaataaaccatggaagaaggagcttcaccaccaagatgagccttggataagaagcttggaaggatgcttcaatggaggaaaagaaagagggagagaaagagagaggggggagcacgaaattgaatgaagaaaaagggagagaagttgaactttgagttgtgtctcacaagactcccattcatcanagttacaacaagtgttacacatgcttctatntatcagatangtagcttccttgagaagctttcttgagaaaa

SEQ ID NO: 29274 - DNA, 372 bp, Glycine max
  unsure at all n locations
tcaagcttttagccccaattntctataaatagggggagaagtgaagtgaaaaagggttcagccccttatgcacttctctctctttcgaatttgcttggaaaaattgtttccgtgaagaaaatctaagccgaggcgcttccgaaacgtttccgtaacgtttccgtaaggaatttcgcgaaggtttcgatcattcttcgactntcttcatcgttcttcggtcttcaacgggtaagtacctcgaaccaagcttttcgattcattctatgtacccgtggtggtccacattgtgtttcgtgtatttttattctcgtttcatttactttntataccccctttntgacgtgcttaagccatnntatttaagtcatttct

SEQ ID NO: 29275 - DNA, 400 bp, Glycine max
gaactataaaaaactaagcttgccgccagctcgcccacgcgagattgttgcttccttcttttctcaaccttttggaggaagggtctacaatgcccaagtgggccaaaattgctatctgcactcccctttttactaaatgcaccccttctatctttgtggtaattctttttccgtaccgtacgaaactttatgaattttcaacgatacttattcaccttcctcaacgttaccaatcttttcggattatgcatttactcttttttagctttcgaagacgttacggaaactcaccgattgcgcaaaaacatcttttattgacttccgccacattacggaatttcacggatcgcacaagcctgcttctctttgatttccgagatgtctcgtgacttcatttatt

SEQ ID NO: 29276 - DNA, 357 bp, Glycine max
agctttatgtgtcttaagtcatggtttcctttcttttttttttcttgtttgtgacaattttgtacgttattcagacattccctggtccaacaacctttttgtatattttgctttttctttcttccgatctttgatcgggaaattttctttttctttcgctttcctccaatttttgatcggggattctcgctttttctttgctttcctccaatctttgatggggaattttctcttttcttttgctttttgaagcacattcacaacttaacagtaaatgaaactcctttttttgggagatccttctgttctttcttcctagggcaagggtaaaaattcctatcatgggtcaaggtttat

SEQ ID NO: 29277 - DNA, 403 bp, Glycine max
agcttgtttaaaattttctaactattataggataaagtgtaaactaaccccagcttgagagatgtgtcagaattaccacagtctggaggaaattcagatgaactgcaggtaaatgactcgtatggttgcctttgttctcgtacgaagctctgtacataaaaatttctattacattatttacaccagttattgctaagtcataaagtatctctatcaggaagctcgtggaccagaaataaatgggcaagattttgaaaggcgtaaccacctgcttcaatttctggttctcttccataagtttggcttccttcacgagcaacattgccaaacatcattgcagaaaaaggttgtgtgaatatagatagatgaaaaattgcttatacgctgtattattataaacaac

SEQ ID NO: 29278 - DNA, 476 bp, Glycine max
  unsure at all n locations
cactcaagctnggaaagaacatctactgcaagcacggtggttgtgactntgtgtttagtaaaaaggataaatttggaagaaaaaatatttagaaaagttaaaactaattaacagttaaatgacagatgtcacaatttaattgggtgggtcactttcttggctaagcccttgtctgttatagcatttttcaaactaataaattgataaaaaaacatccttctacaaaactaattttattaaattgatgaaagaaaataatattattaatattagattcaaaactaaattaatatataatgtttgggtaattgagtcaaagtggatgacttacttccctgtttaaccatttgagttatttttgttatactaaactttntaacatgtgatgttacagaaaaacaaaaatcaaatcatacctccagtcattgccatgaaatagttgtcttgttttggtccttctaagctctctctctttc

SEQ ID NO: 29279 - DNA, 403 bp, Glycine max
  unsure at all n locations
agctttcttattcatttttcaagttacaagtgaactccccaagaagtgacatggcccacttgtggttttccaatctagcttacattctgcaaagttagaatatgaaaatccaattaaactcaaggaggtacctttggggtaccttaaaccaacattggttgtgcccttaaggtacttaataatccttttgacaacatttaaatggtattccttgggattttatttatatctttcacatatgcacacacttagcatgatgtcaagttggcttgtagtcaaatataggagataaccaatcatacctctatactttgactcatctaccgatttacctttttcatccaagtcaagataaatggatgttgccattggtattgtttcttccttacactnttccatattg

SEQ ID NO: 29280 - DNA, 318 bp, Glycine max
  unsure at all n locations
agcttctccgacagcccttggacccatttgctttttatgtangtggttcttttcttagctttggttttgttatgcactacattagggtacgttagtgtaacgttaggttagtggaaccttatggtagaagacggaaccttatggtagaagacgaaacctagggtagaagacgagaggatgccggaaaaaatggcgcaaaaggctgacgacggagtcttccggaagacccgttaggggttcttccggaagtaaccaaacgtcttccggaagaacacttctttcggaagactctcggataacctcttccgggaactttcc

SEQ ID NO: 29281 - DNA, 408 bp, Glycine max
  unsure at all n locations
agcttttcatcatatgttntaatctacaacatggccttttcccagtcaagggtagttgttgctcgagctaccatccgcatcaactctttcatgtgtgctcccggatacttcttcttccagttaccatacaaatgtttgatacacagacgatgttctacgttttcaccaagctctttgattacctcaaccaaaccctgaaaaaaaacagtgcacaaattaaatgaaaaaaatagtgcacaaattaaatgaaagccacagtttttatttaccttctgtaggtcaaaaatgaaagcccaacatccctcctaaataccatctaggtcagctatctacaaatcaacaaaccacttccaagatgaataattntcagattccactacaacataggcaaaaggaaacatttgattg

SEQ ID NO: 29282 - DNA, 434 bp, Glycine max
  unsure at all n locations
atatgcatgtgaatttngaagcattttcaagaatcaagccaaggctattgtgcaagccatcaatggggcaaaacacaccaaatgattatgatgatggatggctcaaattctcacaaaggtaaactcatcactttccaaatgaacttttaaaactatcatgacatgtagaagagaatcaagggattcaagtcacaaaatgtcaagactcttattttcaaaacaattacccatttcttgaacatatcctataattcaaagaaaaaaacatgcaaagttgtacatgcgcacaaaactgacccaaaatattaaactagaaatccgacganactaacaacattaacaaattaacacaactaacaaattaacangagactaacaaaactagcanaaccaaagaacactcctccncccccccgccatacttaaacaacaca

SEQ ID NO: 29283 - DNA, 391 bp, Glycine max
agctttgtctgattaacataaaaattggatttagaagttctaatcaaagttggctaaaaaagttattcggtgctgtgcttaaatattattgttcatgcatcttgggggtgcgacttacagagggtttggagagaaatatgctgcattgaaatacggaagagagaaatatggtgattaaaaatatatgagaaatagaatgaatttatatgtacttggtttgagagaaagagtgggtggatgcatgtatgctattttttatgtaggtgggaatttttccaaaaatcttaatcacgtatatatttgttattattaagataaggctttattgatattattaggataaaatattgacattatcaataaaggataacttacatgtcataatattttt

SEQ ID NO: 29284 - DNA, 438 bp, Glycine max
  unsure at all n locations
cgcctttaacgataaaaataacacaaattgatcttaaaattatattttatctttaaataaaacgattttcaattctatcaaattagtccaatagaaatatattaatatttaagtctaataaaaaattattgacattttcatccaataataataatttattaacattttttgtccaatagaacttactcatatctaagtcaaaacaatgagtgacatttccctcgaataagaaatatattgacatttccgtttaacaaaaattattgatatttacgtccaaaaatgatatcttattgatanttttgtccaatttaattagcatgatcacattgacaatcatttgaatgataaatctatccttttgtgtcatgtagaactatttattaatcacaacgaacaatagttaacgaccgactantattatcacacttcttatat

SEQ ID NO: 29285 - DNA, 285 bp, Glycine max
agctcagtaccccggtgagtactctagagatcctcctgcatgcatgcgcgcgttttctagcttttattcaacattctcacgagcagagtctgctgaccccaacttgagagatgcgtgtgaatatccacagtgtgcacagaaagccagaggaaccgccctgctatgtcttgttccgagcctttattctcgaactaaccttcgtacaaactaacctgcatttctttatctacgacacatgctgcttcgttactttacatctatcttaggtggcgagtggaccactat

SEQ ID NO: 29286 - DNA, 529 bp, Glycine max
  unsure at all n locations
ccccgcgcatgagctatgtgannccattgtannaccncgacacctagaaaactcacgcttgtaatcgtccgttccgaggaggttgcgcgttttgccccgtttgcagacagcggaggcgccagagagcgatattcatgatggccgctcctccattaagggataagattcatgtaacctatctacctacgacattattggtatccacaacatagaaagttttaaccattgattagacattttattctaaagcaactaaactttttctacaattcaaaatttatctacaatctccataatctcctcatcccaacacacttgcgattgtattcttaatctaaactattattattcgatcacacagtcaaactgtgatgttgaattacattactgactactcatatcgagagtacatatcaactaaattctttacctagcgtgagatgcatatgtgcatgctttaaatgttacctatcgtcattgtccggattaaatagtcaatcatatgctcacaaatctttataatagaacg

SEQ ID NO: 29287 - DNA, 395 bp, Glycine max
  unsure at all n locations
ctgcaagcttgtgtctagtttttctaaagcanagggttgttcattctgtgtgtatcaagagtactatccattccatatataatcacttcttgattaggggtttctttctaaatgaaggttacacggcaaaggaaaagtattgaattataactcccgaagaaataataatacaatacttctgacctttaattttaacacattcataattattacatttttagaacagttatttcataagtcaataatcatttatccttttggtatatctagattaaaaagaagaggtattatatagattttacacaatcattaatcactatatgataatttcaaagacttttaaagtatttatcttataataagttaaaggatgacttgtgactagatgataatat

SEQ ID NO: 29288 - DNA, 443 bp, Glycine max
  unsure at all n locations
tgagcacctcttccttcattgatgggttgagccttctctagggctgtttgacangtctatattcttcctccattattatcttgtgcatatagtaggcaggctgattccttttagatctaatatgtgccacccaattgcctccttctgtctcttgaggaactctatcaacctatttcttcttctgttgtaagcttactattgatcaccacaggcttggtcttgttctcttccaagaacatacttcaggtggttaggtaagatctttagctccaccttggtcttctcaggtggacttccgcttttcaattcttcaaaactggtcccccctgcaggcatattttcttcacaatctaagccttccaagcaagcccataaattcttcttctcttcactggttagacaatctacaacattggtcaaagctttctccagtaaagtttatg

SEQ ID NO: 29289 - DNA, 405 bp, Glycine max
  unsure at all n locations
tttcaagctttcttcgggccatttcctgcgaaggcaaacatttggaaagttagttttaccagtgggacactactaaaaaaaaatggcatacaacctcctcccataaatacaaacatcaatgtaaatttagagcaagcttatgcgcatatttccttacgaacgttcacttgcacaagacattctattaactaagaaaaatgcacccatatacaatcaaggcagcttcgttacctagattatttacatgtacttccaaggtgtatttgttacttacatcacacacatttccttggctaaatttacatacatgcatactcaaagcattntggggtaccaaaaattgcacatgtgcacatcttggtatttctaatacctgtacatgcacaaacttcatgatgaatcttg

SEQ ID NO: 29290 - DNA, 443 bp, Glycine max
  unsure at all n locations
tatacggcctangatgtggttttgtgactaaattcaatttagacacaagtcttgcacttgccacattgctacaactccctccatcattgatcatcatgcaaactttgccattgatcaaacatctagtgtggaaaatgttttctctttgactttcctccatagacttcaattgatggccaagtaatcatcaacaattctccctctggtgttttctccacttcctcctcctcatcctcactctcttctcccttttcaactttggactcactaatgtactctccgtctctaagaatcatggatttcttgatagggcactcatatgcataatgtcccaagccgtggcaccgaaagcacttgacatcccgacantttttntaggattgttcttggacatttggaggagttnttgatggtatangtgttgcattagaggtggcaacccc

SEQ ID NO: 29291 - DNA, 402 bp, Glycine max
agctttatatgcattgcataggattcggaatctagtttgataaagaataagagaaccccctatagccttgttccattcccagaccagcacttgaattttctctaatagctcaaaagatagttataaaggcaatacaaattctaataaactaagggacaaattttttttataaatcctttcaaaaagaagttaaccaattaagatctcacttaataagaaaaagtagggaagccaattgtgaagcaaagcaacaataaaagacaacaacatgagaagacaagaagcaaaattcagtcctatcaagcataccgctgcatgaactttgctcaaaatcaatataatggcacaaagggatgcaacaacatgagaagataagaagcaaaattcagtcctatcaagcat

SEQ ID NO: 29292 - DNA, 441 bp, Glycine max
  unsure at all n locations
tgctaagcccaattccacanattntcaaaacagataaggatttgctcttagcgaggcaaggcacgcttagcgcaactactctattgaacaacactggcttagcgagcaggctcgctaagcccaattcccaaaatttgaaaaatagagagataattgcgcttagtgtgatagggcatgcttagcgcacaacaaaacacaaaaatttctaagtgtctgagaacacattactcgcttagcgcacagacgcacttagcgagttcataagcaattgaactttcaaccagagaacatgaacgtgcttagagggacagagccacacttagcgagttcatctagaagtctagatgttcaacagaaacgatgaactcgcttagcgcagcatggtgcttagcgtgctcatcgcgatttccagaaaaagcaggggcttctcacccctccact

SEQ ID NO: 29293 - DNA, 350 bp, Glycine max
agctgtgatacgcaccttcacacgtctggaacacggtggcaagagtcagtacaacacaaataaaactatactcggggtgattgattggttcaattcaacatcctcaaagtgtgctaacttttaacaccttccaaaatgaaattttttatcactttcttaagatcaagatcatatatatttattaacgtcacttatttcttttttttattttatcaaacataattaattatcgaaaataattcaagtttcacatcagctaaaaataatctcacattaaaatatataagcgaaagataactctcatccattatttaacattatcttaaagtactctatgtacaatggatcca

SEQ ID NO: 29294 - DNA, 322 bp, Glycine max
catctaaccacttaattctggtcaataaaatcaagtaaatattctcatattgcctaacaaatgtttatgccttttttataattaaataaaaatcacatttaccacctaaattctctattgatctcatgcataatccggtaaaaaaccaatctttatactaatatgtgaatgccatatggtacaattcatctattatatatacaacatacactaccgtacgatttttttatgaatgtcaaacttcaaaacactacataaaacactaagtcttataatgttctctgacgacatgaataatctacataatattattaactacttc

SEQ ID NO: 29295 - DNA, 368 bp, Glycine max
  unsure at all n locations
agcttttggcaagtgtagcaacatagtatacggaaangatgctctagctgtggatagagcacggcacactgctggagaaatcgctataagagatcacgggccaattttaattgaggtgcaatcagctcccttcatgcgtaagacgatcattgcctgatgccacatcattttaatgttcaccgagctgatgctaatggctatataaccttcaggctctcactcatgcagtcggacatcactctacatctgatgagtaaactaagtaccggggaactgatgagatcgaatattggaatatggcaaggaatccagtgaatacggccaaaagacgggtagaaaggaatggttcggggagtgacaaggatgaa

SEQ ID NO: 29296 - DNA, 401 bp, Glycine max
agctttcataatggttgcaaagaagtctatctatggggggcagaatcactctcattaattcagatttatcaacaaagtgtaccataattctatttaatggatatccacgtagggagtgattgtagcctatagggtgtctatacagggtatgtctatacaggatatgaagcataaggtggaccttgcgtgtattcaagacacaaacaaggagtcttttgataagctcatctgccaatctatgtggggagattcctatgtttcttggaattttgtaccttcaatacaggcatcaagtggattgttgcgcttgcggaataactcatattttcaggtggagaggagggataagggtagaaatattctaatgctggaatggaagtgggtaaaagagaatcagtgga

SEQ ID NO: 29297 - DNA, 393 bp, Glycine max
cctcattgcagtcatttcacacaacataacccacatgacataagattaagacatggtgtgaaggaacttaccgtacgtttgagcaatcctataatttcttgatcttgccaaagccttatgtcaacaatattagcaagcaaatcaacctccatcaaaatgtgggattgttcattgggatgctgacttggcttcctcttaatttcttcttcctttacgattgagaggataataatcttagacattacacaataataatatatagatcaattaaaataagcatcatatctatttcacacttcttaatattacacctataaagtcacatcaacgtcttcattaccttgtctcgacttttcattgaacctttcctctaatatacacaccgacacctct

SEQ ID NO: 29298 - DNA, 406 bp, Glycine max
agcttctttgagaattcttccttgagaagctagagcttagctacacacacccctctcataactaagctcacctcctggagaagcttccttaagaagattcctaaagaagctagagcttagctacacatacctctctaatagctaagctcacctccttatgatgagaagctagagcttagctacacaccccctataataactaagctcacccctatggcaaaatacatgaaaatagaaaaaaaaaatccctactacaaagactactcaaaatacctcgaaatacaaggctaaaaccctatactactagaatggccaaaatacaaggcccaaacgaaggaaaaacctattctaatatttacaaagataagcaggctcatacttagtccatgggctcaaaatctaccct

SEQ ID NO: 29299 - DNA, 451 bp, Glycine max
  unsure at all n locations
tatggcctcatcaaaatacttgtttcccgagggaaattctataaatagatctctcatctntaatggagtgggttaccactactggaaaacccgcatgcaaatctttatagaggcaatagatttaaatatttgggaagccatagaacaaggaccttatgttccctctataatagccggaagtgcaacaatagaaaaacctagagncaaatggactgaggaagaaagaagattagtacaatataatttaaaggccaaaaatattattacatctgccttaggtatagatgaatactttatggtttcaaattgtaaaagtgctaaggatatgtgggatacactacaagtaacacatgaaggcacaacagatgttaaaagatctaggataaacactntaacgcgtgagtatgaactntntangatgaatgtaaatgaaagtatacaagacatgcaa

SEQ ID NO: 29300 - DNA, 404 bp, Glycine max
agcttttaaatgatttgattttcaaaaattaaaatgaagagtcgtatctgttgatgtgtaatcgactacaccttactggtaatcgattaccagcgactgatttcgaataatacatttccaaaagtcacaattcttcaagagacttgtatctgaagattttatcaatagtcacaactttttaagtgactagttttaaaagacattaccaagagtcacaagctttgacttgagtcatcaagagattataaatatgtgaccatggcatgagtttaataattatccttcagcatctttatcatccatcattcatcgatcatctttgaatcatctatctattcatatgtttttacacaattgtatgattcatatctcttcatctttctaaaagtttttgatcagcactt

SEQ ID NO: 29301 - DNA, 452 bp, Glycine max
  unsure at all n locations
gagctttactaaagattacttgggtgttcagatagtctagacatttatgatgaagcacttanagattttgactatgtaagaggttagtcataacacttattattaaatgttctgatatgatgatgagaacctaatatcaatgtgcatctgctcatgttcagaagatcattacatagataatgtatctgtcacttgttatgagaaaacacactatgtaatgatgagtcatcactcagaacgttgctgggttgactacagtgctcataatgctatactcagcacgagatggtgacgctcagaatgttctagtgcaaatgcattatatatgacaacgcataacataatgttgagaggaacagaaaagatgatttaacacatggatattatacccgttcacctcaatcttgcgctgcgttcaaacctcacccaaactgatgaaatgttcactaaca

SEQ ID NO: 29302 - DNA, 323 bp, Glycine max
gcgcgtttgctactcttggtaactgtctaaggaagctactcatggaggtgagcttagttatgatacgtgtatgtgtagctaagactctagcttgtcacggaagtgatcttattgaatcttctgcaggaagtttcctcaagatagcttctaacggaagctacctagtctatctctagatgcaggtgtttcgcttagtgcatcactgatgtatgacagtcctgtgagacacacctgaaggcatcacatgtctctctctttcttccttaacttactggctccggcctctgtcttacgatccatccatccttatctccattgaagca

SEQ ID NO: 29303 - DNA, 363 bp, Glycine max
  unsure at all n locations
tcaagcttncataagaaacagtatgcactaaaacatacctgtatctgcatttttatattgatatgttctaccacaaaggctgacatacctaaggtgtcccatatgactacctaagtatgtattgaaactaaaaataagaacaaacctacctaatgggtccctatgtgcactcaccatgaagatgttaggtgtacaagtgactttacaaaagagagttgcaccactcataacattcatcataccacctattttagggacttggtacctaataatatctattttgggcaccaacaaagcacatggatttaagctcttgcgaaccataccctcatactacaacttctttacttgaggaatatactc

SEQ ID NO: 29304 - DNA, 319 bp, Glycine max
agctatacctgacctattataagccgatacgcagaaatctaaacagcacgatacgcgcatgttatgagcaatgtccacttgacacactctgcaaagcactggaggatcggttttgcacctaacatacgcaaaatcctgacagctagctagctaagagctaatagacgatgatttttgttcttcacacatacataacataatagctaatactcaaccatacagtcattattcaccatgtaaatttaacgcgggaatccgaattcctatatcaaaaaagtcttagatgcgttgaacccgaattctgaacactatctattta

SEQ ID NO: 29305 - DNA, 396 bp, Glycine max
  unsure at all n locations
agctttggtctagtttttctaaagcaaaggtttgttcattttgtgtgtatcaagattactatccattcaatatataatcacttcttgattaggggtttctttctaaatgaaggttacacggtaaaggaaaagtattgaattataactcccgaaaaaataataatacaatacttctgacctttaattttaacacattcataattattagatttttagaacagttatttcaaaagtcaataatcatttatccttttggtatatttagattaaaaagaaaaggtattataaagattntacacaatcattaatcactatatgataatttcaaagacttttaaaatatttatcttanaataagttaaaggatgatttgtgattagatgataatataatcag

SEQ ID NO: 29306 - DNA, 426 bp, Glycine max
  unsure at all n locations
tgagcacctcttccttcattgatgggttgagccttctctagggctgtctgacaggtctatattcttcctccattattatcttgtgcatatagtangcaggctgattccttttagatctaatatgtgccacccaattgcctccttctgtctcttgaggaactctatcaacctatttcttcttctgttgtaagcttactattgatcaccacaggcttggtcttgttctcttccaagaacatacttcaggtggttaggtaagatctttagctccaccttggtcttctcaggtggacttccgctnttcaattcttcaaaactggtcccccctgcaggcatattttcttcacaatctaagccttccaagcaagcccataaattcttcttctcttcactggttagacaatctacaacattggtcaaagcttt

SEQ ID NO: 29307 - DNA, 398 bp, Glycine max
  unsure at all n locations
agcttattataagaaagtgaagtaaaaaacttttaatattggagatttggtttggaaggttatcctgcccatggatagtaaggatcgagccttangcaaatggtccccaaattgggaaggaccgttcaaaataattcagatctattcgaatggtgcttatgagttagaggagctaacccctcagaaacgtactttgagcataaatggtaagtatttgaaaaaatataaaccaacactgctcgaagttaaaataagcatagaatgagagaaatactggaaacatagaaatggcgataacagtaaattgccacaaaagggcctgtgtcagtattacatcaaaagtagaatcgaaatacagaattcgaaataaagatattataagttctactaatgcatga

SEQ ID NO: 29308 - DNA, 453 bp, Glycine max
gtttaagtgaaaggatatgactcttcacatttgtttttgaatttctttattcaacggcactagtaattgattaccaaaacattgtaatcgactatagctttttgaaaataattggaacgttgtaaattcagtttgaaaactttttcaaactcattttgctactggtaatcgattacaacaatatggtaatcgattaccagagagtaaaaactctttggtaaaaggttatgtcaaaaattcatgtgctatgcaaagtgttagtgcttggctctactgagttttaaaagaatggctaaaattctgttaaaacataagcacttagacaatgaatgaaagctggagttgctgcacatgatgtctaacattatgtcaaggaatcagatcgggctgcacaatgcacaatgcacgatataatgtcatatgaagaattgaagctgcaagatccacgatgtc

SEQ ID NO: 29309 - DNA, 403 bp, Glycine max
  unsure at all n locations
agctttctcatttattagcatctatgaatatattaggaggaattgaaagataaaacaggcgattagaagttctcccaccctacaaaaacaattttcatattcaaaagtatggttaaagtctgattgtaaaaatgctcagattagcttcaactaggcagacaaaanaaaaatagaaaatacaaaaataaggtactttcactgttcatatatagacttggtgcaaattaaaatagcttgcaaaaaaaaaaaaacataaaaaagtgcagagggggagaagaaaagatagaatacaagtgtgtctaaggaaacacaataaccaaacatttaaacttattcattccaatcgcaacatgaacaaaatgtttnttcttaataatgtcatctagcattggtatattcaaag

SEQ ID NO: 29310 - DNA, 455 bp, Glycine max
  unsure at all n locations
tataaaactcagctttaattngttgtttgtcttgatagtatttaaattactttttactagatgagttcaataatcaaatgtgataaaattgctgagcataactataaatgttattcaatctatcatgttatcacttttagtaaataattattctttattttattatcatatttattattttattaaatcgttaattcgacaagtctttgattaaattataggcttgttatcatgaagagattatgataatgagaaaaagttatttataatttcattctaaattgttcttgattgtaagattattgtgaatatgatatcaataatccggataagttaatatatatctaatggtctttattggataaagatcaatagatctaatttattaaattgcatataacgattatgtatatgtggatgttataattaaagcgacttaattgagaattcctaat

SEQ ID NO: 29311 - DNA, 400 bp, Glycine max
  unsure at all n locations
agctttctacaagtttcttcacaaataaccatcatgaagcagaaaactaacaaaactacccatcatatctcccaaaaccccatacccacgaaatttaagagagaaagaagtccacccaaacctgaaatttcgaagtcccactcgtagccacgcacttcacgaccccgaaaatgccctcctttcgcgatttggggcagaaatgagcaccaaaggttggagctttgttggggtttcaatggagaatgagggagaagaaaatggcaacgtgagggagagagagagctgtctgaaaaaaaaagtgtgggggctgagtgaagagagagaaaagctttttggtttttaaataaaaggggtttctctttttctattattntatttgagcaatgccacatgtctccat

SEQ ID NO: 29312 - DNA, 421 bp, Glycine max
tactcaagcttgttactcatgtgacaccctctacccctcacatgtatactaatattggattttaattcacatattaattacaagtatttttaaaacatttttttttccgaaacaagtctttcaaaggggaaaaaggctcacattcattttcttctacatcatattcaaactcgtccaaataaataataaagtaatctcgtctcaaacaaggtcgtctaaacttcatacaattaatatagaacttatatcctagtgtcacatcctatcatagcgttgtgttcctgtgtcctctaccatgaggttcttcatagtcatccacctattcatctgtttccccgaacacaagttcaagatcatcacaggatccaaacacaacaacacacagggagcgagtcatcacattcatacctaatagagagac

SEQ ID NO: 29313 - DNA, 390 bp, Glycine max
tcaagctattcttgatactagaagcttcttgaattctgctcatgacactagaaatatatcttgatcatgaactcgctgactgaatcttgaaatcattctttgtggatgttgtcgtcatcttaatcatcatcgaaacttcacgaatcaacttgattcatcatcatgaagcttgcttctacacttaacccccaagaccaaataccaactagcctgagaggctatgaaagaagagccaccagtccctctaagagagcccccatatcctttagttccgtcaaagaagaataaggagcactacttcaagtgtatattgaagatatccaaagtgttggagataaccatgccatttgaggaagccgtacagcagatgctgctctacaccatattcat

SEQ ID NO: 29314 - DNA, 305 bp, Glycine max
agacaaggatgacaaagcttaagataatcaagaacactcagtgaatcagataattcagaagtcagatagaatcagagaattccgactcagaaaaagtcttagtcagaatcagatcagggtaggactcagatcagagagactcatcagaaagtttaaaagttttcaaactttgatgcacatgattttgacaaacttttacaagagttctctcttagtatcgataccaattgtgtatcatacagagcaaatgtttgaaagtttcaatgattacacgtcattattcaaagtgatcgatcatgtttgta

SEQ ID NO: 29315 - DNA, 428 bp, Glycine max
  unsure at all n locations
ggcggcgcttgggcgtgtgaatcgatcactggcanacggaancaaaaactcagcttagtctgaagatgaacgatcctatcactgattgattatggatacatgttgctagagctttagaagagataacgtggctcgcacttagtccactatatgaggacaatgatcactatacattattcgatcatgatccaattcccttgagcaaaagttggttgcgaagcatactcctaattattttactactcccggaggaagttgagatcatcgaccctgcttataatgtatctaaattctcatcgactgcacagtggtatggacttcatctgccgcgagtgggaaatccttggtctttgaggctatgacacgtcaacaatgatttgacagctctattcacacagaccgatactggaccactacaagtgtcggcc

SEQ ID NO: 29316 - DNA, 392 bp, Glycine max
  unsure at all n locations
agcttctacatcagtatccttctattgtgctggaactacttcacatggacttgatggggcctatgcaagttgaaagccttggaggaaagaggtatgcctatgttgttgtggatgatttctccagatttacctgngtcaactttatcagagagaaatcagacacctttgaagtattcaaggagttgagtctaagacttcaaagagaaaaagactgtgtcatcaagagaatcaggagtgaccatggcagagagtttgaaaacagcaagtttactgaattctgcacatctgaaggcatcactcatgagttctctacagccattacaccacaacaaaatggcatagttgaaaggaaaaacaggactttgcaagaagctgctanggtcatgcttcat

SEQ ID NO: 29317 - DNA, 460 bp, Glycine max
  unsure at all n locations
agaggatgcttcaatggaggaaaagaaagagggagagaaagatagatggnggattacgttattgcaggaagaaaaagggagagaacttgaactctgagttgtgtctcacaagactctcattcatcaaagttacaacaagtgttacacatgcttctatttatagactacgtagcttacttgagaagctctcttgagaaaaattccttgagaagcttctttgagaatatttccttgagaagatagagcttagctacacacacccatctaacaactaagctcacctccttgagaagcttccttgagaagctagagcttagctacacacacccctctaataactaagctcacctccttgagaagggaagctagagcttagctacacacccctataatatctaagctcacccccatgacaaaatacatgataatacaaacaaagtccctactacaaagactactc

SEQ ID NO: 29318 - DNA, 364 bp, Glycine max
  unsure at all n locations
agctttgtcactggtattcatgtttcatttaggccttttaagtatatgcattttgatttatggggaccatctagagtgaaaactcatggtggaagctcatactttctcaccatcatagatgatttctcaagaagagtatggccgtatgtcttgaaaatacaatcagaatctttttccaaattcagagagtggcatactcttattgaaaatcaacttggtacaaaattaaaagttntaaggattgacaatggcctggagttngtttcagagcaattcaatgagttntgcaggaaagtatgtatcataaggcacaaaacagtccctcacacaccacagcagaatggattagcataaagaatgaata

SEQ ID NO: 29319 - DNA, 477 bp, Glycine max
  unsure at all n locations
ctcaagtacaataaagaagcctanatggactngaaggtcttgccaacccacttgaagtgtgtgttcttgaaagagaacaatgcaaaacctgtggtgatttgcaatgatttatcttctaatgaagagtctaggtgggtcgaagtgctcaaaaagcacaaggcagtcattgggtggcacattttggacctcaagggaattagcctttcttattgcatgcataaaattatgatggaagctgactataagtcggtgagacaaccacaaagaaggcataatccttcgatgaaaaaagaggtgcacaaggaagtccttaaactcctagaagtagggcttacctatcctatcttagacagtgcttgggtgagttcagtgcaagtggttcccaagaagggtgggatgactntggtgagaaatgagaaaaatgacctcattccaatccgaactgtcatgggatggagaatgtgcatagaatatcgg

SEQ ID NO: 29320 - DNA, 403 bp, Glycine max
agcttgtgcattcaatatcctgatgatggtgttccatatgttctcaagactggactaatacatttgcagcccaagtttcatggtcttgcaggtgaagatccttataagcatcttaaggagttccatattgtttgtttcaccatgaagccccctgatattcaagaagatcatatctttctaaaggcttttcctcattctctggaaggagtggcaaaagattggctatactaccttgctcccaggtctattttcagttgggatgaccttaagagggtgttcttggagaaattcttccctgcatataggaccactgccatcagaaaagacatttcaggcatcaggcaacttggtggagaaagattgtatgagtattgggaaagattcaagaaattgtgtgcaagct

SEQ ID NO: 29321 - DNA, 406 bp, Glycine max
agctttcccctattgtttgcctccggacttcactccccgtgccaccccggaagatttaagccaagcccctactttcgaggggcaactcccaccttatgacgactatcccgggcaagacgatgaggaaggagatacccatcttggccccctgctccacctcaaagatccgtccccccatgaactaccccaaccgaacatagtccgctatatcccggcttcacccacacccgtaaaagaatctgttcccttcgcggaagataagggaaagattgaggcgcttgaagagaggttaagagcagtcgagggccttggcaattacccattctcggatttagcggatttatgtctcgtgcccaacatcgtcatccctcccaagttcaaagtaccagactttgataagtacaaa

SEQ ID NO: 29322 - DNA, 445 bp, Glycine max
  unsure at all n locations
tgtccacaaaaataggtttttgaaagttaatcatttcagtttcttttcaagtaaaatgtatcatttntaaggtctaactccttaagatgatcacccctcaagtaaaaaagaataacttgattcacgcatgtgaaagaactacgtaggtctgatttcttctccaaaggagggtacgtaggagcaaaagccccgcttttgtcgacctcaaaaaattaaaagaaataaagttaggtaacacaatttccacaattctaaaaaataggctgttgtcctttgagacaaacgtgagaggtgctaataccttcctcaagcgtanatacaactcacgaaccatagaatttcattntgaccggtttccttcggttttcccgacgttttccacanataaacgttggtggcgactccgcgcatctttcctcctttgganacacacccgtgagcctcg

SEQ ID NO: 29323 - DNA, 401 bp, Glycine max
  unsure at all n locations
agcttgctttntgctattgaagaaaataaatttaaatatgcaatgataaaataatgaaaacaaattcagcaaaatcatgtttggctgcaaaaagtaaaaacaaaaagaagtttaatccacatgtgttgaagcaaaggaactacataagatttataaaagatattcgcatattcaagtgtcgtttgtgatatttctacacacagatataaaggaacaattacaaatatttgttatgttccatgcttcaatatttgattagatacataatagtatcaatcggtagagtttaagcttgaactaccctcacaatacaatttcaaagaaatggaataagagaaaaacaaaacatagaacaaaatacaacgtctaaatgtaaggaaatggagaaactacgataaaaa

SEQ ID NO: 29324 - DNA, 465 bp, Glycine max
  unsure at all n locations
ctgctgatttagttttcgccgatgaaaggatcgaagtgggtctattaagacgcaaatctgatcatcatgctttgataaatacaaaaaaactagggcaaatgaagatggtgagaataagggagaaacccatgttgtgactgccattcctatacagccaagtttcccaccaacccaacaatgtcattactcagccaataacaaaccttctccttacccaccacccagttatccataaaggccatccctaaatcaaccacaaagcctgtctaccgcacttccaatgacgaacaccacctttagcacaaaccaaaacaccaaccaagaaatgaattttgcagcgaanaagcctgtagaattcaccgcaattccggtgtcctatgctgacttgctcccatatctacttgataattcaatggtagccataaccccagccaaggttcatcaacctccatttctctgagaata

SEQ ID NO: 29325 - DNA, 392 bp, Glycine max
  unsure at all n locations
cttttatatgagctagaagagccttgaggtaacatgcgcaacaaacatgagtgccatctgtattgaaagctgaatgatggggcgcatactttctcacgccattacataatgtatcatgcatgatcatgtcggatgtagaaaaaagatactgaagtcagataactacttctaatggaggcacactctatattgaatctaaactagctcactataatcaattacacggattgacataggccggtagagaggtgcctagcataacattgatcgatgacagactgtgagaatctgattgctcatacatttcctgacacacgattgataatgcatgactctctgcttgaatcggacaccatgtgatagagtggagtgcatgctgccttangcaggan

SEQ ID NO: 29326 - DNA, 446 bp, Glycine max
  unsure at all n locations
tcagctaccgattaatacattgagtggcttatctaaccttgttctcttagcggaccaaatcagcctcagatgcaagggttgggtgttaagtgcttgagactcgtggcttagcgtatgaacaaagatgcatttagtgcgaggcttgcacttagcgaaaggactatttttcagaaaaaagttttctaagttattttttagttctttttccaagaaattgaaacccttatgttaaacattcaaagattggctgatatactcctatgtacagattatatagcaagttccaaatgattaaatgcatgaaaatcaaagataccggaaattaaaactgggttgcctnccaggaagcacttctttaacgtcattagcttgacacttttacctcactgggtgatcttatgttttggttcatactttcagaacctcttgacctccttncattacct

SEQ ID NO: 29327 - DNA, 372 bp, Glycine max
  unsure at all n locations
agctttatatgttttctgtngagcacttagagtttagtattatgatcaaatccctattcatggactaccaaagatcatggagaagcctaattgataatggcaagatgggaattatggtggagattgttatagacggatggagtgctactacaataagcatataatgtgtaaggcgattctgggagggtctgaattagggcagagcatcattacttctttgattttatctctgttgttccattactctatgttattcatctagtttctgttactgtatatatagagcactactctatcattcacccnccagaacataacgactactctatcattgccctgctattccaatgtgaatacttctatcaggatcta

SEQ ID NO: 29328 - DNA, 407 bp, Glycine max
  unsure at all n locations
taaggcacctgaatcgtccaaagtaaaagtcaccttatgtgagattatgttntataaattataatttataacttatcttatgatttaacatgctaaaacatttatactatatatacgcacggaactatatatctctaacaatttaatatatgtgcagttaaaaaaattaatatatatgttaaaataattccatgaatcgaactaatctaaatctttgatatattaggaactaatcattttaggtctcttcaattttcttcttattttttcactactacaaaatatagacttaacatcgcatgattaacatcggtttttcaaaaaatcgatgttaaaaaaagcacagtaacatttttgtaaataagttgagttggttaacattggttntttaaaaaccgatgttaaca

SEQ ID NO: 29329 - DNA, 395 bp, Glycine max
agctttatgaggacagtgcaatgcagcaggtgtttttgatgaacaatctttattacctagtgcggaaagtgaaggactcggacctagggaaggtcttgggggataattggattacgaaacgccgtggtcagatacgccagtatgctacagggtatctcagagcctcttggagcagggccttatcttgtttgaaggatgaagggattggagggagctccaataatgcatcaaagatggctttgaaggagaggttcaagagtttcaatgcttgttttgaagaaatttacagggttcagacagcttggaaggtaccggatgaccagcttcgggaggagctgcggatatctatatcagaaaaggtgattcctgcataccgctcgtttgtgggaagattt

SEQ ID NO: 29330 - DNA, 446 bp, Glycine max
  unsure at all n locations
tattgttgttgcatcataggcttactaggcccatctatttaggtatttctgaggatcaccaagaagattcgccattgtgaaggacatatattgtacacatgtgaaaattgagtaggtcatcttatcgtctatgtagagagcatattagctacatttggttggctgcacatctttaacaaaagtttcatgttcatgctagtttgctacttggaccttttttagggtcttagtaaatgtaaggagtatgcttagtgtggctagcctgaattcgacatgacaaatcggaggatatgactctactaaaggtgccaaatttatttatttttattttctctggctnttgggttgtttgagtggttctcatgattgcgaagtaagtatctatatctctcccctatgtattgaaccaagtaaaccttcacaatactgtgcgagcgtcaataagt

SEQ ID NO: 29331 - DNA, 285 bp, Glycine max
  unsure at all n locations
agctttctacttgatcaggagaaanncnggnnngccaaacctggaaaacttgagctcagcaccacaccatacgcggcacccnccgccaaaaaagaaccacccaggactaaccgaccgaatactatatgtgcctctcttctccctttctccaaagaacgaacgactacccgcctgaattctctcgagtcacccttctcccttgctaagaattcaaaacgacatagcctgagaattctgttgattcctgcattccctaatacaaaagtgtcaaaagactaactgcct

SEQ ID NO: 29332 - DNA, 451 bp, Glycine max
actaagcttatcatcgttgcttccacattgaaacggttgtgctggcctatgtttttactatagtagacgtacatgtgtgatattataaagatggaaagcctacactacccttctaaatctaccccaaagtaactttttaataaaaatattcattctttattgtaatattattttttaattaatagtattacaaatagttgcattgtttcattgaacatgatatacgtcctggacgaggataaatgcaatgcatatatgaatttaacctacacttatttttaagttgtcaatcaaaaatccctctttatatagcttttagaatatttattatttcccattaaaaatatctattattaaaattaaaaaactaatatctatcataatttatgatttaataacaataataaaatatactcgcaatatatatacatactattttctattactcttt

SEQ ID NO: 29333 - DNA, 398 bp, Glycine max
agcttttcagctatttggttactctccctaagagaatggagccaaacaaagcttccttgttgttcctcaaaagccttgaaatttcaaaacatgctttaagacaggtgaaatgaagggcagccatgattcagaagtgaaatagccacaaaggaatcagattccaacatgaattgcttgaatcttctactccgtgcaatttcaattccaagcatgatagcctcgagttctgcagttacaactaaacaatagcatacatcaataacaaaagagaagttcgctttgccattataatccttgagaactccaccaacaatggccttcttcgtgtctctattgattgaaccattaatattgagtttgaactagccatttgaaggcttgctccaactaatgctttt

SEQ ID NO: 29334 - DNA, 163 bp, Glycine max
ttataagagcgggtctgtgagacaaaggtcaagtggtcgcaatatgcgattatgatgttccgagtacattggatctggtacgaccatgccctcctgatttccagctgggaaataggcgagtggaggaacgctacgcaacgagcataatgtaaacctgtacggt

SEQ ID NO: 29335 - DNA, 372 bp, Glycine max
  unsure at all n locations
taagctttatgatgttattaaaggctttgcacctacctctggcagtaacagtgacaaagatgatcataagtacgtttacaactagacatcaaattttacttgagattntatagtttctgatacttggatcacttgagcataacagtggggagcaattgatggaagatgaatctcanattgctccaaggagaaggaagaaacttgttcttgatggtgattcggaaagacaaatcacagatctccatgagaagtatgtttgaccagatcanactttngtctgaactntggagcatgatttanattagagccttgtcacacagaaattcagtctttgttcttttattcttcttacatcatcggtacatacattct

SEQ ID NO: 29336 - DNA, 474 bp, Glycine max
  unsure at all n locations
cgccgggatgagctgtgatgatcattcanacggcccaaatctagctgctatcggcatcaccttttgggggttttttttttggtagcttccaattttggttaatttggccttgccccgaccctttagaaccggatattgatgctccgttttgacgaacaatgtacttaatccctcactgtaactctattaacattgattttgatgacgtggttaacgcagacacatggcggccccgtgaccttgatgactaatctgagcatatttctctggaacaaggatctaaattcatttttactacctgcgtgctgcgttcattagggccgattttacccctcatattggaagagcaagagcagcttttcattactgaacattatgcaaaccattttagcttcatggctatgatgtttgacaagaatcatgcttatacggtggaacttgtcactttatcacaagaatgtatcaggctttctn

SEQ ID NO: 29337 - DNA, 391 bp, Glycine max
  unsure at all n locations
agctttctaaagttntctggttntctaaaccttgaaaacttgtgctattcatcttttcattctcttctccctttgccaaaaagaattcgccaaggactaaccgcctgaattctttttgtgtctctcttctcccttttccaaaagaacgaaggactaaccgcctgaattcttttgtgtctcccttctcccttgtcaaagaattcaaaacgacatagtctgagaattcttttgattcttcccattccctaatacaaaagtgttcaaaggactaactgcctgagaattcttttgtatccccattcacaaagtatcaaaggtttaacagcctgagatctttgtctcaacacattggagggtacatcctttgtggtacaagtagagggtacatcta

SEQ ID NO: 29338 - DNA, 447 bp, Glycine max
ttgatagtgaggaatcaatgggtccagataggttgcatgatgacatactcagaacttcaagtttgtgcaatgaagatatggcttggcaccactcgtttccaattgcagataccttgacaccatctagatacaattctgccagttttgtgaggttttgcaagagtgtacctatatttggcttctcaagttttagagtatgttgcgaggtaaatgatgtagacaagtcaagagtagatagcttggttagatgagcaatctcaattggaatttgcccttgaaacccagcatttgacaagttcaaatacctcaaattctttagcaagccaaactttgaaggaatcatcgaagaatggatgtcattgtgtgccaaattcaaactttgcaaatattgtaggttgaagagacttgaattgtccaagccttcactgataaattcttcactcaagt

SEQ ID NO: 29339 - DNA, 408 bp, Glycine max
  unsure at all n locations
ggtatgtccacgcccatccgcgattatagataaaaacaacttaaccaaacattntgttcacaaagaactacgtaggtctgatttccttatcgcaattaaggaatacgtangagcaaggganataccctcgtcgaccgcaaaaagataaaaaaatatataaaggaataaagacgtaaaagggaacctaaaaattgaagtcatgtttgcacatttaaaggttgttgtctcctgtgacggacgcgtggggtgctaataccttccccgtgcgtaaatacaactcccaaacctttcacttaaagttcgtagatcacgtcttttacggtttttctgacgttntcctcanataaatgttggtggcgactccgcgcgtattcctttcttggaacacacacccgcgagtcacgtgtc

SEQ ID NO: 29340 - DNA, 463 bp, Glycine max
  unsure at all n locations
tgcctaattaacctgaaattgagaganaatgattattaaacacattttatggaagtactaagtatttattacctatacttaatagaaaatacttataacactacaaaataaccataaattggaagagtttgatacaatttacacaagttttatacacaaaagttagtcgtattcaccgactaacaatattcaagagattagaaaatacttcagcaaaatcaaccacagtccaaaatctgcaaacggagattaataatttgaaaaaggaagttaatgaaggaataactaccaaggaacacccttcattagagcgttattcccccttcagatatccaaggaaggaataactaccattaacttaggaagaaaaattacattctatttttctactaaacctatttcaagaaatataaatttcatagaanagaanatcaaccaaattaatttcttanaagatgaagtc

SEQ ID NO: 29341 - DNA, 402 bp, Glycine max
  unsure at all n locations
agcttcttgatgttgtttcaagattgattcaagttggtttgatgataacaagagatgatgaccaaaagcccaatagaatgatttcaagaatgagtcaacaattcaagaatcaagagaagttaattattacaagattgagtcaacaattcaagaatcaagagaagtttgatttcaagattcaagaaaagatgaattcaagtttcaagagaagaaatcaagaagacttcacaagggaagtattgaaaagatttttcaaaaaacaaacatagcacagttttgttttttaaaagagtttttctcanaattttctaagttaccagagtttttactctctggtaatcgtttaccagtttcctgtaatcgattaccagtgacanaagttgttttcaaaagctttcaact

SEQ ID NO: 29342 - DNA, 457 bp, Glycine max
  unsure at all n locations
gtatcaaccataatcgtgatcatttccctctcagtcgtaggtgggatgacttgngctgctaggtctctccacctttgagcatgttccttgatggactcatgttcccatttgctcatgctctgaagttggttccgatcgggagccatatctgtgttgtattggtactgtcgcaacctacccttcggcgggagggcgacgcgagactcgcgggatgcttgttccacgaaaggaatacgtgcggagtcgccaccaacgtttatttgaggaaaacgtcggaaaaaccggaaaagacgcgatctacgaactttntagtgaaaggttcgggagttgtatttacgcacggngaaggtattagcaccccacacgcccgtcccaagggacgacagcctttaatcgaatgtgcaaacatgactnntgattttatgttcccttntatgttcttatatcctttataccc

SEQ ID NO: 29343 - DNA, 399 bp, Glycine max
agcttgtctcagcgtttatgcgatacggagaccaacatgctagctatcatcgccaagtaccaagaagagttaggtctagccacggcccacgagcatagaatcgcggatgagtatgctcaagtgtatgcggaaaaagaggctagaggaagggtgatcgactctttacaccaagaggcaaccatgtggatggatcggtttgctcttactttgaacgggagtcaagaacttccccgattgttagccaaggccaaggcgatggcagacacctactccgcccccgaagagattcatgggcttctcggctattgtcagcatatgatagacttaatggcccacataattagaaatcgttaggaaacttgtatggtctctcagaccttgactagatacgacttcctt

SEQ ID NO: 29344 - DNA, 462 bp, Glycine max
  unsure at all n locations
tgtgcanatcanatcactcctacatttcatctctagcatgcattntctttctttactcactcctcacgtttggttntttagggaaaaacaccataactaaacgcgccgcaagggatccctatcgcaccagatccaaatctagaatgatgggtgatcaagaggagacgcaggaacagatgaaagccgacatgtcggctctgaaagaacaaatggcctccatgatggaggccatgttaagtatgaagcagctcatagagaagaacgcggccaccgccgccactgccagttcggctgccgaagcagacccgactctcttggaactacgcaccatcctccctcanacatagtaggacggngaagggacacactggggcacgatggcagtcctcacctgggatacaaccgagcggcttacccttatggatngccgcccaactattcaccacccgtcttgcaagaaga

SEQ ID NO: 29345 - DNA, 403 bp, Glycine max
  unsure at all n locations
agcttttcttgaccttgtatttacagggaaaaaggctttgacttcagccagtgatcataaaattgatgacgatgatgataacttagatgagtttcttgacgggatgtttctgtgatcttggctgatttgattgccatacctgaaaagtgcttccaggcgccaaagctgggcaaatagaaacggttaggcagtggtggagacaagtgggtgatctgtaggtagatgtctaaaatataggaaacatggtgaccaaatggttcttgacaaaattattcaccctgttgtatccttcaaaattatgtccatttatgcagactataacagttcagcatgctagttgagtttgtattatgtacagtttgtatagtcttttcatctgccaataatgaanattgcgtagctg

SEQ ID NO: 29346 - DNA, 464 bp, Glycine max
  unsure at all n locations
tcggcagaaacgatcacgtggatcaaggcacaatacaatcaccatatanaaatatttatacaatcatcacagatccaacaaanaggagcaacacccagatcacaaaaaccacccattagtccaaatttcaaaactttccacaacaaaattaagaaacaccaaatggggtagcacccagatcatcatccacaaacagatatagaaacggagaanaacagaggaatgagagtagaanataacttacgaatcggcaagcgatgaagcgaagaagaaggagaaaacacgaagacaagaaagaganaattttcagacacagaagaaatggaaaatggtagttctcagatttagatttggactctacacactntctctgtatatatatagacgcggttnttatgcatgaattatntgatcaactctgagttcgagaaagctaaggggagccacaggatcatatcaagtga

SEQ ID NO: 29347 - DNA, 403 bp, Glycine max
agcttgttgagttgattctcgtatcggtttaattgattacagttgtttcataatcgattacactgttatttgagacaatgattgatttattcaggagtctttcttttaatcgattaccaagtggattaatcgattacttctctctcatttagttgttcaaaagtgaacaagaacactttaattgattacttagagcatctaatttactttgtagatttaatcgattataggtggttataaatgttttctctataaataaccatcttgtgttccttccaaaacatatcaaaagaatactcaatatcttgaaaataacccattagcctcttaatgagaaagatctcaagttgtcattagtgaaaagagaaaaaaagaaaaaagctgtataattactcataacttc

SEQ ID NO: 29348 - DNA, 430 bp, Glycine max
  unsure at all n locations
caccttcttgctaagccaatctgctggtttatcgagcatctgctaattgcaacactcatgtgctatgcgcgaggaagaatccacaagaagatgagctntacaggttcgctaagcgccctgcttcagttcatccgctaagcgagaaaggcgcgctaagacaaaaatcactaacgtgggctaagcggtccataagtgcgctaagcacacgaacacgaacaaggctacctatttaagcctaaaataagattttgtgaacaaagtttggactgcgattcagagctttgcatatctagggtttctggagagagaaaggtccaagttccagagagttttgaaagattctgctgtgtgaagatttgcagagaccagagcttgaagcaagagccgngttaagagctctagatgagtctgtgagtgattgtgagatcct

SEQ ID NO: 29349 - DNA, 249 bp, Glycine max
ctttttcaacattgatgcaaggggcgatgatgataacaatagaggaagacaaaaagccctactgaatgatttcctgattggggcaacagtggaggacccagcattggtcatatattgcgccaccgcttcaacatctcaagcctcctgagaagttagattccgggattgaagcatagatgaggcggggttcaagagaagaaatcattaggacttctctggggaagtatcgatgcgatttatcacaaaacc

SEQ ID NO: 29350 - DNA, 336 bp, Glycine max
gagaatgataacgtatgcatacatgatcttgctgatgtcactacaagaatcaccacaggctggttgagcttgatgaataatacactattgttactaccaacaaggactcgattccaacgacttcaagatccaccatatctcacaatgcttggtttcaagccatcacaggcccatgtctgccatcaccgatgagttattagtgaagtgacgattacgcatgaatatgtactcaagaacaccatactttgaaccgtaagaactcctatagatattgaaggatcgcatctcgtaccataaacttaggaagagaaatcacatactctaattctgctatcc

SEQ ID NO: 29351 - DNA, 237 bp, Glycine max
  unsure at all n locations
atcaagaaccgatgctnccactacagagctcactctccagactagttccaggcactaaggattgatatcacaatgagagttgctacttgcacttgatatgacccatccgagtctattattcaataactaaataccatgtgagagcgacataccttacactgttaattggcgttacaaccgaagacatcattatgcttttccaagcttatagcaggtccgacatcctcaacatcctta

SEQ ID NO: 29352 - DNA, 445 bp, Glycine max
  unsure at all n locations
tgtcacatggaataatgtacatacaattcanaattntgtaaatctcttaaatcatcattgtaattaatttcaatatcaattaagctttgataaagcacccaaacacaaaacttactatagtctgagttacaaatttttagggtgttacatacagcctagaaaggtaaacttttgagaaggccaggtaagttgcccttgtcaattttgtggtggtgtatattcccacttacacaatgcaattgatgggtgccacgacaaatttgtgataagtaggatatgttgggcattagtttatttggagtggaaatctagaggggagcctccatctggttaagtgggattctattattcagaagaagaggtctaggggttcgagtagctagacttcataatattgctttggttggaaagcttatttgggatattctccatagccctaacatgc

SEQ ID NO: 29353 - DNA, 402 bp, Glycine max
  unsure at all n locations
agctttcatgatttacattctcccattntctcagacaaattcttcttgacatcatcaaaacctgcatgatttatagccttttgcctataaataggcatccaaggggtgttttaaagggtcccaagggtcagaagtggagagaattgagagaagagataaagaagaagaaaaaagaagaggaaacgaagccgatgcgctaccgaatcgcgaccgcaatcattccctacgtcgtttcttgttcggtgttctttgcaccagtcggttagttctatttttaggtattgaatgtgatctatgtacccttaggggtcccccttgttattatgtacacattcatcttttccatctatcatcgacaatctctttttctaatcttaaccaatcactagctgcagtaaattg

SEQ ID NO: 29354 - DNA, 442 bp, Glycine max
  unsure at all n locations
tccccgccttcaaggtcgcatctctattcctagacttggnttgcttacaccacagcttccctcgaagcatcatttctgatagagatcctgtgttcttaagctccttctagcgagagcttttttgactcagtggcacccatttacgtatgagcacgatgtatcacccacagaccaacggccagatcgaagtgatggaccatgtgttagaacaatacctacgttcatttgttcattcccaaccggcaagttggttccgttacctagccttagcagaatagtcgtataatacttccctttattccagttcaggctntactccgttcgaggcaatatacggcaagccaccaccagtgttgccccattatcttcctggaatgaccaacaacgaggcggttgaatcactggtaaagctctgatagaagatccatgcaaagcttcaatg

SEQ ID NO: 29355 - DNA, 386 bp, Glycine max
  unsure at all n locations
agctttatcaaatattagagagggatctccaagtaattccctcattatctctcatgttcttccctctttttccctttcctctcttcttcttctcctacgttcttcttctatttttattttttttaagttcgtagcttcgtcgtttgtctcggtggtgagatctatggtcgtcaatgagatctgtacaagttgatatcgtcattttttcttggtgctttattttgtttcatgatttttttcgcattccatcatccttttcttctttctcttccttctttttccattttccgatgaagcctcgtgcggtgctgccatggtttaattnttatgttgtanataagtcaacatactcatacaaaataattcgatataacatgaaataatac

SEQ ID NO: 29356 - DNA, 393 bp, Glycine max
  unsure at all n locations
actaagcttggcaatgccctaccaggcctnttatttttattccctttatggggccttttggaactaattctgacatggtgttcttttttacgttatttgcatgcatttttcatgcaaaccgccattgccaataacgatttggctgcagcacgacatgtgtctgggcaaaccgccaacactgtgggcgacttcatgtggaagggcatcttgccacttgcactggcgagttcatcactgctgctgaaaccgcaggtttgactggcgagtttcggaaatggcaggcctagggtgcaggacgtgcangtgcaagttgctttttgacttcttgggcttaaggggagttgccacttgctctggcaacttaagtaaagggaaatcgcctatacgtttggc

SEQ ID NO: 29357 - DNA, 385 bp, Glycine max
  unsure at all n locations
agctttgtgtaatcgattacactgattttgtaatcgattaccagtgatcatttctgaacaaatcaaaagatgtaactcttcaaatagtttttgactttttcaaattggttttaagtttttctaaaagtcataactcttctaatgattctcttgatcaggcgtgaagagtctataaaagcaagactttgttttgcatttcacatctatccaatcaatcaatctatacatcaatcttttccaatttattctttacacaagcaagttttccacattgctttctgagtctctntgaacttcttcttcttcttccttttgccaaaagctttccaaagttttctggttttcgaaaccttgaaaacttgtgttattcatcctttntattctc

SEQ ID NO: 29358 - DNA, 425 bp, Glycine max
  unsure at all n locations
tgcacaanaatgattngatcaaccaagatcttagatctatatgtttccaagcttcacaggatgacaaaaagaaatttggaaccaagactgagagttttgcacgaaaatggtaaggaaacaagaagagaatgaagattaagagtctcttatcaaagctttgagggaagaagccccaaggacaattgtatgaagcttggaagaagaagaagaagaagacaatggactcctctccctcccttgaagaactcatgaacaacaatggagaatgaaggttccaagtttgatatttttggaggagtgaagagataaggctntaaggcttggtccaaatgaaacttggttaggcttaatgttgataagatcaaattgacacaatgaatgaccatctgatagccatggtggaagtgctaaatgcggccatatat

SEQ ID NO: 29359 - DNA, 483 bp, Glycine max
  unsure at all n locations
cgactccgggggttgagcgttganncttgatgcctttganatcccggcgaatcanctcggaccccgggatcctatacagncgctttgcngcattttagctttaataaaaccttccgaagggccagctaatacctatctgttcgaaatggccttcttggctactatcggaaacaccagcggtggtgcggtgcctgtgtgtctccatttctattaccgctaaattaatatttaaaaattctctgtctaagccttaatggttatattgattatagcctagctatcctccaacaacatgtgcattcatatgaattatttctttattcctctgcatattagcgaccatgtggcaagtggaaaactaataaagatgaacatgtgttcctatacatacattatagtaagggataccttcatctctcttcccttctaaaaattagcttcgaccatattaagatatttgaagaaaaagataatgaagatccn

SEQ ID NO: 29360 - DNA, 437 bp, Glycine max
  unsure at all n locations
ctggcaacatagctatgctggagagctttgtagcncattttcttatcacggtcgggtccacttggcaagaaacaattcgtttgtaaaatctctcaagcacacaactgacttatgtctcagttacaaattttgatggcgtaactcttttctggtaagagggatcatatattcacactcccacattgaccttggatatcaagtggttgccgtaagctcagcatacatacctttatcgttgggtgccgaggatattgtgtgcatattccgagtggtggtgactaagaataatgagatggaaagcaagatgagcacctgctttagtaatggtgcatttactatgcaatcactatgccaggtgacgagtatgtcagacaaataatttcgattggctgtaagctaactgggatatcatggtcaccgcacgtgcacatgcaact

SEQ ID NO: 29361 - DNA, 373 bp, Glycine max
  unsure at all n locations
tcaagctttatcaaaacaattatctaatcattccaatccactcaaatcatacaattgctcattcaaatcattctcaaacactcatttcatacaaaacaatccactgcatatcattttcaaccaattcactgttcaaacaagctttttgtacaagcaaacaactcanagtactgaaatttaaataacttggaatttaaagaactgaaacataaaaactaaaatttaaatgattgaacataaatcataaaataactgaaaataaactaaaatgttcaaaatagaagggctcaggaggagtgagctcatcctccccctttactgctactgctggctcctctggttcaagctcctgggctgcagaagccccacccct

SEQ ID NO: 29362 - DNA, 363 bp, Glycine max
tatccgggcctccatcagcagggcttttatatagaaatatttcatgcctacgcaggcgcacggtcaggcactgcagaagcacgatgaggactaacagtagccagctgtaggtgcactatctgcccctctacaagagacagtgggcctggggttcatcttcgctcacctgtggaggttagagcttcaaatgcacaggtacatgcagcatgtgactacccaacaggcagctaatcacagggtcatgtgaagctaaacacgaccttctatcggtacactatgcactagcagagtcagaacaccagtcctttcctgtggactacccacgagcaattcggagccacatttgcctggcctgaacatgcg

SEQ ID NO: 29363 - DNA, 386 bp, Glycine max
agctttatgccatgctacaatggttctccctgacatctccgcggcagctccgaggatttcttggtctaattggattctatcgacaatttgtccagaattatgcccacatcgcagagccactcactcgcctattgcgaaaagaacaatttgagtggtctcccgaggcacaattagccttcgacgatttgaaaatagccatgacaaccactcctgtcctctccctcccagacttcacgattccctttgtagtggaaaccgatgcctcagggacaggcatgggtgtcattttgatgcagcgcagccatccaattgcctacttcagtaagcaattctatcccaaattgcttcgttcttctacatacatctgcgagttgcacgccataacc

SEQ ID NO: 29364 - DNA, 445 bp, Glycine max
gagtaacgcaaccggttcggttactcgcttcgctccaacgcgattgtatagaaacggcatacgatcaacgaggtcgtaggcactccggctccgatcgcctctcagagatcgcagttcgtgatcgctaacgttcagatccgcacgcttttgcacttctacgtgcttttccttcggcggctttggcttctctgtctgcgcaatcggtgggttctcaacctccggcggcggcaccgccgccttcggagcctcctcctttggtttttcttcttcttttgatgcttctttagggttattctcatcttctttcttttcctcgtcttgcgtttcctctgccttatcttctttcttctctccttcttgcgaattctccggcagcttctcctccgatgccggtggtgctgactctgctctctcctctccgggcgtctctggtctcggtggatcc

SEQ ID NO: 29365 - DNA, 408 bp, Glycine max
agcttttatcaaactgttcctagtttcatcatataagaagaacttataccctcttctcaaacaagagattcaacagaatcatagagaactagcatttttaacttcaggagcacctataagtaagtgaaatcttcttgttctcttggcattgctttattgtttcttatagcagtaatgaggagggtaatatagcaccatggctaaatgagtaaatgatatttaaatgcatgttcggtaggttctgagaaccaatggaccactagctggtgggagcaattcatggttcttcttaagaggggtttaatggaaacgaggcatgaatcttattcgagattaatgattctccaagtcttgtctgtctcaattctctcaggacttctgcggtggcattctgatccctcacatata

SEQ ID NO: 29366 - DNA, 425 bp, Glycine max
  unsure at all n locations
tatgcctctctctctctctctctctctctcactngagccctacttatgcatataattgtcctattctcctacctcatattcttacttgagggtcacagtcctctattttgccagtccccccttcctatcaatggtatctttctaaaccgacgtgtgaagtctgagaccccatttcatccacatctaccctgacatgtcacggatctggattttggcaagaacatgatttgtgccaatatttaatgggcttaacttctttaactagaatgagcaagtccaatttcaccttgctgtatggatcttaatcttgctatattggaagaaaaacctgcagctattactgattctaagtgcaatgatgagaaagcccattatagagcttgtgaaagatttaacagactcaacctaatgcttatgagaatgac

SEQ ID NO: 29367 - DNA, 401 bp, Glycine max
  unsure at all n locations
agcttttattntgttatgatttttatgttgttaggctagttattagaatgtatgttgttaggggtttactttcgcacgtaatgtaggttattttgctgtgattntattaggttttgagacctaataagggcctatggttgggggctgaaaaccccaagttttttggaaaatttgatatgcttgctaagcgcgcttgtgcactaagcgagttcatcaattttgttgaatttctgggtttccagatgaactcgttaagccggccttgtcccactaagcgtgttcatcatttttgattgaatttatgaatgtttgcatgaactcgctaagccacttcactttgggcttagcgagagtttaaatttccagtttttattttaactgtcctatgaactcgcttagcc

SEQ ID NO: 29368 - DNA, 413 bp, Glycine max
  unsure at all n locations
ntgaacaatatacttggccttcatttaactgtctctgggcttggctgncacgctcattaaagtactttcgacacctactgtacgttgatttgaccaaggttgttatgggaatgttgcgacaatccttcaaaaccttattgatacattctgagaggttggttgtcatgtggccatatcgacgtccttctctatcataagtcatcgtccattnttcctttgaaatgcgatcaatccatgttgctatggctggacttagttcacgaaatttttctaaattttgataaaaaaaatgtgcttgcaaggagtgtaggatgcataaaattagttatcaataaccaatttaagtatatagggaagttaaataaacgtgaccatcaaatatganatcttacccaacttcttcaacatttctt

SEQ ID NO: 29369 - DNA, 401 bp, Glycine max
  unsure at all n locations
agctttctgaatgattaatcgtgaaaccatttcaaaacttcaaacaagattcacccatattgtgaatcacttgcttgatcttggaaaaccgtttgaagatgatgagctaaacatcaagattctcaattgtcttacaagaactttggaaccaaagatcacagcgaccaaggaatccaaggacttaacatcaatgtcgatggaagatctcttcggaaaattgcttgtgtatgaacatgggttgattcaacaatctcatgtagaagaaacataaaataaaagaaaaggaattgcactcaaggttagttcttcaaaggaagattgcaaagaaagctctagtgatgacgaagatgtagagaatttaagcttgatggtaaagaagtttaggaaatttctcanacaat

SEQ ID NO: 29370 - DNA, 406 bp, Glycine max
  unsure at all n locations
tcatgatgaaacaataatgattcanagatgttttgatgataacatttgtgatgacattaagctcanaggtcaatcaaagaatgagttcaagatgttcaagatagaatcaagaaagaatgagttcaagatgttcaagatagaatcaggaacacttcaagattcaaggatcaaccttccaagaatcaagatcaagattcaagactcaagattcaagaatcaagagaagacttaatcaagattcaagattcaagaatcaagagaagacttaatcaagataagtatgaaaaggttttttcaaaagctgagtagcacatggatttttctcacaacatgtttaccaatgagtttttactctctggtaatcgattaccagattgttgtaatcgattaccagtagcaaaatgaa

SEQ ID NO: 29371 - DNA, 391 bp, Glycine max
  unsure at all n locations
agctttcaacaaatgtcttcacaaataatcatcacacagcaganacctagcaagactactcatcatatctccccaaaaccccatacccacgaaatttaagagagaaagaagtccatccaaacctgaaatttcgaaatcccactcgtagccacgcacttcacgactccaaaaatgctctcctttcgcgatttggagcagaaatgatggccaaaggttggagctttgttggggtttcaatggagaatggaggagaaggaaaaagcaacgtgaggaagagggagagagagagctgttctgaaattgggctgagtgaagagagagagggttgctttttgggttttaataaaagggttttctctntttctattattntatttaagcaatgccacat

SEQ ID NO: 29372 - DNA, 445 bp, Glycine max
  unsure at all n locations
taaggtaaccttttggtcctccacactcatttctaagttatcatttcccatgtccaaaacacattttgcggtaagcatgaatggtcggcccaatatcaagggaatatcagaatcctcgtctatgtccattatcacaaaatccatcggaaaggtgaattggcgaaccttaaccaagacatcttcaactacaccatatggtcatgtaatggaggggtctactagttgaagagtcattatagtgggagctatcctcgggttctcaattctccgacacatagaaagaggcataaaattgatgctcgccaccagatcaatgagagctttacccactgacacagtcccaataaagcatgggatgatcacacttcctgngtctttgaacttctgtggtagaattctatggatcacaaaactacaatttcctttcaccataatgctctcattg

SEQ ID NO: 29373 - DNA, 371 bp, Glycine max
tttgaagcttttttcaagacttagaaatcaaagatattcgagatggatgatcaagacaggctctagagtcttaagaagagtatatttaataggaagagaattccaattgaagtagcataagctttggccaataaatttaagttaaaaaggctttttcaagaaatttactctttggtaatcgattaccaaaggatgtaatcgattaccagtggccaaaactgatttacaacagctattaaaatttgaattcaaaatttgcactgtgtaatcgattacacatatatggtaatcgattaccagcagttattaagacgtttaattcataattttaagcttggaatcgattacacaaatactggaatcgataccag

SEQ ID NO: 29374 - DNA, 448 bp, Glycine max
  unsure at all n locations
tgcccagagaaggagtccatggaggacatgctttcttcctcaaattactggaaagcggnttctaatgactcctctgcggcttccacataaggcatagaggatgggaagctcaccaagatgtcttcctcgcctgatacgatgaccagatgcccttacactatgaatctcaacttttggcggagtgttgagggaacaactcctaatgagtggatccacgggcgccccaacagacagctgtagggagggttaatatccattatttggaaagtaacttgacaggtgtgagggcctatctgtactgcgagatcgatctctcccctaacctctcggcgggtgccgtcgaaggcacgaaccaccgttgaactcggctttaagtgggaggcattgaatggtaatttctccaaagtgctcttacgcatcacgtttaaactggaaccattatcgatga

SEQ ID NO: 29375 - DNA, 387 bp, Glycine max
  unsure at all n locations
agctttgtntaatttttataaagagttaaaattaagttcagaagtgagttatgaacaaagttaatatttataattaactaattattaaaactacatcattcagaaaatatttctcaaaaattataaactacaaaaggtagtttaatcagtgtcactatcattccaattcttttgtcttctaattacaatttctcatactatgtcaaaacgtctataataaaaggagacttcatctccatgatcaaagtcactttctgcaagaaaatcataccatggttgagcaatggctttaggagcaattccagggctgagagtctcaagaggccattgcgatggacggctaaatcgtcttaatactatcatgtgatggccacaagcattaagaga

SEQ ID NO: 29376 - DNA, 444 bp, Glycine max
  unsure at all n locations
actaagcttcttaagaaattctaaagaactagagctttgctcacatatcttctattagctaagctcacctccttgagatgagaagctagaacttagctacacacccctataatagctaagctcaaccncatgacaaaaaacatgaaaatacaaaaaaaaggtccttactacaaagactactcaaaatgccccgaaatacaaggctaaaaccctatactactagaatggccaaaatacaaggcccaaacgaaggaaaaacctattctaatatttacaaagataagcaggctcatacttagcccatgggatcgaaatctaccctgaggcacatgagaaccctagggcctacccttggatctctagcccaatatacttggagtcttctacccaattcccttgcgggataggattgcatcacaacacattcatcataccacctatcat

SEQ ID NO: 29377 - DNA, 389 bp, Glycine max
  unsure at all n locations
agcttgtccgaacaattggagcatgacgagtcttcttgaagaagcaaatctcccgctggaaacctacctaaagcgaaatggccttagtagcttgatatcagagcagcaaacaaattcagcttcaaatgtgcaagcacagacaaccaatgatagtgagggaaaacacaatgaggattgtggaaccgctttggttattcatgagagggaaagcagtcctgaagagaacagtgggcaagacagagagcaaaacaattcactctcatgaaatcttgccagttatattataattgttttttcctttgttttaactcaaaaatcattttacaagaatccttgcataaattataaaattataggaggttcattaggatggctatattnttttttct

SEQ ID NO: 29378 - DNA, 421 bp, Glycine max
  unsure at all n locations
tgtcagaacttgttntaacanaaacaaagaaatttcttgatcaacttagtagcctcatacttatttttcattaaatataaccatgtaaacctagaactatcatcaacaatagtcaaaaagtaatgttttccatcatgagtagcatgttgatatgggccccacgtgtctacatgtatgagatcaaatggggactcaaaataatggttatttgaaataaaagagagccttctanatatggacagggggcagatcatgcaatctttagaactatgagatgtcaaatgcaatgaatttttatttgcaaaaagtttcaaaatcttgtcagatacatgtcccaaatgggaatgccacaaagattgttcactaagaacattacaacttgtaactacattattancaattgaagaatgtgaattcacaa

SEQ ID NO: 29379 - DNA, 396 bp, Glycine max
  unsure at all n locations
agcttgtttaaattatgatggattaaaataatatagcattgccaggactaatgatattacaagacagactgaaaaaatgcctattgttctgtttcatgataaatgagcagcagcagctaatttataactagaggagggatcaacttacaccaagagtaactcttctagtgaaaattttcataccaatttggataaagcaattcaactattatctaagtgaaaattttcttttaataaagtgtcgttacttctgtgtcccatgaattgagttaaaggccacccatctttagcagagtacaaagaattctcatacttgaattagcacaagcgcataatagcattggatggaacccttcaattntatttaagcaatgatttttaatccattaataagca

SEQ ID NO: 29380 - DNA, 423 bp, Glycine max
  unsure at all n locations
tggttaccctttacctttatatagcttctaacatcttaaggcactgtagcttcagtcatatgtagnggaatgtcatgaacaacagctgagaaaggctgatggcctcgcttcatttgagatacatggaaagcatcaagtattttggctacagccgtggccggtaagggaatttttgaagcacccggccaaatcttatctatgagacaatgattntataggaaccatagaatcttgggtgtttactgtgatatgcatacatggttgtagtttcatatacaccacccaatcatccacttgaaacttcctgtatattcgattattggtatttgttagcttgttccaacattctattntgagcttctgtcaaatgaaggtagaacgtgaagggtgaaaacttgatccaggtgtttttacttgtgaagt

SEQ ID NO: 29381 - DNA, 395 bp, Glycine max
tcaagcttttattttgctattgaagaaaataaatttaaatatgcaatgataaaataatgaaaacaaattcagcaaaatcatgtttggctgcaaaaagtaaaaacaaaaagaagtttaatccacatgtgttgaagcaaaggaactacataagatttataaaagatattcgcatattcaagtgtcgtttgtgatatttctacacacagatataaaggaacaattacaaatatttgttatgttccatgcttcaatatttgattagatacataatagtatcaatcggtagagtttaagcttgaactaccctcacaatacaatttcaaagaaatggaataagagaaaaacaaaacatagaacaaaatacaacgtctaaatgtaaggaaatggagaaacta

SEQ ID NO: 29382 - DNA, 431 bp, Glycine max
  unsure at all n locations
ttgctgatttagttntcgccgatgaattgatcgaagtgggtctataaatacgcaaatctgatcatcatgctttgataaatacaaaaaaactagggcaaatgaagatggtgagaataacggagaaacccatgttgtgactgccattcctatacagccaagtttcccaccaacccaacaatgtcattactcagccaataacaaaccttctccttacccaccacccagttatccataaaggccatccctaaatcaaccacaaagcctgtctaccgcacttccaatgacgaacaccacctttagcacaaaccagaacaccaaccaagaaatgaatnttgcagcgaaaaagcctgtagaattcacccgcaattcggtgtcctatgctgacttgctcccatatctacttgataattcaatggtagccataaccccag

SEQ ID NO: 29383 - DNA, 386 bp, Glycine max
  unsure at all n locations
tcaagctttcttgtgaagcttctatggaggttggatctttgagcttcaatgaggtccttcaatgctaattttccaccatggagatgcagcggaagataaaggagaaaaggtgagaggaggcgccatccactaggaaataagccatggaagaagaagcttcaccactaagagagtgccttggataaaaagcttagagaggaagcttcaatggaggaaaagaaagagagagagaggggaggggagcataaaattgaaggaggaaaagagagagagaagttgaactttgaaatgtgtctcacaagactctcattcatcaaagttacaacaagtgttacacatgcttctatntatagcctangtagcttccttgagaagcttctttcata

SEQ ID NO: 29384 - DNA, 445 bp, Glycine max
  unsure at all n locations
tgcttgtggggcttctatggaggctggatctttgagcttcaatgttgttctttgatggtgattttccaccatggagatgcagctgaagacaaaggagaagaggagagaggaggcgccatccactanggaataagccttggaagaaggagcttcaccaccaagataagccttggataagaagcttggagaggatgcttcaatggaggaaaagaaagagggagagaaagagagaggggggagcacgaaattgaaggaagacaaagggagagaagttgaactttgtgttgtgtctcacaagactctcattcctcacagttacaacaagtgttacacatgcatctatttatagactangtagcttccatgagaagctntcttgagaaaactttcttgagaagcttctttgagaaaactttcttgagaagctagagcttagctacacaca

SEQ ID NO: 29385 - DNA, 385 bp, Glycine max
agctttaatcttctagaagcaccatgagctaacctcaaatccatcaccataatgaagtcacacctaccattctaaaaacttaattccattccaaaacgaccatatatagggaccaaagtacaacattccaaatcaccatctaaagaaaagttcaacggtgttctacatatgttccaaccaagcacacacagacaaacatgtcattaacacaaattataagcaaacaaagataggaagaccgcgagggggaatgagcgagggaaaatgaaccttacaaacgatgagagagtgaagctattgtgagggcgagggcatgcaatgatgacgacgataacacacacgagcttcgacaacaacactggacaacttcgacatagacgctttt

SEQ ID NO: 29386 - DNA, 436 bp, Glycine max
  unsure at all n locations
tgtacgaatataagaaacatcttcttcgaccttggtgatctttgtctccatgtcatcgaattgcatgtccacttgtaactcaagagcatcaacctttcaccaacaaaggtttgaagaccatcaaacctatccaaaaccttttgaagaagagaggaatcttctccaccatgtaaatgtccttcttcatcaatgggttgagcaccctttttcacccaagagccatcatgctctttacgataaccaaaggatgcaatcatagtggcaccgattaagaaggatctcttgattggaacataaggttcagaatcaggagggatgttatagtgtttaaggaagagagtgactangtgtggatatggcaatgtagcatttaatcgcaatgccttatgcatgcgatatcggactaagtgtgcccaatcaatttgtcggcctttat

SEQ ID NO: 29387 - DNA, 377 bp, Glycine max
  unsure at all n locations
agctttctttactcaaacatggaaagaagacaatatatacaaggcattaccaattgattaggagaataaatttttccttataaatttttacaaaatattaccaattctttttcccatataggcatgcaataaccccaactgcttaatcaggcttgcctgaacttcatcttggaataattcctggattaggaggtagtaactggatccaagattctctccaagactgttggctaatttccctagcacaatntgatttttttttttgtaaaaatgaaaagaagttagaccgtgagtgagacactntaacagtgcatgtcttatgactatttgtccttatttatgaaatnttcattagtattattaacttagaagttaaa

SEQ ID NO: 29388 - DNA, 419 bp, Glycine max
agcttgttattactatctcccgctttgtgatgatgacaaccctaatatcaagaaacacatacacattctttgtcctagtcgatcactcacttaatactccatattctccccctttgttcttgagtctaagcttcacttgaaattaagctattgaatcatatgagagcttgatttaatccctattatctctccccctatggcatcaacaaaaagccgaagttgtaagaatataaaacgtcataaatgattataaagcataataccaaatgtaagcacatatcactagacatatgtcatcagaataattaagtctaaaactcataacaattaagagtaagtcaatatagtcatgtcaagggatactaatcaaatcataaaagacatactatgtattcacatgtcatagaaatatagatcat

SEQ ID NO: 29389 - DNA, 407 bp, Glycine max
  unsure at all n locations
tactaagctcgccacccagctcgcctangcgagctaggttgcttcctcttgttgcattctccttccggaggaacatcctggaaggccgaagtgggcctggatactatatgcaaccccgtttttactacatacacccccttccctttattggtgattctttctccataacgttacagaaacttacgaatttcgtaacaatactntttttctttccgtaatgttacggaaccttacagattacgtaatcatgccttttatgcctaccacaatgttacgaaactntacagattacgcactatgctttcttttggctttcggcatgtctcggaacttcacgaattgcctaacgatgggtgccaagtacctcacagcggtcaaacgacggtcgcatcccagcaatggatagt

SEQ ID NO: 29390 - DNA, 406 bp, Glycine max
  unsure at all n locations
agcttatggttgtaatacttacttgntggtgatgaacaaaagcgcgaaatggaatcaaaaaatgcgaaaaatgatgaccctnaggctgcaaactcgtaaatcccgtgggtatggctttcgaaaggggggaaaagaagttnttgaatgcaaaaacgtccnccctttcgtcacttttatattttggtgcagaggtggctcgcccaggcgagctcagctcgcccaggcgagctaacctgcacttttttttttttttgaggggaacattaaccatgtccccacctttttcacgggttagcgttcacctaacttgaacctacttaagtcagaattaggcgtcgattacttattntataacaaacaaatagtaaaagaaaattgtgaatacaaggatactgggctgccttac

SEQ ID NO: 29391 - DNA, 485 bp, Glycine max
  unsure at all n locations
tcaagtatacaactaatactaacattgccatgagaacaactattgatgattcatggttatggcattgaagatttggtcacttcaacactcaagctttgatgttgctgcctcaaaataatatgatgagagatctaccatgcctatatgactataatgaagcttgtgaaggatgtcttcttaaaaagcaacaaaattaccattttcaactaacaaagcatgtagagctaaagactcgtcagagttaatccacactaacatttgtggaccaatgaggacatcgtcactaaacaacaacaggtatttcatcctctttattgatgacttttctagaatgacttggtctacttctttatagaanaatcaaaggtctctggaatgttcaagaatttcaaagctcttgttgagaaacaaagcacgaaacatatttaaagtaataagaagtgttcaacgcanagaatataactcacatgagtttgataagttat

SEQ ID NO: 29392 - DNA, 375 bp, Glycine max
agcttttgctttttttgttgttcaccatgttgctccttctatctctaacactgcactccattccatcccaccatgtttgtccttaaccacgaaaaacgactttgttatcctttgtgtagaccaagcaatgaagtacataaaatttgggataaatatacttggacacctagtaagagagagagagagagagagagagagagagaaaatataagcagaataagtgatatgatagtgataagaaaaaagagaaaaaaaaataaaaaatattgataaggtgtttgaatttttggatgtccaaacatcatgtttctaaaatttgtctaaagcttaagagcatctctagcataaggttcttatctggttccttcaattgaa

SEQ ID NO: 29393 - DNA, 445 bp, Glycine max
  unsure at all n locations
acagagtggtacctgcagatatgtcgcgggggtcaggagaccttcgggacgtcaggtggggtgctattgcccaaaaccaagcttgaccaatcccgacccaacccgggcatagtcggtcagtgagaacctgtgatgtacctaagcaggcgagctcctggcagtcaacagataaaaggaaaacaagaccacaaagcatagaggcttgtggtggctggccagctgtgaattttgtgtaatatgtggattgtggcctctggtaatcgattaccaaaggtgagtaatcgattacaacgcttacaattgaggacaggacgctaagatggtctctgcgtaatcgataccaaggggtgtaatcgattaccaggcttgaaaacgaagtcaggaaacttanggagcctctgcgtaatcgataccagcctgtgtaatcgattacacagaggaatgg

SEQ ID NO: 29394 - DNA, 410 bp, Glycine max
  unsure at all n locations
gttttatggttttagaatatcgatataattgagggataattattagaaacatagagagctcctaagtttccagatgcgatctaattgattacaatatgtggtaatcgattatatcaagctacaaagactttcttcttttgaaactagcttgggttatcgattaattcaataaaaattaccaatatttgaagagaactaaattttgttgcttgttctaacactntgcaattgattacttaaacttagtaatctattacacattgtttgaacttattgcttcttagaaactttgagattaatccatctatcttctcatgtntgataaccactaagcatggataaagagaactaaatctaanacacttaacatgcctagtttagaaatatctgatacanatgccatatcttta

SEQ ID NO: 29395 - DNA, 492 bp, Glycine max
  unsure at all n locations
ccgcttcacatggagctagatcatgtggtatcaagagcatctttttctatgtgatgttcttttgcttcctctatcttttggtttggtcaattcactttagagtagattcaaaaaaataaaccgattaaatcttagatctacacttgttcttgcatttcaatggttcaaattttatagatctactctaaaatcatgtttttgtggtgattttatgttctatcatttttcagtcataatgttcttgtgttgaacctttagatctaaattttcttccaaaatattgattagaaactaagtgtaaatcacttaatccatgttgtcttagagtcatgtttagtcataataattgtcacattatgttctaagtttgtgttaaatctttttattctgttgattgaattctacataccattgctcatgtattcttgtcattcttagcccatcttttgaatcttgagtctaattcatgcatcgtatntagttcataacatt

SEQ ID NO: 29396 - DNA, 341 bp, Glycine max
  unsure at all n locations
attnttatatatacacgcgcgaaatggggtggacgtgcgatgaggctggtaacatgaatctataggccactgggccaatgcgcgccgttatctgaaagggtccataaaaccgcttggctagctaggaatatgtcggagccagcgacgtctgccggtatggtcggaagcggacgtgtacccatacacccacctcataagatatatcgcggcggtgtttatcggcagcaaccttcatgagttcctgcgctcgttgaaggcggcgcgtcaattgcgcgtgtacttgcagacgcgtggtgagtagcgagtcaacggcatcattcgacgattgaccttggagatag

SEQ ID NO: 29397 - DNA, 586 bp, Glycine max
  unsure at all n locations
acggcacccacgagcacggaaaacaacgcagccgaagacagaacatcgacacctccccnnccccccaagcggggtttgtgacaccgtagaacancancggcaancnagcncggacccggcgaccccnagagncgaccggcangcangcaatctttttagctaaacgagacggaccacaccgagagaaggagaagaacaacgaccacgcccacaagaatggacggccnagagagcacaaaggaagcgccacccgcaacgcggcagacccaacccgggaagatgcagaaggaagagccttggaggcgaagacaaaaccgccgcaagaaggagggaccgatgaggacacaaccaacgaccatgaagcactggaaggacccacgaccacaagcatacttagacgagcccaacaccgcacagagaccacgctggccaacaggatagccgccacagaagatgactgaacgcccaagcgcagaaagacgaacgcccagaggcagaagcactaccaagaccaccaaacgctgctgaaagcccaaacaaacgcggaagaccaacgcgaataagtgtcacgcataaggcacgaaag

SEQ ID NO: 29398 - DNA, 302 bp, Glycine max
ctggaactacttattttgttttcatggcgcctatgcagggtgaaagccttggaggaaagaggtctgcctatgttgttgtggatgatttctccacatttacctgcgtctactctatctgagagaaaccagaatcctttgatgtattcaaagagctgagtctcagacttcaaacacaacaggactgtgtcatcaagagaatcaggagtgaccatggcagatagttctaacacagcaggttcactgaattctgcacatctgatggcatcactcatgacttctctgctgccattacaccacaacag

SEQ ID NO: 29399 - DNA, 510 bp, Glycine max
  unsure at all n locations
cgacggggtttgatcgtcgancacaccaccanaactaccaagctgtagccaatggactaccttgaatagtgacttttaatgacttttcaaccccgcagccctgcgcgtgaggtgaagctcactaccagccttacgtgaaaaaccctgatattaccatctccttacagcatccatgaccataggaattgcctggagcatcagcgtgaggggttcttagaaaacaccacaactacgattgttggctatccaagcatgatgagctaaggacacacctgacgtacacagcactaacggttgaacgctcgacatgcacaatgaactgtacactcacacaggccccacactctttattgatgacttttctacaagactcgctcgattcatcaagaacacatacgcgtctatgtgagcgcacgaattcaaaccctcctgacagacaaacccgaggccactcctctgctagaagcgtcacgcaccacatcactccatgacttgctaaactcccaaccc

SEQ ID NO: 29400 - DNA, 298 bp, Glycine max
ctgcatttttactcctcgagaccgacacagcagtcggcaagcagacgagcgctacaaaccttctctactatggccttcaacaaaagcgaatccatgtgataatgactttgaggggagatatatttgtggtgcgcatctcaaatgcccaaagggatgctaatctacacttagctcctgggagggtgcaagaagtgaaagtaatccaagctggtctgctggtcaatataacaactgttctaatcctgtcttccaccgttatactcgtggcgccaagaaaccggcatgactcttccttaat

SEQ ID NO: 29401 - DNA, 122 bp, Glycine max
ccacgactcacaaaagacttcgaaaacaaaaaagcatactgaacaccatcccaatataccacaaaaccacaacaatacatatgcacgaagaacagtacaaccaatataccacacaaacataa

SEQ ID NO: 29402 - DNA, 341 bp, Glycine max
  unsure at all n locations
tattcntttcattcaattctgagcgtctcgatatatgacgagactcaatcagacatccgagtaaaaagttattgtcgttttaattggctcagaggttcaacattaaatttcgagcgtctcgctatattacgggactcaatcaaacatccgagtaaaaagttattgtcgtttgaattggctcaaggcttcaacattcaattttgagcgtctcgatatatgacgagactcaatcagacatccgagtaaaaagttattgtcgtttgcatttgctcagaggttcaacattgaatttcgagcgtctcgatatattacgggactcaatcagacatccgagtaaaaag

SEQ ID NO: 29403 - DNA, 451 bp, Glycine max
  unsure at all n locations
ttgagccaattcaaacgacaataacttttactttttgtgtgatgagnctcgaaatataacgagacgctcgaaatagaatgttgaagctcttagccaattcaaacgtcaataagtatttactcggatatctgattgtgtcccgtcatatatcgagacactcgaaattgaatgttgaagctctgagccaattcagatgacaataactttttactcggatgtctgattgagaaccgtaatatatcgagacgctcgaaattgaatgttgaacctctgagccaattcaatcgacaataactattcactcggatgtctgattgagacccgtaatatatcgagaccctcgaaattgaatgttgaagctctgagccaattcaaacgaccataaatgtatactcggatgtctgattgagtcccagtatatatcgagacgctcgatatagaatgttgaatc

SEQ ID NO: 29404 - DNA, 320 bp, Glycine max
  unsure at all n locations
tattctttcncctgtcagagaattgtnctctagactaccaatatcattccaaaccttccctattcccacaatgatgacccctttcccatgtaactgaattccccttatgatttctcactcctctaactaacttgattccccccactcacaaagcactgcaacactaattctgaactgactctgttgccctcttggggcctacatgtgtaaaccttcagagggttcccagaattgagcaaattcctatcattattatcgatgcacatacttatttgatccagctactaacccaatcacttatagatctggtttctggtcag

SEQ ID NO: 29405 - DNA, 391 bp, Glycine max
  unsure at all n locations
ggaatataatcaacaagaaggtgtcattcttcacaaacaagaagttggctttttttaatttttttttcataagcacttaattaccagaaaagaaaataagaaggaaaaatgaaataagttttttttaaagttaaaattaacttatgctatnggtttgcacatttcaaggctcaaaaccgaacggtagaaggaacattggtatatcattgaagatcaaactcattnttatggatggaaaggtgattcttaacttcaaccaaccaaccaagcactaaaattatttcataaaataaaaaagtgttaaaacagtgcaaaaacacctaagctttnggggacgtggattcggagtgactgtataaaatcctagccatanaaagcanatcatgtacat

SEQ ID NO: 29406 - DNA, 453 bp, Glycine max
  unsure at all n locations
actaagcttgatctttatgtgaagcagcttgaagattttcattttgtgtgctagctgcataaatcanaagacaccattgttttctatcttcaactaaaccctgtgctagtccatttagataaaatataaacataaaaaaaaaatccaggttttcatgtctactctagtcatgatgatcaggttttgggtaatgaaacacaaataactctgaaattttttgagagaactaaataagataaatcctaacaataaggggaaaaaaataattaagaaaatcaagagatgtacacattacagatgtacaagagagcaggatagtgagacccctagatcaaccaagataaggatatttagatttccaaatgttnttattatagggtttaggagactcagatctccaaatggttgtgcccctgatgttattcctattgagtaccatggtcaagtttacaa

SEQ ID NO: 29407 - DNA, 431 bp, Glycine max
  unsure at all n locations
agcttttatttnntgtcttcgccagtgaaaggatcgatgtgggtctgaaaaaagggcaaatttgatcatcctactangacgactgagaaaactggggcaaataaagagggtgaggataatggagaaacccatgttgtgactgccattcctgtacgaccaagtttcccaccaacccaacaatatctttactcagccaataacaaaccttctccttacccaccacccangtatccacaaaggccatccctaaatctaccacaaagtctgtctaccgcacttccaatgacgaacaccacctttagcacanaccataaacaccaaccaagaagttgaatttgcagcgagaaagcctgtagaattcaccccaattccagtgtcctaagctgacttgctcccatatctacttgataattcaatggtagccataaccc

SEQ ID NO: 29408 - DNA, 445 bp, Glycine max
actaagcttcttcttctttcatactatctcatacttcggttttttatttctttctatgctatgcatctagcgccctctctgtgattgggaatccccttgcttcctttcttcctttgataggaaactctccttctctgtcactttgattggaaataccccttctcttcttttatgcttacgaggctaacgattgacattctcacactgagtcactgtttatggtgagtcaggattttggctcaagacttgaagaatggctacgcatggtacatgtcacggtttggcttgcgtcaaagacaaaaacggatgccccacattatttccatgacacagatgcaaaaatgatgatatagacatcttatgcaaaactggccatgcatgcacctatgcggacactcaagtgtcacatttttatggtcatgtgatgctacggctcaagattcat

SEQ ID NO: 29409 - DNA, 436 bp, Glycine max
  unsure at all n locations
agcttataagtactttccttacatgagacanaccaacccgcttatccacccctaatttttggtcccttatttttttattttaaatttcttttgctcctttatctgataaaagaatatttaatcattaatctctcaaatttgaatcattggtgctatttcgaaacaatgatttttttaaatcttgcgagacattaaatgcatganaagagaagaatatattgtctaacatatcgttgataattatttctcaacacaatttcaattganaagtcatccgaataaaggaggattagagacaatgatagaacttaatttatcattccatacattactcanaacaaatgagatattntatttatagacataaatctacaactcannaaaatcgcccaatgtattggccaatanaagtctttttgtatgggttttttcttcg

SEQ ID NO: 29410 - DNA, 488 bp, Glycine max
  unsure at all n locations
tctttctggcgcaacgcaattcatagcacanacagagagttatatagggagatggngagcgacagcgaggcagagaagtcggtgcagaaagagaatgagaagaagaagatgttggccctggctcccattgctaaacctcttgctgggaagaagctntgcaagcgaaccctanaacttgttcgtagaggttagctttatgatccattcgcattctctcaatttgtctgtgttttttttttatttgctgcttggtgttagttaagtatatatattgtgttgtttcagctgccgaacacaaatgcttgaaaagaggagtgaaggaggtcgttaaaagtataaggagaggtcataaagggtctgtctgttttctttctaactttctctttctcacaaaaacattagaaatgcttaccctaattntccggtattgtgaatgcagatngtgtgtgattgctgnngaacatatcaccgatgatgtcatcactcat

SEQ ID NO: 29411 - DNA, 377 bp, Glycine max
  unsure at all n locations
gaaaatgattattaaacacacaaaatggaagtactaagtatttattacctatacttaacagaaaatacttataacactacaaaatagccataatttggaagagtttgatacaatttacacaaggttatacacaaaagttagttgtattcaccgactaacaccaactagtggtgtagctgtctaggaacatgtctttgttggaacaattggacatcaagttgttgtcgttnttggtattgttaatcttggagttgcaagagccttccatcttatangctntgggggaaaatgatgatggtctntgctcataggaccccttatctgaagcagtgctctctgaattcaaaaggttcacttcttttctattactctcttac

SEQ ID NO: 29412 - DNA, 323 bp, Glycine max
acactagtggagagaccatgcgaagtatgggtcgaaatcgcacgcgaagtgacataaatacgactagtcagggcgctgaccgtatataacagaaagactatttgcaaaaatagtggaccatgtaggaaacatgttgaaattatcctatattatataagaaaaacataggagacaaactcaaaaatattgtgggtcagcaagataaatcttatatagcgatgcatatgctacattccctattcaactcctttgcatcagagctacgacaaaagagccgaacacaataaagagatacagggttaaataactaaatggagaggaca

SEQ ID NO: 29413 - DNA, 423 bp, Glycine max
  unsure at all n locations
agcttttgttcatatatagctgcaattaacaagttttatattataagtcatttaatgtattttaaatgtggatacataaatagttttgtcctcatttgtacatccaaatctttctatgcagtgcattgaagacattaaagactacttctgacggtaaaattgatcaacctacacatctgtgattgaagtgaaggttagtcatacaatcaatggttatttatgactgttgatgttgtgtaacatctgaattgtaagattgaattatttttcatattgaatgtagagtcacgttcaaagcggaggccatgagtgtggctattatgtcatgcattggatgtagaacatagtgagtggngagttgaagaatgaatggagcatggtatatttacttttgtataaaaattacnttgagtaacactttta

SEQ ID NO: 29414 - DNA, 396 bp, Glycine max
  unsure at all n locations
agttattccgaagttacaccacctgtgaatggacaaccatggagganattgtttctcgacaaggaatagttcgggtctaaaacaaattgaggctctcttataaaagaagcccctagataatagaccccaaaagaaccactgtaaatgtaaaatgccgtaaatcacaggtgaattttgtagattaaatctaactntctccaattccttttctctaatgtgaattttgtcttcgttctgcttaatgatattcatgaacttcaatcttgatcgtctgtgatcataaaatcctctagtcatactaccattcttgcttaattactttatcgccagtaataagtcagacaatctgtcagggaanaacagtgttatgcagtgttaccgacaatgaaaagaact

SEQ ID NO: 29415 - DNA, 462 bp, Glycine max
  unsure at all n locations
tttgttttaaaatgagttggttgagagttccaatcttctttgaagactaaaggagagggataatgcagctccccattctcagaagctacaagttttcgattagctcttatgattggaatattgaactcatttgcaccctcggcaatctccccaatctaagaggaaaagattattagtcacctcaccaagcatatcatagtaacaagaagctcacaagtcaacaaaattacctgtttatcctcgaagaagttggcatcaagcagtccaaagaaacatcctaggctggaaacataacctttcttgtctgataattgacattggtttttacttccctgattgattgcaaaacaaagatcagacataatgaaagcaacanattataaagaaatgctcacaagtcanaacaattagtgcctgaagattgaccaagctctatacgaattgcaataagaaacttatttc

SEQ ID NO: 29416 - DNA, 437 bp, Glycine max
  unsure at all n locations
ttctttttntgtaccttgaacctctnttagaaccatgctatgtgctcgcgactggtccctttcttcccttcgcaacttgagttcactattgctaccccatagagctccgcgaaatttgttccggccatactcttccttgcgagccctcttggtctcttgttcaagggctcttgcggtaattgcattctcttcccgtaacccggcacactccttccgaacgtgtgtagcggccaacttgaacttctccttggcaagttntgcctttcctaactcgctnttgagagtttggacttcttcgtcctcttccggtgcttcaaaactctcttcgctgacgacttttaacttggcgagccaatctaaacctcgtatatgaactttcatccattcgtggtacccaccaatgatgccattacgaatgcctctaagctcttgatctt

SEQ ID NO: 29417 - DNA, 459 bp, Glycine max
  unsure at all n locations
tgagaaagtccttctgattntgtttatatatttctgtctttattatatgagatgaaatgcaaagattggacctcctgttagttgttatcaataagttgcttaaacacttgtgcttaagtgagacagtagccatgagactgtggtttgagctactttccttgaatttgtcttatgattaacctcatctaattgtattgttcacattttggtctcctctttgtctagctgcatattctgtgaaaacaagggataggtacacattgcttcatctttctcatcatgcaatcaatgaattttgatgcatacacccctgtcgcaacctacccttcggcgggagggcgacgcgagactcgcgggatgcgggttccacgaaaggaatacgcgcggagtcgccaccaacgtttatttgaggaanacgtcggannaaccgganaagacgcgatctacanactnttaagt

SEQ ID NO: 29418 - DNA, 419 bp, Glycine max
  unsure at all n locations
atttttcntgaggccttagaatactaaaggaagtgtgtcatcctctttcttcatttattacgaaagtgtgatggaatcttaagtacaccaataattcaaaaaaatgtaaatttattttgcgttgcgacctctttagaaacattntcgtcatggagaaagaaagcaacattgtagttatctctaaatctaaaagctccatccgtcatctttattcatttattataaaagtgtgatgagatgttatacaccaataaataaataaaatagatgatgaaaaataaacatcctacatcacttctaaaaaaatgcaatttagcaaccgaaagtagtgaccaaaatatttcgactgaagtagcgaccacagagttaacgttgcaactcacgatngaatntgcgaccgaattaatcatgatgttaac

SEQ ID NO: 29419 - DNA, 483 bp, Glycine max
  unsure at all n locations
tgtcggngaagagagaagagaataagctatcgcggatgttaacagcgaaaaagagagaatgcttccgaaagagggaaaaaaatgctttttatttttataaatgaacggcaaaattgacctttcattgaattgctgggtgcaccaacaatattgctgggtgcacctagcatatcccatgttataaagaacaaattaagataatgagtatcaattgtgttataatatatcttattcatcattaaatttatttgatttgtcttgcgtaacatttctttatttctttatttctttcatcggtaacttaccttcacacgtggattttaagctcctagaatctccattgttaagctccatataattgatctggttaggacaacatagagtttaacataatgacaatggatgatagctaagtcttaattgctctgagttgtcattctatccgtgattagataaatgatgagtgatgcttaatatgaatct

SEQ ID NO: 29420 - DNA, 644 bp, Glycine max
  unsure at all n locations
ccgccgcactcacaacagtacacgtantcacagcgtacaccccgcctancacacntncnctccccccccccgcgcgcggggnattgatgcagtcgnatagcaacccatgcaanactcaagcanngccgactaacganaaagcancaccacagccccccacctctcctgtgctttancacgagaagaaaagagagccatagcgaccgcaccgggcaagagaagcaacactcgctccgctaaccgccaaatacccaccatgcacagagaaacgagcgactgatgacacacaccataggactctgtgcataaccactcagatgaccgcagcgaacaccatgaacaaaccccaaccaaaacataatcacgaaaactcccagaatcacccgcacacataaaacaagcaggcccaatcacagataaaaacggatagatagacgccctcgacgagacgccaacagcgcaacagggccatgacaaaaacccagaccacatatagaggacacaggtcacgtgcctgacaggagaggacatcccatgatcgaaagaccagatatcgatcagaccagatggaagacatgaccaaacggcatcgtaggaagcctagccagaaaagacacgcaactgggacggaagacgtggccacn

SEQ ID NO: 29421 - DNA, 416 bp, Glycine max
  unsure at all n locations
ttcttttttttaaattacgagcgtctcgatatattacgggactcaatcaaaactccaaattgaaagttattgtcattttactctttatagagctttcgttntcaatttcgagcgtctccatatattaaagggctcaattggacatccgagtgaaaagttattgtcgtttgaattttctcagagcttctgttttcgattacgagcgtctccatttattacgggactcaatcggacatccgagtcaaaagttatagtcgattaaatttgcacagagctttagttttcaattacgagcgtctcgatatattacgggatacaatcggacatccgagttaaatgatattgtcgtttgacttttcttagagcttccgttttcaatttgagcgtctcgatatattacaaggctcgatcagaca

SEQ ID NO: 29422 - DNA, 429 bp, Glycine max
  unsure at all n locations
ntgagcacattcaaacaacaataacttttgaatcgaaggtcngattgtgtctcataggatatcgagacgctcgtaattgaaaacagaagttcttagaaaaatcaaatgacaataagttttaactcggatgtcctattgagccctgtaatatatcgagacgcacgaaattgaaaacggaagctctaagaaaagtcaaacgacaataacttttaactcggatgtccgattgagtgccgtaatatatcgagacgctcgtaattgaaaactgatgctctgagcaaattcaaatgacaataacttttaactcggatgtccgattgagtcccgtaatatatcgagacgctcgtaattgaaaacagaagctctgagcaaattcaaatgacaataacatttcactcggatgtccaattgtgtcccagaggatatcga

SEQ ID NO: 29423 - DNA, 514 bp, Glycine max
  unsure at all n locations
cgccagttgttgttgatcgttgancncncggcaatacagcgcggccgccgggatactgtagagncgacctgcaagcattcaatcnatgaggcaacaacgcgcacacccaccaagagcagggatgccgagggcagccgcatctccttccacacacgaacgagagaggagcacacacatgacacggcccgaagttagtctagcctcttattgtgaagcaagctctccttttctacttggctgctgataaagcatgatttgctatccaggctccactctttaacatactaaacaagaatgatggcgaaactgtcacggaagtggccctgtctcatatagcaaggatgcattatcgtgtaaccagatgagccaagtatatgattctgcatatgcgccggattacttaaaaaagatcttttgctgaagagaacactacgtaacgtaagaattttggttgcaatcattctgagattcattcaagcggacatctgactacttnctaactgcaccctaaccg

SEQ ID NO: 29424 - DNA, 422 bp, Glycine max
  unsure at all n locations
atcttatccattntagctttcaagatgctaggttgaccttgtgcgatgtttttgatgaaggtcccattaatggaacttaatggctagccctatttcgctagatgttaggaatatcattaatagtatatttttgaatgaggatacggttaatgttgtgatatgggatgccccccaaatggcgtttactccactaaatccacataccagtggctcactcaaaccaccttcgccaatggaaacccaacttcgcaagactcctagatatggtctctgcatctctctgaacatatcanacactttntatggctcaccgatcacaaaaagtctccccactaaaagnttttgtctttacagacattatttctagctgcttgtgtagtaagtggtctatctcatgaagaaactattcttcatctcttgaa

SEQ ID NO: 29425 - DNA, 468 bp, Glycine max
  unsure at all n locations
tacccttatggctggcctccggacttcactccttgtgcctctccggaagatgtgagccaagcccctaccttcaaggggcaacttcctccttatgccgattaccccctgcaagaagacgacgacggagacacccatctgggccctctgcttcccctcaaggatccagctccccatgaactaccccaaccaaacatagtccgccatgtcccatcttcacccgcacccgtaaaagaatcagttccattcacagaagataagggaaagattgatgcgcttgaagagaggctaagagcagtagagggcctcggtaattacccgttctcagatttagtggacctatgtctcgtgcctgacatcgtcatccctcccaagttcanagtaccggattntgataagtacaaagggacgacatgtccaaaagggcatcttcggatgtattgccgaaatatggnggcgtattctgtggac

SEQ ID NO: 29426 - DNA, 436 bp, Glycine max
  unsure at all n locations
agcntttattttnttggaatcaaataaaacaccaagatagtctcatattgtaaaattgccaaatcgtgtctcaatagaattaattgattgatctaatatgtataaaaaatactcgatacgaaaagattcttcaggtgaatgtgtgatctcattactaatattttcatcaaaatgagaatttctattaattttacgtttttcacgaaattttggctttatatccatttcgatagccattttttctgtggattttaaagtcaatgcaaacccattttccctataatgttttaaataagtgataagaccttttaaatgatctatggcaacatctatatgcatancctttgattgtagaattttgctaatagaattgacagcaaacaaaatatcataccanatattcattcctaataacaattcacaatcttcaagttca

SEQ ID NO: 29427 - DNA, 493 bp, Glycine max
  unsure at all n locations
ngtgacgatatttaaaanatgacaccaaatataaataaagggtaatattatattgcgacattttatcaaatattgtctatatcacatgtcctgctaaagcatttagtgatatgaactatatacaatatttgataaaatatatattacaaaaacatattaataacaattattcatatttgatgatattttttaaatgttgtcaaaaactattcacaatatttttactaaaatgtgacggtgtatataaatgggtagtaaatagtaatccttggtcattccctagtattagtacaactattcatgtatattcacaaatgtacgtagatatttattaaaatatttttttctaagaagtaaaacataaaataaaaattgaaatatatatgtatacaaaacataaattagaattactctatatatgataaagaacgtntaaataatgtcacattacacgtacctacatgtatgagtacctcattatatatccatcatt

SEQ ID NO: 29428 - DNA, 431 bp, Glycine max
  unsure at all n locations
agcttctactatgtggcanggcgggcttccttcactttcttgtctccaacgcgagctttgaccactgttcttccttcccgcgatgcttcttttcatgtccgcctgagtaggcttatagcctaaaccatacttcccacgatntccttgggtatntatcaggctagttatgccgccgttgtctttgcctaaacccatcccgggttcataaccgttccccaacataactcgggccatcattaccgctgcatcggacagacaaggctgcccaaagagggagtccacggaggatatgctgaccacctcanaagactggaaagtagtttctaacgattcttctgcggcttccacataagccatggaggatgggcagcttaccaagatatcttcctcgcctgacacgatgaccaagtgcccctccactacgaatttca

SEQ ID NO: 29429 - DNA, 479 bp, Glycine max
  unsure at all n locations
tatgcgcatacttcttcacgaacgttcacttacacaagattntttttattactaagacnaatgcacccatatacaatcaaggcaccttcgttacctagattatttacatgtacttccaaggagtatttgttacctacatcacacacatttcctttgctaaattcacatacatgcatactctaagcacttcggctatcaaaaattcacatacatgcatactctaaagccgcatgcaaattcaagtatattttcttttgctcactaaaattgtattcaaattaaaaggtatttttgtaatgtattttctttacataacatgcaacatatttatagatctttgtgagacattntgactaccaaaaattatatgtacatacatccaagtattctgctaccattcccaaagtgtacatttccaaaggtattttgctacctattctaacctacacatgtatgatgaagcagaattctaaccatct

SEQ ID NO: 29430 - DNA, 424 bp, Glycine max
  unsure at all n locations
agctattgttacgattcactgngacagtcaaagtgtcattcacttaacaaatcaccaaatgtaccatgagaggacaaagcacatagatgtgaaactacacttcatcagagatgtgattgaatctgagaaggtgaaggtggagaaggtttcacagaagaaaacctggctgatatgtttacaaaatccctctctagtgtcaagttcaagcactgcctggacttgatcaattttgaagatgcctaaagcagatngatagaagtgcagccttgaatcacaatgtagacacttgcttgattggagtcaaggtggagatttgtggtgtgtgactcanaatcacaattggcacaagtgagaaggctttanagtggtgctgtcataactgttntcagttattataacntgaattagtttggcaccaaagtat

SEQ ID NO: 29431 - DNA, 487 bp, Glycine max
  unsure at all n locations
tgaagtgagacagtgtggaatagtcagtcttcctactttttntgttgaccacagagtcagtcttcctacacccggagatatgtcgcggcggtcaggagaccttgaggacatcaggtggagtgctattgcccagaaccaagcttgaccaatcccgacccaacccgggcatagtcagtcagtgagaacctgtgacgtacctaaacaggcgagctcctggcagtcaaccaataaaagaacaaaaaccacaaagcacggaggcttgtgtggtggctggccagctatggaacttgagtgatatttggaatatggcctctggtaatcgattacaaagggtgtgtaatcgactacaaggcttacaaatggggtcaggaagttgagatggcctctggtaatcgattaccaacgggtgtaatcgattaccaggcttagatatagagacaatatgttgaggaggcctctggtaatcgattaccaatattgtgtaatc

SEQ ID NO: 29432 - DNA, 339 bp, Glycine max
  unsure at all n locations
ttcacgagagcttccgttgttcaatttcgagtgtcactatatgtgatgcgcctaaattggacattcgagttaaatgttatgaccatttgagattctcaagaacttccgttgttcaattctgagcgtctcgttatgtgatttgcctgaatcggacatccgtgtgaaaagttatgaccatttgaatttctcaagagcttccgttgttcaatttcgagcctatcgacatattatgcgcctgaatcagacatccgtgtganaagttataaccatttgaatttcatgagaagcttcgttgttcaatttcgagcatctctacatattatgcgcccgaatctgaca

SEQ ID NO: 29433 - DNA, 434 bp, Glycine max
  unsure at all n locations
tgggaggatngatggngacccggtgttgagagaaacgatttatgggctacgtggaagtacgtgagctcagttggaggtgggcaacaggggatggtgggtttatgcgcgcattgtggatgtggaaaacttgttgtgcaccatcgcccgaccgccacctagtaccacatgtgatgggtaccccataatcctacaagcttgagatgaggaagtgttgaagggtgaaacttcctgcttttattgttgaccacagagtggtacctggagatatgttgcgggggtcaggagaccttgnggacgtcaggtggggtgctattgcccaaaaccaagcttgaccaatcccgacccaacccgggcatagtcggtcagtgagaacctgtgatgtacctaaacaggcgagctcctggcagtcaacagataaaaggaacaaagaccac

SEQ ID NO: 29434 - DNA, 439 bp, Glycine max
  unsure at all n locations
agcttttaatgtgatttataaaataagtgttcaagattgaatgaatgaattaattgaaaagcaaatcaaagccttgcttttatagactcttcatgtctggccaagaggaccatttagaagagttacaacttttagaataacttanaaccaatttgaaaaagtcaaaacctttttgaagagttacatctttcgatttattcagaaacaatcactggtaatcgattaccaaatcagtgtaatcgattacacaaggcttttatgtgaaaggatgtgactcttcacatttgaatttgaatttcaacattcaaagggactggtaatcgattaccaaaacattgtaattgattacagctttttgaaattaattggaacgttgtaaattcaatttgaaaactttntcanaacaattttgctactggtaatcgattacaacaatctg

SEQ ID NO: 29435 - DNA, 414 bp, Glycine max
  unsure at all n locations
atcaacatgcaactntgaaaatgtataataaagtcttttcctggcttccatagggttccaaaactcaataaacttcatataaagccaacattngagactcanagttganaaccaatcgtttcaaacaataaaactcattacaattcanagaataagcttcctttaacgattcaaacacaaaagatgactntgcaaagaaggaaaggaaagaagggtgagctttaggtccaagagaggagctttcctccactcctacaacaaccacactactgatgcatcaaccaaaccccanagtcaaccaaaaatagaattaaccccccccccccccaaatcaaggttttccatgaacttccatgggtgctaaagagaaaaatgaanatggaattcaagagagggaaaaaaaagtacttacta

SEQ ID NO: 29436 - DNA, 321 bp, Glycine max
caccttctcgctaagccaatctgccttggtgtgggcagcccaccgtctaatgaaatacatgctgagccatactacctgcttggtgtccaagatggatccggttaagtatatcttcgagaagctttccctcacgggacggatcgctcgatgccaagtgttgttatccgaatctcactaatgtgcgctaagcagttcataagtgcgctaagtgcacgagcacgaacaaggccacctatttaagcctgaaatcagattttagagagggagtttggactggaattcagagctttgcatgtctagagtttctagggagagaaaggt

SEQ ID NO: 29437 - DNA, 453 bp, Glycine max
  unsure at all n locations
ggtcacatgtagatcttattgtggaccccaacatattagtataaatgttagcatgcttatctctaaagaaaacagaggaagctttgatgatgcctaagaagatcttttctccaaggtggtagctgtagatatggaatggccaacacaaaaaaatagaaacaaactttcatctacctaagcttttcacatgcacaacaatgtctcaaggaatcagtgaatctaatcctcatctacagtgtcaaccattttttaacaactctgattggactgtgatactaagtcgtgaaagtaaactcagttaaactttctaaggtacccaaaccatgtaattgttttaccatattnttagataaactcagcagaattcctcaacaaatgggtttagccttccatcacatggaagcacctttaacaatcaagaagtgggcttttagagatcacaccagaatacat

SEQ ID NO: 29438 - DNA, 426 bp, Glycine max
  unsure at all n locations
agtcttttaataaaaaatntcctgataacctttcaatgacaatgtcaacatctgctttgctctggggaccatgtatgaggacccttgtaaggttcaaaatgtcaccatagtcacccatactaagtgccatttcattagaagtttgagaaggcaagtcctcttcagtcactgcacctatatgaggaccgaataatggctgtgagactntggatccagcatcaagtctgatacaaattatagccattgcatacgcaactccaccaaaacctgtgtgtgatacaaaaaggtaactacctgcagagctacaataaagcaagagtttagaagttagtacattgctatattcaaacaaagaataagattaacatggagggattacagtttctagacaataaggatacagactcagaacaaatgaagaacatt

SEQ ID NO: 29439 - DNA, 434 bp, Glycine max
  unsure at all n locations
cgagtaatagaaataagattctatcataactagagattttgtgttaattaattntttttttactaattagtgtctttagaatattgattaaaaaattaaaaaaatatttattatataaataataagacagcataaaaaaattataaagaagataaatccaataaaatatttttactttaatttttttaatcaatatctttagaatacttattaatattttccttgaacaaattcctaaacactaaaactatttatatttaggcatatttttaacatctctggaaacaaacaagacaccaaaaacttaaagtgatggaacagaaggaatctccaacagcaactaattaatcccgcacttggggaagcgaacaagaaaactntatcctcccactttctctttgagtaccatcaccacttgcattgctaggaagagt

SEQ ID NO: 29440 - DNA, 414 bp, Glycine max
  unsure at all n locations
gttttgaattcttctatgccccttagggtcctccttgctttgatgtcttcatcttcattcttctacaatcggtgatctttttctttgtttaaagcaagtttcgaccgattaattgtgtcgtaatctcacttaatcaccatttaaatgaatttcaaccaatcgtttgtgttgtaatctcgtttaatcaccgttaaaataaaattcaaccaatcgtttgtactgtaatatcagttaatcatanaaaaaaaagtttcaactggtcatttactttgtaagtcctcctttaatgagttggaaaataaccaaggaaaaccaaagctaanatcaactcataatcaagcttttgtccacaagaaaatcgcttgaacccgtccaaaggtccaacgccttaaacagtcttntttaactttatcg

SEQ ID NO: 29441 - DNA, 325 bp, Glycine max
tgccacccaactcgcccaagcgagctacagagcttactcataggcaaccgacatctggaggaacatactggaaggcccaagagggcctgttaagcgatctgcaccctcataattactatatacacccctgcgtataacaggtgatgcttttgccctaacgatacggatacttacgagtttctcaacgatacttgttaccttatcgcatggtcagagacccttacgcgtacttacatcatacctaacatgccttccggaacgtgacgaaactagacgaatcgcgaactatgctttctgcaggctgccaacatgtgtccaaaatcta

SEQ ID NO: 29442 - DNA, 364 bp, Glycine max
  unsure at all n locations
attangtgncttattgnngctaccccataaagctgcatggaatatgtcacggccatgctcttccttgcgagccctcttggtttcttgttcaacggcttttgcggtaattgcattaccttcatcgaactcaacacactctttccggacgtttgtagcgaccaacttgaatttttctttggcaagtctcgcttttcctatctcggttatcaaagctcagacttcttcatcctcttctggagcttccaagctatcttcgttgataatctttaacttggcgagccaatctaaacctcgtgtacgaactttcagccattcatgataaccaccaatgatgccattacaaatgcncctaagttctttatct

SEQ ID NO: 29443 - DNA, 254 bp, Glycine max
tgagagactgatatgtagtgttcaaagtggcacaatgacgctgcttgaccattacacctgtatttgaagtccacacttcagagttgatgatatagcccacggcgcccttgaccgaattgagactctctactacttactaatcgcttggacatgatggatgaacacacttgtataggtgcggactctaagacactcatggatgtgaacctttgacctgattcttcttcacatggagagcctgtatgctcactgag

SEQ ID NO: 29444 - DNA, 432 bp, Glycine max
  unsure at all n locations
ttttttgatatggagatcaaattgaccttgaagctatgtatatatacaacatcctctaagtatagaaactgagaaaattgcactgtgcctacatgagttgcaatgactgtgtggccaatgggaagcttaaaattatgggatttatcttcttacaagaagaaaataagtaaggaaaagttatgacatgatcagtggcttctgaattgagtatccattcatctggacctgtcttgcttacactacaagtaatggataagacattacctctgtgtgcattgctggaaccaatgattgtactaatttgattcacatgntgaattgtgtgactcgagctctattgctacagcanggccattagagccttatattgttgagaagtcaactntattatagtactttgctcatcttgattgttggtaactcattggcaag

SEQ ID NO: 29445 - DNA, 483 bp, Glycine max
  unsure at all n locations
taaatactcagcttgaacaattactggccttcattaactgtctttggttttgtggccacgctcaacaaagtactttcgacacctactgtacgttgatttcaccaatgctgttatgggaatgttgcgacaatcctttaaaaccttattgatacattctgagaggttcgttgtcatgtggccatatcgacgtccttctctatcgtaagccatcgtccatttttcctttgagatgcgatcaatccatgttgctatggctggactcagttcacgaaatttttctaaattntgatcagaaatgtgcttgcatggagtgtaggctgcataaaattagttatgaataacacatttaagtataaatgaaagtaaaataaacgtgaccagcanatatgagatcttacccaatttcttcaacatttctttgtgtttgcattattgaatcttcgattgacagtgcttgtatgtgtcgcacacagagacatgata

SEQ ID NO: 29446 - DNA, 386 bp, Glycine max
  unsure at all n locations
atcttgtttggntctacttctctgatcatctggtaataaagccaatttggaaaatttcttgggactcactatctcaagtttctcagtaatttccttgaatgctggaacaaggccacgccttatgaagcacccttctataagccgcatcgaatttaactcggggagactaggagcatcttttaactccagatccaagcaaaatggggagtcttttagccacatcctgagagagtgagccttggccacaaggatgccttgtcgtgtcttacaaggaagaaaaggcgatcccatttcccanaggcatgccttcaatgtgctgtcaagagataccatgttatactctngctgttcccgtataagtacaactggatttggtgactctggat

SEQ ID NO: 29447 - DNA, 453 bp, Glycine max
  unsure at all n locations
cacattggagaagttntatccactgttcctacaattgtttgggcttattntttttttattaagtcttcatttaaaagtgcaaaatccttaaacatatttgttcatctttcaacttcattcatgtgacaacacgaattaagttattctgtctggagaaccaaaagatgttttctgcttggtttttgtttctttcattgcataaattcgaggattagcagacttgtatatttgttttgttgactttgtaatgactcttgaagccttcttatggtaagctggcttttgtaggaataagtttcttgtgatgaaaagagaatttcccctcttgattgacagggaacaatatgtactagcaatggttttcggtgaagtgaattaacacaaacatatacatgcaaccgtgtttcgagtttcaaccaatntagtgaaactaaagttagaactaanagtcac

SEQ ID NO: 29448 - DNA, 418 bp, Glycine max
  unsure at all n locations
ttcnttgatgattnggnctttgccagtgaaaggatcaatgtgggtctgaanaaaggaaaatttagtcatccttcttggatgaatgagaaaactggggcaaatgaagaatgtgagaaagagggagaaacccatgctgtgactgctattcctatacggccaagtttcccaccaacccanaaatgtcattactcagccaataacaaacctccttacccaccacccagttatccacaaaggccatccctaaatcaaccacaaagcctgtctaccgcacttccaatgacgaagaccacctttagcacanaccanaaaaaaaacaccaacaaaaaggaattttgcagcaaatagcctgtanggttcaccccaaattccgttgtcatatgctaaacttgatcccatatctactagataattcaat

SEQ ID NO: 29449 - DNA, 359 bp, Glycine max
  unsure at all n locations
taagcccaataatcagacaaacttggcacaagatgaaggatcagaatttgaggttgtaatgctcatggcaaccacaagcaatgaatcctccaatgacacttcatggtacttggattctggctattccactcatatgacaaggagaaaggaatggttcattagtttggatgactcatcaaagagcanagtttgttttgcagatgatagcagtctcactgcagaaggcattggcagagtggctcttagagacacaaatggaaaagacacagtcattgaggaggttctatatgtgcctggcctgaagacaaacctgctgagtctagggaacctactgcacaagggaattgtcatgacaatgg

SEQ ID NO: 29450 - DNA, 350 bp, Glycine max
agcttgtcatttttctccccaggcgagccgatgtgcttcctccataatcatcccccttctgaaggaagaatctggaatgaccaagagggtctggatgctatttgcacgcccatttgcactagatacacacgatgccttcattggtgattctgtttgactaaacatacaaagctttactaatattgttacaatgcttgttcttacatctatatgtgacgatgccttacagactacgtaatctaccccttgatggatagatggatgttcaaaacattacggatcgcgctattacacttactcttcattatcggcatgtcacgcaacttctcggattgtgctactatgcttta

SEQ ID NO: 29451 - DNA, 438 bp, Glycine max
  unsure at all n locations
agcttgttttttatttgtcctccatgtatattcttcttgccataactgaaatccaaacaaataagcatttaggtcaaattgagaaagatggatctgccattttgaccagaaaaagaaagaatacnatgtacaagaaaactgggatgttatggatcatgacataacgttttccataaattgagtgagagtgagagagataatgacaaagataaaactgatattattgcttagaaagaaaaaaacccatagagttagatacaacagaggtatctaaagagttttgacttgagaaactaaccacaactaactctaactacctctaactaacttctaacagaatgtaaactaactctaactacctctaactaacttctaacaaaatgtaactacttgagcgcaatctagtgaaaactatcagcccttacaacatatacactg

SEQ ID NO: 29452 - DNA, 405 bp, Glycine max
  unsure at all n locations
gcgacctatgatactcagctgactgtgtcatntgtggttcttggtattgctgtttacatttccacctctgttggttgctccacgtattgctccacgtgtcttctttttcagccttcatcccgagccttcttgctttccattntatctttccatttctctctctctcatgctttctagagctggtgctttaggaggagtagtgattcgatggttgaagttattaatccattatttattttttcaatcgtgagagaagagaaaaggacaatgaagaagaagaatgcaaaagcaatcccatctgtgtgtttgcatattagaagggagggctatcaaactaaggttcttttgttttccttcctttattatgcactctctctctctctctctctctctctcgctcacgct

SEQ ID NO: 29453 - DNA, 423 bp, Glycine max
agctttacattgcggttgcctgaggaagagaaattggttgaagtgccaagacttcccatcgaatctccggtgtgagtcccgaagataaagcaacttaacaggaatggagggggaagccctatcacacgattagctaacctctcaaattctgttaagtaatcgttaatagatccacgctatgaaagttcgaagagagctcattctggatcatcatagaatgacggcgcgaacatggactctatagcttgcagaaagccggaccaagacgtgatgaatccattgtggaacatccactggtaccaactcaaagcggcatcgtcgagatagaacgaagctacagtaatcctttcttcttccggtgtgtttgggtaatcaaatagatgtgttattttgaatatccatcctagtggatcctggctatcg

SEQ ID NO: 29454 - DNA, 490 bp, Glycine max
  unsure at all n locations
ttgtcctgccaacaaccaccattgttntgcaaacactcagttgntttcatgtctgcaaagaatataatcaatggtacctgatatcaattcttttatccaaaatagcaaatgacaacacacattacacattgccaagtggagatataagattggttgagtagtaaagaaggagaggaaggtcgtgggttcgatccctcctggtgacaaaaactaacaaactgacaattaaaatttgccgatcataaaaaaattacacatttccaggtgaaagatgagttgcttgtaaaaggcacataagtaactaaggaggtagacaagattttcctaggatgtttgagaggtanggagagaaaacaagaaatgagcaaagaacctggagttaaacatattgatggctcagtggtctcttggatacctgaacagattgccttgagtactgctgctcttgacagcttacctaanagcggttaataataatatacaattatac

SEQ ID NO: 29455 - DNA, 438 bp, Glycine max
  unsure at all n locations
agcttatggttattgtaaggagaataaaacaatccanaatcaattgtacctttcaagtaacgaagaattctttttgcggcttttagatgtggagaggtaggagccttcgtaaagagacacacaactcccaccgcatatagaatatcgggccttgtattggctagataccttaaactccccacaagactcttgaagatcgtggagtctaccttctgtccttcatcaaactttgataacttcaagccaccttccataggtgtgttcacaggattgcaatcaagcatattaaatttcttcaacacttcttttgtgtacctttcttgtgagacaaagataccattctccgtttgcttcacttccattcccaagtaatatgacataagtcccatatttgtcatatcanattcacgagacatggactccttgaagtcttcaaac

SEQ ID NO: 29456 - DNA, 465 bp, Glycine max
  unsure at all n locations
gttataggtttcatatatgtctcaccatagatcttactcgtcttggagtagactctggtgatgatagttcttgatcttgttgttgtggtggaggtgaaggtggttcacctgggtcttcttcctcagctatttcttgaggtagttgagcgggtataagaacattcttttccactttttcttcaccccaattccaagaagcgtactcatcaacttcaacatctcaactgatgacgagtttcttagtttgcaagttgtagacacggtagcccttagagatattgctatacccaaggaagatacctcgtatagtcttgtcttcaagtttgtgcctcttcacgtctggaatataaatgtagcatatagatccaaagacccttangtgctntgctgatggcttcttnccgttccaagattcaattggagtcttgtcttttacagacttnagtggacatctgttgagtgtgt

SEQ ID NO: 29457 - DNA, 428 bp, Glycine max
ttctttttatgcctttcagcaatggtaattggtgcctcattttgatatccattgtgcttatgatgttttgcatttaagttcatcgtgttctgattgctttccaatgtttattttcacgtaaaatttcaaggttgcagtgagttttactgttgtttcagagtcttttatgagtcagggcattgtttatttgacttctttttctcttggcaggtttggtttatggccgaattttcacatattcttgtagattgtgatgaggtatgttataaaattaaagatgctccccattgaaatcattgtagccttttattgaagcttccttacatatgcaattgtaaatggttccccaactttgaatcattattgttggactaggcatatctctgataatactgaggtgaaaatataatgaaataatcttttagatg

SEQ ID NO: 29458 - DNA, 487 bp, Glycine max
tggggataaatccaccttatcaccacaagccaagattatttgatcaatgtttttttatataattaaaatttatgataaataacttatattgtaatataagattaattttaacaatggatacttttttaaaaaaatattgaaattaaactttaaaaaaaatggaaaggataggttaaaagagataagacaaatccataaaaaaaatattagttgaagattttttaaaataaaaatactttcgttaaaaaaatacttccgataaaaatattagtctaattattatcctattttttccttatataaaacaagaactaattttaaaagattttctcgggataaaatcagaaactttttttttcttatacaaagctaaaatttgaatttaacctaattcttgaatagttataaaaatcatccaaatccagactaaaaaagagaacccacgctctattatgttgtgtcgtgtcacaaggacaagacatgaaac

SEQ ID NO: 29459 - DNA, 434 bp, Glycine max
  unsure at all n locations
agctttaagttgcaatagtgctaaggtttctggttttagttactccatattgttgacaattaacttgggtttctacctttgtgatcatttagtttaatgtgctaagttgtttcaagtttggtctttggcaagtgtgtacaaagttagtacctatcactttctatattttttgttgttcagacctcactatgaagactaaaagtttcaagtctttaatatgttagtttttaaatatttttggaggtagatgttgaaggtacttacgtctggccttgtgggagagctcattttcttgaaggctatgtcagtttttagtaaaaggctatgtcagttnttaacagtgttactttattgctatgaaaaatgttgtctttgagagtggtgatgctcacacaatacttagaaacaaagtatcaataaatcgtgtatggaac

SEQ ID NO: 29460 - DNA, 399 bp, Glycine max
  unsure at all n locations
tacccncactactacccacaaccacccaccaaacctatctttgtttagaaaatgacatcggcagaaatgcagttgagaagagaaaggggcctatgctttacttgtgatgacaagttttcccctagccatcgttgtcctaataagcaatattttgttccacagtgggaagaagaggatgaacctgcattacaaccagatccaccagacgaggttgagacagctggtgaccccagtttgcaagatcatcatttgtcttataatgctttaaaaggctcatcangtcttgngacaatgaagtttcaaggatcaataaatggattgagagtgtagattctactagatagtgggagttcagataacttcctccagcctagactagctcaatgcctgaagttacct

SEQ ID NO: 29461 - DNA, 406 bp, Glycine max
  unsure at all n locations
ttctttanatataactgtttgagaaaatgtccaactaanaagtgaaataaaggaagaaagagaaagataagaggaaaaaaagaaaaaagacaggagaagattgaggaagtgaaagacaaaaatgaaggagtgtagcggcctcgtaggaacatgactgataaagaagaaaggaggtggctctatgatgcaatcctactccgcaagggcattggatagaaaaactccaagtagattgggccagagatgcaagagaaggccctagggttcttatgagccttanggtagatttcgggcccatgggctaagtacgagcccgcttatctttgtaaatattagattaaggtttcatntattttgggccttgtatttanggctccataatgtaggtagggtaccctagaaatat

SEQ ID NO: 29462 - DNA, 479 bp, Glycine max
  unsure at all n locations
tgtggcggctgaggatgaggacgttgttgctttgatagtgcattttgctttcaaggacactactgttaaaaagaaaaatgaggtaactgatgcaatgagtcagaggggggaaaaaaaataatggtcgaagagaaaaaaataaaagaccaagaaaaataaatagaggtagaaaaagaaaaagaaaaagaagaaaaagaaaaagttaaaaaaataataaagatgaagaaaagagtagaagtgcaaaagaaagagaaaagaggaaagagaaagcttcagataagggtacggaagttccatatcccgtggtaccgtccaagaaagataaggactgccatctggcgagattcctagacattnttaggaaactggaaataactgattcctttggagaagctntacagcagatgccactctactcanagttnttgaaaggttngttgacaaggaagcacaagtacattcaccaggagaatatcatt

SEQ ID NO: 29463 - DNA, 426 bp, Glycine max
  unsure at all n locations
ttctttatgtttatgaatcaagttgattcaagaagtttagataatgacaaagatgtagacaaaaagcccaaagaatgatgtcaagattaaatcaagaacaaattcaagaatcaagagaagtttgatttcaagattcaagaaaagatgaattcaagttccaagagaagaaatcaagaagacttcacaagggaagtattgaaaagatttttcaaaaaacaacatagcacnagtttgtttttcaaaagagtttttctcacaagtttctaagttaccagagtttttactctctggtaatcgattcccagtttcctataatcaattaccagtgacaaagtttgatntcaaaagttttcaactgaatttgcaacgttccaattgatttcanaatggtgtaatcgattacaagatattggtaatcgattacca

SEQ ID NO: 29464 - DNA, 483 bp, Glycine max
  unsure at all n locations
gctaaccttagttcatcgctgttgatcccatggtcttatcttatactttgccacattatatcaccttgaccatttataaggccactagtctcctatggcacctagacttcattcccttagttttaacaactcattagattctcacttcactaatacattggacagaaatgtgtataaccttttttcttttgtaaactactctataagggctcacatcacctctctattaagcataatatattttacaagctaattacataatatatttaaattggactcatccattcatataacataaataaattccaatctaagaagaggaaataaagataaaatttatacacttagaanataaggcatataataaatagaaatttataacaaaactcaattcatacaagtcatctcatatacaagtacatcaacaaaatattgtcaaaccaagatatcatagttcaattactaaacatcaccatgtgacat

SEQ ID NO: 29465 - DNA, 424 bp, Glycine max
  unsure at all n locations
tctttcttgttgatcatagcagattaaggacaatgaactctaaagagggaagcgtaattatcaagtattgaaagtgattggttcattccaagggaaacgcatacacaattttaaaaagattgagttgatgatatcttcgtactcataaacttggtgtacgtgattcttccttcaccatctaaagtgtttttttctttctttaacaatattagcaccacttatcttgccactatttttatctttcatgctcgaactaaacttctaacccatagactttcactatgtacatgtaaaaattgcctctaattaatcttcttcaaatcactatatatgttactaccattcttcnaagggcttatgttctctcaccanatcttttgtcatcttctatccacacacacacaaaaatactttgtcatctact

SEQ ID NO: 29466 - DNA, 479 bp, Glycine max
  unsure at all n locations
ttgttactttagtgtctaatattaagtaaatttttttttttctganattgcaatctttcaatttcacatgtaacatgtgacttgagtgattaatattaacatttgtttaaggatcaaaaccatactaagtggttaaaatggctaagaattttgggatttatttaaatttttcttaattttagggaatcgtgtgatagtgctttaatactttcaacactaaaagttaaggtgatttacccgttgtctctaccttagtccacttctatcaatgcatgaattacttaatttattataataacactcaatcattatattatcacccacattctggattcataaaaaagaaatcatccacattntggaggcaaaataacacacatcagaatcagtggtcagtggttaagttaaagagaaaacatttgtacttcgagggtacactanatttagcatctgataataacttcggactttctagcatc

SEQ ID NO: 29467 - DNA, 376 bp, Glycine max
  unsure at all n locations
tctttcttttattaagcgcnncgccgtataaacaacatctatatatcggtagtagttcatgctcacgtaaccacaagctgcaataatgtgtgaacatggatagcgaaacgcataataccttccgcattgacaatgacgaccattcaagtttactgaccacttttgtccgtcacgttgcgttataaggttgaagctctcctctacttcaaaccttgtggagtggatatcatacacgcgaacgatgtgcgtacaagcttgttcttgatttttcctcagttctttaacaagctttgaacaatatacttggccttcatttaactgtctttggcttggcagccacgctcaacaaagtacttccgacacctactgtacgttg

SEQ ID NO: 29468 - DNA, 476 bp, Glycine max
  unsure at all n locations
tgtagaggctacaacaagaaagtggctctagattattattttagtaatatagataaattggccatggtaaacaatgacactatcataagtgtgctgctctattccacaatattggttttggttttcatgagtgtccaacagcatcatcattgtattactttgcttttaacagaggccagacagctgcttctgcaattaagttgacatttgagaataaaatcatgtaatgtaattcatgcccctctattcatgtgaatacttaaatacacgcatgctttgtttgcaaatcaccgggtagagggttgattangtagttgttcaaaggctctggataatattattttggactgttaaaattactacaaatttctagaatattcttacatataatatgtatgaaaatggtagaatatcctagaactatagtgagtatgaatatagtagaacaatctaanactataatatgtatgaatatg

SEQ ID NO: 29469 - DNA, 391 bp, Glycine max
tagcttatagtttactttacaaatgattccaacatcttgaaagagagcatgaggatctcaagaaaactaatcaagctcatttagatgattatgttctggaaaccacttcagctggagatctacaagacaactctgttatgtatgaggtcaatacattattggacgaaaatgtatccagtggacgaaagattcttcttaaggattatcgagacttggacgacagggtgaaatccttaacttcaactcgtgaagattctgaagaagagtacaattaaatgcttaaacaaaagctctgatttcaaaatgacataaatcttgctaataatgagctcgataagttgaaaaacacgacgcgaagtcttaaatgaactaccacccgagattgaaaaca

SEQ ID NO: 29470 - DNA, 493 bp, Glycine max
  unsure at all n locations
tcaacaattgtttaatagagataaaacaatntgtacgtattattattttcatgaatcgnctaatagagataaaacaacaaccaagccttttcccactagagagattgaataacaacccttgttataacccagcaagggtcctaagatattgctactaactttccagcacattaaccttgaatgtattgagcttgaatatttaatttaatggattaaaaaggtacttcatatcaccaccaaatcagtggctaagacaatccatcatcaaatttctcattaaaaaagaaatcttgacattaatgaaatggataaactttcaatcatatgagctattcaataaagtatatgtggttccaaggtgctaatatgactgcgatttgataattctacgtattggttgtgattataaatacatgacaagaaaacacatttatagaggtgaagcccnanctaaacagaatataggataacattcctctcacatacagaatct

SEQ ID NO: 29471 - DNA, 398 bp, Glycine max
  unsure at all n locations
agtggtctatttataaatcttgtggtcatcttctcatgaatcttatctctctctcacacacacattctttatcaatttgatgagtttaaagatatatctttttaaataactntaacaaaaggatattgtgtatgggtgattgattagatattggttttaaacaaaaaaaaattgtgatacggtccttggaagcgaaagtttttcaaaattgtttttattttgatttattttcaaaaccaattcactccccccccccccccctctttttggtttgttagttccatcattaattggtatcaaagctacatcttgaaagttgctcaagatcacagtttttctaaaatggactttaaacaaattactttcaaagagggtgcttctcttaatcggccaccatt

SEQ ID NO: 29472 - DNA, 486 bp, Glycine max
  unsure at all n locations
ntatcaaacaatagttntatttattgagaaggcttataatttatttaaatcacaattcaacccacattcttatgaaatttgtctttacatggattcttattccttctatattagtacccattctttgcccaccatcaaaaaacatacaaaaaaatacttcccttatctctctttgatatcttgatttgcggccaacactttctcttcttcgttctataaatgcatcttactgtatctaaatctcatcttttttttctctatttgtgatgagcttatatatcttactttctttattctttgcccaaggtatttgtaaaactcttcaaggattntagatcatactttacctttaacatttcttgtcttattcctagtgttntgatagcttgtctaattntcaacattattacacccatgcaagagtttaaagcattntcttttattcctagacttgtcttgaacanttttattccacttccaatattc

SEQ ID NO: 29473 - DNA, 214 bp, Glycine max
cccaccgccccgggagcaaagcgacgcagcagcaacttttttcctatgggacaaacacctaacgcaaacactaagagggcaccgaagcgagactcaggaaaccgaaagagagagacgatccagcacggagaaaacatgaatataactgcgaacactcaaagcatcaaaggaagcgctcaatagagaaaatggagccacccagagacaagcgaca

SEQ ID NO: 29474 - DNA, 339 bp, Glycine max
gacttggtgtgtgagcctatatggatactagacatctacatacacagtagatgtgatggcacgctgagcaacggtgacaggactcaaagtgtatggacaaccaagtgacatgatgactatattaccaattttgctagcagagagtgttgaatcataggagtgctctctcatctggcattcggcacatcttctagacctattctgtgtcatctacaattaaaacaaactgttatgacctgataagaaatagttctactgtataccttacaactcactcaactctatcatgaccctatatataatatgcagaattaccagcacgcatacatataacaccct

SEQ ID NO: 29475 - DNA, 429 bp, Glycine max
agcttgtgttttgttttaattagaagatataacttgagaaggatatcggagtcatcaaaatcatcggtcaaacagatgaagaaaggatattaagaatggaaaaccgaacacactatttacccattaataatcgagagtagatatatctggcttgcgtgctaataaaagctgcctcagctgcgaaacatgtgtattattgtgtgtatattttgagctacaaaaggtttaaacatgacgtataaagtaaattcccgtacggagtatagaattggattttcaattatttattatagctagcagacaggcatgtaaacagcccgtagccatcaataatgaattactataagaagaacgagactgaattcaaaacaaacgacgctattatgagataaggcatgataatgaaatgaaggctgctatacttaactg

SEQ ID NO: 29476 - DNA, 478 bp, Glycine max
tgagagagagacaccttttggttgcaaacaatgtataataaataagtgtgacacctaaattccaagcatgcaaaggttcaacatagaaataacaaaactaacataaataaataaagggggggaagagttgaatttcatgaatggattacaattaccaatggtgggggaaagatcttcaacagaacttgaaataaagctgacaagtatgctactttttaccaccccggaatctccaatcaacaagatcttgaaagagagatcatagccactgctctgacctgaggatgaactcattctctcttcctctgatgaatgtcttacgtgtgtgtgtcaaaaagtacagtgaaagatacgtatgcaagggtgagagatatatagaggcttatggtgttgggctacggaaggctaacctgtaacgaagacaatgtggcaaccctttcattattggtggagagataatactgaagagagagagata

SEQ ID NO: 29477 - DNA, 503 bp, Glycine max
  unsure at all n locations
cgacgccgcgcgaacatactccccgcagaagaaacttancccccccccnccnagcggggtgtgatcgatgacaccaggcaatcgacacgccccggcgaccagagagcgaccgcagcangcattattagatgaacaacacgaccaacgaggacgagaaacgaagagacgacaagagcccaaagtcaagagcaccgaaagacacctagacgatgacaccaagagcaagacacaagcaggcaagaacaccgcaagaacaagagaactgcgaaaccagaacagaaacaacagccagaccaaagaacaagagaacaagacaagaacaacacacaagaccgacaacagagaagactaatcaagaaagaggaaaaacgccgcgaagcaacgagagcacaggaagtggccaaaaacacaccaaacagggacgcccggcgaccgaaaccaggaagaggaccnataccaggggcgaaaacggaagaggccgaatgacacgagagaacacgggg

SEQ ID NO: 29478 - DNA, 286 bp, Glycine max
tcgagctcggacccgggatccttaatcaccgcggctgcatcttgatttattggaaggcataagacaaggcttttttcagttccgttgatggtgagttatatcacagtcgggttgagccttccatcgtttgggcagatccaacaccacctggtggctcattcgtcacctcatgcacgacttcctgccatctgcatagatctttactcttctcctacaaccttgtgtgccgctttgcgacgcgtgacatctatcgcacgagtaccttttctttggcttcagtctggct

SEQ ID NO: 29479 - DNA, 507 bp, Glycine max
  unsure at all n locations
cgcggcncttgatctgtcnatgcaccgcactaacaatcacagcttacagacagacgactgacagtgactgatagaattcgtgttgttatctatctagctgaaagtccacgcacaactctctttagttggcctacctcatcacccatctgatgggccgtacgtctgccactagaaccatccaattcatctttgtctggctatccacacacgctcgacgacatacatcatcacgaggcggacgctcactacatccatcatagcatactgaaagagagcaatatattcatcatacacatccatctatccagagcgggtctaggacagcacacgcggtccacggagagagaagtagctgacgcatcacgaagaagtgaaacactactctgacccccacatgcaccgacctatgggaggagaccaccaacagtgatggcttcctccacggcggagacatactactacgctaccggaaggatggtgacgtcctactcgatgccgtcttacacn

SEQ ID NO: 29480 - DNA, 431 bp, Glycine max
  unsure at all n locations
atcttgttcatagctntgtcagagcctactaatcattggttagtaaaagttgcaacagttactaatgaggataagttactaagtgaactgattagtcgctaccgccacctatgaacaggcgtgaacacatatttcagacgctnttttcttttaatggtcaaaacttaaatacaatatcttgggtgttattttgttcttcttcaatcggaatttatgttttagcttagaaaactgtataatttttaaatgcaaacttttattatactaattgcagagatagaattccaattctaattagtattttcattaagagaattatctgatgatatttttattattgtcattagtatttaagttattattgtattaaaccactaggcaaatcctggtccatttttggatccaaatgcaatgggannatattaacgcac

SEQ ID NO: 29481 - DNA, 488 bp, Glycine max
  unsure at all n locations
ctcagcttgcggattagcattataagcttaaaattggattttatgtgattcaaatttggtcagtgtggtgggatatattgttgcaccatcttcgtcggttagagattccgtacttcggatgaggtggtgaagcacagtacaatgatgagaggaataattttgtagtgttttcatttataaaaatagaactattttttctccccttcttttagagagtttgcacaataaggagtattattaattatgcggcaatgacggtctccggcctttatcaatttttaagaaaaataattttagcttttaacaattgcttaagaaaaagttttaaaaatatttttaaaactttnttttcacatatatggaacacatatataacaataaaaaattatgcccctcatttaatttacacaatttcttagactntntttatctntcaacanaccacctcactacaagtgactctaaataaaataggtttctctttatac

SEQ ID NO: 29482 - DNA, 413 bp, Glycine max
tttattcatttttatgcgtagaaatcctgaacaattcttagaattatattttagactttcacctactagacgcctccattattccattacacactctaggtttcatgatattatttttatgagtgcaatctcttctacctaggagaggaaaggatggaccttgttgatccctttaactccatcaattcaatacttcatcttgatttcttgtgtcggcatctccaagggattgaatatcatgcaagtagtttagaatatgcaaccatgtgggagcttgggtagaatacattagtgaattgaagataagcgagagagatgagtatagaagtatgaaattacagtggatcgagtaaatttcaagtcagacctatacactcattcaccaatatcgatgtcaccatccaagtctaata

SEQ ID NO: 29483 - DNA, 305 bp, Glycine max
gtttctttgaacacactacgaacatgctagaaatcaattgtagaattctaattatgtttgggtgtccgatatcaattatttagagccccacacagttgcaagatgaacaaattacaaacctaaattatatagaattgcacattgatgctaagcacccattgctgtggggttaattattcttggaagacgcatacagcatgagagctatttgaactcctcgcatcacgcatcaaattggtgccaagccttacatattctaatgctaaacttcaaacaagaagaaagaaagccattctctgacctct

SEQ ID NO: 29484 - DNA, 424 bp, Glycine max
  unsure at all n locations
catgtctttttcatcccttagaaaattactagggagctaacgcgacaaccacgtgcttagcatgagagcttagaaaacatttttatgcagaataggcttagcgcagcaggcacgcttagcctaaatctacaattnttcaaacagagggagatttgagcttagcgtggcaaggcgcgcttagctcaacctcacaaaaacatatcacaggtttagcgagtaggctcgctaagccttattccacaaataggaaaaatagagacgatattgcgcttagcttagcagccaggcttagtgctgaacaataatttgaaaaattctaagtgtctgatatagtagtctcactcaacacacaaacgcgcttagcgagttcaccattgatgctcacagaagagatgaatgttgcataccctaattctccgggaca

SEQ ID NO: 29485 - DNA, 384 bp, Glycine max
ctcaagcttgtcgcaagctagcgctatcagagagtttctcgttatcgcgaaccctctatgtcttaaaaatatggaattgggctgagcgacctgctcctaagcctattctgcgaaaaatgtctttctggtcaaccgctaaacgcgggtatcgcgcttactcatgagtaaaatttcataaggcacgctaagcgcagtcgtcggctagcgcccaccttaatttatttatttctgtttcactttaatacatctgataatcgtgcttatgatcttttgtttgagatggcttccataaaaaagtactgcttcttgcccagatacgttgataataagattgatccagatgccggaccgttgtaacatgcctggcgaagaccttccaaagat

SEQ ID NO: 29486 - DNA, 434 bp, Glycine max
  unsure at all n locations
atcacctgaagcattaatcnttttataatggcgattncggnatcagctgctcttattgaagaacgatatgcacttcttgcattgtaaatttgctatatcgtggtgcaactgttggcattgtgttccttcaacgttagcaagatgttttttggtttcaccatcgactctgtcatatcagcaataattttcttttcatccttactcaatcgcccaacgtatggatgtccaactaaagacttggccaattcatgattgtgaatcccacanatcaacttcaccatccaaccttctcctccatgcactggtttcccacgaagcctgagaggacacaccacagttctacttccagtgtcttttctaacgagttcttattcctacacttgtacgtaccactccgttcacacccaattaagaacaatgaacttcttcttctg

SEQ ID NO: 29487 - DNA, 414 bp, Glycine max
  unsure at all n locations
tcatgagtgcgggcttgagacatgaagagaatgttattatgatacacggtgaagcccctccaaaaatttcagactgggtgcggccatgccttcctgattgtcaattgggaaactggcaagtcgtggaatgacccgaagtttccatggcgggcacaatgtaatgctttagcttcaaccctactactgggcctaggctttaaggttctctccttgttaaggcgttatgtcattctctagtaaagaatataatataaagatctttccttaatctgttcttgtgccttcacccattctcattcatctgcatgtttatttttgttgcatctaaacgatacagatccgatgatgagtcttgtaaaggtactaataccgangaccctgctgtcgattntgaacaagaagcgaatcgacctg

SEQ ID NO: 29488 - DNA, 416 bp, Glycine max
  unsure at all n locations
agcttgtcttttagtttatcgtctattctatatgcaagtatagatagccaggccaaaactgcccagattccatctttctcacgaatatggtcagaacctatccacaagcacaaggaataatcacaagataaaaagtttaaaactaggttctaataaagttgagagttgtactttgctcctcttaatgcaatagcaaacacataccagtcccaaaactttcttcaccacagactgaacataatccagcatccattaaattaccaaagaacttccaacccgtggggacctggttgtgaataacaattaaataaaataattgcatgtctaanagccatcaacaagtagtttcatacttaaaagacattgaagagcaatatacctcanagaatctcanattcagatgtttggcaacaaca

SEQ ID NO: 29489 - DNA, 461 bp, Glycine max
  unsure at all n locations
taggctgccaaattagtgccggtatgactccaaatgtctttgtgacttgtgaggacaatactctaattaatattatatggcctattgcaacgcatcaagttgttttgttaatgattcatagacgtgcaacaggttcatttgggagaacagtcaacagaaagaactttgaaaaagataaacaaaggggcaaaatataaaagcagttgacctgcataatccaatcacctatactaactactgaactttgacagaaattaagaactggacaaccagtgnnntcgaggtaactagtttgattagtttagtttagtttttgatatctaaaaagtatcaagtataattatattggggattgaaaatgaacgatttaattaagaaaatagaagttaagtggaacgtgtatgacaatcgtaatatatagttgatgaaaaatggtaagtaaataagcaaaagtgtcgtat

SEQ ID NO: 29490 - DNA, 474 bp, Glycine max
  unsure at all n locations
cgaacagccggcacaacaggcgcagaaagaaaccctcccccccccccccgcgcctgtaacccgtgacacccagccnnaccgccccgggagcgaacagcgaccgcagcacgcaagcagggtagcatcggcaccccaaaacgaggaggcacgggaagacaggcggaacggcgcagcaacaacaacnagcaagggggaaacaacgcgcgacaaaaaaccaagccagcccagaagccaccccgggaaaaccaccaccagggcgagacgcaggcaagggcggagagcngggagagagcgacgaagagcaggacncgangcgaaccaaagaaccgcaacgcaagggcaacacggggaggaagcggggacaaaagaagaaagacgcgggggcagggcccgagcagggagacgacgagaggcgggaagacgcgagaacaaaggcgagggaacacaacaagaggcaaaaacgccggagagcgc

SEQ ID NO: 29491 - DNA, 469 bp, Glycine max
  unsure at all n locations
tatatgcactgtggcaccatataagtgaacaaccatcctttggtgcttatgaatacataacaagacgcaccacacaatgagtatgtcaagtcactctcactaagtaatatcataacgtgaccaatcagggtcactccgtttgcgagaatgctcataccatatgagatcaacgtacgcttaaagaagcactcacatcgagtgtctttactcccaaggcccagacttcgaagaatccgttatggtctcaccttgctgattcgggtgtaacccctacaacaattnttacaagcagacactgctcatgaatgatacaatactcatgacctcacactcgtgattcaaacacgtataacacattatgatacaattcaacactgggtcctaactatgaacttacactttctctntaacactgcgcatatacgacttnttcaatatagacactgagacgagttattggataattcac

SEQ ID NO: 29492 - DNA, 382 bp, Glycine max
  unsure at all n locations
agctttcttttggttctttatggaggctggatctttgaacttcaatgaggtcctttaatggtgattttccaccaaggagatgcagcggaagacaaaggagaagatggtagaggcggcgccatccactanggaataagccatggaagaaggagcttcaccaccaagatgagccttggataagaagcttgaagaggatgcttcaatggaggaaaagatagagggagagaaagagagaggggggagcacgaaattgaaggaagataaagggagagaagttgaactttgagttgtgtctcacaagactctcattcatcaaagttacaacaagtgttacacatgcttctatntatagactaggtagcttccttgagaagctttcttg

SEQ ID NO: 29493 - DNA, 489 bp, Glycine max
  unsure at all n locations
tctacttatgtggcagggcgggcttccttcactttcttgtcttaactgcgagctntgaccaccactctttctttccgagatgcttctctttatatccgcctgagtgggtttatagcctaaaccatacttcccacgatttcctttggcatttatcaagctagttatgccgccgttgtctttgcctaaacccattccgggttcgtaaccgttccccaacataactcgggccatcattactgctgcatcggacaggcaagcttgcccagagaaggagtctacggaggaaatgcttaccacctcanaagactggaaagcggtttctaatgactcctctacggcctccacataaggcatagaggatgggtagctcaccaagatgtcttcttcgcctgatacgatgaccagatgcccttccactacgaatttcaacttttggtggagtgtagagggaacaactcccactgagtggatccacgggcgccccaacag

SEQ ID NO: 29494 - DNA, 421 bp, Glycine max
  unsure at all n locations
agcttgtaattcatgttcataccacatcttatcaccctcaccttgcccgcaatatatacgcatcttnaagagtatatcttcttcattcatangaattgctttatttaccaacatccaaggttcatatacctctttgcttttttaattntgatatgaatatccttcgatatgtcccctgaattcctacaatcacaatcactaattgatttaccttctttgtcattctctttcagtgcatgttgtggtctagccttcgatccacttcctttagagcttgctaatttcgagcaaccaatattggctagacaaactagtttctcatgacaaatatcctatcgtggaccatatntcttgcataagaaacanaccaagtgtacataaaccttcatatntatggaggaaatatcactccatgagcttt

SEQ ID NO: 29495 - DNA, 493 bp, Glycine max
  unsure at all n locations
ntgtggatntggtcttcaccgacaaaaggatcgaagcgtgttctgaaaagaggcaaatttgatcatcctactttgatgagtgagaaagctggggcaatgaagaggatgagaatgagggagaaacccttgctatgactgccattcctacacggtcaaatttcccatcagcccaacaatgtcatcgctcaaccaatatcggcccttctcattacccatcacccaattatccacaaaagccatccctaaatcaaccacaaaacccacctaccacacaaccaatgctaaacaccacctttagcactaaccaaaacaccaaccaaggaaggaattntgcagcanaaagcctgtagaattcaccccaattctggtgtcatatgctaacttgctcccatatctacttgataatgcaatggtagccataaccnctgctaggtttcctcaacctccanttttcctaggatacgactcgaacgcaacatgtgcatatcatgga

SEQ ID NO: 29496 - DNA, 436 bp, Glycine max
  unsure at all n locations
agcttttattatgtggcagggcgggcttccttcaccttcttgtctccaacgcgaactttgaccattgttcttccttcccgcaatgcttcttttcatgtctgcctgagtgggcttatagcctaaaccatacttcccacgatttccttgagtatttatcaggctagttatgccgccgttgttttttcctaaacccatcccgggttcaaaaccgttccccaacataactcgggccatcattaccgctgcatcggacagacaaggttgcccaaagagggagtccacggaggatatgctgaccacctcanaagactgganagcagtttctaacgattcttctgcggcttccacataaggcatggaggatgggcagcttactaagatatcttcctcgcctgacacgatgaccaagtgcccctccactacgaatttcagcttt

SEQ ID NO: 29497 - DNA, 484 bp, Glycine max
  unsure at all n locations
tatcgtctgattattcagacatagactcagctagcatattctattaacacattggattcaagttttaatatttgtatttattttcatttaatcaaaataattaggagttttgatttgtcttaagacataaatgtcttttgactcaatacttactgaataaaataacatgtgtatatcatatacatacatgtgacacactntanaatatagttacaaactttcatttttataaacgttatcaatttangcccctttcaggttggttgttagtttccggtttttggttttaaaatgcaatttcaaaacggatacgcattgcgctaaaatggtgctaagttggattntagttcttttcaaaacaattttcacctcatttcanaaaccaaacaataggtttatggcgttttgttgttggtttaccctanacccaagagactaacttctaccttcacgttgctntctctccccccttcatgttgtctct

SEQ ID NO: 29498 - DNA, 429 bp, Glycine max
  unsure at all n locations
agcttttatgatatgattacactatcaagtataagccagggtttgctaatgttgttgccgatgcgttgtccagactcttctcgaccgaggtctcctgcttatcattaattatgcctcatttcactnttttgcatcaactccgtcacactttgttacaggatccccaatatgttgatcttctgcataccattaaattgcgcccagatgctcactccaacctcgccattcataaggaccttattttccgacaaggctgtatttagattcccttcccaaccccttttactgccttactcttagaggaatttcattcttctcctctcggaggtcacacaggggtatcaaaaactctccattgtttacgacaaatatttgattggccacatatacaganagatgttcgtcggtacatcgcgcaatgtcccacgt

SEQ ID NO: 29499 - DNA, 420 bp, Glycine max
  unsure at all n locations
agctttttgtttcttaangaaccactagagacactgctatcactatcagactacacacatgagtccacttagaggtaagagatgagattattgcaattggggttagaatgaacatgtgtagggatctttagaggatcaaattgagatttattttgggatgtttactgtattgtgattcttcctatatgattatgtgaatttgttttagcagtttaatcatatgaatataacatattaatattattattgtgtgacatgtatataatgcatgaggcatgatagcgtgttgtcttaggattatgggagtgtaataaactatgtgtaagtggcaagttgagtatgtgttaaattgtgagatcacacatgtgtattgagatgttgtgtgcattgagttgtgagctatgaaccatacaatcacat

SEQ ID NO: 29500 - DNA, 481 bp, Glycine max
  unsure at all n locations
tgtatttaanaatgttttanaaatactnttaattaatatttgatttnttattcctttattaatacatatgtgaggggtagagggtgtcatagtttttgttagaaatgtcaatgggagggatttgagtccgcgacctttgcctcctcccttctccctttcatccttaagacccctttcccaccctatttgttagtttttcttagctgcatgggtaatctacttgcctccctttttgtatttgccttgtctagcacactcaattagctgcacgtctctccttatttgtgtatcactcaactacaccacacaaattcagcatcattaccaagaagcaacaaaattcacccaaaaccacaagagacccacaccataatccatgtttgcattntaactntnttgtgaatntgtgccatatggctngtctagtagtgctcctcttgtggctgtaaagacattgaatggtgttgatcacattgataat

SEQ ID NO: 29501 - DNA, 420 bp, Glycine max
  unsure at all n locations
atctttanactaganaacaatgaagcatctcattcatgtgaatgttgtaataaatttaatgaagaaattgtagatttaaaaaaatgctcttcccaaatttactcttggtaaaaataacttagatataatattatgaagacaaagatgtgtctttgccaaggatggattagagtataatcctaaaaatcaacaaaagatgcacaaaaatttctttgcctctactcaaatgaatagttctcccttcttaacatatttttactgtggtaagaaaggtcatagtgcctcaacatgttatattangaagaatgataataacattggaaaaatggtatgggttccaaaaggatctttagtcaaaactaacattcaagaacccaagaaaatttatgtacataaatcaagaatattattatatgattg

SEQ ID NO: 29502 - DNA, 410 bp, Glycine max
tagacggagaagaagagaccttagatggagaagaagaataagagcttagatggagatcgaagaagagagcacgagcaaaatagggctcgcgtctgatatattttaaaatgtaagtccaacatcggttttcaataaataaaaaaatcgatgttaaagttaacatcagtcttttggacgaaaccgatgttaccttatcatacattggcattggttttctaaaaaccagatgttaacaaacttacgttaacatcagttctgcatatatcgatgttaacagatgcacattatttacaattatgccaccgcgcttaatatggcgatgttaaatcttgcttttgtactagtgcttttaaaatagtgaagtcataatgtgtctcttatatggcgtttcttttagaatgagcttaccc

SEQ ID NO: 29503 - DNA, 428 bp, Glycine max
  unsure at all n locations
gtctttaaattttatncacaatggcccaatgaattacaaaatggtgtcatcgattacaagattttggtaatcggttaccagtgtgtttgaacgttgaaattcaaattcaattatgaagagttacatcctttcacaaaaattctttgtgtaattgattacaatgatttggtaatcgattaccagtgataagttttgaataaaaatcaaaagatgtaactcttccaatggttttcaagtttttctaaaggttatgactcttctaatggttttcttgaccagacatgaagagtctataaaagcaagacctttgacttgaatttagaattcattcataacaattatcacaatctttgaatctctttgaacatcttcttcttccttttccaaaagctttctaaagttntctggttttctaaaccttgaaaaca

SEQ ID NO: 29504 - DNA, 437 bp, Glycine max
tgggtgatgttgcgcgtactgatgggtaccatgaggttgttgctgtggtttgacccatgcgggcgttgaagagacggcatgggcatctccttccttcctttctgcccctgatgccccgattcttttggcgttcacgtttgtggaggaaacgtaatcaaactttcctctcttcaatcccacctcgattctttccccggcaaacaccagatccgcacagctggacggcatgtaacccactatcttctcatagtagaacactggcagagtgtctaccatcatggtgatcatctctctctcaaccatgggaggagctacttgtgccgcctaatccctgcatcgctgcgcatattctttaaatgttggacgctacttcttgaacatattctgcagtcgatgacagtccggagccatatcagaatcgtactgatactgcctta

SEQ ID NO: 29505 - DNA, 429 bp, Glycine max
  unsure at all n locations
ttcttttctttgcaactaaatcttgctttctttagttaattntataaacagtattttacatgtatgaattattttcgaattataaaaatttataaattaaaatataaaaaaataatatttaaatatttttattattntaatttacaggtatttaattttatcacaatattttattataatataaattaatatattattatatataaaaanttgttcttattntattatgattntaaaaaaactacataaactaacatatagattatntaataaaattattttatgtaagttatacgaattaagtaaattaaaataacatttanataatataagaaattgaaaatttattattttttataattaanataagaatttgtattaattatatataaaaataaatntacatggctcttgtannatacataaaat

SEQ ID NO: 29506 - DNA, 477 bp, Glycine max
  unsure at all n locations
tctaccaggaataaatgaagccgcaactcanaattgctcttgctttagttattagcttgctttggattcaacaatcattttgtggttagtatagcaatttgccttttaacttttgacaggcatgacaatatgttgagtgctgatattaccaggaataaatgaagccgcaactcacatgtgacttctagttgtatatgttttttgtagttaccatgattttagccaggctataatgataattatcataattaaagttaattatgattaacataattgggtcagtatgtgggagggggtagatgttttaatttgtgtaagcgtgtgttttttagctggcaattgccaaactataggtaccaaanatattntagctggcatattattaataagaaaagaatctcagtacaagctttatatatatatctatatataaaactcaatacaatcatatntctttcttctaattntatcttggtc

SEQ ID NO: 29507 - DNA, 397 bp, Glycine max
  unsure at all n locations
ttctttttatccaaggctcatcttggtggtgaagctccttcttccatggcttattccttaatggatggcgcctcctctcacctcctttcctttgtcttccgctgcatctccatggtggaaaatcaccattaaaggaccccattgaagctcanagatccagcctccatagaagccccacaagcaagcttccatcaagtggtaatcagagcacaagagcttcaagtaggtgctccttaaacctccattaatttttttgctttaccttctcttccattgttgtttcttcattntttctccatgtatctcctcacatgtcttgtgctaaatgttgttaacatgattctttaaagtttccaccaattaaacttgctatagatgctagaaattgatttctatg

SEQ ID NO: 29508 - DNA, 462 bp, Glycine max
  unsure at all n locations
tatgctgcanatatttacaatagacctcctcaatctcagtatanaaatcaaccacagcagaacaattatgacctctccagcaacaaatacaaccctggatggaggaatcaccctaacctcagatggtccagccctcagcaacaacaacagcagcctgctccttccttccaaaatgtagctggcccaagcagaccatacattcctccaccaatccaacaacagcaacaaccccagaaacaaccaacagttgaggcccctccacaaccttccctcgaagaacttgtgaggcagatgactatgcagaacatgcagtttcagcaagagaccagagcctccattcagagcttaaccaatcagatgggacaattggctacccaattgaatcaacaacagtcccagaattctgacaagctgctctctcaagctgtccaaaatcccaaaaatgtcagtgccatttcattg

SEQ ID NO: 29509 - DNA, 418 bp, Glycine max
  unsure at all n locations
ttctttacatgcaatgtatgaatntaaaaaaaaaaaagtaaatactggagtctgactcttttacataatcaagttagtgatatctcaaaaaaaaaaagtgagagtataatacacatttatatatgtcagagcatgactntgtctcacaatataattaattatactatttttaaaaaatatatgtaatgctaaattaatttttataaaatgaaaaaatattaatttatcaacttgtgcatcatacgggaacacacactaataacttttaattaattattaagctctggttagtatatatgttacactaaagtcatattaggtcttgattgagtcttattaggggtcaatgtaattattatatttgtataatctgatatattatctttttaanaaatataatatataagattaaattcta

SEQ ID NO: 29510 - DNA, 387 bp, Glycine max
  unsure at all n locations
taaccgagactcgcgctcncggttaaggggccagtanacttcttttatcagattcctgggccacatccctgannnncgacggtgatccactgcgccagcaccaccagagagggaggctatcacgcagccactatgcataccggggcaagatttcacccatgccgctgcaaagagacgagtgtggatcatgtgtacctacatgaccccttttacacagatataaaagacgatgctacaaaagaacattctgcccagcgaccgcaatgcctatctacccctacaaaagaatcagaaggtctgtgtagaccagacatgggtaagaatgcatatggttctactgantaatgataccaactatagattgctgggatcgcacccacaaagaca

SEQ ID NO: 29511 - DNA, 417 bp, Glycine max
  unsure at all n locations
agcttctgttttgttaaactggttcccagaagacaacagggagtgaagattgctgaanaccctagccttgcaacaagtcctagggaagtagatacggagatggacaagaaaatctgcagtattgtgagtagcattttgaaagacgcctctgtgcctgaagctgatgaagatgtcccaacatcgtccaccccanatgtttctgtgcctgatgtcaataaagatgttccaacatcttccggcccanatgctgaagtactctcttcccccagcaaagagagatcaacagaggaagatgatcaagccgcagaggagactcctacaccacgggcaccagaacctgctccaggtgacctcattgacttagaagaagtcgaatccgatgaagaacccattgcanacaggttggcacctggcatt

SEQ ID NO: 29512 - DNA, 496 bp, Glycine max
  unsure at all n locations
tactaagctntcagcagatttagtaatgacccactaacctataattattatttttaatgccattaacctagggaattaaaaaaaacttaatggctgagtgtaactgaaattgtggcaaccaaaagtcacccccaacagccaacaagacagccaacaagtcagccacaatttggtctcccaaaaggctgatgcctaggttgccagaattatctcgtggccataactcccattttacgcactcaaattaagtgattcctgagcctaaattgaatttcaaaacgagacctttcaccacgttttggaatcacctcatttggagccttgtagcttgagttattgccatttctatatttctgtccagccaccacttaacctacgttntaccatcccattaatccattntatgccaagaaccaccttattaagacccacganattaaccaccttaattttcattcttaatcattntccgcattntccatcaaggtttaatcct

SEQ ID NO: 29513 - DNA, 404 bp, Glycine max
  unsure at all n locations
agcttgtacttatgtaagaaacatcttctttgaccttggtgatccttgactccatctcattgaatcgcatgtccacttgtaactccaaagtatcaaacctttcacaaacaaaggtttgaagaccatcgaacctgtccaaaatcttttgaagaagagaggaatcttctccaccatgtaaatgtccttcttcatcaatgggttgagcaccctttntcacccaagagctatcatgctctttacggtaaccaaaggatgcaatcacaacaacgcctattagaaaggatctcttgattggaacataacgtttagaatcaagagggatgttgaagtgttgaaggaagagagtgactangtgtggatatggcaatggagcatntaatcgctatgccttatgaatgcgatat

SEQ ID NO: 29514 - DNA, 441 bp, Glycine max
  unsure at all n locations
tcgccctcagatccctcttgttggactaggcttaataattctaccctcttaggtttagactaaattaaactaagcttcatcctcagatacctcttgttggactagacttacttacatagcttacgaaagtttagactaatttagcctaagctttttcctcagatccctcttgttggactagacttagaccaaacaacattattgtaacaacatatttaaaaccaaaacttaatccgcaaatccctcatttaagactaagtttcaatcctgcttcattcaagttctaaggcaaaagtacatttcccaatgctaaagtcacctaaccaagcacacaaatggttgatcagaccaagagcatacagaatntaagcactaaaagaatcattagacacaagaaacacaatcaattagatattanagtaattacattagttgttcttt

SEQ ID NO: 29515 - DNA, 433 bp, Glycine max
  unsure at all n locations
agcttgtaatttttatattngaatatatttgnatggtctatttatgtagatgtttatattttgataaatgaatagttttaggtagtgtaagataataattttgtatagtttagtttgaattcttaatgttatatgctacattagatttagtttaaatcttttttatgataaattaggaatagttttacatactctaagttattaattgtatatggtagattaggaatagtttacattgttatatgatagattaggtttagttgaaattttttgtataatagattagaaatagtttgaagtaccgtaacttattaattctagattagctttagtttaccatttntgtccgccacgttgcgtaataggattgaaggtctcctctacttcaaaccttgtggagtggatgtcatacacgcgaacgatgtgcgaacaa

SEQ ID NO: 29516 - DNA, 439 bp, Glycine max
  unsure at all n locations
atttatttatccaagaattgcccatgaactttatgttttggttcaactttcccaccagtctttggttaattttagctctctgttcggagtatagacgacggatgatgtccacagtccaccagtctttgtcatctctctgtgcttgtcctttntgacggcaaagaaagttgtatatgactctgaatgctagatggacttggagatggattttggggagccataatgactttntatgtgaagaatttgtattgttgctgcgattcttgaccttttttggggttaagattttggaccattgtattccttccaactcttagaaaatcttgctgctntgactgtgcattgcaatgagccaaggaatggcggagagagtanggacattgttgcatagtagtgggtaatttgtatgacaactgttgttagtagaatgtatatgtgg

SEQ ID NO: 29517 - DNA, 359 bp, Glycine max
agcttttccttggtttacacatgactgatacatgaattgtgacttgtaggattcaatctgggcacaattggatgaaagcaagagtggttttcgatatctgtactctatgctacatttgcttgctaaatgcgcagcagaattttgtttagtgcaaactaatgcttgtgtatggctggttgtgaataaggtagcacatatgggagtctgaatatttgctagacgatcccaacggtcaaaatgtagacttatgcactagggacttccagtacatatttcaagtcactccaacggcgaacgaattggaacgaacgaaatgctactggtgtctttaagtgagacaaagctgcgattcttggttt

SEQ ID NO: 29518 - DNA, 392 bp, Glycine max
  unsure at all n locations
catgctgngttgtatacgcagtgtatcacagtttttttagagactgccaaaccgctcagtaactagctcaacaaggacgctgtgtacntgctcgatgaatagtgcttgaacgcattcaacactatatagaccagcctagtgtctactaccgtcattacaacaccagattggagccaagaatttgagctcatgtgtgatgcaagtgattatgttgtaagcgctgtattgggccacaggaagggtagagttttccatgctatctattatgccaataaagatttaaatgatgctcaattgaattatggcaccatatataaggaaatgctcagccttgtctatgctctggagaactcagatcatacttaggtgatcaaagttattgttacactgac

SEQ ID NO: 29519 - DNA, 439 bp, Glycine max
  unsure at all n locations
agctttttgtttgattccatattcagaccacattagtatttcgaaagttgttcttttatcaagtccatgcaaaaatatctaagttcatttggtattcgggaaaggccttcattattttcatcctcaatatttttttcaaaaaaaaccatttgtcatgttctgatccaaaaatatatataacaaaaaaactggttggtgattctttccaaagcatgtcatgttcaagaaagattttttgtttaagtcccaaaaagagttataatctacaactacaccatcagaatatcaaagcatgcataaattaatcagaataatctcgcgtaagtttttattcaaaaaattcagatcaaagtaataaagtactgatatctaatacgaagcgatgaataaacatatagacaagttctcaaatttcanatgatcatggctaaggaactca

SEQ ID NO: 29520 - DNA, 294 bp, Glycine max
ctcgcagagctcttgatgtatcttgaactcgttcgttgattgacccatgagacctttggcatgaccctagccatcatcaaaacatcattgaatcaatcttaaatgatcatgaagctgtgctcctacagacgtggttgacgatccttagccgatgtccagtcatgcttactaactcatactatccgtgactctaatacttgagctcctatcttagataagctgcatgcttgagagaagtgagacgagattgtgatgctggcgacagatagcgtacaggatgtcacgacatcacgc

SEQ ID NO: 29521 - DNA, 469 bp, Glycine max
  unsure at all n locations
ggcatgcaatgtcttttatatactnnntgtacaagaaatggaaaagctctgatacnncacttggttagaaaacaagtggccctcagaatattcttanagaaaggggnnggttgaattanagaatanntcacaaacttattccctttaattaaaaattcttaatttgatttntaacccaaatcctaagattccttttaaaatgaattcctaaataattattcaaattaaacttactgaatagaagcaataagcaataataaataaaagagtttaagggaagagaaagtgcaaactcagttttatactagttcggccacacccttgtgcatacgtccagtccccatgcaacccgcttgagagttccactcaatcgcaaaaaccctttacaagttctgaaccacacaaggacaacccttcctttgtgttcagatttctttacaacaagagaccctcggtctcttaatccctt

SEQ ID NO: 29522 - DNA, 447 bp, Glycine max
  unsure at all n locations
ntaacatcaagtttagtaatgatccactaacctagaattttaagaacttaatgccactaacctagggaactaaaagaacttaatggctgagtataactgaaattgtggcaaccaaaagtcaccccaaacaaccatcaagtcagctaccatttggtctcccaaaaggctgatgcctaggttgccaattgggcccttattacaactttaactaaatcaaactaaagtcgttttagttgattaaccaaaaacatatttttttggtcagccaactttacaaggattggaccattatttagacaaactaaacactctaaaattgagacagagtggtgccatttagtcctcctccatttgagccatgatacaactcacaaccttggacttttctccttgaaacttgagcttgtattcaaatagtgtggacaacacttgttgaagaagcttctt

SEQ ID NO: 29523 - DNA, 434 bp, Glycine max
  unsure at all n locations
agtcttttcatataaataataaaatcatctcggctcaaacaaggtcgtccaagacttcatgcaataaatatagaaacctataccctaatgttacattctatcagaacattgtgttcctacatcctctagcatgaggttctccatagtcattcatctaaccatctgctcctacgaacacaaagttcgaaatcatcacaagatccaaacacaaatagcacacggngagtgagttatcacattcctaactagtagagagaaacgagacaactagatatacatatcatgtaaatgagatacaacttacttaaacatagctcacgtaattccgccactgtgtcacataacatcacatcattcacgtactcaaagatcanaacacaatatcactaaatcaatcaatatcaataaatacgcaagcattatgcaatagatac

SEQ ID NO: 29524 - DNA, 485 bp, Glycine max
  unsure at all n locations
ttgcacgagatgcttgatctccctctgccatcacgctcttcgatctctgtcaccgtcaacccttcaacctcctctagtggaatttctctttttcaaaactatcataatctgatgagatgaatttgtgatttgnggttgtgatttgtggctctttacttgttttaagttatgttcttgttctgggttatgaattatgttcttcatttggattcttagatgttgttcttgcgtttacaaaataaacatgtttaaagaaaaaaaagtattttgtgatgacttttaactgctaatggagctagatctgtcttgacggaagaattgttttgaaccttttagttaagataaataaccaaagtgaactttttttaaaaaaaataaactaaactgacacaaaaagataaaaaaatcacataagttatttagcctacaaaatgacatgtaaccaacattttggacacctttattacaatttacacagtactaat

SEQ ID NO: 29525 - DNA, 418 bp, Glycine max
  unsure at all n locations
ttctngttgtgagaaagcgtggaagagtcagtcttcctactttagtttgttgaccacagagtggtacctggagatatgtcgcgggggtcaggagaccttggggacgtcaggtggggtgctattgcccaaaaccaagcttggctaatcctgacccaacccgggcatagtcagtcagtgagaacctgcgacgtacctatgcaggcgagctcctgacagtcaaccaataaaagaacaaagtccacaaatcaaggaggcttgtgtggcggctggccagctatgtatcttgagtggtatctggaatttagcctctagtaatcgattaccattcatgggtaatcgattacaaggcttaaaaatggagataggatgttaaatggtttctggtaatcgattaccaattgtgtgtaatcgattacat

SEQ ID NO: 29526 - DNA, 423 bp, Glycine max
  unsure at all n locations
ccaagtttctataaatagggggagaagtgattgtgatatagggttcggcccctgagacacttctctctctttcgaatttgcttggaaaaattgtttccgtgaagaaaatctaagccgaggcgcttctaaaacgtttccgtaacgtttccgtaaggaattttgcgaaggtttcgaccattcttcgacgttcttcattctttcttcatcgttcttcgatcttcaacgggtaagtacctcgaaccaagctttttgattcattctatgtacccgtggtggtccacattgtgtttcgtgtattcttattctcgtttcatttactttgtatacccccttttgacgtgcttacagcattntatctaagtcatttctcgcttaacctacaactacaacacatatccaccgatcgttcgaattgtattatct

SEQ ID NO: 29527 - DNA, 436 bp, Glycine max
  unsure at all n locations
agctttcttgatanaattcctaaagaagctagagcttagctacacacacctctctaatagctaagctcacctccttgagatgagaagctagagcttagctacacaccccctataatagctaagctcacccccatgacaaaatacatgaaaatacaaaaaagtccctactacaaagactactcaaaatgcctcgaaatacaaggctaaaaccctatactactagaatggccgaaatacaaggcctaaacaaaggtaaaatctattctaatatttacaaagataagcaggctcatacttagcccatgggctcgaaatctaccttaaggctcatgagaaccctagggccttcccttggatctctggcccaatctacttggagtcttctatccaatgcccttgcgggatatgattgtatcattcctcccttcttctcatt

SEQ ID NO: 29528 - DNA, 418 bp, Glycine max
  unsure at all n locations
tcaagcntttaataagccatatgaataagaattaaatgatctaattcaatattaacatatgttttttttttcctttgaacttatccaacatagtggtcctgattntgtaagcactttgtgtttgtgtttctgttcatattaatgaagtttggcttgtgctttttctcaagttactattatagattaatttatcaggattatggccaattttaattcttgaaaggcatttcatggttttatctgttcttgaattagtcaaagacgcttcaacagtaccatttttttgtccttttcatatctatgatgaatcttcctagttnttttctttttggagtgtgaaacctgaatattntgtgctaaatagtaaatagtaaatagtaaatatggnggtgcaatctcattacttaaataaaatctt

SEQ ID NO: 29529 - DNA, 454 bp, Glycine max
  unsure at all n locations
actcagcttgctggtttagcaacttgcagccatcattttctttgtggagaatgggtattggagctggcttccttctggttaattatagcctgatagtttctaactacagcaatattcctaattgcatttgattctttatctgactataatttgagtaaatcctaaaatggttatcttttatgttttcaggggtgaccatgtcaaattagtgagggctggaaagcatcaggtctgatcgcacacctttcccttgtaaaaggtttttttttttcatgaagacattgtttcatttaaagttatgctacaggtggttnttcttgtaaaaggaccaatttacttggtctgcatcagctgcacagaagagccttatgagtcactaagggggcagttggagcttatttatggccaggtataatcgggttggatgcttgtatgtcccaatanaaaaaatgga

SEQ ID NO: 29530 - DNA, 307 bp, Glycine max
  unsure at all n locations
atcntttcttacctatctatctcccaaatgtctttgcaaagattcaatggataaaaaacatgaagttctaattcaagatgttttctttgttgcatgggcataatgcaatcactctatgtctagcaatgattttattaagatgtccctacctttgagttctactaaaaattatcctctctcgagcgactaatccctaaaactgatgcatataaaaccttcaatgtatttctactaaggattaccctctttcaagcgccaaacccctaaagatgatgcaaggatgaagcatataatacatttgttggca

SEQ ID NO: 29531 - DNA, 261 bp, Glycine max
  unsure at all n locations
ttactcttcgtaaagccgcgaccactcacaataaattgaccctcatgtgatgcttgngccgacctaatcaagccattgagaatcgcgtcattactatcatacatctcagagagagagacaatgaagcatcgtgacacatagcacgaccaagcatacaactaacacatgccttccgtagccaaccaaggttgccatggagtcatacttggagaactctatctacttcatcacacatatatatatacatggtggaacaatgtg

SEQ ID NO: 29532 - DNA, 357 bp, Glycine max
  unsure at all n locations
natttctttctccctatnttcctataaatagggggagaagtgaaggaaaaaaatgttgagccctcctggtaattcgagatcacttgatattagtgaaaaaaattgtttccgtgaagaaaatcgaaaccgaggcgcttccgtaatgtttccgtgggtgatttcgcgaagattttcaactgttcttcgacgttcttcgttcgttcttcgtcgctcttcagtcttcaaccggtaagttcccgaaatcaagcttttcaattcattctatgtacccttagtggtcctcattcgtcttcacgtgctattattttcatattatatactttgcgtacccccttctgacatgctttagtcatttac

SEQ ID NO: 29533 - DNA, 394 bp, Glycine max
acgaaggatacggaacttagaaaaactaaatccttaatgtaaggagtacgagacaaccatagcgaattattaaacaaaatcggtagtttacttaaggtcattccagaaactacccatacttctgaacatacatgcaaaatggtaacaataagtacctccaatttaataaatgttattaatgaagatattgaccaaaactgagaaaatgcaactgagatatgatcagtatcagaaaagaatataaatccaattaattcccacacaggaaaaaccctctaaatatatatcaacgtcaactgtcctaccttctataaagaagaaggaatcaatttaagagttagtgcaacaacattatagtggacatgatgccagaggagatacatcatgatacctc

SEQ ID NO: 29534 - DNA, 433 bp, Glycine max
  unsure at all n locations
agcttgttattgactcattntcttgaaggaagaaagttccttgagtggatgttgaagatgaaaggaaggtgggtggatggggaagcttgttgtggaaaagaaattctaaaattttagtgtgtgctacaaagtgtttcattatcatgagagaaacaagggaggaatttttcgctaggtgtgttgtttaaagagagataatgagtttaatagaaagaaacaaaatgacatcatgtggattatttcgtggcataattaagcttattataatatagtaaaccaatttagcaagtgttaattgtgagaagggggagacatgcaatcagctagagcaaaggctcctctgctcaagtctctaatcttgaagatctctatgcaaaatagtgttttacaactcanatcanactaatngatttgatcagtttaagcgacaact

SEQ ID NO: 29535 - DNA, 488 bp, Glycine max
  unsure at all n locations
tgccncaagatgaaggtttcttgtggacgagggcatgcttgtattgttcgatcatgcgattcanaacttccgtttgtccatctgtttgtggatgataagctgagctcatccgcaatttcatgtcgctcatctgaaacaggtcttgccagaaaattgcttatgaataatgggtctctgtcggagatcaagctgcgtggcatgccatgaagctttctgacgatgtccatgaacaggatgacgactgagtaagctgagtgctgagttggcagcatgcctaggtgtatgccttttgaaaatcgatctactacaaccaatatggcagtatttctgtgaatcggaggtaggcctgtgatgaggtctaagggaaagtcctcccatggccgacagggtaccgataatggacataagagaccggcagacttcttagtctcatacttagtgtgttggcagtcgacacaggttgctacaaaacattntacatcttttct

SEQ ID NO: 29536 - DNA, 473 bp, Glycine max
  unsure at all n locations
tcactcgacccggatccttaagtcacctgcngcatgcagcttattttgccatctatggtcttaaacatgcncctagagcctggtttgataaactcaaggtgcacttctgaagtttgaatgtaagtccagcaagtgtgatccctctttatttgtctactccaaagggtcctcaacaacctatatgcttgtttatgtagatgatatcatcataacagggaataatccttccttaatcaagcaactcatctctaagctaaatactttnttctttcttaaagatcttggttctctagactatttcttgngaattgaggtaaaacatcaatctgatggatctattgttctcactcaaggaaaatacattagagacttgctggcctanactaatatgacagaagcaaaacctatntcttcacctatggttactggatgtaagctaactaanagtggatctgatccactcactgatccat

SEQ ID NO: 29537 - DNA, 490 bp, Glycine max
  unsure at all n locations
tatatctcattgtgtgcaagaggaagagaggtcgtagattgtttgatctaanagtgctcatttaagcttgacattgacttgctacttctacaagaagtctggacacatgaagaaagagtctacaaggtaagttgcatggcgtgtaaagaaaggtaaatctcttgctcttgtttgttttgaagttaatttagcaataacagatcattcccatttatttgcatatctagtgatttttttaattaaattgattgacacgatatattgtcaaagtaatccctattgtaaaaattgatttgattaaaattacatagatttatgtataagattatttatgcgaattgtgttcagcccanaggaagacataatttggccaaataatattttgtacctgtgatgataaatgtgtgacaattataaggtgttntcatgtgaataatagtcggtccaaataaagactattatntgacagaatntattgtcaatatttgat

SEQ ID NO: 29538 - DNA, 475 bp, Glycine max
  unsure at all n locations
tcattgcctaacaagccaacttacaacagcaagccccattatactcttcataatgatgcacaggtcaaagttgagtatgtgaaaaggttgtatgaccaagtgaaggtgcaaattgcaaagaagaatgaaagttatactaagcaagccaacaagaaaaggaaggaagtggtacttgaaattggtgatgatcctggacatttgagggcaaatgttttccaagaaggagggaatgatgagaatcctgaaattggccaaatacaggctaaaggcctaagtggagaatggtgaacgcccaagtggagaaggataaagcccccgagtggagaaggatgaaggcccaaactaaattgaaggtccaagttaaataagcttttagttataatttatatttattgtaattctggctcacactgtatagaaggcccatgtntatntgtatctttctgttcagatacactacaagtatttgttttca

SEQ ID NO: 29539 - DNA, 428 bp, Glycine max
  unsure at all n locations
tcattcttatattctancataatccaatatccagaagactttgatagggaagttagaatcctagggaaagcaaggcacccaaatctaattgcattgaaaggatactattggactcctcaattacagcttttagtgaccgagtttgccccaaatggtagcttgcaagccaagctacatgaaaggcttccttcaagtcctcctctttcttgggctataaggttcaaaatcttgcttggaacagcaaaggggcttgctcatttgcaccactctntccgtccgccgatcatccactacaacataaagccaagtaacattntgcttgacgaaaattacaatgccaagatctcggatttcgggttggctcggcttctgacaaagctggacaggcatgtgatgagcaacaggtttcagagtgcattangatatgt

SEQ ID NO: 29540 - DNA, 342 bp, Glycine max
  unsure at all n locations
gcatccattatccatagngagaacacagatgtgtagactaggatggttgctggttgaaccaaacaaatactgtgctaaggactgcagaaacaactatctgttcttattaggttaatatctgatatgtgaaccattggttcacacgatactaaattaatgttttgaggggaggatccactacagtagcttgctaagttgctactgaagcccttatgtgttgctcatgcgttgcactactacatgggcttggacacccgactaaaccagtttctaagtttttatttggagcatgatgctagcaacatacgactattatagttaaattacagaattatttcatta

SEQ ID NO: 29541 - DNA, 345 bp, Glycine max
  unsure at all n locations
attttttaatcaaaagacactgtagtcttttgaaacataaagcagaggacattgagtcctatgaaaaaaaacaaatgacgttgagtcctattgtcataccctgatttcgtctgaggattgtcatttcctaaaattntcaaccttgctagccgaattcagttgcttgcgctacttgccatgcaatacaaaaggttttttaacgtttatgaaaagaacatgaaaatacccaaaggggagggcaaaagggtcattttaagactttttcaaacccctggctcgcccaagctagcctctggctcacttgggccatcgagataacttcatggtgaagtaattagcccgcct

SEQ ID NO: 29542 - DNA, 468 bp, Glycine max
gggtcaggaagcacaacttcagtcaagcatttcaagtattatggatccttatgctataggcatgttcttgataagaggagaaagaagttggatgacaagagtgagccaatgatttttgttggatacaactctactggttcatacaaactatacaatccaaagaatcaacaagttctatttagtagagatgtctactttgatgaattaagctcatggggagagtttcaacctacttctgagacaatacagaagattcatcttgaattgaaaaatgatgatccagtaggagagatacatcaagaagtggtcaataacgaaccttagatggtggttgatagacctacaagagccaaaagttttcccttaagactcagagattatcaggtttaccctgatagtgcaattactgaggatggtgatttggtcagcatatggcacttatggcagacatggaacctattacttttg

SEQ ID NO: 29543 - DNA, 434 bp, Glycine max
  unsure at all n locations
atcttttaagtccaagtttcttctgccataccccagtgatttctttggatagataatagataacattntgatttgacagttcactaagattataacaaggtcatgtctttgcaattttgagattaacctcaagcttgaaagtccaagtttcttctgccatatcccagtgatttcttttgatagataatagataacattntgatttgacagttcactaagattaatcttataaagatttccttttctcttagtggtgaaaagttgggtcccatttttgtcttggacgacacacccatcattgccaaaggaaatatcaagtcgactatcacanaattgacttatactaagcagattgtgtttaagtcctttgaanaatagtacattctccatgggaagatagggatcaatacttatctttcctactccatcaatct

SEQ ID NO: 29544 - DNA, 475 bp, Glycine max
  unsure at all n locations
taaccattaagcacaagccatacacaagacttaacactattaattacatttaaccactaagcagaacccgccattatgaaacctggcttgctaggaaaacaaagggtgcaaatattttgaacaattatgaaaaggatgagaggtttgctaggaagcccgataattagaaaatcctgcgattcatttaaatcatctgctgatatagacaagcatgcagaatcatgttaaacgtttttcctgtgatttggttttgatagtttttatttctaaatacttattaaacatcatgtacaaaaaaaatgtggcatggaccaggatttctagagttgcattctaatgaaacatataacagtacatanaggatagaggatcatccatcctctcttctgtcccgctttgaaggctacatggagcacatggaattcatcttgtcaatatagggatattntagtgtcaagcaagcctcaagtagcac

SEQ ID NO: 29545 - DNA, 433 bp, Glycine max
  unsure at all n locations
tgctttataattngattntgnttgagttgtgatgaaactggtaagttgtgatgaaactggtaatatggatgataaaatataatattataacttgatagcgctaatatgtaattataacctacaagtgtctgatatctaatctattaactgtatatatgaataagttatttaatttttttggaaaaaaataaaacaaacttgtttaataattaatttaaataatttcttatcaaatgtaaaggtgcttcttattaataaatatattagaaaagatatatattatatggtcttaatatttatataatattaaaatgttaaactcacttaaaattgtataaatatttatatcctanatatatntataattatatccatgttactctacatancaaaatatttatttttattatatntttaagctctttaattatta

SEQ ID NO: 29546 - DNA, 480 bp, Glycine max
  unsure at all n locations
tctagtatttataggtcttcttcaacaagtttccattgtttctaaatggatagatttcttcacttgagcttgcatttgaagattgtggtcgttggagcatttaatgctttcattaaatgcacatactttttcatgttgaaaaatcactctttnttactttcgtgtggaatacttcaacaaaaatcacttcctttgtgttagagtaggtctgtcacagtagagcacatcttttgatgatgtttggcaacttccaggtcttgagcttcattttttctttataggatccgacacaaatccttggagaattntttttctacaaaacgaatctcanacatagatcaacaaatgaagtttaaatggcatcgttactgttgtatcagatcttggcttggttctaactatcgcttgaaatgannacacggatgcatgagccacgctcanatatcacataagatgtaacttttaacctttgcatctagt

SEQ ID NO: 29547 - DNA, 429 bp, Glycine max
  unsure at all n locations
agtctttattctttagaagagaaagaacatgtaattaggattacgactganaatgctagtcaatttgttagattgattgtgaaggaatgctttaaccgtaactcggtgagggtgtgatcttaattgtgagagaaacgactaaaattaggtaatgaattttgcatgaatctctgaattatggaatgaatgcatgaatctgaggatgatgaaggtcatgtttgattgtaaatagccacttagccaaaaagctgaccatgtgcatgaatgatttatcccttgcacccagtttgagttgaattaatgtttgattgattgaaccttgagcctgcacagttatctcatgctaccttgtcttangttgtangaaagcatcattcgtagaaagacttggttcaaggcanaatttgccccannattgggagagctact

SEQ ID NO: 29548 - DNA, 475 bp, Glycine max
  unsure at all n locations
tgtctcggaaatattggttctaatatggtactaattgtttatttatgggcttgtacagatccaaaaaatttgtttagtggagacaataatttttttatcaatggcaataaaaacaccacaacaactatcatttatatagatagatagataaatatatacccaaatattgttattgatccataataaatttttcttcatttttgttccctgatatttgacatggttttttaaattgtagtcattagttaagtgatgacatgtcactactaaaaaatagggtttcaacattggttattaaggactttccacatcggttattaaccgatgatgaaagtaccaacgttgaaagtaatatcgttaacatcgattntccaaaaccgatattaatataaaattacaacatcggttattgaaataactgatgttatataataagaattataaaanaaagtaatatatcttcatatcaacatcg

SEQ ID NO: 29549 - DNA, 433 bp, Glycine max
  unsure at all n locations
ttattcttttcttaaccacttggtttctttcctgccatctaatatctagatatgtacatggtgttgagttggccttggtataggtatgtacagaaacatatctctctcatttcagggtatgaatgccccagcttctgtagatcttgcttaagtcaaaattctatcacatggacaaatgtgcatttcttctcactgtcttgcagacaagattacctcgctaatattgggtaaaacgttcattaccggttccatgaccttaagtatggctttcccatttggtcatgtattgaagaattctgacgtggcaagctcatccatgccatatcatcaggcaccaggccactangtgcttcacgtccagtgaagtaatctaatggacgagaagccggtggtgcaaccgtgttcacccttggtgtacctgcatctactaatc

SEQ ID NO: 29550 - DNA, 476 bp, Glycine max
  unsure at all n locations
tgtaattgataaaagacagaaatgatgcagagttgatattattgagcttcgngtgtgtgtttacctttcttagcttttcattggagagtcatcaaccttcaggccttctcttgctagtagcattcttcatgaagttctctgtatgttatgcatagactcattctatttcatgacttattctagactgaggacctcaatttatcacattttgttagggttcagtcagaaactagtacgataggctatgaattctttgttaataattntagtcttatttctactgagcttcgagcttgtactagtaatactacacgacttanatagtanaactaagagcattatgctacacnccctattatcagntatcatgttatctatagtctatactcaatactgttggtacctggcttttacttcttgctctaatccttatgacccacaatgggaaagatgtcaatntcttaatacagcacaac

SEQ ID NO: 29551 - DNA, 358 bp, Glycine max
  unsure at all n locations
tcaatcttgtatggaaacccgctgagttctttgttagcaccgaaactctaggaggaggccaagaaactactgtgtaagattttctttttttccttgttagtgttcttgatttgtgaatctcacttaaattttgagcttaatatgtggcatgcattgtgaatcacatttttaatctttatcagctaagttgagttgtttatgtatgttgtagggcctttcaaggagaaacgaagcaatgagcttaaattctaatagctcanaatcacatataattntcacatttgtcattgagtctttgtgtaaggtactgtcacaatttgtaattctacctaacattaccagcagntgtgtatggaaa

SEQ ID NO: 29552 - DNA, 474 bp, Glycine max
  unsure at all n locations
tgtggtggtcattctctacgccattntcatcgctgtcgtatgtaaaatgacggtcaaggctcttaagacagcaatgtaaagatgtacggtatgataatagcaaggcaaattgaaatagaatatgtatattgttatttcattgatcctttgcatgatatatataatacatgtacaagaatgttctataccaattctaaggcatgacagacgtgatccataatcagtggcatctgatttattctatgcattataaggtaaataaatatagaatcaaggtaacataggaaagtaaatatatacacagcatatttgcaatcatgtagaagatatttcctaatactcccnctcaagttggtgagtgaatatcgtgaagtcccaacttgttgcgcaatgtcacaaattgatcttttcccanagcttttgtaaacacatctgctagctagaaattttgtggcacataagaaggattgatca

SEQ ID NO: 29553 - DNA, 369 bp, Glycine max
  unsure at all n locations
tcattcnttgcgcgcaatcatgcttcaacttacacagagtaattaatgcttagcgcaacaggcgcactaagcgcacttctaagaattcaaaaacagtaaaagattggcgcttagcacatcctgtggctaagcccaactatgaaagctcaattccagaatggatttggggcttaactcanggcagcgtgcttagcgctactacaataaatttttccattgaagaagtggcgcttagcgcatcatcttcgctaagcccactgcttgaagtttacttccagtgaagatgttgggcttagcgcagtgatgtgtgcttagctgaactattcaaccaactaatcaaaggtctaagtgcttagcgtgagcaagctc

SEQ ID NO: 29554 - DNA, 393 bp, Glycine max
  unsure at all n locations
caagaatcaagcccagactattgtgcaagccatccatggggcacaacacacccaatgattatgatgatggatggctcaaattctcacaaaaggtaactcatcactttcaaattgagctttcaaaactatcatgacatgtagaggagaatcaaggatttcaagtcacaaaatgtcaagaacttttattttcaaaacacatacccatttcttgaacatatcctataattcagagaanaacatgcaaagtcgtacatgcacancaaattgacccaaaatattaaactanaaatccgacgaaactaacaacattaacagattaacacaactaacanattaacanaaccaacataactagccaaacatagaaacactcccccatacttaacaacacat

SEQ ID NO: 29555 - DNA, 388 bp, Glycine max
  unsure at all n locations
agcttgccttcttgaggtccaggacagacaaggcagccgaaggaactanttccgctccggagtatgacagtcaccgctntaggagctgctgttacaccagcacgcgctttctaggccattaagggatggtcgtttctctgggagcgacgcgtccagctcagggatgacgaatatactgatttccacgatgaaatagggcaccggcggcgggcatcactggttactcccatggccaagtttgatccagaaatagtctcttgagttttatgccaatgcttggccaacacatgagggtgtgcgtgacatgagatcctgcgtaaggtgtcagcggatcccgtttgatgcccacgctatccgccaactcctaagatatccgttgtgttggaag

SEQ ID NO: 29556 - DNA, 344 bp, Glycine max
  unsure at all n locations
gttgacagaacaactgagcagaatggaagagaatatgttgacaatctattgatcaatataaggagaagatgaacctagctgctagtcatatgcagaggctggaggatgaacatacgaatgtatcagctctgcanattgaaagggaagcaagagagagggtgatngaatcatttcacgaggaagctatgaaatggatgaataggttcgctctcactctgaatgggagtcaagagctcccaaggttgttagccagagccaatgcaatggccgacgcgtactcggctccagatgaagttcatggtcttttcattactgccaatacatggttgaactaatgacccaca

SEQ ID NO: 29557 - DNA, 567 bp, Glycine max
  unsure at all n locations
tatctataccttctccctcctcaccagaacattaaagctatntccgcattntcctaccccccccccccctgagtgacgcttgatactatggaacactccngcnncgcacccggggtcctctacagtccatctacacgcactctaacatagctgttttgggatttattcggcgacacgatccaaccggagctaatatgacgcatatctgatcatcttgcgttgatcaaagcaaataacaaaactgcgggcctatgaacagggtgacgatgatggagaatcctgcgttgcgtctagccatccaatacagccatgtatcctaccagcccagcaatgtcgtaactcacgccataacaaaccttctccgtacccaccgcccagatagtcgaacaggccatccctaagatcacccacacagcctacctacacaactctcaatgacaaacaccgcgtgtacgccagaccacacatcaaccaagaaatgaatctcctatgagaaaccttaaataaacccccatccagagcttatctgacttagccctcaaatattgaaagtcacggaaccctccg

SEQ ID NO: 29558 - DNA, 462 bp, Glycine max
tacattctcccactttctcaagcaaattcttaattcttcttgatatcatcaaaatcttcatgatttacaaatatgttttataacagctactaatatttgaattcgatattctagactgtgtaatcgattacacaattttggtaatcgattaccagcagttaataaacgttttaattcaaattttaaaagctgtaatcgattacacaattcctgtaatcgattactagacaggattttcagaaaaatatttctaagagtcacaacttttcaaaggctttattcatgactaccaatgatctatatatatgtgacttataacacgaaattgctcagaagttttcagaacaacaagtgtttatcctctcaaagagcaaaatcattttatcctcttaagaattccttggccaattcaatcgcaattcattaatgaattatttgagtgctcaatctgtaaaatctatc

SEQ ID NO: 29559 - DNA, 393 bp, Glycine max
  unsure at all n locations
agcttacccattntgttctaggggttttatgatgatgcttgtgatgtgcatgtgctgaaattgcttatggaacactgttataaatgaaaggcagaactaatctagggctagaaagtgacaatgtggtgttaggagtggaaaaagagtgaatgttttatggctggaaggtcaaatctggaattggtagtatttagaggttagagtgagttaatcttagcttgaaatgccatctagaacatgtgagaaaggttaggctgtgctagagtgaaaagcaaatggtcaaagtgaaccaagagccatttctagggcaaaattgggtgttgaggagtcatattntgattctgtggaattttacgtgtacatccagtttgagcaagtctagattgatgttat

SEQ ID NO: 29560 - DNA, 472 bp, Glycine max
  unsure at all n locations
tgagatgaggaagtgttgaagggtgaaacttcctgcttttattgttgaccacagagtggtacctggagatatgtcgcggtggtcaggagaccttggggacgtcaggtggggtgctattgcccaaaaccaagcttgaccaatcccgacccaacccgggcatagtcggtcagtgagaacctgtgatgtacctaaacaggcgagctcctggcagtcaacagataaaaggaacaaagaccacaaagcaaggatgcttgtggtagctggccagctgtgaaacttgattgatatgtgagatatggtctctggtaatcgattaccaagggtgggtaatcgattacaaggcttaaaaatgaagacagggggctaagatggtctctggtaatcgattaccagtggatgtaatcgattaccaggcttgantacggagtcaggaagctaagggagcctctggtaatcgattaccagcctgtgt

SEQ ID NO: 29561 - DNA, 405 bp, Glycine max
  unsure at all n locations
agcttttccattatgaaancannganatgagtgagttgagacattatatgttaatgcacacaaatcattgtagtatctacacgaaaaggtagatacttaaaggtagnttatccatccattctacataaatgtttgttttcatattattaatatttatataacaaatagatatattaaatatataaattacattgtaattaaaatttattctagataaatattaataatttaaattatgatantaaattattttaattgtttaatttagagatcgataaagatataagagagacacataaaataagagtactctaatatggctaatagagaaagcttttggctagctagctaagcacatggtatgtaaatatacatttaaagatatgaagatcacataaagagaaa

SEQ ID NO: 29562 - DNA, 468 bp, Glycine max
  unsure at all n locations
gtagaacttgtccactcncttccttccacatctgaaagagtgtgaagggtttattttcccatatgtgataagttctcatgtgtgagccaagctgcttaaaatcttaagggtttattttccctanaatgagagagatccccacatataaggagaataacgatgagtgttagtcattcctctatccaactttctagcaatataacattatgaggagtgctacgaacacactctctaccaatgaacctataacgaataccttcaacatgctcattaggcatcatggtccgaataataggattttgcacaagatctttggatgaagaaagaccctacatgtgctgtgtcccacttattgaatcttgtacgttcatgggatgttacgttgtntaactatggtcgctggttgatgagggtactcgacatcctttattggcttaatggctcgcttcttggccgaatattatatca

SEQ ID NO: 29563 - DNA, 256 bp, Glycine max
agctcgcctcattgaggttcaggatggacaatgcggccgaatgaactagttccgccccggagtacaactgtcaccgttttatgagcgatggcaccgagcacgcttccaagctatcaagggatggtctgtttctgcggtaacggcgcgtgcacctcacggacgacgagcatactgactttcatgaggataaaagacgcccgcggtgggcaccactgagtactcctatgggcacatttgatccagaaatacttcttga

SEQ ID NO: 29564 - DNA, 445 bp, Glycine max
  unsure at all n locations
tctagccaaagatagagggagagaaagagagaggggggagcacgtaattgaaggaagaaaaagggagagaagttgaactttgagttgtgtctcacaagactctcattcatcaaagttacaacaagtgttacacatgcttctatttatagactaagtagcttccttgagaagctttcttaagaaaacttccttgagaagcttctttgagaaaacttccttgagaagatagagcttagctacacacccatctaaaaactaagctcacctccttgagaagcttccttgagaagcaagagcttagctacacacacccatctaanaactaagctcacctccttgactaaatacatgaaaaaacaaaaaagaagtccctactacaaagactactcaaaatgccctgaaatacaaggctaaaatactatactactagaatggtcaaaataca

SEQ ID NO: 29565 - DNA, 357 bp, Glycine max
  unsure at all n locations
cagctcggacccgggatcctctcagtcacctgccgcatgcatcttgagcttttgcatangggttcgatgtggagtacgaatgtgtgcacgtatcatggtgcaacgagagttggtgatgggcttgggcttgtcatggatacgtgaactggtccattcctcggaatgcacccaataacgcaactcactttggacaagcctaagtttgtgctttgttttatattaaaatcatcttgatggagctaatttttgcttgttgttctggtgcttttatgataaaactaaattgattaattgaatgacattgcaggtaaagttctataatgcatccaatatacctgtcattcatatattgaaatt

SEQ ID NO: 29566 - DNA, 453 bp, Glycine max
  unsure at all n locations
nggcagatatagtctagatagcactcggtgattgaacactgcttttgttgcatctacatgtagaagaacacaagacgttagcagctgaataagaataattaaacaaaagaatgagagggaatgcagtggctaaaatacataacactatgcctgtaaacaattaaaagttatgatataaaagtacatgttactcttacagatcaaaatttagattatatcctccacaccagacttacatctatatatgatggatacccattagtaagtgaggtaagttggtntaacaaataatgcatgttgcctactaatcttgtcatttgtgagagaactgtggcctttgggcattgggaagttcaaacactcaaagttctacaagtttatatctcttatcctttctgataagatacgatgtttctattaatatactntagcaacacaaagacattcatatac

SEQ ID NO: 29567 - DNA, 334 bp, Glycine max
ctactatgtattctacacatgtcttctttgtccattgatattctgaactatgaaatcttgactctcggctatggtttatttctaaaattggatttcatatttgcaaaacaaacaaggctaaaatgttattcgtttttctctatcaccaaacatacattatatctatatatattgtgagtaccagaggtactaagcattacatgtaattagattgacttgccaccaacatggttccaagctacaatcttatttgtattggacgtctagtaatgtattgtatatattggtagcattctatcagcggagtctattcgagctttctttatttgaaata

SEQ ID NO: 29568 - DNA, 456 bp, Glycine max
  unsure at all n locations
tactaaggcacctgttctagctcagtatgacttttctaaaacttttgagctagaatgtgatgcctctggagtgggagatggagctgtattgttacaaggtgggcaccctatagcttattttagtgaaaaacttcatagtgccaccctcaactaccccacctatgataaagagctttatgccttaataagagccctccaaactagggaacattaccttgtttccaaggaatttgtcattcatagtgatcatcaatcacttaagtacattagagggcaaagcaagttaaactagaggcatgcataatgggtagagtacctagagcaatntccatatgttatcaaatacaaaaagggaataacaaatgtggtagctgatgccctctctangagacacacattgttttgctccctacgagctcaaaatttaggatttgataatattanggacttgtatgc

SEQ ID NO: 29569 - DNA, 416 bp, Glycine max
  unsure at all n locations
agcttgattatgaaattgttatacatacgtactaatccaataaataatcactaaatagcaaaataaaactaaaaattgtgacttttgtttctcgatcggntcaaaggtgtcaacttggaagcaatggacacatagttggtttctcagaagaatgttctgattgaattcccattaagtcttaaggtccttgcagttgatcatgacctcactattcttgataacattcttaatatgtgttctcgatgccactatcgcggtaatttcaattaattgttactatttcttgtacaaagatttgatctttttttattgatgattgcgtttatgtcgcaactgtggcatactctgatgcctcacttgctattttgcgaggaaactctggagtcnatatcaaccaccaaaaaaacaagattctg

SEQ ID NO: 29570 - DNA, 454 bp, Glycine max
  unsure at all n locations
tgagccaatattaggaactaagcaatgtattctattttcacaattattgtgtnnttcactttagcttactcaaaattctaagctcaactaatagtcactaaaaataaatattttagctttgccataaataaggcttgactgccatttagaaagtgaggggggagttcttcatttggcatgaattcacagtccatcgagaggggaagcttcctttgggctccactcttcatctttttcctccctccatgtgttttgaggctacccatggaaatgggtagctaaatcctccaccattggagttagatgcaaccaaactcatattctcttctatcttttgatattntaatatatatatatatatatatatatatatatatagtattaatgttagtatttgcttctttatttaatgtctgttgnggaatttccaaccatggcatgttttaggtacttg

SEQ ID NO: 29571 - DNA, 277 bp, Glycine max
agcttcaagataaaattgatgttggttgggtcagcaagaaggttgtcaatggaaggtacattatccttcttgagattaaagaatgcggatgggacattctttgctttgtaaaaaaacaaaaaaatggattgttttctttgaagtccatgaactagtttgttgatagaggtgtgattagcctgtctaatgatcctttacatttacatggaactggaggtcctatgacaaggtccaagactaagaggatgaagtaagcattgcaaggcctaatcctaaa

SEQ ID NO: 29572 - DNA, 458 bp, Glycine max
  unsure at all n locations
tgccacccagctcgcccaggcgagctaggttgcttcctccagattgcaggagaacttcctggaaggccctggttgctatttgcaccccatttttactaaatgcacccccttgcctcttttgctgattctttttccgtaacgttatggaaacttacgaattacgtaacgatacttgttttccttccgtaatgttacggaaccttacggattacataatcgtccctttttttccttccggagtgttacgaaactttacggattgtgcactaacacttccttttaatttccggcatgtcacgaaacttcacggattgtgctacaatgctttcttttgacttccagcatgtctcggaacttcacaaattgcctaacgatgggtgccaagtacctcgaagtgtgcaaacgagggtcgcatcccaacaatggatggtccccagacgatattanggtatgacaca

SEQ ID NO: 29573 - DNA, 282 bp, Glycine max
tatggagatgcagcggaagatcaaggacaagacgcgagaggagacgccatccactagggaataagccatggaagactgaggttctccaccaagaatgtgtcttggataagaagcttggagagaatgcttcaatggaggataagacagatggagagaacgagagacgggcgagcacgagattgaaggatgaaaatgtggagagaagctgaactgtgagtagtgcttcacaagactctcattcatcagagttaccacaagtgtaacacatgcgtctatttatag

SEQ ID NO: 29574 - DNA, 382 bp, Glycine max
  unsure at all n locations
agttctaagagattttgctatgtgaagatctgcagagacgagagctcgaagcggaagctgttctgagagcttgagatgagtttgtgagtgattgtgagatcctagaggtgaaggagacatcctcaccacttgtatttttgcaatctttcatcttattcttctctatgttagaaaggaggtttccagactatggaaagctaaatcctctgttggatcttccttataggtacttgatgtaaatatatntctatctatgtaatgatgttttgtgcattctctgtgctatctgctnttcattccagtatgcctttaccttgatcacgtagatgcatgctgttgtanggtcattcaacagngaaactgggttgattctaagtcttga

SEQ ID NO: 29575 - DNA, 414 bp, Glycine max
  unsure at all n locations
cactcgacccgggatcttaagtcacctgcggcatgcaagcttcgagaatgaaatcattttgtacacttttgggtatcccttataccctttcttcattaatattattggatctntgcccgataaaaaaacatgaatcaccttttatttaaacatttcactaatacttttcatttttatctatctttctcttcttatctcatcataaatcctatcatacctatatgttttctttgctctttctctctctaaatattggataacattcggagtgtctatcacacattctcctcgatacaatcttatccttgaatttccttgtgacaaacacnatgattatgaattaaccctgatgtgatccttactangagcggatcgcttgatacaggtcacagagnttggatgacttcactttca

SEQ ID NO: 29576 - DNA, 429 bp, Glycine max
  unsure at all n locations
tgtattcagtagcatataatataagcaattattgggagagagaatcagagagatcagcggactttaatgtaacaaaaggtcactgcacgttggtatgctcaagaagggattatattagtgtaattcaataaacaatctatgccaatccaaaagcgtaaaagccattactattgaacgtggatgactagtgtggtccacatattagggaccattttagaagcccanaaaggctaaaatatcangattgcttangtgaaaaaaacaatcgttttctaggaaattgaaagtgaaagtgaaaatcatctggcataggagaattaaaaaagttgaaacagggacggaagataacaaaaaatatatactagtaaatattagggttaattactntgatatttataattatacaaaaatgatcttagtttttataca

SEQ ID NO: 29577 - DNA, 453 bp, Glycine max
  unsure at all n locations
gcttggatcttatatatagtttgcacatgtctgtgcaattggttattggtttaagaggtggagtataaacacattagaatgttntctttgtgtgtcactctactaagatgattatctttttggattctggaatagatgcaacacatctttttttactaaatcttggaaagtaacttctaaaaactttataccttctagaagatacttttcataatacanaaattgaaacagtattttagaaagtactttccacaaaatattattttgtatttcagagagtatattttggaataatggttaaatttgtgtattcaggaaagtacttttcagaatacaaaaatntaaacatcaatccagaatgtactttcggaatgatgagatagggtattttaggtataataagtattcatgataataagtagagtgtacttagacaaaaggagtggatatagc

SEQ ID NO: 29578 - DNA, 455 bp, Glycine max
  unsure at all n locations
tgttagtcgaaactctatatattcataacaatgtattctaatggttaagcaataatacaagcatttccttctcccttaccttgttctggaggccctagacctcgaattctagacatgtttccttgatcacaacaatgagctatatagattgatgcanaataaacatttgaaatgatccttggcttcatgcaaaagatagctatgttcaatctcttccacggttccacctacatatatganaatttcgaaagggaaagatttaattgatactagtgctggtagttggaatcaaaattntatccatgaatatttcaataatcgagatgcacaaacacatactgtctatgccaattgttttttgaaaatgaggataatatggtgatttggaagatgagcaaagattttcctgtaaacatgcatattatcatattatggagaacatgttagacaattct

SEQ ID NO: 29579 - DNA, 420 bp, Glycine max
  unsure at all n locations
agctntatgcttgtcaattttcaggaggcatctcggagaggatctttttcggacatatttgcgcaaaatctcttgaactangaagatgttgcccatcatctttttgttcttaatgaaagcagtttgagtgtccctaataatagtctcaagcactggggctatgtggttagccagaattttagatacaatcttgtataacaaattacagcaagatattggtctaaaatggttaacctgcgaggcctgatcatgcttaggaataagcgcaataatagcatggttgagctgctttagaatttttccagttgtaaagaattcattaaccgctgcagagatataatcaccaatgatatctcaagccttcttgaagaataaaacattgaaaccatctggcctaggagcgttattgtatccatcaca

SEQ ID NO: 29580 - DNA, 466 bp, Glycine max
  unsure at all n locations
tacaataggtagcatcttttcactagcattggttntgatgctttatgcaatgagtagtgctttcaaagaaatagtttctaagtgtaaacacgtaacaacaaccaaaggctaatgtggatggcaaaacaactgtgaaaactgcatggtaatagattagaattatgaagaatcttctttcataccccagactgttcaataacaatactgttgtaagtactaggtagtgaatcaaaaaatggtatcattatgttgttttttattcaacattgtcattccttcactaacaatattgttcaatactatgtagatgtgacaaataaattaaaggttagcataggaatggcagtgatgataatgcggtgggaaacatangttgaaaatggaaagaataanaacaatattgttgcatctttggtgaaatgctcaaacaatggtgaaatactcttcacattcagcagcaacaatg

SEQ ID NO: 29581 - DNA, 378 bp, Glycine max
agcttaaacattatactttgagcgtctcgatatattacgggactcaatcagacatccgagtaaaaagttattggcgtttgaattggctcagaggttcaaaattcaatttcgagcgtctcgatatatttcgggactcaatcagacatccgagtacagagttattgtcgtttgaactggctcataggttcaacattcaattgcgagcgtaccgatgtattacgtcactgaatcagacatccgagtaaaaagttatcgtcagtggaatttgctctgagcttcaacattcgatgtcgagcgtctcgatatattactggactcaatcagatatccgagaaaaaacttattgtcgttggaatcggatcgtacgttcaacattca

SEQ ID NO: 29582 - DNA, 451 bp, Glycine max
agctttaagccaattcatacgacaataactgtttactcggatgtctgattgagtcccgtattataacgaaacgctcgaaattgaatgttgaagctttgagccaattctaacgataataactttttactcggatgtccgattgagtctcgtaatatatcgacacgctcgaaattgaatgttgaagctctaggcctattcaaacaacaataacgttttactcggatgtccgattcagtgacgtaatatatcgggacgctcgaaattgaatgttgaacctctgagccaactcaaacgacaataactttatactcggatgtctgattgagtcccgtattatatcgagacgctcgaaattgaatgttgaacctctgagccaattcaaacgacaataactttgtactcggatgtctgattgagtcccataatatatcgagacgctcgaaattgaatg

SEQ ID NO: 29583 - DNA, 251 bp, Glycine max
taacaagagaaggcacatggataagaagaaagcgcgagcacaacacgtctcgtatgatatattttaaaatgtaagacctacataggtcttaatacaaaaccgatggtcacagaatgaatgttaacgttaacatcgggtacctcaagaaccaatgtactggtatacgtaacatcgattttaaaaataatgtaacgaacatatgtaacatcgggtttcttcaacccgatgttacgaacagatataacatccgt

SEQ ID NO: 29584 - DNA, 360 bp, Glycine max
tagagaagctagagcttagctacacatacctctctaatagctaagctcacctccttgagatgagaagctagagcttatctacacaccccctatcatagctaagctcacgcgcatgacaaaaaagacatgaaaataacataagaagtgcttattacatagacaactcaaaatgcctcgaaatacatggctaaaaccctatactactagaatggcaaaatataaggcctagacaaattatgaacatattctagtatgtacaaagataagcgggctcatacttagcccatgggctcgatatctaccctaacgctcatgagaaccctatggcctttgcttggatctgtagcccaatctacttgg

SEQ ID NO: 29585 - DNA, 435 bp, Glycine max
  unsure at all n locations
tatatatatttgtagaggaatntaataaacttatacttttcttcttgactgtccgactcatcaggaacgatgaatcctgactaatcgaacatccgattaaaaagctattgccactgggaatgagactcacataatattcagagaattcaatcttaatggtaatatatgaatcacttatatctcatcactctcttttaataagcttatatgtgttcaagttaaaattcccaaagagtataattccatattcgacacttgatcagtaataatagtatcctagcctagattttctccattcataagctaatgatgcgttggtaactctcgttctactggaacgtgatgcactcacgtctgatgtggaattaactcgacccattgtatctatatctttccgttgcatgacgggtgaccattcacacattcaaagaatca

SEQ ID NO: 29586 - DNA, 346 bp, Glycine max
agctttgagcttttcaaatggtcataaatagtaactcggaggtccgattcaggcgcatattttatcgtgacgctcgaaattgaacaacggaagctctcaagaatatcattggtcataacttttaactcagaggtccgattcaagcgcataatatatcgagacgctcgaaattgaacaacggaagctctcaagaaatttaaatagtcataacttttaactcggaggtccgattcaggcgcataatatatcgagacactctaaattgaacatcagacgctctagagagaatcaaatggtcataacttttaactcggaggtccgcatcaagcgcataatatatcgatac

SEQ ID NO: 29587 - DNA, 457 bp, Glycine max
  unsure at all n locations
tgtanggttaaagtctcacgaatgtcatgtgctcatgcaacaattgttagccgtggctatacgagatatcttgccaaacaaagtctggttagcgataactcgcctgtgctttttcttccatgctatatgtatcaaagtcattgatccagtcaagtttgatgagttggaaaatgaggccgcaattatactgtgccagttggagatgtattttccccccgctttctttgacatcatgattcacttgattgtgcatctggtcagagaaatcaaatgttgtggtcctgtatatctacggtggatgtacccgggtgagcgatacatgaagatcttaatagggtatacgaagaatctatatcgtccagaagcatctattgttgagaggtacattgcagaagaagccattgaattttgttcagaatacttagagaaagctaaacctgttgggctatctgagtct

SEQ ID NO: 29588 - DNA, 384 bp, Glycine max
ctctctacatatcatgcgccgcactcggacatgcctgtgaaaagatatgttcataccaattgctcgagagcttacgatgcttaatttcgagcgtatcgatatattatatgcctgacccggacctcacagcgaaaagttatgaccataccaatttcacgagagcttacgttgtgcagttccgagcgtatctatatgagatgcgccgcactcgaacatcccagtgaaatgatatgaccatgtgaatttctcaagagcttacgttgcgcaatttcgagcctatcgacatgttatgcgcccgaactggacatcccagtgaagagatatgaccatacgaatttcacgagagcttacgatgtgatattcgagcctatcgacatattatgc

SEQ ID NO: 29589 - DNA, 413 bp, Glycine max
  unsure at all n locations
agcttatatccagcaaggcacaaggaacaaattaaatcaagtcttatcaaaatcagataattcatgggacttctatcaatgcaaaatgtcttccaaaacaaaaagctgaccttttggctgactacattgcatttatgaaagatagacagtacatatttgttgattcatgcagggacgcgactaccttaatcttagattgtattatccatcaagctttctctcangatgccattggagatgcagtataccatataaaggaaaatactagtgcccaagacatacaccttcttgcatccatatngaagctgatgagtgtttcattgctgcatacaattaagtatctaagcaatagtggtgattcagatgtagaagcacataactttgatggtttgatgatgataatgatgatttga

SEQ ID NO: 29590 - DNA, 444 bp, Glycine max
  unsure at all n locations
ntataagctntatttaagccatatctctagtcaatgtgggactaaattaccacccttgagctgcaattaaggcagcccccatagcaaccgcaactgagcttggataggggtgaccacaattaagcttggctttccaacaattaggcaattccctaactcttcttaccattttctccactctttcaccccctttttcctcctcttctctacacaccaacagacttttactactgttaggaccatttttatctttctttcctctcccatgtatcttgatcagcagcccatcagaactcaattaaattaaaatacaactcangcagaacaaaaaatctgaatattatttggacagtgaggtctctcccaagtttgtctatgtttgactgctgaacttatggagattaacataaatgatctggtacagttgcgagggacacacaaagc

SEQ ID NO: 29591 - DNA, 416 bp, Glycine max
agcttgaaggctaactggatgcattggtcaacttggtaacccagctggccttgaatcagaaatctgtacctgtcgcaagggtttgtggttagtgctcctctgctgaccaccatacagacctttgcccttccatgcagcaacctggagcaattgagcagcctgaagcttatgctgcaaatatttacaatagacctcctcaacctcagcagcaaaatcaaccacagcaaagcaattatgacctctccagcaacagatacaaccctagatggaggaatcaccctaacctcagatggtccagccctcagcaacaacaacagcagcctgctccttccttccataatgctgctggcccaagcagaccatacattccttcaccaatccaacaacagcaacaacctcagatacagccaacagtt

SEQ ID NO: 29592 - DNA, 468 bp, Glycine max
  unsure at all n locations
atgccgtggagtttgacacaatgtcaatgaacaacatatgtaccatgtgagctgtatgagcctgaggtataatgccgaagtgaatcccctttganaagcggtcaacaaccacaaggagtacaatcttgccctgaaaaaaaggaagaccaatgacgaaatcaagggagaggtcctcccatggtctgaatggaactggaagagggcacaacaagcccacaatatgtttcgtttcatatttcgtgaattgacattcaatacaattagctacaaagttggcgacatcagctcggagacctggccaagttaaattctccgacaaccatgttattgtctttgtgactccaatatgaccccccatgggagtggcatggtattcgatcaagagagattgaatgagtggaagatcatggtgtaaccatattctgcccttctggagaatgagattcntaataatggtgaagtctggat

SEQ ID NO: 29593 - DNA, 414 bp, Glycine max
agcttgagatgatgaattgtttaatggtcaaccttcctgcttttatcgttgaccacagagtggtacctgcagatatgtcgggggggacaagagaccttggggacgtcaagtggggtgctattgcccaaaaccaagcttgaccaatcccgacccaacccgggcatagtcggtcagctgagaacctgtgatgtacctaaacaagcgagctcctggcagtcaacagataaaaggaacaatgactccaaagcaaggaggcttgtggtggctggccagctgagaaacttgagtgatttgtgggctgtggctctgataatcgagtaccacgggtgggtaattgattacacggcttaagaatgaagacagtgggctaagattgtctctggtaatcgattaccagcggatgtatctaacacc

SEQ ID NO: 29594 - DNA, 477 bp, Glycine max
  unsure at all n locations
tcagaccanagcaactcanaatctaggtatctaaaacccctcaattttagtggatttcaacgtttgagaagtgaaaatgagaatgggacttggagcaaactctcatctcaaacaagtctatatcatcaatttaaactcgctcaaactggttntacgacgaatactctaccgaatcaaaatttgactcctcaacacccaattttaccctagaaatggctcttgttttcactttggtcactcatattcctcatttgcacagtctaagctttctcataagtcctaaatgacatttcaaactaggattaactccctttaacctccaaataccactaaatccagaatttgccttccaactctcaaagcctcactctttttttcactcataacaccacattctcactttctaaccctaggttaactctacccttcatctctagcagttttccataagcaatttcagcacataaacatcacaag

SEQ ID NO: 29595 - DNA, 428 bp, Glycine max
  unsure at all n locations
agcttattcagatgtacttttatgataaaaacataagaagaaaaaatgacataaatttcttcataagtttaaaaatagttcacgcataagttagtttatagaagctatcttatatagcttctctaaaagatgatagagtttctacaaattgatatgtacataaattaatttgagcttatggagaaattcatctcattatatttctttttatctttttctcctaacagttcttctagaaaaattcatccaaacacgtctcattntaacagttaacataaaccatcaagattatatatactttatcctctaaattattttttactttgaaggagtcaagataaaagtcattataatgcatgtgtaaagaanatactacaactcatgcaagtgcatatatcgatatgtttagtatatgaaaattacgaatc

SEQ ID NO: 29596 - DNA, 475 bp, Glycine max
  unsure at all n locations
ntcttgagataacttccttgagaatcttctttgagataacttccttgagaagctagagcttagctacacacaccctctcataactaagctcacctccttgagaagcttgcttaagaagattcttaaagaatctagagcttagctacacacacctctctaatagctaagctcacctccttgagatgagaagctagagcttagctacacaccccttataatagctaagctcacccctatgccaaaaaatatgaaaatacaaaaaaagtccttactacaaagactactctaaatgccccaaaatacaaggctaaaaccctatactactagaatgaccataatacaaggcccanacgaagganaaacctattctaatatttacaaagataagcggactcatacttagcccatgggctcgaaatctaccctaaggctcatgagaaccctanggccttcccttggatctctggcacaatct

SEQ ID NO: 29597 - DNA, 423 bp, Glycine max
agctttgaccaaattcaaacgatgataactttttactcggatgtctgattgagtcccgtaatatatcgagacgctcgaaattgaatgttgaagctctgaccaaattcaaacgatgataactttttactcggatgtctgattgagtcccgtaatatatcgagacgctcgaaattgaatgttgaagctctcagcaaattcaaacgataataaatttttactcggatgtctgattaagtcccgtaatacatcgagacgctcgaaattgaatgttgaagctctcagcaaattcaaacgacaataatttttttagtcagatgtctgattgagacccgtaatatatcgagacgatcgaaattgaattctgaagctctgagctaattcaaacgacaataacgctttgctcggatgtctgattgagtcctg

SEQ ID NO: 29598 - DNA, 493 bp, Glycine max
  unsure at all n locations
gacgcgacacttaatactcagcttctatataagctgaaccattttatcaataaacacaagttgagttttattcagaaaattagagtttatctcttttatcttagtgagagtgattctcctaaattcttgagtgattcaagaacaccctggctatatcaaaggactttcacaacctttgtgtgttgccctcgctggaaagagtgattctttccttcctatcatctccacccttgttctttcaaaccacaattccagaaaatccacctctgcccaaaattatctcgtgaccataacttccattttacacactcaaattaagtgattcttgagcctaaattgaatttcaaaacgatacctttcacctcgttctggaatcacctcattnggagccctgtagcttccgttattgccatttctatatttctgtccagccaccacttaacctacgttntaccatcccattcattccatttatgccagaaaccaccttatt

SEQ ID NO: 29599 - DNA, 566 bp, Glycine max
  unsure at all n locations
cctcacaccaatctacctcctcacgcttctattccganantctgccctccgacactatgcaccccccccccccccccacgagtgagctgatgcaatagtcatcaggccaatccactcgtaccgtagaccctagatcccctgccgcatgcaacttagaatttaacttgcactccaatgcaacgaaacatgctatggctacatattcacatttgcttgtgagagcccatgctacactctgcgctgacccatgcctgatacttcacatagaaagaccgtggaaaacatcctcgaaatagtgtgcatacataggtcaatatcaggagcattaactcccaacacagcgagaatgatcgactccctaagtgaacgtatgatcacgcggaacgccatttgaatgcatgtatgtgcataatgcaaaaatctagccaatatgtgcaagtgtgagagaaacaatcaacgtcggtaaggcatatatactctgagtgcgcgaacgcacatcgcgatacctcactgtttagacatagctatctcaaattatagcccacgccttgaggtgacagctctcg

SEQ ID NO: 29600 - DNA, 409 bp, Glycine max
  unsure at all n locations
agcttatatgttactctgagcactgaatanggaagagacatagggataactatagtcactccagggctgattgagtcagaaatgtcgcaagggaaagtcctatccatggaatgcaagatggtttttgatcaactaataagagatgtaagctatctttactttttgcacaagacttggacgcaatttttaacatatcttttgtgctgtttcctagtcagaattggaacttcacttgtataaataaaagattagtattattcattgtaatataagccaagttcggtccttgcctttcattgtaaatatttggttctccatcggaatcggagtccagcctgagagggaacggaacggaacttggttttctcctcacatgggggcctacaggttacacacccagccaatacta

SEQ ID NO: 29601 - DNA, 534 bp, Glycine max
  unsure at all n locations
cacattgtcctaacttatcaatctcatattctaatgtaatttatatnnnaannannncatcgatgagcgtgctgacccctgcattccggcactatnaatactcaacttgtatcataagagccttatgggactaaatcttatccactctaactatacttcctgaacttcgatattcgatggatatgcctgccagaatcagttctggacgcttaagtcgcggatctaaggggcacttatactacctatccttttatgggattcttttccttcattaagatagttctatctgatctgacattattaccatatatagaagatcaagaagtgcctttgcctgagatagactatattacaaaacttaaccttgttctccaatgcagtatacacgaacagcataagccatgctaatgaatggtgcaaagctgacatgacaagctgtgacaatgcctactgcacaccgggggaaagtcagtctagtgaatcacttgtcttcatactggctcatattatatgagatgaccgcctcgcatgaag

SEQ ID NO: 29602 - DNA, 341 bp, Glycine max
  unsure at all n locations
agcttcacgattttcctagcaatttagtttcagacagggatcccatttttgtacgacttttttggcgcaaattgttcaccatgtgtggcataaagctatgtatgagcacttcacatcacccagaaatgaaccagcaaaccaaagttctgaaccatactttagagcaatatctcaaatgcttggtcagtgacacaccaactcgctggttcaactatctctcactggcagaatggcgttataatacatccattcattctgctacaagaattactcnctttgaagcaacttacggcaaggtcccttcttctattctcggtacttgatgggatcgtccagcgtat

SEQ ID NO: 29603 - DNA, 455 bp, Glycine max
  unsure at all n locations
nttaatttagtagtgggaacgacaaacaggatggaatatgaggatcaaagttgagctacattgagatatgggttatgaatgttggtggcataacatccacatcaataaaagtgtatatatatatatataatactagaaactgtatccaatctcttaagtatcgactaagactattcattaataactatgagaaaggatcataaccttattcttaaaattctaaaaacattaggactctagttctgatcatgtaagtatcattcaaggaggcttttggctcccactactttgccaaagattgtgctggttaggtttaagtaaaaggttctgaaatttggttagaaaagcatgttatcttttttaagggcacttagttggataggatggttcttcagcctcccaataattnttctatgctagctagttgctgatagatggtttaaaagattgaaatt

SEQ ID NO: 29604 - DNA, 422 bp, Glycine max
  unsure at all n locations
agcttgatgatatgggctaatcccgaaagaatttatacaacaaaggcttcgattcaaaaggaatcctanagagtctgcgtgagtgactaacatcaaacgtacgcttatcacaattgtctttgggcattntccatgagctcctggtccaatgagttttcttctcaattgtgcaagtacgaaaccttgaggattatatatttttttcaataatcacaagcgtgtatgggtttcattccagaatcccaacttataagcaaaattagtcattccttgatccacatgggctntattgtgcttgtaacgtggtcaggggtatgagggctatganagaaaggattagagaggctcanagagtgtttgaaggttacattgagtaagaaccttgagagtcttgcttgtactttttgtcctttcaactcttg

SEQ ID NO: 29605 - DNA, 454 bp, Glycine max
tgaatatcgtcatactttgtacattcccgcattgtgtcttttgcatatgcatcgcatatgggttctgtcttgatcccttcagtaaacaaaccaacggagggtctgtgtcgccttcttaaaaacgtacgttggggcactttgctacccctagacgttgtatctaagaaggggacaaattccccgggcccccgcattcctagattgcatttgtgtcatatgcattccatcatgcattcatccatcccacccatgagatatcggagttttgatttgcaccagtttttgtctcactttagtaagcatgggaacaaatcaaaccggcaagaggttctaccaagtcaaggttaaaagcctagataccaccagcatcaaggaattagggcggttgatgaaacctctccaaatgcaagccttccgcaagacttacggaaagatcttagagttgaccatagca

SEQ ID NO: 29606 - DNA, 407 bp, Glycine max
agcttctgttttcaattttgagcgtctagatatattacgggtatcaatcggacatccgagcaaaaagttattgtcatttgaattttgtgtattcattttttagcatcaagaattattaaatgactcaatcggacatccgagtaaaaagttattgtcgtttgaatttgctgacagcttttgtattcaatttcgagagtctcgaattattaaatgactcaatcggacatccgagtaaaaagatattgtcatttgaattttcttagagcttttgatttcaatttcgagcatctagaattattaaaggactcaatcggacatccgagtaaatagttatggtcatttgaatttgcttagagttactggtctcaatttcgtgcgtctcgatatactataggactcaatcggac

SEQ ID NO: 29607 - DNA, 460 bp, Glycine max
  unsure at all n locations
tgtagcanatgcaaaccacaataactnttagctcggatatccgattgagtcccgtaatatatcaagacgctcgaaattgaatacagaagctcttagcaaattaaaacgacaataactttctactcggatgtctgattgggtcacgtaatgtatcgagtcactcgaaactgaatacagaagctgagagaaaattcaaacgacaatgacttttaactcggatatcccattgagtcccgtaatatatcgagacgttcgaaattgaatgtagaagctgtgagaaaattgtaacgataataactttttactcggatgttcgattgaatcccgtaatatatcaagacgcttaaaattgaacacagaagctcgtagcanactcaagcgacaataactnttaactaggatgagtcctgtaatatatcgagatgctcgaaacttataacggaagttcgtagcatattca

SEQ ID NO: 29608 - DNA, 375 bp, Glycine max
agcttgtccgttcggagttttccgactatgctcttgtgtggtggaacaagctacaaaaggagagagcatgaaatgaagagccaatggttgatacatggacggagatgaaaaagatcatgaggaagcggtatgtgccggctagttactcaagggacttgaaattcaagctccaaaaactaacccaaggcaacaagggggttgaggagtatttcaaggaaatggatgtgctcatgattcaagcaaatattgaagaagatgaggaggtaactatggctcgatttcttaatggtttgactaatgatatccgtgatattgctgagctgcacgaagttgttgatatggatgatttgcttcacaaagcaatccaagtggagc

SEQ ID NO: 29609 - DNA, 433 bp, Glycine max
  unsure at all n locations
ntgcggatntggtcttcgccagtgaaaggatcgaagtggatctgataagaggcaaatctaatcatcctgcttagacgaatgagaaaactgnggcaaataaagagggtgaggatgagggagaaacccatgatgtgactgccattcctatacggccaagtttcccaccaaacccaacaatgtcattactcagtcaataacaaaccacctccttacccaccacccagttatccacaaaggccatccctaaatcaaccacaaagcctgtctaccgcacttccaatgacgaagaccacctttagcacataccataataaacaccaaccaagatatgaattntgcagcgaatagcctgtatgattcaccccaaattccggtgtcatatgctaacttgctcncatatctacttgataacgcaatggtagccataacccct

SEQ ID NO: 29610 - DNA, 352 bp, Glycine max
agcttccaaattagtgtaccacactaccgcagctccggccaagctatcctgaaagaagtgtatcaacagcttttcatctttagaatgagcgcccatcttacggcagtacatcttgagatgggttttgggacaagtcgtccctttatacttgtcgaagtccggcactttgaatttcgggggaataacaacatcgggtactaaacaaagatccgtcatgtctgcaaacggatagtccccaaatccttccacagccctcaatctttcctcaaggagatcgagcttccttctttcttcaattgccgggggcggcccttccatagacaaaactataggcgatgctgcgatgttgggt

SEQ ID NO: 29611 - DNA, 435 bp, Glycine max
  unsure at all n locations
tcanaataaaaacctaactggttgaagatcgatgaacgatgaagaacgaatgaagaatagcgaagaatgatgaagaacatccacagaattgatcacaaaaacatcatggaagcgttacagaagcgtctcggcttggatttattccttctttcttcttttcctcactaattttaagtgaaaactgaatatccaatgtgctgaaccccttcccctcagtcccaaaagtcattntatagcaaaaatgagggagatggttgccgcccagcctgcccaggcgagctatgtagcttccacctgaagcaacctccctctagaatgttccagatgggcccaggactagatacacccnccctgaatggatcagttcacccnccattttgtgttttggctgatttccttcgaacatcgtgaaatgtacgaatacacgttgatagt

SEQ ID NO: 29612 - DNA, 429 bp, Glycine max
agctttgccacatggagatagatgtccaaaaaatgaaaaaataaaaaataaaaaatcaactccctcttgttgtgtgtaacccttggccacaagcctagctttgtaactttggatggcgccattaacacaatgtttgatgtgataaacccacctataaccaattgaaacttagcttggggaaaatcagttagatacgaagtatgatttgcttcaagagtatgtaattcatccttcatagcttttcttaatacagtttcatacttaacagcttatgcatatgttttgggttcagaaatttttgaaatggctaaggtatatatttgagatgactaggagacaaatgatgataggacagaacagtggataaggaatataaagcagtacctgaagtagaagacaggaacctgctgagttagaagattgcatgta

SEQ ID NO: 29613 - DNA, 397 bp, Glycine max
  unsure at all n locations
tttttttctcaaccttcactttctatttttttctcaaataacaaacttaataacttatgttattttttctcaaataaaaaaattaaaaacttatngtattctttttatttctcttttcccatctatctctttcttattgctcattggcttctgttcttttcttcctgtcaaatactataactaccacattgaaccactntntacactaaagcttctgtttagtctcctcacatacaaagtttttttttgtcttctctctcagatatatttgttcctaatcttatctttttcttatatgcgaactcatcagctntaacattcttatcttatctacacacttgaggttatatttatagtaattaatacaacttatattntatctttgattagcctgtgc

SEQ ID NO: 29614 - DNA, 420 bp, Glycine max
agcttacaggaatttttccaagaaaagtaggacaaacaaaatcatgagattaattcaaagttgtagaaacaagacttgctcattatttaattcctttacacttccgagcatacaacactaaccttgtgtgtatttgataagctaccaaaatgttgcttaaacatgtcactgtcttcttcagatggtagacttcccaaattgccttcagtagttgtttctgacacacttccagattcacttaaatacaactgctctgctttactctcagaaacttcttcagaacaccaagaaacatcattattgttacagccagcatgttctggagcaacacccctcttttcattcttgctaaggttattacgcccaaaggagttctggtcctcacaaatcacagccttatgttgtcctacaataagccat

SEQ ID NO: 29615 - DNA, 427 bp, Glycine max
  unsure at all n locations
gaatgacatactcttgttggacatcaacttgtgttcaaaattattagttntaaggactgacaatggcctgcagtcgttcaaagcagttcaatgagttctgcaagaaaataggcatcaaaaggcacataatagtccctcacacaccacaacaaaatggtttggcagaaagaatgaataagaccattttggaaagagtgaggtgcataacttctaatgcatgactgccaaagaccttctggggagatactgctacaccacagcatatttgataatagatgtccatcatcagccttatgtttcaagacactaatggaagcttggagcggtgaaccacctgattattcatgattaaaggcgttctgatcactggctttcgctcatgttaaacaacgaatgctggatgcaaggtgtataaagtgagtgttca

SEQ ID NO: 29616 - DNA, 355 bp, Glycine max
  unsure at all n locations
agctntatgtatattctttgtaaagttcagaagctttcaaaataccttgtacatcttagagaaaaaactaagagcttagattgtatatcctcctatgagacgtttaagaagtactcaatgagccaaccaaacaacaaatcttttgattattttagagctagtagtgacttactaggacaaaagatattgagttggttaagtttgcgttgcatgagccaagagtgatagtgaaaaatacttgtaattagtgaaatttggtggtttatcaagaactggacgtaatctcagtggtaaagacgaaccgatataaaacttcatgtgtctgatatatatctctttgtgcttatctagtctt

SEQ ID NO: 29617 - DNA, 475 bp, Glycine max
  unsure at all n locations
actcagcttgtatacaactcanaataatgaacgattttcaagcaaatcaagcatacacaatttttgttgttgttctggacgtgtattttgatgttaatctttatcaccttttcttgctcatttattctttgtttttggttcattatttatccattgttttcatccagatgtatatttaatccagttaaaatttcagctcaaaacttaaagtattcaaaccatggtggagttaagaagaaagtgtgccaaaattgacagcaaccaaaatttcaacctagaaataaagagtagtgtttatattgtttaaggcttagatagttacaatttgtggttgattaagatcaattgtcttgaataaaacaaatcgatagagcttaagacttattttgattcacaaatccaggcacaactcaatttcttcataggcatcatatagganacttanaaaacaaaaaagttcaacaaaactacttct

SEQ ID NO: 29618 - DNA, 417 bp, Glycine max
  unsure at all n locations
agcttcttatccaaggctcatcttggtggtgaagctccttcttccatggcttattccctagtggatgacgcctcctctcacctcttctcctttgtcttccactgcatctccatggtggaaaatcaccattaaaggacctcattgaagctcanaccaccaaaagtgagtgttttgttgggaaccttgaatgtggtcatccaaacactcttaggattcgcctagtttacatttcttgcttactttcatagcttatttcctttatcttccattgtcaaaccgcctagatagctttccttttaaccaattagttttttcccttatctntcagacctcttttagtgtttattttggctagtttcaaccatagttacttttaccttntgttttcaaacctccaataagaaagaaccacaactt

SEQ ID NO: 29619 - DNA, 463 bp, Glycine max
  unsure at all n locations
ttnntgaaagacaaatctcttcaaaccattntaaaaaggcacaaatggcaatttgaaaaggcatgaagggtctatatatatgtgtgtctaactttgaaaagcaagaaagagatattctaagagaacttcattgccaaatgttctctcaacaactcttgggcaaacacttacaaatctattgagagttcatccaggaatttcaatttgtatcatccactctaaaggagagaaatctttttgtttatctcanaagtcagttgtaatcaagagactggttgtctcttgaattgtgagtatcctgaacacaagagaaagggattcctcgggtgttcagaagttgtaaaaaggatttttacaaagttagtgaaaatctcaagtgggttgcttgaggattagatgtangcacaggaagtggctgaaccagtataaatcgagtntgcatttctctcttccttcatctcat

SEQ ID NO: 29620 - DNA, 422 bp, Glycine max
agcttccacaacatccaagagaaacaacattcaaacagcacaagctatcacagccaagcaaaacagagtaaaggcagaaaactctgctcaacacatcaaccaaaatcacagcttttctcacttaaagaccacagtaacaattccttcgatccaattcgttaaccgttggatcgactccaaaattttactggaagtctatagtgcataagcctacattgtaaccgttgggatctactagaaaacatccagaactcattctgtactactctttccacagccaaccacacacaagcattttctgcaccaagctaaaatcctgctgcacctattatgacagcaaaattctgcataagtgcagatttcgaacatcacacttcccctcatccaatcttgctcagatcagatcctacaagtcccaaatc

SEQ ID NO: 29621 - DNA, 435 bp, Glycine max
  unsure at all n locations
attaatgtgttgtaccgattgaaaaggccatatatttgagctattcaaaattagttcgtcatggatgagaactggaaagtaactaccaaggaataaggatataggagggggccataaagagagaagtgagagtgagacgccataaagtgtgtaaaatttttatatagtcagtatatgtttgataataagttctttgaaagttctactaacaagaatccagaaataaattatttttggtaattaacaaagtataaacaacaattattcaggtcaagacaattaaaatatctgcaagagcagcatatacctcaactctaagtatcagacacgatcacatacttatcctattacatggaccgtgtaattctggaatcttctttttagatnttaccgttattattttgctctcattagctgtgcattgttcttgcacat

SEQ ID NO: 29622 - DNA, 368 bp, Glycine max
agctttgtgttttttgttataatagagtgaatctttggttgattcattttatgtatggagtatatcaattgactttaggactgatctgtgctctttgcacttttcccctttttttaacgttcttgaataaaatttggcttcttaataatttggacaacataagtgttaatagatttataaacttaaactaatgtgatgttagaaatcaattaagaaccacatactaggatgggcattagacacctaacgacccattctgagaattaatggatgcttgggggttattagagaccctaaactcacgaaattatgcgacaacacgaattttgttatgtcataaactaagtgtacaagtgtgtagttttcac

SEQ ID NO: 29623 - DNA, 454 bp, Glycine max
  unsure at all n locations
tccatggcatgaggtctggctcccgctctgctcttgcccgcgatgccttctccctttctttatccacatgctctctctccctcaatgaattaaggcaacccctctcccttccttcatccaagatgcttgtcgagctctccaagtcccaggactcccctgccggcgacagcaccaccaccgtcatcgtcatcatcggcgccctcctcaagcagtgcctncaccttctctcccacgacatccaccccaccatcgtcactgacgccctccacaaggctgccatcaaggctgtcgatgttctcattgccatggctgtcctcgtcaagctctccaaccgtgactccctcgtgaagtccactcanatntaatggataggggtaatatgaatangtaacccaattgaaataagaaactacccaattanatccaatgaactactacnaatatgcatcaacat

SEQ ID NO: 29624 - DNA, 367 bp, Glycine max
  unsure at all n locations
agctnttttcagtcgtctgtaaggatgattgggtgttagaaagtggtgatgcctactgtacacagtttttctcccatgtttaagttgtttgtaacttgtattttcttcacagatggggcatgcatgatgacccttaacactgtaaccgctgagattcccatatgctggaaagtcattaatggtacaaaaaagcattgcacgcatttcaaaggtctccttgcgaaacgcatcanacactacaacccccttgtcccacaactttctcagatcttcaaccaacggacttagataaacatcaatgtcatttcctggctgtcttgggcccgatatcatcatattcagcgtcatgtgttttcgcttcatgcac

SEQ ID NO: 29625 - DNA, 446 bp, Glycine max
  unsure at all n locations
nttaatggaagtcaagagcacgatattgcgcccataccgttgactggtgagcaggtatatcagcgggttcaacacctgaatactgtatttggaaagacccaaaagaaggataaaagtaagagttgcatatggaaaaagaggtccattttctttgatcttctgtactagtctgatctagatgttagacattgtattgatgttatgcatgtcgagaaaaatgtatgtgacagtgtgattggcacgctccttaacattcaaggcaagatgaaggatggcttgaatacccgtcaagatctagctaatacagggatacaatcatagttgcatccaaggtctgatgggaagaaaatttacttgcccccagcttgccatactttgtccaaaaaggagaagatcccgttttgtcagtttcttcgtcgggtgaaggttccacaaggatactcttc

SEQ ID NO: 29626 - DNA, 421 bp, Glycine max
  unsure at all n locations
agcttatccaaattctgttntagatattcgtgaattacaacctgncaatgtgaaagtttttattcaatggcaaaacctccctccaagtgaaaataattgggaatctgtggctaaattacaagaggtttttccgacttatcaccttgaggacaaggtgagtcttttaggaaggggtattgatatgcataagcataagccacacatcaccaaggtgtacactcgcaaacaacgagcaaaagaagcaataaccatggaccaccagcagcaaggcgcacaacacccaaggggtgcaaaccacccaatagttacaacccatccaaagggtgtaaaccacctaatagttacgattcacccaaagaatgcaatgtcagaagatgcgaatcaaggggacatgacccttgngaacagtcacaatcaaccg

SEQ ID NO: 29627 - DNA, 461 bp, Glycine max
  unsure at all n locations
tcaggttgctcattgactccagattgatgcataanaggacaaagatctgtatggtgatctacagaagaacatagaccacagactctttcaacaggtgtagattttttattcatggcaagctgagttactaggttgaccaaggcatcaagttttccctcaagctttttactaggttgaccaagccatcaacttttccctcaagctttttattttcacttgaatttgaaattgaattttggagacaaattttcactaattatgattagtgaattttagctatggttcagcccaccaatccaagatcaattccaagattctccactaagtgtgcttaggtgtcatgaggcatgtaaagcatgaaggacatgcacaaagtgtgactatatgatgtggcaatggngtgtagcaagcaaatgatcacctccccctctaatantttaatggattggtcttctcccaat

SEQ ID NO: 29628 - DNA, 380 bp, Glycine max
ctctctactcggatgtctgactgagtcccgtaacatatcgagacgctctagatcgaatgttgaagctctgaccatcatcaaacgacaataaccttttactacgatgtatgatcgagagccgtaacacatcgagacccttgaaaatgacttgagaagctctcagcatattctaacgacaataacaatttactcggatgtcggatagagtcacgcatacatccggacgctccatattgaatgttgaatgttttagcatattcataccacaataactttctactcagatgtccgatgactccggacatatcgaaagctgcaattaaatgtcgaagctctgatgatttcaacgacaatactattactcggatgctgaatgaccg

SEQ ID NO: 29629 - DNA, 351 bp, Glycine max
actcagcttaacattcaatttcgagggtctcgatctattacgggactcaatcggacatccgagttttaagttattgtcggtcgaatttgctcagagcttccgtattcaattctcaagagtactcgatatgttacaggactcaatcacacatccgagtcaaacactatcgtcgcttgaattagctcatagcatcaatattctatgtcgagcctgccgatatattacgggactcaatcagacatccgagtaaaaagttgttgtcgatagagagttctcaaagctataacagtcaatcccgagcgtcttgacagagtactggactcaatcagacatgcgagtaaaaaggtattg

SEQ ID NO: 29630 - DNA, 457 bp, Glycine max
  unsure at all n locations
tggttntgggcaatagcaccccacctgacgtccccaaggtctcctgacccccgcgacatatctccaggtaccactctgtggtcaacaaataaaagtaggaagactgactcttccatgctttctcacaccaagcttattggattatggggcacccatcatatgtggtactaggtggcgatcgggcgatggcaccaatcaactatcccatttccacaagccaggcataagcacaccatccccagttgtgcacctttaaatttagctcatgtgcacatacgtagccttctcctcgttcctctcagcccgggtccccatcaaccccaccaagctttcacaatatccaaacaattcaattccatttgtcatgaaactaccttaaacaaagaataacagagtggaggcagaaatctttgcacaagattcattcaaattccatagaagttttcctaccctcata

SEQ ID NO: 29631 - DNA, 330 bp, Glycine max
agcttctactataatgtaaaggtgaaattatgtataagttgggtgtcataagttgaactaaatacattgatctaaacataagtgaaaagcttaaggctctatctagctaaaaaaagacagacaaaataatgaactcgttccattaactaaaattcaattacgagataaagcatagatacgaaagattattacatagattatgtacttggctaaacttaaaggagtgttgttcgccggcgagctggaggttgccgctgacgaagacgatcatggcggagttgacagcggacggctgggaatcgacggtggtgatggagtgctggcactgtt

SEQ ID NO: 29632 - DNA, 511 bp, Glycine max
  unsure at all n locations
gtgaagctttgttgaaccttgnattgatccctgcatacggaccttaagtctcagcttactcttatgccttgttgcactcgactgtaacacggtaacttaagcatatgcgcctaaccacctatgaattgccgaatctccactcaaacagaatgagactaatactctcacataggtcaatatagggtccattaatatgtgatgatgtgaaatgagatgaacatgtgtaagtgtgatagccatgatgatttgacgcgcgagaaggatgtactataacaatgatcgtgtaacatgacatgcaatttcatgagatataaatgatggcgatgatcagactagtaatgaatctaattaaagtatacaaagaattatggaatacaatgtgacagagtaagaaaattccttcgacgtgagtttgactagattatatgcgtaataaacttgtactctattagcactctctagtattagattaacatagctatagctactctacatttataactattcatct

SEQ ID NO: 29633 - DNA, 403 bp, Glycine max
  unsure at all n locations
agctntcattgttcaatttcgagcatctggatatattatgcgcctgaatcggaccttcgagttgaaagttatgaccatntgaatttcacgagagcttccgtggttcaattttcagcgtatcgatatattatgcacctgaatcggacctccgagtgaaaagttatgaccatttgaatttctcgagagctttcgttgttcaatatcgagcgtctcgatatagtatgcgccggaatcggacctctgagtganaagtaatgaccatttgtattgctcaaaagctttcattgttcaatttcgagcgtcttgatatattacgcgcctgaatcggacctcctagttgaaagatatgaccatttgaatttctcgagaagcttcgttggtcaatatcgagcgtctcgatata

SEQ ID NO: 29634 - DNA, 443 bp, Glycine max
  unsure at all n locations
tctaaactntgtacaagaatgaagctctgataccacttgttagacaagtggcctcagatatcttaagaaggggggggttgaattaagatattcgaaactntntcttctaattaaaaatctatcttactttgtacttaagttatgaattcccttaaagacaatcttcttaaatattaattcaaatgaagcaacttgaatatgaatataaagcaataataaataaaggagattaagggaagagaaaatgcaaactcagttttatactggttcggccacacccttgtgcctacgtccagtccccaagcaacccgcttgagagttccactaacttgtaaattccttttacaagttctaaacacacaaggacaacccttcctttgtgtttagagattctttacaacaagagactcacagtctcttaatcccttagagaatgagaagaa

SEQ ID NO: 29635 - DNA, 226 bp, Glycine max
gcttgccttttgagaattatgaacacacacacacagataattttctagaattccaaagcaacgacaccacagcgcatatttcgagatacaggctctggaggcagcaagaggagtacctctgcagagaaccctatggtactatacatagagagagattagtgagctgcacagtgatagtgagaagctgagaatatgaggagggatcccccttcttatgtaatgaaca

SEQ ID NO: 29636 - DNA, 306 bp, Glycine max
acagactcgcagcagctgaatcattcctctatagcatccttaaagctgctccctcagctttaagcgcttgaatgccatgctatacaggctgaactatgactcacagattcaagaaatcaatgaatctctgctgaccattgaactgtgagtgaacgagcttaaaagcaaatgacctcttgtgaagcttctagaagcaatgcttaatgcaggaaatcgaatgaatgcacgaactgcaagaggcaaagctcaagcttttttcaatgtggcttctctaaggaagctctctgatgtcaagaccaccaacgg

SEQ ID NO: 29637 - DNA, 434 bp, Glycine max
taatcattccagtccactcaaggcatatcatatgagcacttcaagttcactccacagaacatctacatgtcatgaactacaatccacacgcacgtcgaatcatctatcaatccgatgcagtttcacgtgctgcaaacattgcttttagtatcagcgatcaacacttaaacaacagaaatttaaatgactgaaatctaaggactaacaaagcagaaactagataattgacaagaactatataactgataaactagattgttcatgatttgcaaaattctcattactatgcagaattgagaactactgatcatcctgtagctgatcgatagaatgctcgttcagatctatcactgaagaagctggaggagactgtgaactagactactcttacttcaatgctagcgcatatggcaacggtattctatatatcccgg

SEQ ID NO: 29638 - DNA, 421 bp, Glycine max
  unsure at all n locations
agcttgtagcatattcgaacgacaataacatttcactcggaagtccgattgagtcccgtaatatatcgagacgctcgaactttacaaccgaagctcgtagcaaatatgaacgacaatgacatttcactcggaagtcctattgagtcctgtaatatatcgagacgctcgaaatttanaatcgaagctcgtagaatatacgaacaacaataacttttcactcagaagtccgattgagtcccgtaatatatcgagacactcaataattanaacccaagctctcagatacttctaacgacaataactnttcactcggaagtnctattgagtcccgtaatatatcgagacgctcgaaatgtanaaccgaagcccgtagcacattcgaacgacaataacattccactcggaagtctgattgagtccc

SEQ ID NO: 29639 - DNA, 444 bp, Glycine max
  unsure at all n locations
cttcggtttaanattcgagcgtctcgatatattacgggactcaaccggacttccgaacgaaatgttattgtcgttataatttgcagagagcttcggttttaaatttcgagcgtctcgatatattacgggactcaatcggacttccgagggaaaagttattgtcgttagaattatctgagagcttgggttttaaattttgagtgtctcgatatattacgggactcaataggacttccgagtgaaatgttattgtcgttcgaatntgctacgagcttcggtttaaaaatccgagcgtcacgatatattacgggactcaatcagacttccgagtgaaatgttattgtcgttcgaatntgctacgagcttcgggtttaaatatcgagcgtctcgatatattacgggactcaatcggacttccgagtgaaatgttattgtcgttcgaat

SEQ ID NO: 29640 - DNA, 595 bp, Glycine max
  unsure at all n locations
cggatcgtacttcctacacaatcgactggctatagtcaaaatgggatagtatctaacttaataanntnnnnnnnnnaagtcttgagacccatggttggacaccactcgatanaacagcgacacntaaagacatgcgccgggcctcaatctgactgcgattagataagttcttacgatcttactgacagcagaccgttctctgttcatagcgatgcttcacgagatgcaacgcacctgaaccggactgccactagagaagacacgaccatttgaacgagaggagagcttgcgtaagctagagcggagcgagttactatacgacgcgcccgaacacgactttgatgtgccaagacatgactaatcgaactacacgagagcgcgcacagttcaaagcagagcgacacagtatacgatgcactggcattggagtgccatacgacacggccagaccaactgagctgctcgatgagcttgcgcgacgcgtcgcagcttagaatataggactcaccggacgacgccgatcgaaccatgtgctaatacacatgcggcaaacacgaccgggggttggaaatcacgaacataccgtacatcggct

SEQ ID NO: 29641 - DNA, 309 bp, Glycine max
atcttcaacattcaatttcgtgcgtctcgatatgttacgggactcaatcacacatccgagtaaaaagttatggccgtaagtatcggctcagagcttctactatcaatttctagcgtctcgatctgttacgggactcaatcatacatccgagtaaaaagttatggtcgtttgcattggctgagagcttcaactttcaatatcaagcgtctcgatatgttacgggactcaatcagacatccgagtaacaagtatggccgttcgtattggctcacagcttcaactttcaatttcaagcgtctcgatatgtta

SEQ ID NO: 29642 - DNA, 199 bp, Glycine max
tgacatctcaactaacatatcaaactgtacaagactattatagtatgctgtttgaatacctcacccactcaagtgtatcacacaattattgctctttctctaatgaaacactcttgcctttaaccactctaattcccctgagttcttacgcaattcaagagattatggccacaacaaagaacaattcaccaatatgtgt

SEQ ID NO: 29643 - DNA, 392 bp, Glycine max
  unsure at all n locations
tgttntgagtatcatgtgatcctttggcatcatcaaaacatcagcttaatcctttgtctacaatctctccctttttgatgatgacaagccctgaaatcaacacaaactatattcaacatgatagcccgttcacacaacccttactcgcgctatcttgtgccatgtatgcctaatgataaacttctaatcgatttctaacccaagtcccaagtgctctcaagatctctccccctttggcaacatcaacaagaactaagcagcacaatcaaaattcaaacagatcaaacaataaaccataatacatccagacattgtcataaccataccaatcagagtcaagaaacataatatacctgcaagattaccatatctaagccataataagcccaata

SEQ ID NO: 29644 - DNA, 59 bp, Glycine max
cgacccggagacctatacatccgacactgcacgcatgcaagtttgtgcattcagtatcc

SEQ ID NO: 29645 - DNA, 431 bp, Glycine max
tcggacaatgatttctgtccacaagttagtcatatacagcgactttcaaactcccctatatttacaattatgcttgtcctcaagcaaagaaagaacagttcacttgtcctcacgtgacaaagacagaggccattcaaaagataatggaggttgattcatcaaggacatcaaccatatgaactgaatatcatggaatgcttaaatcaaccactactcacaaacatgcagcattccaaatataggagcacacgtattatagtcacagctgaaataagctagtaagcatgatagaaatcaatgaaggatcatcatccaaaatctcacagtcattgtttcactcaaactcaagtgttgaagcttattccatcataaacaaccaacacaagttacaacctttgcatttaatcttctatcatacaactatgaacaca

SEQ ID NO: 29646 - DNA, 406 bp, Glycine max
  unsure at all n locations
tagcttactgntgctgccccaccaagcaccacaaaatatgttcctaccatgctcttgcatgcgagccctccaggctttcgtgaatagaatctcgcagaatctccattggatgattgtacccgagcatactctatcagaataacggtaaccagcaacgtgaattacgctttaggcagaggtcataactctagagcgagtactatagctacgacttgtggctcctcgtatggaacttaaaagctaggatcgtcgataatctttaaataggagagcacctctactcctcatagacgatcgttccatcattcttgagaactgccaatgaggccattaagaatgcccctaagttatatactttcactcgccgactcaccccgccttgaggaatcttggctgaccatcaacg

SEQ ID NO: 29647 - DNA, 447 bp, Glycine max
  unsure at all n locations
cgcccagctctctcatgcgagcanggttgctacctccatattcatcagccttatggaaggcccaacagggccatatagatatctacacacccctgcatactacatgcaccaccttcctatcttttatctgaatacttattccgtaacggtacgaaactctatgaatatcgtcccgatacctatttttcttacgcaaggatacgaattcttactgatgatgtatccactctaacttagctctagaacaagttacggaaactcatggatcgcgcacaaacatatattattcaattcccggcacattagggaatttcacgaatcactcacgcttgcttacatttagattctaagacagcacgcgacttcatttattgcacgtcactcaacaaataatcaccggacgaaattagcgtatgacatccaccaccaccatgtgcattaccacct

SEQ ID NO: 29648 - DNA, 425 bp, Glycine max
  unsure at all n locations
agctttataatcgcgggtctgggagacgaaggtcaagtggtcgcgatatacgaagatgatgttccgagtacattggatttggtacgaccatgccttcctgatttccaactgggaaattggcgagtggaggaacgccccggcatttacgcaacgagcataatgtaaacctttacggttttaaaagctctatagttaggcctaggctttagagtttttccttttgttaaggctttgtgtcttttgttttgaatttataatacaaggatctttcttcatctgttcctacgtctctacccattctcattcatttgcctgtttacttctttntctgataatggcagatccgatgacgagtcccccgaaggtactaatacctgcgacccgcctatcgacttcgagcaagatattagtcatacggaagatca

SEQ ID NO: 29649 - DNA, 462 bp, Glycine max
  unsure at all n locations
gacttgagtcatcaagagattatanatatgtgaccatggcatgagtttcatanaaaatcaataatcaataatctatctttcaatcttctctcaacatcattcaatatctttcaactctgtctaccaaattttatgattctttntctcttcatcttttctaaaagtcttgttcaatactttctctttcaagaaaagttctttgatcaaaaacttgtgcttttcatctttttcattctcttctccctttgccaaaagaacgaaggactnaaccgcctgaattctttgtgtctctcttctcccttacaaaagattcanaggactaaccgcctgagaattcttttgattcttcccttccccttanacaaaagatctcaaaggaaataaccgttgagatatcttttgtttccccatacatagattcanaggactaaccgcctgagaattctttgtcccaacacattg

SEQ ID NO: 29650 - DNA, 588 bp, Glycine max
  unsure at all n locations
tactttacattctatattaatttactcacgtttttattgtttataactatacanantnnnacnnnnnnntcgcgtgacccgttgttgacaccctgctattacgtgaactatanaatactcaagcttctgctgcagagaatcatagcctctacgactattaacgcggaggattgtgttactgctactggatggcctgagccttcttgctcacatcatgagaaaactaaccgacaatgatagacatgggtatattgacgtatcacagcatgatgattaatattagatataactcatatggtaatgatcatacctactaacaatggtctctacgattctgtcctaaacggactcactttaccttgctgatgccgtatcactcatagacagcgtcctccacactgttgtgatcagctggaatgactcattttctcgtgaggtttgattaatacttcgtgcatatctgcaacacaaccatgcagtagctggcttagcatactactatcggatgcctctcagatgtcaaatactgcctgacatcatcagatacggtttattaggataataatgattatctggtagtggtgacag

SEQ ID NO: 29651 - DNA, 397 bp, Glycine max
  unsure at all n locations
agcttggaagctttgcttccacaaacaagaccttagaggcgcaccggtggccgcgatgaaacttttcatcacagttgaagaaaaggtcacgttcccgccgcatagccaactcctccaatgacaagctctngatcaggagaggtggagaaagttgcaacggaggtgacaacaaaagtgaaggggataaaggcaccactagcaatggaacttctcctcttgaagacacgttaatcctacggcttgaaccaaagtcagaggttgcaaggtttgaacctcgcanagaatctcaagagtcaagcccgagataaagcaacttanaggaatggtggtggaaggccaatggtgcggctggcaaggtcttcaaacttgaagaggtaagcattgatggtactacact

SEQ ID NO: 29652 - DNA, 468 bp, Glycine max
gcttgtgttgcttccacgagtgagagaagatataaggaagaacaaacttctgcattttgctttatatcaaactctgaaaaaggctttgtacaaacctgctgcattctttaagggcatactgttttcactatgcgaggtattttgcttgtttctatgttagtttttgacattccaaattaataattggtggatattttcttaggttctatttgtggcattatattaattcttcaattatggtatattttgctctttcatataataatatttcacccatcctttacggtgagctgcatctgatgtttctttattataattgctggaatatagaggggggaaattaactatgaaccgtgttttgcaaaatggaaaatatggaataacatgtatatggaatggtaaatgaacatgagacagtgaccagttatgtttatgacacattgtgaatgaattgtttgtcgtcatggg

SEQ ID NO: 29653 - DNA, 363 bp, Glycine max
aatacacgcacagaaccggatcgccacatgcgagctatcatcgtacttagagatggcaacttgttttattccgcgggtcttagctttgaacgtggggataagcttctgaatggcaaaacgcccctccttccgttatcaatgttatatattgaggaccagtgtcaccaacgactaactaccttttttttgcctagattatctacatcgcccataaacttatcagacaacatcacactgatatgtcaaagaccatagattctaagacacacttgtttccgttatgactcccgtgacggaccatactctgatgctcttcccactactgatgcatagatccagacccccaaatagatagcatctacg

SEQ ID NO: 29654 - DNA, 560 bp, Glycine max
  unsure at all n locations
tattcggacaacatcgtatttatntctcaaaacatattgacgtatataattgtagaattatatannnnnnnaagagtgatacctggtttgacccattgaaaacctcaactagnnacaatgtgccnacctaacagaagcgatcttatagacagtttcagtcatgatgttgtgccatcaagccttggcggcagctaaagaaggcccgtaattgctatgttgcgacaggtgttcattctggaataaagcaaagcacgctcttatgtggacagaggcgattccaacgtgactcttgctgaagatgcgtgacgtgtcaagtgtgcgatcatctctagacggaaaacggccctgaatggcgtcactgagaaggtgcggagagttagctgtacatatggatggcagagctattttgaaaggtattgatgcacacaacagacgtcnggcactgctgtcatacaggccaataatggtgtggtacagatacactgaaagaagtagccacaaatgatctgcgaggacatggtaacatcgtgcgaggcagaaccgatgaattcttgagcacg

SEQ ID NO: 29655 - DNA, 420 bp, Glycine max
aaggctaagttttcatgttgctcctcctatctctaacaatattttcatggcacaaaacatatatatatatatatatatatatatatatatatatatatatatatatatatatatatatatatatatatatatatatatatatatattaaagtgagttatattattttcaattaaaaggggggtctacaacaattaaattaaaattgtatcaaaagaaattactactaagcaattaaaatcgcacaaaactttctttagtgtattattgtattaagtatattattatagtgtgtctataacatgttgatcaacatcgcgggaggatacaagatatatacaataatgtgtataatacaagcacgcgaagagaatattatttcgagtacaattcacgttctataatagagcgcactatatgcg

SEQ ID NO: 29656 - DNA, 452 bp, Glycine max
atctgacgaagttgaggcagcattacacattgatctctaagtacactacatgaaagcggtaacattaattccccgacaatcaagtatgcactaagagaacaactagaaatgcattgcttcaaaatttcatcaccattcaacaaaataatgttaaccttaacacatgaatctaccatataaatatgactcttgccaaactgtccaaatggacaagtcaatattcaatacaatgattaatgcaaactatccacaagaataattgaattcaatctcaaatgagaatctaaggttcactcatgatgaacaaaagctgtatataaagcatagtacattaatgacagacaacaacgtacaaaaacatttgtaacatacataagaatcataagttgatggaaaactgtcgtacttgtgatgatgattagtatagtgtccaacaatgaattatgtgatca

SEQ ID NO: 29657 - DNA, 420 bp, Glycine max
  unsure at all n locations
agccacaccatagaatccttactatgcctctggataggaatgaagcttatttcctccataaactgcacagctatatcattttcatgatcaaatagattcctcctccacctgagatcccactcccagctatcattattaaagttacccatgctagagatgagggaactttgctgtctactaatccgaaaaagttgattatatttctgctcaagagtgtagtctgtccctagccacttatctgtccaaaatttgattctttccccactcccaaccttccaggtcaaatgctgattgaaaatattaggatccgactgatgatatagctntctaatatccctccaccaatgggaatgacccctcttgttagagccaagctggaattatgaccaatccccatatttagaaattacgactcttacc

SEQ ID NO: 29658 - DNA, 414 bp, Glycine max
  unsure at all n locations
agcttccatcaagtggtaatcagagcacaagagcttcaactaggtgctccttanacctccattaattntttttggtttaccttctcttccattgttgtttcttcattntttcctccatgtatctcctcacatgtcttgtggtaaatgcttttaacatgattctttagagtttccaccgattaaacttgctatataagctagatttgattttctatggtttaaatttcttgttcttgttcttgaaccatgaattgtgttgagtttaagttcctttgagttttgtcttgttaatttttgtggctgaaacctanaccataaaattcttacaaaaatattaaagtagaagaaaacctcanaaatctagagtgacttgttcacttattgttgtttgtcatagaagtcatgtctagtcat

SEQ ID NO: 29659 - DNA, 439 bp, Glycine max
  unsure at all n locations
ctagtgtanggtttagaggtatatgttgttgtcgtttgtcatgaccttgtagcaagaataaatganagaaactgttcaggttctcgaanaagaattctcaaggacaataaatatttaaaggattttcaattaacagattaagtcaaatgactcttgttcttcacaactcattttttactctcgagaaagccaacttttaagaacaaaaacatgctaaacgaatatgtatgacaatttaatgacttatgcaaaatgcaatgcgtgaatacaataagtggtaaatacaggaatgatatgttcattatgatgccatgaagagatgcatgatgtgtgttgcaacctacccttcggcgggagggcgacgcgagactcacgggagcatcttccaaggaaggaaaacgcgcggagtcgccacccaacgttattcgaggaaaatgtc

SEQ ID NO: 29660 - DNA, 537 bp, Glycine max
  unsure at all n locations
tattcgcaccaacaatactcacagcacactacgttcaacattccgcaccccccccagcgagtgagcttggacatagcaaccgacaaccccacgtccgcgagccacttagaccgcactgcatttcctattcataaantacttacaggcgcacctgcggtcgccgagaaactttacatctgatctgaacacaaggatacgttcctgccgacaaaccataatcatgcaatgacacgctctagataatgagaggtggacaacggtgcaacggctgtgaccacctaaactaccgttatataagaacccacttcacgagctactactcctccgtgaaaacacgataaattgttggttcgcaccactagacagaggttagaacgtatgaaactcctcactaaactcattatcgcaccacatatacagcttcacaaacgagtggaggtggaaagccattgatgttgtagagcaggaatataacctagaaacagtagactagaaatacacaacaggcaaatcttaacaaagctctttagggagccg

SEQ ID NO: 29661 - DNA, 433 bp, Glycine max
tattcttcaaggtcatacttcctaatgacattcatgagataaattatcataacgcgcacatgtcatgtagttaaggaaacaacaaaagaaaaagattgtcaataacaagtcaaaatatgcacaaaaaaagaagtttctattagtaccttagaaaccataaatgcacacaaattgtgagaaggtaaacaattgcgaatactgactatgggataaatagaataaagaagtaataagcaaattagagaggtcacaatgcactactattagacgctcatctgagactaagaatcaagcacaaaacaatacccaaaacttcaaacactttaatcaagcatattacagtggtcacaaactcacaatgcatcgtcaccacatatagtaagttactatcactaagaagagaaccgattaatggccaaaaatggttgtccca

SEQ ID NO: 29662 - DNA, 433 bp, Glycine max
  unsure at all n locations
tatctagatatagtaaatcgnggggaacatgaatatgaaaacaattctaacttctaattcataagttcgtgcaatgttcacagaaacaaacatataaatggccatgtaggaggagtattgcctttgcaagcatggccattacaagtgacatgtttggataagtgttctcctgttttatgaagggttaggtaaagtctcctacttaacatgaaagtattccaagttttaatggagaagtcaactaagcaaacacattatcaattaaagggatgacaccaacaatgagtctgagcttataggtaatgtcagcgtcactacttttgacttactttaagatcaataccccttatatgtaattcgataataagataacttattcattatggacaacanaatcaattaagaataacttcacatataaaataccaattcg

SEQ ID NO: 29663 - DNA, 417 bp, Glycine max
  unsure at all n locations
agcttggagttgcaatagtgctaaggtttctggttttagttactccatattgtcgacaattaacttggggtcctgtcttcatgatttttaagtttaatgtgctaagttgtttcaagtttggtctttggcaagtgtgtacaaagatattcatgacccgctaattaataggaaagattcaacacctataggatatgaagaaacttttagcgtattgctaaattgctgatttcttaatatgatgaaagactaactcaatgatgtctactccaatatcaatgatatagagtcttgggaaattgagggtttttgcttaaaaaaattcanatactgaaagttttatttccttaatatcttggttctataaagattccaataaacaagaagaaaagagacacttatcttcanataattatattg

SEQ ID NO: 29664 - DNA, 104 bp, Glycine max
tggagatgcaatagtgctcacgtttctgtgtttaggtacttcattttgtggacacattacttggggtcctggttttatgatatttaaatttaatgtgcctacct

SEQ ID NO: 29665 - DNA, 357 bp, Glycine max
agcttgcactgtcaacttagattgcttaaaatattgccgtgcttggagaacctatagctcaacagatgcgtcacgctcatcttgcttactggagctgggctatctaacttcccatatcgcatcatatgtgctgtagccactctgaactacttcgacattgatgacactgacagcacctgtccgatagctagactagatgctcttcactatgccgcaataacagagatcacctgctgaaactaagatgctagcaagacctatattggtttgagaattaacatgaattcttatggagaggataactctaactgttattcgtcataaagcatctgatgctcattatctggcattgcctac

SEQ ID NO: 29666 - DNA, 77 bp, Glycine max
  unsure at all n locations
ggaagtcaaagccgtggacttgatgaataccttaagctaccagccttgctntaacttgtggatggaaccgacaacat

SEQ ID NO: 29667 - DNA, 413 bp, Glycine max
  unsure at all n locations
tgtgactcttggcaatttctttaacaaaaccagtcacttanaatagttgtgacttttgaanaaatcttcagaaccaagtcacttgaagaaatgtgacttttggaaatgtatttttcaaaatcagtcattggtaatcaattaccattaaggtgtaatcgattacacatcaatagatgtgactcttcattntgaattttgaaaattaanatgtttagaaacactggtaatcgattacaagcattgtgtaatcgattacacaagttaaaaatgtttaaacacaagttgtaactcttgaaatttgaaatcttaacattntaaaacactggtaatcgattactaccttctggtaatcgattaccagagagtaaaactctttggtaatgaatttgtgaaaacttcttgtgctactcaat

SEQ ID NO: 29668 - DNA, 409 bp, Glycine max
agctttcaacatgagtcttcacaaataaccatcatgaagcagaaaactaacagaactacccatcatatctcccaaaatcccatacccacgaaatttaagagagaaagaagtccacccaaacctgaaatttcgaagtcccactcgtagacacgcacttcacgactccgaaaatgctctcctttcacgatttggggcagaaatgatggccaaaggttgaagctttgtttggagcttcaatggagaatgaaggagaagagaatggcaacgtgagggagagagagagctgtctgaaaagtgtgggggctgagtgaagagagagaaaagctttttggttctaaataacaaggggtctctctgtatttctattattttatttaatcaatgccacatgtctccatttgagtggagc

SEQ ID NO: 29669 - DNA, 465 bp, Glycine max
tcgcgatatatcttgcgccttaatcggactttcatttgataagttatgaccatatgaatgtctcgagagctttcgttgttcattttcaagcttctcgatatagtatgcgcctgaatcggacttgcacttgaaaagatatgaccatttgaacttctcgagagcttgcgttgctcaatatcgagcgtcttaatatattatgcgcctgaatcggactttcgtgtgtcaagtcatgactatttgaatttcttgagagcttgtcgtgttcaatatcgagcgtctcggtatattatgcgctggaattggactgtcatatgacaagatttgaccatttgaatatctcgagagcttccgtgaccgttccaggtttaaataagaagaatcaccggacgacgccgatcgaacattgtctagtagacatcgtccaaatattatcggcggattgaatatataaaacaataccggaca

SEQ ID NO: 29670 - DNA, 427 bp, Glycine max
agcttagagagttagcttattggaggacaaaaatgagagaaagagagaggggggcacataattgaaggagaaaaagagggagagaagttgaaatttgaagtgtgtctcacaattttcacattcatcaaagttatgacaagtgttacacatgtttctatgtatagcctaggtcactaactatatgaaagctttcttgagaagctagagtttaactacacacactccctctaatagctaagctcatctccatgaaaagcttccttgagaagctagagcttagctacacacacccctctaatagctaagctcactcctatgtcaaaatacatgataatgcttagctacacacacccctctaatagctaagctcacctctatgccaaaatacatgacaatacaaaaaaattccctactataaagactactc

SEQ ID NO: 29671 - DNA, 416 bp, Glycine max
  unsure at all n locations
ctcctcactcagccacagcagataatacagaagccttttctctccctctctcacgtagcttactactcttcttcctccaccattgaagctccacacaaagcttcaacctttggccatcatttctactccaaatcgngaaaggagagcattttcggtgacgtgaagtgcgtgaatacgagtgggacttcgaaaatacaggttagggtggactcacttctctcttgatttcatgagtatggcgcttacgagatatgatgggcagacttgctatgttactgctgtgtgatgattatttgagaagacattagctgaagcttgatgaaattgccatgattgtatgacttatacatacccattatggtcaaggttttaggacgatgttcgtatgctatatgcaaaatgctatggaaactgta

SEQ ID NO: 29672 - DNA, 408 bp, Glycine max
  unsure at all n locations
agctntaccttcacaaacacataaacacattactccattaatgcatcacacggtactctatttgaaaatggatcttttactctgtgcctgcaaggactgctgacccttccacctgatagttcatcgcatcaaatagacaaaatatatcataagatataagtctcacagttcataaatagagagagccacacagtcaaaataagcaaactaaccatgaatgcaaaaacaaatattgaaataaataataccactattatgtgtagtgcagctttccaacttttgtacctaactgaaggagacttgtcaatcacttgagagcctgtagcagatgcaatactgtaattaatgaagcttcattgtgagaactgtggtacaacctatagtgacagacaattagtcatcattata

SEQ ID NO: 29673 - DNA, 470 bp, Glycine max
gcttgtgatatttatactatatatgtgtgtgtcttcgtttatctctacctgtttaaaaatgtgttaattcactcctcatgtgttgtttatgtttggatcatgtgatgatcttaaaccttgcgtttgtgagagcaaatgactaggtgaattactttaagaaaccttgtgatgaaggactccgagacacaatattttgataggatgtaacattggaacaagagtttctattttaattgcatgatgtatcaaacatgtcattttactctatttgataaacttgaacagtcttgttttaagtcataaatatttctaagacattttatttggtaacagtgaagcgaatgtgaacattatccacgtgaacttatttacgatcttattgaataaaattgatttaattagattccgcattgtatatatgtttctttcatatatatgtatgttggagtacaatgtgtgagagacatctt

SEQ ID NO: 29674 - DNA, 418 bp, Glycine max
agcttgctctgtaagtcttacaaacttactctgcaagttgtacaaatttgctatgcaactctcataggtctctataaaatgtacaatgtaactaaaaatgtttgggaatgaaattaaatgtcacacttccgcaaattttacgcaatgctctctttctcttactctctatttctctctccttctatcttttagtttcaattcattactaatagatgtcatccctctctttttgtgtactcaaagtcagaatctgtaatgtacagtctaatatatgtagaggatatcatagtcactgcaaatgactctaaactgatttataaactagtttacctattttccttacaagatcatggagatcttaattattttttgagaattgaagcagctaattaagttgatggctcacatatacttactc

SEQ ID NO: 29675 - DNA, 468 bp, Glycine max
  unsure at all n locations
tgactcgagttatcaagagattataaatatgtggccatggcataataatccatcatctttgaataatctatctttcaatcttctctcaacatcattcaatatctttcaactctttctacataattttctgattcatttctcttcatctttctaaaagtttttgttcaagcactttctcttccaagaaaagttctttgttcaaaaacttgcgctattcatccttttcattctcttctcgctttgccaaaagaacgaaggactaaccgcctaaattctnttgtgtctctcttctcccttacaaaagattcataggactaaccgcctgagaattcttttgattcttccctttccctatagcataatatttcaaaggactaaccgcctgagatatctttgtcccaacacattgaagggtacatcctttgtggtacaagtagagggtacatctactncgggattttatactga

SEQ ID NO: 29676 - DNA, 423 bp, Glycine max
  unsure at all n locations
agcttcgtccgcagatccctcatgtaagactaggcctaaactaaacaacattactgtaacagcataattaaaaccaaaacttaactcgcagatccctcatgtaaggctaagtttcaatcctgcttcaatcaagttctaaagcaacagtacatttcccaatgctaaagtcacctaactatgcacacaaatgggtgatcagaccaaaagcatacaaacattaagcattgaaggaagcattgaacacaaaaaacataatcaattagatattgcgtatttacatcaagtgttcattaaaaatcctcaactagggtgtttagccagccattacaaagaaaccctaataataaatgagattaanagcagagaatgatagttccatacataagacagnggattcctcctcctcttctcaacatctcacac

SEQ ID NO: 29677 - DNA, 338 bp, Glycine max
catctatatttgcatatgatgcgcaagaacttatttccaaacacaattgctcaacattcttaaggctcaagctcctcttataccaataaaaagaaatgtctggtaacttcattcccgtgtacttctcatacccatatccaccatcacaacttaagcgtattttgatagattgttctaatctattattggctcatgtaattatagaatgactttaatgataagatggttgctagacttatatgtattaaagtcattgggagttatattagtctttagaattagttccctctcttctcatttcattaacggtaattttggcattaaagaccaaaaacttg

SEQ ID NO: 29678 - DNA, 341 bp, Glycine max
agcttgtaatgataccttgatatttcactgagaaatcagagaccctaaattatgatgattacaaaaaaatgaagataattcaagtaaatataaaaagagtacatcatagaaagaatattacaagaagagggtaagagagagtcttccggcattcttcttacatgtttatatgtcataacgagttaaagattatctaacatgaatttataaatgcaatcttagaaaaaaaaaagaataagaaagtatacatctcatgtcattgtaattgagatataaaaaatagtcatatgacaggagacaatggtttcaatgtattccataactatagctctttgagatcc

SEQ ID NO: 29679 - DNA, 396 bp, Glycine max
  unsure at all n locations
tggcaggcacatgcacaagcacttgttanctcatacaaaatatacaaggcctacattctaaatgccgttcattcatagtgagagagtctcacagtttatatataaacggagatatcatcatacaatttcgtctcaattagacaaccaacatgacatgagaaatttatgaatgaaagattgctatttgccttttctttgtaaggacaggagatggtaccccaattcatagaagacaaatantctttaggctcaaagaacattcctagaagacttacatttgtctcaccccatatagacaattcagacgagcaatgacttaaaactataacctgtttgatgcaagaccttatcttgttccatctgactaatatcttgttcgtaaagatcgctatatgt

SEQ ID NO: 29680 - DNA, 416 bp, Glycine max
agcttggagagaatgcttcaatggaggaaaagaaagagggagagaaagagagagggggggagcacgaaattgaaggaataaaagagggagagaagtggaactttgaagtatgtctcacaagactctcattcatcaaagttacaataagtgttacacatgtttctatttatagactaggtagcttcctttagaagctttcttgagaaaacttccttgagaagcttctttgagaaaacttccttgacaagctagagcttaactacacatacccctctcataactaagctcacctccttgagaagcttccttaagaagattcctaaaaaagctaaagcttagctacacacacctctctaatagctaagttcacctccttgagatgagaagctagagcttagctacacaccccctataat

SEQ ID NO: 29681 - DNA, 450 bp, Glycine max
tccatcaatacagaggcggcgagcctgatgacatgcaggaaccatttggtccctcacttttaaactttcttttgctatctctaagactcaaagcatgatagcacgcagagaataacatcgtcttctgcgccttttgtcatccagaggcggcgggcccgatgacatgcgggaaccatttggtcccgcacattttaagctttcttttgctatctctaagactcaaagcatgatagcacgcagagactaatgtcgtcttctgcacctattgtcatccagaggcggcgggtccgatgacatgcaggaaccatctggtcccgcatttttaaacattcttttgctatctctaagactcgaagcatgatagcacgcagagactaacgtcgtcttctgtgccttttgtcatccagaggcggtgggcccgatgacatgagggaaccatttggtcccaca

SEQ ID NO: 29682 - DNA, 64 bp, Glycine max
tgcttaaatgtttagtctagtgatatccggagaaatttggcttcacagttaattttggtttctc

SEQ ID NO: 29683 - DNA, 453 bp, Glycine max
  unsure at all n locations
gcttctaaggaagttttctcaagatagcttctcaaggaagctacctattctatatatagaagcatgtgtaacacttgttgtaactttgatgaatgagagtcttgtgagacatacttcaaagttccacttctctccctcttttattccttcaatttcgtgctccctcctctctctttctctccctctttcttttcctccattgaagcatccttccaagcttcttatccaaggctcattccctagtggatggcacctcctctcacctcttctcctttgtcttccgctgcatctccatggtggaaaatcaccattaaaggacctcattgaagctcaaagatccagcctccatagaagccccacatgcaagcttacatcataaacattntccataacttgtatagctgcccaatttatggttattctgtagtgattctgtaaataaatcttggttta

SEQ ID NO: 29684 - DNA, 352 bp, Glycine max
  unsure at all n locations
agcttgaagaagttttgatctgcacattaaaggtgtacattcaatctaattttgatttctttgtaaaagtttaatcttggctagggttaccaatggattttgagttgatagggtttcaactcttggattttctctttgatgcaatcctccctatgaagggaccagttactagatccatgagccagaggcttcaagaggattgggctagagttgctaaagaaggccctatggttctcatgaacctcaaggtagatttctgagcccatgggtcaaggttgggtccaattatctttgtacatattagattangatgtcattatatttggtccttgtatttacgactccataatat

SEQ ID NO: 29685 - DNA, 379 bp, Glycine max
  unsure at all n locations
tcacacaggcaagtgtttcatctcaattccaaatcacagatatgtcaaattgattttgaagtcatttcccatcaaatcaaggataatgcgcataatcatcatggatcaataggtcttttcaaggttggacttgtaggaaattttggcattggttgctttnggtttctttttcttttttgttttggtgtttttgttgtgcataagagagcaggcataaagatttggctagtagcttaaaataggcgaatacttcctatcctttcatgccttgaccaagttgtcattatttttcttccattttgcttttttcaacaactccacacatggntcagatgtttgttattataaagaacttattcttcttctctattttcctttt

SEQ ID NO: 29686 - DNA, 418 bp, Glycine max
  unsure at all n locations
agcttcatcaatgaaacaaggaaccctttccgtcacggagtacttcacaaagcttcgtatcatatgggatgaaattgagaacttcagacctgaccccacttgttcttgcaccatcaagtgtacatgctcagtcctcaccatcattgcccaacggaaattagaagaccgagccatgcaattcctatgaggattaaacgagcagtacaacaatgtgagatctcacgtgttgctcatggaacccatgcccaccataccaaagaccttctcctgtgtagcccaacaagaacgtcagctatcaattccttttcaaatctcaatcttgaatcanaagaaaacgtttccattaatgccgtcaagaatacttgtgaattctgcggacgaaatggtcacaccgaaagcgttggtacaagaaacatgg

SEQ ID NO: 29687 - DNA, 445 bp, Glycine max
  unsure at all n locations
ttccaaanagagttactagagacatgttagtaagatctcttgattatgcaattgttgttacttttggttgccattgcctgcttaaacatctaaacactctgttaatgagatcttcaataggaaatatttttcccagtgatgcaagatgattaactatattagtaaatctcttttgcatatcttgtatggtctcatattgattcattctaaacagttcatattcatgtgtgagagtgtttattctagatctcttaacatcagttgtgccttcatgggttacttgtaatgtatcccatatttcttttgcatttttacaatttgagactccaaaatacttatccattcttctctaagtttttctatcagtgcatatcccactaccattgcaggaatgaagggaccaatgtcaatggtttcccatatatntaaatctatggcttctata

SEQ ID NO: 29688 - DNA, 175 bp, Glycine max
agcttataatcatggttacctcgaaagagaatgaacggtcagattagaagttcgttctctatcgaaaccacaagccaagttggaagattctgcttcggttgaatggttcctctcggtgcgtgtttcaatggagaacaatgatggtttgtggtggctaatggtggttgtgggtgat

SEQ ID NO: 29689 - DNA, 432 bp, Glycine max
  unsure at all n locations
ntagcagattcaaatctcccagtgagtgcattcacatctctgtcagaatcactntcttgttcactctctgtatcatcagaccgacttacaganagtcctttcctctgcttcttgagatgagtgggacattcagctttgatgtgtccaaagccttcacacccacggcattgaattcctttgctgtgactgggcttttcatctgaccttttctggtattcactgcctttcctgatgtcgaaagggatgttccggacatgtggtttctgccttctgtccattctgttcatcactttgttgaactgctntccaaggagcacaactgcattagtcagaccttcatcagtttccaggtcatactcatcttcttctccttcatcattggacacgaaagccaaattcttgctcttcttttcagccctatccgagagtcct

SEQ ID NO: 29690 - DNA, 425 bp, Glycine max
  unsure at all n locations
agcttgaacatttcanaatatcatgggatgtatttgacacaaggtacactgatattcacataagttntccttcaagtttgaaaaagttgcatcttgaaggctttcctgaccaaaatattccagaagcctagcaaactacctgaaggatttacacaactaaatataacaggaggaaaactgaaaagtttggatgatggagaaaacgataatattttatggcatatgcagatcgtgcgtctcaagtagctaaagcttttggatattaacttgacaaatttacaagagttgtctcctttgctaaggtatgcagaaataaaacaaatcctacaccagtatatttcatttacgagtataattcattatgccacacatatataaatgtgtacaaacattatgtacatcactatttgttataataaattgaa

SEQ ID NO: 29691 - DNA, 449 bp, Glycine max
  unsure at all n locations
ttttcattatatattagcatttcatttgcctccttacatttgatgcatcattggtgtcttctagcagtgatgatatgatttttataagataaccaaatgtttacttcttccaaaattgaggtgtttgtttgggttgtagaaatcttcatatttgatgttatgcttttaccctttatttcaatgttgattgttctttcattgcctcaccagacaagatctaagaggttcttggaaattcaacaattgagggagcataataaagagtatgacatgaagacaacaatatatttggttaaagaaacaactaaaaccaagtttgtagaaatagtagacgcccatttctgcctcaacattgaccctaaatataacgatcaacaattaagagcaacagtgagtctcctgctacttgcttgattatggtatatgcagttacattgaanacgtgaggt

SEQ ID NO: 29692 - DNA, 387 bp, Glycine max
agcttcttgaattcatgtttctctcacgagaagtcaaagctgctagaagagaattcacaactgtcgaccaacgtggcagcttgtgacaataatgattcacacgctctttacggagggaacacaactaccctgcattgatctccatatgctgacattgctagacctctttcagctgtccaagtagagaatatgtctggtataaatacaaaggtgtgtgaatctggatctttcagctacagtgagaagttggaccatttggatgatccacatgttgatgctgcaaactcatatgaaaatacaatgacatttctggacccttcttcatcttattctgcttcatataatgcacatgatcaaccagaatctccattgcaaacttatggagat

SEQ ID NO: 29693 - DNA, 403 bp, Glycine max
  unsure at all n locations
agcttcatgatgacgaatcaagattaattcaagttgttttgatgataacaaagatgatgacaaaaagctcacgagaatgatttcaagattgagtcaagaacaattcccaagagaatgatttcaagattgagtcaagaacaattcaagaatcaagagaaatttgatttcaagaatcaagaatcaagaataatcaagatcaagattcaagactcaagattcaagaatcaagagaagactcaatcaagataagtattaaaaaggttttcaaaacattgagtagcacatgaagttttcacaaaatcttntaccaaagagtttttactctctggtaatcgattactatgttactggtatcgattaccaatgacaaagcttgttttcaaaagctttcaacttgatttac

SEQ ID NO: 29694 - DNA, 424 bp, Glycine max
tgtaacgccataagcaatggcgagaaagacgatgccgccattgactacagcgagacatgctgtgactcactgcccatgccgccattcatactggcgggacatgctgactaggaaagatgagcatctcgccagtccttcctgcgagacacgagcccatgccgccattggtactggcgggacatgccaacgtggacagtcccgccattggctcctacgagacacgttcacgccatgcttaagtctgaagatgccactgttgatgatgagactgaagcattgtgatgcatgctatggctcaaaggctagggctgtggttcacatgcattatatgcagaggctgaagcatttttttcgtgatgcaggctagggctagagttgtagttcacatgcattctgtgcaagtatcacatgcatacagtgtagc

SEQ ID NO: 29695 - DNA, 411 bp, Glycine max
  unsure at all n locations
agcttgtaggattatggggtacccatcacatgtggtactaggtggcggtcgggcgatggtgcacaacaagttttccacatccacaaagcgcgcataaacccaccatcccctgttgcccacctccaactgagctcacgtactcccacgtagcccatatcctcttttctctcaacaccgggtccccatcaatcctcccaagctttcccaacatcaaagtaaaacgacattcaaacagcacaagctatcacagccaagcaaaacagagcaaaggcagataactctgccaaaacaccaaccaaatcacagcttttctcacttanagactccaataacaattccttcgttccggttcattaaccgttggatcgactcgaaaantttactggaagtctttagtacataagcctacat

SEQ ID NO: 29696 - DNA, 445 bp, Glycine max
  unsure at all n locations
tgctgccacggagttntccgactatgctcttgtgtggtggaacatgctacaaaaggagagagcaagaaatgaagagccaatggttgatacatggacggagatgaaaaagatcatgaggaagcggtatgtgccggctagttactcaagggacttgaaattcaagctccaaaaactaacccaaggcaacaagggggttgaggagtatttcaaggaaatggatgtgctcatgattcaagcaaatattgaagaagatgaggaggtaactatggctcgatttcttaatggtttgactaatgatatccgtgatatcgttgagctgcaggagtttgttgaaatggatgatttgcttcacatagcaatccaagtggagcaacaattaataaggaagggagtagtggctaagaggagttntaccaactttggttcttctagttggaaagacaaa

SEQ ID NO: 29697 - DNA, 326 bp, Glycine max
agcttgttaattaacttagagaaaatcaagatcaagcttgttcgcacatcgctcgtgtgtatgatatccactcgacaaggtttgaagtagaggaaaccttcaatcctataacgcaacgtggcggacaaaagtgggcaattaacttgaatggccattattgtcaatgcggaaagtattttgcgcttcactatccatgttcacacattattgccccaatatatagatgttgtttacacaaatgaacacattttaaaagcttactccgcacaatggtggcctcttgggaatgaagcggctatgtctcctctaatgacgcatggacactt

SEQ ID NO: 29698 - DNA, 439 bp, Glycine max
  unsure at all n locations
tcagtcaaaagcattgacaatccaatgcacaattaggtaggttgtaaagctcaagcaaataacacatcaatgtcaaaatttgaagacgattaattaggttgtaaagcacaatcattcaattaatgcatcagaagtgctttatccaatacctagcttgaatcatcaaaacaccaaataaagccataaacacaatccaattcaattgcaaattaaaaggtgtcacaagcttgtgttgtatgacaaaccaaacatacaaagcaatatccaagccaaagttgatggctattgaaggagtaagtgcacctttgtccttgaatacatataaagatcaccctataaaaggaaacaaatatacatttagtaaaagttaatgttaagatcgcataactngagagcatgagaacctagatgtgtagttatatgcaagcattcacaaagt

SEQ ID NO: 29699 - DNA, 421 bp, Glycine max
  unsure at all n locations
agcttctacttatgtggcagggcgggcttccttcaccttcttgtctccaacgcgaactttgaccattgttcttccttcccgcgatgcttcttttcatgtctgcctgagtgggcttatagcctaaaccatacttcccacgattaccttgggtatttatcagtctagttatgccgccgttgttttttcctaaacccatcccgggctcataaccgttccccaacataactcgggccatcattaccgctgcatcggacagactgggctgcccaaagagggagtccacggaggatatgttgaccacctcanaagactggaaagcagtttctaacgattcttctgcggcttccacataaggcatggaggatgggcagcttaccaagatatcttcctcgcctgacacgatgaccaagtgcccctctac

SEQ ID NO: 29700 - DNA, 374 bp, Glycine max
  unsure at all n locations
atgaaacaacgagatgatgcgctccatgagaggctggatcaaatggagaatagagatcatactgaagaagaaaggatgagaagagggaatgactgggttcctagaacaaatccgaattgatggtattaanactcaacatttcctgcatataaaggaaagaatgatcccgatgcctacttggagagggagatgaaaatagagcatgttttctcatgcaacaactatgaggaggaccataaggtgaagcttgccgccacggagttttcgactatgctcttgcgtggtggaacaagctacaaaaggagagagcaagatatgaagagcccatggttgatacatggactgagatgataaagatcatgatgaagcggtat

SEQ ID NO: 29701 - DNA, 423 bp, Glycine max
  unsure at all n locations
agctttgagctataatcctgactcaccataaaccttgacccanggtgagaatgtcaatccttaccctcggaagcaaaaaaaggaagagaaggaaaatttccaagcaaaaaaaaggagagaaggaaaatttccaatcaaaggaaaaaaagaggaaagaaaatttccaatcaaaggaaaaaagagaggaaaggaaattcccaatcaaagaatgggagaaagaaaaaaaaaagagagaaggagaagaaggaaagaaagctcctgatcaaggatcgaaagaaaacagaagacatgtgcataagaacaatacggaattgtcaccaaatgaacaaaagaaagaaaaggaaatcataacctacaagtggtcttctccctgtgattaccaatcaaaatcctgtgcgtcggtgacttgttcgcctcgcgtca

SEQ ID NO: 29702 - DNA, 441 bp, Glycine max
  unsure at all n locations
tggatattcggcctgacgagggattgagggtttagtaatttatgctgcaacatacaacacaagagcatgattgattagagaaatatatttctatgcatcagcttatttgttagaaagacccaacatatctacctactgttgtcattttatttaccttgcattttatagcttttagcatacaagtttagtttagattttgtttgaaattatcacttatacatgttctctcaacaatgcttcgattctgaacttaattcagggtaacattagttccctgtgttcaatactcagattcattcgttttaattttaaatacttgctgatctggtgcgctctccgataaaccccgatttacatttccttgagacatagatgcacaaaaagtaactgcaatggcgagtgagcanagtatctatggcaccattgccggagaactaaatt

SEQ ID NO: 29703 - DNA, 249 bp, Glycine max
agctatagatattctatagggattcagggctgtccatcagctctgataaatctgccatatactcagccggtattaggcctcatgagctatctcatattcagcagattactggatttagcttgggtgatgtccctttcagatactcatgtgtttcccttttatcatctagattaaatgtatgtcataatgctctcttgctttccaagataactggcctgattcaggaatggagcaaaaagtctttatctt

SEQ ID NO: 29704 - DNA, 459 bp, Glycine max
tagggttcaactcaatcaatcagatttaagctcataatgggtgcttaggattcatcattcatgaacagggtaagctatttggctaagtggctaattcaatcaatcacaaccttcatcatttccaaatcatgcattcattaagtattcagagattcatgcaaaaattggtactcaatgctagtcgttctctcacaattaaagatcacacaactcactgggttatggctaatgattacattcactatttatctgtcaaacaaactaacaatttcactcacgcccctaattcatgttctttctcttctaattacctcatacttattcaaagcacgtgatctaacattgcaattcactcaagtcatgcaatcaatcgatttcagaaccaataacatacaccagaaatttataccataacataccactgcataacaattaaaaaactgtaaactggtcaaaact

SEQ ID NO: 29705 - DNA, 412 bp, Glycine max
agctttgtgaagctcctgttttagctttacccgattttactcaaccatttgaagttgaatgtgatgctagtggagttggcattggggctgttttgatacaaaacaaaaggcctatagcttatttctcggagaaattgggaggagccagattgaactattgcacctatgacaaagagttctatgccattgtgagagctcttgatcattggaatcattatttgcgttctaatcactttatattgcattcagatcatgagtcattgaagtatatcaatgggcagcagaagttgagtccaaggcatgctaaatgggttgaatttcttcaatcttttaatttctcttcaaaatacaaggatggtaagagtaatgtggtggctgatgcactttcaaggaggtatgctttaatttcaat

SEQ ID NO: 29706 - DNA, 208 bp, Glycine max
ttgagcagatgcatacgacaataacctttttactcggaagtcgtattgtgtccacggatatatacagacgctcgaaattgaatggagaagctatgaccatgtttatacgacaatgactttctcactcatagggcggatcgagtcctgtaaatattgagacgctcgatatgaaataccgaacccctgagctttttcaaacgactttcac

SEQ ID NO: 29707 - DNA, 412 bp, Glycine max
  unsure at all n locations
agcttttgttatcacctaaaaaccattntttaaaggtccaacgccttgaaatggtcattttcgcttttattggttaaacgtggatttttaaaaagcctaaaatcaacacatagctttgtcacctctttcaaaaaaaaaccaagagatcattaatggtccaatgccttaatattttctcccctttcaaaagaatcgaaaaatcgtttaatggtccaatgccttaaatgaccttttattcaatcaaaatatatcttgcaaaaaaaggataaaaaaccaacgtttagttctcanagaactacgtangtatgatttccttatcacaattgaggaatacgtaggagtaagggaaacaccccttgtcgaccacaaaaagataananatacanaaggcataaaagacataaaaaacgta

SEQ ID NO: 29708 - DNA, 443 bp, Glycine max
  unsure at all n locations
tgatttctggaacttaccggttgaagaccgaagaacgaagaagatcgaacaaagaacgacgaataacggttgacaatctttgcgaaatcacccacggaaatgtcacggaaacgttacggaagcgcctccgcttggattttcttcacggaaacaatttttctcactaattgtaagtgaatctcagataccaggagggttgaaaatttttgttcttccctccttcccctatttataggaaaaggaaggagaagcttgccacccagctcgcccagatgagctaggttgcttcctccagaaggcaccacaatgatgcttgttttgcacaacaatgctctttctgacttccagaatgttgcgaaactttacggattgcgcaacagtgcttgttaaacatttcagaatgttacngaactatatggatngcacaacaattctcgttaaac

SEQ ID NO: 29709 - DNA, 441 bp, Glycine max
  unsure at all n locations
tggttggtgctnggataaccggacaagagtgtaatgcanattatgcaatggcatgaagtttttgccaccaaataataacaacaatgtcagatgtacgtgcaattggtaaaaaaaaaaaaaaaaaccactgctgcaagataaagcaactgtcattcatgcctggccaaaaaaaccaaagattttggcaatgttctctttggctttggtctttnggatgggaactaatgtggagctgagaaaaaaaaggtgggaattgacggtaacgcttacaaagacatgaagaacaatcatgtgtcccgtcgctttcaaacgcctcacggaacagacacaacaacatccctagaaaatcattcacacaaataaagctgaaggctccaaattttgaacgtagactnagctagtgtactaggcaaatgacctcagtaagttctatttttaaac

SEQ ID NO: 29710 - DNA, 417 bp, Glycine max
agcttgaaaaattgatagagttttattcttagatttaataggaaatatccaagtgtacctggaaaaggcatcaataaaggatacacagtatttatgaccagcataggaagtcaaaggtccccacaaatctgtgaagataagctccaaaggagagtaaacagaaatagaagtgtgaggtggtaatctatgagatttttccatcagcaggaagaacaaaaatcagaaaatattttagtagttgtgggaaatattacaatgattgaagactagcttcattacatgactattaggatgagctaacctagcatgccagagactagcaatactaggagaagaaacaacagaattggaaaccacagtagagttttcattaaccgtagcagctgtaatagacaagccagtatctgaaattgagta

SEQ ID NO: 29711 - DNA, 507 bp, Glycine max
  unsure at all n locations
cgcggctgactcnctcggactncnnnnntatttagagtgtctcnatctataatgcgcctgaatcgaacatccgagtgaaaagttatgactctttcaatntctcgagagcttctcttgttcaatgtcgaagcgttcgatatgtgatgtgcctgaatcggacctgcggtgaaagtatgacctttgatttctcgagagcttacgttgttcaatgtccagcgtctcgatctgtgatgggcctgaatcggacctcgcggggagaagtttgaccatttgaattgctcgagagcttccgtcgttcaatttggagcgcctcgatatgtgatgcgcctgaatcgaacatctgagtgaaaaggtatgaccgattgaatttctcgagagctgctttgttcaatgccagcgtttgcattattatgcgcctgattcggacttccggtgagaagtcatggccgtgtgatttctcgagagctcccgtggttcagttccaggctctcgatatatgtggcgccg

SEQ ID NO: 29712 - DNA, 390 bp, Glycine max
agcttgtgcttttacgaaaaggttcttggtgtcaagatgaagtatggaagtaaccatcttgcaaatattggggcaaaagatggatcgcgttacatcgttgcttcgtctactgccaaacacatttagggccgtcgatgtccctgttacttccagtttcaccttgacgaagatgtcatggaccatgttgaaaatctaaattgattcaaccccatatcctgcgtaaaaattcgcaatacttcagctgtgcatcattcgcatacatccatgttgttcattggttgcattgctcattgcattctttccttaaaaaaaaaaagaacttaatcattgttataaaagaaaaacatgatttacggtgccctcatcgaacctgtgctagagctagagtaa

SEQ ID NO: 29713 - DNA, 457 bp, Glycine max
  unsure at all n locations
atttaccttgcttaggttataggagagctctttggtntaagaacaattttatcccaatttgngggagtttgcttggtggataatttaaaaggtaagaaacaacaacacacacaacaaattaataaaatgttctatgtgttaaaaaaaaagagagtagttcaaataaagtgtgtgtgcttttagaacaaagtcaagtgaaagactagcgagtaagctaagtggattgaaaagacaaattgcgtaagtctagaagttgtgctctcttagacttcaagctattgcattctagaaaaaccaatatttttttttgtagccaaacctcactacaagctaataaaagtccttctgattcaatttgtgcatttctaacattatggcatgagatgaagtacaaaaattggacctcttgtagttgttattgtaaatagcttanacacttgtgcgtgagtgatacagt

SEQ ID NO: 29714 - DNA, 479 bp, Glycine max
  unsure at all n locations
aggggacgcgctggagcctgattgacgctttgaactcggcccgggatccttaagccgcctgctgcatgcaagcttgagactttacacgngtgttctttcttgacgagctttacaaccgagacggtcttatctctaaccagactcccaaccactatgatacgcctgccatttctgtaacagatgactccaaagaagataacgttactgcacctaacatccaggacatacaaactactttatttactcgatcagtccactgcncaatcattgaaaccatgaaatgcgtcgttggtgtgagatagcacagtgcatagatgtctatgatctttagcaccgagcggtagcaacgaagctcgcgcaaagtaatgtgtctacactgccaattacaagtgagaaggaactatcccgtagcgtggatacttctatctaggagttggccaacatatgatggctgatgtaaactcagatgattaagtatc

SEQ ID NO: 29715 - DNA, 396 bp, Glycine max
  unsure at all n locations
agcttgtcgtatttgtngnnctagatctttcgtctttacctcattttagtgttcccattatttatgtctatttattgaaagtttattttcttgattgtttttaaatgaaaggttttccattgaaatttataatacatgagttgacacatgcaagcttatactaattttaatggaagatcttccttgtttaattttatttcatagttcgaaatcgccaaaataatttatatttcaacttatataaatctctcatgaagtttaattttgtttcgttgtttgcaattgccacaataatcaggaactgagcgtggtagtagggttgcttctatgcgtgcagcaataaatgacactgtccctgaaccaaatcgccgcttactgcaaaggtatttgattgat

SEQ ID NO: 29716 - DNA, 359 bp, Glycine max
ttaacttcttggaatgtgcatgtggcgatggataaaggcataatccaagttaccttaaccaatccagatggaacttgcactgggatacgatataatggcggtgacagtctgcttgaagttctcaacaaggaaactaatagagggtatgtgcccctagcgatgagtatctgtgaattgtatctctctcacacgtgtgccgctgtgccgagctcagtgccagagaaccattttctgaaatgtaatggtaatgaacaggaagtatcagaattcagctgacagagtaacattgacacaggaatgggcgccagaccaaggatgttgatgtgatgcaatactgttttttgtaccgatggtgcttg

SEQ ID NO: 29717 - DNA, 404 bp, Glycine max
  unsure at all n locations
agcttcggatgttaaggaanggtcctagtttgagagatccgacagatcctgccagtgattccaagaggcagccgctctgatattgttaatgcaacagttaattgctcttatctatgggattattatcagatcttgaggctgacaaataacatgctcttacaaaacaacatgcgagcatcagatcatgacgaaattatgactcttgcacaacggattatagatattgatgatgagattattggacatgacaatgatggctacgctactatcgaaatgtcacatgaactattattcacagaatataatgatcctattcatagcatagttagctctacattcctagattcatgtcatcatcacagtgatcgtgaatacttacaattcacagcaatattagcttctac

SEQ ID NO: 29718 - DNA, 496 bp, Glycine max
  unsure at all n locations
cgcggcgttgtccccttgatnacngacctgagaacacttggactnccttgtaattcatnnacgcntgaaaggaaagaacgtgcttcaattttatgagacaatccgccatatatagtagttttcagggccgatntacctatcccacccataccccatataccaaaggctctaacttcttgtcggcgcattgtaaagaatgattcaatatgtgtacaatgctcctaaattcaactagtcccttacgttgatttggtatcaagaggcaattcttgccaaacatctgcacaatgtccttaagtatttaggatcagtcctatctattaaagggatacactataaaataaaaatgatcgatgcgtacatatctatcaaatccaacaaaaagaattatcccgatgccctacaatgatttacagtctacaacagaaatagtcatgataatatggtgtgcggagacataacaagattttattaggaatgaaaccctgcttaaact

SEQ ID NO: 29719 - DNA, 287 bp, Glycine max
  unsure at all n locations
cacgcgagcattgaacgagatcttttggtcanagatacaggatcattcagggatcctgtatgggcaacagagctcgagtctatacgattcatggccttcatcatgttctgagttatacaaatcattctataattcctaatgtaattttcagagttgcctatactatggttgacgcgaatatctaagataaggatcatgaggaacttatatggatcgctgatacaattgacctaatgtagatgtcggattaaatgatagagagagagagagatatgatatcggttatg

SEQ ID NO: 29720 - DNA, 305 bp, Glycine max
  unsure at all n locations
agcttatagtctttacttattgagaacaataagccaaagtcaatagttcctatataacgaagaattcattctgcggccttgagatgagtagtggttggagtctccatgtatcgactgatgagtctagtagcatatagaatgcctgatttgtgcacatcacatatcgcanactacccaccacactctggaaattattagcatccaccttttctgcctcattgaactgtgataacttcatcttgtactccaccgttgttcaaagtggcttgtagctatccatcttgaatttcttgagcatcttctat

SEQ ID NO: 29721 - DNA, 372 bp, Glycine max
  unsure at all n locations
cagaaaacttatcttgcattttcttagcttccttagtttccttagcagtagcagtaaaatggaatacttgttcgtatcagaggatgacaatccaaacagaatgacgcctcatgcatcctatgtggcaaaaataacccatgttaggtaaattggttcacaaatcaccatttataattttacacgtaaacatgtattacatggacaatctaatgatatttaagcggtaatgtctcttaagaagttttcaaacactttacttgctactntccactgtgtttgtcacaccaagtactatgagaaggcaataggaccaattcttgttgatcctataactaatattaacatcctataacttcgtgcatttcacgttga

SEQ ID NO: 29722 - DNA, 372 bp, Glycine max
agctttaaccttattgtctctcatagtctttagatttgggagccaatccaatccttgtgttcggactctcagccacttatgatagccgccaatgatcccattactgcttcccctaagctctctgtcctttcttcatgccgcatcccatgccttgcgaactccttggagtaccctcgcgttgtggtcactaaaatctcgtgcgatgaaaggcgtgattgatgcaagctccattggagcttgtaggcctaggatcttcttcaccaatggattcctttgcttcttggaagataaatggcagcggaatggagaaggaagagagagaggagacgccacttcaaggagaagatgagtctagaagaagctcaccaccat

SEQ ID NO: 29723 - DNA, 452 bp, Glycine max
  unsure at all n locations
tattcaacaatggcaaatcacatttcanattnttaagaaactcggtctcactagtagttgtgtctaaagcaataatttttgctttcatgctagaatgcgaaataataagttgttcagtagatttccatgatactgcaccaccaactaaagtaaagacaaccacttgtcgattttggttcattagaatcagaaatccaatttgcatcactaaacccctcaattacatcctaatctaccaactgcatatgccatgtcagacccagagaaagttgtcaaatgcaacaaagaaccaataatttgaggatatttatgtgaaaaaattcctttactcanacttttctttaacttaatggatgagtcataagaagtagaaacatgtttcacatcanaataattaaacttcttcaatagcttttcaacataatgtgatggggttaaacccatgtatcatt

SEQ ID NO: 29724 - DNA, 376 bp, Glycine max
  unsure at all n locations
atntccttgtttcctattaacacaacctgtacctgcgcaccanaaagaaatgcaagaagaggtcgtattattctcatgagccctangatagattttgggcccatgggctaagtatgagcccacttatctttgtacatattagagtaagatttcattatttttggatcttgtatttatggctccataatgtaggtagggtaccctagaaatgtaagatttttcaaccattgtattttatgacacctagactagtatttgtattatgggtagttctgtaatttcacatgcattaagtgaatatatgatgtgtgtgttgcgaaatacaattaattgaatcgngtgaagcccaatccaattaaattttatagggggagat

SEQ ID NO: 29725 - DNA, 354 bp, Glycine max
agctttgaaaagtggtggttttcaccttctcgctaagccaatccgctgtcttagcgagcgtccgctaagcgcaacactcattggctaagcgcaaggaagaatctggaagaaaatgagctgtaccagttcgcttagcacactgtttcgtctcactaagcgcaccgcttcagtccatcagctaagcgagaaaggcacgcgctaagccgaaattcactaatgtgcgctaagccggccagaattgcgctaagtgcacgagcacgaacaaggccacctatttaagcttgaaatcagattttgtgaagggagtttgggctaggattcagagctttgcatgtctagagattctagagagag

SEQ ID NO: 29726 - DNA, 415 bp, Glycine max
  unsure at all n locations
agcttcaccactttatgctcatctctattnttttctaacctctntgtcacgaaatccctatgataaattctatgcaaaacgcatctcctaaactaaaattccaaaaaatctttttttcttcaaaaactactccctacattggctccaacaccaaccaattaactctatcaaccatcaaagcatccaagccacccaggggcggaactagagaaaaaagttaagggagacgaaaaaattaacacatgattatgtaaaggagacatgaagaagaaagttgtaatattaaacttaacatgttaaaagctgagggggacaaaattttctattntaagtgcagttactaatgaattgtgattntttaggagggacggatgccccttttgagatgtttgtagttccgcccttgaagccacca

SEQ ID NO: 29727 - DNA, 445 bp, Glycine max
  unsure at all n locations
ntatgaacaggcagccaaagtttatttaccattggctgtacgtcttcttcattactatgctggggagagagaccagnaagacccatataagatctttatttatgtacctatttatgagtaaatactatatgcattgatagtgtaaagagtttttatataataattcaattacaaacataaatttattgatttttatgataagtatcttaaagtcagatcagcaagaatttatgtggaaactaaactctttattcattcacatatacttgggtaagtgatttttatgattatttccgcccttaattaattcaggttgggcagataaaattcatggtctaacgggctcagctgacgggaatatcatgcacaacatcttatttttttattatggagaagcatatacttctactttatgctgcatgttcaagagaggtgtacttatatt

SEQ ID NO: 29728 - DNA, 269 bp, Glycine max
  unsure at all n locations
agcttgatagcttgtataagaatatgacttcagggagattcaactntcacccaccatcactntatacatgcaaaaactatctttgtcagttacataatctcttgatgctagtttgggcatgactatgttgagcagaaagttgttgatgagcctgcacatatgtgaggttagcggtcctcagaaagctgaccaaacccttcttataagatgattttggacactgttttccatagagcatagagtccactgtttcacaggttatctccttc

SEQ ID NO: 29729 - DNA, 375 bp, Glycine max
  unsure at all n locations
cttccttgatctctttgaacctaanggatgtaccctccactagaactgatccacaagagatgtaccctctcttggtttcagtcaaacccaagtagatgtaccctctacttgtgccacaaaggatgtaccctccaatgtgttaagacatagatctcaagctgttacacctttgatactttgtgaatggggatacaaaaggaatctcaggcggttaaccctctgaacgctgttgtattanggaatgggaagattcaaaagaattctcagactgcgtcgttttgaattctttgacaagggagaagggagacacaaaagaattcaggcggttagtccttccttcttttgtgaaagggagaagagagacacacaaagaat

SEQ ID NO: 29730 - DNA, 412 bp, Glycine max
  unsure at all n locations
ttttatgcaagcttctttcttattccanactcccttcacaaaatctgattttaggcttaaataggtagccttgttcgtgcttatgcgcttagcgcaattctgaactgcttagtgcacattagtgaatttcggcttagcgcatgcgtttctcgctcagcggatgaactgaagcggtgcacttagtgagatgaagcggtgcgctcagcgaacctgtatagcttacttcttccagattcttcctcgtgcttagtaaatgagtgttgcgcttagtggacgctcgctaagccagcagattggcttagcgagaaggtgaaaaacaacacttttcataatcgcctaattaacctgaaattgagagaaaatgattattaaacacacaaaatggaagtactaagtatttattaactatatt

SEQ ID NO: 29731 - DNA, 429 bp, Glycine max
tcacacgtggttttgatacaacagcactgctgccgttgtggatcttgtattcactcataaaggacattagcgcgagtgtcatttactcaacctctgcatccaacatctggaacgatcttgagaaacatttcaacatcaagaacggacccagaatcttccaattgcggaaagcattactcaattgtgttcaaggaacgaactccatcaatatctacttcacgcgattcaaagggctttgggctgagctgggtgaactcaaggccaatcacagttgtaattatggcggggttgctccacttcttgcttccatcaaagaggaatttgtcatgtcatttctaatgggtgtcaacgagagttttgcccatgctagaggtcaaatcttgttgatgaaaccgattccggatattgatgagaccttctcattattgc

SEQ ID NO: 29732 - DNA, 413 bp, Glycine max
  unsure at all n locations
agcttcatcgtttggaccttggagatatgttgagaggcagagcctctcctagagcaaacagtagatggacaagaaggtggagaagcatggatcgaaaggaaaaaccaattgtcgggatgcacttcaacaactatggatgggacaatgctggtgatgacgaaggagtatggactaaggtgattagtaaaaagaccgcgaaaggtttgaagaagaccctgaaggctgacaatcaaacgcaacacctagtggcaaggggtaaacctacacgttaccatatcaactggagggacaaggatgacattacgtcatactacttcacccattttcctgacaaagctgatgaagagttngtgtggaagcattctaaaaaatggggtgatgtgagagaagttacatagcgaanaggaacaata

SEQ ID NO: 29733 - DNA, 464 bp, Glycine max
  unsure at all n locations
agctctattaaatggtagcataagtttatatatacaagaggatgaanagtttgatggagaagctggataggtagttacaacagaaagcttaactaatctaactaacctaacaaactagctaactaacgcagtgctgttaagatcttttttatcaccaaattaatcttataatcttgtgatgcaattcagggcattaaggggatggaacacccaatattggcttaggtggtgcactaataagcttgtatcttctcccccttaaaggagtgtggtagagtatgaattatcatgcacaatgtgaagctagaanatcacctactcccctaaagttgactggtnctagtggaaatatttgcactggttaaattaaattggttggaattntntagtctaattatgttcaacctgaacaaaatgaatcgatcctctntgtgatttataaactcgtcggttgagtctaatta

SEQ ID NO: 29734 - DNA, 430 bp, Glycine max
  unsure at all n locations
agcttcgatcctgatcaagcttgtcacataaaccaatcctaagcctagaacatgatcttacacaaaccaaattggggcatgtttcttaataaaattgctgggctcaaaatcagctccacatttcaaaatcgagagggataaaaaattaaaataataaactaagtattgggacttggttaggcttcctggttcttaaattaaacatattatcaaacaacgcacctatctaattgacattattcaccgtgtgtcataaatgaattgatggactacaatatccaaattcaacaaccaatatgaacaagactcanatgaattcaggatagcataatgatccaaactcacaggtggttacataaacgattatgtacgcactccgctatcaaagccactgtccgccttcaatgctaaacctgcctcagcataatga

SEQ ID NO: 29735 - DNA, 477 bp, Glycine max
  unsure at all n locations
ntataaagctctatntaagcaaatatctttaggcaatgtgggactatatgcactccctggaagctgcaattaaggcagcacctgaagagtctgcaattaagccgggctagggatgaccgccattactgtggcttttcaacaataagcttataaaaatcttgaaaatactacattcgggtgcaggagcagaattgcaattatcaaaacatcaattatattagttaccacttatcaacagttcaacacttggaactttngttaatngaaaatccctaagtattcatttttggccacagttgtaactcaacaattntccagatttcagatatagaaaggcaatgcacaccaagttgttgatgtttctgatactcttcaactcattggtttcatgaatntccagcagatcagcttcagttnttagacaagagtactcgcatcaatcttctatcagatcatttggngggggcatcaattaca

SEQ ID NO: 29736 - DNA, 415 bp, Glycine max
  unsure at all n locations
agctttgatattttcttttcagcattctctttatcattaactgaattnttttagaaattacaaagttttttaggaactaaattntatttaatgaatctcactcatgattttatagtttagtaaattttagctaataataaataatagctagagaaatagtgtaatgatagttggtgggaatataagggagtaaaacattgagagatttctatcaatgaccatgaacaaattacacaaataaatttgataccacattaattcaattcaaaaccttanaacatttggattgtgagtctcattttcttggatgatattcaacttgtccactcttattcaatttgngattntatatttcataccaacctttcatgcaatattgcctaatggcattgnggaagattcacaagtagagact

SEQ ID NO: 29737 - DNA, 454 bp, Glycine max
  unsure at all n locations
gagactcacgcatatataanaacaaaagtgcggtccattatgcatgaagtcgcattagataataataattgttaacttattgacaaatacaccaaattgtcacaagtaataaaattaaaacgaaagttcgaatgtcgaatttacaaagattttggttgtactttagttaatatatacctaatttgtaagcaagagataagaaattgtaatagggagaagaaacaaaaaattgtaattaaaaggcaagaacaagaaaataaacaagaatgaatgcacttgataatttcagaatttaaatatggtggggtctagcatgcccaactatccttgatgcaatgttaaaatggttctctatttaatggtattntaattntcattcacatttactanaacactcaactctgatccctcatgatgaagagttcagtttatgtattctctcttctaaatttct

SEQ ID NO: 29738 - DNA, 421 bp, Glycine max
  unsure at all n locations
agcttgtaatcttttatataagctattgatgcttaacaaaaggggagagaaaaatattattttcctcatcccttgagctaacttttgggattgagttaggcccaaaattcacattctgagatggtatcagagccctagcgccttcctttgactttcgcacacagaccctagcgtcgttcaacccttttctttttcttctccatcaccatgtctcactcaaactctatctttcacattgctcttgttgtctccaacatcaagaattatgtcctaatcattcttaagatggaaaatgtccaatacgtgacataggctgaacttttcaaaccccggtgagcattttttctcgttgtctctctcanatctcttcttttaccttatctctctcaaatcacttcccttaccttaccttcccttcatc

SEQ ID NO: 29739 - DNA, 373 bp, Glycine max
acttttgggactccgatacccaacctggcacttaaatgaagttattttgccaaatgggtttaaaggttcccacccttcaacccaacacaatctaacttaaattctagaaaaatgaagtggacaccacaattagcaccccactcatccttgatttatcattgttttaaaaaatcctacacacttttaaaattcctcaataaatagaataatcaaggttaccaaaattcataataaaaaaaggtcattgatgatccccttattgccccattttatctaacgtatgatggtgaatatctaaattgatctttgaagtatgacacacgtactatatatgtaaaatataaaattaaataagtttttgtcactttgtcat

SEQ ID NO: 29740 - DNA, 421 bp, Glycine max
agcttcttgagtatgtgtgcacattctattcgaaagctggaaactatgcattctgagtaagaatagcatcagcataatctgtcgacttaatttgtagaagcaatggttaagatcataaggtagtacatcgtattttattggattcggttgaggatgtagatatgcaaattaggttccaaattattctacccctcttcaatttgtagttatatgttcattagttaaactcattggagaaagcgattcatgcagcacaaatctggcacctattcttctccttagataaacatgcagtgatatataaaacatcgtgcattataattctatctgaacatgtatgttgagatactatggagactcttgactttctagttcgaagtgtgatgggattctctgaagatgggaaatatattatatcatg

SEQ ID NO: 29741 - DNA, 358 bp, Glycine max
  unsure at all n locations
tcacagatcttntgtgttcttcacattccacccaaagattatgtttgctcattttgaggtctttataatgtttgtctgcttgtgcacattctctctgtagatcatgtctttcttctttttcataatcatgaagttcattaagctctgtcagatccttttgaagatctttcagtttgctttacaaggcttgaaaagtctttaacagatttttccttggccattatctcattctcaagacatagcttggactctttctcctaagagtccacaggctttacatgtctgagtggactcatctggtgatacatctacttggtcttgaaggggtttctcacgtctaaaatgatctttgaatagt

SEQ ID NO: 29742 - DNA, 500 bp, Glycine max
  unsure at all n locations
nggggnnggctggcttgatgactcgcaacctgcccggcacgggagcctgtacaccgggactgtatgcatgcaagctgcagccttcgacttctgccacattttctatgcataggcgataagagaacggataacatgttcacccctctgggtgatttgagatcacttggagggagtgaaaaacatcatctccgtgaagaaaactccaggccgaggcgctttcataacgtttactgagcatttgcgcttgggaatgcgtgaagattctcaaccattgcttaacgttcttcgttcgcgctttcgtcttcaaccggtaagtccgcgcgaatcgaacgtttcgattgacttcatgttcccttagcggcctcatttgatctacgtgctattatttcaagatatctactgatcgcaccactttgggcgtgcattagccattaacttaagtcatctgtttcgactactctgaacagcttatatggctaccctggccaatcgtagtggtn

SEQ ID NO: 29743 - DNA, 534 bp, Glycine max
  unsure at all n locations
cggccggtgtgacncccttggaanancngacnttgataccncatgcatctacgcgacaccttnnnaaacctcagctttcatcacgggccgtataataattaaccgcgaagaagtttgcttatcactccgaacttgactaggtataaccttttgaataaaatgaacttgtcccatggttttactccaaaagtcaatgcgaatcaaatcattctcgcattttatttctagcctgccttcatatgatgcatcgcataagcatctcttcatggcatcataatgaacatatcgtgcctgcatttggccggtatcatattccaacatcacattntgcatgagtcattggctcatcatgcatatgccgtcaacatacgttttggtctacaaactgcataccttgttgttggatatattcatgatgcattcctggttgcatatattccggaccatgagcccaccatggtgggatcatanaccccgttcacttanaaacaaaatgagtgaacatggcaccctatggcattgttaactangaan

SEQ ID NO: 29744 - DNA, 313 bp, Glycine max
  unsure at all n locations
cattctgctngctngtggtgtttctatggaggctggatctttgagcttcaatgaggtcctttaatggtgaatttccaccgtggagatgctgcggaagacaaaggacaagaggtgagaagatgcgccatgcactaaggaataaaccatggaagaaggagcttcaccaccataagcagccttagatatgaagcttggatagattgcttcatgggggatatgaaagagggagagaacgacagagggggggagcgcgaatttggacgaataaatganggagagaagttgaactttgacttgagtctcacgagactat

SEQ ID NO: 29745 - DNA, 382 bp, Glycine max
  unsure at all n locations
ttcttaagaagattcctaaagatgctagagcttagctacacatatctctctaatagctaagctcacctccttgagatgagaagctagaacttagctacacaccccctataatagctaagctcacccncatgacaaaaaacatgaaaataccaaaaaaaagtccttactacaaagactactcaaaatgccccgaaatacaagggctaaaccctatactactagatggcaaaatacaaggcccaaacgaaggaaaaacctattctaatatttacaaagataagcgggcttatacttggcccatgggctcganatctaccctaaggctcatgagaaccctanggccttcctttggatctctagcccaatctacttggagtcttct

SEQ ID NO: 29746 - DNA, 377 bp, Glycine max
  unsure at all n locations
attaagcanaggcattcacaccactannaggggagganagagcggaaatgcttggctctgatcaacatttagatcccaatattgcatcccaacaactcgaaacattatcaaagctctaaccagtagttattggatgctagtatctatcattgccagaataatgtagtaatcaacatgtatatgataataatatacaatatctactttaagctagcacacttgccgcaactaacacaagtgactctgaggtgagtaagcttgactagaactacaaattatgaatattttctatatctaaacaacatgtatcatttattggatataattatgttcagatcaaatgggattagaacaccagtgacaaaactctccttatg

SEQ ID NO: 29747 - DNA, 408 bp, Glycine max
  unsure at all n locations
cttccatcatcntttttcaatggaaatatgcttgagtctaaggagattgttcngtgtcaacggtggtaacctcgactagtgtaagagttgtaagtttgtgaggcatgtctagctcccctatcttggacgacttgtgagtatgcttcttctgacaagttgtattgagaggacatgtgttttgatcttgaagcatagatatacgtgtcangtggatgatgtgcttatatatgacaattcagccctttgatgatcattggaggatgcattgatcacgaatgtatcgctctgtctataactacatgcgagtgcaacacacacatattactctagcatcatgctcactcatgacatgggtgttgactagatatgcattactcgggcgtgtggagctgcatcatctnttatagg

SEQ ID NO: 29748 - DNA, 442 bp, Glycine max
  unsure at all n locations
cccattatatgtggtactaggaggcggtctgtcgattgtgcacaacagactttacacatgcaccaatcgcgcataaacctaccataccctgttgcccacctacaactgagctcaagtactcccacgtagcccatatactcgtttctctcaacaccgggtgctcatcaatcctcccaagctagcccaacatccaagtaattcaacattcaaacaacacaaactatcacagcgcagataacagggcagaggctaaaaactctgcccaaacaccaaccaaaatcacagcttttctcacttaaagaccccagtaacaattccttcattccagttcgttaaccgttggatcgactcanatgtttcactggaagtctgtagtacatagacctagcatttgaccggtgcgatctagcattaaacacgcacaacgcattctgcatcactc

SEQ ID NO: 29749 - DNA, 370 bp, Glycine max
  unsure at all n locations
agcttatgcgtatactccacgaacgttcacttgcacaagacattcttataactaagaaaaatgcacccatatacaatcaaggcaccttcgttacctagattatttacatgtacttccaaggtgtatttgttacctatatcacacacatttcctttgctaaattcacatacatgcatactctaagcactttggctatcaaaaattgcatacgtgcacatcctggtatttctaatacctatacatacacaaacttcatgatgaatcttgactatctacacaataaggtgctacatttcatgctttntctttntcaagtgtttttactacctanagccgcatgcaaattcaagtatattntcttttgctcact

SEQ ID NO: 29750 - DNA, 424 bp, Glycine max
  unsure at all n locations
agatgagcagcagtaggtgacttgtagggaagtcttttgtcggagctcgcgcagccgatgtgataacgttggaatttattttgggggagagttgtgttttgttatgaactcttccttagttggctccttgaatctttctgattgggcatantaactctaagtttagatatatgtaaaaaaatctgaattatgttctgacatttgaaagatgagtagtgggggaatatatatatatatatatatatatatatatatatataagcatgtatttgctcacgtgtttgtgagttgttggatgaatgtacatcacacaannattaccatcgttntcacaatcaaattaatgggagtttcacttataaattgaaatgtcacatttttatagtagtgattgtagcgacaagacgggtcgttacagtggcac

SEQ ID NO: 29751 - DNA, 274 bp, Glycine max
  unsure at all n locations
agctnttccatttcttacggtaaaatctgngacctagccatggtagaaatctccacagaggccattgcctccctcgcccagtattatgatcagccgttgaggtgcttcacttttggggacttccaactatcacccatggtggaagagtttgaagatattctgggatgcccactgggaggaaggaagccatatctttcctctgggttctatccctccatgacaagagttgccaaggtagtgaatatctcagcacacgaagttgaccgtgtaaagc

SEQ ID NO: 29752 - DNA, 288 bp, Glycine max
accttgaattaatacctttgatagcacttttgagccttgcttccctttccttggtatgaagctcactacaagccttaagtgataaaccctgatattaccatatccttaaggaattttggagctttggaatggatttgggaataagtgtggggggtttttgtttcattggacaacttgttttgttggctatgcttcatgatgtattttgcgccatacttgatgtatattgcatattggttaaatgctggacatgctgaatgaaatgttgtttcctaaaggctaaagagt

SEQ ID NO: 29753 - DNA, 372 bp, Glycine max
  unsure at all n locations
agcttgttcgttttgctgatatttatcatgcacactnttctgatgatgaccgaggaacaattagggatcaacttgaaacttatgtgcttcaagtgagaagaaatgcttctttttccacttgtgaagatgttcaaagtttggctatgaagatggttcanactgagaaacatttggtatttccattggtttataaacttattgagctagctttgatattgccggtgtcgacagcatccgttgaaagagctttttcagcaatgaagattatcaagtctaaattgcgcaataagatcaacgatgtgtggttcaatgacttgatggtatgttacaccgagcgggagatattcaagtcgctggatgatattgatatta

SEQ ID NO: 29754 - DNA, 415 bp, Glycine max
  unsure at all n locations
ntatatatntatttttatttttntaaaattaagggataaaatnttattttttcataatttaaaaattcacgtattacaaatttaagaactaaattgaatattatcaggagcctcggcagccttaattntaaccaaacaaagttacgtactaaacaagactttgaatgcctgcagatttttctcanaagagttgtccgccaggtaacactttagtgactntataagaaaattgaacttgcattcgatcacganaaaaatgagaactaatttgaattatattaactacttatatcaaccctcgtcaattntatctacatatgcatacaagtgtaattagatgagtccgatcgggtctgagcgagggatcaaaattacgtgggtttcgttagggttggagacaatatcttctaattaa

SEQ ID NO: 29755 - DNA, 427 bp, Glycine max
  unsure at all n locations
agcttctacctctggctgctgctgctgctgtcacttgtcatcatgatgtgcacacattgatgcaatcactcgacgaggggtggggaattttgaaatgagagacagaagggtattttcactgttgataggggctaattgcaaaagagttaggggccaatagcaacacccaaactcgttttagaatacaagtcataatcctcctgattgggccttcgagtaaaagcccattcacaaaatggatgcaaacacagttttgaaatgggctttgtagccaggtccaaatctgaagcagctgctatttttggtttgcatctctctctctctctctntcttcgctagccaactcaacccagtgcagcgagtaaagctttctctctcttgttccttcgnnggctatgttcttcttctacccttcgcgaatggattc

SEQ ID NO: 29756 - DNA, 453 bp, Glycine max
  unsure at all n locations
tatggtacacgacaatntatgagttgataaattgtattacactatttatacatagattatttactatttgaataatttgatttttttttaaaccagattccatgcaaccatatacaatcatgccagtaatttatgcacaattgtcaaaaaccaatcgtacaggaaaaaaaactattcattctgagcaagccatgcctcaattattattttttcatgtcaaatcagataaaaaatagcttttaattttgcataaacaattatgtgagcaacactactcctctcataatataaatatttgattntggttgcccatagaccataggttttaaggcttgcagggagcagaatgtgtcagcttcagatcagcaggaagcaagttcactattttgttntacttattggaacagaaaggtatgtgtntgatgggccacatgggtccctctgtatcttgat

SEQ ID NO: 29757 - DNA, 366 bp, Glycine max
  unsure at all n locations
catgcaagcttccttttcttcctctgtctcattgtactgngccgaatggtatgtaatgttttcttctaacctcccctctactctctctctaattactttctccaccttttggtaaataaatttaaggaattttctttgatgaattcaacgctccacgactaatttaccaccctaatttaaagtattcatcatacaatttgttactcattttttcgcaatctattattacaagagtctatcatgaaataattgtgcttttaaatgaatttgactaatctaattcccaagtactgcactgatggactatatgatgttggaactcatgaggtgggaattttagaattgcacctgaatagaaaagcatga

SEQ ID NO: 29758 - DNA, 474 bp, Glycine max
  unsure at all n locations
catgcagtagaatcgtttcagataacttaaaaccaatccaatatggaagggcgtttgcttatattaataacgagatgaattggattaaaaaaatatattcatcaatattggtgtgaagcatgtaaatattgaaatgatatataactaaagaatgagaatcttttggtatgtacaaaaagaaaggagataaggaaaaaagaaaacaaaagacaaaacgagtggaggactgtaaacggaaatgagcggagtgccaaataacatttgtggnggcacgatcagaaattntaatccattgaaactgatttcttttctttntctgaggaggaggggaatggaaaaaagaaatatgagtagccaacacagaatcanacttgtcccttannatttttaggggataatgccatgacagatttaattnttctatttttgtcatgaaatccttcacatcaataattgatgtattatttgaaataa

SEQ ID NO: 29759 - DNA, 390 bp, Glycine max
  unsure at all n locations
agctttggtacatatatatactccatgtttattttgagtgtaacattaatgtgcatttattgcctaactaattaatactccagattaagcaagtcttcatgtaattaatcatgtattgagcataagcaattatcgactgattacccacacaattctagccacactatatttgattcttatatggcccaattaatttatagactgagttgtcatttacttgcagatattctcagatctgaaagctcagatcttgtcatcacagcgtattttcttctcactctaacttcanagtcgggctataaatttttaattctctgttgtttatctggatacagatcagatatcgnggatatatgctgagagaattcacctctcattttcacacatgac

SEQ ID NO: 29760 - DNA, 459 bp, Glycine max
  unsure at all n locations
atagcttgctataaactcacacaactgacttagagaanttaaattttgtaattgtagttaaatagaaagacccaattgaaaactaacataagtttaagaacccaattaaaaaaattcagatacttaattaaaataattggtccctccaaattataattttttagtccctcaatctcaaaaaaataattttttagtctcttctgacttattttttgcaatttggatgaacacttggggtgatttttaaccataggagggattataaaacacattntccaaatttgatgagttaaaataatgtaaactttattttgagaaataaaaatacaatgtccccaaatttaagagataaaaaatatttaaatntaataaaaaataatcaaatagtttcaaaatctgcaaaataatttaacctanaataaagacatcattatcttatccccttttgtttttcactcg

SEQ ID NO: 29761 - DNA, 400 bp, Glycine max
agcttgccacacttagcagaagagcttatttcctatgtaagacattccttccactcacttctacacatgctcccttgctcttcatagacattctccttctcttcttcctcacctcactataataaccagaaatagaaacagataataatgcacacagtataaaaaaaaatacaacgagaaacaaagatgaaacaaatgcaaaaaaaaaaagaagcaaactttacagcttctgtggcagccagccactaccttgttcgttgggggcaaaagaggaagaagacccactaaggcccccgcctctttaaatcacaaacgaaattcagaacaacacttataagttataacaaccaaaaacggctggtgtgaagtatgaaacaaatttataagtcaaatctatgga

SEQ ID NO: 29762 - DNA, 465 bp, Glycine max
  unsure at all n locations
gtcctttaatttcacaattatgttatgcccncttatagtgaccttaaactgttggacgtataagattcttatatttaccaatagttcactttgcctaataactttgcacacacgcatagaaatcagtatttccaaagtcctaaaatttgtgattgcaatattaatttttaatgctctttttcagggcaatatcagcatggtatgagaatcgtcattggtttaacactttatgcaagacagtgatggagcaagactggtcttggaatcgccctgcacttgattatctggagctttaccatgctgcacgtaagtcagcatgagatttaatagacatgaattaagtttcatcctctttgtacacattnttgtggtaagcttcagtttgaacacacttgattgcatctggtgaatccttcaaaaagataacaactacgaggtgaanagccataaaagatgatgagcttc

SEQ ID NO: 29763 - DNA, 423 bp, Glycine max
agcttctttcgattaatgaagatgataatattacatgttaataagttgacagttttaagtgtcttgatggcttgtggcacaattaagtctttgctatttggaagagaagttcatgcacagatgattaaaagtgatatccataccaacatatatgtaggaagcactctggtatggttctattgcaaatgtaaagaatactcctatgctttcaaggtgctccaatatatgcctttcacggatgttgcttcatggactgccattatctctggttgtgccaggctcgggcttgaacatgaggctctggagtctttgcaggaaatgatggaagaaggcgtgttgcctaattcctatacttactcgtcagccttgaaagctcgtgcagaactggaagctccaattcatggaaacgtaattcattcctac

SEQ ID NO: 29764 - DNA, 441 bp, Glycine max
  unsure at all n locations
aactgaaatttctttatcanaattacatatttataatacttaacagatgataagtaatattaatcatatttttttcatttgtaaaaaattaaactcacatattaaaagatttacaattttcaaatacagtgttcaattaataaagttaaacccgttaatgataattaagtgtagatagaatgatttcatatatttattctgtcaaaaagtttttattgaatataaaaattataacataaggattatgtttcaaacaactttnttctcttttaagatgttttcatacttttttactagttaaaaatgatnttattntttttatncaaacaaaattaatgaactcaagccactttttacaaacttactccgacaattttttttaattataatctatataacaataatattcattatcatataactaatattaaatatttaatt

SEQ ID NO: 29765 - DNA, 278 bp, Glycine max
tctttctcaatccaaggaagtatgcattggaattgcttgaagacagtggtttattggctactaagcctaggacaactccctttgattgcttcttgaagcttcatgaccgtgactcacccccttatgaagatgaaacagcctatatgagacttgttggcagacttttatatttaactacaaccaggcctaacattgctttcattgttcagcaacttagtcaattcatctctcagacattacaagttcatcactcagcagcaattatagtcctcaatatc

SEQ ID NO: 29766 - DNA, 307 bp, Glycine max
cacgttagttgagtcacacaatcaaatctctcacagcactcttaccaaatttacctaatatttaggtactgaacataacttacattaagcctctgctattttactattgctgttcattaaaataatttaagagaaatcatagtaaatcttaacaagtgaaaatatttatatgttatgaaccaattaagaattataatacatataatctttaagataagttttaattatagctttgatccctaattaatatttaattgttggatttaatttttgtatttaattctataataaatatttcttttacgac

SEQ ID NO: 29767 - DNA, 320 bp, Glycine max
tcatagacgttcaccttctcgtcttccttaacgcactgcaatcaccagaaatagaagcagacaataaagcacacggaatcaaaactcgatacgccgagaaacacagatgaaagagcggcatctctatcaggaccgcccctttgcacagtcggaggaagccacacgctccctagatcgatgggggcaaaagaggaggatgacccactaaggcccgcagctcgctgaatttgatgcgatactcagaaccgcactgtaatagtaaaccagccagacacgagatgtgcgagaatgagacacatttattagtcaatctatggagg

SEQ ID NO: 29768 - DNA, 447 bp, Glycine max
  unsure at all n locations
gcaatctatattacgctcaatcctataccataaacnctcgacctgatcggatatcataaaaggacacctagacganatcaagactacnctccactcgatcagatctagatggaaccctctctagattccattacatctacataaatcagatttgcttaaattgtctgctctcttcccgtacaagcccaattacttataatactcctggagtaaattaaaaacacagagttagtcccataggccccaacgcataaacctgctaactaattcgacaatcaacactaatccagcattaaaatggcgcccacagggttacaaataagacacaataatggccctcactttggcgaagcgctccaaacacactttgtgacccattgtgcttcatnccaaatatcaggcttgcttgtttaccattcaactatcacttcttgatgaatgtgatgt

SEQ ID NO: 29769 - DNA, 235 bp, Glycine max
tcaagcttatgccatcccttatgatataactaaactcgtccgaacgaacttagatatatatatgcacatccattggacattctcttaatgcagcacggacgtctatgtttgttcctgatgaaaatccaatggaccatgcacacgatgggaactttgggagtaagagaaacaaagactgatcatatgcaaagacacatgaaggataactaacataagtcagttctttatatacact

SEQ ID NO: 29770 - DNA, 441 bp, Glycine max
  unsure at all n locations
tggataggaactttgacgggtagagagttcattgngtagaagtatgatcaagagatattaaggatgttggctcagggatgtaaattctgaaattgtttaatacgactttaccagggaagatggatgttagtggagaatcagtctatgtggtatagggttctgcgatgggaagttgcattagaagactcanagttcatcttggtggaagtgagctacatgtgggtggttgtgactcttgattttattgagactgtgaagaaagcagttggagatggaaggagactccgttttggttggagccatgggttgggagagaggctttggagggtcattatagatgactcttttcatcttacttgcttatctgattctaaggtggctgaaacttcggtgagaggagatggagactggtgttggaattggtggaagagggatcttttg

SEQ ID NO: 29771 - DNA, 422 bp, Glycine max
  unsure at all n locations
agctntgcagttttggtcttcgccagtgaaaggatcgatgtgggtctgaanaaaggcaaatttgatcatcctactangacgactgagaaaactggggcaaataaagagggtgaggatgagggagaaacccatgctgtgactgccattcctgtacggccaagtttcccaccanacccaacaatgtcattactcagtcaataacaaacctcctccttacccaccacccagttatccacaaaggccatccctatatcaaccacaaagcctatctatcgcacttccaatgacgaacaccacctttggcacanaccacaaaaacaccaacaaaaaggaattttgcagcanaaagcctgtanggttcaccccacattccgctgtcatatgctaaacttgatcccatatccactcaataattcaatggg

SEQ ID NO: 29772 - DNA, 421 bp, Glycine max
  unsure at all n locations
tctcgatatattatgcacatgtatcggacctncgagtgacaagttatggccatttgaattnttcgagagcttccgctgctcaatttcgagcgtctcgatatattatactcctgaatcggacctccgagtgaaaaggtaagaccatttgaatctctcgagagcttacgatgttcaattttgagcgtctcgatatattatgcgcctgactcggacctccgagtggcaagttatgaacatttgaatttctcgagagcttccggtgctcaatttcgagcgtctcgatatattatactcctgaatcggacctccgagtgaaaagttatgaccatttgaatttctcgagatcttccgttgctcaatttcgagcgtctctatatgtgatgcgcctgaatcggacctccgagtcacaagttatgaccat

SEQ ID NO: 29773 - DNA, 489 bp, Glycine max
  unsure at all n locations
cgatgagccctgattgctgangccatagaacacacggcgattcagctaggacccgggatgctctgagtcgacctgctttatgcaagcttgattctctttaaattgncaaacaatcagctctgggggccatcgccacagtttggatcattccataagaatccttcaagcctttgtacgcactcaaggctttgtgggaagcctttgaacactacttgagaagaacatcctgatgatgatgatcctacgaaagaacaataccaccatgatattgtttatgaaaccatagtaactatactggtagttagatctgcaagttctataggactaactgtattactcgttatcaacagatgtgggaaatgacgagtattaatatgatgcttgcgagggatcgcgatggaactaatancaaattattctaatgtcaagaacggcagtgttactgtctaaaaaacatcggtgcttgtttgtagtgatgcaacgtacacg

SEQ ID NO: 29774 - DNA, 546 bp, Glycine max
  unsure at all n locations
acgacacgggcgtgatcnccactccgatntanctgacgctaganaacactttgatcccccttagctatnnccgngacactataaaanactcaagcttgtagcatggctgtacatgatatatgtcacagtgttcgcttgcgtctatggcacaaggataaagggcgctgtccacattatttccatgacacaccatgccacactgatgattctggatattctcttgcaaaacgtggtcatgcatgcaccccatgtggacactcaatcataaagtttctatggccatgtgacactacggctcacgattcattatttcctaatcaaggcaacccaatatctctcaaatatgcttctttatcaattcatgcattcatcccagtccatttgcgtgttcacgaaaattctacagcacttacccttcaggtgcatacacatttttcttcaaaaactgttgttttgatcggtgaatctttctacaagacagggcggacgttatttctttcaaaagcatgtgcctttcacgccaagacatatctttgcgtttttctc

SEQ ID NO: 29775 - DNA, 394 bp, Glycine max
  unsure at all n locations
agcttattacctcnaattngnnnctctngaacataggtgagttgtaatcagcttttacgtttggaatgagattcataatgaagaaatcaactacaattttgcataagccaaaggttaaagcagagagaatgtcccaaaaaagtagtcaaatgctagaatctccctaggtcttcgctagctcaagagattccttcaccaacgtctaaataaagtttccactagaaaggaaaccgtcaactagtttctttcctttcaaaagagtacgtgcaatatctgatagtgacacaattgctgtgcgactaccccttctcaatacaactccacaccatcaaattatatgcaagacaaaaatgagaggtaatacgccacaattaacttaacatatcattaaata

SEQ ID NO: 29776 - DNA, 421 bp, Glycine max
  unsure at all n locations
agcttgttacttatggtaaacccacctccacaaaagactacgtacataaagaaatggnggtgaacttaaggattaattgagacaaattgaaattgggatgcctatgtacacacacaaaaaaaaaaagatttagtttaagaaattattagaacgaaattaaagttatagatatttatttgtaaaagaataaagtttgagcatcttttttaacaagtacacttccgtatactgctccttagacaaatcaatacataaggataataattatgagtcatttccgaaaactgtgagtattttcgtttatttatattggattaaggggattcacatggtacaaatcagatacgtagtctcttgtaaaaacccaacaagttttcctgtcatctaatatgcatacacttgttaattatgtattgttaca

SEQ ID NO: 29777 - DNA, 473 bp, Glycine max
  unsure at all n locations
tattactntattacgtgtntgagaatatatatgcgaagtactatttattgtaaggaaatacatatggtgcatgatatattgtgaaatgctattagaatgcaaagaaaatatatacgaagcactatatattattaaaaaaagtaccaaactacaatctatatatataaaaaaagactatgccaaagntattactaatttattactttctcttaagaaattaaaaggaaaaaaataatatgaaaattatagataagcagaanaaaaaatcataaataatacaattttatacattccaataaaaaatcatgggttagcattnttcttcatagaaagcgctattttttttggtgattattaaaaagaaagaaaagatattaatttaaagaatgttaaactatgtaagtgtaattaagaggatctaatttaattagttaagtatgataggtgagtgttataaatctctttatattata

SEQ ID NO: 29778 - DNA, 415 bp, Glycine max
  unsure at all n locations
agcttcataaagttggcttgtgaagttccggcgggtgtcctcacctcgaatgcttagaaaacatcatattttttagttgacagcatagaaaaagagttagacgaagaagcaacagcactaatcatttgttgctcaactgttatgaattcctagtgctccacctacaatgattataacactaaactcgaagaaatgaaaaaggctntaacatttcattntgttcttgacacttgtctgcaacactgttcatacaggacatgcaggataacattgttcanacagaattggggtcaaatagggttgggacacgtggacaagggggagttaaagctgaagagtgtatttggacgtggttggtgaggtaaggggttggcaatttgttgctttagtatctaagagaggagagagagaatct

SEQ ID NO: 29779 - DNA, 485 bp, Glycine max
  unsure at all n locations
cactaagcttgcgtttggtaacaacttaactaacttcttattgaacaagtgtttatcatatctcatataaacgcttgtgtataagcgctttttataattgaagtggaaagaagtaaagttaaactggtttcatataagctataagttggtttcctaaactatcttgaagagcttatngaaataaacagaaaacagctaataagcatatcttaaacactggtttcataagctntctcanacactaacacaaagttcatgagagtaatatatgtccttcctacaaattctttactgcttaattcctataagctcatgtgcatgataagttcacaagggattgattaatctgtttacctaaatgtcacagggtggtcatgattagggtatntatacatcagtataatcatacctaataaataactatattataagtgggtattataattataaccataactttggttttaaatatgggtatataacta

SEQ ID NO: 29780 - DNA, 417 bp, Glycine max
  unsure at all n locations
agcttgtggggactntgcatacaattttctatttagtggtaagacacttgtatctgacaggcagtttgacattgtctaacaatcactatgtacaactggaatatattgttcttttaaatttttataattgaggatggatgagcttgacataacaatggtaaggttattgccttgtgatttggagctcacaatttcaaatcattgaaacaatctctctgcttgtagggatatatctgtgtacatctatctaccctccccaggttccactaggttggagcctcatgcattgngtcaccgttaatttctattattattgntattcctgcatccttcttttatatgcaatgctatccttaattcaaataaggtggatttcagagttacaaaaggaatcagacaaatgtttgaagagttctg

SEQ ID NO: 29781 - DNA, 382 bp, Glycine max
  unsure at all n locations
gcgtagcccaccatcttttcatagtagaatagcgataatgtgtctaccatcacgattattatctccctttccatcattgggggtaccacttgggctgccagatccttccacctttgggcgtattctttgaaagatctgtgcccttttttgcacatgttccgtagttgcatcctatccgaagacattatactgacactgcctaacgaaggcaaccattaggtccttccaagaatgaactcgagaaggttccaagttagtgtaccaggtaacagctgccccagtaagactttcttggaaggaatgtatcagcaatttctcatcttttgcgtatgcccncatcttccgacaatacatctttagatggttcttggggcaagtaagt

SEQ ID NO: 29782 - DNA, 420 bp, Glycine max
  unsure at all n locations
agcttgcttgtggggcttctatggtgtctggatctttgagcttcaatgaggtcctttaatggtgactttccaccatgaagatgcagcggaagacaaaggagaagaggtgagaggaggcgccatccacttgggaataagccatagaagaaggagcttcaccataaagatgagccttggataagaagcttggagaggatgcttcaatggaggaaaagaaagagggagagaaagagagagggggggagcacgaaattgaaggaataaaagagggagagaagtggaactttgaagtatgtctcacaagactctcattcatcanagttataacaagtgttacacatgcttctatttatagactaggtagcttccttgagaagctttcttgagaaaacttccttgagatgcttctttgagaaaaac

SEQ ID NO: 29783 - DNA, 482 bp, Glycine max
  unsure at all n locations
agcttccagaattatgacctcatcaaactacttgtttcccgagggaaattctataaatagacctcccatcttttatggagtgggttaccactattggaaaacccgcatgcaaatctttatagaggcaatagatttaaatatttgggaagccatagaacaaggaccttatgttccctctatagtggccggaagtgcaacaatagaaaaacctagagcagattggactgaggaagaaagaagattagtacaatataacttaaaggccaaaaatattattacatctaccctangaatagatgaatactttagggtttcaaaattgaaaagtgctaaggatatgtgggataccctacaagtaacacatgaaggcacaacaaatgttaaaagatctaggataaacacattaactcgtgaatatgaactggttaggatgaatgtaaatgaaagtatacaagacatgcaaaagaagttcacacacatag

SEQ ID NO: 29784 - DNA, 431 bp, Glycine max
  unsure at all n locations
agcttagaggggttagggactaggggaaatgtttgttttgtacccctttgagatatatgaaaacatagaaaaaggcctcaattcatggttcaagcttgaggtttcttaaactagcacaaacagtacctaaaacaaaactatcactgcaccaaaagagatttgacatgccccaccaacatattcaccggatattctagttaactctaaaagttgtgagaccaaacattttggacggaagacatctganactaaaatactgtaaaagggcatgaacctgttctaaaggaataaatcacaccaactgttcaaagacaggacatgtctaacttccagcaagtagatttttagagattntaaatatcctttcaagctaatttcctaccttntactagttacaaataagagaatggcttgattcaatccctgtacat

SEQ ID NO: 29785 - DNA, 312 bp, Glycine max
  unsure at all n locations
attctcattacttcttagttntactacttctgggcataatagtaaattaggacatccaacctgtatttcatcttngcatttggtttacagttatgcagttagaacatctggcctttatatctcaaattctattgaatatatcccagtgaataagggatatgcggatatcaatgactgatttttctgcttctctattaattttccatcttccttggttggatattcttctanggtggttggagaatcaattctttctctctttttcatgcttaagaattaatactaaggccccaaaccaaaacattctcattt

SEQ ID NO: 29786 - DNA, 394 bp, Glycine max
  unsure at all n locations
tgncggaaccatggaccgtgttatggcatgccacatcaacggctttcttgttcctctcctcaaagaagccggtgctctctggctctgaaaagtagacccacccaactaacgctatctaagtataaataaacaaaaaaaatatatatgagagaggaacaaaacagggtttattaaacagtgtttattattattattattatcagaggaaagggatgaagtggtccttttgtgagtctcttcttctttcattccattttggatacactactactactactacttgcagcagcagcagcagcagcttcttactgactngttaatcaatcttctttctttaatttctttctttcgagtttcatgctctttgtattaatattattcttcttggttttct

SEQ ID NO: 29787 - DNA, 393 bp, Glycine max
ttaagcttcataagttagcttccaacaagtggtatcagaacacaagagcttcaagtaggtgctccttaaacctccactaattttcagctttactttctcctccattgatgattcttcggttctctccatgtatctcctcacgtgtcttgcgctgaatgttgttaacataattttttagaagttccaccgattaagcttgctatagaagctagatttgattttctatggttcaaattccttgctcttgatcttgaaccatgaattgtgttgagtttaggttcctttgagtgttatatatgcaattattgtggctgaaacctaaaccataaaaatcttaccaaaacattaaagtagaagaagacctcaaaaatctagaatgacatattcacctat

SEQ ID NO: 29788 - DNA, 449 bp, Glycine max
  unsure at all n locations
ntataatgcacaccttccatctatatcttagtatcactctatcatctgcaatattcctaccacatgaaatctacactataaagtgcatcatctcctcttgttctcaccaaataggttattagacccagaggtctaagactgactttgtccacactttataattattttttatcgtgtttgtatcttttttgtgtatgctagatccatgagccaaggaacaaaaccccattcatggacctccattgcagatctactcagatggaattcgttgaccatgtctcatatttctttgccctctcttttatgctttgccgtatncgttgttctaaccatggccaataaacatcttcaagctgcaacgaccatgatntctttgataactatataaggaaaatttctacctcttttgtattgtaaataactcatttataataacattacatgataat

SEQ ID NO: 29789 - DNA, 390 bp, Glycine max
  unsure at all n locations
agcttgaagtgatantcttgcggtcaagagaacttcatgttcgtatttcaatcaacaattatgacaatcaagttcaagtgtgttgtttataaccataaagatcaagactgagacaaggtgatctgaaagaacttctactctcgaggaaactgtttttccaacctcatcactaatccttgactcaatcatgcgagcatggggaacgaagtaaaaggaaaatgtttggatatgatagcacatgccaacgcggtgagataacggtgtgaatagccttaaaaggataaaagtgacgatgatggacaatcacgtttagcatcacctttttggataaaaaaatgcaatgattcaacattgttgaaaggcagatggaattcgttctacttgaatcta

SEQ ID NO: 29790 - DNA, 328 bp, Glycine max
acactatagaaactcaacttgaaccctacttttgaaatgtattattcaaggaaaattcttctttgaacagcaatgaccatcaatatgatatttgtaatcttacagagcaacctgaggatctaaaaggtggttcttttgttccccatcagcttgaggcactgaactggttgcgtaaatgctggtataagtccaaaaatgtgatacttgctgatgagatggggcttggaaaaacaagatctgcttgtgcttttatttcatcattgtattttgaattcaaagtttcacttccttgctaggtcttggtaccactttctaccatgcctaattg

SEQ ID NO: 29791 - DNA, 326 bp, Glycine max
gaagttcaagtccatagccatcaaagtctgaacagagtatgatgaactaagggacgtcaatatggccacagctgaagctttggaacgagaaaccaagaacgcccgaaaggaagaacactaccaaagcatagttctgatgggctttatagggcaacaatagtgagcctcaagctccgaagaggtgaaaggaatcttcacgggtcaaatgcatgatcttgaacgacgagctaaaggtttgccttatgttcaaaagaaatttgcccaacagtaagcgagactgaaagaatatgtgggccatcatcgataattcaaagaaagctaaatta

SEQ ID NO: 29792 - DNA, 381 bp, Glycine max
  unsure at all n locations
agcttaggcgttcagtgagcatctgggaaccaacacgaatcagacgtcgagggagacaaacttgtaaggaactttgggttgcagcttttgccccactagctattacctagactctgcaacaacggtcaacatcgttgacaggagcacgtactcactaaatggtggccccactcagtgtgggttaggtgaggaaatatacaaaaggtggttgagactgcaaaccagtacgatggggacatggaggatattaggaagcaaagcctagcagcataaattcaccatgtaggggaggcaggtactatgctntctgatgaggagggaganaagatcaacaaaatcgacaagaaaagggaagaaagggacacacactagcagacacat

SEQ ID NO: 29793 - DNA, 451 bp, Glycine max
  unsure at all n locations
ctttgagagtgtcacttgaatatgatatcaaagcctctataatcatgtgatttattgtttgttgcccccattcttctatgtattaaaagtcaaaattcattacccgccaccaggtatgatgggcaatgggcatgcacagtgtccatgtttcaagcacaaggggctcttgcatgtgtgggagttagatacaagagttatccatgtctcttcattcacccaacaatttaagcttttgggagagttagtttatgacaaaatctatctatcttctgatgttntataatcatgctgataatgagtcatgttgcctacagatacccacttaaaaatccaacatacctgagaattccaacgcattgtctttggaaaatgaaatttagcaatagtagcaggcaaatcttcagacaaaacctaataagagtagaacanatcagcagcaataaaatgtgta

SEQ ID NO: 29794 - DNA, 349 bp, Glycine max
  unsure at all n locations
agctntttggtgtagaaacatgggaccaactcattntatttcagaaagtcgtatctagtcaaagtctgagagaccatacaagtttcctagcgatttctaattatgtgggccattaagtctatcatatgctgacaatagccgagaagcccatgaatttcttcgggggcggagtaggtgtctgccatcgccttggccttggctaacaatcggggcagttcttgactcccgttcaagggaagagcaaaccgatccatccacatggttgcctcttggtgtaaagagtcgatcacccttcctctagcctctttttccggtatactcgggcatactcttncgtaaccctatgctc

SEQ ID NO: 29795 - DNA, 394 bp, Glycine max
  unsure at all n locations
agcttcttattttangctcatcttggtggtgaagctccttcttccatggcttattccctagtggatggcgcctcctctcacctcttttcctttgtctttcgttgcatctccatggtggaaaatcaccattaaaggacctcattgaagctcaaagatccagcccccattgaagccccacaagcaagtttccatcacatatctcctatcatctaatgattgacacatgacaatgaatctattaaaagttactacaagttctgagaaataaactaacagtggcaaataggattgatgggaaaaggatggatggtactgtcagtggggggaaagaaaatttgttgggtggttgtcacaattgtccatcttattattagaaagtgttgttgagcaattc

SEQ ID NO: 29796 - DNA, 455 bp, Glycine max
  unsure at all n locations
actaagcttaagaaatatggcctcatcaaactacttgtttcccgagggaaattttataaatagacctcccatctttaatggagtgggttaccactactgaaaaacccgcatgcaaatctttatagaggcaatagatttaaatatttgggaagccatagaacaaggaccttatgttccctctatagtggccggaagtgcaacaatagaaaaacctagagcagattggactgaggaagatagaagattagtacaatataatttaaaggccaaaaatattattacatctgccctangaatagatgaatactttanggtttcaaattgtanaagtgctaaggatatgtgggatacactacaagtaacacatgaaggcacaacagatgttaaaagatctangataaacactntaactcgtgaatatgaactgtttangatgaatgtaaatgaaagtatac

SEQ ID NO: 29797 - DNA, 377 bp, Glycine max
  unsure at all n locations
agcttaacagttggtgaaaggtatgtttttcggtgggagtcccgtgactgtgcaccttccacataccttccacatcgggttggacacagtattgttggcgactgtgtcatcgttttttggattgtggagggttatgagttaagttgggtgaaaaaaattaggaatgttttttatggtcttttgttgtaatgttattgggagnttttttcctagtgttttttgttagtcctcctggtatatgcgttatagtttcatagcttgtgatggttcgaatgctnttttggggttattttgttgcttgtcaattcttctcgtaattatcgtctggggaacaatcgaatgtgtgaaatttagttctacacaaattgtaaattcac

SEQ ID NO: 29798 - DNA, 427 bp, Glycine max
  unsure at all n locations
tgtgctgagaccctntgaatgtctataatggagataaacaactcacacaaatgtttctatctaagttagttatcgtccaatgatcacagagtacacgtatacacatcatgaagttgatcaatgttctagaaactgtttattttcattccctcataatttttgaaatgctaatcatttgaagttcaagtgtatattgagacaggttggcaaaaaggtatattctctgcagactgttgctaataaaagtagtggaaagcataatggaagggataatactanttttacctttctctctccatctcaagttgccatgttgcatcattaccagctatgagagaacanatattttcgtgaaggcacttaaattcacaacggtcacatatttctagatgaccaagcgcatcaagaaacaactttngcaatctgt

SEQ ID NO: 29799 - DNA, 224 bp, Glycine max
agtcgaaggatattaacgagagaagctgtactttgaagtgagtctcacaaagttctcacatcatatccttcttaacaatcttcttggaggactcctattgctctttttccttacgcttggtctttgaagacaaggtcttactatccttctttttcttttgcatttctagtgtttctttcttatccctcttagtcttcatagatagctgatctttgaccatctgt

SEQ ID NO: 29800 - DNA, 384 bp, Glycine max
ttatagaacttttcctttctaaatatgataaaggaaactcattactaggcctatacttacaaagcctatattttgtgtctacaaggtccgccataattaatacataggattatgaactcaacataggcccattcttgtcatgcaacatgacaacttccacactatgctgaataaccaccaagcaccctcaacttatgtgcctactcacaacaacaacaacaacaacacttggatttccttgaagtctgagaaacgacaccttcgtacctaccatctcactcatggctagtcttaatgatccaagcttcacaatcaacaacaattcaccccatatacactaaaatggtcactaatgctcttatgagatagccttctacactctga

SEQ ID NO: 29801 - DNA, 238 bp, Glycine max
ggggaagctccttttcctggctattccctaacggaggcgcctcctctcacctttttcctttggctttcgtgcatctccatggtggaaaatcaccattaaacgacctcattgaagctcaaagatccagcccccattgaaaccccacaagcaagtttccctcacatatctcctatcatctaatgattgacacatgacaatgaatctattaaaagctactacaagttctgagaaataaacc

SEQ ID NO: 29802 - DNA, 416 bp, Glycine max
  unsure at all n locations
agcttattgctttcgaagagcataatcattttgtttggaagatggtgacatcaattcaaatttttccactccttcgccggtgcaaggaaagcctctaactaaatttcctctattttcgtgatgatagtcttgtggttcatagtcataaggagatttcaaatgtagttgtttcttacttcaataacttgtttcaagctaataacaattgtaatgcttttatgcctattatcaataatatttcatcctgtatttccccttaaaataatgacctttttttggcaccctttacaattgaagaatttcaagctaccatttttcagatgaactcaaacaagtcaccatgtcctaactgactcaatccagcatttagaaaaattgcatctttatggacaagaatttntcactctggcatcact

SEQ ID NO: 29803 - DNA, 454 bp, Glycine max
  unsure at all n locations
atggacttaccttgaattaattcctttgatagccctttttagccctgnttccctttccttgttatgaagctcactacaaaccttaagtgaaaaaccatgatattaccatatccttaaagaattttggagctttggaattgctctgggaataagtgtggggggtttctgtttcattggacaacttggtttgtcggctatgcttcatgatgtattntgggccatacttgatgtacattgtatattggttaattgttggacatgctgaatgaaatgttgtttctcaaaggctaaagagtaaaaaaacaaattcgaataacaataatcgaataaagacaaagatagcaataaagctgagtgataagatcttaatggccaagatgataaactcttggtcactctcatgttcatcttatcttactcttctatctcttattcttctctcgatatgcactat

SEQ ID NO: 29804 - DNA, 430 bp, Glycine max
agcttgttctatggtacagaaccattattttaattggagtagttagataaaagacaagaatattttttggtacataaaaaataaaaaataaagactaatatttatctaatactactatttttttatattctttagaatgtttataaagtgtttaatcatgagatctggctgaaagtcaaacatgactcgcatcttttaagtaaagtctcaaattttaattttatggaaagaaaaaatatagttagaaaagaaaatttcactaaagatgacttacttaaattttttgaagaacattaattattatcaaaattgatggatactttactcaatgacttgataacaaagaaaaaacttgacaaaagagagagaagagagatggaaagagcatattaaatccttatatgttataaactaataagacaagatcatg

SEQ ID NO: 29805 - DNA, 426 bp, Glycine max
  unsure at all n locations
tgcatggattataatatatcaactaaacacaattcacaaagtatttggatatgctatgcataatttacctgtacacagtctgcatttaccatacgtgctgtgctatataatatacagtagtattttcgagtcatacaacccaatggtagtgacccaatcaattaaggacaagagnttgataggacagaaaggtattgtgacaaggacaacgccaagaagacaaaaagatatgcacttttatatgtagttataatacgatagcttctcttcaagaactttactggttaatggtattttttttaagcattaactaagttctaattttctaatttctttcgaaattaacttcttttcctaacacattatttttctggttaattttttacttttttatcaactaactaaaattttgtttgattagtaaag

SEQ ID NO: 29806 - DNA, 254 bp, Glycine max
  unsure at all n locations
tagcatctcagataattttctcaagaaagctactcaaggaagctatctagtctataaataatagcatgtgtaacacttgttgtaactttgatgaatgacagncttatgagacatacttcaaagttccacttttcttcctcttttattccttcaattttgtgctcaccccttctctctttcttttcatccatttaagcatcctcttcaagcttcgtatccaagcacattcttggaggtgaaactcctttttccat

SEQ ID NO: 29807 - DNA, 350 bp, Glycine max
tgatgcgccccgcttcgactattttacgccatgggacggatctttaagatcctccaatttttcgactatcattagacccctgaggaggaacgcatctctgctgcttatttttatatggatggtccagcttaaatgctgatttcatggctgcaccaccaccatatgaccacttccttggactcctttgctcacgcgctccagactcgctttgccccgacattttatgatgaccctcacagcacactggccaagcttactcaacgacgctcggtgaacgattacctccacgagtttgaacagctcgcgaaccgggtcacatgtcttcccccctccttcttgcttacctgttt

SEQ ID NO: 29808 - DNA, 405 bp, Glycine max
  unsure at all n locations
agcttaattgtatattttcaactccacaagtcaacctcaacggctcaacaaccggatcatcttcaatcgcctctccatactgagtttgctctatctcatgtggcttgtgtttttcctttgtaagctctgattgttcttttagcagaggagccctcaacttatggtagctcggaggattcaattgttgaccgtaatctccaacagcttcaatcatcatcttaaagcctttagagcatgcaacctcgaaaggaatttcattctcacggatgaattgggcaatgcatcgattagctttagcccttgctnttttaatactagcatcccttatacatgttttcctcttggccattccaagagtgagttngtttgatagttcaataattctcagcgtattcatatgtccat

SEQ ID NO: 29809 - DNA, 474 bp, Glycine max
  unsure at all n locations
cgtgacactatgaaactcagcttagctttttaggaatcttcttaagaagcttctcaaggaagttatcttggntatgagaggggtatgtgtagctaagctctagcttctcaaggacagtttctcaaagaagcttctcaaggaaagtttctcaagaaagcttctaaaggaagctacctagtctataaatagaagcatgtgtaacacttatcggtactttgatgaatgagagtcttgtgagacatacttcatagttccacttctctccctcttttattccttcaatntcgtgctccccctctctctgtctctgcctctttcttttactccattgaagcattctctccaagcttcttatccaaggctcatcttggtggtgaagctccttcttccatggcttattccttagtggatggcgcctcctctcaacctcttctctttgtcttncgctgcatctccatggtggaatatcaccat

SEQ ID NO: 29810 - DNA, 152 bp, Glycine max
gctacacccttttagtgcatgtctagtacaatggatccattcatacagcacacatgacaaaacaacatttatcaacacttatccaccaactataagtctggacaaatatattaatctgtgtgggctgaatgagaagattgtcaacatgtcca

SEQ ID NO: 29811 - DNA, 408 bp, Glycine max
  unsure at all n locations
tcaagctagcatgattangattgctcaccctacaccagcagtcggggtaacctttacagaaatatgatcaccatcctgaatctctagcagtcttctacacttatcttcataaggattatgtgtactatgtgaagtttttatgctatcttgaatcaacttaatcctctcttcggtttgttgcaagaatcttggggccccacgaccatatttgcaccatcttggtaacaacaaaggggtggtctacacctcctaccatataaagtttcaaatggtgtcatgccaatgctagaatgaaagctgctgttgtacgtgaattccaccaaagggcaaacctgatcctatctacctagatgatcccacacacatgctggcaaatattgtctaatgactatatcgtcctctcggatt

SEQ ID NO: 29812 - DNA, 325 bp, Glycine max
  unsure at all n locations
ngcacaacaagnttctaaatctatctttgtacaaaatgaagcattctaataactaactaactaactaactccactaatatatccagtaactactcagaaagaaaggatggacttaatcgattaagcccatctaatctacctaattaaactaattacacaaagcaaaacccaaattcgcagcccaattattgaactgcaatgattcttagctccaagcccaatttgacccgcgaaatggcaaaatgtccaagcttatctgcgaaagataatacaaaatcgaatccattcttctgatctttccaagaactactcacatgctccattc

SEQ ID NO: 29813 - DNA, 411 bp, Glycine max
  unsure at all n locations
taagcttctcattgtttttcctagtcaataaatataagcatgtgtaacacttgttgaactttgatgaatgaaagtcttatgagatacacttcaaagttccactcctctccctcttttattccttcaatttcgtgctcccccctctctctttctctccctctttcttttcctgcattgaagcatcctctccaagcttcttatccaaggctcatctttgtggtgaagctccttcttccatggcttattccctagtggacgacgcctcctctcacctcttctactttttcttccgctgcatctctatggtggaaaatcaccattgaaggacctcattgaagctcanagatccagcctacatagaagctccacaagcaagcgttcatcataagtatttattacctatatttaact

SEQ ID NO: 29814 - DNA, 450 bp, Glycine max
  unsure at all n locations
tatcctataactgactaagctctattggtaatcgattgcagtcttgtgtaatcgattacatcctactgttctatggtaatcgattacagggagtggtaatcgattaccagacctaaatcaaggctttctctacaaatctaactattgcttactcctaaaaactacatactcattgtatcttttatctaccacaatcagagatcaataatagactttgaaaaacaagcattataaacatcttaactacaaccatcaagcacaatcacaagtacaaatatactcaccaaatcaataatcatcaaatcatacacaaagaanatcattaagccgcaatgtacaaccattatgattgtcaaaacacaaacaaagataatcattgacaatcattcaatcattatgaccatcaaaacacaaacacaatcataaaaaaagaanatataaattaacaat

SEQ ID NO: 29815 - DNA, 356 bp, Glycine max
agctttttcttttgaagaaggagaagtacaagttcacagatatgttcaaaagttaattggaaaacttatgtcagagttttcgaaatgcaagtcaatgtcttgcttttatagactcttcatgtatggtcaagaaaaccattggaagagttataaccttgagaaaaacctgaaaaccataggaagagttacatcttttgattattattcaaaacttgtcactggtaatcgattacctgaaccatgtaatcgattacacacagcattttatgaacatatatgactcttcacaattgattgtgaatgtcaacgatcagatacactggtaatcgattaccgatatattgtactcgattaca

SEQ ID NO: 29816 - DNA, 433 bp, Glycine max
  unsure at all n locations
tgagactcttttttctgaagatgaagctaatcatgctttggaattattcaagaaagaagaagaatatgtattcccatatactggggatatgttgctggagtttctaacaaagaagcataaagctgggaaagaagtgatgatttgcccttgatttagtgttgtgcttgataaaactacaacaatggctttcgaagcttctaatttgcaagaattatcagataattcaagacgttgatgcttaagggaagggaaagcaaaaaatcaatatgactgtgagtcaagtgcaaaaaccatacaatatttctcaaagaaggtctacatatgtctcacatggtggaagtccttcgaatagatggacttgacagggacatcaacaagtattgatgataaccattaagctgaacaattatgtgcctcanagagatggaactac

SEQ ID NO: 29817 - DNA, 404 bp, Glycine max
  unsure at all n locations
agcttatttacttccctcaaaacccaattttgtcgaaaccaagtgtcatgatttctatattaccaattntgctagctgttgatgttgcatcatagttttgctatgtcatctacctttggtctcatctctttaccttacaattcaggcaattctatcattaccctttttcaatatatagaattggcaacatgcaaacatatctaatccaggagattccaccactaatagtcagcctataatccataaccaatgaagtcccccatctccaatttattccatcttctaantttattgtagtttctgcagatttaagataagcgtttggttcttcggtntaacatanatctattngttagtttataattcacccaattctgcctttagtcattttcaacatgcagaac

SEQ ID NO: 29818 - DNA, 404 bp, Glycine max
tagaacaatattcttgtccttcatttaattggctttgtgcttggttaccacgatcaacaaagtactttcggcacctgctatatgttgacttgaccaacgctgttatgggtatgctgcgacaatccttcaacaccttattcacacattctgagagggttggtgtcatgtgaccatatcttcgtccagatgtatcataagccatgctccatttttcctttgaaatgcgatcaatccatgttgctatggctggactcaattgatgaaatttttctaagtcttgatcaaacacatgcttgcaaggagtgtacgctgcataatagttgctaccatcaaaagttgtaggtagatatgaaactaaaattaacttcatgtataacataaaccttacccaatttcttgaacat

SEQ ID NO: 29819 - DNA, 407 bp, Glycine max
  unsure at all n locations
agctntgaatgctctattcaatggtgttgacaagaatatcttcagactgatcaacacatgtacagtggccaaggatgcttgggagatcctgaaaaccactcatgaaggaacctccaaagtgaagatgtccagattgcaactattggccacaaaattcgaaaatctgaagatgaaggaggaagaatgtattcatgacttccacatgaacattcttgaaattgccaatgcttgcactgccttgggagagaggatgacagatganaagctggtgcgaaagatcctcagatccttgcctaagagatttgacatganagtcactgcaatagaggaggcccaagacatttgcaacatgagagtagatgaactcattggttcccttcaaacctttgagctangactctcggata

SEQ ID NO: 29820 - DNA, 482 bp, Glycine max
  unsure at all n locations
tattcaaagcccttanagctaanaactctnttgatgaagaatctaatgaagagtctgatgaagatgaagttgccttcatctcacagaagattcacaagatgtggaaaaacaaaggtgaatccagatggaagaactcctcaaaaagcacgctcaatgaanagaaagataaagacaaaagctctatagtatgctatgaatgcaagaaacttggacacttcaaatttgaatgcccagaacaagacaagtctcaagacaagaagaaatactataagaccaaggaaaagaaaggtctcatgagcccttgtaaagatctagatgacacctcatctaatgaagaagaagccaacctatgtctgatggcagatagtctctgaagaatctaaatcanatcaagaggatgaggtaactcttaatgatcctaaatctcttannaagcttacaatgaactgctatcaaacttttccattctttcacaagcttac

SEQ ID NO: 29821 - DNA, 425 bp, Glycine max
  unsure at all n locations
agcttcaccttttggtcctcctcattgttgttgcatgagaaaacatgctctattttcatctcccactccaagtaggcctccggatcattctttcctttaaatggaggaatgttgagtttaataccatcaattcggttttgtctaggaacaccatcattccctcttctcctcctttcttcttcattatgatctctattctccatttgatccaacctctcatggagcgcatcatctcgttgtttcattaacctctccaaatgttgcatcaaagcttgcatttggaattgcgaaagccccactccatcattaggattagtacctgacatctcanacaaacaaatcanacgtaacaagacaattatagttgctgtttgaatacctcacccactcaagtgtatcacacaattatggctnttctctaatga

SEQ ID NO: 29822 - DNA, 471 bp, Glycine max
  unsure at all n locations
caatttcatgcgtctcgatatattatgcgcctgaatctgaccttcgtgtgaaatgttatgaccatttgaatttctcgagagctttcgttgttcaattttgagcgtctcgatatattatgcgcctgaatcggacctccgagttaaaagttatgaccatttgaaattcccgagagcttccgttgttcaatttcgagtgtctcgatatattatgcgccagaatcagacctccgtgtgaaaaggtatgaccatttgaatttctcgagagcttcagttgttcaatttcgagcgtctcgatatattatgcgcctgaatcggacctncgagtgaaaagttatgaccatttgaatttctcgagagcttccattgttcaatctctagcgtctcgatatattatgcgcctgaatctgacctccgtgtgaaaaagtatgaccatntgaacttctcgagagctttccgttgtcaatttcgagc

SEQ ID NO: 29823 - DNA, 366 bp, Glycine max
agcttgtaatctattacacatatactgtatttgattaccagagcagattatcagaatatattctcaacagtcacatctttttatgtggttcttgaatggctatcataggcctatatatatgtgacttgagacacgaatatgctaagagtttttcagaacaaaaaggtcttattctcttatagagcaaaatcgatttatcctcttacggatcccttggccaaattacttgtgattcaataacgaattatttgagtgctcaaattgttcaatctatctctttcaagagagacttcttcttttcttcttcttcattctaaaaagggactaagagaccgatggtctcttgttgtgaaagaattctaaaca

SEQ ID NO: 29824 - DNA, 362 bp, Glycine max
aactcctaccgctgtcaaaaacctaacaaattccgccatttccggcattgtccgcaccccggcacgaccgccatgactatggcggcccgcatcccaaacccgcaacgccaccgctattccgtggcgtttttttgaaaatcccccacgaaaaaccgccatggccgccatttaacaacactgggacatgatattcgattgtgaataagtggatgtgctaacacttgatgtacattaattatattgcgagctatgaattatacaataacccgaccagtgttatgcgcagtgtaaagagaaagtgaagttcctattaggaaccggtgtaaatcgagcgcattgtgtaaacatgtctgaacatgagt

SEQ ID NO: 29825 - DNA, 420 bp, Glycine max
agcttgaccaatttctcgacccaacctgtgcatagtcggtcagtgagaacctgtgatgtacctaaacaggcgagctcctggcagtcaacagataaaaggaacaaagaccacaaagcaaggaggcttgtggtggctggccagctgtgaattctgtgtgatatatgggttgtggcctctggtaatcgattaccaagggtgggtaatcgattacaaggcttaaaaatgaagacaggaggctaagatggtctctggtaatcgattaccaagggggtgtaatcgattaccaggcttgaaaatgaagtcaggaagctaagggagcctctggtaatcgattaccagtctgtgtaatcgattacacagaggaatgggtcactggtaatcgattaccaggtatgtgtaatcgattacacagtgcatttt

SEQ ID NO: 29826 - DNA, 303 bp, Glycine max
atatttggtcataataataatgggaaaatttgccaatttattgaaaatatatggttaccacataaaaatggatttttttaatattaattggttaaaactatgaaccaccttaactatttattatcaaagtatctgggaaaccttaacttaatggtaaaagaagtcattctttcattatatattaacaggaaaaaaaatccacaggaaaaaaaaattcagtagtacataacttgatctatttggcttcttgggtggttcttcttaagcatgcccattggaatggtcctaattatatatctactc

SEQ ID NO: 29827 - DNA, 433 bp, Glycine max
  unsure at all n locations
agcttgaaattgatacaacggaagttctcgagaaattcaaatggtcataacttatcacccggaagtccgattcaggcgcataatatatcgagacgcccgaaattgaacaacgaatgctatcaagaaattaaaatggtcataacttgtcacatggaagttcgattcagatgcatactatatggagacgctcgaaattgaacaacgaaagctcccgagaaattctaatggtcataacttgtcacacggaagtccgattcacgcgcatactatatcgagactatcgaaatagaacaacggaagctctcgagaaattcaaatggtcataacttatcacacggaagtccgattcaggcgcataatatatcgagacggtcgaaattgaacaacanatgctctcaagaaatagaaatggtcataacttgtcacacggaag

SEQ ID NO: 29828 - DNA, 484 bp, Glycine max
  unsure at all n locations
actaagcttctcgatatattatgcgtctgaatcggacttccgtatgataagttatgaacatttgaatttctcgagagcatccattgtttaatttcaagtttctcgatatattatgcacctgaatcagacttncgtttgaaaagttatgaccatnttaatttctcgagagcttccattgttcaatttcgagcgtctcggtatattatgcgcctgaatcagacttncgtatgaaaagttatgaccattttaatttctcgagagcttncattggttaatttcaagcttctcgatatattatgcacctgaatcagacttccgtttgaaaagttatgaccattntgaattctcgagagcttccgttggtcaatttcgagcgtcttgatatattatgcgcctgactcggacttncgtgtgataagttatgaccatttgaatntctcgagagcttccgttggtcaatttcaagcttctcgatatattatgc

SEQ ID NO: 29829 - DNA, 500 bp, Glycine max
  unsure at all n locations
aggggncnnggtttgagcattgaatgacgctatggaactacgggcgaatcagctcgtacccgggatccntagagtcgcctgcggcatgcaagctgccgctgtangaatggcgaaaccacgtaaattaaagacccccattgaaatttggttcgaaacagaaccttgttcgtaaaatgtttttaaaagaaaccctatacaataaatttgccctctaagcaattgcacatgcagcctttacagcaatttcttggacccgttgatacatctgatggctgataataaaatttacaaaatcaaacacatctacttgcttatctctacgtacgtgttatatataataaaaaaaaatccagtttttaattattattcataaaataccttaattttagtcattataatntataanaaaatatttntaaattggttttaagtgtgggtgtgtgtgtgtgtgtgtgtgtgtgtgtgtgtgtgtgtgtgtgtgtgtgtgtgtgagtgagtgc

SEQ ID NO: 29830 - DNA, 416 bp, Glycine max
  unsure at all n locations
ntataagtgcgggtctgggagttaaaggtcaagtgttcgcgatatgtgaagatgatgttccaagtacttcggatttggtccgaccatgctctcctgatttccagctgggaaattggcgagtggaggaacgccccggcatttacgcaacaagcataatgtaaacctttacggttttaaaagctctatagttgggcctgggctttagagttttcattttgttaaggctttgtgtctttcgtttttgaatttataatacaaggatctttcttcatctggttctggtctctacccattctcattcatttgcatatctacttctttctctaaaacggcagattcgatgacgaagtccccgaagtactaatacctgggacccgtctatcaacttcgagcaagaaatgagtcaaacggaagat

SEQ ID NO: 29831 - DNA, 406 bp, Glycine max
taagcttccaattttttaagttattcctcaaaactgtcctacgcaaagttcccaaagtcctattaacaacttccgtttgcccatcggtttgtgggtgacaagtggttgaaaacaacaatttagtgcccaacttgctccacaaagtcctccaaaaatgcaaatcatcaagcctaggtataggatgcctatatttaatggtgatgttattaagggctctacaatcagaacacatgcgccatgtcccatcctttttagggaccaaaatcactgggacagcacaaggactcatactatctcttacccaacctttgctaatgagttcatccacttgtctttgaatctctttggtttcttgtgaattacttctataggctggcctattgggcaaagaagctctcggaatgag

SEQ ID NO: 29832 - DNA, 444 bp, Glycine max
  unsure at all n locations
ntgcgaaaggcttgtcgctggagctgacccatcaactgccctatctctntcagtactgtgattcctangatcttgaccttgacttgatagaacctctctttaagcgaaagcgtctgactcgatcccatgttttactaaagtgaaacaaaatccagtgcgaatcanaactctgacatctatcatgggtggaatggatgaatacatgaagaaatgcatatgacacagatgcattntatgaatacgggagcncgggaaattgtccccttcttagatacaacattcgggcagcatcgcgcccgacgtatgcatttaagatagcaacacggaccctctgtcgggttgacaaagtgaggggatcaagacgcaatccgtggatgatgcagatgcgaaaggcacaacacggngatgcatatagtacgacaatatccacanatatagtacatg

SEQ ID NO: 29833 - DNA, 397 bp, Glycine max
  unsure at all n locations
agctntgcttgtatcttcaatggagaatgaagaagaagaaaatggcaacgtgagggagagagagagctgtctgaaaaagtgtggggctgagtgaagagagagaaaagctttttggttttaaataaaagggttttctctttttctattattttatttaagcaatgccacatgtctccatttgagtggagcaaaaagggcccactttccctttttgactgtgacccatactcagtcacaaaagtgaggaaaatctgacctttgaaacgctaaaatcctgcctcggtttgcgtgctgtttctctggttccagttcctcgtgtttctctgcgtctgtcanggccagttttcgaaagtacgcaatatatatatatcanaacgctcagaataaaaccccgagc

SEQ ID NO: 29834 - DNA, 368 bp, Glycine max
  unsure at all n locations
nttcgattcattctatgtacccgtagtggtccacattgggtttcgtgcaattttattttcgntntggttactttntataccccctggtgacgtgcttaagtcattttacttaagtcatttctcgcttaacttaaaaataaaataaatttccaccgaacgtttgaattgtattatccgttaacttcggttaaaatgaattccgaccgtttggtcgtgccgtaaccacgttggaaatcaaaaagaggtaaaaaaataatataataataaaaaaaacatcttttagtaaaataaagcggaaaatcaatcggacattntctctttgggatttctcattcttaatcgaatcgattaataactaaagtgaaact

SEQ ID NO: 29835 - DNA, 411 bp, Glycine max
ttagcttatgacttttattacaagcctttatagagaatgtgggaaacacaaattaaataaaaaatatataacgacttataaactagatgcatttatcataaaacatcgctatctaccatgttatattttatataaagagtattaaaaatgcacaattaactatttaaaccataagagtaacgtaaatcagttataaaggtgttgacaatttaaaagctgatatatatcagacgaaacctatttggtgtatgtatttgggaaatttcattcataatagttctttgctaaatgcaatcatgttagattgtaaagcaaaaggaaagaaaaacattatttataaaaatatataagagtcaagctaaaagacaagtagtgatagatacggaattttgcaatgaattacggtataac

SEQ ID NO: 29836 - DNA, 161 bp, Glycine max
  unsure at all n locations
aagtgggcctggttgctatttgcactcccattattactacatacaccctcatgcctttttttggttatactgatcagccaagttacggaaccttactatattctnnnngatacttgttatctttccgtaatggtacagaaccttgcagattacattatcat

SEQ ID NO: 29837 - DNA, 409 bp, Glycine max
  unsure at all n locations
agcttacaccttgtttattgtttttttccttatcaagccatttctaactctgaaaaatcaaaaaatttgtttaggctaagatgcacatagacaaagctaacaaacatataatctaagctcactatctttntctctcaagatatacaagatattttgagagcttttccagcttagaaagattttgaatgcaaaaagaatgaaggctattaatattgcttagatcaaaattcataactagagctttttggtatttatagatctcttcaacaggtaatcattgtgagtaaacgaccttctatttgtgggtgatgggtcatctatagcaaatgtatgttgggagcattaaatgcgcgtccactctgagatgataaatactatgtgtatctttcttgagcaacacttctctgga

SEQ ID NO: 29838 - DNA, 397 bp, Glycine max
tcagactgaatatgaaacagtgtctcattaagaagaaactctctgtaaccaaaatgccagggaagattgggtgaggttagggagtaagaactcagctttctttcatgctcaaactgttgctagaagaacaagtaataagactcatgggttattccttaatgcgtgtatttgttgcaataactgtgatcaacttcaagctcatgttgttgagttcttcaagaggctgaatagtgttactgaaggtaacattatgcatgtatcccttcctcttgccccgattctttgtggtcaagactctatctctttcccactagatacaaaagaggtgcatatatgctctgcagagcatgaaatcttatgagtctctcacgccagatgggtttagcctctcttctat

SEQ ID NO: 29839 - DNA, 403 bp, Glycine max
agcttcaagatttatggcctcatcaaactacttgtttcccgagggaaattctataaatagaactcccatctttaatggagtgggttaccactactcgaaaactcgcatgcaaatctttatagaggcaatagatttaaatatttgggaagccatagaacaaggaccttatgttccctctataatagccggaagtgcaacgatagaaaaacctagagcagattggactgaggaagaaagaagattagtacaatataatttaaaggccaaaaatattattacatctgccttaggaatagatgaatactttagggtttcaaattgtaaaagtgctaaggatatgtgggatacactacaagtaacacatgaaggcacaacagatgttaaaagatctatgataaacacc

SEQ ID NO: 29840 - DNA, 213 bp, Glycine max
ggaatcggacctcagtgtgacaagatatgaccattttaatatccttatagcaaccgctggacattatccagtgtctctatatgtgatgcgccttaatctaacatccgtgtgaaaagttatgagcatatggatatctcaagagcttccgctgaacaatttcgagcctctcgacatattatgcgcctgaatcggacatccgtgtgagaagctatg

SEQ ID NO: 29841 - DNA, 426 bp, Glycine max
  unsure at all n locations
agcttggcttatttcgtgaagagatatcgcttagcggataaacaatctaaaaatttttcttagtcattntctgcttatctcttcactcatactttaaaaaccctttttgttcattaatacacaagctgaaataaatcacaatcatcaacaagatgtcctaactacatgcaagaaataaaaataaagatacagaagggaaagaaaagctgggttgcctcccagtaagcgcttctttaacgtcactagcttgacgcatcatcctattatccaggatccattaaagttcccacttcaagcaccttcttctcaagtcttctttcctccatcacatgaactttaaaatagacattccagtcaggtggctctntatcttcatgaaatagatcanagctgattntttgatcttctattcccaattgcaacatc

SEQ ID NO: 29842 - DNA, 485 bp, Glycine max
  unsure at all n locations
tgagcttcattcgcagatccctcatgtaagactacactcgatttagatagttctcttaggtttagactaagtttaactgagtttcatctgtagatccctcatgtaagactagactcagctcaagtagcttactaaagtttagcctaatttagcctaagcttcgtctgcgatggtgtagtttttaggagggggtggcttgcggtggtggcggnggacagttttgatgatgagggtgaagaagctgacgaggaaggcatagacaacgagagtgccaagtgtctagatgaagacctagcgactaacaatgatgcagcccagatatatgtaccttttcttcttctttntatgttctcctttgcccaagagccagctatgttgggtctcatccaaagcacctcggtccagctcatggagattcggtggcggagtctatggtgtgaatctcaagcaggcctccccacagatccctactgtgcatactaatt

SEQ ID NO: 29843 - DNA, 414 bp, Glycine max
  unsure at all n locations
tttagttatgccatgnttttgcatatagagaagtgaagtagccgttgaagcaatagaaatttcataagagaagaaagtagcggattccaggtatgcttaaaaaaagactattcaagttcacaagtttagttgtttatctccttaagattgggctggtcttcagtttattgaatggatttgatttttgcaagatcatacctcgaggaaagggtagctaaaagtgcatataaaaaatgccatgttttttttttctgttagtctacaaccaaccacaagtcaatcgaatgaattcttcaagcaaagatatcagaaagactaagaaagagatatgcaatttacaacttgttgtctactttcaggaaatgttcggagtagaacacttacaataatacaacgtcgtgttctccagagatg

SEQ ID NO: 29844 - DNA, 400 bp, Glycine max
  unsure at all n locations
agaacagtacgttgcagggcgcgtcaacactcaaaagtgcacgatgaccctaggntgtgtttgtgcgaaaaaaacgcgacgcagaggtagcggaggctcgacaatgtacccttccttttgcaaaactcacggtggtgcaagggagattgagctcaataggagatgccgactgatagcacaattttcagatagtgatttctaggtacgtgtgttcaattagcgtgcaagggggacatatatgaaagcatgttaacgacggtgtatntgaaaacccgtctttgagagtcaatatttctatgatggtgtttacaaatacaccgtctttgataagctccggcctaaccaacatagatggtgttagcaaaaaacgtcgttgtagacatcacgcgccatgcacatt

SEQ ID NO: 29845 - DNA, 426 bp, Glycine max
  unsure at all n locations
agcttggagctttcttactacatttcgcttatacaacagcgggtgtataagacattcaaagagggatttgaaccatctttgtagccaacgtctttgagagttaagactttctacgacagtctcaagaaaaaccgtattagaaatgaatatcattctaagatgatttttaactacaaaccctcttagaagagtactcttctaagacaattattcagagaaccgacttaaagggatattcttctgagacggatgttatataagaaccgtcttagaaggtcgtagaagggtacccttctaaaactgtcttagaatgggacccttttaagacgantatctgaagaaccatcttagaatataagtnttttaaaaatataatgacaataagatcttagagctttgtcaatatacattgtgtttttataatgc

SEQ ID NO: 29846 - DNA, 206 bp, Glycine max
gctttggagaacattctgaagttctaggggcctgatgctattgcccctcattttactaatacacccttgcttttttgctgatcttttccgaacgtacagaacttacaatacgaacgaagctttttcctttgaatgtacggaccttacgatacgaatctcctttttgccttcgaatgtacaattttacgatgccactaacactcctt

SEQ ID NO: 29847 - DNA, 417 bp, Glycine max
agcttgtgtttttaatattccattgtatgtacaaattattgaaatatttgccatttaatttcatttcaaagcacattgcagaatttcaatgaaaagtgacttgttattacaaatagaaaagttatattttgtttaattacaattcaaaaatattattcatttttgaaaagtaattacaaatataccttttttagaagtaactcaataaaacttctcaaaataatcagaaatatattttttcaatttttttctcaaaatatcaaatgaatacattaaatattttaataataatattttctttttcaaatgaaaaataacttttcataaaatataaattaaacagacggacttgtaattagagatattgtccgcctttagtttaagcttcagagtcattaatttatgttcattatgttc

SEQ ID NO: 29848 - DNA, 315 bp, Glycine max
ccattgctaccaccaactttaggttctacgacttcaagcttaagaagaattgggtcagctatcactttggtcaagacatcattgacagaatcaaagtaatgatcacctttcacaaggtttgttcttgaaaactttttaacacccaggaaaagaaaggccactaaatttttggagctcagagaaccttgattctttagtttctccgagttctaaccttttgccaataagcgaggccaaacagcttcctagaagatatcattacttttggctttgcacaaattggtatcccccagtcaaatgcttgattatatcact

SEQ ID NO: 29849 - DNA, 379 bp, Glycine max
agcttaagctccttgttgcttcccttcttagctcctcggaatttgtttcggccccattcttcctttcgggccctctttgtttctcgttccaacgcttcggcggtggccacattgatgtctcttagtttgtcgcactctcttcagaccttgatggctgtcgtcttgaattttttcttgaccgcttgtgccctttcaagttccacctttaaggcttgcacctcttcgctctccttaggggtttcagcctcttgctcacttgaaacctttatcttcgggagccaacctaactcttgcatctgagcctttattcagttgagatagccgtatgtcgcaacctaccgtattgcgggagggcgacgcgtgactcgcgggatgcgtg

SEQ ID NO: 29850 - DNA, 456 bp, Glycine max
  unsure at all n locations
gaatcaaccttgtttgtttgacattgtcaacaaatattgaccatggtgagcaagcaatttcaaacttcttaactcatcgaacccttgctcagaaggcaatccacgagactcctccatgcttccatgacataatcccatgcattttttttacccacaaaggttttatattttgccttcacattcttatcaatgtgaaaccaacacaacaagttggttgacttggggaaaatagttttcattgcattcatcaatgttgaatctctatcagtaacaataacttgagggattgcatcacgtctcagaaaaatacctcanaaccattntagagcccanacaacatttgttatacgttttcccttcaaataggaaaatgcagctgaaaatgtcatcctaattggtgtcataccaacaatgtcaagtaaaggaagcttgcatctggttgttttggatgactat

SEQ ID NO: 29851 - DNA, 298 bp, Glycine max
  unsure at all n locations
tggctggagaaactgataacattatgcttactggtgaaagcttgagatatagtactgatcaattgtactcccagaagagactcataaaggtctcccttaaggcgcttggttctgcaacatacgcgcctgcaaactctaccagatctcaacattctcaagacagttcattacctgtaactctaagattgattnttcagaatgtagataagtttggaggtgacatttattattcagctggtactggtatgagcgatataatccacanagatccaacctgtttttctgctctgcatgaaat

SEQ ID NO: 29852 - DNA, 396 bp, Glycine max
  unsure at all n locations
ctaagctttagtactacaactgaattttactgagcctgggtattcatgtacgatgcttagtggctgggtgaagatcctcagaaacaccttcatatactggaggaataattaataaaccaaggattgcacattccttgtgattccctttcaagccaaaaggaattagaggtggttctgcacctccacgagtttgatctattgcaggataaatagagccattattatttttctgcagatcagtttcttcagcttgttgatcttcctgtacacagcctgaaacagattgagtaacaactaagtcaaacttcagaatangaatgatctgcaaattatgaattgtaaaacagcactatgcatgcangggattttntgtcctcagtgggtgtcaatcttaat

SEQ ID NO: 29853 - DNA, 390 bp, Glycine max
  unsure at all n locations
agcttgtggtgtaattatacataagcttttcatccagcattctattacgtaacaaggaatctttttataattaaagtaaaacatataatgctaaattattttttagttaagatatccaaatatacaaaaaatatattagttattcaaaagtaagtatgatatgattgtcatattttgtctttttattagtttatttttctcatctaaacacaacattagttttttttttttaaaagcccgttagttctatttaggatgcaaataacaagatcagacaaataaagtaagttgaaggaagatatagagaggatgggattggaatagtagagaaattntgaaaggttgcaagattaatattatatatttaanatagatggacagatatcactt

SEQ ID NO: 29854 - DNA, 444 bp, Glycine max
  unsure at all n locations
ttgatgctctagttngatatctatcanagacattaaaaaattatttataattggttcacanacaaaatgcaaggctgctactaggtggattggtgttaaagtaagtcatttaaacaatgcttctaatttgtattttattattgtgtagactaatttgtacttaacattgaatatccaaatttcataatgtatctagtgtaatagacaaaaaggaatcactgaatgcaggtattacgttatgcactggatgtcaactataatcttagtaagtttcaagaataattgtgaaaagataattggttaattcacacatatnntcattttttgtaattgatattatatattattaacttatgtcttattatatcatgcagtatttcaatgatgctagaccattaanaccagagagattgaaggcacttcgcatctagtgggcaaactact

SEQ ID NO: 29855 - DNA, 408 bp, Glycine max
agcttattcgttgccccttgaattgattgccaagctctgttcgttcatgaatcctccgccgaattgattgcctaacgctgttcgtgcatcctccatcatcaaatcttattcggagccccatgaattgattgccgttcatgcatcctccccattgagtccggagccatacgaattgactgccaagctctgttcatgcatcctttatcatcaaatcttattcgaagccccatgaattgattgccattcatgtatcctccaccattgagtctggagcccgccgaattgattgcctagtgttgttcgtgcatcctccaccatcttattcgtagccccatgaattgattgttgttcacgcatcctccaccattgagtccgaagccttacgaattgactgccgagctctgttca

SEQ ID NO: 29856 - DNA, 386 bp, Glycine max
  unsure at all n locations
ttataagtgcgggtctgggatttgaaagtcaagtggtcgcgatatgtgaagatgatgttccaagaactctggatntggtccgaccatgccctcctgatttccagctgggaaattggcgggtggaggaacgccccggcatttacacaacaagcataatgtaaacctttacgggtttaaaagctctatagttgggcctaggctttagagttttcatttttgtaaggctttgtgtcttttgtctttgaatntataatacaaagatctttcttcatctgttcctggtctctacccattctcattcatttgcatgtntacttctttntctgaaacggcagatccgatgacgagtcccncgaaggtactaatacctgggacccgtctatcaa

SEQ ID NO: 29857 - DNA, 382 bp, Glycine max
  unsure at all n locations
agcttgtctcttagaggtccaggaaggacaaggcggccgaaggaactagttccgccccggagtacgacagtcaccgctttatgagcgttgtacaccagcagcgcttcgaagccatcaagggatggtcgtttctccgggagcgacgcgtccagctcagggacgacgagtatactgattttcaggaggaaatatggcgccggcggtgggcaccactggttactcctatggccaagtttgatccagaaatagtccttgaattttatgccaatgcttggccaacagaggagggcgtgcgtgacctgagatcctgngttaggggtcagtggatcccgttcgatgccgacgctatcagccagctcctgggatatccgatggtgttgga

SEQ ID NO: 29858 - DNA, 437 bp, Glycine max
  unsure at all n locations
tcanaccaaagcaattcanaatctaggtgtctaaaacccctcaatttagtggattntcaaggtttgaaaagtgaaaatgaaaatggggtaattntggagcaaactctcatctcaaacaagtctataacattaatctaaacttgctcaaactagttntacgacgaanacttcaccgaatcaaaatttgacccctcaacacccaatttaccctagaaatggctcttgctttcactttggtcactcattttcctcatttgctcagtccaagctttcccacaagtcctaaatgacattntaaactaggattaactcactttagactcccatttacactaaccccaaatttagcttctctaaccctcanaatctcacacttttctacctacaacattgtcattctcacatttaaccctaagtaactttccccttcatctcta

SEQ ID NO: 29859 - DNA, 385 bp, Glycine max
tatcatgcaagcttgtgttatgtctatagcaccccacctgacgtccccaaggtctcctgacccccgcgacatatctccaggtaccactctgtggtcaacaataaaagcaggaagtttcacccttcaacacttcctcatctcaagcttgtaggattatggggtacccatcacatgtggtactaagtggcagacgggcgatggtgcacaacatgttttccacatccacaatgcgcgcataaacccaccatccgctgttgcccacctgcaactgaactcacgtactcccacgtagcccatatactcgtttctctccacaccggtccccatcaatcctcccaagctttcacagcatccgatcagaacaacattcaaacagcacaagcta

SEQ ID NO: 29860 - DNA, 432 bp, Glycine max
  unsure at all n locations
taaagcatgcttgagtcattcatccctatgagatgttgctgaagtattggtgatcagaattgccattccttggattatanggttgaaccaagctcatgcttttacaaaaaggctcatcaagtcaagttgaaatatggaagtaaccgtcttgcaaaattggggcaaaagatgaatcgagtcacatcactgcttcgtctactgccaaacatatttaggattattgatgtccttgttacttccagtttcaccttgacaaagatgtcatggaccatgtcgaaaatctaaattgattcaaccccatatcttgcgtaaaaattcgcaatacttcaactgtacatcattcgcatgcatccatgcttttcattgggtgcattgctcattgcattctttccttgaaaaactacaataaatataataaaatgaacttaatca

SEQ ID NO: 29861 - DNA, 409 bp, Glycine max
  unsure at all n locations
agcttgcagcttccataaacaaaaaggagacaagaaagctntanaaacccaccaagaattcataatctacaacaccatcaaacccatagctntaaaatccttggttgaaaaaaaaaaaaaaaagaagcaatatttacaaatgacaaagtcaaacatgcatctaggcacatcacgtacacccattcaaaacatagaaacactagttttttaaaaatattcacaaccatgctttccgtcacgaccgcaacggtatcacaattacaattatggctacatcggccgtattaatctgcaattntctataatgtcaaaggatcacgatgaaatcgcgaccccgaccataatttagaatcttagaaacaatattgttgcagtgacaaataaagaattgctgacagaaaagcaaaaa

SEQ ID NO: 29862 - DNA, 288 bp, Glycine max
  unsure at all n locations
tagttgagctttagtntgcatgagtctttcttttgcagataatgttatttaattctgctttgtgatgctacttggttttgtgggggtgggtgtttacttgactgtactaagaagtgaaattgagtatttcgtttttattgcatgatacgttttcttttcatcttggcatttggtgcatttgacttatttgtatattcatgatcatccattaaattgataatgtgtattcttgttggagatttgtttttaaagatggaaagatggtgtcgcaacatgcccttttgcggg

SEQ ID NO: 29863 - DNA, 424 bp, Glycine max
  unsure at all n locations
ttggaaggtagtcatacctcacaaaatatatatatatatatatatatatatatatatatatatatatatatatacatatatatatatatatatatatatatatatatgtttagggagaaagataccttggatatgcatgtatgtagcaaaaaaaatttcacaaaatatatatatgtatgtttaggtagcaagataccttggatatgcatgtatatagcaaanatatctcacaaaacatatatacgtatgtttaggtagcaagatacctgggacacacatgtatatagcaaaatacctcacaaaaatatacgtatgtttaggtagaaaaatacctcatgagaaaaaagagagcgagcaaganaagaataagaagaaaaaaaanatagagagagaaataatanaaaaatatataanataatagagg

SEQ ID NO: 29864 - DNA, 412 bp, Glycine max
  unsure at all n locations
atccttatgacttgcctccggacttcacccnccgtgccaccccggaagatttaagccaagcccctacttttgaggggcaactcccgccttacgacgactatcccgggcaagacgatgaggaaggagatacccatcttggccccctgctccacctgaaagatccgtccccacatgaactaccccaaccaaacatagtccgccatgtcccggcctcacccacacccgtaaaagaatctgttcccttcgcggaagataagggaaagattgaggcacttgaagagaggttaagagcagtcgagggccttggcaattacccattctcggatttggcggatntgtgtctcgtgcccaacatcgtcatccctcccaagttcaaagtaccagactntgataagtacaaagggacgacatg

SEQ ID NO: 29865 - DNA, 427 bp, Glycine max
  unsure at all n locations
agcttgtaggattatggggtacccattacatgtggtactaggtggcggtcaggcgatggtgcacaacaagttttccacatccacaaagcgcgcataaacccaccatcccctgttgcccacctccaactgagctcatgtactcccacgtagcccatatcctcgtttctctcaacaccgggtccccatcaatcctcccaagcttccccaacatccaagtaactcaacattcaaacaacacaaaccatcacagccaagaaaacagggcaaaggcagaaaactctgcccaaaacaccaaccaaaatcacagcttttctcacttanagaccccagtaacaattccttcgttccaattcgttaaccgttggatcgactccaaaagtttactggaagtctctagtacataagcctacattntgaccgttgggat

SEQ ID NO: 29866 - DNA, 486 bp, Glycine max
  unsure at all n locations
agcttgcggggcttatgtattgtctaggacccacaaagtctacgtggcattctacttgacactcagagacatgtgtcaaccttccacgtcaatcctgttacaggagcgtggaaacctgacccctagtagttggccttcccaacaaacaggttatttctaacctaactaatattcaaatgtgtttgaatattttatctattggcatatattaaattatctataatgccacattatctacaaggtatgattatcttctacctttatctataattcanatgtttatctctaacattatctataaactcccagctattatctataagccgagaattatctacaaggctacaataatccctaanaacatcctcgctcaactaatataaatacaggttccattgaacaactctacacgacttgctcacacactcaacacacaacaacaagcctgtgttcctctctctcgctcatacgaagctcattacaaca

SEQ ID NO: 29867 - DNA, 372 bp, Glycine max
agctttgaaattttttaaatgctattaactcttcactcggatgtccgattcaggagtatcacatattgagacgctcgaaattgaacaacggaagctctcgagaaattgaaatggccataacttttcactcggatgtccgagtcaggtgcatcacatatcgagacgctcgagattgaacgacgggagctctcaagaaattcaaatggtcataacttttcactcggaggtcaaatccacgcgcctcacatatccagacgctcgaaattgaacaacggaagctctgcagagattgacatgctaataacttttgactcggatggtcaattgatgcgcatcacatatcgagacgctccatattgaacaaccgaagct

SEQ ID NO: 29868 - DNA, 538 bp, Glycine max
  unsure at all n locations
cgggcgagcgttgannccccttctatntancngacactatagaatactttagcttccttgtggagcttctatggaagctggatctttgagcttcgatgttgtccttcaatggtgattctttaccatggagatgcagcggaaggccaagggaaagaggataagggaagcgccattcactatggaataagcccaggaagaatgagcttcaccacccagaattggcttggataaaaagcttgaagaggatgcttttatggaggaaaagaaagaaagaagggaggagcacgaaatttgaagaataaaagaaggaaagaagtggaacttttgagtggatctcataanactttcattcatcaaagttacaacaagtggtacacatgcttctatttatagactanagagcttccttgagacgctttcttgagaaaactctcttgagaagcttctttgagaaaacttcctttggaagctagagggtagctacacacacccctctcataacttagctcacctccttgagaagcttcttaagagaatg

SEQ ID NO: 29869 - DNA, 421 bp, Glycine max
  unsure at all n locations
agcttaagaatatattttataaaatattataatctattaataaatttaatgttactaattatattaatcaacttttttaaagaatgaaatttaattaaaagagtcttatatttaagaatgaacactattttacacttcanatgtatcacctattttctaaaaattatatataataaaaaacttaaaaagcatgcatgcagataatattctttatgataagttaatatcgcatgattgttagatggcatcacttttttcactaaactcagatgcacttgtctcgtagatattaccatatgtatcaatgagcaaacatgcttgatagagttgttttgcggatacctttcatgagtgggtgacantgctaacgaaaacaaatgggtcttgttccgattgacatgtacttccaaccaatcggacc

SEQ ID NO: 29870 - DNA, 357 bp, Glycine max
  unsure at all n locations
agctgcatgccccacctaatgacatcttctagaaatgtaagtcaagtatggtagcggcttgattaacttataaattgctatggtagcattaaacgaccaagcatataccacaccatatttttaaatcttgattccttaatcaaggttgatttttttgtaatttgctgtgctcaagacaaaatatctggtaaccatttgactggcttatggtgcatactttgaagttagaatttggaatgaagaggaggagcataatccggttattcctttagataaatcccgccatgaaattcggagagtgcatncatttgtagttctgatatgcacttganagatngtggatagcaagtacactac

SEQ ID NO: 29871 - DNA, 406 bp, Glycine max
  unsure at all n locations
agcttgctcatattgttttacacatgaaaaagcatacacctactcattgtattgaattgaaaaaaaaattgacttgccctaaatatgatgttttatgagttatttgtgaaacaatatacgatagtatttttgtatgttagaaaactattttatacaaaatattattaaaggataatattttctcttaatgaagcttcttgaaattggtactttgacatatcttaagacttcagaaattgattgtttttttgcaaaaaaagacaatcaattaagtatcattattcaactctctttctagtgacattttgatccactttatttgtgtgtgtgtgtgttgcanaatttaatgtgtattaaattaatttcatattcaatttaatttttcattaaataaataaattaaagt

SEQ ID NO: 29872 - DNA, 407 bp, Glycine max
  unsure at all n locations
tcaggtcaatggccactggctgaaaccattcctccttagtggatgtagtggtggaggagacctccttacttcaccctacttcttttctgccatgacttgnggagttttctttcttctgtctccttctttacttttattgcacttgtccaaattttattgattgctttgattgttcttgatcttatgattgtgctacattgaggacaatgtgttgtttaagtgtgaggggggagaagattgttctttaattctgttgggtattctaagtttaatttattaggttctctagtttaagttttttaggttctacgttaactttgttattttggttntatgtttgtgtacaacattgcatgttcctctttgaatnttggttatgtagaggtaatgtgtaattggttttgaat

SEQ ID NO: 29873 - DNA, 374 bp, Glycine max
atttttttattaatggaacttatctttttggcagtaacacattaaattcaataatcggtgtaacacatcatgtgtcatttatgcgaccctatggtttgcttgatattgcttctgtttcactagctaattcattgactctcttcccatacattgatgaaatatttgagaagctggactatataggcataaactactatgggcaggtttgctttattaaccttgagagtgcactgtgcatgatatctgacatactcacatgacaattctcacatttattttaagaagtggtttcaggtgcaagcttgaagttggtggaaaatagtgagtacagtgagtctggtcatggggtataccctgatgacttataccacatg

SEQ ID NO: 29874 - DNA, 416 bp, Glycine max
ttgataccaactgaaactactatatatgcactaaaaggggggagggggttgaatagtgtctatcaaagaataaatattttcacaataatagggatagtatggataatacaaagataaaaactgattgtccactgagaatgaaaagactatgtaatgaagaatagagtgattgtctagtgacaaacaaaagggtcttaaaacaatttttcaaataagtacttggtgtaaagtgatgttagaaaatgtaataagaatactcgataaaacaatatggagtgaagtaaaaacacttggtttatactggtttgctcaacctaagctacatccagttctactttactcaccagtaaagggttccactaatcaaaaactgattacaacaagtattctaacctgtcacttcttgctttacaatt

SEQ ID NO: 29875 - DNA, 410 bp, Glycine max
  unsure at all n locations
agcttcacagttgntttatgacactccctaggtcatgacatgatctcatatactaaacttaattcgtgtgcttaaaaaacattttaatacatatgactgagaattgttaaaacttgcagctaacattctattttactagtattataacggagtctaatgtatgtgacctccttaggtccagtacggtgtgtaagtttttaacggtcattggatacagtgttaaaaaaattaaccatagagattttgagggatagggtggtcataaagtattgaataacaattgtcagcggcacccggttttaaaaattttgggtctataaaaaatactaattaagaattttttatatntaagtatttaaaattagacacatgatataatatgatcaaaaaatatatacattctatttcat

SEQ ID NO: 29876 - DNA, 391 bp, Glycine max
  unsure at all n locations
accccacaaaccatgatgcattgtttaaccttggattggnttcaaaaatggaaggctcgttacaacaagcggcagattgctttcaagctgcatatgaactgaagctttcagctccagtgcaaaaatttgagtgaccgagaccttgggagtactggtaagtttttgtggttgagttcaaccaagagcattatacaaaaaaccatgagcagcaactgatggaaaagaaaacgtacccatggttaatatttggtgagaaacctatatagtagttatatctagctacttatttatagatttacttcattatgttccaatggaatgtccttcacatttgacacggaaggacagaagtttggcttcccaagtggtatagaattctttataacataat

SEQ ID NO: 29877 - DNA, 388 bp, Glycine max
  unsure at all n locations
tttagcttatcggtttatgcacattgcataagcataaacggatctttgaggacttgatactgatcaacaaattaaaaaatatatatctttataatttcatgatcatttgtccaaggttattactgaataaagtggattattagatctagtaatattctgattntacacttacgcatttcataattaactttgcttataggttactggaagggctttgcaggactcagtacaaatagtgactaagttttctgagatggaagagacatattcttctcttgggtctcttacgtaatctataggttaagctttttgaaatatattttccattagaactcgtattttctcttactttcagcatctgtatactaaactatattctgcataatat

SEQ ID NO: 29878 - DNA, 401 bp, Glycine max
  unsure at all n locations
tagagcgagttcagcatactctttgtgttaacccacgcgcgctatctgaaaataaaccaaaaacaaagacagtctcattctcatagtacttgggagtcacacggtcggttctcttctctgtcactttggctacccactaagaaaaatcgatcctttcttctcttccatacgcttctttctcttctcttcattcatttcaatttgtggtgttagtgaaataataatgaaggggtagttgaacattcaaacaacccatgccctcatttttatgtgtgggtatggtctcattatcttcaacaaatacatagtacaattactacaatgctgtatctgcttctgcgtggntcttactcaatttcttctctttcttcccttcttcctcgatctcaatcttcccaact

SEQ ID NO: 29879 - DNA, 414 bp, Glycine max
agcttcatcctcagattcctaatttaagactaggcttaatttaaacaacattatcatcacaacatatttagaaaaccagaaccccacaattcatccctggtaatgtagttatttagccctgcttctatcaagttctacagcaacagtgcatttcccaatgctaaagtcacctaacaatacacacaaatgggtgatcagaccaagagcatgcaagaattaagcattgaacacacaaaacacaattaattagatattaaagctaattacatcaattgttccttagaaatccccaactagggtgtttagccagccatacaaagaaaccctaacacaaatgagatagagagtacaaaataattggtgcttacacaagaaaggtgatccctcctcctcttttaagcaccttacaatcac

SEQ ID NO: 29880 - DNA, 444 bp, Glycine max
  unsure at all n locations
ntgaaagtggattccttggtcttcatttaattacaaacacgtttgttcctnccgtgacttggataaattttaaagtttgttcaaccgaaatttaaaataaaaacagagggttgagggggcccaaattgaaagcaaaaataaaaaaggatcacaattcacgaagtagttaaaacttgaagagaataccataaaattaattatgcaagttgtccactagcccatcttgtccaatcaaataaacctaaactttcctcatgggaggtgccatgtgagggctctatctctccatantttattaatatcatattcaaaccacattctttgttagtaatctttcatttcnngttattagtcaaacttaacttccttttctttcattacccctcagattaatacgccacttatttcattctcanatatccgcttcaaaataatagtatatta

SEQ ID NO: 29881 - DNA, 379 bp, Glycine max
  unsure at all n locations
agcttgttttgttgaaccacctaattacttangattgaaggtgtttggatcactatccttcgctcatgttaaacaaggaaagctggatgcaagggttgcaaagtgtgtgttcattggctatcctaaagaagttaaagggtacaagctatggaaattgaaacctggtgagacaagatgcatcattagtagggatgtaacctttgatgagagcagaatggcaatgctaagcaaggagctgaaggataacagctcaagtagtgagagtaccaaatttgacgtggagcattctaagatttcagatcatggcagtggagatgctattgatcacactgattaagcagaaactggagataatgaagagctggctactcagcatgac

SEQ ID NO: 29882 - DNA, 405 bp, Glycine max
  unsure at all n locations
ntgtcgcctatagacgtcaggatgtactgactgttgcccttggatgaccagagcaccctgctcgtgtccgggctactagagtcggtgtcatgaccaaacaatactttggactggcttcaaaaagctctcacacatctacttccatggcttttgaagacctggagcagctgacaaaaaatcagggactagttggaggagtcaatcactaaaaaatgactcgacaactaatgctttcattcaaccaaatgcaatcctagatgcaatcatagatacaattatagggactcgtaccacctcctgagcctgaggttagtccttctgctgcctgtgtcgatccctcgaggaaggacccaaacactggtgcatcagataggcgcgggttgtatgtcaatgagaattctccct

SEQ ID NO: 29883 - DNA, 385 bp, Glycine max
  unsure at all n locations
agcttctatattctaatgtgctaacagacgattccacaaaccatcttgacttcttacaagtctttggagcatcgctaaacacattagacaatcaatgagagactntagtgtgaaaatttatcctaatcctatccctatgctcaggtttccacatcaccaacctctatatgaagagaaaaaaatgttggtataggagacactgaatatatttcaatgttggtataggaaacactgaaaattntatggcaacttgagccatgaaattgcaaaaagaagcatgtggtataagaaatatagaagcctcacatctaanagtgcaaattanataaaattntaattgaaaaactaaatctatgtttttggtacataacacttaattcacatg

SEQ ID NO: 29884 - DNA, 445 bp, Glycine max
  unsure at all n locations
tgggtatcatctggtgggtcagaaatggnttctatacattgactttacaccaagaaattcttcaagatctcacccaggtattctacagtctgaacttgagttaacctatatcattttgtgtgagcggtgaacctatgcattatgtggtggcttcattattttgaattgctttctgcatgccaataggggtatacatttcattgtatctgagaccaatggtttattctgataactaaggattttaaaacaaatgtgtccaacttcttcacttcgattaatggcaagtgaatattggaactttcccaattttatttataagggtttgtatagaaagaatcctttcacttgctggagatntgacaaactgcttgtaactggaatcagcatcgtatcttgtaatgccataacctctgtgaatggtatnggattatataccgtatttaat

SEQ ID NO: 29885 - DNA, 395 bp, Glycine max
  unsure at all n locations
agcttcttctatggattgaaaacttgcttaaatttgatgagtatcaagcacttaatatcaattgtcgtataaagattatgtcacaatggaaatatttttctccttttccaaggcatgaatgattttcacaatttagttggaaacatctaaattttttgaattgaagataattcgttntaaaattttcctaactcaatattgtttgtaaggaattttatatagttgattatcttgatggacttatggacactgacagtgggatacgaaacattgtttcaatgtttgaaattgctaatattctatccattntttaagtacatcatcaatctgaattctcaattaatgtgatgctnggtattcaactnttatttatcataattnttttcatgctaagt

SEQ ID NO: 29886 - DNA, 389 bp, Glycine max
  unsure at all n locations
tggtgctgatgccgcacggnctgatgatctcattcaatgtatgtgtttcatacgtcaagttcccttggttgtattgtatgattcaggtgcgactcattcatttatttctcgtgtctgtgttgaaaaacttgccttgcctgtgtcttccttgaaattttacttgattgtgaatacacctgctagtgggtctgttntaacttctgatgtgtgtttgcaatgtcatgtcttaatttctgatagacaatttcttattgacttagttgttctacctttgagtcagattgatgttattcttggtatggactggttatcttccaatcatgtcttattaaattgttntgagaaatctgttggctttcttgagtctggtgtgagtgaaagtgatatgt

SEQ ID NO: 29887 - DNA, 210 bp, Glycine max
  unsure at all n locations
tagcgcatgaacagagatgcgcttaacgcgaggcttgtgcttagcgaaaggactatntgtcagaataaaaatttctaagttatttttcagtcctttttccaagaaaatgaaacccttatgttaaacattcaaagattggctgatatactcctatgtacagatcatacagcaagttccaaatgattaaatgcatgaaatacaaagataaca

SEQ ID NO: 29888 - DNA, 456 bp, Glycine max
tctggtgactgggaagcacgttattctgttgttttccagatcggttccttcgccatgtatgtgcatatctgtattatatttgttgttctggttgttgtttgtattttgttttgtgcagaagataaaaaaaagaagaagtagagatgagagtcgtcattgcgaaaagggtaggacggacgaaatctgtgtcctatctttgctttcctcttatctccgatgagaggtaagtaaagaggggcaactgtcataccctaatttcgtccggggattattacttgatgacatgcaataaatgaagtcccgagacgtctcagaaatcaaaaggaagcaggcttgcgtgtttcgtgaaattcggtaatgtggcggaagtcgaacatatgtgtttctgcacaatccgtaagtttccgtgacttcttcgtaaggtaaaaaaggagtaaatacataatccgtatgtat

SEQ ID NO: 29889 - DNA, 496 bp, Glycine max
  unsure at all n locations
nnnnncctctgagcctttatgatgcgctgaaacacctcgnacccgggatcctcagagtcgacctgcagcatgcaagctnngaaaattttngnnnnncttcntctcgctaagcccatctactggcttaacgaaccttccgcttaacccattctgcttgcctaacgagccttccggtaagcgcaacactcatgggcctaaacgcgagggaagactcttggaagaagatgatctgtacaggttcgctaagcgcaccacttcatctcactaagcgcaccgcttcagttcatccgctaagcgagaaaggcacgcgctaagcccgaatcactaatctgcgctaagtagtccataagtgccgctagcgcacgagcacngaacaggtcacctatttaagccctanatcagattcagagaaggagtggactgggatcannagcttgcattctatggttctagaagagaaaggtccagtctaagagtttgagagattgctggtgan

SEQ ID NO: 29890 - DNA, 454 bp, Glycine max
tatgttgatgctatttctgacttaaaaatatttagaggtgagtcttccagttttgcaagttaaggaatttttttagaattatttaattcgagtaataatttttttgttagaatgaagtatcaatgtctagtttaagtttaatagtgctagcaaatagatttatttatttttatcattcacaaaatatttaattgaagtaataattgtttttttagataaaaaattaatatgtgaagtttaagcgtattaatttttgtaattaggttttttactttgaagtttttttaattatgtttaattatttacaagccttacaaatatttacctgattcccttctagttttttgaagttagaatgaaatttgaatctatattttaagttaaagttagtagatgaagcaaccaaatacagttatttatttaaaaactactcttgttatgattaattattttt

SEQ ID NO: 29891 - DNA, 410 bp, Glycine max
  unsure at all n locations
tcgacccgggatccttaagtcaccgcggctgcagcttagcattgatngnnccatgcttctcatttgatgctccccttatctctaacaatctnccccttttggctttgatgatgccaacctttaactatgacattgagtgcattggagagtattgagatggattggaaacatgatcttattaacacttaataaaggattaattcatcatgattgatgcaaccctaccccccaagggcattggatagaagactccaagaagattgngccagacaggcaagagaaggccctagggttcttatgagctttagggtagaatttgggcccatgggctaagtatgagcccacttatctttgtacatattagattangatttcattatttttgggccttgtatttanggttctataat

SEQ ID NO: 29892 - DNA, 463 bp, Glycine max
  unsure at all n locations
ctttgatgattcattacttgtcttttcgaggagcacacaatttctggataacttgtcttcatgatttgtctttatcttcatagttctattatttcaatcttgtcactgatctattgtggttaaactcgtcgggtcgccacagtggtttccatcacaatactcattgcgcattaactcgttgcccttaaagggtcttagcattaacttgttacccttaaagggtcttatagtcgtgtgattgtacaattcatagctcataactcaatgcacacaacatcttaatgcacacatgtatattgcaagtcaatacatactcaatttatcacatatattcggtctcaatcacaatggaattgtatattctcaaagtagcatgttatcacacctcatgaatcatacacactntacctatgaactatgaaatacacacaactactcaattgtttcaaagtcatttacctcg

SEQ ID NO: 29893 - DNA, 412 bp, Glycine max
  unsure at all n locations
agctntggggctgaanaacnattttacagcaccaaggggcnagnttaggctctcttctctcttgtctctattctctctcctctcctctctctctctttgtcgttatagttttagagtgctactctcttttccgttttagtcacttttcgttgtagcaataaaatttcgttcttcaatctataatttcgttctctattgattaatggaaggctaagtctccaacgttgttttctcttgaggatcaagcacaattctctctgaggttctattattactattaaattctgatccagttttcctcttcactaattactctgtatttgttgctattaattcatgcatgcttagtgcttgattaattgtctctgtgcttcaattacgttcatgcttaatgatcatttatgattaattg

SEQ ID NO: 29894 - DNA, 456 bp, Glycine max
tatcggcctgacaaacccaaacagcgatctaaagcctcagattgataagtaactgttactactaaagacataaatcttaatgttactactaaagccatagatcattgatgtcatttctttctatgatcaataatagttcactcacataaaaaatttcagagggcaatccaaccagacaaggagccatgcaaaacaaggtaaaagtgtcgtgcatttcagttgtgaaaagaacagaagcagcataacatagaaagaaggccagcaacaccacaacaggacctcacaatcagactagacagacaatgggatctctttgatctagagatgccaaaagaagacaggttccagcaatacaagtgttatcaatggcatatcacgcaaaatgacaaaccaataacccagtatatcatataacagatagtgttgcaagcatatagcagaagtcttattcacata

SEQ ID NO: 29895 - DNA, 426 bp, Glycine max
  unsure at all n locations
agctngaaacttgatgggaattttcaaatgtnngaatgagaaattgctgaactagaggaacaactcaaggttttgaagtgtgtgaacttggaggaagctgatcatgagaataaaagaaagatagaaatagaagagatagaagaaaaattggaggacatgatttttgatatgtccgtaaaagatgatgaaaatcaagctttgaagaagaaggtacaagaagctaaaatcgagctagaagatgctaggcaacaaattattaaggtaaatgttctgttctgagaaaatccttattctaatccttatactaaggagacactntagttcataattntattaaaccttttactntaatttttcaacttcacaaaaagtaattcattttttacttttactttgtatcataaaggttatttaagtgaataatat

SEQ ID NO: 29896 - DNA, 429 bp, Glycine max
  unsure at all n locations
ctaagcttcgagagaaanacctaccgtgagagcaagaatgagagtgacacctataccaacagtgagagtgtgaccgatagtgatagtgctgatactggtttcagtgccgcgagagtgataccgatagcgagagtgacactaaaacctagacgatcatgagcgagactgacgacaatggtttcagcgtcacaagagtgagagtgagagtgaaagtgacaaagggtttgaggttgccagaagcgtgagggagatgagtgaattgccaaaagcacgaataatattataaataggacaatacaatgtcagtttttcttttaaaaaatgatattagcatgagttggttaatattggtttttgtaaaaatcgatgttaaagaagtcacgagaacatcgatctttgaacaactgatgttaacaaactaacgttatc

SEQ ID NO: 29897 - DNA, 491 bp, Glycine max
  unsure at all n locations
aaaaactgtgagctctgtgaaccgtttgaatacaggcacccgggatcctaccagtgacctgcagcatgcnctgaggcatgttagcgncccactcgctcgcccaggcgagctcagctgtcccagccgagcaaggttgtttcctccagaagcaacagccttctggacgaatgatccggaacgcccaggcggccacattgctatatgtacccccttattactaaatgcacccctcctagttttttgggtaattcttttccgtaacgttacgaaactctacgaatatcgagcgatgcttatctccttccgcaagttacgaatccttacggattatgtatttactctntattagtattcgaagacgttacgganactcacgaattgcgcaaaacacctcttttcgatttctgcacattacggaattcacggatcgcgcaagcctgcatactttatgattctgagacgtctcgtgactacatttattgtgcaacaat

SEQ ID NO: 29898 - DNA, 429 bp, Glycine max
  unsure at all n locations
caacatgcgaacatctcaagctatcacagccaagcaaaacagagcaaatgcagaaaactctgctcaacacatcaaccaaaatcacaggttttctcacttaaagaccacagtaaaaattccttcgatccaattcgttaaccgttggatcgactccaaaattttactggaagtctatagtgcataagcctacattttgaccgttgggatctactagcagacattgagaactcattctgcactagactttccacagccaaccacacacaagcattnttctgcacttgtgcaaaattctgctgcacaatttcacagcatatattctgcataagtgcagatttcgaatatcacacttgctctcatccaatcttgcccaaatcaattcctacaagtcccatatcatgtatcaatcatgtctaaaccaaattcaag

SEQ ID NO: 29899 - DNA, 442 bp, Glycine max
  unsure at all n locations
ntgcatgtctagggtttctagagagagaaaggtgggagttctagagagttttgagagattttgttgtgtgaagatctgcagagaccagagcttgaaacaagagccggtttgagagcttgagatgagtttgtgagtgattgcgagatcctagaggtgaaggagacatcttcaccacttgtatatgtgcaatctttcatcttgttcttctctttgttcttaagaaggctttctggtatggaaagctaaatcctttgtggatcttccctggaggtacctgatgtaaatatatttctatctatctaatgatgtattgtgtgttctctgtgctatctgcttttcattccagtatgcctttaccttgatcacgtagatgcatgctntgttagggtcattcaatactggaaactggtctgacgctaaagtccttgatagtgcacggctg

SEQ ID NO: 29900 - DNA, 402 bp, Glycine max
ttctgtgtcttctctaaataacgatctactcttgtagaccccttctattggatctgtgttaacttctgatgtgtgtttgaattgtcctgtggagatttctgggagaatattcttaatagatctgatcggtctttcttagagtcacattgacgttattcttggtatggactggttatcttgcaaccatgtcttgttgaaccgtttagatataagagtggtgtttgacgattctggagtgagtaaagatatgatgtttatctctaccaatctgtgacatcgtttaccgaagatgcttaagtatacatgatcttgtctagcctggaaaagatacaaaggtttctatgttgaccctcctgatgtcaacactatctgaagtgttcttgaggaatattcactctccac

SEQ ID NO: 29901 - DNA, 363 bp, Glycine max
  unsure at all n locations
cnggcacannaggaggngaatgtcaaaggncaaaggcaccgcgaaccgacnaccaaaacattggaagacgaaacagcacagagaaaagaaggggaacgaaggaaacacaantcgaaaacagccacaaaacaacggtgctactggaaataatatcccactctattgtccaacggaacgcccagagggcatcgttgcttaaaattgacgatcaagcacaataatagttgacgttcgatcagtaatattatattctgagaacttgtgatgttaacaattactctggtatgatgtagtcacaatgaagcaaaggccgataaccacatgacttaattacgacccgctatgatagcaagataccgagtc

SEQ ID NO: 29902 - DNA, 444 bp, Glycine max
tcggcagctaaagtattactcaaaagataaagatccaaaatcaaatcaatcttataaataaaataaagaatcaaaattaaaaataaaataaaaaatcaaaagtataatttatcctaaattatattgtagatttcgaataaatattttaaattttaatataataacgataaaagaaggtaaactaaaaaataatttaagatgattagaagatcaatttttttactaattgtgagggtagtctaataccttgattttcaatatttcacgtttaacttccttgatcaccgttataattgaaattgtcatttaaaacataaagattaattaaatgaactttatgtcaatctctaagcaagtttcaataatttattagattgaaacttagaccgtactgtgaatcaataaatgctttcacaatatgtgctgtgagccgacaatcaaata

SEQ ID NO: 29903 - DNA, 427 bp, Glycine max
tgaacgtaaactgctcgagaaaatacccaacttttaagtgaaatgatggaagaaagagaaagatattgggaaaaaatggaaaaagagaggagaagattgagaaagagaatgagaaagatgaaagagtgggacgacctcgatggaacgtgattggcgaagaagagaagtggtggctctggcggtgcagcgagcaagaggtgaaacagtgccgttcggggtgggattagtatagaaatgaggaagtgtgtatagaggggttctagaacggtcgaggacatggatacggtcctaagagcaataacaccactctcaaatgcggaagcataatatacaggggttatgaaaatatcataaacacccctgtttataccgaatgtcaattttatatgttgtccaatttataactgaaccgcctattattgcttat

SEQ ID NO: 29904 - DNA, 222 bp, Glycine max
gatggtgcaacatatttctttggcctaataggaactccaatatttttacagcttctaatgttatgattggtttggccacaccttccacatgtaaactcagccaatttcctctttagcttatgtcctgtgacattgtcctcatctacagatctccttctatgattctttggccttactctatggacctttttatgtggtggaacagggtgtgtatactgtgtc

SEQ ID NO: 29905 - DNA, 441 bp, Glycine max
  unsure at all n locations
tgttctanatatacattgatgtttgtatgggaggatgttacatgccattattgctttaagagtaatgtcccactaaaactaactttccaaatgtttgccttcgcaggaatggcaccgaggaagcttgcctcatagaggtccaggaaagacaaggcggccgaaggaactagttccgccccggagtacgacagtcaccgctttaggagcgttgtacaccagcagcgtttcgaagccatcaagggatggtcgtttctccgagagcgacgcgtccagctcanggaggacgagtatactgatttccaggaggaaatagggcgccggcggtgggcaccactggttactcccatggccaagtttgatccagacatagtccttgagttntacgccaatgcttggccaacagaggaaggcgtgcgtgacatgagatcctcggttaggggt

SEQ ID NO: 29906 - DNA, 401 bp, Glycine max
  unsure at all n locations
agcttatcgatactgaancncanncnnnnaacacattgtctttttcgtactaaaccaaaacccaattcgctaactttttaccaaaatattaatttattaattaggaggggcatacaaggaaatatattttcaaaacctatttaggaataaatgtaaataaaatacaaaatcaaatctattgtccgaagggagcgccgttgggttttctatcctanatcctaccattttcccttttcataattctcactctccgcaatattattttccttcaaagtcattggtaagttaaagacattttttttttataattctttgcccataaaaaanaaataattccatttatcgaanagtgaatattcaatgtaaaccacaaccttaattgaacattatattcaagatct

SEQ ID NO: 29907 - DNA, 441 bp, Glycine max
  unsure at all n locations
nggttaacaatatcctttatataatataaatgttaattaatatcttanaaatactagttaatgaacttaaagttgaaatacggaagataaacaattacaatgttcatattttttatgatttatgcatttaatattcttattcttttaattccttaactaatatctagaagcgctaattaacaagaaccatataagtaaaccaatgagtaactaacaatcccgttataaaaaaaaaggttatcatcatgtcttttttggactaatcatatcatcctatgatttcattcgacaaataataaagttaaaaatgaattgaaattaaaatacataggaccgaaaaggagttatgagttaatatatttaattaagacacatatctgttaacaaaattgatacagcatgaatgaataatgcgtctcagcgaacaaaatcttgatggtt

SEQ ID NO: 29908 - DNA, 311 bp, Glycine max
  unsure at all n locations
agctntgagcctaaatcctgactctccatattccttngacccaggtgagaatgccaatccttaccctcggaagcaaaaagaatggagggaanattccaatcaaagaanaagagaaggaaaatttccaatgaaagcaaaaaagaaatgaaggaaaattccccaatcaaagagtgggagaaagcaaaaaaaaggaaaagaaggaaaattccccaatcaaagagtgggagaaagcanaaagaanagaaaggaaaattcccaatcaaagaatgggagaaagtaaaaagggagaagaagaagaaagaaagctctga

SEQ ID NO: 29909 - DNA, 456 bp, Glycine max
tctagccaaagaaagagggagagaaagagagaggggggagcacgagattgaaggaagaaaaagggagagaagttgaactttgagttgtgtctcacaagactctcattcatcaaagttacaacaagtgttacacatgcttctatttatagactaagtagcttccttgagaagctttcttaagaaaacttccttgagaagcttctttgagaaaacttccttgagaagatagagcttagctacacacccatctaaaaactaagctcacctccttgagaagcttccttgagaagcaagagcttagctacacacacccatctaaaaactaagctcacctccttgacaaaatacatgaaaaaacaaaaaaaaagtccctactacaaagactactcaaaatgccctgaaatacaaggctaaaatactatactactagaatggtcaaaatacaaggcccaaaag

SEQ ID NO: 29910 - DNA, 417 bp, Glycine max
  unsure at all n locations
agctnanattatcacancancgttttgaataatganaagnnactgtgtgagttgatttcttttgcggtatccaatataataaaaatatgtgattatattacaaaatcaattcgaatccaaaaattggtgttaatatttttatttgaacccgtgcgttgcatgggttgttggactagtatttgtaacgactgggatcatatatagtttatagttaagtaggcacacagtgaanatctttataacgaagccgctgtaaacgttacaagcggagagccgtatcaattcgcttttcatatgtaatgtgtnaagcaggcattgcaatattactgatttctttgcagctagagtttaatttatattatgttatcctatgcattaataatatgatacgatgaaaaaatattttcttattaatat

SEQ ID NO: 29911 - DNA, 456 bp, Glycine max
gctaataattattgctcattctttacagatattgaaaataacatctctaagattcttgagcttattaagaacaaaagccatagcaaagaagatgatgagaaccacaaacattctacaagtgggacagaacttgttgggttaatagaggatttatacaagaagcaacaatcactttatgccatatatgattgtgtcattgaagagtttgagaaagtagtttctcgcaaaagaatcaagaaggttgcaatgtcttcctctgactcggactctgaatacttttccccagaggaagtagatggcattaagagaaagtcagataaagaatattacagtgtatcttatcttggcacccttaagcaagaatctgatagaggtgattgtacagatgaggttcctaagattgaagcaacaaagtttgaggaacaattaacttcactagcgaaagaggttgagagt

SEQ ID NO: 29912 - DNA, 406 bp, Glycine max
  unsure at all n locations
agcttgtagcattatgcanaccattantaacttttagctcgganatccganggagnncccgaatatatcaagaccctcaaaatgaatacaaaagctcttaacaaataaaacgaacataaactttctacacggatgtccgattgggcaacgtaacatatcgactcgctcgaaactgaataccaaagctgagagcaaattcaaacaacaatgacttttacctcggatatcccattgagtcccataatatatcgagacgttcgaaattgaatagagaagctgtgagacaattctaacgacaataactttttactcggatgttcgattgagtcccgtaatatatcgagacgttcgaaatttataacggaagctcgtagcaaattcaaacgacaataactttgaacttgga

SEQ ID NO: 29913 - DNA, 458 bp, Glycine max
  unsure at all n locations
tgagatgaggaagtgttgaagggtgaaacttcccgcttttattcgttgaccacagagtggtacctggagatatgtcgtgggggtcaggagaccttgnggacgtcatgtggggtgctattgcccaaaaccaagcttgaccaatcccgacccaacccgggcatagtcggtcagtgagaacctgtgatgtacctaaacaggcgagctcctggcagtcaatagataaaaggaacaaagaccacaaagcaaggaggcttgtgtggtggctggccagctgtgaactttgattgatatgtgggttatggcctctggtaatcgattaccaagggtgggtaatcgattaaaaggctaaaaaatgaagacaggaggctaagatggtctctggtaatcgattaccacggtgtgtaatcaattaccatgcttgataacgatgtcaggaagccatgatggcttctggtaat

SEQ ID NO: 29914 - DNA, 429 bp, Glycine max
  unsure at all n locations
agctnggccnctcagnggnnagttggtatgttgacncccnnaantnggggangaagagtgggcacactanaagaatctaaaacttcaaaacctggagagtcgatcatcataaccacatcgagtagttgaaactcactcgaaaagaaagtgagatttaaaaataaatgaattcaaattacggtgatgatctgttcatataataaagaaaatattttaaagagaaactaaagataattttattagtcaaaatagattaatatgatcaagacagtaactaataactcanatgcgcatatntggcctttgcattcttaagaaaaatctatatatatgttaatccattagagtgatagatagagtaaatgcaagataaatttaatatgcgtcaataaagtctaaattaacaattttatcgattcttgatatatg

SEQ ID NO: 29915 - DNA, 464 bp, Glycine max
  unsure at all n locations
tactcaagctttgacctacatgttccttatttcggattcatgtgttactaggctatgacaaaaaatattgaagatcaagagtgatttatcctaattaaattatttccatttctaattatttttttagaagggcacaggggaatccgagatagctcttaatacaacagtgcaaagctgctacctatatgatatatatgtagttaaaatctgaccctgcccatgtacgttaagtaataagtgggtcgagcctaaatctgtgcctgaagaggcatatgatttcaagagttggacctatagtgaatttttaaaaaattcccacactagttatctgacactttcatttatgatgaggagaatatgaagtaatttctatgaaggtgcttcacttcatgagtntaagaagtgcatcatatcaatgagtagttgaattcgatgatattggatataattttcttaaataaata

SEQ ID NO: 29916 - DNA, 53 bp, Glycine max
taatgcatgtcatacctactaggcactatacgttgctaatccattatgaccac

SEQ ID NO: 29917 - DNA, 497 bp, Glycine max
  unsure at all n locations
aaaaaaccagttaaccccgtcgaagccactgacatcagggcgactcagctcggacccgngatccttagagtcgacctgaggcatgttagcnaacncttcataattcgcaacacaagaacctgggaagctgaaaatggccctctcttaaaacataaaccaagggtagaaggtcccataagaatatctaaaatgcctttaataaaagaataatgaacctcccttggttctttttggaaccctgcacataagccaacaccgaatattaaatcanggttggatgttgaaaggatagcagtgatccaatcattgctttgtattgggtcccgtcctcctttttagattctttgtccaatccaaggtatngtggtggatgcatangtgtcttcatctctttttcattggccatgtngaaacttcttagaagtttttcacatacttgggttggtgaaatgtaatncattgctngttgctatntttgcaatccaggaaaacattan

SEQ ID NO: 29918 - DNA, 449 bp, Glycine max
ctaagcttctataggaatcttcttaaggaagcttctcaatgaggtgagcttatttatgagaggggtgtgtgtagctaagctctagcttctcaaggaagttttctcaaagaagcttctcaaggaagttttctcaagaaagcttctcaaggaagctacctagtctataatgtgtaacacttgttgtaactctgatgaatgaaagtcttatgagacacacttcaaagttctacttctccccctcttttattctttcaatttcgtgctcccccctctctctttctctacctctttcttttcctccattgaagcatccttccaagcttcttatccaaggctcatcttggtggtgaagctccttcttccatggcttattccctagtggatggcgcctgccttctcctcttctcctttgccttccgctgcatctacatggtgaaaaatcaccattg

SEQ ID NO: 29919 - DNA, 213 bp, Glycine max
  unsure at all n locations
gctcactacaagccttaagtgaaaaaccatgatattaccatatccttaaggattnnttggagcttggatttgttttgggaataagtgtggggggtttttgtttcattggacaacttgttttgttggctatgcttcatgatgtattttgggccatacttgatgtacattgtatattgggtaaatgttggacatgctgaatgaaatgttgtttct

SEQ ID NO: 29920 - DNA, 442 bp, Glycine max
  unsure at all n locations
tctgcatgtttagagagttctagagagagaaaggtccaagttccagagagtttgggagattntgttgtgtgaagatctgcagagaccagagccatcctgagagattgagatgcgtttgtgagtgattgtgaggtcctagaggtggaggagacatccccactacttgtatttctgcaatctttcatctttatcttctgtttattgtaaaggaagtttccctgttatggaaagctaaatcctctgttggatcttccttgtaggtacttgatgtaaatatctttttatatgtttaatgatgttntgtgtgttcattgtgctatcagaactgcattctacgatgcttttagcttgatcacgtagatgcatgtgttntaaggatcattcaacagtgggaactggtctgattcttagaacttgataggacagggctagtttgttgtat

SEQ ID NO: 29921 - DNA, 418 bp, Glycine max
actcttctgactcatgatgtagatccatgtctttcttgagtattcatcaattatggacaaaaaataccttccaccacctatagaagatactcttgcaggcccccgatagtcaagatgaatgtaatcaagagtctctttgagggtgtgaattgctttatgatattaaatcctatgttgctagccatatacacagtgctgacataatttcagttcatccaatctttgatttcccaacagttgctgtttttgaagtatcatcataccttcttcagtcatatgtcctagcctcatgtaccacaattgagtttagtcaggtatgcccttattggatcttgatggaacagttactataccatcatcaatacatgttgtaccttgaagtatatagagattacccctctttatacccttcatcacc

SEQ ID NO: 29922 - DNA, 420 bp, Glycine max
  unsure at all n locations
ttagcttcaagactaatggccttagcaaacttcttattcccaaaaggaaattcaatanataggcctcctatttttaatggagagggttaccactactggaaaacccgaatgcaaattttcattaaggcaatagacttaaacatttgggaatccatagaagttagaccttatgtacccaccatggtggctagaaatgcaacaatagagaaacctagagaatagtcgactgaagatgaaagaagattagtgcagtacaatttaaaggctaaaaacatcattacttctgccctaagaatggatgaatattntanggtttcaaattgtangagtgctaaggatatgtgggacactctacaagttacacatgaaggaacaactgatgttaaacgatctangatanatactttaactcatgagtat

SEQ ID NO: 29923 - DNA, 440 bp, Glycine max
tctgggacgcttactctggatacaactagatcatgatgctcgctccagatgaggagaaaacgacattcgtcactaaaagtaccaatttttgttacaaggtcatgcccttcggccttaaaaatgtaggcgctacataccaacgattgatggaccaagtctttaaacaatagattggacgaaacatcaaggtatatttggatgacatggttgtcaagtctcaaagcatagtccaacaagtggtagacctggaagaagtctttggggaactccgtaaatatgacatgtacctcaaccctaaaaaatgtacttttaaggtgggcggaggcaagtttctcggcttcatgatcactcaccaggggattgaagccaacctcgacaaatgcactaccatactagagatgtgtttcccgaccaacgtccaagaagtccataaactgaac

SEQ ID NO: 29924 - DNA, 391 bp, Glycine max
attgaattatttaacatgcccaaaataagttctctaatccttatgaatctttataattgcatattacataatggagaccggataaactatatatgaatttgcaatttattatgtctatttcttcttactaatatagcaatatacctaaatttcttcttgaaaaaattagtgcatgacacattaatctccaatactacagaaatattattgtatttagttcttaatatcataaattgcagtcatataaaacatggtacactttacgtttcaaaatgactaatataaccaatatttgattgtttttaaagattaacgtgagagtttatatgtttaaggattaacgttttataacaatagatatggctgctcggcggttactctatgtcttaac

SEQ ID NO: 29925 - DNA, 387 bp, Glycine max
  unsure at all n locations
agctttcgaataatagaggaactatcttcagttcgtaggttgccttcatcatcagcgggttaagcaccctttntgacccaagagccatcatgctctttgcggtaatcaaaagaagcaatcacagcagcaccaattaaaaaagatctcttgattggaacataaggttcagaatcaagaggaatttgaaaatggcaaaaaaaagagtgacaaggtgtggatatggcaatggagcatttaatcgcaatgccttatgcatgcgatatctgacaaggtgtgcccagtcaagttgacgcccggtatgaaaggcccacatgataacaagatcttcctcagaaacctgggcaagaatggaagatcgtggaagcaaaatccgcacaatcagataat

SEQ ID NO: 29926 - DNA, 442 bp, Glycine max
tagccaaatcatactttacaagttgcatccctattagttgcgaatcaaaattattgatccaagtaatgatctttgagttgtttacttcttaggtttccaactcatttatagatttcccattgtgttcatttggaggcttagtaagagttccatcaacatagccctactttctattgcctttcaaaaaaaaatttcattacatctccaataagaataacagagcaaaatagattaccggaaccatcgtgtcgaaacagaaacaagtccgcaacaaaacagagaaggttgcgatataatagatcttcgtgacggagttggggtcacgaatgcagagagagaggcagaactgggtcaaaaaacaaatttgataccatgttaacattgagaacgttacagttattccgaattaggaaccaagctctttgatagcatgttaacattg

SEQ ID NO: 29927 - DNA, 469 bp, Glycine max
  unsure at all n locations
ttcaatctcagcttgtaggtttgtttatattatgttgtggtaacaaagtttctggcacacgactgggtagctgctgtcagggagcttcagagcttatttctaacctagatgtcttttcatttggtcttttttttgtttatttatttttctatttaaatttttttgtttcattatatactattggtggtcaagatttctcagaacaattgcttaactaaaaattttggtgcactcttgaactctagccaatatacagaaccttttaataggttaaagttaccagttagtgtgggattcaagtttatgattgctntaagcactagtattcttttaggtctctcttaagttggagaacgtagatagagagaaattgcttaacagaattacaattaagagaaaggaaatntgaagtgggaatgagagaatctgggttatctctatatatgtaataatctgtccatgcanggat

SEQ ID NO: 29928 - DNA, 405 bp, Glycine max
  unsure at all n locations
atcttccacagnnagctccaatactttacctgccatgtngcagatccttcataaaagccaggtcatcatcatgcagaacctatagaactcangccctgcacctatcatgagcatggaaaagttcattagccaagtggaatgaccaggagtccaaccttctcctttgggaaggggtgaggcctncgcagcccaagagcctgtgcccgangatgaagacgagtctcntccccctgagcctttcatttatgagccagacacaaagattgctcangaggaggcaccatcaccagagcttattcctcagtcatcaccatcaccagctttagtccttgaaacccagagccatctgcaccagcaccgatacctgatcagcctcttgctcangaccctctagctgcactaatg

SEQ ID NO: 29929 - DNA, 424 bp, Glycine max
tgaatttggtttacacatgattgatacatgatttgggacttgtgtgacttgatctgggcaagattggatgagaggaagtgtgattttcgaaatctgcacttatgcagaatttttgctttgaaattgtgcagctgaattttgcacaagtgcagaaaaatgcttgtgtgtggttgactgtggaaagtctagtgcataatgagttctggatgttcgctagtagatcccaacggtccaaatgtaggcttatgcactatagacttccagtaaaattgtggagtcgatccaacggttaacgaattggatcgaatgaattgttactgtggtctttacgtgagacaagctgtgattctggttgatgtgttaagcagagttatctgcctttgctctgttctgcttggctgtgatagctagagctgtttgaatg

SEQ ID NO: 29930 - DNA, 421 bp, Glycine max
  unsure at all n locations
agcttaaacnctaaaacaaaggtgtagaatatgganaagtaagtgagtgatcaactagganaaaatgtgtgtatgtgtttcttgatttcaaggttgtcatcatcaaaaangtggagattgtagaagcaagcttcacgatgttgaatcaagattgattcaagttgttntgatgataacaaagatgatgacaaanagcccatgagaatgatttcaagattgagtcaagaacaattcaagaatcaagagacatttgatttcaagattcaagagaagatgaattcaagattcaagagaagaaatcaagaagacttcacaagggaagtattgaaaagatgttttaaaaaacaaacatagcacaattttgtttttcaaaagaagttttcaccacattttctaagttaccagagtttttactctctgg

SEQ ID NO: 29931 - DNA, 455 bp, Glycine max
  unsure at all n locations
tgccgcccagctcgcccaggcgagcgaggtcacttcctctagatgcaacagccttctggaggaatcttctggagggcccaagtgggcctggttgctatttacaccccccctatttactaaatgcgcccccctttctattttgtaattctttttccgtaacgttacgaaactttacgaatttcgtaacgatacttattttccttccgcaaggttacggatccttacggattatgtatttactcttttttagctttcgaagaagttacggaaacttacggattgcgcaaaaacacctcttttcgacttccgccacattacggattttcacggatcgcgcaaccctgcttcctttagatttctgagacctctcgggacttcatttattgtgcaacataggacgccaaatatctcanagcggctaaccaaagggtgcatgtcatcaagtaataatcccc

SEQ ID NO: 29932 - DNA, 416 bp, Glycine max
  unsure at all n locations
agcttggagagtangcttcaatgtatganaaganagagggagagaaagagagaggggggagcacgaaattgacagaagaaaaagggagagaagttaaactttgagttgtgtctcacaagactctcattcatcanagttacaacaagtgttacacatgcttctatttatagattagataacttccttgagatgctttcttgagaaaacttccttgagaagcttctttgagaaaacttccttgagaagctagagcttagctacacacacccctctaataactaagctcacctccttgagaagcttccttgagaagattcctaaagaagctagagcttagctacacacacccnctataatagctaagctcacatccttgagatgagaagctagaacttagctacacacccnctataata

SEQ ID NO: 29933 - DNA, 460 bp, Glycine max
  unsure at all n locations
tcatgtttttggtatgtacgcgaaggacttcaagtcttccaacttcatcaggaacaccaatatcaatttcactatcaaatctaccagacattttcaatgcagggtcaatgctatttggtcgatttgtaggcagtggcagtgaaattaacctcaactatataccaaaggatatccacctcatatgccgcttggggctataatctacacataaaggcacaactaaaaatctattgaggaccacgtagagaaactaaagccaccaataagtgtaaaatgctcagatcaaagatagcccaccaataaaaatgagatttttattatatatgtatgcaaaattatgaaaggaaaggtatatttgtttgataatcctagctgtcaaggaattactttntataaccattagattaaaaaaataagaggtgatataaggagtaacaaatttgtctagatataaaaatat

SEQ ID NO: 29934 - DNA, 418 bp, Glycine max
  unsure at all n locations
agcttcgaagctatgggnggattttctttcttgctnnggaatnngngattgcggtccttttgtcctccatgtttatctttacgttgcttaaccttttcttgatactatgtttcttgacagtgcaagcgacactatacctagggatgaagttgatcttataaaggatgttntatcgtatagaatgagagtgagagaaacatgagagacagaagcgggcttgttcgttttgtccagattcgttacttaggccacccacacgtgaacaagaatgatccgtgaattcaccctagcgtgacacgtgcttgcatatcagccacgattagctcttattaactctccccaattctagcttgaacttctagcataaccatcgactagtaaaatcaagctacttaatcctgccttgtgtacctgcact

SEQ ID NO: 29935 - DNA, 456 bp, Glycine max
tattgaataagtgcttaattatgttgattagtaactatcaaaatggtttaaaagtggaagtttacctggctattaaggcaaggatgattgcggaagttaccattaacagcctttagtagttctacaagatggttagggtactggcaagaaaatgctcgtggtactatatctctgtgcaatgtgattgcctgaacatggctccgtggcaatccaagcatgtcaagtagagtgtcacctccacacatgatggatggtgccccaaaggttatgacaggaagcagagaggagaatagcgcttccttccttatcggtagcataagatttacaagtaatgccaagctccccccaagggaatgaccagtgaaacggatagttgcacgtgaaccatgagatttatgtgagcacgaatttctggcaacatctgttgatatgtcccttttgcagcctcgtatatac

SEQ ID NO: 29936 - DNA, 313 bp, Glycine max
  unsure at all n locations
acaaccggccagaccctggagaacaatctagntcacactccaataataagggcacctgactggagtaaagagtttgagctcatgtacaacgctagtgactatgcagtaggggtagttcttggacaatggagagagaatgcattccatgccatttttatgctagcaagatcctgaatgatgcacaactaaattatgcaactactaagaaggagatgttggccattgtgtatgccttatagaagatccgagcgcacttaatgggctccagagtcattatctctactgatcatgcatcaatcatataccttttcac

SEQ ID NO: 29937 - DNA, 387 bp, Glycine max
acttctccaacccttgacctgacttcttggaaagccttttcacagcaaactctgggccatccttcagtcttccctgctaaccaaattgttagaaatattttgagttaggaaaacaaacatctatagttggttttccatatcaccttgtacacaggtccaaagccaccttctcccaatttgttactctcagcgaagttctcagtggctctttctatgatggggaaatcaaatgtggacaaatcaatgccttcttttctcagttttcgttcgaaatggttcctataaattattcttgctacccctgataggtttgaagataacaatagagaagcactatgacactcacaatgtgcacgtatgatacataaacctactatcatatattag

SEQ ID NO: 29938 - DNA, 312 bp, Glycine max
  unsure at all n locations
tatagaaaaatttttccaaatagacttatacaactaataaataatagttatgaattaaattgattttattaaccatgtattggcaatacaaattttttaacattgtcaatcagctaaaaaaatatcatttgtataattttttttaaattattatatatgataaattgtgattgaataatgaaataaaattaattaataacattattatatatatatactattttttattattaattntatattactggaaatagaatttggtaattaatttatgaatttttattcttaaagtgatgatttaatgatagaaat

SEQ ID NO: 29939 - DNA, 445 bp, Glycine max
  unsure at all n locations
tgtaattatgtaatatattgtgtaaaagaagtattgtaaattatggatattatgagttgtataattatatgacaattatctactgtatttgcagttctaattataaataagagtctccactgtgtagtcaagacacagattcattcacatgaactctcatttttcttcctctcacaagggattacacaaaagattaaaaggcagaaagtttgcttacctccaaaagttggagttcttcagatgcttgtctcaatgaatctatcacaatctcataattntcaaagactgaaaaagaaattcaaatcagtcaagtaagattcagttaaagccccaacaaggggagagaaaaaggatcaacaccctcagaaaactattgatgaaaatgtggngaaactaatttccccctatttgattattatcttttacagaatcagaaatttggcta

SEQ ID NO: 29940 - DNA, 409 bp, Glycine max
  unsure at all n locations
tagcttgnangattatggngtacccatcacatgtggtactaggtggcggtcgggcgatggtgcacaacaagttttccacatccacaatgcgcgcataaacccaccatcccctgttgcccacctccatctaagctcacgtactcccatgtagcccatatcctcatttctctcaacaccgggtccccatcaatcctctcaagcttccacaacatccaagcanaacaacattcaaactgcacaagctatcacagccaagcaaaacagagcatatgcagaaaactntgccaaaacaccaaccaaatcacagcttttctcacttaaagaccccagtaacaattccttcgttctggttcattaaccgttggatcgactcgaaaatttactggaagtctctaatacttaagcctac

SEQ ID NO: 29941 - DNA, 447 bp, Glycine max
  unsure at all n locations
ctgatgatatggtgttcgccggcaaaaggatcgatgtgggtctgaaaaaaggcaaatttagtcgtcctgcttggacgaatgagaaaactggggcaaatgaagagggtgaggatgaaggagaagcccgtgctgtgactgccattcctatacagccaagtttcccaccaacccaacaatgttattactcagccaataacaaaccttctccttacccaccgcccagttatccacaaaggccatccctaaaatcaaccacaaagactacctactgcacttccaatgacaaacaccacctttagcacaaaccaaaaacatcaaccaagaaatgaattntgcagcgagaaagcctgtagaattcaccccaattccggtgtcctatgctgacttgctcccttatctacttgataattcaatggtagccataaccccaaccaaggttcgtcaacc

SEQ ID NO: 29942 - DNA, 192 bp, Glycine max
ttacgcatctgtgcggtatttcacaccgcatatggtgcactctcagtacaatctgctctgatgccgcatagttaagccagccccgacacccgccaacacccgctgacgcgaaccccttgcggtcgcatcgtatattactatcaataataggtgctataccgagtacttatcgagtaactatgactaatatag

SEQ ID NO: 29943 - DNA, 397 bp, Glycine max
  unsure at all n locations
tcgcnncnnccctttgtttctcactnnaancntttttttttattgttgaataataatagggttgtcaatgacatacatgggtcttctactaagaagaacaaagagtaccaagagaagctaccccttgttgtgctcaaggcagtggaaattatttactctaaagccaactccgtggtaactttccttcttcgtttcttgcttacttgcttgtgtactcaactattttatgttatggtttgcaaaacaaaaaaggaaaataaaaatgacttgaggttattttatttcttgaggaggttgaaatagaaatatcacgagcattaaaagaaacttttttagtggtttgataaataataattttttttgggtaggctgaatacatgtttcaatatcatcttat

SEQ ID NO: 29944 - DNA, 417 bp, Glycine max
tcaagaataatggcctcagcaaacttcttattcccataaggaaactctataaataggcctcctatttttaatggagagggttaccactactggaaaactcgaatgcacaatttcattgaggcaatagatttaaacatttgggaagccatagaagttggaccttatgtacccaccatggtggctggtaatacaataatagagaaacctatagaagagtggttggaagatgaaagaagattagtgcagtacaatttaaaggctaaaaacattattacttctgcccttggaatggatgaatattttagggtttcaaattgtaagagtgataaggatatgtgggacactctacaagttacacatgagggaacaactgatgttcaaagatctaggataaatactcttactcatgagtatgaa

SEQ ID NO: 29945 - DNA, 291 bp, Glycine max
ccttctgtgctcttgggtggatgtgttatggctatgctttcacacttttaattataacattacatagcaggagtgactctgatggtggtcagtattctgtcatggcatacatgatcttaagcatgcaatgccgcaacaccttgtattatctattactggatgcaccatctaccaggggcacactaggcagtgcatagtggagcatgagtgaatatccaactatcgcgggacgctcattgatattcgagtgcatttctagtgtatcatctgctatatctatctttggattaa

SEQ ID NO: 29946 - DNA, 395 bp, Glycine max
agcttccacgtttgtcagagaatggttggcaataacagcctctatcaagaagtggcgcatcgcttcatcatcctcacttataatcgcaacctcaaagagctgatgactcaggtcgtgaagacacctaaacaacaaatgaaccttgagcgtcttatgggatataattatagtatctagaattggtccgacagcacgaacatggttgcagatgcattatctcacattttggagaactcgtcatcaaccttgctacttctgtcagtaccatgtttcacattcttggaagagcttaagagccggttggcccgagattcagtctttcagcaactccgacaagacattagcgataacccgaaagattatccagagtatgtcatcactcagaacttaatcct

SEQ ID NO: 29947 - DNA, 439 bp, Glycine max
  unsure at all n locations
tggaaagatagtggcagaaatntaactagcgctaatctagagcttaataaattatgagagaaattagcaaagtaggcttacttgttaaagagacctatacttaagaaacttgtacgcactgcaagtctgcaacagttatttggcccacaagcatgtatttattcccttgtgcaaaatctgatttttgtaggctgacccaaatagattagtccaaaatgaaatcttctgtttttagctttaattttttgattaaaattacttttttttatgtaggtaaataagttagttcgtgtaattttatagactaaactcgttcttaaagcagatcaatccgcataaacctacttgggctatgggttgtaaggacttatccacaatatctattaattntaggaaaactatcaacgtacaccctatntttggaagaaattataatatg

SEQ ID NO: 29948 - DNA, 362 bp, Glycine max
  unsure at all n locations
ngactcgttcttaagcgaagatgttcgcaagagagattcaggagaatctttccgttatgtttcccattcatcattgaatacctgaaggcagggaaagactacctagaggggcagaatgtcaaggcagatcaaagtcaagagggaaggtcagagaaatttcaagtgacgtactttgctgaatgtgacaagaaggtcacttagcatcagtgcatgcaccaagaagaccagtcacacacacacaacgcgatgatgatgatcgcaatgcacactgatgactgagatgcattattgcagttgatagtctgtgatcatgatcatgactcaggctcgtcacactctctctaagatatgctactaatttt

SEQ ID NO: 29949 - DNA, 460 bp, Glycine max
taacaagatttcggtgctgaagtttagcaatcagtttgacttcattcttgaactctgtcattccttgtcccgagcctcttgagagcctcttcacagcaatttcttgtccacttactaatcttccctacaaaataaataaataaattggaataatcttaatcacattgacactttttgaggtctttttcctaaaacgacaaagaagattgaatcaccttgtatactggtccaaaaccaccttctccaatcttgttgtttattgagaagttatcagtggcaatgactattgttgaaaggtcaagtaaggggagatcgatattttcttcacttcctcccctattttgatcacgtacaatatctgaatactctgataaaatggaacaatggcttcaatttagttaaaggcacaatgtatatgatagtttagtcaagtcaataactttgcagcattacatctttg

SEQ ID NO: 29950 - DNA, 366 bp, Glycine max
agctaggcccgtcccgctgcatctctctctctcttgccagccaagacctggacatcatcttgcaaactctagcagcgcacgaacactttatcaccatccaacctagtgccaagcaactatggaagacagttggcggatcgaccttatggtcttaacaaaggcgatggtggcgttagcaaccttatggcactccactttccagacagtgcgagcagtagccctgcatttggcgacctatacctgcaaggacgtcaccttgagcaaagcctaatggtgccactcgccattctcctctataatcgccacactttgctggagaacactttggcaaaagatggagcgttcgataccccagccaaccaaatc

SEQ ID NO: 29951 - DNA, 458 bp, Glycine max
actcaagcttgacagagaaaataaactgtctgagttagatttccatctgtgctttaattacattgtgcattgagtcgcaatgtaatttgtctttgtgctagcggactctatgcaaggttcactctgagtacacatatcacaagggaggttagcacactaatctgtgaagctagcacactaatctaaaatattaaaataagatttaccagttttagcaaaagcaatttttaccattcttggttaagtctacttcaaccatttctagttaaaaattcaaaaggcacaatacccatatatggaaacatttggcatgtccaccatggctataaaatggtcattaatgttgtcaattcgatcttgtcaacattaagcctaaacaagtttcatttggaccaatccttaagccttatctctttacttctccaaaaaaaaatcccacttggaaccttcattcttca

SEQ ID NO: 29952 - DNA, 418 bp, Glycine max
  unsure at all n locations
agcttgatgtctttagactgaattaactccctgatgnaaatggggtctatgtcaatgtgcttggatcattcgtggtgcgtatggttggaggcaaggcttacaacaaatttattatcacaaaacaatatcacagaggacacatcaatttcaaagtgaagaagtaaccttttcaaccaaacaacttcactagtaacaaaagacaaagcacaatattcagcctcagtggacaatttagaaacaattgattgtttcttagaatgccaagagagaacgttgtttcctacaaatacacaaaagccagaagtggaccttctggtatcaacacagctagcccaatcagcatcagtaaaggcaatgagtttgagagagctctgagcagganaaaataagccttgtccgggagcatatttgagatact

SEQ ID NO: 29953 - DNA, 457 bp, Glycine max
tgtattgattccatgaagttgaacaattgactccaagcaatatatatgaacttacttatggacaaacagaaatgcagcacaaagtaacaaggtgcctgtaacaagaatccatccaataaccaccaagctgcagccacgataaaaaaaaaaaaaaaaaacagaacatcttttactgatagaaacttaacgggagacaaatctatcagagtgaaggaaatgaaatgaattcaacttacgagtatacaggacccggcaaagcaagtaaagaaaatactgcaaaaattaaatcaagttcatatgatttggttaacattgagtatagagtaagaaaaagaaaaaagacaaaaccaaaatcaaacatacacaatccgagaaatgcaacaaagatcataacagcagcaacagtaacaagagccagtctcctgcagatgatcacaacaagcaatgttaattaatc

SEQ ID NO: 29954 - DNA, 361 bp, Glycine max
  unsure at all n locations
ggtttgtattgccattttgttctaagggtagcatttcttggtaaaactaactttccaaatgtttgccttcgcangaatggccccgaggaagcttgcctcanagaggtccaggaaggacaaggcggtcgaacgaactagttccgctccggagtatgacagtcaccgctttatgagcgctgtacaccaacagcgcttcgaggccatcaagggatggtcgtttctccgggagcgacgcgtccagctcanggacgacgagtatactgatttccaggaggaaatagggcgccggcggtggacatcactggttactcccatggccaagttcgatccagaaatagtccttgacttttatgccaatgct

SEQ ID NO: 29955 - DNA, 464 bp, Glycine max
  unsure at all n locations
actcaagcttactaaaacaggagcatatctcttctcagatcctactctatatatatcagtagttggagctctccaatactccaccataaccagaactgagctaagttttgctgtaaacaaagtctgtcaattcatggtcatactcttgaaactcactgagcagtagtgaaaagaattctcaagtatctaaaaggctctttacaccatggcctacttctcanagctgctactccaggaattaccattcctattaaggccctatgtgatgcagattgngcttctaaccctgatgatcacagatctactttaggagctgctatttattttggtcctaaccttatatcttggtggtctaagaaacaacagattgttgcaaggtcaagtactgaagctgagtatcgaaacctatctcaagctacaactgaagtagtgtggatntattagaattctaacagtatcataga

SEQ ID NO: 29956 - DNA, 446 bp, Glycine max
  unsure at all n locations
tctagtattcaaagaccttcttctgtaagtgtttgttgtctctatgcgaatagaattcttcacttgagctttgtcgcaagctacccttttgcgggcgagcgaggcaaggctcacaggtgcgtcttccataggaagaaaatgcgcggagtctccaccaacgtttattgaaaggaaaacgttagaaaaatcaaaggaaaccggtcatgaagaatattccagattcgggagttatctttacgtttgaggaaggtattagcacctctcacgtttgtccccaaaggacaacagccttagattagaattgtgtgaaattatgtatctaaactnttatttcttttttattttttgaggtcgacaaaagcggtgctcttgctcctacgtaccctccatcgaagaggaaatcagacctacgtagttctttcanaagggacaaatcaatngattct

SEQ ID NO: 29957 - DNA, 395 bp, Glycine max
  unsure at all n locations
tttgcttactctttntctcttgcaacccactccaatttcaagaaacccccttctctgccactcctacagatntctttctttatattntaatcgtttttttttctttttctgctggttttctttttccctccactttcatatcttccacatatattgtccattttctggtttcctctctctctttcacccactttcagaaaagattctcactgtcaacttttcttgtttttttcctttaatatccagatgctgaccagcagcagctacttgtatgttttgttaggtactctttattatcaattatgaattggagtatttttctattttgtaactcttagtatatattaagtgagtggtaaataatattagaatacccagttgtccaatatctgata

SEQ ID NO: 29958 - DNA, 448 bp, Glycine max
  unsure at all n locations
ggcaagaactggctcaacaaaggctaattatgagtgtagagcaattcattgagaaggtggtctggcttggagcccgaccttcttttgtgggggataatgaaagttttacaacccaggcacctcaatagcatgagctagagccagaaaatgatcactcatctgaagccatcatccctggagctgttgatttttcgaaaagaagattagagacaagatccaatgaggctgctcatcctgggccagtgcctgtatcagctgatgcaccatttccaggggtggatccatcttcacctcagcacgcagcagactcttccactcctgtcttagagatacctgagggccagaccataccagttctgactntggacacttctcctncagctactccagtattgcatctgacagatgaagaggatgttcanacacaggatacccaagaccagtcaca

SEQ ID NO: 29959 - DNA, 404 bp, Glycine max
  unsure at all n locations
ttagcttccatcatcntntaaagctgtccccccacatgttcacttgatggaatgngtcatatatacccatccttttcgtgaggactagttgagttgatgaagagttcatatactataaatcatgcaaaaagaaaattcacatctcaaattggagattcaatgcaatgtagacaaggtaaaatgggaaaatntagacttggttctctataaaactggcaattgatttgaaaactggaatatgggtttgctggaaattgaatgaaacctcaacatcagaaacagcaagattgaacttttcacatnggttatgttctggtatctctaggattggccaaaggaaataactgttttctaaacaatactattaanaaacaaaataacatatgtttgatgccacttataag

SEQ ID NO: 29960 - DNA, 446 bp, Glycine max
  unsure at all n locations
tctgaccaagataaanaaaagacacactaactaataaaaattaaataaccacgtttaagagtgtttttttccccccttaaatgcaatatctaaagtagcaatgtttgtcatattcatagacatagttgagagtttactccttaggtaatcttatactttataatcatttaattttttttaaattttttttatcaattttaaattgaatttattttatatatgaagtatcaaacattttttttttatttttttataaaatttgtagacattatctattctataaaaacttctaatataatgattggatcattgaaatttaatatcaacagaattatcaaattgactaactttaccaagttactcttgaagtcgcttgtctcaatctttttagatactaatttctttaatctcttttacacatgcatgtatattttcttagatattga

SEQ ID NO: 29961 - DNA, 409 bp, Glycine max
  unsure at all n locations
tctagcangangttttaatactgagangacatgaaactatatgcgngacatttcttgaagattgtgtttgacttaccaactatgcatccaattttaaattgtttgtaaatagaacaaataacgaaaaagatggtggaactcacaaaccaagaggagggtgaattgatttctaaatcaaatcaaacttttaaaaaatagagctataaaaaacttcttttccaatgatcgtatcacaaacttttgataaaccaatatttaatcaatcatcctttacacaaagtcttttgctataattgtttcttataatatattctctttaaccttcagtaaattgatcaagactagaataagaaagatagatatgatcaagagaagatgtgcaccaatttctatattggttcactctcta

SEQ ID NO: 29962 - DNA, 447 bp, Glycine max
  unsure at all n locations
taactgaatggagtcgttgttggggaggagttcttcgtgatcttcttggtgttgtgaccatctagtatgctcataatgtaacattatgttttctataatgattgattaagtgttttaattaaattgtaagagtaattaaatttaatttgcgtgtcgtaatttgtggtgtttatagttaatgtttttgttatgcttatgcttatgcttaaaccttattttangtgtgaataatacgttttagagtggttggaccgaggtaagtgggccttgagtgataaggatgagatgagtgagtttagaaagtgaaaatgtgagattagaaggaataggaagagtcagagactcaacatatagggatttaaatntgaaccagatcacaaacactctcattcctctccaaaacaactcacaattagagaatgtgagtcactgaaatcctagtacaaa

SEQ ID NO: 29963 - DNA, 414 bp, Glycine max
  unsure at all n locations
tcttcttgacggtcatctgtttagtcttggtggtcatctcgagagtctcggtggccatggtggataggttctgagtgaggcaatatacaacctcttcaaggcggtccatggtggtgtggtggccgttgtgagcgagcatgattagaggatggtgtaggggttccagtaagggaagaggcaagtaatggcagccatggatgataggtcaaaacaatttgttacgaacattactacactatgctatgctaactacactattaggtatttcataattcttccttgccttatttcattactgtggtgtatttataatgatcatatagagatataatttggcacttttggcccataacaaanaagtataacagaaatgcaaaacaacatagtaatgggatcatactagtttggtataac

SEQ ID NO: 29964 - DNA, 406 bp, Glycine max
  unsure at all n locations
tatcaacatcaaacttggagaaagagttcttgtggtcaagacatgagaagcaatcaagtataatgttacttccttcactaaagcggtgatccatctccacacatattttatcaatagcaacataaaaaatctctggacggtcatgatgaagattagtgatagtcctcccttctgctcttgaacgaccccgaactggtatatcgtcatccatatttggtaccagaatacttttagcaacacaaaatccttggacatcggcaaaaaaattattccagccactctctctcattgtgcccaaccgagctttgcaacatcaactaattccatggcattcacaatattaagatcttntcttcgcaatatatctgaaagctcgtttgtttgctatgacctgtatcacgcacaa

SEQ ID NO: 29965 - DNA, 302 bp, Glycine max
  unsure at all n locations
tttgcangcaagcttgtancttggngaccaactggagctnntcacactgcgtggtgtggaacgatggcgtcctcgattgtctatacaacattgntcaataccaagtacaatgaaactccatagcgatgaagaacatgacatcactgtgagatatatatgttgagataaaanaaataacgcattatgatgcatacgagatccgatagataggcacatcatcatggatgttagtttgcgtgtatgactcgtatacgtcttctatgtttagttgacgaagtangaagactcaccccttacttttt

SEQ ID NO: 29966 - DNA, 439 bp, Glycine max
tcttatcaaggcactctcttggtggtaaagtctttccttccatggattattctctagtggatggcgcctcctctcacctcttctcctttatcttccgctgcaactccatggctaaaaatcaccattgaaggaccttattgaagctcaaagatccagcctccatagaatcttatcaagcaagcttccatcaagcactaatcagagcacaagagcttcaagtaggtgctccttaaacctccattaattttcagctttaccttctcgtccattgttgtttttttacttttctccatgtatctcctcacatgtcttgtgctgaatatttttatcatgaatctttagaatttccaccaattaaacttgctataaaagctagatttgattttctatggttcaaaattcttggtcttgttcttgaaccatgaattgtgttgagttt

SEQ ID NO: 29967 - DNA, 389 bp, Glycine max
  unsure at all n locations
agcttcctactcaattagtcggntggttggggttttctacttaatggacttcattgtcaacttaaaaaatgatatgtgactacttcatacctgtatatgagttttgctaattgtgtcgagttgttcctttatccagacagttgttgcttgtagcttttgcaaaagcaatgatatttatgatcaagacatgcacattttctcattacgattgtaagtgatttttattctttgttttcatgtttaattttgtgcaagtaaaataagtatcttctctgtcattcattcttattataactccttccatgtgattgatgtaatattgatgacatacaccactaaaacatatgatacacttgagaagagacccgganaagattcagtaacattta

SEQ ID NO: 29968 - DNA, 440 bp, Glycine max
  unsure at all n locations
tatacatttagttaaacttcatatataactntaaacattatggcatataagatgatttttgaatatcgttaatggaatacaatcttacttaaaatggataaaattattatagaagatatttataaattaatagggtattgggattcatgactaactatcagtattatttaggacgtatttcactctatggagtgaaaaaaattatgtaaaatgagaagtaattatggatgtgtctattattaatataaataaaatatcctataaacagaatccaattaaattaaaaaaaataaaataaatgcacctttcttttcactctgtacgcgcttctcaccttttacagcaaaatagaaaatctaaaattaatttaggttgaaagtagtagttctaatttaaattcagtgatatctaaagtgataaagttaatctgtcgcttacct

SEQ ID NO: 29969 - DNA, 359 bp, Glycine max
  unsure at all n locations
agcttcccaatatggagagctttatcttctgttggancttccttgtaggtacttgatgtaaatacctgtatatctatttaatgatgttttatgtgttgcttgtgctatcagtacttcatttcagtgtgctttttccttgatcatgtagatgcatgctttgttaggataattcaacagtggaaactggtctgattcttagaacttgataggacagggctagtttattgtattatcacgaggaatcggngtacggtaacctagttgtttgtatgtttgtcttaatgcagttctggtcgagtttagtccaacaagaggaatctgangatgatgcttggtcgggattaagctagactatcatg

SEQ ID NO: 29970 - DNA, 460 bp, Glycine max
gctttccagttatggaaagctaaatcctctgttggatcttccttgtatgtacttgatgtaaatatcttttttatctatttaatgatgttttgtgcgttcactgtgctatcagaacttcattctaccatgcattgccttgatcatgtagatgcatgtgtatttaggatcattcaacagtggaaactggtctgattcttacaacttgatatgatacggctagtttagcatatattcacgaggaatcggggtacggtaacctatttgttgtatgtttgacttaatgcggccctggctaagtttaatccaacaagatgaatctgtggatgatgcttgggcaggattatgctagactatcatgatgaatcggggctgagcatttcatgagataccatataacgcatgagcattgttgagtagagaatatgcttttagcatcagacacctattatgaagaccaacg

SEQ ID NO: 29971 - DNA, 397 bp, Glycine max
  unsure at all n locations
tttccctctgttccngcaagacatggagggggagcgacctatgcacaccagnngcatctgagaagaaganatgaaacnctaacgcccaaaaagctttatgtgccaactcgacaggtaggtgacaagattttccatagaccaactggaaagacataagtcctgtgggggctttataggctattctgtatggccacaaatcttaatctagtttcagggaccaatccttccttgattgagcaactatttcatctagaattatcttaacttccctattagaaacttcaactttcccattggtctgagggtggtaaggtgaggctaccttgtgtttgacactgtagtgtaggaggacttttgatagccgtgtattactaaaatgagaatctccgtcacttan

SEQ ID NO: 29972 - DNA, 230 bp, Glycine max
gcttgcaccaacattcattagtccaatacacactcaacagatagtcttcatccatccactattccaatcattcatgcgcaatatgatgcatgcacctgacctcaactctcatgtgcaatgtggtatcatcccaaggaaacagcctaagtgtgtccacacgacactctcacttaggaaaactatgtagtaaatgtcgaggtcaccctgtcgggcacaggcaactccccccc

SEQ ID NO: 29973 - DNA, 323 bp, Glycine max
caaatttcatggatcttccattgatgatgatcatggaaggccaaacactcaatcaatccaaggatccactccaagcaaggctgaatttgagttctcggttagtatttctaatccatgtgaatgttcatctgtttcttcaatcctattttggattttcatgattatgaatatgcttaggattgaaaacaaattagtttaggaatttctttcctaatcttgactttaatcacagattgcttagatgatatttcaacctaatttgcgatctcaatgaatttagagattgattcgattgaaacacttctaatgacattaattgaact

SEQ ID NO: 29974 - DNA, 445 bp, Glycine max
  unsure at all n locations
gaattcgcgacattgcgcttagcgctaccctgtcgcttagctctagtaagtggatctaagcttagcgccaatcgtgcgctgagcctggctgaagacaactaatatgcttagtgcactgatctcgcgcttagcgtgcggccttgatattgatgccctgccagattcttctgtcgtgctaagcgcgctgaagctgtgcttatcccaataatgagctcagctcaactgtcactttgggcacttcatgacttagactctatttcacttgaaattgcacatatgtcatcattaaatccaatggatatattctagagacaactttatccatacaaaaaaattatttacaaaaatcactacaaaataaccattaattggagaactatactagttttggaatatgaattctatacanaagttagtcgtataaggcgactaacagtgaccatga

SEQ ID NO: 29975 - DNA, 447 bp, Glycine max
  unsure at all n locations
catatatatcaatatattaaagggtgtntgacgctctccacttagaatcaatgccttcattgtgaattgccttcattgtagacaatttaaccctgaaccagattaaagaacaacacataaaactcatataaagcggaaacaaataagcgtaagcttcaaacaggaaattggattaatactgcatgtggttgcaattctttttttaaaactccataggatcctaaaccctttttcattattatttggttaatgtttatggacacaataaatggaatatataaatatttatacattcgctataaagaaagaaaataaaaggtggtgcgcgcgttcggaacatacaataagaaagtgtttgatatgccatgggatcaacaatgcatccaacaaagagtaaacaagaattagacgcaaatcacattgtctcagattacttacgcaatccgt

SEQ ID NO: 29976 - DNA, 210 bp, Glycine max
  unsure at all n locations
ttgcagaagctgctggttggtngacanaacaagaggacgggcccaacataaaaacaaacccgctcgccaaccatggagggggggaggacaatgccaacgaggcgagaaagccacacgggcccaagcatggcaaggacggcacgacccccagaaggaataactacaaagcctggcacaacgcgggcaagataccctgcaacgggcacaaag

SEQ ID NO: 29977 - DNA, 426 bp, Glycine max
tgaggtggattgcaatggagaaggtgttgtttttgctgaggctttcatggccagaggtctagtgtattattccccctctcataatacaggtcacagattaattaattccttcaacttttggaatttctagatcatgaaccgaaaatcctatgaccacagcttataaaaaagaagagaaaaacacgtctaattataattattatattcaattataagtttatttatcgattaagtatgatcatcattatgaagatattcaaatgatgacctactgggtttctgttaatataacagaggacgcatcaagtatctaatacaagtgttatgggctggtgtgtcaacgcacaaagcttgtgtataggaagcttatggtggtataatcccctgcagaaatacaaatattaattattttaacagatttgtctc

SEQ ID NO: 29978 - DNA, 142 bp, Glycine max
tatccgaacctacctactcatactttatgcctagactgatcggctactctgccccttaatctttctatgcatagagcatactgtcaatgagacagccaagtaccaactaatctcaagagaaacatgtcatcaagcttcatat

SEQ ID NO: 29979 - DNA, 355 bp, Glycine max
ttacaatcgttgaccatgatttgagaaaccgtgagggttaatatcactgttgctatgacaatcttttgttatagtcagtccacatggtagttatgtcacagggaatgttgactataaatatcacgtctaagctatcggaactgactccgaacttggatactgactatagtgattcaacagactttttgagactacgggatctatgagagactcagcatgtattctataatgactatacaaagtattttcgcactataacgactattaatatcatactcctgagactatgtatagagtagatgagttatattaagctatggatcggacatcatcaagtatactgcttgattatata

SEQ ID NO: 29980 - DNA, 386 bp, Glycine max
  unsure at all n locations
agcttgatnctcgaatngattntagccttagtttcactttggttattagtcaattcggttaagaaagaaaaatcccanagaanaacgtccgatttgattttttgattattttattaaaatatatattttttattattatattactattttgccttttttttgttttaaatgtggttacggcatgacagaacggtcgaatttcattttaacagaaattaaaagatgttacaattcaaatgatcggtggaaatttattttatttttgattaggcgaggaaatgacttanataaatgactaaagcacgtcaaaagagggtatggaaagtaaatgaaataaaaataaaagcacgcgaaacaaatggggaccactaagggtacatagaatg

SEQ ID NO: 29981 - DNA, 440 bp, Glycine max
  unsure at all n locations
nttaactgaatttgcaacgttctaattgttttttaaatggtgtaatcgattacaatatattggtaatcgattaccagtgtatctgaacgttgaaattcaaattcaattgtgaagagtcacatcttttcataaaattatttgtgtaattgattacatggttttggtaatcgattaccagtgacaagttttgaataaaaatcaagagatgtaactcttccaatggttttcaggtttttctcaaggttataactcttccaatggtttttcttgaccagacatgaggagtctataaaagcaagaccttgacttgaatttcaataactntatatatatacttttacatcctttgaatctctttgaacatctttttgaacttcttcttcttcttcttcctttgccaaaagctttctgagttttctggtttccaaaccttgttcttt

SEQ ID NO: 29982 - DNA, 371 bp, Glycine max
  unsure at all n locations
agcttgacaggtccaggtgcggttgctgctactggtggagggacttcaatttgcttgccagacctcaaggtgatggcactcacattcttcggattntgcaccatttgtgaaggcaatttgtcagaattttgggactgagcttggttcaactgagtagccatctgccccatctgatttatcagactctaaatagaggctcttgtctctntctgaaattgcatattctggatagtcatttgcctcactaactcctctaaggaaggttgagaaaagggcctcagttgcttgttgtctttgttggtggtgctgcattggaggaggaacatatggcctgcttggaccaacaacattctggaagggagggacaggct

SEQ ID NO: 29983 - DNA, 457 bp, Glycine max
  unsure at all n locations
tccctttctttggccaatgctggactcgtttggcagtgatttccttggcaatctgatgctcagaaacatcaatatccaccactccttcagtaggtctgcccaggtatttgttgatcaccgcaggggagaatctaacacactttcctctgacaaacactctttgataatcatcactttttctgtttgttatgtcagagggaatgttgacaataaattccctgactaggctttcataacagtctcccaacttggtgactgttttcagtagtccagcagccttgatgagttccatggtctccttgcaatccaaggcatttcttcccagttctctttccaaggcaagtctgcgttgatacacgtatttccacctttcagcattgccaatggagtggaatgagatgttgtccaatggtgcatcanggacattntcaggcacctttttcccagatttcttggt

SEQ ID NO: 29984 - DNA, 462 bp, Glycine max
  unsure at all n locations
ctaagctgagtcacattgggggttccagttaaacctgcgctgtgtatatacctcattatcaattggcctagtatcaacaacgttatcaactgtttgaatgccctccaaaagagttggttganaactatcattacttgaaggcagatatttatacacgactaataatccaagagtgaatatagcttgcagcttcgtagagtccccttgaactgagaagaatatgagcatggcacgtatgaacagatccacacagagacgcatgatgcatattacagtgtctattaacctcccatcgttgcctgcggggaagccacgaactcgatacacaaacagagtattgtacttgtcaaccacatatctatacccaaaataaatggcaccaacaggaaccacaatgggattaaatgaacagtatactagagtcagggctaatattgtcaaattaaaggcgtaatactgtgc

SEQ ID NO: 29985 - DNA, 411 bp, Glycine max
  unsure at all n locations
agctntggcggtcnttgggattttctcaagccccaacccatcaatgcctaagacaaatccttttgggggttcatttaataatgtagcaaacaaagttaccaagctctacagttacattctctgttcctagtggagagttgtttaaaaccagcattctttaatttctcaagcccncagtcatcttcaccaacccagacaacaatttcaggtgcattctctggtggcttcaatgctgtggcagctgttcccgcacaagctccaggtgggtttgggcagccagcacanattggatcagggcaacaggttcttgggtcagttctcggtggttntggacaatcaagacagcttggtagtggttttgctgctcctagtggtttcggtggtggatttgctggcggtagttctcccagt

SEQ ID NO: 29986 - DNA, 451 bp, Glycine max
  unsure at all n locations
tgtcacttttgggaggattgtaccaaaccatcacccccagatcaatcttgactgatctaaaaccccatttatgctagtgtacttttattcagtcactttggaaataatttatagaaatactgtgccatatatttttgaaacaaacattataataaactacccacatactgactntaaacaagtacttatcatttagttaattcatcctaaatacatggatatgtccaaaatcctacttgaagcaccaatctgacattataaacaatggccgccatctaacactagcattcacttgtgactctagatatttccagcaagttcattgttcaaaatcttaattaattgcgagattctgccctattttgcatagataaaaagtaatataatacagattattntttacttanacaagtagacatctaggatttgcaatanagatagagcaactaac

SEQ ID NO: 29987 - DNA, 427 bp, Glycine max
  unsure at all n locations
agctttcaggtttanactnacctaagcacagtcttagaaaccttacataggctccgtccttgaaagcaagctttctaagacatttctaagacagtgcatacgtaagcactgtccttgaaagcaagctttctaagacgatgcttacgtaggcacagtcttggaaagcaaacattctaagacggtggttacgtaagcatgtcttagaaagcttactttctgagacggtacctacaaattaccgacttcgaaagttggctattttccaagacgatgtgttcttactcgtcgttgaaaggtaacactttcaatggtgttagcttctacgacggtcgacaatcgtctttgtatattaatttggaccgtcgtagaaaaaccatttttcagtagtggtttaaggaagggtgaaacttaattccaactcattcac

SEQ ID NO: 29988 - DNA, 459 bp, Glycine max
  unsure at all n locations
tctactgagcacaaataaaaacaaagcaaaatttattttcaatcctacaaaaagaaccataaattggggaaaatatatacattttgtaaaagttttctatacaaaagttagtcgtataagacgactaacaacatccatcaaatgaaaattcaaaaaccaaaaggaataaacaaatcaagcatgtcagagcaaatttattattatattcaacaagatcgtaaacattggagagtaccgttagtggtggtagtccaccggagtgggcagcaggggaataaagtgtccttcgcttgtcatcatgcgttaggtctcatcttcgtgcaatcaattntgatttcaacttgaatgtgaacaagcgcgtttatgtgtgtagtggtgagtgagaggggaagtggaacatgtgagtttctttntatttaagtggaaaatattctaagacggttatatgggaaccatctc

SEQ ID NO: 29989 - DNA, 193 bp, Glycine max
  unsure at all n locations
tccttacgcatctgtgcggtatttcacaccgcatatggtgcactctcagtacaatctgctctgatgccgcatagttaagccagccccgacacccgccaacacccgctgacgcgaaccccttgcgggcgatgagaatatgaccantggtgttgatgcactattacatgcccctttgacttatgacttgatcgcg

SEQ ID NO: 29990 - DNA, 420 bp, Glycine max
  unsure at all n locations
cgtaatcctatgaagctgtgcacaatcngacgacntcagctcggacccgggatcctcagagtcacctgcggcatgttgctncatatttcgcatataangaacataaagcttgggatcgatcgggcccccggtaaaggaggccatggaatggctcaatttggtatgggaccaatgaaacttttttgatttaagtcataaaatgatgccaaggtctgttgatccgctgaaacttatgacatggctgatcacaagaattataaatgaagctaccctggattcaaaagaatccaagagttgcatgaagacacatcaagtccctctatacaatgctttggcatttcacgactctgtcaatagtttctttgaatggcaggtaacctgnggttattctatttattaaataaatataattaattaaat

SEQ ID NO: 29991 - DNA, 445 bp, Glycine max
  unsure at all n locations
tggtttatgaattgattntagccttagtttcactttggttattattcaatntgattaagaaagaanatcccaaagaaaaatgtccgattggattttttttattattttatttaaagatatttttttgattattatattattattttgcctctttttggttttaaacatggttacagcatgaaagatcggccagattntattctaacagaaattaaaagacgttaaaactcaagtgatcagtggaaatttattttattttttgattaggcgagaaagtgacttaaatatatgactaaagcacaccanaaggtggtacagaaagcaaatgatatanaaataaaagcacgcgaaacaagtggggaccactaagggtacatagaatgaattgaatggttcgatttcggaaacttaccggttgaagaccaaacaacgacgaagaacgatg

SEQ ID NO: 29992 - DNA, 409 bp, Glycine max
  unsure at all n locations
tcgcttaccaattgtggaagtgaagctcttccatgcctttctagcaggtggaaggcttagccttagccttaggcttatgcaggatttcattgataggaggagagagcaatgcttcaaatcagaagaggaggatttaataggtgggttaaagttaaactcaagttcaaatggaaacttgggtccttaatttataacatggtagcatgggttagattcccttttttgcagtgtcatgttgcggaatagtatattactgtattcatatatggtggttttgctgtgaggggtggcttagttattacgcgctcaatattttttgacaagacgagcatanagctgcagtaggtaaaatctgccaaattctccagcaccaacgacctagcttgcttaattattaagctgacattaa

SEQ ID NO: 29993 - DNA, 450 bp, Glycine max
  unsure at all n locations
caattatctacattatccacattcctagctttctttatccacatctacaaaatagtccttagatttccctctctctttcttttgtataactgtgtcatatcttagatctcctttcacttccttcaaacaacaaaatcatgggtctgagagacattggtgcttcactgcctcctgtgtttcggttttatccgagtgatgaggaattggtctgccattacctctacaaaaagatcgcaaatgaggaagttctgaagggtaccttggtcgatattgacctccacatatgcgaaccttggcaacttccaggtaaatatatattcattctaaattatatatatatatatatatatatatatatatatatatatatatatatatatatatatatatatatattcttataagctattctgaattatacaccttcctatagcttgatctctgtggttn

SEQ ID NO: 29994 - DNA, 450 bp, Glycine max
  unsure at all n locations
tgtaggattatggggtacccatcacatgtggtactaggtggcggtcgggcgatggtgcacaacaagctttccacatccacaatgcgcgcataaacccaccatcccctgttgcccacctccaacggagctcacgtactcccacgtagcccatatcctcgtttctctcaacaccgggtccccatcaatcctctcaagcttccacaacatccaagcaaaacaacattcaaacagcacaagctatcacagccaagcaaaacagagcaaaggcagaaaactctgctcaacacatcaaccaaaatcacagcttttctcatgtaaagaccacagtaacaattccttcgatccaattcgttaaccgttggatcgactccaaaattttactggaagtctatagtgtataagcctacattntgaccgttgggatatactagcanacatccagaacgcatt

SEQ ID NO: 29995 - DNA, 304 bp, Glycine max
tcttgaacgaaccccttaaatgcaaagccaaccatctctgtccccatccattcatttctgccgccgaacaggtgatctggatcttgacctccttcccctgcataaaagggttacagtaaataaacaacgcaccattgtaacataaatatgaagcctgacaaattcacctgtgcagcttaatcttatatgatgatggaagtttgtctgaaaaacataaatcttaatcttgaaaaactctggcaacaaacctggaagaatcaagagaagtatatggagaatgcctgcgctgagaatgcttgctatg

SEQ ID NO: 29996 - DNA, 413 bp, Glycine max
  unsure at all n locations
taggattaaagttcagaaacttaagagcccaacaagctttatgctctagctctatgggtaggtgacaattttatcaaacacaagtctataaggagacataccaatgagagttttaaatgttgtcctataagcccaaagtgcatcatctagtttaattgcccaatctttcctagatgcactaactgttttttcaagaattatttttaactcgctattggacaattctatttggccactagtttgtgggtgatatggggttgcaagcttttgagtcacccatatttagccaagaggccatcatacaacttattacagaagtcagtgcctttgtcactaatgatngctcgaggtgtgctaaatctggtgaannatattttctttgaaacttttttaccaccagagaatcattaatg

SEQ ID NO: 29997 - DNA, 395 bp, Glycine max
  unsure at all n locations
tttgcatgcagcttatctattctctttnataaaaagaggggaaataagaaaagtgacatgggatgaaattcttttatatttccatgtttgtaatacttcctttccaatggaaacgtcggaaatccaacttatgaagagaaagggtggtctgtagaactgtcattatgcatatcatggtagttacttatgataatttgagtgatgcaagtcgtcttttatgtatattgatagaatacaaactctattgatgagaatggaagagtatagcagtcaggacaagacatcctcgaacagtagatagaagaacaaactatagaatacaatagaagatataccagagattgacatatgtacattcaaaccatctagaagtaatgctctttgaagaggacaga

SEQ ID NO: 29998 - DNA, 440 bp, Glycine max
  unsure at all n locations
tattgtcatttttcttttattntcttctctcataagtatttatggagagatttatccaaacaaaaataccatgaagaacataaaattagtcagcttaacctcaaaagtacaaagaaggttaagtcaattcataaactatcattatgttgtaacacttacaatttggaattcatctaatttgcctcctgaacaagattggaaaatgaaagtagcacaaacagtaacgaataggtcttgctactatagtggagagaggaaattctgatggtcccacaaatataacaagatataaatattagataaattacttgttccttaatttatttactgtgataacaattgaggttgggtgcatgagcaatggaagagaaggaactaataatttcttaattatatttggagcaaaatctattaaataaaaatggacatcaaaagtaaat

SEQ ID NO: 29999 - DNA, 399 bp, Glycine max
  unsure at all n locations
agcttagtcctcgtccaccagngacctgaattgaatataagaacatcagaatcaatccactcgtggctaatatcatcaatcttgtccaatctcagtgcagtcttcaccctttggggagcatgtctaggcacagaaccaggcctcaccaggaacactgatcgataaaaatcgattctaacatcaaaagtactaaacctcacacctaanaaccttatctgttttgtgatcttgttgcctttgatttcatagacactcttcttatcctcaactcctgtcattagcaaacatatcatggactcccattgcgtcctactcaaagaatcgccgacgaanaccacccttttcccacgaagtcgttcgagtattccacggacatcaaaccttggaatctcacagttc

SEQ ID NO: 30000 - DNA, 442 bp, Glycine max
  unsure at all n locations
tcttccataaaccataattccctcctctgcatcctgcacacattcttgccgactttttttcaaactcatatatatgttgggaaatcacacaattgcccccgtccctcagctagctagctggatttgttaatgtagtgctagctgaatttaaccaagattgtgaattagcaataataagttaataactcatcaaatctctatcaacttaccctatatacataaacgtctctgttttttaaacttttaaaataactccaagtcaattcatattctttagactttagtggtcacactcacacactaccaatataaataattttacaatcttttgaaataaataatataaaaatcatataggtagtatatgatctattcatttattntttctttatcatacttataaagaagccatgcatcacanagtaaccccatggaagtggcg

SEQ ID NO: 30001 - DNA, 101 bp, Glycine max
  unsure at all n locations
agcttggccagtagaangaagactcgacactatgtagtgtgggtttgaaccgggaatggctgcccattggagaagaatgaaatcaatgaggagttatgatg

SEQ ID NO: 30002 - DNA, 448 bp, Glycine max
  unsure at all n locations
acgggtcattntgaccagagctccaaagatccataatcagcagaaaattctgaaaggagaaattacaaaaattgaagataaaagctgggaaaatcaagagtaagatatttttaaaggataaatcagctcaagaagaacataattacttgaattaattagaaatgctatttatttttaatttcttgtgactatctccttaattaaatctatctacaattctaaaaatagggggttagacattcgttgtaacggtgtaaaagtccctatcaattcttagaattatattttagaattgcacctactacatgtctccattattccattagacactctagatttcattgtattatttttataagtgcaattccttccacctaggaggagaaatgatgaaccttttttcgctgtaattctatcaattcaatacttcatcttaagttctttattt

SEQ ID NO: 30003 - DNA, 411 bp, Glycine max
  unsure at all n locations
agctngnatcgttganaangcctcttggcaattctcagcagagaaatggattttgtcagattgagacgaaacagttatggggaaatcaggtagctgcaccttgaagtgttctccctcgatccttgacacaaaggacattactgacccaacccaggaaatggggaatactcatccctgtgtctggacttagtcgtagactactaataaatagctttcagcggaaagtttcttttgatgaataattggaacgttataattctctgaaatctgttatattggaccagagtggacaaaatggcattgtatgacagtcacttcctgagacaacaacctncanagagaaagttggttctggatatcctataaagtcacttcctccttcacctacacttgaacatatgaaaatatcct

SEQ ID NO: 30004 - DNA, 453 bp, Glycine max
  unsure at all n locations
tcaccttgaagctaattgaaataagctaanaaaagtcataactttaaaataagctcttacaaacacctcatatattcaaaacgagaagaactgtggaattaaacatcatccactctatgtcagactggtaattccgtaattgctgcaaatactaagttattcctctagcatccattgtcgatttcaagattttcctatcatagtgatcacattatctgattgtagttatcattggtacactntaacctcataacaaagtcaatcaataagagtcgatttcaatttgcagatcagaaaagctacccctcaaattaggttattgacttaagcagctgaatgcataatcaaaaggaatttgtagaaactaaagcaaaatatatagatggataatagaaaaaggaaaaggctgcacatctcaattccttaccgattcaccactgagattcatgtaag

SEQ ID NO: 30005 - DNA, 416 bp, Glycine max
  unsure at all n locations
gagcttggctggagntgaggtacgtgtctctttgaaattgaagcgtctgcaattgccatatctgcgatgacataatggccatccaaactgccgcaaaactatatatcagatgttgaatcatgcataagatatttcagcatgtctactatatatactattatgagcattacaagagcaactgaatgcatcacgcgtgcatatatacgtgttcaataacgtgtacgcctaactggcgaagatacatatagggcacttggcaactgaatcatgatgatacgagtacctcagacaaaacactcctcaacaggaatatgaattcacagtgtcaataatgctgttggtcatcgagataactcctcttccctctccgctctttcgtccacgatatatattatcaaaaggctaatatcattgat

SEQ ID NO: 30006 - DNA, 377 bp, Glycine max
  unsure at all n locations
agcttctcagtgttgtntctctttttgctacctangctataaatagaagtatgtgtaacacttgtggtaactttgatggatgagagtcttgtgagacaaacttcaaagttcaacttctctccctcttttcttccttcaatgtcgtgctctgccgtctctctttcttttcttccattgaagcaccttctccaagcttcttatccaaggcattctcttggtggcgaagctccttcttccatggcttattccctagtggatggcgcctctgctcacctcttctcctttatcttccgctgcatctccatggtagaaaataaccattgaaggacctcaatgaagctcaaagatccagcctccatagaagctctacaagtaag

SEQ ID NO: 30007 - DNA, 454 bp, Glycine max
  unsure at all n locations
ctcaagcttgtagcatacggactaaggtttgagagctttgggcatccggtcctatggttgctgacggaggagctggagtggatgatgaagggatgtcttttgctctagccctttttcttgatgacatctgtaactaaaaagaactcaaaattccttagaccaaattaacgatgggcgcttagcgggatacaactcgctcagtgcgccctcagaaatataacatatcggcttagcgaaacagcatgtgctttagcctaatcaacgctgcaacagatatgcgctaagctcagcagggttgcgcttagcggcagcatgaaattcagaaaattcactaagtatgggggcttagcgagcaaggctcgtttagcccaatggctgccacaatgaaatgagcttagcccagataggctcggcttagcgcatagctntcaacaaaaaattggactaagttacc

SEQ ID NO: 30008 - DNA, 396 bp, Glycine max
  unsure at all n locations
ttgatctccttcttcagcctctggatctcgtccttctttagccttgcaacgctcatctccatcgaagcttgatgacgagaggccagagagtgtttcttctctctgccccgctctctatgatggcaacgaagagtcacgatacaagacaaagtaagatagagggttgtcaaagcttatccagttataacgtgccacgttagcatacaaattggaaaacacaggttttcaaagacggttttttaaaaccgctctcgtgaagcatattttaagccgggtgtaaagtacccgtctttacaaagctataattatgcacaaaaatgtcaccgctntatatactacatcggttgtcgtataaccgacgtataaacagtgacgtagaaaatctcttttctagta

SEQ ID NO: 30009 - DNA, 450 bp, Glycine max
  unsure at all n locations
tctctaagcttctcatccgagacactctcttggtggtgaaacttcttcttcaatggcttattccctaatagatggtgtctcatctcaccttttctcctttatcttacgttacaacttcatggctgaaaatcaccattgaaggacctcactgaagctcaaagattcagcctccatagaatcttctcaagcaagcttccatcaaaaagtactgaacacaacttgctatgttcaaaacagaatattgataagaccattgataaaaaaaactccttatgaactatagagtggaagaagacctaatatttcatactttcatcgatttggatgtgagtattttatactgaacactagatatcaacttgcaaagtttggttcanaggtggataaaataatcttcctcgaatgctctaacacatctaaagcatacaaagtgtttaactcaagaacttt

SEQ ID NO: 30010 - DNA, 376 bp, Glycine max
  unsure at all n locations
ttacatgcccaactgtcttaagagacatttgtattgatagatgtattgagtgtagcatcttagtatatatcatttcatatgcatcatgcatcatcatgtaggagtaagaagaaagtttctaaagttagaaaatttattcagtagttcgaactctgtgttttaattgattacgcaagtgtttgaagcttgcatagaagtgtctcatattggtttaatcgattacatgcttatagtaatcgattacacaattcgctatgagacaatgattgattttntcagaagtctttgctttaattgattaccacgtgatataatagattacttctctcttaataagtgtttcagaagcgatcaagaacactgtaatcaattacat

SEQ ID NO: 30011 - DNA, 450 bp, Glycine max
tcgcattgctttcttcataagaaatcaacagatctactgcaagatgaacgagattgtccagtatcaataactggagcccgtctaacaacaacataaggtagtgactccacctcaatggacgaagtataaccacatttatactccattagttgcatacaaggctttaaccccaggtgccacagtagattggatactcccttatcgacaagaccagtgtatcccaacctggtgaagatggatcttcatttgatgcctagtggtaccccaagaaccactcgttcattgtctatgccagtagagctaaagtaaaagaaaattatcccttcaagtgatccctttaccaagactccaagatttacttcacctacaacaaccatcaaaatggacctttccgaggagaatcccactcctaaagtccaatggtccaaggaggtgcatatttgtacacct

SEQ ID NO: 30012 - DNA, 482 bp, Glycine max
  unsure at all n locations
ncgtgaatcctgctgatgctactgcaacttcgggcgaactgagctcgtacccgggatcctctgagtcgaaccgcaggcatgcttggcacngaggtcaatgtcttatccgnggangccattcttagaagctattaaatggtttcaggcttgagaattaactttggccagaaccactttggggccattggcccatctgaaaaatggtggtgggccgctgctgaatatcttaaattggccatgcctcaattccccttttggtacctaggggtgcctataagcattaatctgagaaaaatatggtgtgggagcctatcattaaaacggtcgaggctaagttgaacaagtggaatcaaggaacatctctatggctggaagaatcacccttatcaatgctgtttaacagcacttcccttgtttacttgtcttntacaggctccctcagcagcattaatagataaatgctattcgagacacttttgtgg

SEQ ID NO: 30013 - DNA, 449 bp, Glycine max
  unsure at all n locations
tagtgaaacactaaatatacacctctcttctaatggaaattcaaacatcaatttgccacataatgtaatagggtggtaaaacaggttgaattcatcaaaccaacccacataatcctccaaaaaatggcagagtatattaggtgattaaattcatcatcccaccttgtataagttgtcaacttaaggagttggaggctaaagaactaacttgctcagtgttatcaagactataccgatcatgattcggtcagggaactaggttgatgggtcagtggttgaactgaacgtgggtcgctagccgaactggtatatattaaatatttaaattctatagtaaatatatcatatataaattactttntttgtatctatatcataaaattntgtttgtatcaagagcggttggcacaattggtagcggcttaagtccctaaaccaagtggtccaag

SEQ ID NO: 30014 - DNA, 367 bp, Glycine max
catcataccacctccaggtgctggaactacttcacatgtttcttgatggggcctatgccaattaagagccttggatgaaagaggtatgcctatgtcttccacaacagagtcacacttagaagacggactcctacctctccgtattaaatcatgaaagggaagaagccaactgtcaagctctttcacatctttgagaagtccctgttacactttggcgaatcaagatctaatgaaaaagatggatcccaacagtgaagctggactattcctgggatactctacctacagcagagcatatagagtatacaattccataaccatagcagcgatggaatccatcaatgtggttgctgatgatctgtctcca

SEQ ID NO: 30015 - DNA, 291 bp, Glycine max
  unsure at all n locations
tagcnnagnngttcctgcctcatttccagngagcatcgcgatcaaacaaagagcgcggatatgacaatcaccgggtcaataaacgaagaggacaacactgtttaccttaaagaccggatatctgacataatgggtatgcacaatttcatcccacattttgcaagaatcttacaataaattatttcatggatcaaaccacgtagttatgtgccggtcaatctccacatgatgcataattaagctatttagattacggagaagagctgataaaaattgattactgatcacctc

SEQ ID NO: 30016 - DNA, 445 bp, Glycine max
taatggcctcattagtctcagtcttaggtccaacagcttgaggtggaaccttccaactgacctactttcccttccttccctgcgctttgtatatctccaacacaacaacttctcaggtgttattcctgattctctgccaccacggcttatctttcttgatttgtcccataactcttttacaggacaaattccagcctcaatccaaaacttgacacatctgataggatttaacctccaaaacaactctctcacaggacctattcctgatgttaaccttcctagccttaaggatttggatttgagcttcaactacttgaatggatctattccttcaggtctccataagtttcctgcctcctcatttagagggaatttgatgttatgtggagcacctttgaaacaatgttcttcagtttcccctaataccacattgtctccaccaaca

SEQ ID NO: 30017 - DNA, 310 bp, Glycine max
  unsure at all n locations
agcttcntagttaaatggacggaccttannagaatagctttaatagcccttgtgagccttgtttcccttatcttgttttgaagctcactacaagccttaagtgagaaaccatgatatcaccatatccttaaggaatattggagctgtggaattgttatgggaataagagtggagggtttttgtttcattggacaacttgttatgatggctatgctacatgatgtattttgtgccatacttgatgtacattgtatatnggataaatgttggacatgctgaatgaaatgttgtgtctcaaaggctatagagt

SEQ ID NO: 30018 - DNA, 430 bp, Glycine max
  unsure at all n locations
tgtagaatggctagacatgatacatgtcanggtttggtttggttcaaggataaaagggatgccccacattatttccatgacacaaatgcaaaaatgatgatttggaaattttatgcaaaactggtcatgcatgcacctatgtggacgctcaagtgtcaaacttttatggtcatgtgatgctagggctcaagattcatttcctctattttaaatcaacccaatgtttccaaaatatgttcttttatcaatttgtgcattcatccgagtccatttcgggcgtctgggaaaatttcacagcgttcacccttcgggtgtacacacacatttttttcaaaactagctatgatcagcgaatttttcttcaaagaaaagatggaagtcatctcttttcaaaagcatgttggcttgtcagctatactacttattattt

SEQ ID NO: 30019 - DNA, 424 bp, Glycine max
taagctgccgcctaagattgttatatttgcgtggaggctaactttagatcgactaccaactagagcaaacttgcggtctcgacagatcgaagttgaagatgcaacatgcccattctgcagagaggtggatgaaagcgcatgtcatctattctttcattgtcacaagataactccagtctggtgggaatccttgtactgtgtagatctttccggtgccttgccaaatcacccaaggcatcactttcttcaatacatacacagagtaacagaggaaatgacgtctaccacatggaaatggtggtggttggcactgacatggaccatttggaatcaaacatataacattatcttctccaatggtacattcaatgccatcgagatactagatgatgcagctttcttactatggatgtggctaactaac

SEQ ID NO: 30020 - DNA, 390 bp, Glycine max
atcttgaagctatatagcgtggaagagtcaatcttcctacttttatttgttgaccacaaagtggtacctagagatatgtcgcgggggtcaggagaccttggggacgtcaggtggtgtgctattgcccaaaaccaagcttgatcaatcctgacccaactcgggcatagtcagtcagtgagaacctgtgacgtacctaaacaggcaagctcctgacagtcaaccaataaaagaacaaagaccacaaagcaaggaggcttgtgtggtggctggccagctatggatcttgagtggtatctggaatttggcctctggtaatcgattaccaagggtgtgtaatcgattacaaggcttaaaaatgaagacaggaagttaagatggcctctggtaatc

SEQ ID NO: 30021 - DNA, 439 bp, Glycine max
tgtggttttctcacagataggacatgcatgatgccttttcacactgtatccacttaaatttccatatgctggaaaatcgttaatagtacaaaacaccatggcgcgtaacctgaacatctgttgcacatttgcatcccacgcatctaccctttcttcccacaattttttcaaatcttcaattaacggactaagatacacatcaatatcattctcgggttgccttggacccgcgatcatcatacacaggataatgtatttttgcaaaatacacaaccaggggggaggttgtaaatcatcagtaaaacaggccacaaactgtggttgttgcttaagctgccataaggattcattccatcagaagcaagagcaagccttaagttccttggctcgtccccaaactctggatacaaatgatcaattgtcttccactgtggagaat

SEQ ID NO: 30022 - DNA, 402 bp, Glycine max
  unsure at all n locations
agcttcttatttcttgctcatcttgttggtgatactntntcttccatggcttattccttaatggatggtgcctcctctcacctcttttcctttgtcttccgctgcatctccatggtggaaaatcaccattaaaggaccccattgaagctcanagatccagcctccatagaatccctctttgtaaacaaccaaaatttctcaattgattatttttccttgtttggtgattgttgcaattctcttagtgtagtactagttgaatgaaatagtgtgttaatctctcctctccatttctctagtttttattttcgacttgaatcctttacgaaccctattctacaagttgttgaactatattccaaatttctaccttttgcaactatggaacantaaaatattaaa

SEQ ID NO: 30023 - DNA, 459 bp, Glycine max
  unsure at all n locations
tccttgagaagatntatagagaagttagagcttaactaaacacacccctctaatagttaagctcacctccttgagatgagaagctagagcttaactacacacaactcctataatagctaaattcatcccatgccaaaatacatgaaaatacaaaaaaatttctagtacaaggactactcaaaatgtcctgaaatacaaggctaaaatcctatactattagaatgaccaaaatacaaggctcaaaagaagaaaaaatctattctaatatttacaaagaagagtggacccaacattgacccatgagctcaaaaatctatcctgaggttcatgagaaccccagagccttctttagcagctctaacccaatcatcttggagtcttctgtccaataaccttgggagaaaggattgcatcaacttctccctcgagcgttnttggatctaattatggtgtaagagt

SEQ ID NO: 30024 - DNA, 413 bp, Glycine max
  unsure at all n locations
agctntaagtctttcaacanattatttattgttcatagttttattaataaaaaaaataaatgccttatattctggcaaaaaaggtacatatgttgacaaaacatatgtangaatacaagtgggaagggaagtctcttttgtgtaagaatgaaaaagtgagcaccatatgagtgaggataaaaatcataaactngagttttaaaggtttaagttaaagtgtgaccgtcaattttcttatgtggntgttcatagcttataggtaaaatctcccctgtgatttatccccttcatngcataataattagtataagagtagatgatntaacttggtgatcgactcagacgagtaagatagtaacggaggatcctagtcctanggatcccttgtaccanaagtctttctggcgatgggt

SEQ ID NO: 30025 - DNA, 461 bp, Glycine max
tctcttgattcttgaatcttcttgatttcttctcatgaaacttgaaatttatcttgatcttgaacttgttgactaaatcttgaaatcattctttggggtttttgtcgtcatcttagtcatcatcaaaacttcttgaatcaacttgattcatcatcatgaagcttgcttctacacttaacccccaagaccaaaaaccaactagcctgagaggctaggaaaaaagagccaccagtccctctaaaagagcccccatatcctttagttccatcaaagaagaataaggagcactacttcaagtgtttattggagatattcaaggggttggagataaccatgccatttggggaagccttacagcagatgctgctctacaccaaattcatgaaggacatcttcaccaagaaggggaagtacattgacagtgaaagcattgtggtgggaggcaactgcaatgcagtgat

SEQ ID NO: 30026 - DNA, 364 bp, Glycine max
  unsure at all n locations
agcttgccgcttctgagnnanactactatgtttcttgngnggnggaacaagctacaaaaggatagagcaagaaatgaatagccaatggttgatacatggacggagatgagaaagatcatgaggaagcgggatgtgccggctagatactgcaaggacttgaaattcactctccgaaatctaacaccatgcaacaaggaggttgaggagtatttcaaggaaatggatgtgctgatgattcaagcaaatattgactaagatgacgaggcaactatggctcgacttattaatggtttgactaatgatatacgtgatacttgtgagctgcatgagtatgttgacatggatgatctgcttcacaaagcaa

SEQ ID NO: 30027 - DNA, 438 bp, Glycine max
  unsure at all n locations
actgtgctagagagnaaaacaaatgaccaaagtgaacatagttccatttctagggcaaaattgggtgttgagaagtcaaattttgattcggtggaattttacgtgtaaatccagtttgagcaagtttagattgatgttatggacttgtgtgaggagagagtttgcttcaaatttacctcattctaaatttcacttctcaagcctagaaaatccattaaattgaggggttttggacacctagattttgtgttgctgtggtttgaagcttgtctttggtttatacatgattgatacatgatttgagacttgtaggatttgatttgggcaagattggatgaggggaagtgtgattgtcgaaatctgcactctgtgcagattattgctgtgaaattgtgcagcataatcttgcatgagtgcatacaaatgcttgtgtgtgat

SEQ ID NO: 30028 - DNA, 328 bp, Glycine max
  unsure at all n locations
ctcacaactttcccaaaaaagaagtttaaagatgtgggaagccttcatccaccttgtggcatggtataaaagtgtgccatcttgctaatccaccaccatanagatagagtctacacctctttgggttctatgaagcccaatgacaaagtccatactaatgtctacccaaggtgcanatggaatgggtaagggtgtgtatagcccatgaggcatcaccctagacttggctcgtaaacaagccccactcctagtgcaatgcttatggacatctttcttcatatggngccaataaaacttctctttgagtaagacaagggtcttgtctatc

SEQ ID NO: 30029 - DNA, 449 bp, Glycine max
  unsure at all n locations
gctttgtcacaaagaagaagaagatgttcaaagagattcaaggcttgtaaatgattgtataagatctattggaaaagtatattgaaaagcaaatcaaagccttgcttttatagactcttcatgtctggccaagaggaccatttagaagagttataacttttagaaaaacttaaaaccaatttgaaaaagtcaaaaaccatttgaagagttacatcttttgatttatttagaaacaatcactggtaatcgattaccaaatcagtgtaatcgattacacaaagcttttatgtgaaaggatgagactcttcacatttgaatttgaatttcaacgttcaaaggcactggtaatcgattaccaaaacattgtaatcaattacagctnttttgaaatcaattggaacgttgtaaattcatttgaaaaaaatagtgtgtgcatgctatntcattat

SEQ ID NO: 30030 - DNA, 446 bp, Glycine max
ggacacttgatactaagctacacacacggtcactgcatgtttttgcacagaatgaagaatatttaaccaacaactttgtgcaagaaatccctacacacacacacacacatattaataataaattgaaaccaacttaattaaaacaatttaaaacattctttttaaaatacaagcctttcaaaggggaaaggctccattaccttttaacatcataataaaacttgtacaaataaataataaattcacttcggctcataacaaggcggtctaaaacttgatacaatcaacatagaacctataccctaatgtcacatcctatcctatcagagcattgtattcccgtgtgctctagcatcaggttcttcatagtcatccacctattcatttgctcccactaacaccacgttagagatcatcacatgatccgaacacagattatacactgt

SEQ ID NO: 30031 - DNA, 331 bp, Glycine max
  unsure at all n locations
tttgcncngaacttttattcatgaaaaagggtctttgttacgtgtgggtgagagatgttagaatgagtaatattgatagaagaggaggagatatgagatactacctgcgtactttacaacaaaggccaacatgggtaaagcttattggatatatggcgggaaacatatagcagacaacagcacgaataaggagttcagccagaccatagctatatagataaaaatctcaaaggaatataccaagtggtatctacccaacccatgcaaaggaaccacgtgtccagtgattagcctaacgaaggtatcactcttggataagcaacgagtgatc

SEQ ID NO: 30032 - DNA, 442 bp, Glycine max
  unsure at all n locations
ngccagctggtagtccatggacatgccctgaagacgaagtgttttacaatgcttcaatcatttggggagtagtgggaccacagagaatgtttaccaaggatgggatttaccctgngatgaattggtttttcctgattggcctacttgctcctgttccagtgtggctgcttgctcgcanattcccaaaccataagtggattgagctcatcaatatgcccttaatcattgctggtggtggtggcatcccaccagccagatccgtcaactacataacttgcggatttgtgggaatcttcttcaatttctacgtttacagcaagttcaaggcatggtgggctagacacacttacatcctctcagctgctttagatgctggtgttgctttcatgggtgtcattctctattgtgcccttcagaattatggtgtttttggtccaatatg

SEQ ID NO: 30033 - DNA, 394 bp, Glycine max
  unsure at all n locations
ttttgcttatagattcctttgctttttttgctagacttgaagctataagaatcatgctttcctttgctactcataaaaatataaagttatttcaaatggacgttaaaagtgctttcttaaatggctttattgaagaggaaatatatgtcaaacaacctcttgggtttgaagatcatactcttccagaccatgctttcaaacttaaaaaagctntgtatggtctaaaacaggaaccacatngctggtgtgacagactgagttcatttctcttagaaatggttntattaaagtcaaagtggatacaactctttctaaatgagaaagtggcanagatttcattatagttcaaatntatgttgatgatagtatntttgaagctactaatgaatctctt

SEQ ID NO: 30034 - DNA, 451 bp, Glycine max
tgaatgaatataagacacatcttcttcaatcttggtgattcttgactccatctaatggaagtgcatgtccacttgtaattccaaagtgtcaaacctttcaccaacaaaggtttgaagaccatcaaacctgtccaaaatctttgaaagaagagatgaatcttctccatcatgtccttcttcaccaatatgtcgagcaccctttttcaaccaagagccatcatgctctttttgataaccaaaggatgcaatgactgaagcgcctataaggaaggatctcttgattggaacatagggttcagaatcaagagggatgttaaagtgttgaaggaaaagagtgactagatgaggatatggcaaaggagcattcaatcgcaatgccttatgcctgcgatatctaacaagaagtgcccaatcaatttgtagacctttatgataggcccacataacaatg

SEQ ID NO: 30035 - DNA, 382 bp, Glycine max
  unsure at all n locations
tttgctaataacttataacaaatcaacgntatatccttgtcaccgaaaatattttatatttttttctcgtatccacatttactcgagattatttcttattttcatattttctaatattttcaaagaatgtgccactcataaagtaacattccaaattagagataggcattcatctactttctatgggaacattagtaaaacacatganattatntactatgtgtttaaattgtgccgtttggcatgacatgaacaaggttcttcatatcacgtaaaaagtagataaataaaagtaaacaaataagtatggcatatcccattagtctaaaagcaaggttaatatattcaaaggtttatatcccattatttcatatgttcacat

SEQ ID NO: 30036 - DNA, 446 bp, Glycine max
  unsure at all n locations
tggttcgaggtacttacccgttgaagatcgaagaacgatgaagaacgaatgaagaacgtcgaagaacggttgaaacctttgcgaaattcttcacagaaaacgttacggaaacgtttcggaagcgcctcggcttagattttcttcacggaaacgatttttccaagcaaattcgaaagagagagaagtgccaaaggggctgaacattttcttcttcacttcctcccctatttatagcaaaataggggaggtggttgccgcccagctcgcccaggcgagccaggttgcttcctccagaagcaacagccttctggaggaatattctagagggcccaagtgggcctgggtgctatttccacccccatttttactaagtacacccccctctgctnttttggtgattctttntccgtanagtcacggaaacttacgaattccgtaacgatact

SEQ ID NO: 30037 - DNA, 509 bp, Glycine max
  unsure at all n locations
aaaagttgggccttgttgancctgagngcttttcggagatacanggcgaagttgagcacgggacccgtggatactacagagccgaccttcttgcatgcgagctttgacattggctaggangcagatgaggcatacaacgaaactctgcgtatgagagttaaacaagagtgaatcataagtacgcatgccaactgagtaatgatgaaaatgagaatcgagatgctgaagatgatgttggattggaagtatcaactgtggacttggaacgtacagtgagatgaatggctcttactctatggagttagtatatgtcaaggactggacaaaggctaattttcatgaccgaaataaccctgtgaaacatgatgttctatctatatactgtttaatacgaacacagtgtgtgctatagatgtgatatcgatgcaaagatgtgctagcttctattaatgtgacaacttcttatagctacccatgctatgataatatcatatacggataataacgtg

SEQ ID NO: 30038 - DNA, 428 bp, Glycine max
tatgaggtcggttatatattccttctttcaccctatttgaggtctctttttcctttcataagagaaaaattgtaaatttttagtctctcatttatatatataacacaatttcatacaagagaaattaaaaagacattgatttatttctgaaggattggaagctaacattgtcttgtactaaaactatatttgacaccttttattgcatgatcgctttctctaatatagaatctaagttagtgtattggtttagtgcaggttctgagtgatccccagaagagagcaatctatgatgaatacggagaagaagggcttaaagggcaagtgccacctccagatgccggtggccatacattcttccaaactggagatgtgccaacaacgttcaggttcaatccaagaaacgcagatgacatctttgctgagtt

SEQ ID NO: 30039 - DNA, 133 bp, Glycine max
ttcgagcgtctccatatattatgcgccttaatcggaagatcgagtgaaattgtttgaccatttgaatgctccacagccttctatggtcaaattcgagcatcttgaattttatgcaccttaatcggacctccca

SEQ ID NO: 30040 - DNA, 398 bp, Glycine max
  unsure at all n locations
ttgaaaagtgttgtttntcaccttctcgctacgcctttctactggcttagcgagcatccgctaagcgcaacactcatgggcttagtgcaaggaagactctcgacgaagatgagttgcacaggttcgcaaagcgcactgtttcatctcactaagcacaccgcttcagtccatacgctaagcgagaaaggcatgtgctaagccaaaattcactaatgtgcgcttagcggtccattattgtgctaagcgcatgagcactatcaaggctacctatataagccataaatcatgatttgtgaacggagtttgggctgtgattcagagctttagatggttagagatgttatagagagaaagtctcagttctagagagttttgagagattttgttggtgatgatct

SEQ ID NO: 30041 - DNA, 408 bp, Glycine max
  unsure at all n locations
agcttgtttgttacaatgacattgactgggctagagatgaagatgatcagaaaagtactagtggatatatgtttttcatgggaaatacaaccttcacttggatgtcaaaaaagtagtcgatatatagtcattcttttgacttgtaagccaaaatacctagcagttgcttcatgcatttgtcatgcaatatggctcaagaatttgttaaaagagttgggcatgtcacaagaagagttaccaagatctttgtcgataattaataagtcagtcattgctctagcaaagaatccaatgttccatgatcgaagcanacatattgatacccgttaccactacataaaggagagcacaacaagaaaggatgtacatgcangatatgtgaagtctcaagaccaagtagttgacatc

SEQ ID NO: 30042 - DNA, 277 bp, Glycine max
  unsure at all n locations
gggacgagggcaacccaacactatggctacattgcacacgagggaacgccttaacgtccccgccaccactaggggaagaatcatggtgaccagaacaagttcccaaactggagaagtagtggaaggttgcaccctcccgcggaggtgagaagtgcctccaccagcacgacacaagaccgtcacactctttgaggaagcggacttgctatcgaaagccccatggcgagtctcctccgangaggaaccgccgatggagacgacccttagagtcactatc

SEQ ID NO: 30043 - DNA, 480 bp, Glycine max
  unsure at all n locations
agcccggtttatgcttcatccccnaatttgnnanngacggngcgnngnnnaagctatattacaannanaantaanatgnntttccgaagngggacataattgggcgaaggttgcctgtttttttctctctgccccggcgccacatgccacatgcagggatggtgggatcagtatttgagagattactattaggagctgaatttgagagacatgtgccaggaaaaagagggagaaggataaagataaacggatagaaaccttataatgaataaagtctaagaaatgttacaagtttgaatgtgaccgtctaatgggtatgataaaaatctcaaaagttcgaatgtgattgtctaatggcgatgatattcatattttctactaaaaaatctcatanaatttatcagaatttatttaaaaaaacattaaaattgaaaacttttgatatcaagagacttttataaatataaaaatctaattaat

SEQ ID NO: 30044 - DNA, 405 bp, Glycine max
  unsure at all n locations
agcttctcgtttatgagaacaaatntcaatatcattcatcataattggctcccaccaatttttcagattcaagtttaccacagaatgacaatgaagacatactgttaattaataacacatccaaagcggcgacatattatcttgcaaccacttaagcttaaagtagacctactattgttctcctttggcagaacaacacccanatattgttcatacatttcctcccaatcataataagttgcaccagtaattggcctatcgtccacccttaaaccaagctgtagtgttacatcctctagtgtaattatacattatccaacaagaaaatgataagtgtgcgtctctggtcaacaagtgcaggcactagatgatgatcaatcttgaagtgtcataattttgtcacat

SEQ ID NO: 30045 - DNA, 306 bp, Glycine max
agataaatagtaaaaaagtgttttaaaacattgagtagcacaagaatttttcacaaaatcttttaccaaagagttctactctctggtaatcgattaccagaaggtagtaatcgattaccaatagccaacattgtttttaaaactgatttacaaagttgtaatcgattaccatgagcatgtaatcgattaccaatattttaaagcgttagatatcaaatgtcagaagtcacagatagtgatagaacattttcaaaacagtttaaacttgtgtaagcgattacacaatacttgtaatcgaataccagt

SEQ ID NO: 30046 - DNA, 403 bp, Glycine max
  unsure at all n locations
agctttcatatttgaaaaaaaaatactaacttttggctcttggaatttttcttctggctttctaagatatgaactggtaagttgttctaaataataaaggatatggtctcagattattttgcgcagttgaaattcttgcatactatccagttgcaatcttgttagcaagtagcaactacaatgacacttatanacgatggaaaaatctatntgactactgntgtgcatccccttctaaagaattgtctgtgcctgtctttttgtcctgcttgtaagctggacanaatgaggaatattctgaattcattatggatctacttcgtaagtccttaactgactnnttacttatttctttgctgcagggagatcaattgcaagtgacagtaaataaattaacatcaac

SEQ ID NO: 30047 - DNA, 426 bp, Glycine max
aggaacggcggataagaatagagagagagattatgtttctgggaagtgactttattctagtagccgcgtgacatgagccttcgcattcgcccagaatacaggaacaaacttggaatgggcaccaggcgcaaccacgtaagcccaattctgttcaaacaatctagttccgggtgttactaggagcacccagaatttttttctggggcacccaaaaacatagtggaagaataaaacaatgagtaaatagacgttataaataaatagtattgctatatataaaactaatcccgtgtttaagaacgcctcaagaatttcgagcgaacctagccagcaaaagttgatggaatttggactcaaaagaatggcggtgcaattctagactatagttgcttttggcaaaactaacgctaaacaatctattggtga

SEQ ID NO: 30048 - DNA, 55 bp, Glycine max
agcttttttcatcttatcattatcaaacagatggtcagactgaacgaaccattca

SEQ ID NO: 30049 - DNA, 443 bp, Glycine max
  unsure at all n locations
tatcatgatctggaaaagtaaaacaatgtcagttatatagtttagataatcatgattatatcagtaatttcattgcctccaatatcatataaagcatttagtataatatataacaatatatggtaacatatgagagttaaaagcttacaaacatacgcttacaaggtcatttcatatatcacaaaattgaagataacattcaatggttcatcatcaaatgttgcatcatattaatatacacattttgaataggcaacacttgcctctcagtcaaaatgcattttcagcaattggatgttatctctaaaaaagttaagattgtatcagacttagtagcacattcagcagcatgacaaaagacacaggataaataatgcaccatangatcaataccaaactggaagagataacttctcagttttaaaggtgaacactattataat

SEQ ID NO: 30050 - DNA, 408 bp, Glycine max
agttagtaatgagtggaacttgatttatggtttagctcaatttgacttaaaagaatgacttagttcaaagcttgttacaagtttaatatcaacttttattttttatttgaattcagtttgatttaaacttgtgagtaattcaatttagctcttttgttggattggtttaaaactataattattttaattcttttatttatttatttattttgtgaaataaaattaattaacaaactaattatgtcaatttactattttatatcaatttagtcatattaacacatgtaaaattagaggatgaaattcagggagaaatgacactggctattggcgtgaagtgggcgaaacagccgaaaacctgaactgggacatttttgcaccacaactagtacttaagtagtctttctg

SEQ ID NO: 30051 - DNA, 404 bp, Glycine max
  unsure at all n locations
agtctttatttttatttcttgacnatctttaatgagctggtgtaacagaaaatgataaaataatcatgtaaggtccgttttatacacacatacatctagcgaattctaatttacatgtagcggtttctcgacaaaatgcagatatgcttctgataattgttttggggtgcattgacacccatcaaaatgggacaacaattgattggtctgtcaaccatgcgcaatcaatttattatcagataggttgcaacgcattgattttgaatccttgatcgttaccacacacgtgccctatatgagcaactatcgtagagaccaagaactctttccttgaaataagttccctctttcctttctgtagtgctttgcttgatcttccactcacggtgataaaaatctgactc

SEQ ID NO: 30052 - DNA, 419 bp, Glycine max
  unsure at all n locations
gaccgctntcagttttatacctagtaaatccatagatangtttatcaaaccagtatacaaatggggacagaaaatgaaaaaaggtaagtgagctcaaactcaaagaatgcataatatatcatttcaaaatcagaaccactgaaccaccaaacattataaaagaatttgccagatcaaacatctagaatgggtagaccttacaagaacaattagacgagaagaaagtttcatgcagaattaatgtacaaaatgcaaaaacaaaagacaagccttcaaaacctatggtcagagacactacgcttattggatgttattcatgaacttcagtatttgttattagaatcatatagtttcaggagtcttattaatatgctatgttatcattgttatgtagcagaattgtacaagacctatcatat

SEQ ID NO: 30053 - DNA, 367 bp, Glycine max
  unsure at all n locations
ttactcggaattggtaactacattttttaagctcgaagttttactgaattttgtagacatttggaccacaattataaaaaaagaaccaagcgaattggattaaagaaaaaaactaaaaaaatcacacaagttggatgaaaaatcagtgtccaggaaaataaaagtgaaaaggaagtgtgcttgttggtttaactcaaaactttttctataattggtgcctactttataccactcctagttctgaaacttcaattgaaaataattatgaaaacaagtgccaaaaatagaggtttcttgagtctttttttcgtttctctttattaagntttctactctactctatagcctttctaggtttgtctttgag

SEQ ID NO: 30054 - DNA, 427 bp, Glycine max
  unsure at all n locations
ctaattatatcctataaanttgctatcacttactacttacatacattcgaagtacaccatacaaatttttgttgtttcactcctatttatttatatgcatattggaaagctaattacatcctgcacatatttgcattcaaaaagggcattccacactatcatacattcatttaagaaaacaattactcatactttgctaggaatttcatgctccttatatttacctatgtatacacactattgcaaggtgttttccacgctacctctatgtaaagtatcaaacatggggcagcccaaattcgagcaaaaactctcacaagcaaatcctaattttcatgtttttctaattctaaaaccaaattntggattcctagccataagcatgtttccttgcattgaagctacaagtttgggttcctaagcttgg

SEQ ID NO: 30055 - DNA, 417 bp, Glycine max
  unsure at all n locations
gtcatgcgatttatatacatgaaattgattagactattattttattcgaccggnaaaatatcatggacattgaaaacatggcccacaaagtcacctccatgaaaagtttaaagaatttaactaattcctataactaatatattttaagagtaaattaaatcataaatctgcaaattaaaataaaaaactcaaaaaaagaaaacaactattaaaaaaatacaatacataaatatagaattaaaaaaataaattcataaaacaaaaaaatggcacattgagaaattggtttgcgacatattgtgtagcaaaaaaaattaaagctggacagtgagaaatcggattaggggcaccggattttcattggcaataatgatttgtatcacttttgatagataatttggaacttgtattatttgt

SEQ ID NO: 30056 - DNA, 419 bp, Glycine max
  unsure at all n locations
tgtatttcttgaggaaatactgtaatacttaattgggtgcacctacatgtaacaacatcactttccccgtcaacaaacatgatcaaatcaacaactattatttctacacattagggtgaaaaagcactcaatatttttgctataacataacaaaagtgttacaacaagagtaaagtgattccaacttcaacttttttttttcacttccctcatttcatttgggtgcctaaggtatctagcctagagtcagaaactaatttctcaagacacaaagatcgattcaagggagctgaactcacccaacatanaaacataagagactcaatcacttcctaatttccatccnctaataaaacatgatttgtggaacaagtgagttaaaataactaanagaattgaaaagcacctgcatgttgact

SEQ ID NO: 30057 - DNA, 276 bp, Glycine max
tgaacagatttgataggagctagggagtttaccctctgattcatataaaaaaaaaagacatcacatcatgcttacccgtttaataggcatggaatagacaagtctctaagttaacacgggaagtgcgaggcatgaagcgccaatcgcgagggacaagtaacccataaccatgaactgaacatgaagaagcctcctaagttaaaaataaagcgcaagacggtgggataaattgggattagtacagcgttgtaggccaaaataaaacgaaaagcggaa

SEQ ID NO: 30058 - DNA, 406 bp, Glycine max
  unsure at all n locations
ctgctacttatatatcgagacgatcaaaattgaacaacggaagctctcgtgaaattaaaatggtcataagttttaactcggatgtccgattcaggagcttcacatatcgagatgcacgaaattgaacaatggaagctctagagaaattctaatggtcataaattttcacacggaggtcctattcaggcgcttaatatatccagacgctcgaaattgaacaatggaagctctcgagatattcaaatggtcataacttttcactcggatgtccgattcaggtgtatcacatatccagacgctcggaatngattagcggaagctctagagaaattcacatggtcataacttttcacacggatgtcctattcaagcgcttaatatatcgagacgctcgaaatttgacaac

SEQ ID NO: 30059 - DNA, 389 bp, Glycine max
  unsure at all n locations
acaagtttcttcacaaataactatcatgttgtctgtttactagcaagactacccatcatatctcccaaaaccccatacccacgaaatttaagagagaaagaagtccacccaaacctgaattttcgaagtcccactcgtagccacgcacttcacgaccccgaaaatgccctcctttcgcgatttggggcagaaatgatggacaaaggttgaagctttgcttggagcttcaatggagaatgaagaagaagaaaatggcaacgtgagggagagagagagctgtctganaaagtgtggtgctgagtgaagagagagaacagctctctgggtttaaataaaagggtttctcttttctattattttattaagcattgcacatgtctcatttgagt

SEQ ID NO: 30060 - DNA, 343 bp, Glycine max
  unsure at all n locations
tagctttgtttactttattnttggtaagaggctttacatattatatactaagatatctggttgaatcttccatttcttatctatggtcttgaacacttacgaagtctaccagtggtatgctaatcatgtgtatgcaattgactagatgaaactagaaggaatttggtagattggcctaaacgatttaacattatttgtggcattgctcgaggacttctttatctncatgaagattctagaatgaggattgtacatagagatctgaaaacctagcacattttactagatgaaaatttcaatccanaaatatcagactttggcttagcacgagcattcttgggag

SEQ ID NO: 30061 - DNA, 419 bp, Glycine max
aaagtctcacgattgtcacgtgctcatgcattatttgttagtcgtggctatacgagacatcttgcgaaacaaagtcaggttagcgataactcgcttgtgctttttcttccatgctatatgtagcaaagtccttgatctagtcaagtttgatgagttggaaaatgaggccgcaattatactgtgccagttggagatgtatttccccccccgctttctttgacatcatgattcacttgattatgcatctggtcagagaaatcaaatgttgtggtcctgtttatctacggtggatgtacccagttgagcgatacatgaagatcttacaagggtatacaaagaatctatatcgtccagaagcatctattgttgagaggtacattgcagaagaagccacttgaattttgtcataatacttacag

SEQ ID NO: 30062 - DNA, 399 bp, Glycine max
  unsure at all n locations
agcttatattcctattgtcctatagaggcatttcattccttctggagagtccactagctctatgatagttgtcacacctctgaacatattcataagcatccttgtgcaaggtaagccaataaaaactagattgaaggaccttggcagtagtcctctctccatcgtaattgccttcacaatgtgaactatggcaatgccacaatatgcttcttgcctccccctaagttacacatcttctcaagagattatctgctccaattttataaagattgggatccccccacacaaaatatttagtgtccttgacaaacttctttttttggaccaagtgagatcatcangaaatgcaccaattgctttgacactagtcatctcagcagaccatggccttctacaatg

SEQ ID NO: 30063 - DNA, 433 bp, Glycine max
  unsure at all n locations
tggtcttcgccagtgaaaggatcaatgtggttcttatttatgcaaatangatcatcctactatgacgactgagaaaactggggcaaataaagagggtgaggatgaggcacaaacccatgctgtgactaccattcctgtacggccaagtttcccaccaacccaacaatatctttactcagccaataacaaactttctccttacccaccacccagttatccacaaaggtcatccctaaatataccacaaagtatgtctaccgcacttccaatgacgaacaccacctttatcacaaaccagaatacaccaaccaagaagcgaactttgcagcgagaaagcctggaggaatcaccccaattccagtgtcctatgctgacttgctcccatatctacttgataattcaatggtagccataaccctatccaacgttatca

SEQ ID NO: 30064 - DNA, 251 bp, Glycine max
  unsure at all n locations
atggttaataatctgcataaaggtgtgaatgtgtgtggtatgtttggtttagttcaattcttggtgcatggatngagatcccacattgactatagatatggctaaagtagaaattataaaggctggggaaatcctcacctcatgaagctagctttggagtttgagtcaagcttatctcanattcaagatggtatcagagcctatcataaattcgatattgggccaccctcaactgtccaaaaatctacatg

SEQ ID NO: 30065 - DNA, 431 bp, Glycine max
  unsure at all n locations
aacctcgtgtaggcgcttcacgcncgccatgcgcttttttcgcgtnctttgcgcgcgcgagctcgagcgcttcctccatcggatctggcgcggccgggtgcagatctggtttaactgtcaccggattcaccaccgcataacggcgccgggaagttgcgaaatgcaaatgtaaatgcgaatgcgggatttaaaaggagtgagagggaggttcagtggagtgtagtgagagagagagattgtgaatttagttagcggaggcgtcaaaatgaggggagaggttgcggtacgagagagaaagagaatgatgacgcggaaatgaaatgaaatggaaaatgatttgaaaactatgttttatgctatggggctgccgtgcttgaaaattaaccactattagtattgagtgatagtttgttgggttgggttgcttttaa

SEQ ID NO: 30066 - DNA, 478 bp, Glycine max
  unsure at all n locations
cgggccggttcctatgccatgaatatctaggcaattcagctcgtacccggggatctctaaagtcaacctganggcttgcagcttttttacattattgtgagagtggttgacagaaatcaaaagcttattttggaggccccttttttaaaaaataaaacatttaaaattgaaaatgatgggataaaataaaaatggtttggcactggaagtaaacgtggagaatgggtattggattactgatttggccctttaaattttaaaaatctgaatcagcttaactcaagaaaaatggtggtgggtttgcctcagatcaagccttctagtgaagatgtgatggttgttacagtgtaagcatcaagagcactttcaaacaaatgaccaatcaggcaaaagagaacttgaatgattactctgtgtgtgtgccctatgcgactgatctctggtggaacagatctcatatctttatgatgattgacan

SEQ ID NO: 30067 - DNA, 436 bp, Glycine max
  unsure at all n locations
ctacaagagaagatacaaattctaagaaattctttaattgtgtgatgagaatatgttataccatgaacttattttctaaaatttttgcaattggtataattgaagccttgcttgattcctgtttttctttttcttttctcatttatgttttgcgaaggcatttttttctcatttattattttctgtcattgcattgagatcgtaggcatagattcaatcttttcctctaagtacacacattctaaaacagatttttaatcaactgatgagaacaggttataccatgcatcattattgttagaattcatggttcagttcaagatagaagagagaattgagaaaaaaaaaattatatgtatattaatattcttaaatgagtacccaacaagtatataccanagattccctatgagatgatgattgaaaagaagtctag

SEQ ID NO: 30068 - DNA, 117 bp, Glycine max
tgattctgatataataatgaaaacttgaatagtgatgatgattcttgtaccaccccagcttttactaggaaatcctccaaagtcatttcctcaagtgtttgcttgcttttgagcagt

SEQ ID NO: 30069 - DNA, 444 bp, Glycine max
  unsure at all n locations
aatagatttagttagtcactctacttgcaaaagagagattttctagctttctaggaacttagacgttgatgaactttgtttaagataaattgaaaagtattcctagaagctatcttatgaaagatagacactccaaggtactttccaagatccttagtccaagcaatacccatttctccacttagttgatccttgacttgagtctccacatttttggaaaagaacattcaagatttctccaagctaattttctgcttagaactcttgcaaaataaattcaaaatattcttgatagaatggacctgctccactaaagccttcataaataaaataaggtcgtatgcaaaggctaagtgagatataagtggaccatgtctaaaaagacgaatagggcaccacactctntggtccacaacaacagagatcaattgaaacatatgttca

SEQ ID NO: 30070 - DNA, 407 bp, Glycine max
  unsure at all n locations
agctttgatttacacagagggtttcagggacaaagcttcgatttacatattgaatttcatccaattttttgacaagtcattgttacttccatgaatattgatattgtatcatgcttaattatatgcatttgattattctgatcattgtgtgttgtgtgattatttcttccatgcaggtacatgattcctatttgttgtgagagtgaaatgatgggcagcatcaccaactgaggtgagtttatatttccttttttttgtctttatctttgttagttcgttatatagtttttattttatatgtttgagttctacatgtgtaaaaaatagaaatagacaggtctggtgattgcttangaattccttgttgtttcatggcattccttntgaacctcanaaggtgcttatga

SEQ ID NO: 30071 - DNA, 426 bp, Glycine max
  unsure at all n locations
gctgcaccattgacagatntacttagtaaagaagcattcttgttgtctccagaggcagagacaacatttgttcaattgcagaaagtcatgacttcagctccagtgttagctcttcctaatttccagctgcccttcattctggaaactaatgcttccgacactggtattggagtagtattacatcagaatggccatccaatagcatttttttccaagaaacttgcacctagagtgcaaaagaaatctgactaatttagagagatgttagcaattgttgaagctatagctaagttcagacactacttgctgggacacaaatttattatcaaaactgatcacaattagtcagatgatgatgttgatggatggaacaaccgctacagacacctgaacaacaacagtggttacacaggtttttgggatatg

SEQ ID NO: 30072 - DNA, 382 bp, Glycine max
  unsure at all n locations
agtctttttgaaaagattcctaaagaagctagagcttagctacacacacctctctaatagctaagctcatctncttgagatgagaagctggaacttagctacacaccccctataatagctaagctcacccccatgacaaaatacatgaaaatacaaagaanagtccctactacaaagactactcaaaatgcctcgaaatacaaggctaaaaccctatactactggaatggccaaaatacaaggcctaaacgaaggaaaaatacctattctaatatttacaaagataagcgggctcatacttagcccaggggctcanaatctaccctaaggctcatgagaaccctanggccttcccttggatctctggcccaatctacctgga

SEQ ID NO: 30073 - DNA, 446 bp, Glycine max
  unsure at all n locations
gggctganaatatataacaacaccaaggatctacttttatctctcctctntcgtttttagttgtaggcttctcttcttcttttagacactcttagccagaagtagcaagaaaaaaatatttgttttgtaatcaaagttttgattagtggatgtggaagtaatgctttccaagattattttgatgatgccaaaaactcaagtcaagaatcaagagtcaagcaagtttcaagaatcaaagagtcgttcaatcaaagcaagtttcaagaatcatagagtcgttcaatcaagattcaagattcaagattgaagtaaagaatcaagagaagactcaattaagataagtattaaaagagtttttcaaaatattgaatagcacaattttgttcaagagaatctttcaaagaacaatcttttacaaagagttgtactctctgataatcgattac

SEQ ID NO: 30074 - DNA, 387 bp, Glycine max
  unsure at all n locations
agcttgtatcattngacttatatgctctagcttgagcgagtgttggaattagtagttaaatgcctttcagatacaggtacactattcttgtacctagaatataccgtgcatgtactaaggaactaaaatcatcattaatctccttataaacacaaaacagtgtatataaatactagatcagctgaataactcattcaagctattagaaaagtcattctcgtaatccctaanaattcctcatgtaataacattcaaccttccaacaaatgcatatggaggatttcacattctcaattcattgatcttcattcaagtgctactaaatctcaaaatatantaaatntatgtctttggtgcatctatcattgcttaatcanggggttatgc

SEQ ID NO: 30075 - DNA, 447 bp, Glycine max
caagatgagcggtcatccttgcagcccataattcgttcttctcaccatcaaaaattggtggtgaacctgttgtgtatgatgtttctccctccattgatttctctcaactcacagatcccttaaagataagagctctgataccaatttgttgtttttggttaataacggtaagcagaaatattaaagaatgaaagggagcgtaaagaaagaaattgagactacaaaggcttgttttattctgatatgaagcaacgtatttaaaaacatgaaaggatagtaacggctaacaaaaagataacaccactaacagatcatgcctagaaaataggatcaaaactaatttatcctatcagtcaacatgactgttatttttccttaaaaatagcacaagaatcttatctactatagtttgttagacagtttcaacagtcacatcttaataaatta

SEQ ID NO: 30076 - DNA, 326 bp, Glycine max
gtggtaatcagagcacaagagcttcaagtaggtgcttcttaaaccctcattaatttttttttccttaccttctcttccattgttgtttcttcatttttctccacgtatctcctcacatgtcttgttctaaatgttgttaacatgaatctttatagtttccaccgattaaacttgctatagaaactaaatttgattttctatggttcatatctcttggtcttggtcttgaaccatgaattgtgttgagtttatgttcctttgagctttgtcttgttatttttggtggctgaaacctaaaccataaaattcttacaaaaatattaaag

SEQ ID NO: 30077 - DNA, 434 bp, Glycine max
  unsure at all n locations
ttagagganactcaatcacctaaatcatctgcagcatttctgtgttaagagaatccgaagtaggtgcatcagaagctcatatcatggctgaagatcaaccacgaacggttactcttgaagattattctagctcgatcgtgccacaattcttcacaagcattgcgcggccggaagttcaggctcacgtcatcacatatcctcaatccttgattcagctgattcaaggagatttatttcatggattgccaaatgaagacccttacacacacttggctacttatattgaaatctgcaacacagtaaagattgtcggtgtgccagaagatgcagtgaagctcagtttgttctcattttctttggctggagaagctaagaggtggctacactcatttaaggganacaatttgaagacttgngatgaggttgtagagaag

SEQ ID NO: 30078 - DNA, 391 bp, Glycine max
  unsure at all n locations
tagctgctaaactaaaatcaattgagggaacctcccccagtattcccattgaaaaacctttatatcaacctttcaaagttagtgaaaaggctaaacgaaaaaattagggacctataaaaaactaattcttaattgaagggcgacgtgataaccatagtgaaatacttaacaagattgatagtttacttaaaggcatttcagatactccccaagcctcggaaaatactttcaaaatggtaacaagaagtaccctccaattaattaatggttataatgaagatagtgaccacagctcagaatacacacactgagataggatcagtgtcagaaaagaatatanatccantaaattccaacacctgagaacacccctccaaatatattatcaacn

SEQ ID NO: 30079 - DNA, 436 bp, Glycine max
atccaagtaattcttgtgggtgaagctccttcttcttgttctattccctagtggatggtgcgtcccctctcctcttctcctttgccttccgctgcatctccatggtgaaaaatcaccattgaaggacctcattggagctcaaagatccagcctccatagaatcttcacaagcaagtttccatcaagtggtaatcagagcacaagagctacaagtaggtgctccttatacctccattaatttttttgctttaccttctcttccattgttgtttctccatgtatctcctcacatgtcttgtgataaatgtttttaacatgattctttagagtttccaccgattaaacttgctatataagctagatttgattttctatggttcacatttcttgttcttggtcttgaaccatgaattgtgatgagtataagttcctttga

SEQ ID NO: 30080 - DNA, 346 bp, Glycine max
tatcttgtcattgtctacgccgaagacgaaggatgacgatgtacctttctggaaggatggtgaacaacgacccctaagaagataaagcttgctgggaggttgctgcgtgcacgggacaccatagacttcaccgaagaaaacgttctttgaaactgaagaagaagagaatgttgttttattagatatattaacttttattttatgaatgaagggtattctatgaagctcattctattgctgggcgcaccatcaattctgttgggtgcacctagcaacagccaggtgaatttcgcgcctatgttggcctcctttcccttaaccaatgagtggtcctccaattgagcat

SEQ ID NO: 30081 - DNA, 421 bp, Glycine max
  unsure at all n locations
tcctagcggtttctaattatatggacctataaatctatatatgctgacaatagacgagaagttcgtggatctcctcgngggggagtaggtgtccgccatcgctttggccttggctagctcttcatcaatggattcctttgcatcttggaagatgaatggcaatgtaatggagacaggaagagagagaggagacgccacttcagggagaagatgagtctagaagaagctcaccaccataggaggccatggataagagcttggaggaagaaagagatgaatgaagggagaaggagagaagagcacganattttgtgctctaaatgagctctgaaatctgaagtttaatattcagatgatcaaagttcaaaaaaatgcacacatatgacctctatntataccctaagtgtcacaccaaattgga

SEQ ID NO: 30082 - DNA, 410 bp, Glycine max
  unsure at all n locations
tgcttatattaacaaaattgccttaatcatttccaaatatgcatgtgaattaagatgcatcaacaagaatcaagccaaggctattgtgcaagcaatcaatggggcaaaacacaccaaatgattataatgatggatggctcacattctcacaaaggtaaaatcatcactttcaaattgagctttcaaaactatcatgacatgtagagaagaatcaatgatttcaagtcacaaaatgtcaagaacttttattttcaaaacaattacccatttcttgaacatatcctataattcaaagaaaaacatgcaaagtcgtacgtgcacacaaaatngacccanaatattaaactgaagatccgacgaaactaacaacatttacagagttacacaactaacanattaacaaaaccaac

SEQ ID NO: 30083 - DNA, 427 bp, Glycine max
  unsure at all n locations
nttgaaatcaaacttttccactggtaatcgattatattgattatggtaatcgattactagagaataaaaactctggtaacttagaaaattttgagaaaaacttttttgaaaaacaaaattgggctatgtttgttttttgaaaaatcttttcaatacttcccttgtgaagtattcttgatttcttctcttgaatcttgaattcatcttctcttgaatcttcttgatttaatcttgatcttgaacttgttgactcaatcttgaaatcattctcttgggctttttgtcatcatcaaaactacttgaatcaacttgattcatcatcatgaagcttgcttctacaccaaccacaaagtcaattacagactaagccttgtcttggatatttagatgcagaaccatcctaattagaatccactgcagaacaata

SEQ ID NO: 30084 - DNA, 276 bp, Glycine max
  unsure at all n locations
gatgccactctacttcaaattcttgaaggatatggtaaccagggaacataagtatattcaccaagaaaacattataatggaaggaaattggagtcttgggattcaaaagaacctttcaccccaacctaaagaccttgggagtataactattcctttgtcaattggagaagtcactatgggaaaagctcttattgacctgngagccagtataaatttaatggtgctctccatgtgtaaaanggtgggaagcgtagagatcatgcccactaaaatgac

SEQ ID NO: 30085 - DNA, 432 bp, Glycine max
  unsure at all n locations
cggagccncatgaattgagttttcgttatgcttctctaccttcgagtttggagccatgcgtagtgattgcttagtgcaattctccattctcaacccctttttcggagccccatgaattgcgttttcgttcatgtgtcctccaccttcgagtttggagctatgcgtagtgattgcttagtgcaattctccattctccaccctttttcggagcccatgaatttcgttttcgttcatgtgtcctccaccttcgtgtttggggccatgtgtagtgattgcttagtgcaattctccattctcaacctttttcggagccccatgaatttcgttttcgttcatgtgtcctccaccatcgagtttggagctatgcgtagtgatggcctagtgtaattctccattctcaacctttttcggagctccatgaattgcgttttc

SEQ ID NO: 30086 - DNA, 369 bp, Glycine max
  unsure at all n locations
agctttaaggttttangaccttaaattctcttaaggtgcggatgtggagcccactgaaagtgagaacacgtagccctctaaagtcgggggcgggtcaccctttgaaagacgaaggcgtccagccctctaaaagcgagggtgtgtagcccactaaaggagagggtgtgcagccctctgaaggcgaggacgtgcaaccctctaaaggtgaagacgtgtagtcctctgaaggtgagggcgtgtggccctctgaaggcaaggacatgtaatcctctgaaagcgagggcgtgcagccctctaaaggagagggtgtgcagcctcatgaaggcgaagatgtgcagccctctaaaggtgaggacgtgtagtcctctg

SEQ ID NO: 30087 - DNA, 432 bp, Glycine max
  unsure at all n locations
tatgcccgagtcattcatccctatgagatgttgttgatttattggcgatcagaattgccattgcttggattacggngttgaaccaagctcatgcttttacaaaaaggttcatcaagtcaagttgaaatatggaagtaaccgtcttgcaaaattggggcaaaagatgaatcgagtcacatcactgcttcgtttactgccaaacatatttaggattgtttatgtccttgttacttccagtttcaccttgacaaagatgtcatggaccatgttgaaaatctaaattgattcaaccncatatcctgcgtaaacattcgcaatacttcaactgtacatcattcgcatacatccatgcttttcattggttgcattgctcattgcattctttccttgaagaataanatacaatacaaaatggacttaatcattgttatc

SEQ ID NO: 30088 - DNA, 387 bp, Glycine max
caagctttaatttcctgaagctccatggtatctatccactcattgaaaccagcacttgcatgaacacccacatacccgtgagaggaaccaattctttcatccatactcctaatactgttgaaagtccccaagaaacaccaagcacccttaggattagaggcttttaagtgcttcagttgatcccaaagctctctcttcccagctatgtcacacggggcataaacatttacaatgtacaacagcaagttatccttagcccatctccctgccaacatcagaaagtttgtgcccttgacccttctatcaacctcgaaggcaaggttattccacatgcaaagaagaccaccagcagtgttaattgaagggacactgtcccaagacacacta

SEQ ID NO: 30089 - DNA, 431 bp, Glycine max
  unsure at all n locations
cgagttcttntcttagccctattctctgtntgctnttgcttcttccttaaggcattgtttcttctacaagttctttgaatctcttgatccaaagggactagatcttcttaagaaactctacctcatacatggaacaaagcaactaaagaacatgttagcacagtactcaagagtaatataaaaacagaatttaaaagcaaagaattgaagaataatgaatcattgcatagaatatgaaattagcataagttgcctaatacgagaaacaagtccccgacaatgatgccagaaaacttattacatcattgacaaacgtaccaattagtgtagtattttcaatagtaagtagaaagactgtctcctcaaggacttgtntgtactaagcttttctgtgtaactcaacaactaagcaatgataatttcttcttttg

SEQ ID NO: 30090 - DNA, 381 bp, Glycine max
tttttttcttaggggaggcccttatggtctccaatggtggcatcttcgaatcctgcctgctcttggcattaatactggcacccaatccaccatcatcagaccaatctctttcgctgtctgacccaaaaacactctcactctgactaaaactacttggacttgctgggattccgggtttctgcttgctacttgagcctggttctaaagcattttccaatttatcacgaaggtttaaaaacttgtgcttcttccttttcgcgcgcaattcgcttagtacggtttcctttgaagccgtctttcagcatgtctagccgaggaacgaaccttgacagaagaaggatgatgagatgaatctgcagtagtagtattagtagtagtagt

SEQ ID NO: 30091 - DNA, 445 bp, Glycine max
acgatatatattctatctttcttccttccttatagaccttgtatatatgctcataaacagtgtacaggggtattttaaggctactccactcgatcgagtttatattcacaccagccatttctattttcgatatcttctcagcacttcagaataacaacttgcattttattttcttttgcttttgaggctaaatcaggcctacggatatgcttacagcgtgtagttctgccatctatctatcacaagagaaagagaagcgttacactaagctagtattaagtatttaatttaataataccgtgaagggattccgaatttattcattgaaagtaaaacatacaaaacggggacgatcacatacagaggaccagttgaaagatgtttctagtctagctctcaacagacccacactggaaagatgcttggtgtttgctggcatctttcg

SEQ ID NO: 30092 - DNA, 416 bp, Glycine max
  unsure at all n locations
agcttgtantcattgtctccacgccacatctgtaaatgaaatttcccaccctaaccaaggagattgtgaccatcaaggctgatcaaaagcaagcacaataatgctatgctgagagcctgaaggtaacaccctatcctcccactagggagcttgccaagcctcaccctacagcggttgaaggtactcaagtcatgaacaaagggcttccaatccgagccttcattgtttaccaaacaagcctggacgatgaatttgatatagatttgtgggagaacacttctgacagaggccaaaagcccatcgaagagcttgtcaagctgcatgtaaggacctcactagccttgaacacaagcacatcattgatgtcctatacaagaacatggacctgttctcttgcagccatctgacatgccgag

SEQ ID NO: 30093 - DNA, 417 bp, Glycine max
tccactatggcgtagcccatagaatctatttttacccagctatcaaggaatgttagatccattttcaattcagttcccaacaaatcctcatcattctagttgttgtaccaatgacgacgacaacaacaactattggagcatggaggatatctggtcaatgcaattagccaattactgaacgggaattaaacctataaacataaatataaataatatatataaacctaagtgtctaagttccataaattaagctgtagtctctggcttaaaacatgttaggtttgtttatacaagtagttggatgtttggagtacttcggccttttgcgtaccatcaatatttaagaactaagttagttatgctccgtaacttatgggctcttaataaactatatctgcacaaaattatatatatatc

SEQ ID NO: 30094 - DNA, 375 bp, Glycine max
agcttttcttatctctctgcgttgcttcttctagaggtggcttcaatttctaaatccaatggaaccaattcacctgcagaagatctacgcatacaaacactaacaggaacagcagttaaccaattcaagaagaaaataaattctgaactaaacaaatattaacaaaaaataattaataaatcaaagaataatgaattaatgccttcaaactgaactcaactttccaaatggaaaaagttccccggcaacggtgccaaaatacttgatgttcgcccctaagaatactacttatttgtgtgggcgcagaatctaccggcgagtgcatcggatcgtcaagtaaataattaaaacgaaataagccgaatatcgaacaca

SEQ ID NO: 30095 - DNA, 417 bp, Glycine max
  unsure at all n locations
gagagtgccttgaataagaagcctagtgtttttctctaatggaggaagacaatgagagagagggatggggacgtgcgaattgaaggagattanggagaaaagttaaactttgaagtttgtctcacatgtttctcattcatcaaaattatggcaagtgttacacatgtttctatttatagcctagcacaggggaaacttcctaacttccttgagaagcaaggaaggtagcttccttgggaagctagaggaagatagcttcctagagaaactaaaggagggctacttacacccatccaatagctaagctcacccccatgccaaaatacatgaaaatacaatgggaagcttccttgagaagcaacgaaggtagctttcttgggaagcaacgaagaaagctctagaggaggggaaggacta

SEQ ID NO: 30096 - DNA, 404 bp, Glycine max
  unsure at all n locations
agcttgtctcatagaggtccaggaaggataaggcggccgaagggactagttccgctcctgagtatgacagtcaccgctttaggagcgctgtacaccagcagcgcttcgaggccatcaagggatggtcgtttctccgggagcgacgcgtccagctcagggacaacgagtatactgatttccaggaggagatagggcgccggcggtggacatcactggttacccccatggccaagttcgatccagaaatagtccttgagttttatgccaatgcttggccaacagaggagggcgtgcgtgacatgangtcctgggtaaggggtcagtggatcccgtttgatgttgacgctatcggccagctcctgggatatccattggtgttggaagagggccaggagtgtgagtat

SEQ ID NO: 30097 - DNA, 423 bp, Glycine max
  unsure at all n locations
cttggtttaaacatgattggtacatgatttgngacttgtatgattcaatttgggcaaaattggatgaatgcaagagtagttttcgaaatctgcactttatgcagaattttgctgttgaaatgtgcaacagaattttgtataagtgcagaaaaatgcttgtgtatggctggttgtgaaaagggtagtacatatcgggttctgaacatttgctagcagatcccaacggtcaaaatgtagacttatgtactagagactgccagtaaaattttcgagtcgatccaacggttaacgaattggaacgaaggaaacgttactggggtatttgtatgtgaaaagctgtgattntgagttgtgttttgggcagagttttcttgcctttgcctgttttgcttggttttgtgagtccatgatgattggatgtgg

SEQ ID NO: 30098 - DNA, 377 bp, Glycine max
  unsure at all n locations
ttagtaatgacccactaacctagaattaaaataacttaatgccattaaccctaggaattaaaaaaaacttaatggctgaatgtaactgaaattgtggcaaccaaaagtcacccccaatagccaacaagtcagccaccatttggtctcccaaaaggctgatgcctangttgccaattgggcccttattacaacttgaactaaacctaactaaagcccttttagttgattaacccaaaacatatttttggtcagccaactttacaaggattgggccattatttagacagactaaacactctaaaattgaaacaaagtggtgtcatttaatcctccttcatttgggccatgatacaactcacaaccttttggactttctc

SEQ ID NO: 30099 - DNA, 385 bp, Glycine max
  unsure at all n locations
gaataggaagtgttatgggcgaaacttcctgcngttattgttgaccacagagtggtacctggagatatgtcgcaggggtcacgacaccttgaggacgtcaggtggggtgctattgcccaaaaccaagcttgaccaatcccgacccaacccgggcatagtcggtcagtgagaacctgcgatgtacctaatcaggcgagctcctgccagtcaacagataataggaaaactagaccacaaagcaaggaggcttgtggtggctggccagctgtgaattttgtgtaatatgtggattgaggcctctggtaatcaattactaagggtgggtaatcgattacaacgcttattattgaagacaggaggctaagatggtctctggtaatcgatt

SEQ ID NO: 30100 - DNA, 409 bp, Glycine max
  unsure at all n locations
agcttttcataaaagccaaactaagcaataaagtacctcgtatttttccctctgcctccggttgtcgtgcaatcccttctacagcttgccctgcagcagtgccttgaccaaccccaggtccaatagaagcaagccctacggccaacccagcagcaataacagaagcagcagaaataattggattcatgataatttcctcgtaacctaaatataaaataaagaaatagttaatgatataatcaaccaataaattatgacttaattnttcaattatcaagatttattcggtttaaagtaattaataagaattccgaattgaaaataataatagttattgaactctacgaattacttcgagatttattttttcgtctctacctacatacatnagttttttttgtgaatatgt

SEQ ID NO: 30101 - DNA, 410 bp, Glycine max
agctttatttagctaaaattgaccttaaaataaggggaaaaatcttttgatatatgaaataaacatgtcacttccaaagccattcaagttacataattaaccttttttcaaataataatgataataaatatctaatcatcatcaatgattcatgagcacttaatatcacatccaatctaaaatcttagcacactaaatcttcatcgatgatagtgaactatacaaataaactataagtgacattaattcttggttgttttttctaagaatgtattttgtgaaaattaaatttaacttttctcttcacaaactcaacgtgtgtatcaaatgatacacctattagattgcactgtaccagactagtttaattataaaaaaaaaaatcctcatttttctttttgtttggcttc

SEQ ID NO: 30102 - DNA, 495 bp, Glycine max
  unsure at all n locations
cgaccggcgnnttatactttcgcttgacttacgtgatacttagacaccccaccttgctgcgatagagagtcttactgtttattgcatgcctatatagctctacaacataattaagagtcgtactaaaaaaaaggtaaaatctattaagagagtcttactgtttatgtcataatttataacttttattacgaattgggatatatatatatatatatatatatatatatatatatatatatatatatatatatatatatatatattttgcatgagtcataacctcataggggctgattttattattgggattatcattctattttattttgaaaattgtctctttttctacctcgcgcttaagagaatttcttatactatctacttctctttacagcacttattgcctccttttctatcataactcttgataataccactgcatcgctgtctaataatataccatgtctgtcatatagcccttattctctcgagacg

SEQ ID NO: 30103 - DNA, 295 bp, Glycine max
tttcttattcgagactcgcgcctccggttaaggggccaataatttccttttatcaatttctgggccaccccccctgatattggaaggcgaccaactgtgccagcacaaccagaaagggaagctatcacgcagctactatgcataccggggtaagatttcacccatgccgctgcaaagagacgagtgtggatcatgtgtaccgacatgaccccttttacacagatataaatgatgttgctacttagcaacattcttgccagcgaccgcaataccgatctccccctgcggaagtatc

SEQ ID NO: 30104 - DNA, 438 bp, Glycine max
cccttatcccatgcttctttggccgtcgatgcgttggatatcttctcaaatgtatcttcatccaccgagtgataaatgagaaagagagctttcttgtctctctttcttgactacttcaacgtctcctttacaccttggcttagcgaggcttcatcttgctcctcgaagccattctctacgatatcccacacatcttgagctcctagtagcgccttcatcttgatactccaattatcatagttgttctttgtgagcatcggcattcggaaaggaaaacctccattcgccatcttttgaggatcttgaagctctgataccactttggtggaaataaggctctttatgtctatgaaaagcgtttaggaatattggagactctgaatagacacttgataggaaggagaattctttatggaggagagaactttgtacttttgc

SEQ ID NO: 30105 - DNA, 480 bp, Glycine max
  unsure at all n locations
tgcccgtcgttgagttgttgcagttcgcgcacctttgtcaattaaccatcctcctacacnnngaaaatatgatgacatagccgctctatagtatttatcctcctaacaaataaattcgagctggtggaccatcttctactaactctgacttacaacagtattcctatccctcatcccattcgcacctaaagcatgtgcacacaaaaaaatggaagaagtggaaaaggagatcttggagacctctacgaaagtagaggctaacatacctttattggacgcaataatagaaattgccagatatgctaaattcttgaaggaattgagcaatctcatcggaactgataggaagtgaacgaatattatgagcacaaatgcttcgtatcattggaaagcagctcccaatccctgaaaatgtaaaaaccatgccattatcatacctgattaagggactatgtttgacagcccgctaattatgactcg

SEQ ID NO: 30106 - DNA, 290 bp, Glycine max
  unsure at all n locations
gattccatggatttaaaatgccagttaaaggcctgcttttatagactcttcatgtctggtcagaaaaccattaaaagaagtataacttttaaaaaaaccttgaaaccattggaatagttacatcttttgatttttattcaaaacttatcactggtaatcaattaccaaatcattgtaattgattacacaaagcatttttgtgaaaggatgtgactcttcacattttgaattaatttcaacgttcaaacacactgggtatcgattaccanatcattgtaatngattacacc

SEQ ID NO: 30107 - DNA, 429 bp, Glycine max
  unsure at all n locations
acgtttgcagatgctctcaaaatcaatcccaatgtattgagctgaatgtacaaaaggatgaggggtttgtgacaaggaatgggatgagtgctacggaaatggttgctggtggttggctgtgtggaaaggatggcaagggaaggggtggttcaacggatggtatgggttgcaatggttggagctataatggcagccacagaagctccatttagcgagtggtgtggatggtggtagtggaagttggtatggtagccatggaagacaaccatgagctctcaatgaaagcaccaaatgctacaaacgcaggaacaatggggaagaataacctagcttcgagggctaggaacctccataagagagaaaaataaggaaggaaaacttgtatctattttntgctgtcctctattgcatactaagcatcccttatat

SEQ ID NO: 30108 - DNA, 360 bp, Glycine max
  unsure at all n locations
agcccttttccttaactttctagggactactcacatgaatttggacttttggagtggcttatagaccccccacaaagaaaatagggaaaggtaacataaaatcccaaaattagccacaattatcaattaaacccaaatatttgcctaagaacaaaatgaagtaaggtgagaaaataagagccaaaaagaggtgaaatatgctaaggagaatagaaaaatattaaactaagaatgctcaatcaaatttccccacactttatcttttgcactcctgggcaaaactaagagaaagactaagaaaaagaaatcaaactaaaggtaaaccacaactaanagaaaggaatgaacaagacacacata

SEQ ID NO: 30109 - DNA, 432 bp, Glycine max
  unsure at all n locations
tcgccattacatgggctgatccactttgtctaatatcttcctcattaaaatttgtaacttttcttccttcgtgcacaatagcatgttctagtcctagtctagaagctatgtgtttcactcccatgacgtcatcctctgagaccagtttcatctatatatttgcatcatttttgacattttccaaagctaattttatggattgaagactagtagtgcatttgagacctatcaatcctaacaagatcagttcttcttgctgaagttgttctccatctctttgtgtataagcaaaagcaattggcttaaggtcagcatcccccatttgttgaatcacctggccaactttgaacttcttattttccatggcatgtgtggcgtttaaacaaattagttttacacatganattaanaataaaaaaggaaccttcgagt

SEQ ID NO: 30110 - DNA, 420 bp, Glycine max
aatctacagagatatcttcctatacgactcctaggtcctgaataagttgcagcaaccccgcgggagactacacctggtacttgtcatgctgatcaacgtcacattggcggatgtactccattataatagctctcattctcttccaaaagaagctggatgacaaccgcttatacgtcttcgtgaattccgaatggccacctgcaaccgtgtcgtgaaattcggccatcacagtaggttacgcaacatcagacagcctttgaagaataggacaccatcgtgcagagtatagtgtggcagagaatcagaatcagattgcaattgcgagctcaacttgaccaactcaaggtcattatgcacttcgtgcttgatagcagggaattccacccaataaggactcatgcagatggtgctgaactcact

SEQ ID NO: 30111 - DNA, 416 bp, Glycine max
  unsure at all n locations
agcttgttatgaggaagtgttgaagggtgaaacttcctgcttttattgttgaccacagagtggtacctgnagatatgtctcgggggtcaggagacctttgggacgtcangtggggtgctattgcccaaaaccaaacttgaccaatcccgacccaacccgggcatagtcggtcagtgagaacctgtgatgtacctaagcaggcgagctcctggcagtcaacagataaaaggaaaacaagaccacaaagcaaggaggcttgtggtggctggccagctgtgaatnttgtgtaatatgtggattgtggcctctggtaatcgattaccanaggtgagtaatcgattacaaggcttanaaattgaggacaggaggctaagatggtctctgngtaatcgataccaaggggtgtaatcgattac

SEQ ID NO: 30112 - DNA, 437 bp, Glycine max
  unsure at all n locations
aaatgtggcatttgtgcacaatacacaatgtcctgtacattacaacaaaatggtgtatcataaaggcgtaatagaactttaatggatatgattaggagtatgttaatcaatttgactttacccgtatctttgtggatgtatgccttgaaaactgtcatgtatttgttgaatagggttcctagtaaggcagttccaaagacacctttaaactgtggacaaataggacacctagtataaggcacctgcatgtttggggttgccaggcagaaataaggatttataatccgcaagacataaaattggatgcaagaacaatcagtggatatttcattggttatccagaaaatgaaaggggtatatgttttattgtcctaatcatagtatgagacttgtcgaaactaanattgcaagattcattgaaaatgaataaatcagag

SEQ ID NO: 30113 - DNA, 407 bp, Glycine max
  unsure at all n locations
agtttgttcaaatcaaatcactcctacatttgatctctagcatgcatcttctttgtttacccactcctcacgtntggttttttcggggaaaaacaccataactaaacgcgccgcaagggatccctatcgcaccagatccaaatctagaacgatgggtgatcaagaggagacgcaagaacagatgacagccgacatgtcggctctgaaagaacaaatggccatcatgatggaggccatgttaagtatgaagcagctcatagagaaaaacgcggccaccgccgccgctgccagttcggctgccgaagcagacccgactctcttggcaactacgcaccatcctccctcaaacatagtaggacggggataggacacactggagcacgatggcagccctcacctgtgataca

SEQ ID NO: 30114 - DNA, 301 bp, Glycine max
agagcttcatgtttgttctccttacacctccattaattggctgctttaccttctcttccattgcccgcctcttcatttttctccatgtatctcctcacatgtcttgtgataaatgtttttaacatgattctttagagtctccaccaattaaacttgctatagaagctagatttgattttctatggttcaaatttcttgttcttgttcttgaaccatgaattgtgttgagcttaagatcctttgagttctgccttgttattttctgtggctgagacctacaccatacaattcttacccaagt

SEQ ID NO: 30115 - DNA, 352 bp, Glycine max
  unsure at all n locations
atcttactctctatgagtcacacccttgaagtaggatcacaatacataagaagaggatgagtcacacccttgaagtaggatcacaatacataagaagaggatgagtcacacccttgttttttggctttaaaacattgttttggaaacaatttcctaaactgaatagattttgaatgaaaaattaattcctgaatagtgtgaaattactttagaaaatagtttttaaaaccaaaaaggtagaaggaaattaaatagatcctaaatattttctttatgtacattntatgattattatgttcaatgtcttcatcatttacttagcttggaataatacaaacttccactttctgcg

SEQ ID NO: 30116 - DNA, 370 bp, Glycine max
ttttcatagaaattgcgttctacctaagggtgcaaatgaaaatttcttgacactcattcctgatgtagagaattcgattggatcgaatgagtttagacccatttctcttgtgggttgtctatacaaaattgtagctaaaatactttctatttgccttacgaaagtgttgcacaaggtcattcatgagtgacaattggctttccttgaaggtagaaatatgttagatggagtggttatagcaaatgtgtcgaacatggatttcctaaattaaagggtgcattgagacctttactatgtcggttcttgtgaatgggagtccaactcacgagtccaaaaacgagacgggctcggtggtttgtacgaatgccat

SEQ ID NO: 30117 - DNA, 388 bp, Glycine max
  unsure at all n locations
agctttatgttgctcattgactccaaaatgctacaaagaaggacagagatctgtatggtgatttgcagaagaacataaaccacagactcttgcaacaggtgcagatttctgattcatggcaatctgagttactaaggtgaccaaggcatcaagttttccctcaggctttntattttcaatagatgaagatgaattcgtggccacctcatggactcctctaaggacaatagcatcatttcttgcactgaattgttgggagttggaagccatcttcttaatcaaattcctagcctcaacaggggtcatatcaccatgagctccaccattggcaacatcaaccatactcctctctatgttgctaagtcccttatagaaatattgaagaatg

SEQ ID NO: 30118 - DNA, 445 bp, Glycine max
  unsure at all n locations
gcttagcgcgtgaagaaatggtgcttagcgcaaggttttcgcttagcggataagcaatctgaaaatgtttctaattcatgttctacttatctcttcacacataattttaacaaccctttttgttcattactaaacaagctgaaatcaatcacaatcacaagcaagatgtcttaactacatgcaaaaaataaaaatgaagatagagaagggaaagaaaagttgggttgcctcccagtaagcgcttctttaatgtcactagcttgatgcatcatcctgttatccaggatccaataatgttcccacttcaaggaccttcttctcaggtcttctttcctccatcacatgaactttaaaatagacattccggtcaagtggctctttatcttcatgaaatagatcaaagctgattctctgatcttctatgccaatntgcaacatcttcctc

SEQ ID NO: 30119 - DNA, 393 bp, Glycine max
agcttgtagttgttgaacttgcgaaccttacaagtcgaactcttatcatggcccacccatatgaatgatataggggtgcaagaacttgcgttcaattttttttttggtcgatttatgaatcaaatttcataatataaataaacattttgcagtttagttacaaaacatattagtttaaacacatttgaaaatagattttcgaaagtgttgaatctacactttggaaacttagtttctagaagtacaagcattgttcaaatacacaattagagtaccttactgaatctccatgctccattatgtatgtattcccctcgtcactaaacctctttggacccattggtctcacatcaagacaccattgcattgaagactcatggaccacccacatgc

SEQ ID NO: 30120 - DNA, 357 bp, Glycine max
aattcatcgaaggaaggtgcgaggcaataactcaaaagggctcaccatcttggatagcagatatggcagtgctcagggccacgatgttatttacaatttctgaagctgctcaagctagagagaatcattacatgcacatgcgcatgcaccttcttcactaattacgtacgggtatagatattcccatagctaatcataatttcttgttctctctttaattgtgtgtatatctatttatttctattacgatgcatatatcatgccatagaatgatgatcttaccgattttctacaatacatttgtcgatcaactccgacggaagaaatctaagaaatgaaagaaaatatgaatatgac

SEQ ID NO: 30121 - DNA, 414 bp, Glycine max
  unsure at all n locations
agtttattgaaacaagctaaaaagagctaattttaaaataagttnttctaaatgccccttgagtctattttgtaatgagtaagtcattaattttgtcctcaaactattaccctttcttttgaatgatggctaatgtaaaaaataaaatataattactcgagtagtgccacaagtattgtatatcatgctaagtaatcctccaaacattaaaaaaattgttcaaattgatccctaaattnttctcanatacataaacttaaggaccaaattgataaatattcaatactacggngattagctaaatacttttattacttttgggacaatttatgagatagaaagggccatacttcaatgacaaaattgatggtttattcattgtggaatcttcanataaatggtacagaaagatat

SEQ ID NO: 30122 - DNA, 432 bp, Glycine max
  unsure at all n locations
ttctcctccattttttttatgtttaaaatcatctatgtttctcttanattgngtaactttgtgtttgaaaaaagataaaaaaggagggttacatgataaatccaatccaccccccatccctacctccttttcccttctccatctanacacactagaaacttccagggcacattccaaactcanngcaaaaaaggtgaagccataggatcacatattacttttgatataccccaactaagaaaaaaatntcacataaacacaatntaaaattattttttttcaatttcacctccattagactcagtatcgtcttccttcccaataacatatcttggagctccccaagttccattcactctctgcctcagtatatangactgaattctcggttgattgtgtgcaatctagcttcagcttctcaggttcttctta

SEQ ID NO: 30123 - DNA, 324 bp, Glycine max
  unsure at all n locations
tttcttttatcttctgtgntctgggaacctctccttcctcatgtgtacccaaacccaatcacctggctcaagaacgactttctttctgcttttgttggcttgccttgcatagctcgcatttttcttttcaattagagccttcacttgctcatgcaacttcttcacatactcagctctagcctgtgcatccttatgcttaaacatancaatgttaggcataggcaacaaatcaagaggagtcaaaggattaaatccatacactatctcaaatggtgaacaattagatgtgctatggacagcccgattatnagcgacactcacatg

SEQ ID NO: 30124 - DNA, 396 bp, Glycine max
tctacttatgtggcagggcgggcttccttcaccttcttgtctccaacgcgaactttgaccattggtgttccttcccgcgatgcttcttttcatgtccgcctgagtgggcttatagcctaaaccatacttcccacgatttccttgggtatttatcaggctagttatgccgccgttgttttttcctaaacccatcccgggttcataaccgttccccaacataactcgggccatcattaccgctgcatcggacagacaaggctgcccaaagagggagtccacggaggaaatgctgaccacctcaaaagactggaaagcagtttctaacgattcttctgcggcttccacataaggcatggaggatgggcagcttaccaagatatacttctcgcctgacac

SEQ ID NO: 30125 - DNA, 345 bp, Glycine max
  unsure at all n locations
accaaaccaaacaacattcaacccaaccctaagttcaacttcatcttttgttcatttgattcgctcccaaacagagacatagcctctttcttttcgtttgagaaacaaacccctcgtttcaatcattgatccttttctgttaggtttgtgaatntgcttttgtttttgtaaaactttgcacctccccccttttggatttcgtagttaggcgaaaattttaatgtttccgtgtttcaaatttgcagataccagttactcttccaatttcgtcatggccaaaacctccttcaagcttcagcatcctttgggtacttntttttcccctttaatatttcgttntctcta

SEQ ID NO: 30126 - DNA, 443 bp, Glycine max
gaatgaaatacagtgtacagactctaccctactgtttttgcaagttaaaacaattgcactagagaaatattgccaaaagaagcttcctagctagatctcctaaaaagcagggatattatagaagttggaaataccacccctacaacctttctttgatttgatcctcttactgtgtccttcattcctatgttatggagcagatccccctccaaagaaaaaagaaagaaaagcattcaaacaagttttgatagaaaagtcgtagagctagtacatacaagtaaagctaagaatgtaggactttgattcctttgctttttgtctctctttctctctccccattaaacggaaattaaattaaaaaaagattttttttttcatttataaaaacaaaaggctgataaagctgaattcatatacacagagcagttttacagtcggacatg

SEQ ID NO: 30127 - DNA, 273 bp, Glycine max
  unsure at all n locations
acaaaagatgatcttctacccccattcctagttatatgctanttttcatcgtatattatcggaggtataaatctttaattccaccttgattttgatattacattaaccataactcgatgctagtatatacgaaaaaaaaactgtaatttgattacttaccttatgctctaatagccagaggatcaaggcttctctcacctacgcttgcttattgtcttctagcatatgcaacaaatgtaaggacagacacttttggaattcatgctactcatc

SEQ ID NO: 30128 - DNA, 419 bp, Glycine max
  unsure at all n locations
agcttctggtcattgggcccgtaaaactcactagggatagcggtattattaaacgcagacaaagcaaccagcgataaaacccaatacagataaagcacctaaactaatagaaaagtaagcttctccagaccataccagtgcacgccgagcccatgcaaaaggtttggttaagatatgccagattccaccaagtatacaaatggaacccaaccatacatgccccccaattatatcttccaaatcgcacacactaacaatccacccttttcccccaaaaggtgattttaataaatatccaaatataatactcggactaatggtcacattggttatttttcttacatctccgccccccggagcccacgtatcatatatnacctccaaatanagagccttgaatactagatgaaacgcaccta

SEQ ID NO: 30129 - DNA, 495 bp, Glycine max
  unsure at all n locations
agggaccgcgagtgagnctgagaccttgcacaacatagttatttagcatccatccccgagagggaaacagcccggatcaccagctaatgtttttaattgaccgctcagtgacaaaggaggtaggggtgcagagacaaccaggaggtttgcctataagcagacacccttgaaagagtgcgtaataactcactgatcgagcgctcttgcgccgaagatgaacggggctaagcgatctgccgaagctgtgggatgtaaaaaagaatccgtaggggagcgtctccgcttagagggaacgacccgcgcgagcattgctggacgacacggaagcgacaatgtcggcttgagtaacgcacacgttggtgagaatcctatgcctcgaaaacccaagggcttcctcgtaaggttcctccaccgagggtgagtcatggcctaagatcatgccgaaaggcgtatcgatggacacaggcgaatattctgtactacctttgtcggtcg

SEQ ID NO: 30130 - DNA, 413 bp, Glycine max
  unsure at all n locations
tttatatgangatanagctctcttgcttctgaattccttaccaaaatcctttgaacatttcaaggatgccattctttatggccaaaaacaaaaacttacccttaaagaaatcccgaccttcaccagggaccagggaaatccaaaaccgccagggttctaatctgaggataatggtgaaagcctgaatattttcaaggaaaggagtgaaaaaagggaacaagaggaaaaagtccatatcaagtcaagggattcaaagaatggctagaanacaaagttcanatgctttaatttgtcacaaactggtcatttcaagaaagactgcccatacaagatcaagaaaggatctttggactctgctgacatagttgaagcctctganggtatgagagtcangtgtttagtagcttctatcn

SEQ ID NO: 30131 - DNA, 445 bp, Glycine max
aagagcccaggtagtcgaagagaagttcaagtccatatccttcaaagtctgaaaagagtatgatgaactaagagacgtcaatatggccaccgctgaagccttggaacgagaaaccaagaaggcccgaaaggaagaacacgaccaaagcaaagttttgaggggctttatagggcagcaatagtgagctcaagctccgaagaggtgaaaggaatcatcatgggtcaaaggcatgatcttgaaggacgagctaaaagcttgcctcatgtcgaaaagaaatttgtcccaacagttaagcgagacagaagggaatatgtgggccatcatcgatgagtgcaaagagaagctaaatctatcggcgactcataagcaaaggctagaggatgagtacgccaagatatcagcagacagggaagcaagggatagggttattgattcattgcaccaa

SEQ ID NO: 30132 - DNA, 412 bp, Glycine max
  unsure at all n locations
agcttgtatgattatggggtacccatcatatgtggtactaggtggcaatcaggcgatggtgcaagtcgactctccacatccacaaatcacacataaatccaccatccccagttgtccaccttcaactgagctcacgtgctcccacgtagcccttatcctcgttcctctcaacaccgggtccccatcaatccctccaagcttccacaacatccaagaaattcagcatccaaacatcatgaactatccaaaaccaagaaaacagggcataggcagaaaactcttcccaaaacacattccaataccacagttttcctcactcanataccccagtaacattctctttgtttcgattcgttaaccggtggatcaactcanaattnttactggaggtccctaatacatatatctacag

SEQ ID NO: 30133 - DNA, 411 bp, Glycine max
gaataatggcctcatcaaattatttatttcccgaagttattttctataaataagtctcctattgttagtggtgtgggttaccattattggaacaaccacatgcaaatttttatagagagaattcttcttcttcttcttcttcttcttattcatgagattgattaacggatcgagggtttcttaagttgaaggaattctgaacacaagggaagggttgtgcctatgtggttcagactttgtaaaaggcattttacaagatagtgaacatctcaaacgggttgtttggagattagacgtacgcacagggcatgaccgaactagtataataactgagtttgcattctctcttcccttaaaattctcttacttattggtctttatcttttgcattacagaagtttactttgaatt

SEQ ID NO: 30134 - DNA, 353 bp, Glycine max
  unsure at all n locations
gctttgttttaaccanatatgaacaatttatgcgaatcattctttcttggaaaactttctataaattcttgtaagattaaagctctcaaaacaccttttataccttgagaaaaaagacttaaagtgttgagtgttatatttgtctataagaccatcactaaaattaatccatgtgtaatcttttaacaaatctttgtgatttgtttaaagccaacaatggcttgatagaacaaagaatattggtttaaatcacacttggcgtgagcttgtacgtgaagagctagaagtgacagtgaataatacttgtaactctgataagctagtggaaacttggttgttaccaagaattgaat

SEQ ID NO: 30135 - DNA, 300 bp, Glycine max
gcacaattaccccttccactcttccatataaaatatctactttaaccagctttgcttccctgggtgcgtctaaataaaggattcaagaaatgttgtgccttcaacaggccaacctagaagaaaccatggcatagagcttcctcttctaatgcatggaaaccaattcgcttatcaagaacaccttggaagcttcactcaagtacttcaacgactctcgtatagttctatattaatatgctaatgcaacaacgacttgcttcaaccggctaatcccttgtgctacaaccagctacttctttc

SEQ ID NO: 30136 - DNA, 357 bp, Glycine max
agctacttgatgttgaatccagaatgatttagagagtcttgatgatcacaaagatgatgacaaagagcccatgagaatgagttcaagattgacatctgaacacttcaagaatcaagaggaaatttgagttcaagattcacgaatcacgtttcaggatttaagtttcaaggaatcagagaatcagcgagtcaagaataatcgagttgaagattcaagagtcacgtgaagactcgattcagataagtacacaaacgtttttcaaaacattgagtagcacatgaatatctgacaaaacctgttgccaaagagtttttactctctggtaagtgattaccagattattagaagtcgatacca

SEQ ID NO: 30137 - DNA, 383 bp, Glycine max
agttttctctcttaaatttctataaatagggggagaagtgaagtataaaagggttcagccccttaagcacttcactctctctcgaaatagctgacgaaaattagtttcgtgaagaaaatccaagccgaggcgcttccgtaacgtttccgtgagtaattacgcgaagatgctcgaccgttcttcaagattcatcattcggtcttcgctttcttcagtcttcaacgggtaagtacctcaaaccaagcttttcaattcattctatgtacccgtggtggcccacatttcgcttcatgtatttttattctcgttttcattacttcttataccccttttgacgtgcttaagccatttatttaagtcatttctcgctttaatctaaaaat

SEQ ID NO: 30138 - DNA, 500 bp, Glycine max
  unsure at all n locations
cgancacggccntattgacactnttagattccccgccactcgttagattattcaacctcgccacccagctngactatgcaggctacggtgctacttctatattctccgccttctggcggaacctgctggaatgctcaagtgggcctggctcctatcctcaccacatgtatactaaatacacccaaaccacttactcgttgattcctcatccgtaaccgtacggaactctatgaatctcgcaacgatcctcgctctatgtccagaatgtcacgaaaccttacggattacacaatcataccttatttggcctccgaactgtaactgaactttaccgactgagcaacaatgctctcttttgacgtaatgcatcgcacccaactctacggattatacaacaccgcatcctttcgacttctgcgatgtcacgaaactttaccgacttactcataatgggcgcacagcaccttcaagcggtcaaccatggtctctcccccaaaccc

SEQ ID NO: 30139 - DNA, 411 bp, Glycine max
  unsure at all n locations
ttgcttcttacaagagactaagaaatttctgacaaaaaatcttgagatgaaagatcttggggaagcctcttctgaattaggaatcaagatactaagagatcgctcttaaggtatcctaaggttttcacaagagagttatatcgataaggtcctaaatagattcgacatgaaagatagtaaaccaggagataccctgatagctaaaggagacaaatttattctcaaacaatgtcccaataatgaccttgaaagaatagagatgcaaaagattccttatgcatcaacagtaggaagtctaatgtacgctcaagtttgcactcgtnccgatatagcatttgtagtaggaagtctgggcagatatttgagtaatccttgaatgcagcatttaaaagcagcnaaacgtgtgatgcg

SEQ ID NO: 30140 - DNA, 409 bp, Glycine max
  unsure at all n locations
ggctctagcctcactcaccgcctttctggttttatttctagctatcttatacttatccggagtttgagaatttctacacctagaccactccttgaaacactccttttttactctaactttgctctgaacattttcattccaccaccacgattctttacccctaggtccaaaacctctagattcacccaacgtctctttagccactttaataatctcttgggacatcttgttccacatatcatttgcacttccttgtgattgtccacaccaaccctcccatatctnttgttggaagattccttgtttctcacccttcaagtgccaccatttgatccttggtgctaccataggacttcttctctttgccctatctctaattcttacactcataaccaacactctatgttgg

SEQ ID NO: 30141 - DNA, 318 bp, Glycine max
  unsure at all n locations
ttgagaagattggggttgacttacctatggaactattacagttggcgtttatgagttatgctgaatgtcatanagtagttggagacctggaccaaaataagatagctttggaaattttagctgttcctgaccttcctcaattggctccattttttctaaggaaatcatcaccccacggcaatgaagacattgtgggcccaggtattccttttcctgttctacttgtgcttaatgaaattcacaacgggtactcaaatttggaaggagacgcactttcagtataagcagagcttggcctcaaataccaagaagttatgc

SEQ ID NO: 30142 - DNA, 351 bp, Glycine max
gtgaccaggatcaggttccacgatgggaaagctgtatatacagaaattgcgcaggaataagcgaagctcgccccaacttgaagtaaaaagcacttcacagaaaactaaagaaactccagcatacaaagccctagaagagatcactaaaaccatgcctatgaacagaatatgcagtatataatagaagcaataaagaaaacttgctcactattcacaccaataacaacaaacatagtcccagactcaaaatacacctaccttcaaacaaatagaaatagaaatatagacacagtacaatgttatcattggcaccattctaacatatagagaataccgcactgaatctacaca

SEQ ID NO: 30143 - DNA, 447 bp, Glycine max
  unsure at all n locations
cgcccatgtgtcatactatctgggcaatcagctcgtccccgngatcctttaaatcaacctgcaggcttgcaaccttgacttgtctgcctaagcacactatgcctctggaagttttctttgaattaagattaacctaacttctggtcttagcccttggtgggtggtgagggaggttaacctaacccccttccacccttaacttaacttttttattggattttaaagttttgcagttaagctaaatgccccctgtgcgctaacctggatgtattctgataacgtgactaagcgcccatgctacactaagctcactctctttatttgaaaatgggacctggctaactcacttgctgcctaacttaattacaanaaatatttgtgattcagctatgcagttactggcttatcctagaaaatttaaagcgcgctacgcactgctcctaacac

SEQ ID NO: 30144 - DNA, 432 bp, Glycine max
ataaaagttattatgttagacatttgtgagacaaaatgatcaagaggcaatgggaccctgaaagtgtgaagttgagagaaacctagatgaagtgtaggctactttatgagtggcgttagtctatgctcaagtccttggaaagtggttattgtgtgtggaactgtatggttcatgttggatcaagtcgagaatctagaagggggttgaatagattatttcaaaatcttgtgttgtcaccacaatctgttgcccttgcactttagcacacaagaacccagtatcaccatcaatatgagttatggtatagaaaaattttacaaggtctatgtagtaggtgcacttcatctccaccaatttcttcaacccgtgataatactagttcaactcaggaaaaaaaaaatcttcacttttgagccacgccaaactaacatc

SEQ ID NO: 30145 - DNA, 344 bp, Glycine max
  unsure at all n locations
ttaatggtatatttacctttattagccatattaaatattatttattattaaacttaaatttaagccaatggtaatactaaaaattggtattttttaatttccttaaatttggaaaattccccccccccccttggagaaatttcctaattctgtccttgcaatcagaccaagtccagtgtctggagtagatgaacaagtgctcaatcttgtactgtatgaagaaaaggatgaagacacatcagatacctttagagtatgtttggatggggaaacttaaaattctgagaaatttaaattctagaatttcnatacttcaatgaattctttatttcaaaatttttgtt

SEQ ID NO: 30146 - DNA, 410 bp, Glycine max
  unsure at all n locations
tgagacttttattactatattttccacttcttatctaaccttggaaaggctccacaaagagaaagccaatattagaaatatgtttatttctgatgaatggatcctaaacaagttatctaaggagcctaaggggaaagaagttgcaaaggtagtgctcatgccttctttttggaatagtgtggtttacactcttaaagtcatggctccacttgtcaaagtgattcttcttgtggatggtgaaaggaaaccagccatgggctatatttatgaagcaatggacaaggaaaaagaaacaattatcaagtctttcaacgacaatgaaagcaagtacaaagatgtgtttgcaatcattgataaanagatggaattgtcagcttcataggccattgcatgcatctacccacttctta

SEQ ID NO: 30147 - DNA, 211 bp, Glycine max
tttttcgaaccatttccgtgaataataattttttggccaaatgggccaaaaggcaattttcgcccaataaatgggaaaaagccatgttcggcccgaaccaaaaagcgggtgggctcgcacaaaagaaactaacccgactacattttaaattttgtatgcaacaccaaaacaagaaaacttcctgtgccgtaaaaaaaaaacattacatgac

SEQ ID NO: 30148 - DNA, 435 bp, Glycine max
  unsure at all n locations
atgacgccgatcgaacatttcctaaccgacgtcttgctnatttcgttcagggattgaattgaaaactcgttaggcgacatctgtcgcgaagtaccgaccgatatttttcagccgacattgcacaattctttttagaaaagctcgctggtcgataatggtctttttacggcagagtaagttttcttgttttggtgttgcataaaaaagttacaatgtacttcggctaggtttttcgtgcgagttcaaccgacattttgtttcggccaggaaaacattagcccacctctgcaaaaaaaatatttgctaaccgtcttcatgcatatttcattcaacgattgaatagaaaactcaatagccgacaacggtcgtgaaatagtcccgactgatatttttcagccggcattgcgcatttctttctaaaaaaacgctcgctgg

SEQ ID NO: 30149 - DNA, 168 bp, Glycine max
  unsure at all n locations
atgcttcaatggaggaaaataaagagggagagaaagagagagggggggggggggaacacgaaattgaagggaataaaaagggagagaagggaactttgaagtatgtctcacaagactctcattcatcaaagttacaacaagtgttacacatgcttctatntatagact

SEQ ID NO: 30150 - DNA, 445 bp, Glycine max
acgggcatcttagttcattccttatgaataatgatttttttagaggaaaatggatacaactatgttatgcaagaattatgattcccaatttagcaattttattaagaattggcttccacgttttctctcttcttgggttagctccaatagggataccaagatacacaaagggaaatttattgatcatatagtttatgatactagcatacctctccaaagtgctatctttaaccctaatagtcctaaagaaacttttatgaaaattaactttaagtcccaagatgagctcgaaacctcttaatatacttttaatggtatacacatttgagagggatgcatcaccaaaaaataataaagtatcatcggtatattgaaggagattgatttgagttttttccttacgcaccaagaagctacaaaacaaatttttctcaatagcttgtct

SEQ ID NO: 30151 - DNA, 417 bp, Glycine max
  unsure at all n locations
agctnttgatcaattcanatggtcataacttttaactcagatgtctgattcatgcgcataatatatcgagacgctcgaaattgaacaatggaagctcttgagcaattcaaatggtcataacttttaactcagatgtctgattcaggcgcataatatatcgagacgctctanattgaacaacggaagctctcaagtaattcaaatggtcataacttttcactcggaggtccgattcangcgcataatatatcaagtcgctcgaaattgaacaacggaagctctcgagaaattccaatggccatcttttcactcggnggtccgatttaggcgcataatatatcgagacgctcganaatgaatagcggaagctctcgagaaattcacatggtcataactcttcactcggaggtccaattc

SEQ ID NO: 30152 - DNA, 446 bp, Glycine max
  unsure at all n locations
gggcaacaatggtggaggaagataagaagaagaatgtttctgtgagagagagggagagcttcagaatttcttttggctgagtgaggagagagaacagcttttggttttaaaaagggttttctctttttctattattctattcaagctatgccacatgtctccatttgagtggagcgaanagggcccactttctcttttgattgtgactcatactcagccacaaaaagtgagaaaatctgacctttgaaacgctaaaatcctgcctcggtttgcgtgtcatttctctggttccagttcctcgtgtttctctgcgtccgtcggngccagttttcgaaagtaggcaatatatatatatcanaacgctcanaataaaaccccgagcgtggttcagaggttggttttgttaaattctaagtcgcacgcaaaatgatgatctttaaactaat

SEQ ID NO: 30153 - DNA, 392 bp, Glycine max
  unsure at all n locations
agtttttgtttcctagaaaaccaatatttttttagcccagcctcattacaagccaataaaagtccttctgattcaatttgtgtatttctgactttatggcatgagatgatgtacaaagattggacctcttgttagttgttattggtaaataacttanacacttatgcgtgagtgatatagtggccgtgagaatttggttaaatatctttccatgaaatctgtctcttgcctagcttcatttagttgtgttgttgactaacatgttcttttctctgaanaactgcatgtcttgtgaaaagcaattgataaaangcattttggttcatttggtatcatgtaattaaaattttgtgaatcacacacctttgtacataatcactgcatgcttttca

SEQ ID NO: 30154 - DNA, 444 bp, Glycine max
tcttccacctctctgcaattagaaatccactatttctaaaggcgttgaaaacctggtgacacattaaacttatcacaactaaataccgtgagagagtccaaccctttcagcaatacttcctctcccaaaaattgagcacattcagtaatttcaagattggaaaggcatgggaacatgttttccccatactcccttgataaccttttaaagtttggatgatgacggatggtcagatcttctagagccctgaaaactatttccccatcacaggactcctcatagaggtattctacgtaattattatttattgtacccaaaatctttaaagaaggcagtttccccaatagtggaagttgtaaacagttttcacaattcagcagatttaacagggttaaatacttgagagaaggagtagacatccattgtgggaaatgagcacctttg

SEQ ID NO: 30155 - DNA, 413 bp, Glycine max
  unsure at all n locations
agcttgtatgtattatggggtacccatcacatgtggtactaggtggaggtccggcgatggtgcacaacaaattttccacatccacaaatcgtgcataaacccaccatcccctgttgcccacctccaattgagctcacgtactcccacgtagcccatatcctcgtttctctcaacaccgggtccccatcaatcctcccaagcttccccaacatccaagtaattcaacattcaaacaacacaaactatcacagccaagaaaatagggcaaaggcagaaaactcttgccaaaacaccaaccaaaatcacagcttttctcacttaaagaccccagtaacagttccttcgttccagttcgttaaccgttggatcgactcgaaaatntcactggaagtctctagtacataatcctacat

SEQ ID NO: 30156 - DNA, 441 bp, Glycine max
  unsure at all n locations
tgggacatcttgacttgctttccaatctgacattctccttatattctgccttcttctattgtcagattgggaatgcctctaacagcacctttgtcaatgattttcttcatgcctcttaagtgcagatgtccaaatctttgatgccatattttgacttcatcttctttggagaatagacatgtggaggagtaactggtttcttgaggtgtccataggtaacagttgtcctttgatctgctgcccttcattaggacttcactcttctcatttgtcaccaagcattctgactttgtgaagtttacattgaatccttcatcacacaactgactgatgctgatcaagttcgcagtcagtcccttcaccagcagtactttgttcagactaggaagtccatcatggactagctntcccattccagtgatctttcctttagagccatct

SEQ ID NO: 30157 - DNA, 410 bp, Glycine max
  unsure at all n locations
agcttttttcaattctgccattttaagggtcaaattgatcttggaagtcaaaacctttgcacttgaataattggactgcgagtttgggcttttgttcgtgtaattaatttaactagtttaattgggctgcgaagtttgtgcaacttggtgtccaaagtttatcccctattctgagtgaaagtaacctctttggggttaagtttgagttaaaattgccaaattctgcctctatgagttttatcggtatgggcaatttggtcatttcaaaggaaattatctcagaatgggctaaaactttgccaaaatgtagaanaattcatacatcgaggtgcccctgtgagggacaaacacaaacattangaatcattnttgccaaattcatttatctggaccacttttggaattccttt

SEQ ID NO: 30158 - DNA, 424 bp, Glycine max
  unsure at all n locations
ttcttttgtgttaggtattaagatactacgagattgctcttttgtatcctaaggttgtcacaagagagctatatcaataaagtacttgatagattcgacatgaaagatagtaaaccaggcgataccccaatagctaaaggagacaaatttagtctcaaacaatgccccaataatgaccttgaaagaactgagatgcagaagattccctatgcgtcgtagtagcaagtctgatgtatgcttaagtttgtactcatcccgacatagcatttgtcgtaggagttctgggcaaatacttgagtaatcctggattgcagcattggaaggcagtgaaacgcgtaatgcgttacttgaagagaacaaaaggctacatgctcacttattagaagtntgacaatntggagatcatcgggtactcagactctga

SEQ ID NO: 30159 - DNA, 348 bp, Glycine max
  unsure at all n locations
agcttgttgtatgggttcaattcctaactatgtatagagaaaaaaagtcatttgttgacaaaggttgtattcactttattggtgaaagagtgtagtctgtagctggtggtctagaaatacttttaatatacacaaagtatgtatttacaaaaaaaaaatgatacaattttcattgctaaagacgggtgtaagacaatcatgaaaatagggtgcaggggaaaaaactaaagctcagatcgagcagaatagagcagggcagcagcttcttattttgattgatttgtcgggtttcatttattttaaaatgtaatttggagactctatgtttctttcctttntcttttatga

SEQ ID NO: 30160 - DNA, 96 bp, Glycine max
tcttttgatccgactatgtgactaatcattgattcttgtcttattcaaacttaaagctcatctctcgtttgtaatagtgtatcatgttgggatgac

SEQ ID NO: 30161 - DNA, 391 bp, Glycine max
  unsure at all n locations
agttttgagcaatttctaacaacaataactttttactcggatgttgatgtgatccttacggngcggatcgcttgatacaggctgtagagttttggatgacgccacttccagtgaaggaagataagtcagggtagacaccacttccggtgaaggaagataagtctgggcagacgccacaaggattaccttgataagtctgagattggttcaaccaggaacccagagagaaactcaccatattctatcatatgccagaagctttgtcttattcagaacgaaaaccaatacttatagtgtagctgaacaacaagataaaaatagacatgggccttctaaacagtttgggccaaaattacaataaaaataaattataactanaaacttatttaac

SEQ ID NO: 30162 - DNA, 439 bp, Glycine max
  unsure at all n locations
acacagcaacacagaatctaggtgtccaacactccttcaattcaatgggttttctaggtttgagaagtgaaatttagaatgaggtaaatttggagcaaactctcacctcacacaagtctataacatcaatctaaacttgctcaaactggatttacacctaaaattccaccgaatcaaaatttgactcttcaacacccaaatttgccctagaaatggctctttgttcactttggtcatttgtttttccctctatcacagcctaacctttctcataagtcctaaatggcatttcaagctaagattaactcgctctaacctctaaatactaccaaatccagatttggccttccagccctcaaaaattcactctntttccactcataacaccacattntcactttctaaccctaggttaattctaccattcatctctaacagt

SEQ ID NO: 30163 - DNA, 404 bp, Glycine max
  unsure at all n locations
ggcggtctcgatgatacgcggagataccttacggntatccgcacccttttgtcatccagaggcggcgggcccgatgacaagcagagaccaagtttggtcattctgcacccttgtatcatccaaaggcggcgggcccgatgatacgcggagataccttacggttatccgcacccttttgtcatccagaggcggcgagcccgatgacaagcagagaccanatttggtcattctgcacccttgtatcatccagaggcggcgggcccgatgatacgcggaaatacccgagtggttattcgtataaacattcttttgctatctgtaagacagaacgctngatagcatgcagaggctgacatagtcttctgcaccttttggtccttcgggaacaacaagtcatttacatg

SEQ ID NO: 30164 - DNA, 429 bp, Glycine max
  unsure at all n locations
catgatgaatcttgactatctacacaataaggtgctacattccatgctcttttcaagnttttgctacctaaagccgcatgccaattcaagtatattttcctttgctgactaaaattgtattcaaattaaagggtatacatttttttgtaatgtattttctttacataacatgcaacatatttatgtatatttttttgtgagacattttgactaccaaaaattatatgcacatacatccaagtattttgctatcatacccaaagtgtaaattgccaaaggtattttgctacctattctaaacctacacattcatgacgagcaaaattcctaaacatctangcgtanggaaattattgtagcgtggcccatagctgattgctggccaaaaagggtaactntacccaatatngcacctcttttgtgtctttt

SEQ ID NO: 30165 - DNA, 412 bp, Glycine max
  unsure at all n locations
tagctttttatgaaggaaatatgcttcccgactcaacgtatgactatcaaaagattattaaggatcttggacttgattatgttaagacagatgtttgcattgatgattgtatcttatataaaggaagctataaaaaccttgatgaatatcctatttgtaagaaaactagattgcaagaaaataagaagaaaaataatgtccccaataacacagttcgttgctttccaataaaaccaagactgcaaaaattgtttaggtctaaacaagttatgtaataattttggtctcaacattttggaaaatgaaaggctccttcagttttggaattgagaagacanaatgaatggctactaatgagtggtaatgaccactaatgggtggtaatgaccactaatgagtggaatgactacta

SEQ ID NO: 30166 - DNA, 440 bp, Glycine max
  unsure at all n locations
aagatttgaaacttcacatataagagatgctntattattattangttaaattaatgatgatctcaaaataaaaggtgagattgtttagcaacttatgaacttgaaaattttgagtttttgttaagtacgactatttggtatgtcatattatttcatgtaaactccattagtaaaaagttacaatcaaaagatatgggtatgtatgttgctatagaacaattgaaaggtcttatttctttttttgaaaaatatagagaagattgatttgaaaatgctataatttctgctaaagaaattggtattgaaatagatatagaacctaagctttttgaaaaatgtgttattcatagaaagaaaaacaatttgatgagaatattgataataaagttgtaaaattgcctaaagaatcatttanaattgattacttcttgtatataata

SEQ ID NO: 30167 - DNA, 415 bp, Glycine max
  unsure at all n locations
gcttgtgctatttctagttcatataccatacctttaagccaaaatgcttccttcactccttcaactagggcccttgattctgctttaataaatgaaagaacaaccactgaatggtgaattgctttccaactaattggtatacccaacaaaagaaatacatatccggtaaagactttcttgtacctacattttctacaaaatctgcatctacatagcctgtgattgctgcctcatgtgttgtcttcttgtaccttaatccagcattcaaagatccatttagataccttagtgtccacttcacagcttcccaatgtgcactgccaagatctcccatgaatctgcttataatacttacagcatgagccaagtcaggtctgctgcanaccattccatacattatgcttgcaacaccact

SEQ ID NO: 30168 - DNA, 435 bp, Glycine max
  unsure at all n locations
tggaatcgataaggcggaatgtctgaggtatcttattaccttccatggtgttgaggataatttgggaaatgagtgaagggtcacggtcatgggtgatgtcggggccagcaatgtcttcatccgcaagaagcaggtttaaatgggacttgcaacggtggccgtgagaccatttatcatcgcaatggtaacacaggccctggtctcagcgaattgcaagctcttctgccgataaacatttgacgggatttttggtagaggggagggaaagtgtattataaggtttaggggaaaaggttgagggggtcgtgggataagggaaagggtttggggaggatgtgggggcacgggttcctctgcagtggtccaacattntatccccctggagacgtgccagctcaattgcctgtggaagcgagatgtggcgcaacacatgga

SEQ ID NO: 30169 - DNA, 413 bp, Glycine max
  unsure at all n locations
agcttgttgtatgcatggctagagatatttgtgtcgactgaagaccaagaattgtgtatatatataagttggaagattctgtggaaacccaattgccaaagaaagtgactgtccatggatggagggcatacgcatgagatatcacatggtgttgtcttcggtccaactatgaaggataagttgtgaagacttgcgtaaccncaccttatcatacattaattggccagcataaagtctccacatgtaaccaaatgagacgtgcctctgtgaaacgtaacgtctattcaagcattatttggtattccatatttgatatgttgtttgcgatccaagtccacacaccttcactgttgggaattgcaaagaattgtctgtggagggagaaatatgcatcgcacgaagcattacaaaat

SEQ ID NO: 30170 - DNA, 441 bp, Glycine max
tgcttctctcagggacacccctttcttttccaatctcattgttcctccacaagctcccctctctccctatccaataccagagagaaagatgaaccacaccacccacttccaatcacaccattgcttccttcaaaaccatcacttttcctcttggtgacatcttcatcaatgccaccaccccataaaaaatcttccatttccatgcctcaataacaataataaagttaatgttcaaaagggtaggtgatttcacaaatagcacgtgaaatgggaaatggggttgttttgttctttcttatagtgggtttggagtgtgtgtgtgtttggaactaagtaagaatggtgagtgtctgaaacagtgtaacagtgtcagtgacagcatatgaagatggcaaaagaagtaataatgagaaaagatctgaagggtactaagtaagaatt

SEQ ID NO: 30171 - DNA, 414 bp, Glycine max
  unsure at all n locations
agcttgttattatatacaaaacacacaaattattatgaacaaattgacgttaatgacgtaaattattagtaacacttaccactgcatgtctcaactaagtcacatcagacctttcagaagtcgaccgtgctgctggctccgtgaaccgacggatatctgtgtctggatcctgaggggcaactctgggctgcgtagcatgaccatctgcccgaggatctgatggctggcccggtgtcatgaatggatgcgaaatgcggaagaatcagtccatgtagtcgcttgcacactgcccttgcacaacgcagatgtcacctgctacaaccatatggtccgaatagtgcatccacctgttgtgtatatcatcagactgcacccatgaatcngcangtggagcangaatggtctgagtgtatc

SEQ ID NO: 30172 - DNA, 400 bp, Glycine max
tacccgtcacatgtgggagcaggttggtggactggcgatggtgcaagtcgactagtgacatgcacaaatcacacatgaatccaccatccccagttgcccaccttcaactgagctcacgtactcccacgctagccttatccgagttactctcaacaccgggtccccatcaatccctccaagcttccgtaacatccaagcaatttcaacatccaaacatcctgaactatcaaaaggaagcacatacagggcagacgcacattactctgcccaacacacaggccaataccactactattattactgctataacctattaacactaccttatgcacaattggttcaccggtggatcaactcgaagatttactggaggtccctagcacataagtctacatttgga

SEQ ID NO: 30173 - DNA, 413 bp, Glycine max
  unsure at all n locations
agcttctctgcacaaatattccgtcccctaaatatatgcgtaaatttaaaattaaaagtatgaattttatatgtatatagtttaatcatctattcctaagttttcaaagcaccaatattagagttgatttaaaatatttcagtactaaaagattatttacacttatatttaaaatgtcattttaacgtaatgtgttttaatattttaaatattatagttgtaataaaaataattacacatttattntaagtatgttattttaatgtaatatttcttaacttatttgtggttcattntttggtttataatgtggttaactattatttgtgaattttgttcttgagtcttatgtctaataaatataaaccaattttacatgtttcttacaaacattgtatctgtctcttttcttt

SEQ ID NO: 30174 - DNA, 402 bp, Glycine max
  unsure at all n locations
acatatcaaatatgttcattnttccatcttcttagacttctgctaatgatttcctttcctatgttctgtgcttttttggtgctttaggtggtccttcattccctacttttaactctgtcaaattgagatgtcaatgccataaataagttaacagtaacagcaatgtgcagttcttcaccccataatcagtcacagtgcatttccttgtctcatgggatattattaaaagtcagtatcttaaggtttgagtactttgggtatttgcaatgaatctgcctaaggtagagtagcaatggtctttaagggctaaggagatataataatcaaggggaaatatacaaaacaatcaagaggaactagtaaaaatataacaatatatacaatgaaccaagtaagaatctc

SEQ ID NO: 30175 - DNA, 409 bp, Glycine max
  unsure at all n locations
agcttctacattcaatttcaagcttttcgatatattacgggactcaatcggacatccgagtaaaaagttattggagtttgaatttgctcagggcttcggtattccatttcgagcgtctcgatatattacgggactcaatcggacatcagagtaaaaagttattggtgtttgaaattgctcagagcttcggtattccatttcgagcatctcgatatattacgggactcaatcagacatccgagtaaaaagttattgtagtttcaatttgctcanggcttcggtattccatttcgagcgtctcgatgtattacgggactcaatcagacatccgagtaanaagttattgtcgtttgaatttgctcagagcttctacatttcatntcgagcttntcgatatattacgggactc

SEQ ID NO: 30176 - DNA, 435 bp, Glycine max
  unsure at all n locations
attcanacgacaataactttttactcggatgtttgattgagtcccgtaatatatcgagacgctcgaaattgaataccgaagcgctgagcaaattcaaacaacaataactttttactcggatgtctgattgagtcccgtaatatatcgaaaagctcgaatgtgaatgtagaagctctgagcaaattcaaacgacaataactttttactcggatgtctgattgagtcccgtaatatatcgagatgctcgaaatggaataccgaagctctgagcaaattcaaacaataataactttttactcggatgtccgattgagtcccgtaatatatcggaacgctcgaaattgaatgctgaagctctgagcaaattcaaacgacaataacactttactcggatgtctgattgagtcccgtaatatatcgagacgctcgaaattg

SEQ ID NO: 30177 - DNA, 342 bp, Glycine max
  unsure at all n locations
agtttgttggtcttctcataaagatttatcccttggttggaattcttgacaggttgacttctttgctccttgttatactggttccccgaatgattcctccagcttgagccctgtgtgaaattcctcccttgattgaatctcagcggtcctcctaggttgtagccttggaatctgtggcggttctgagctcccatgtagttcacctccatgtaagaatctacttgngctattgattgccttgtttcatgtgctccatcacagatatggcatccccctatntgcatgagtgaagagtgagagggacttaccgcttgtaaatgttgagggagcttgctgagggtc

SEQ ID NO: 30178 - DNA, 447 bp, Glycine max
  unsure at all n locations
cagcaaatgtcttcacaaataatcatcacacagcttatttctagcaagactacccatcatatctcccaaaaccccatacccacgaaaatcaagagggaaagaagtccacccaaacctgaaatttcgaagtcccactcgtagccacacacttcacgactccaaaaacgccctcctttcacgatttggggcagaaatgatggccaaaggttgaagctttgcttggagcttcaatggagaatgaagaagaagaaaatggcaacgtgagggagagagagagctgtctgaaaagtgtgggggctgagtgaagagagagaaaagctttttggttttaaataaaagggtttttctctttttctattattttattcaagctctgccacatgtccctatttgagtggagcagaaggacccactttcnctttntactgtgacccacactcagccaca

SEQ ID NO: 30179 - DNA, 379 bp, Glycine max
gtactcgaagggggtgacccacaactatatgtacgattcagaagtatcctcatcattttattaagtgaaacgatgatgttcagaggcggactcatgagggtaccacttgtctccatcagcatccatacattgattacaagtgtgagtataccccgctttcacctgccttaacgatcgttatgagcctcatctgcctgactaatatgtgatgacaagagacgaccctactatgggtcgatctcggatgctagcaccaatttgtatgcacgaccgtattagtagtcaacgtgtcgtatcgcctacttgcaacgtagccacccccaaatacatatgtgcggaggagatgtcctccgccgctgacccaccacagaatgctgcc

SEQ ID NO: 30180 - DNA, 338 bp, Glycine max
tttgactgccagaagctacaaacaattctattgcatagacacacacgtgctatgtagctacaatttcaatctctggagacgcttaaaccttcagcagtatatagcaattagatatacaaacactatcactagactttgcatacatcgaagcaccctatataaagtaaacaaacttgctaaagcaaggaacatggatcgatctgaattaattcccacaataaatacccacaagagaaacagaggctcgcacgtcatcatccacggccatgtgacctctctctctctgctgcatggatatatctttaccatggagccggacatcaagcatatattgccaa

SEQ ID NO: 30181 - DNA, 351 bp, Glycine max
acctcgccccgggatctctaagtcagctgcaagctgtttttttttcttgctaaacggctattgtgataaaatgttgtataataatgctctcattttctgtgtgtaattaaggtcctccgtccattcctccttcgaacgttgacctcatatgttgaaataggtttgccaccaaaaaaggaaaccattctcaacagtagcatgtcgcatatgcagaatcaattttataaggcattactgcataaggatctgtacgtcgcgaatgcacgaggagaacgtaacttcttctaaatatagcaatgctactacctaaatgctgccatcacccatatctcttacacggtgctgaacctg

SEQ ID NO: 30182 - DNA, 252 bp, Glycine max
tgaccttaaagccactattgagtgatttatgttgatacagcgtcatttttaacatttatttcttaagatactgctgatagatctatcgaaataagatgtttttagcctttcttttctatattatcttaaccgtcaataatttactctatttattgtatcaaactattttgtttgctgttactcagattctatcctataaatgttattctagttgaaatttgtacgtattatctcaattactcgattttttta

SEQ ID NO: 30183 - DNA, 302 bp, Glycine max
gcaggatgctagcttgtaggattatggagcacccatcacatgtggtactatgtggtggtccggcgatagtgcacaacaaggctttcacattcacaaatcgcgcctaaactccccattccctgttgtccaccttcaactgaactcacgtactcccacatagtccatatgctcgtttctttcaacaccgggtccccattaattctcccaagcttccccaacatccaggtaatacaacattcaaacagcacaaactatcacaaccaagaagacaaggcaaatgcataaaactcttgccaaaacac

SEQ ID NO: 30184 - DNA, 379 bp, Glycine max
cgtgggaaccagaggtgggtaatataatgaagtgaccaagatcaatcagaaatcataaccaaccaaaaacataaataagtgataaccaaaatgaaatccaaacagtcactattcagaaccacatagaataaaaacatataagactaaagtccaaatactaaaagataaataatgtgctgaaagcaataatcaaaatatcatagccaaaatacacgacttataagacacatagaattataaactaaattctaacaaggtggaggtggtggtggaagatcgaaactctgacgaatgtaacccacatcttcttcaagctgtgtgaggcgaatatccattccggcaaagcgagtatccagtgagtcgaaacgttcaccaacat

SEQ ID NO: 30185 - DNA, 388 bp, Glycine max
  unsure at all n locations
tagcttgtgtttgtctctcatggctgatgtcaaatctatgacatgtggattaaactcaactttaattgcaaaaaaaaataattaaaggaatatatattagtgaaacttcatcatttagaatataacttagtttttctaacatttttctcttctgctccattaaatctcttttacatttgtctttttcctctttatattgcctttatcttgtatcctcccacttcttcctcaagttaaaattaagacaagaatagaaactagaaagggtagagtttggatttttgcaccatatatgcatgatgcccttattgacatgaaatcttcattntcaccatatgtctaggtcaccaaacaaatcttaatattggtgtttttttttactcggaca

SEQ ID NO: 30186 - DNA, 440 bp, Glycine max
  unsure at all n locations
ttatcttggtttatctggaggtgtaagacactggttttttttcatgcttatcttanattatgtataaatggtcaatttcaataatataagtataaccttgttcattcaggattgtctagaaaacatcgatgcagttccttcatacaattttgtgtcatatattttgatgttatttgttatacaaagatccctcttaagcttaatggaaaatttaactgtgcaatcatatgatcaatgttgctttaattatggtgctgaatgttgggcaattaagggctaacaagagcataagatgtgttgcgcagatgaaatgttgcattggatgaggggtcacactagaaaagataagagaaagaatttattaagagagaaattgtgagttgcttttatacaggatatcaggcctataatagcttggacacaagacaagaataccaata

SEQ ID NO: 30187 - DNA, 349 bp, Glycine max
  unsure at all n locations
cacaaccaaattttcacattcaccaattgcgcataaacctaccaatccctggtggccaccttcaactgagcttaagtacttccacgtaacccataatcttcgttcttttaacaccgggttcccaataatccttccaaagcttcccaacatccaagtaattcaacatttcaacaacacaaactatcacagccaagaaaacagggcaaaggcaaaaaactcttgccaaaacaccaaccaaaatcacagcttttctcacttaaagaccccagtaacaattccttcatttcaggttcgtaaccggttgatngactcanatatttcactggaagtctctagtacataaacctac

SEQ ID NO: 30188 - DNA, 395 bp, Glycine max
  unsure at all n locations
tcgagatgaggaagtgtaaaagggtaaaacttcctgctnttattctgttgaccatagagtggtacctggagatatgtcgcggnggtcaggagaccttgaggacgtcaagtggggtggtattgcccaaaaccaagcttgaccaatcccgacccaacccgggcatagtcagtcagtgagaacctgtgatgtacctaagcaggcaagctcctggcagtcaacagataaaaggaacaaagaccacaaagcaaggaggcttgtgtggtggctggccagctgtgaatcttgtgtgatatatgggttatggcctctggtaatcgattactaagggtgggtaatcgattacaatgcttataaatgaagacaggaggctaagatggtctcttggtatcgattac

SEQ ID NO: 30189 - DNA, 413 bp, Glycine max
  unsure at all n locations
cagctcgtcccgggatctctaagtcaccgaggctgcagcttttattataatggttttgacataaattacatatctggaaaatctctatgacttttgaacctgccgctggtcctgtcctacacttaaattattcttctcttaatgcctggcattttttctggtagaaaagtgggttttgaccttacttccttttgctatttaactggggcttagttgaaaaaggggcacattacacattcttaaagttaagtgatttagntttctacatctgtatgtgactatgtgtggactaaggtgtttgatgtactaatgtacttctgctgtcatcctcatcctggcacataccttgtgttggtacatgattatattactagcatcttagatgcctataggcatgtgattcccatcaatta

SEQ ID NO: 30190 - DNA, 451 bp, Glycine max
  unsure at all n locations
tcatgctattgtaaggtntttagcacanattccaaatgagtgttgtgataatttcatatagaactatatatcagaatgtcattaaaaaaaaaaaccaatacaaacttcctcaagactccccttaatatgtcattcataagactttggaatgtagcagaggcattagtgagcctaaatggcataactagtcattcataatgtccatggtgagtcctgaaagctattttatacctatcctcaggtttcaacaaaatctggtgataaccagaccttaagtccaacttggagaaaaattcagctccaaacagctcatcaatcaattcatcaactgttggaataggaaatgtatctttaaccgtaatagaattcaatgctctatagtcagtgcacaccctccaagaaccatccctcttcttaaccaanataattggagaagaanatgggctcttac

SEQ ID NO: 30191 - DNA, 391 bp, Glycine max
  unsure at all n locations
actaacctagaattaaaataacttaatggcattaacctanggaattaaaacaaaattaatggctgagtgtaactgaaattggggcaaccaaaagtcacccccaacagcccacaagtcagccaccatttggtcttccaaaaggctgatgcctangttgccaattgggcccttattacaacttgaactacatcccttttagttgattaacccaaaacatatttttggtcagccaactttacaaggattgggccattatttagacaaactaaacactctaaaattgaaacaaagtggtgtcatttagtcctcctccatttgggccatgatacaactcacaaccttggacttttctccttgaaacttgggcttgtattcaaatagtatggacaac

SEQ ID NO: 30192 - DNA, 431 bp, Glycine max
  unsure at all n locations
cgacaataacttttgactcggatgttctatttgtcccgtagtatctcgagacgctagaaattcaaaacagaagctattagaaaaatcaaacgacgataactttttacacggatgtcccattgagtcccataatatatcgagacgctcgaaattgaaaacaatagcacttagcaaattcaaacgacaataagttttgactcggatgtccgattgtgtcccgtagtatatcgagacgctcgaattgaaaacagaaactgtgagcaatttcaaacgacaataactttatactcggatgtccgattgagtcgcgtaatatatcgagtcgctcgtaaatgaaaaaagaagctttgaggaaattaagacgacaataacttttgactcggatgtccgattgtgtcccgtagtatctcgagacgctcanaattcaaaac

SEQ ID NO: 30193 - DNA, 395 bp, Glycine max
  unsure at all n locations
actgaaattaaacactgaaacataaatattaaccccaattataaaatgtacttaaaaccaaataataatcaaagtggtcaaaagaacagaaaataaaaattctatcatgggtcctgtggtgcaaaagggtcatcatgtggtgcagaaagggcataatccatggcttgggcatcatcctcatcctcagatagctctagcacaggcgtagccaccgtcgatgcttgcaaagaagacaactccagcacaggtgtggtcactggtaatgcttgtggagtcatctctagcgaatccttcacagtgtccttctgagcagttggatcaatctcttggatgtctggctcttaataactangtcaacctctacaacatctggatcatccttctgagtagcttct

SEQ ID NO: 30194 - DNA, 447 bp, Glycine max
  unsure at all n locations
tctgatagtttcatgctntgatgatttgagcttctgccaaatggtcttgttgttaatttcgcttgatggttgagatatttgatgcttgctttggacccttggaagaagattgagaaaaccgatgttggtagaagatttctagaagctatgtaccatggttgcacctacattntgatttgtttctatatttttgttttggccgatgtatttttgacatgtttagctatattccaatttttcagattttattctcatttcctttaatgttgatgtatatcttctccaacttccagcttgcgtgggagggggatattagagatatagattagtttagttagttacaagttagttactagtatcaattatataaggtacaatgtatttatgtaatgagagagttttgctcatttgagcattactccaatattaattagttctaccttttcc

SEQ ID NO: 30195 - DNA, 404 bp, Glycine max
tctgtttatcataattgttcttcagaatggagaacttcagaacaaactcaaacctatcatgtcaagtacaactagcacactttcatgttttgcaagaagttgtcacagagttaaaggccttacttcaagcaactattttcttgggatattttagacttggaggaagctattaaagttagaaaaaaaagaagacctagttgtcataatggctactttggtctgtgggtcctatgaattgatagagcataggtgcaaaacttgagagagaaggtaggagataacctacactgtgtagaaaccatattcatcttctttccgtactacatatgtgctatgtagcttagaatggttgtggcaagagtgcatatagctcagagctttaaagaagattcaccctaattagt

SEQ ID NO: 30196 - DNA, 404 bp, Glycine max
ttcgtcaccgcagcaacactgtagaaaccttactgcttcctttatcgacacctactggttcttttccgactaccgacttcccctttatttcagttagtaattgtttaatttcaactgaatgtggctttaaattgaaacaattaacacagaggtagcagagaagaagaagacaaatttgggtttatttgcaccgcctagtagtagcagacacagagaagaagataaatttgcgtttgtctttgaaaggttaaatattgtatgttatatagaagtactaacattgtgaaaatgggtcccatatttttcaagtttatctaatatctcatatggtgaaattataatattgtatcatactgatcacttcaataaatgtcattataaaaaatatgtactttataatatat

SEQ ID NO: 30197 - DNA, 395 bp, Glycine max
agcttctatagttagtcacatcataataccatttgctttgttgaacgttattgtaggaaccaaatcaaccaatggtgttcaagcaaaagaaaatgttagttgagcagattatatgcagcaggcacatcgcctcattttaccgcctactgaagacaataaaagtgttacaaggaggaatgaaagatggaagaagccattaccaaagccaaattaaaagcaaactttggcattggaaccattattaggaccattagggtgaatttttgacagcagcaacaaagtttatgccaaatcttatagtatcagagtggaagaatctctggccttaagatggtgtattgaagtcatgtaagaaaggaccaacactgcattacacatattgtgatggcattatc

SEQ ID NO: 30198 - DNA, 431 bp, Glycine max
ttagccatgatatcttgattggaacataattttttcttcttttgcttgtgtgctctaagcacaagaactaaatcttaataatgaagaagtatgttaatcttaacttatttaccttggagaatttgaattttcttgaaatacaacaaattatactagaagaggggttgaataatgtgttagtcaaaatataaaatattttggaagtgagagatgttataatagacaagtttatagaaccattgtctagtgacaaaaggtgaactatcatccaatgagatgtaaaactttgtctttcagtaaaaatcttgtgtgtaaggtgtgacaataatggacaatgaaatattttataagttaatgaaaaacagtaaaaatactttgttttgtactagttcactcaacctaagttatgtccaattttcctttaccaacta

SEQ ID NO: 30199 - DNA, 381 bp, Glycine max
  unsure at all n locations
agcttgtatgatgtcgagcgtactgatgcgtaccatgagatgtctgcgggggtttaacccacatgggcgctgtcataccctaatttcgtccggggacctttgcttgatgacatgcgacctttctttggtccttgtgaggtgcttggcatccatcattaggcaatntgtgaaattccaggacataccgaanaaccaaaaaaatattgatgcacaatccgtaagtttccgtgacaccccggaaatcaaatggaagcatcgttgcataattaagtgaggttccgtaacattccgtaagtcaaaagggggatgattatgtaatccgcaaggttccgtaacattacggaaagaaaacaagtatcgttacgaaattcgtaagtttcc

SEQ ID NO: 30200 - DNA, 439 bp, Glycine max
  unsure at all n locations
tattcaattgcttcagattgttgcacagaatgtgtttatgtctgtgtggtggtcgacagaggagcataaaccacaaagtctggcgacaggtgcaaatttttgattcacggccagttgggttaccaggttaaccaaggcatctagtttaccttcaagcttcttagtctcggctaatggagatgaattcgtggctacttcatgcactcctctaatgacaataacatcacttctagtactaaattgttgggagttggaagccatcttctgatggaagcttgcttgtggggcttctatggaggctggatctttgagcttcaatggggtcctttaatggtgattttccaccatggagatgcagtggaagacaaaggagaagaggtgagaggaggcgccatccactanggaataagccatggaagaaggagcttcaccaccaaga

SEQ ID NO: 30201 - DNA, 421 bp, Glycine max
agcttctttgagcaatgacaaacaaattccacacaaacaacataaccttctagagacacattaaagagagtcatcactagatctctctacctctatctttagttaaagcaaattgttcctatgttagatatatttggacaacatagaggcagctatttttccttacctagaaaaaaagaaaaaagatgaagtttaaactacagataaaccacatgtctaaaattagtttttagcataatttaaaatagaaaactatatattattccgattgtaagcaaaatgagtctttagagcctcaaggcactacaacacaggcacaataaatttaacataaaaattcacaataaaaattggcttcaaagccaagaaagaacaaaggaaaaaaaagaacaaagtttcagcaatcatacttgggagtatg

SEQ ID NO: 30202 - DNA, 429 bp, Glycine max
  unsure at all n locations
gagattataataggattgtatggttnttaggtattgtttactctcaataccatatgcagtttctcaaggagggtggttgagtttcattctgctaattgttcttgcaatgatgttttggtacacggngttacttctacagaggtgtatgaacaagcatccactaatcaaatcttaccctgacataggtgaggttgcatttgggctaagaggaagagctatgatctctacattcatatacatagaattgtttttagtggccgttgagcttctgatattggaaggcgacaatctagannaattgtttcctcatatgaacttcanaattggtagccttagaattgaaggtaaaagtggttttgtggtgctagctgctntggtcatactaccaacaacattggtgagaagttnggagctttggctatgtttctc

SEQ ID NO: 30203 - DNA, 417 bp, Glycine max
  unsure at all n locations
agctttttagctttaagaactttttcctttntacatgcccaactctttgagtgacatttgtattgattattgcatcttagtctttatcttttcatatgtacatcatgcatcatcatgtagaggtaagaagattgtttctaaagttaaaaaaattntcaatgcataaaactctctgttntaatcaattacaaggctaatcgtaatcaattacacaagtgtttgtagcttgcagagatattctagtttcagtttaatcgattactagttaaccataattgattacataaattagttgagatcatgtttgatttttcacgagtctctgttttaatcgattactagatgatcataatcgattactacattcttaaaggtgttcccagaagtgatngagaactctttaatcgattacatcaa

SEQ ID NO: 30204 - DNA, 391 bp, Glycine max
  unsure at all n locations
ttatcnttttatattggtataccatgctacagccgctccggccaagctgtcttgaaagaaatggaccaataacttttcgtccgcagaatacgccctcatctttcggcaatacattcgaagatgccctttcggacatgtcgtccctttgtacttatcaaagtctggtactttgaacttaggagggatgacgatgttgggcacgagacataagtttgctagatccgagaatgggtaatttccgaggccctttaccgctctcagcctctccttaagcgcatcaatctttcccttatcctctgcgaagggaacatattcgattacgggtgcgggtgaagatgggacgtggcggactatgtntggttggngtagttcatggngggatggatctttg

SEQ ID NO: 30205 - DNA, 363 bp, Glycine max
  unsure at all n locations
tgaaaggataatattccgggtaagtttttgctattaaatgtcgcgtacctggaactattggaaggatgtcttatatatggcataagagcaattttggctcaagtaaaggtgtgaagttgagtctaggtttgtaaattaagaaaattaaataatatactcgaccaaatgcaggaaatattacccgtattgtagaaaaaaagttccttaaaaaaagtccgttcactatagtacgtacatataantttgatatatttaatttagtgaatttctctggacttgaactcataactagccagatgaagtagataatttttttttanatcaaattcacaataaaacaagaaaaatctctccatgacttgc

SEQ ID NO: 30206 - DNA, 407 bp, Glycine max
  unsure at all n locations
tagcttgtatgttagagtagtaccacaggacgttgataaaacaaaatactaaagacacataattgggacattttactcaactatctttgataactcttcctatcccgaggatatgataatggagcatctcaataacaaataataatggcatatgatagacataagtgcatgcatgctaataatttaataatttcatgttttaatgtgcatattgataattgtgtgattagtaaaatcagatacagttgtaaactttcacactctgactcatgagcaccctcattcccactatttaattgatagatcccctctaacaaactgtctataactatntgtcacttcccttctatcttanatgagatggctcatcgtctccccccccccccttcatgctctagaggatacaa

SEQ ID NO: 30207 - DNA, 417 bp, Glycine max
gcttgaagaagtttgactttactatcctaactcccttgagtggcattcgtattggttgttatcttgtatgttgcatcttagtacatatgatatcgtattgcatcatgtatcatcatggttagtgtaaagaaaagtttcttcaagaggcaaaaaatctttgttttaatcgattataggttcattgtaattgattacgacatgttgtctaaagcttgaagagttgagtctcatatcggtttaatcgattacattggtgtttgagacaatgattgatttattcaagagtctctactttaatcgattacgaagcggattaatcgattacttctcgctcgtctagtagttcaaaagtgaacaaaaacactttaatcgattacttagagcatctaatcgattacattgttcttgagttatttt

SEQ ID NO: 30208 - DNA, 386 bp, Glycine max
  unsure at all n locations
gagagatgaaggaccacgatccagacagttcgagagatttgcggagcgaagatttgcagagaccagagcgcgaacaggaagccgccctgagagccagagatgaggctgcgagcgactgagaggccctagacgcggaagagacatccccacaactagtacgacggcaaaccgtcaacctctacactcccggttgcaaaggaagcagactagctatggaaagccaaatcctctgctggatctcccttgcagatactngatggaaatagcagcatatctagacaacgacaagcgcatgatcactgagctatcagaacagcataccgccatgctactgcctagaccacgtagatgcatgggctgcgaagattatacaccagtgcaaaccg

SEQ ID NO: 30209 - DNA, 446 bp, Glycine max
  unsure at all n locations
cttctacagaatgatgaaatggattcggctcttttatnatgttcttatgcagntttgatctgcagaatgttttgctattntggtgttgatacccacgaggaagttgttggttttgttgaggtagagtttgaagtgaagaccaaagttttgaggcagatggtgtacatcaagtctgaagaagctgggtttaatggattgagaatagtagaaaagatcaaacagaacaagaagatacagaaaataagcccctaagcctctttgagcagatgatgttagcaaagatgcatgagctcatgaggatacatgaagaagactatgctaagcttaaggagtgctctgagtatattgtagaagcaagcttcatgatgaatcaagattgattcanggagttttgatgatgacaaagatgatngacataagctcacaagtaaagatcacttcatgat

SEQ ID NO: 30210 - DNA, 450 bp, Glycine max
  unsure at all n locations
tgaaatcgaaataaggatatttgcgactcaatctaaaaaataagggagagntgtctgttacgcgatgactggcccgggacctaaacaaccgaggcacaaccaggtctttagctccacaatgcaccagggggaatcatatgcaacaatatccgacgccatggaatgaccaagacaaactctaacccaccaaacaccttttctaaatgtacaaagaccaaactacccaaccctgcctctcatagctacgctaccaggataactaatacactagaaaccaaagacaacgaaaacaagcccaagtacgaaaaagggaccttgcatagaacgaacaatgcaccaataaacccatccacgaacgaaatgatataatgaaaacacaagaaacccaccattcccaatacgaagcaaggaaacaagcacataatctaacgagaaataccaaaagcaacg

SEQ ID NO: 30211 - DNA, 490 bp, Glycine max
  unsure at all n locations
gaacctaactatttaagaatttcattataaanaannnnnnnnngaggaatgatctctaacacaanaannngnnnggaggnaagnaacgaagcagagcaccttgtttattctctgcaactacctgaaggattttttgtgatgacagtatacaatgttaccgacttgactttgagtgccatggaatgataaagatccaactttgtattcacggtggaataaatggtgttaatgagaaaaaattgattgggttgaacaactgtagtttattgttgagatactgtcaatggtctatggatattcttgatgcttggctccattggggcctcaggggaagataatagatgaagctgggaaagtgctcactatggagctaaataatatgcctagttttgaacacgcgatcaatctgctataggttatttgttgcaactgagaaagagaaatgtggtgacaaggtttaccttagatcactactactgcatagtattgg

SEQ ID NO: 30212 - DNA, 566 bp, Glycine max
  unsure at all n locations
atacaacggagtagtaagaaacagtaaacacagtgaaaaagcacgagagatanantntnaannannntnnnnnnnnannncnaannnnnnnngaaggaaggactgagtcgtagtanntncgncannnncnnnaannnnaannnannnnaanggnnnagaannaaaaagaanaaaaaaaagagaaagangaaantatttatagattatgagtaaagaaaagaagaagaggaaggaggaggagagtatagaatagaaaaaatgaaaaaatgagaagagangataaaagaaaaggaaatgaaggaatagaaagaaaaaaagagaaggagagaagggaataaagaaagaaagaaagaagggaggagagaaaagaatgaaaaaggaaaaaaaggaaaaaaaaagaaaaaaaaaagaaaaaaaaaaaaaggaagaaagagagaaaaaaaaagagagaaaagtaaagagaaaagaaaagaaaaagaaaaaaaagaaaagaggaaaaaaagaaagaggaaaagagaagagaaaaaaaaaaaagaaaagataaaaagaaagaagaaaaaaaaaaa

SEQ ID NO: 30213 - DNA, 408 bp, Glycine max
  unsure at all n locations
agcttatgacaatttgaaattctcgagagctttcgaagattaattntgagcgtctcgatatattataagtcttaatcggacctacgtgtgataagttatgaaccatttgaatttttgagagattccgttggttaatttcgagcgtctcgatatattatgcgcctgaatttgacttgcctgtgaaaggttatgaccatttgaatntctcaagagcttccgttattcaatttcgagcttctctatatgtgatgcgcctaaattggacatccgggataaaagttatgaccatttgaatttctcanaaggttcggtagttcaatttcgagcatctcgatatattattcgcctgaatctgacatccgtgtaaaaagttatgactattttagtttatcgggagcttccgttttc

SEQ ID NO: 30214 - DNA, 316 bp, Glycine max
  unsure at all n locations
gtgtatggaccatatcgtagccaattgtgctcatcgataatggntccagtttaaacgtgatgcctaagagcactttggagatattaccattcaatgcttcccacctaaagccgatttcaatgatggatcgtgccttctacagaacccgccgagaagttaagggagatatcgatctcccactacagataggccctcacacctgtcaggttaccttccaaataatggatattaaccccccttacaactgtctgttgaggcgtccgtggatcctctcagtgggagttgttcactctacactccaccaaatgttgaaatt

SEQ ID NO: 30215 - DNA, 302 bp, Glycine max
ttgtgtaggatggatctaggatatcggattaaatactcatgcaaatcaacctttcgtcttcaacactaaattagggaaaactttctattcatcttgcccaattaagaagaaacctccaataaccgaccaatgatgataggaggaaaaagagtgtggccttggcagaaacatcgaacacaactttactcacgatggagtgagtccgacccgtgtcatgatgtgaacaaggccgatgtgggtgagatatggatagatgcccatgggggtgtggcttggattgggttgggtggggcattttgatg

SEQ ID NO: 30216 - DNA, 392 bp, Glycine max
  unsure at all n locations
aaaaccattaaataaaagctgagtgacaaaatattaaaaatactttaatttatttaccaatgcttttcttattgaaattagtagaaagcactccccatatgtcagtgacttcaaaaaaatggaaccacataaagaaaatgagagtaattttggatctttatctacctataccaattggattgacattattcaataatttaaagttactaaaaaggttctattcaagacctttntccacttcaatagacttccttgttataaatataagaaaaataactgatttacatagtcgacatcgtttaattatattaatcttattaaagagtaatttttntcaactattctgtatggaacttntattatgtatacaaaaatcattaaactaatacttc

SEQ ID NO: 30217 - DNA, 325 bp, Glycine max
  unsure at all n locations
agcttttattctaattgctaagcgacagcttattcgtggctaagcgtgacctattatcgccaagcacaattccttatggccataattgaggtccatgacgctaagtgccagtcatggcagctaagcgagattcattgtggtaatatgagtgctaagcgagtccctctcatctaagcgcatgctcctctgtacttaagatgcatcattttagctaagctggccagagcctgncttagcgacagttgcaacttttctaatctgtagaccttgctaagcggaagaatcaatgcgctaagctaagccttttctcccanaaaaaaaactt

SEQ ID NO: 30218 - DNA, 345 bp, Glycine max
  unsure at all n locations
agcttgngttgngctaatgagngaaanganngaccaaagggaagacaagagccatatctacggtaaattgcgtgttgacgggtcaaatattgattcggcggagttctagttgtaaaaccagttcatgaaagtttacattaatgttatagacttgtgtgagatgagagtttgctccaaaattaccctattctcattttcacttctcaaaccttgaaatccactagattgacgggttttatatacctacattttgagttgctttggtctgaagcttgtctctggtttacatatgatttatacatgactaacgacttgtaggatccaatctacgaaaatatggatgat

SEQ ID NO: 30219 - DNA, 98 bp, Glycine max
  unsure at all n locations
tcatgcgtagctaccatgcgtttaagggcaccaataactgccttaccataatacgcatcgccatgcactcatctgagtactgatgtactcattaagcn

SEQ ID NO: 30220 - DNA, 384 bp, Glycine max
cactggccatcgtttacaacgtcttgactgggataaccctgtcattacaccgcttaatcgccttgctgcacatacccctttcaccagctggcgtaataacgaagaagctcgcaccaatcacccttcccaacatgtgcgcattctgaatggctaatggcgcctgatgcgagatcttctccttgctcatctgtgctggatttcacaccgcatatggagcactctcactactatctgctctgatgccgcatatttgatccagaccggacactccgcgacatcctgtgacgcgaatcctgtggggaagcaggcatttaaattgcgatattgtgagcgtatataagattaaatataccgtattctatttgtgagatatgaaggataatg

SEQ ID NO: 30221 - DNA, 407 bp, Glycine max
  unsure at all n locations
gtgcngatatgagaggtgagcgtgtctatntatcataactctgcactggaccgatgtgagctatgcaacgaccataggagaaatgagtgcgagaaatgagacgatacatttactgccgactatgctatgcgctacactgagtacaagactggaatggttatgaccatatgcaatgtcgatcggaccgttctgttgtcactttcaatcgtctgtagttatgaggcgctctaatatggtcacactggatatatgttgtgaccatctcaatagatccattatgccggagcaccatgaacgatacacatgatataataatactgcgaatctgacgcactctgcataaggtaagactcatttagatatatgagagcgcccacatgactatgtacagcgattgattcagagat

SEQ ID NO: 30222 - DNA, 496 bp, Glycine max
  unsure at all n locations
aggcgttcatttctctgnacacancncannnatnatcgtncccgggatacactagagnggancngcatgcatgcatgcaaactttattgtgtttcaacacccagcgncaaagggggaggtcctataattgcatatacttcctccccccacgaacctagcattttccgcacaaaccatctatggaaaaaagatcatattaaactacaatcgctaacacaacaatggtgtgaattgattcacataacacggcgattcgcgaaagttgcagagttctggaaaacctgtataaacacgatcatgtgcgttagaacggcacacacgtgtatcatgaagtttaaatatccttgtatacgcacttctgatataggcccatgatgacaagcttatttggcatcagttctatatgaactggtggaagaaatgcgtgctcattgcaaagaagcggcactattattgcgtctgtctattgccacgtgaacatattggttaagatacg

SEQ ID NO: 30223 - DNA, 419 bp, Glycine max
  unsure at all n locations
cgcatgctatctttcttgtgccatacctgcacacgcgaacatttggaaagttagtttttgtgggacatatactcttaagcagaaatggcatataacctcctcccataaatacaaacatcaatgtatatttagagcaagcttatgtgcatgtttccttacgaacgttcacttgcggaagatatcctattaaccgaaaaaatgcacccatatacaatcaaggcagctntgttagctagattatttacacgtacttccaaggtgtatttgttactacatcacacacatctccttggctaaattcacatacatgcatactccaagcatttggggtaccaaaaattgcacatgtgcacatcttggtatttctaatacctatacatacacgaacttcatgatgaatcttgactatctacacaata

SEQ ID NO: 30224 - DNA, 360 bp, Glycine max
  unsure at all n locations
tttctcgctctccaccctatgcanacccgccacgtgccgctaatagcgtgtcctcgtcaacgtaccggcaaggaattacaaccatatatgagacccaccgaagaaactacctctccgaatccaaacttccttcgcttgtagtactgccctaattccccaaattcgggtctgtgctatttcttttttattattgtactttcttctcagatcccggaggcctcttccctccctgtctcaagagaattcccccgattttctcgagaaagtgaaacggaattatgagctttcaggacatctaagccgggcgccccttcggttcgaggcgcgggtngatgaatgggaagcaagaccccacgcaag

SEQ ID NO: 30225 - DNA, 430 bp, Glycine max
  unsure at all n locations
agctttgtttaatttgttttgacaataactntatacacggatgtccggttgagtcccgtaatatatcgagacgcctcaaatttagatccgaagctctgagaaaaattgaattgacaataactttatacacggatgtccagttgagtcccgtaatatatcgagacgctgcanattgaaaacggaagctcgtatgaaattcacacgacaataactntntactcggatgttcgattgaatcgggtaatatatcgagacgctcaaaattgagactagaagctctgagcaaattgatatgacaataactctatacacggatgtccggttgagtcccgtaatatatcgagacgctcccaattgaaacggagactcttatgaattcaaacgacaataactttttactcggatgcccgacagagtgtcgtaatttatc

SEQ ID NO: 30226 - DNA, 495 bp, Glycine max
  unsure at all n locations
cccccaccanngggaattcagtcangacatcgnnaataacatcgacccggaactttgatgacctgaggcatgcaagcttacttctttnttagtaatgacccactancctagagggaatatacttaatggccttaaccctaggcattgaaaaaaactttatggctgagtgtaacttanacttggtgcacccaaaagcacccccaacagcccacaagtcagccaccatttggtctccccaaaagctgatgcctaagttgccaattggccccttattacaacttgaacttaacctaactaaaagccgctttaattgattaacccaaaacatatttttggtcagccaactttacaaagattgggcccatattttaaacaactaacaccttctaaaattgagacaacatgagtaattagatcctctccatttggccctaaaaaactacaaccttgacttttctcctagatactgggctggattcaaatagttggacaccg

SEQ ID NO: 30227 - DNA, 392 bp, Glycine max
  unsure at all n locations
agcttgattgctttctttggctgaccctaatatatgttactcaaccatgaaacaagttttgttggataagcatgggccttgaaccaagtaatttgatgcaactatatcgagcanagagaaaagtcatgaaatactagaggggtcatgcatatcctataatgacttgctgcttggctctatcagtaatagaaacaatccttggatatagtgaagatagctgtaaaccaagtttgatttgatccccaatttaaaggatattctttgcttgatgatataaaaaaagattgtgaagggtgatcccatggtcagaatgatggttgcatttaaatgtcttatggggaatctattatttatgtgctcttgtgcaacagggttgtccctttgtattgagt

SEQ ID NO: 30228 - DNA, 463 bp, Glycine max
  unsure at all n locations
agggaggtgaaactagtancnctgcgcacaanatacacaagcttatcacatgtanctgttggcatgacattngaagggaagaagcatttgtgttttggagtacttngggccactatgtgatgccatggcaaagtcttggtgtggcccctgccctcaactggcatcttcttggcagcaaagtcaggtaattgttggagagatgtggtgactatgccctgaaccctccactgtatgtcttgactcatggcctcattcaaattgtgacaacaggccccataaggtcggattcatgaacaccctttataaaacctagctggagtttgtcattgtcaatcactttattactctatgaagagtttaaaatcagcgcttctctatgtatcttcttagtaagtttcctttcttgcaatttgcataggacctctatttgtggcggcccgtctctcctttgcttatatgcttg

SEQ ID NO: 30229 - DNA, 403 bp, Glycine max
  unsure at all n locations
caattatgaaaattaatttttgtgcgagatttaatgttgtcacatgagctatacttattggataaagtatataagtatactactaattactcatacaacatctaaattaataaaaaagattgcagtgcttatataataattattagaaagatatatnaagagattaataaaaagatgtattaggttctattgatagaggtatactaataaaaaaatacaacgaaattcattcagcatcgctattttttttttaaatttagaagtatgaaatgaaattaatctcttttgcattatacagtagaaatatataaaaaataaaataattattttatttatgatggctcattctagtgtatttcacttaaagtttctccattgaaatttctcttattgattctggatc

SEQ ID NO: 30230 - DNA, 489 bp, Glycine max
  unsure at all n locations
gtgctgcgtcgtantctacacnaaattatctaagctttgagatactanggatntgatgaagaaattgaccttatctcattttttgaatgagggagcgacaatcggatgtggattttagtatgttgatgtgagtcctttgctacgtggttggggatcaatgatgaatgatttttatgaattccgacctcgagacattagccattgattgttaatcatgtcgtcctcataccaatgtgtgtggaggagaaatcctatattggtgaatttcacccttaggtcgggagtatgtaggtttactatattctcttttaggtaatgttacttgtcaactgcattatatacttgccctaagcctttgtagcaaaatgtggcaaatgcactgatattatgcaagtcctatggtacaatctttaatattcatcggacttgatgatttggtcccttcccaatttatgacgaggtttggcatcttggcgagacttggtgaan

SEQ ID NO: 30231 - DNA, 474 bp, Glycine max
  unsure at all n locations
aggtcttctgtcnctcgacatncnannancnatnatagnanngnggacnctccggaggcgaaccgcgaggcagcgagccnggctttttttcttttttttcaagccaaaactgagggggatggggccctatacctttgacacactcaccgacacctaagttggtaaccaattatggcacggggtgaaaataactgggttcaatctctatatcctatatttcctccataacctacggggtgtaacatgacccaggatttggaattgactttgtttgaaacttaatctaatctgcaaaatgtgtctctatccgctaagccttggatggaaaaccctgcatctggtattcaaatattttctaaagataatttgtttcgcagtgacctcaataatttattacttggactttacccctttatccgaacttttttattaaataaaactcatacttttattaaattatgcactatatagccg

SEQ ID NO: 30232 - DNA, 591 bp, Glycine max
  unsure at all n locations
cagccccgatggacatttgcccaggttacnngncnacnnatcagngcngnaannnanatgctatggnnaccgcggcnggagcgcgactcnctagtacgagccctggacacgcgataggccantgccanangcanttgnaattttntnatgntatancagnnacaccacgccctnncgngcgggggacnacgtggtagttgtaatactactactcctctaattaattgaacattcttggagttcgattcaatttagaaataaaaatctaccaaatagagaaatgagatctatatatttaactatacttttcagaaaatacatgcactctaataggcaccaaagactatatgctataccactcctaaatctacaattaaagctacgtagagaagctaataaaaaaactttatattcaatagaatgcgaatcttacattaaataatcatactaatggatgacaattatacatgtgtcattatataagatcttacgaatttaaaatcacctcaatatatatcccgagaagtcatatctacaatatcccgggttattaaagttacctattggggctgattatacccattctatccg

SEQ ID NO: 30233 - DNA, 395 bp, Glycine max
  unsure at all n locations
agctttatctactttgatggaatgaatccatatggcaatntaagcacttaacacaattcatggccaattctactagtaatntacaaattttccttccttggttgtgcatgcagtgaaaatacatgatgttgtcgatgatgatatcangcccaagacagccaggaaatgacattgatgtttatctaagtccgttgattgaaggcctgagaaagctgtgggacgagggggttctagtgtntgatgggtttcagaatgagacttttctaatgcatgcaatgctgttttgtacaattaatgactttccagcatataggaatttgagcagttacagtgttaagggtcatcatgcatgccccatctgtgaagaagacacaagctacatacaactganacat

SEQ ID NO: 30234 - DNA, 422 bp, Glycine max
  unsure at all n locations
agcttcattaagtttcaagatngattcaaagagtggtgaggatatcaaagaagatgactaancgctcataagtcaggaacacttcatgataacacagctgatgatctcaagaatcaaagaatgagtttaagattgaatcatgtacacttcaaggatcaagaggaaagttgaattcaagaatcaagtttcaagattcaagttccaagaatcaagatcaagattcatgactcacgattcaggaattaagagaagactcaatcgagataagttttaaaaagttgtttttaaaaaataaactctgaatagcacatgaatgtttctcaaaaccttttaccaaagagtttttactctctggaaattgattaccagattattgtaatcgattaccagtagtaaaatgattctcaaagaacattcaaact

SEQ ID NO: 30235 - DNA, 115 bp, Glycine max
atgctctatgtgcgcactgtgctatcaatactaaattctagtagtgcctttgcctcgatcacgcacatgcgtgctaagttaggagcattcaacattggggaatagtttgatcctt

SEQ ID NO: 30236 - DNA, 358 bp, Glycine max
  unsure at all n locations
agcttgactcgctcatattancatgannatctactatgcgagtaatttattatctattttccatctgccaacactcatgaatagatatccttacgaccccactaatcctttatatgtttgacttggaaagcaatttggaacgccatttccagtttggtcgaaagattgaagacttgatgttcactgatgcacctgaagagggttgtgtgtataatgctttataatccttcatagtttcctgctatggcacatctagtcatgtctagaattctatttatgaaacaatctggttgcaatgtgtattagttactctggttgaaatcacgaggttctagatatagatggcggaagagagata

SEQ ID NO: 30237 - DNA, 422 bp, Glycine max
  unsure at all n locations
agcttttttataattatcatcctctgaaatcagntcagagtatgcaagctgccaataccatcaccaaaactaccactcaccacaatcacatagtgtatacaaaaaaattatagaatataaccgctatcaatctttcccaatgtgttactagataaaattattagcatgtttagattacacgcaagaatcaattctaccctataaaataatggtgataccatggaaaagtataagcaactatttgtggttttgccttcaccatgaaaaaagtagctgttcctagtaaaggacagtaggataacattaacatcagaaaggaccaaagtcattagcataggaccaatattagcatcaagtttccccttgtatttcatacacacagagagctgtaggtcttatttggtccgcatcaccctttggga

SEQ ID NO: 30238 - DNA, 459 bp, Glycine max
  unsure at all n locations
gctataacactcactcaactattagtatgaaagaaataantcttgctgatatcncgaaatactcatgattgtgtatgtgactntaaaaggtcatgtgtgtgtcagtcactttaaaaggttatatatttttttttattttaatgtggatcattcagataatagacacatgcaccaagcatgaacgaaactagaaaaatatgttaagggggcaaaattttaacacattatanacaagattaaaaataactaaattttaattatttattatctaaaatgtagtttaataaatatgaaatattaaataacatataaaagtggctatnattacctttaatgcaagattatacggaaattgttgaaatttgtggtataggcacatggtggaatagatcaaaaccattgtttttctctaaaatgtgtgtttggttctacgatggagaattatttccaatttatatt

SEQ ID NO: 30239 - DNA, 381 bp, Glycine max
  unsure at all n locations
tcttctttncttaagtggtatccggcattacattgagactcgatccattgtcgataaacacctttgcgacaacatggtccatacactgtaccgacacatgaagagccttgttgtgtcctctcccctctacgggaatctcttcttccacagacgcgatataattgatggtggttatatgattaatgatgccttcaaaaccctccattgagatatcgtgcgctacatgggcatcattgaggacgtttatcaacagcgtacgatgaggctcggagtttatgagcagttcaggcaacgacatccttgctggagttttattcagttgctcgactaccttaaactcgctgtgttggatgacgcgaaagaactcatgggcctcttcca

SEQ ID NO: 30240 - DNA, 528 bp, Glycine max
  unsure at all n locations
cgggccctccccnnnnnnnnngngttggaaagtcangnancgncncnctngatnaatnngagcgnagctcccgtggagcctcttgagtcgatgtgcacgcatgtttgtttcattaanaggcgtctcgcacactcgggaggtggtgattaagatcacaacggccaaatcatggccgctcgtatagtgaagatgcataccttatagcgagatgattctgcggtaatcgaagactcgtcatcatcctatcgcagctccttcttgatactaattctaagagcatcacatagaaagcttctccataatcatatctgagagttctttgacaagcgatctcaggaagctattttgcgatgctagagccttatcgatcctcacacctctatcaagtatatgaactaccgctggaattattctcggaaatgaataacgacaccatgtatctaccgtcctacatcatcacgtatgcaatactatctgtatattctcgcggtgtacatcgcacacacactctccgcatactgtggaccg

SEQ ID NO: 30241 - DNA, 375 bp, Glycine max
  unsure at all n locations
attgtgcaagcaatcaatgaagcaaaacacaccaaaagattatgatgatggatgactcaaatgctcacaaatgtgaacttatcagtgttcaagtgagcgtttcaatctatcatgacatgtagaggcaaaacaaagatttcagatcgcagaatgtcatgagactattatctccagaacaattacccatttcttgagcatatgctacagttcagagaaaaatatgcatagttgtacatacaaacanaattgacctaaaatattaaactagagacccaacagaactaacaaatttaacacgaacgaaactatcagaactagcaaaacgcaaaccaatgacactccccccccccccatacttaatacacatggcctaat

SEQ ID NO: 30242 - DNA, 402 bp, Glycine max
  unsure at all n locations
tttcatcaattcacaaacaaatctttgagtgatgcacttgaaatatttagaggattgttgaganagatgcctactcatggtttttttgaaccaatacaactcaacatatttatagatgcgttaagaccgcaatctaagtagcttttagatgcttcagctggnggtaagatcaaaatgaagacccctgaggaagcaatgaanttaattgaaaacatggttgctagtgatgatgccattntgagagaccgagcccacatctcaaccaaaaatagtttattggagcttacatcacaagacgctttgttggcacanaacaagttgttatctaagcaactggaggcactaacagaanaacttagtaagttgcaactcagcttcattttgcacaaacttcacattttt

SEQ ID NO: 30243 - DNA, 530 bp, Glycine max
  unsure at all n locations
caggtagtnccttgaaantcgtcgacacnanacatatactcnagcttctatatcagctgaagccgtggtatcaataagcgacaagttgagtcttattcanattatgagagngtatctcgtttatcttaagtgagaggagattctcccgagatatcttgagtgattgcaagaacacccttggctgtatgcaaggactttcacaacctttgtgagttgccctcacttggaagagtgattgttttcctcgctttcgatcatcacgccttggtctttcagaccacaattccagaaaatccacctcttgccagaattatctcggggccataactcccattttacgcactcaaattaagtgattcttgagcctagattgaatttcagaacgagacctttcacctgggtgtaggaatcacctcatttggagccctgtagctgcaggtattgccatttctatatttctgtgcagccaccacttaacctacggtgtaccatcccattcatgcatgttatgccaagaaccaccttattan

SEQ ID NO: 30244 - DNA, 406 bp, Glycine max
  unsure at all n locations
tgtatctttntttcttgctgcccaatgcatctagtagtcgctatttcagctgaaatggaaaagcaaccgcctacttgggaaaatgtatattgttcccgatgaagacgacngagacactgtctcgtctgtgtcagaacttccttgctgtggcatcctcaaagactgtctccgtctgtcacactcgactcacaccacacccaattgtgataaacgcgctgctgtaatataattangggtgctntaatatttnttttattaatatgattgaaccaacaactcacatatactacctaactgagagaattttgattntgaatntgaatttcaacacataattagttgaattttaattagataatatattattagatctgtttatgttagttcactattgatcgggtaatac

SEQ ID NO: 30245 - DNA, 507 bp, Glycine max
  unsure at all n locations
aggagtgcatcncctangattngctgcacananaatacacaagcattcgtatgatccttaccatgattntgtccttgtagctcccttaatcaatttcttaagaatatgggcaacaaccactttggttaatttataatttgatgaccgggtagaatcaacgccattacattttcttccttattggtttttttttaaccccccacccatcctatattatctccaggttgtaattcttgttgtttctgttggcggagtcttaggccgagttcttgcttgttctcgagggttgggtttatttgcaactggaagacataggtgcgggagacaaagacgtacgtgtacggatatcgggctggtctctggattggattccattggacagagcactactattatcaggtttacttgtgatgatattaagaaaagcaccaagaatctctccagaaatacatagttggaagaggtggtacaggattggtacaaggctttgcttctaatgaagcgaag

SEQ ID NO: 30246 - DNA, 373 bp, Glycine max
cagccttcttttttgattaggaaaattttatccaccctaattaagttggaaatttaggtgacagaaccaaaattaaacctgctcttaaataaagaattatttcttagaagttaatggtaatggactaataattttaaccttatcattccattaccaatcattattgattataattttaagaatatttcataaaaatcatcaaatttattatatatgatgggttctgatcggatgaaagtgtaaattattttacagtgataatgtataattggttttctcaatttttctttgataggactagtgctggtatttatctaaagaatgaaaagatagtcatgtaacttccaaccctcagcaactgaatgcaactact

SEQ ID NO: 30247 - DNA, 533 bp, Glycine max
  unsure at all n locations
gggattctggccctgatcatgcgcacaacactaacaagctttgccacaatcacacttgtgggtctggttctttcctcgtattattattatcaaatttgcncccggcccaaaaccacttactaccaggattctgtgctttgtctngtgagaagtagttgggtgtacccagaccaagataccgcattcttgggttgagaacaaagaattgccttgtgcttgctgaggtggttattattaccncganggaatcatttgattggggttggcgcttattaaacatccccaaacaacctgtcttggattgagatgttctttgtaccaaatacccacattaacgttattgggaataacctggtgatgtgccattcatttcttctattttctaaaccctttttgcaccatgttaattattgattgatcttaattgtcaatttattacgcaggtatattatttgggcccattaagcttatgtgatgttcttatctatttcacgattaatgaacattggcttgatctgctttggcttgatttn

SEQ ID NO: 30248 - DNA, 517 bp, Glycine max
  unsure at all n locations
ccccagggggnnnaaggggtggcttgccttgtatatctgcganaccactnctacgngagctgctntgagnagacctagatgatggcagcctcctattattgtggcagggcggcctcccttcactttcttgtctccaacgcgacctctgaccactgttcttccttcccgcgatgcttctttcatggtccgcctaatgggcttatagccctaaacatactttccacgaattccctggggttttatcaagctagntatgctgcattgtcttttgctaaacccatcccgggtcataaaccgtccctacataactcgggccatcataccgccgcatcggacagacaagggtgcccaaagagggagtccacggaggaaatgctgaccacctcaaaagactgganagcggtttctaacgattcttctgcggcttccacataaggcatggaggatgggcagcttaccaagatatcttcctcgcctgacacgataaccaagtgcccctccactacgaatntcagcn

SEQ ID NO: 30249 - DNA, 368 bp, Glycine max
  unsure at all n locations
caaacatttaacttgaacatctaaaaaaatattagcatttaagcattgcccggctataaaatcccaatttaaggatgtcacctaacattgatgaacttgaaataccatagtgtgctgttatagattttgaacttgtaaagggggaaagcatacctacacgagtatgcttttccctgttctggcaagttaagatgttaccaaaacttaaatttgtttccatttgacacaatatttaaattatccttatttcacttaaaataaacctctttactggttgtactattttataaacctcanacatgatgcattgttattggagtatgattgatccagctgataatttcccccattgatggtacatattatat

SEQ ID NO: 30250 - DNA, 393 bp, Glycine max
  unsure at all n locations
gagcttcacttttttaattttaaantataaaatttcatctgagttataagagtttttaataagatatgaaaataaatatggccaattatgtggtttttttggaaaattattatacacattaattaagtccgtgccttataataaaaccggggtaatattatccgaatggctacttttattctattctgtgacatgtaataggttttgcattcattacctcagggacgaaggaattaagatgatttttttgcttcattacctcagagaccaggattagggatgaatattgtacggacatagacgctcatgatctttntatcttaaaagaaatatctctgcgtgctttgaagataacaatatagactctatgaaaacatttgagctatactcgcn

SEQ ID NO: 30251 - DNA, 489 bp, Glycine max
  unsure at all n locations
agaaggatgaccatgatantcgtacataatattcagctgacacatccctttgaaatgaaaagcaagacccattattgtctttatccctaaccccgctgctggattaacctggagacacaaaaatttatgaatattccgaccgatttttgaattaaggccaaccatggtgaaacccaatggttaattgggagggaatatttgaccaatttaaatatattatcttacccttggagaacctatcattttgaggaagaaaaaatggttacttcatggattaacttgctcttactggtgccaattaattatattatctaacttaattattaagccaaggatatatacttaatatagaatgcatttcccagtggtttaaatcatttcaggtggctgaagaaagcatgaccaaccagctttaacccgcatcttaatccactttgcatncagagcccgatttgaagattaatntgaatgggtacaaatataataatn

SEQ ID NO: 30252 - DNA, 249 bp, Glycine max
  unsure at all n locations
acactanagagaagcaatggcgatattgtacacacacacattctctatctagaataaacctanaatgtgcattttcactctactaacttaaaccctatgcaggggaataaaaagtaggtctgatcttatatgccaacaccggcagtgtactagaatagatcacatccttcctcacattggtcttccataaagaaagcggtaacggggaaaagtaaagagggatatgtgacggtgctttgtttctgtaaa

SEQ ID NO: 30253 - DNA, 395 bp, Glycine max
ggcggatgagaaaacattgtctatattccatctccaactccagtaggcctcccaatcattccttacttttataggaggaatggtgaggacaataccctcaatgccgttttgtctaggaacacacatcattccctagtctcttccttcttgattattatgatctctatactcaattgaaccacctctcatggagcgcatcatctcggtgatcattaacctctccaaatgtagcatcaaagcttgcatgaaagattgcgaaagccccactccctcattaggagtaatacctggcatctcaaacaagcatatcaaaccttacaagacaaatataggaactggttgaatacctcacccactcgagaggatcacacaataatgggctgtctctaacgaac

SEQ ID NO: 30254 - DNA, 513 bp, Glycine max
  unsure at all n locations
aggaatgacttttctanatgattctgagaancatcatnnacgcattctnagactccanacactgcggngnatatcaaagaggaagtttcttatcacgtcttngtatatgacaatttacaagcaaactatagagacagtgcatcagacaacgatataacagcgaatgataaatgcctccatcatataaattcaaaacacgaggggcatcaaactgtcatcagtaggaaaatgatggatgatatttatgcattaggggcaaaatgtaggggaagatgtggattactcactaggacatcgtaacttgaaagttaccatgggtgaggaaataacataactgtcagattaaaaaagggccggtcacacacaaggacctcataagcattcacaatagtatgactanattgaaagtaattattcagcgttaccttcaactatttctgctggtacataagcagcacattatcattctcaagaagaatcactccgattacaaattacaaaacaaatcaatag

SEQ ID NO: 30255 - DNA, 413 bp, Glycine max
  unsure at all n locations
agctctgcttatttggtcttcgccagcgaaaggatcgaagtggatctgaaaagaggcaaatctaatcatcctgcttagacgaatgagaaaactgnggcaaataaagagggtgaggatgagggacaaacccatgctgtgactgccattcctatacggccaagtttcccaccaaacccaacaatgtcattactcagtcaataacaaaccacctccttacccaccacccagttatccacaaaggccatccctaaatcaaccacaaagcctgtctaccgcacttccaatgacgaagaccacctttagcacaaaccataaaaaacaccaaccaagaaatgaattntgcagcaaaaagcctgtaggattcaccccanattccggtgtcatatgctaacttgctcccatatctacttgat

SEQ ID NO: 30256 - DNA, 438 bp, Glycine max
  unsure at all n locations
actaagctgagctcactggtgtgcccataaagctccacgaaatttgttcggccatgctcttccttgcgagccctcttggtttcttgttcaaaggctcttgcggtagctgcattntcttctcgtaacccggcacactctntccgaatgtctgtagcgaccaacttgaatgnttctttggcaagtcttgctattcctagttctggtttgagagcttagacttcttcatcctctttcggagctntgaaattctcttcgttgataatctttaacttggagagccaatctaaccctcgtgtaagaactttcagccattcatgataaccaccgatgaagccattacgaatgcccctaagttctttatctttccttaacgagctttcccacgccttatggactctttgtataaccttgaaactttgcgcgccgaaatctctcaca

SEQ ID NO: 30257 - DNA, 366 bp, Glycine max
  unsure at all n locations
gtgggtacctatnttgaatctgcgatgctgtctctacatacatanaacagtcccaccatcccaattgtgcaaaaccatattcatatatcattgcggcatttcaccgagcacttggtgggcgcacgtttggacataaatcgcaagagaatgggggcaatgtggcatgcctcattgcttcagaacacaacataggcctaaggccttctcattcaaatcctcaactcaagacatcaagcatacaaacaacccacaactgcctcaccaatgtaagcatgttctcacaattagagcaccagaagatgaagaatatactccaatgggaagcataaaactcaaggatngaatacttacttgttggagtgagta

SEQ ID NO: 30258 - DNA, 492 bp, Glycine max
  unsure at all n locations
aggaggatgatnncttagactctganncaaattacctactccaccgagacgctnnaagtagagctggctcatattcctgtctnnnnctgagcgcacctcgttggatgagaactagagctatctaccaccggctataatagctaagctcacccccatgacaaagaagctgaaaatgacaaaaaaaaaaaagtacgttatacacaataactgagattgcgccgaattacaaggcgtaaaccctatacttactaaatggcgcaaatacaaggtctagacgaaggaataacctatgttaatatttacgaagataagcgggctcatactaagcccatgggctggaaatctaccctaaggctcatgagaaccctagggcctttcnctggatctctagcccagtctacttggagtcttctaaccgatgctcttgcagggtaggatagcatcattccctccaccttaggaaggatgtgacctaaatcccgagttcatgag

SEQ ID NO: 30259 - DNA, 524 bp, Glycine max
  unsure at all n locations
agacgttctgannctgagtagnatncctagggcgnctactctgaccnngccatactatcgagnngagccgacaggcaggcaggcaaactattttgncttgacnagaccccnnagcttaggagagatcagctctaccaaaataacaaccgaggagcggaaagtataaaatattaaaaactaatataaacgatgatgntaatgtaacaagtgacttcgaataaacatcggagggaaataatattactgctaggctacatacttatattgtacagagaactactacaagtaaccttacaaaacgtgacaactatgtagaaacgactaaaaaagattatttatgcaacaatgagtacaactttacagagataaaatatagttgaaaatataatcgagcttaatctctctaatgtgatagtaagacaaatgctcatatgacatctctatcatttataacgtgccactaattgagcctggttattgctcatatgtgcagtactttttacagagcatgttcagccacgccn

SEQ ID NO: 30260 - DNA, 506 bp, Glycine max
  unsure at all n locations
agagtaatggctnatgagactntcggacacataatctacgctagcaagaaccangcggganggagaatgaagaggcgacaaaaatgancgatgtgcnccncgagcccagaagaggtgattgagcctggagaccaagacacctatgaattcctacaccgatatcaagatgttgtccggctacaccaacgactatggcatatcagcaaggatgtacatttcttcctagtcatacgcccggcgcatggatgacccactaaggacttctgccaaaacatgattatgattctccgcgaatcaacttcacgcatgcagcctagccctccaagcactgagaccagacgaagcccgaaaggacaaccacatatcctactcgcgaggtctgtgctaccaattctttattgctgcacgagaacgaccactcctttccactcaatgaacacaaatgaacttttcctctgctaccgtctctgagtcagatctataatcactgcacatatccatttagn

SEQ ID NO: 30261 - DNA, 415 bp, Glycine max
  unsure at all n locations
agctnttctccctcattctcacattgctttntctccctttctcctccaccattgaagcctccattanagctccaaactttgctcaccatttctgctccaaatcgcaaaaggaagctattntcggagtcgtgaagcgcacctctacgttgtgggaacttcaaatttaggtttgggtagacttcttctcacataaattntcgtgggtattgggttttgggagatatgatgggtagttgtactaagtttatgccttaaggtagttatttgtgaaggaatttgttgaaagcatgctaaaattatcatgtttgatgtgagctaaatatacccattctgttttaaggttntataatgatactttgtgatgcttgtgtgctgaaatcgttggtagaaaattgatagagatggagggtagagt

SEQ ID NO: 30262 - DNA, 210 bp, Glycine max
cttttgagctagaatgtgatgcctctggagtggaattggagctgtttgttacaagctggcaccctattgttatttattgaaaacttatattgcaccctaactaccccctatgataagagcttatgccttataagagccctccaacttgggacataccttgttccaggaattgcattctagtgacatcatcacttagtcattgatagcaag

SEQ ID NO: 30263 - DNA, 316 bp, Glycine max
tctgctgccaccatacaacctttgcccttgcatgcaactacctggagcaagtgagcagcctgaggcttatgctgcgaatatatacaatagacgctgctcaagccgcagcagcagaatctaccacagcagaacagttgtgacctctgcagcaacagatacagccctgcatggaggaatcacgctaacctcatatggtccagcccttagcaacaacgacaacagcctgctccttacttccaaaatgctgctggcccagacataccatacattcctccaccaatccaacaacagcagcaaccccagaaacaaccaacag

SEQ ID NO: 30264 - DNA, 379 bp, Glycine max
  unsure at all n locations
tatggtgttcaaggtggatgntgaaaaagcctatgactcactctcatgggttnttttggattatatgctgcanagaatgggtntttgccacacatggagacactggatgtctgcctgtctcaagtcagcaagcattgctattcttatcaatggcagtcctacaaaggaatttgctcctactanaggtttgaggcaaggtgatcctttagcccccttactctctaatatagttggagaaggcatcacatgattgatgaaggaagcagtcaaaagaacttatatagaagctatatggctggaaagaaaaacgaacccattaatatcttgcagtatgcggatgacagcaattttgtgggtgaggctgagtgggagaatgtta

SEQ ID NO: 30265 - DNA, 173 bp, Glycine max
  unsure at all n locations
gacctggactggaaacgattatcatgtactacagcatgatgatggaaaggatgacatctattcgcttattatcactgagtgaggcatagagaccacacgtttatggctacagaagatgtcctaataaattatccacgtctgccatcatcaagtactgttgtaatgatcagaan

SEQ ID NO: 30266 - DNA, 275 bp, Glycine max
ttgaaaccactttctcactgcgttgaacttcctaattaaatgaaataatttccctataattaccatggacaaattccaattgtaaagatccaattcttatttacctaaaatgattaatgattcactaagacatcatcttctcgctgcttttgacaatgagtatgggtgaacgaagccgtacactaatccaatacacatttaaaatacagtatctacgaagtgatcctacgttgtctccaacgagcaatgtcaaccaaatgttcataacacatagt

SEQ ID NO: 30267 - DNA, 478 bp, Glycine max
  unsure at all n locations
aggaatactannctcgattntctcacanantatcnnanataaggcatccnnggccggnnctangaggaatcgngagacatcatntattnttcnnngaancccanncactggaggggaccgaacgcaggaatcaaaccgaccgtgataacatggaatccgcatattttattgtacaatgaaatatggaacccacctctgggtttcatattggtgacccatgcctcataacatatgagccatcagtttagtaagttgaaaatattgggcaagatgtgttgttgtgttgagccacgtgatgtgaacaactgaatgtataccataatgattaatgcatggctatggagtttaattttatattggactaatattttatgggacatactactgataaaatgtgatctagacatcattgatcatgcaagatcctaacctttaacacagtttggaaagattaagtatttgctctatacaagatctg

SEQ ID NO: 30268 - DNA, 389 bp, Glycine max
  unsure at all n locations
agcttcatactttctaattaatagcttccaaattttcattttgaagctatctcatgagttatggctcttgcatgtctcccatgttttgtattcttcctttatatctttagtaatatatagacttgtagcataagatcattacgaatagggtcactaatatagttggtatgctttttcctaattaatgtgatatattactcttatactattttctacaagattctttctaaaagctatcattttctattcatggctagaagacatggttttatgatggtgatttggtgacgatnttataataatcaacatcattaaggaggcaatgacatttttgtaaataccagtcatatttcaacgactgtgttccataaaacgatgtagaaattgca

SEQ ID NO: 30269 - DNA, 250 bp, Glycine max
tgtagcattgggtatcttttgtgatcgacagcaccaccaagaacacaaatagtgtcgacatgaaaaaaacaggttgtgatggtagaatttcttcttctttgcaaacaaaaccactatcatagatcctcttcttattgaccagggtgagtattttttttagtacgttccctcctgctcctctgggttcatttacctatttacattggatgagttttttattcgggtttagttatcactgcatgttcattgc

SEQ ID NO: 30270 - DNA, 451 bp, Glycine max
  unsure at all n locations
cggggaaggggtnnnnttnnnnnnnnaccttgctagtcaggcataccggagtanctgagggagcaacctgtattgtttgngttatttgccgcaagaaacctgcccattttcttatctttcttcagggccctatggtttggcactccggcgcttacaatatgggatggttgttccgacctttggcttaccgattcgcaaaattggaggattggttagtggctcgttttcttcacccttcgcaaggatattttggccaccagtttctattcttctaatgtgaactgtgaatagtggtatgatcatgtggaggcctcttatttctaattccaaactttggatttttttttaacctctagtttcattgccccctaactggccgctataccattttcctcgacccttttgtttaagtgaagggtcttatggcccattttctgcggttcgatcccct

SEQ ID NO: 30271 - DNA, 239 bp, Glycine max
  unsure at all n locations
gtacaaaaaaaatcctgcacatattttcacccttcactctataaatacatgaaatcgattattctgacaaaatatatgcgtccgcgtgttcggtcgacaaactgtntgatctgcagaactgcataccatttgatatcatgtttgctcatccttgcgtgttcctctacaaaacaaaaacaaaaaagggggaagcgtgaaacttcatactacattcttagtttcatgtgttacgcaccacg

SEQ ID NO: 30272 - DNA, 423 bp, Glycine max
  unsure at all n locations
agcttgttcatagagatctaggaagaacgccgcggccgcagggactagtgccgctcccgagttcgatagccatcgtttcaggagcgctgagcaccagcagcatttcaaagccatcaagggatggtccttccaccgagagagacgcgtccagctcatggacgacgagtacacagaatttcaggaggagatagctcgtcngcgttggatgttgctggtcatgcccatggtcaagtttgatcccgatatagttctcgagtnttacgccaatgcttggcctacagaggagggcgtacgggacctccggtcatgggtaaggggccagtggattcctttcgatgcagacgccctcagtgtgacatcctgaaaatttctacctgaaattnttgaaacgatgtattttgaatgattatatatatataagta

SEQ ID NO: 30273 - DNA, 447 bp, Glycine max
  unsure at all n locations
agactctgcaggtagattttagccttagtttcactttagtttgtagtcaatncaattaagaaagagaaatgccaaagagaaacgtccgattgattttttttgctttattttactaaaaggtattttttgattatgatattattattatacctcttttttgatttccaacgtggttacagcacgaccgaacggtcggatttcattataacagaaattaacggatattacagatcaaatgatccgtgaaaatttattttattttttgattaggcgagagatgacttaaataaatgactgaaacacgtcaaaagagggtacgggaagtaaatgatacaagatattaaagtacacgaatcagatggagaccaccacgaatacataaaatgaattgaagagctcagtttgggtacttaccggttgataaccgatgaaaaacgaagaacgaac

SEQ ID NO: 30274 - DNA, 448 bp, Glycine max
  unsure at all n locations
gccatgcaagcttgacttctacactcaaacatggcaaggttcaacacactggtcagacaaatcttcttcaccaaataaccctatcacaaagcataanaccannataaaacctacccatcatatnnctcccaaagccccatacccacgaaaaatgtaggtgagaaagaagtctacccaaacctgagatttcgaggtcccacacgtagagatgcgcttcacgattccgaaaatgccttcctttcgcgaattggagcaaaaatggtgaccaaaggttggagctttaatggagaggaagaagaaagaagaagcaacgtgagggagagggagaaagcttctgaaattntctgttgagtgaggagagagagaaaacagctnttttgtttaaagaggatnntctcttttctattattntattntaagctatgccacatgtctccatttgagtgga

SEQ ID NO: 30275 - DNA, 434 bp, Glycine max
atgaagagtccaaagcaatacacatatttaacaaatacaaaggtgaatgttttttaacacatgcacgcaaacgaacataaaggccaaaacgaacacatgcatgcaaacatacataaaggccaaaacgaaccacatacaaacgggtaaaaaaaaagaacaaaatagaaacaattgtaggcatcaaaactgatgcaatcctaccccgcaagggcattggatagaaaactccaagtagattgagccagagatgcaagagaaggccctagggttcttatgagccttaaggtagatttcgggcccatgggctaagtacgagcccacttatctatgtaaatattagattaaggtttcattattcttgggccttgtatttaaggctccataatagaggtagaggaccctagaaatataagagttttcagcccttgtattta

SEQ ID NO: 30276 - DNA, 332 bp, Glycine max
  unsure at all n locations
atcttgagttgatgaagtgttgaagggtgaaacttcctgcntttattgttgaccacagagtggtacctgnagatatgtncgcggggtcatgagaccttgnggacgtcangtggggtgctatttgcccaaaccaaacttgaccaatcccgaccccacccgggtgtcgcaacctacccttcggcgggagggcgacgcgtgacttgcgggatgcgtgttccacggaaggaatacgcgcggagtcgccaccaacgtttatttgaggaaaacgtcggaaaaaccggaaaagacgcgatctacgaactttttagtgaaaggttcgggagttgtattta

SEQ ID NO: 30277 - DNA, 456 bp, Glycine max
  unsure at all n locations
agtcattggcgagtcngactntctgcgacacatttttactcaagctgatacccgcagagacaacgtcgtgtttacgcccaatcaatcgcngcgacaacccgnaacgcgcgggatttcgtaatctccgcctctcaagatctgtatatggactttgagcacgcagatggcggataacgcgagtggtatccgtataacttttgctatctgtaaaacaaaacgctgtagcacgcaaagacaacggcggctttgcgccttcgcaatgcggtcgaaagcccgtgacaccagagatatacatatctttcgcgctccaagaactgacatctgacttttggtcgcgctaccggccgaatacccaaggggatccgataaacttgtgctgttgtagacgatagctggtacacccaagactacgtnggtttgcgccttatcatggcggcgaccacccggtgcctcggg

SEQ ID NO: 30278 - DNA, 500 bp, Glycine max
  unsure at all n locations
cgccccgcannncnaaggatgttgaaagctanagaagctncgcaattattcattgncccgcgattctctgagccgactggcgcgtggccagattttttcttaattaatnnccaatatttatgatggtgtaataatataaaattttaagaccatcctattaatatttatccggtggtnttttatattaaaatatttaagaataaaatattattttggatattccatattcaccggatcggaataattgggttttttatataaaaatccatctcttaggcctattttaaattttcattaaccggaattnttatttattgaaatacctaaaattaatttagggcaacctaccggcgcgtggatttaatattattatcaatcctattatatataaatggagtgattccgaagggacatgtataaaactgaaaggctagtattgtgcaaaccagcgcagaaaaaggatcgtgaatatggtacaaatattttgagagaaacacaan

SEQ ID NO: 30279 - DNA, 440 bp, Glycine max
  unsure at all n locations
ctatgaatatattaagaggaattgtatataattctggcgatnagaagttctcccaccctacaaaaacaattntcatattcaaacagaatgggtaaattataaaaatgctcagattagcttcaactatgcagacaaaaaaaaaaatagaagagtaagttcctttaactgttaaaatataggacttggtgcanatttaaatatcatgcaaaaaaagaagtgcagagtgcggggaaaaaaacaagatgtgattctgctttcaattgagaaattgtatttagttcccattaataaaatactactggttcaaaaaactaagattagaacagtgcttgcttcttagttcttacaggaggaatctgaactacattaagttatagactagagtcatttcagatcatccctttttcaactacctcatagtccttcagcttcttgtctag

SEQ ID NO: 30280 - DNA, 381 bp, Glycine max
  unsure at all n locations
ctctatncctccatcatcctattcactaagaggtagatgatctctattgggcatttgtgtaaaaaagcttaccctaactttgcttttaaatgtaaatcttgcattatttgatgaatcagtttatagagatagaaataataatgcgttgaatatgtaatttttactatcatcgaatcagatcacanatagtgtgtatgataaacttgttaaatttatacatctaccttaaagttaagatattatttcaagaataatacaatgatataagagttaattgcgacaaatgagatataaacttcttaacacgttagaataggactactactcaagtataccaataacattctggatagttgataatataaactttaccgctatacc

SEQ ID NO: 30281 - DNA, 369 bp, Glycine max
  unsure at all n locations
actacaaggttaatcaattacccacctaaaaactacaactattgaattaattatctacttcgctgtcatgggcttaactcgtggacaagtaaggaaattggagtaaccagagaacaatcgagaaactcangcaaattgtgcctaccacatacaccagtacatcgaagtacttactttaagttaattaacgtaaacaaactctgctgtttctcaattctaacccaacaaccatacccaataaagagaacaactcgtggattagctattttcattaatcttattctatatattattgcgaagctatctgatatatatcctggacgaagagtattccaagncttttgaggttctatataatttttttaaaat

SEQ ID NO: 30282 - DNA, 395 bp, Glycine max
  unsure at all n locations
ctgctgctttctcangttgagtatctaaatatactaaggagaagatccaaaacatcaaagatgtacaatagaaggaacgaataacaacttattttaaatccatctatgttgacctatgggacatggtggaaaatggaaattacattccatataacgatcagttaaacaaaattcctaaaagtcaatggacaaaggagcaatctgattttctcaactcagagactccaaatgtgatgctatatgctctatcagaagatgagtacaccaaggtacacaactntaaaagtgtcaaacaaatgtgggacactctagctgtaacgtatgaaggaacgtgacgggtaaagaagaacaaactaagtctgctcactcataagtatgaaatcttctctatggaa

SEQ ID NO: 30283 - DNA, 438 bp, Glycine max
  unsure at all n locations
cgccacggaaaaaaaggaagggagaattttcangtanancacataannaaagcnggacacgagatccttggagtggacctgccgcatgcttctttgtacctctntngcactcgacactgactattcacttttacttatgttcatcaatcaccctaacacattagctatgagaataatttatcaagaaaccttttcatgtggcccattctaatagatcgaggactcttgagtacatgtgaaggctgctatacagaagtggaacaattcaattatagtatcattttactaccttacactctaagtgcgacagatactctgtccatagtgactttcatctcctcataagatgcaaagagtgatatgtaccgttacaaaggcatctgttatgcttggatagctactcgacagtggtattggctctataacctaaagctctgg

SEQ ID NO: 30284 - DNA, 456 bp, Glycine max
  unsure at all n locations
aatcattcaacgcattcagaatatgtgttcatccttantaaagctactctaaaataaatgacacagtcgncagcanagagtaagtatcagatgataggtgcacccctatagatnttaatgccataagtatgtccttgcccctccaacttcttaataagagcttanatcccttcagaacaaaggatgaacaaaaaatgagagatgggatctcctagtctgagacctttcccctggataataggaccaaccaagctttcattgataataacagagtagacagattggatgcgaattaaaatccacttaacccaagtcgcactaaatctcattttggccatgacgttttttaaataattcccatcgacttggtcatacgctttgttgatatccatcttcagcgcaacttgtaacctcccacatgttacccttgaccttacactgcatatgatggagaat

SEQ ID NO: 30285 - DNA, 421 bp, Glycine max
  unsure at all n locations
agctatgtgtggttcttcaatggtgaatgagggaggaagaaaagcaacgtgagggagagggagagagagcttctgaaaatgtggggctgagtgaggagagagagggttgctttttggtttaaataaaagggttntctctttttctattattntatttaagcaatgccacatgtctccatttgagtggagcaagaagggcccactttctctttttgactgtgacccatattcagtcacaaaagtgagaaaaatctgacctttgaaacgctaaaatcctgcctcggtttgcgtgccgtttctttgattccagtttctcgcgtttctctgcgtccgccggggccagttttcgaaagcaagcaatatatatatcanaacgctcagaatanaaccccgaacgtggttcagaggttggtttcgttaa

SEQ ID NO: 30286 - DNA, 423 bp, Glycine max
  unsure at all n locations
aggagtttattctgcattcggcannnctatttatcngncgaactcagaggggnnngcaagcatgcaagcaagcagtgatatttcnnnnccccgcnnnaggagggggttggtactatcattccctaaaaacatcaacatatcaacgttactctttatttacatcatgactgctgacgaagtttttagctgcactctgagatattggtgacctcactgctagagtgacgacctgtcttatgctctccaggctattcaaaatttgcttgtctttcttgcgacgtacttggttatttcttccatcaatgactcatgtcctgaagtgtacataggaatataacgtgttatgaactctatttatttgaaatttaccttataaaccgactaaggtaacaccttgcggatgaaccctccttaagagttcag

SEQ ID NO: 30287 - DNA, 337 bp, Glycine max
  unsure at all n locations
aggagatttatctgactcanncctatnttcgacaacaaccgncgggggaggaggattttattttnnnnnncaaagggggggtattacatcaccaaacaccagcangacacaacatgggcaatccccaatgacattgtggtggcaacactacaagtaatatactttaatgacttgagattcttactgtagagatctgattcaatacaatgtagacctttcgcaacagaccatacttgactaccatatcaaaaacatcaatttctcaccaattaccaactttaactggattacgacttacatgaagtaccccacatgcctgtcctttacaacagtcctc

SEQ ID NO: 30288 - DNA, 409 bp, Glycine max
  unsure at all n locations
ggacctgcaggcaggcaagcttgatttcttttctcacatactggaatcgattaccagagaagtgtttcagaaatattctcacagtccatcttttacttgattctgatggctgcaaagcctatattatgggaactggacacaaantgccaagagtctttcaaaaccaaaaggtattatcctctaaaaagcacatcgttttatcctcttaacaaattccttggccaaattacttgtgattcaataaggaattatttgagtgctcaaattgtgcaatctatctctttcaagagagatttcttcttttcttcttcttcattctgaaaaaagggattaagagaccgacggtctcttgttgtgaaagaattctaaacacaaaggaagggttgctcttgtgtgtctagaacttgta

SEQ ID NO: 30289 - DNA, 512 bp, Glycine max
  unsure at all n locations
aggttggctccgctgagantctaccanactactcnaanctangacactcgnngagagggncttacaggtgagagaggagcaaataatatntctaacncnccccgaaacaacggcgcccctggcagatgatcgcacacgcgaggccaggaaccccgagatgatccgctaacactcttgtgcgtgagagcagaaatgacaaccagtggtggacaagaangtgagattcctttgtggagccggcgaactgcatgatgaccgtgagattatttgggagagagtgtgttttgtaatcaactgctgcctagcaggtccggaattctttttggtgatttggagactgaaatcacatatttaatcatatgtgtgaacaaagttattcgtcattatgtgaatgatgtggactacgngactatatatatatgtatatatatctcgtatgtgtgtatgggtggattccctcaagcataggtgcactgtcctggggatgtatatcggtaaaacgattcgttcat

SEQ ID NO: 30290 - DNA, 349 bp, Glycine max
  unsure at all n locations
tccttccttaacctttctagctgtgcattggtgtattttgatctccttttggtcctctaattgtggaatgtgttcaatatgtgggcaatttttgggttgtttccttgcttgattgggttagaaattgggggggtttgtatggagatgggccctangccctataatgcattttttgaagcaatgagacatgccacatttgtccccgttctcttgctattgatgcctaaacacgcgcccaccaagtgttcngtgaaatgcccccatggcattagcgcgtggtttttgatggaaacaacccatggagcattttggtttgcacatatnttccattttttgggacatgcattca

SEQ ID NO: 30291 - DNA, 366 bp, Glycine max
acctttgtcaatgatattcttcatgcctcttaagtgcagaagtccaaatctttgatgccatattttgacttcatctttctttgcaggtgggacatgtggaggagtaactggttctttgaggtgtccataagtagcagttgtcccttgatctgctgcccttcataaaaactcattcttctcattggcaccaagcattctgactttgtgaagtttacattgaatccttcatcacccaactgactgatgctgatcatagttgcagtcagtcccttcaccagcagtactttgttcagactaggaagccatcatggactagctttcccattccagagatctgtcctttagagccatctccaaatgtcacat

SEQ ID NO: 30292 - DNA, 501 bp, Glycine max
  unsure at all n locations
aaggagttcatcttcttgcatnacgacannnctattnctatcngcgcacacatncacanggnngacctgcatgcgtgcaagctttcgttcttctntnnncactgctgcgagaaagggggttatttatccaagtgagattacaagcccctaacaactgtgcttgacaacacgcctaagtccgacacagatcaggtgcttgacgatgtgtatctgatagagaacggcacaggttttttcacacggatgttgaacttaaatctgtttacacaaacatcctatttatgactatagaaagtgaacaacctgccttgattagctgcctgctctccgaccaccgatatgaagtagattgcgcttactgtgcttctcgtacctgcacaccgccacacttctagttaagacaactctcgtgtcggaaactngatgcttgtaaaagtctaccatatcagcttaaaaaggagaactactttgcattgcagatggtctaaccatctatcaccc

SEQ ID NO: 30293 - DNA, 412 bp, Glycine max
  unsure at all n locations
agcttctattactntattgacacacaaaatacctaatttgaatgaagcatttgatatatttcttangatgtagtcttaagatgcgaggatgaaatctaaaattaggttaataaaatttggtcactttttgaaataatattgattgaagatatggatgaaattgaatatttaatattaaaaaatttgagtaatttaaaaaacttatataattcttttataattataataaaagtggctacataagtaaattattcttatgatgatcaaatgaatcctataagtatatgtaaaacctacaaaaattattctttccacaatttacccatgcattgcgcggaaaaaattgaccatagtttttttttttaacttaaaaaattgaccatagctganatgtaatctagtttcgcttata

SEQ ID NO: 30294 - DNA, 259 bp, Glycine max
  unsure at all n locations
ggagatcagtttatcnancttttcggcacgcggcgggggggagcttttttcacacgcaggggttgtacatacccccccgtcacactcctgtgcggctatagcgtggacaaccaggtttaataagttatctacaaggcgcatcttgaagggcaatatgatgaagaaaggggtaactgtagaattataaaaattatatattatctaaggaaaaaagattgtgaaagaccagggggcctggtaatcaagcaaaaacgacgac

SEQ ID NO: 30295 - DNA, 388 bp, Glycine max
  unsure at all n locations
agatcgtgacgttcttgcnnncntatnnatgnnccaccntctgagcgccggggagggctttttcattttttncnacncagctgggggtgcgcagctggagaaaagaaccaacaagaaacagcccatgatgcggggtggtctttactgcagagtggggaacaagaaaaacgtttgactgcctttggaagcaataactcaccccattccatgactttctttaagtggagttgccgcgcgcaggtgggtgaagcctcgagagcagaagcaccaagaggaagagagaacaccgcacgacctctagaattggataaaacaatctacagggtgctaaagacgctacatgggcttcaaacatctgcttccgattaaatggtgtcattactctcgc

SEQ ID NO: 30296 - DNA, 372 bp, Glycine max
  unsure at all n locations
agcatatttttcattaaaatagataaaatactatgttcagatatacatgtctacttgtgaagagatagctagctatcacatttagctatggtgatcagcttcataaagagtccttctaaacccaatcaaagcaacaacaaagtaacaaatntacagaatagatcaagtgaaaacacttgaagcttaaaatcagtaatcaatatgattggatagaactatagtcttatctaaatcacanggcaaaccacaacttgcaatanaggcaaagtaactaaatagtgactactatagataacactaatcaatttccaaagtgcatacaaaatatatccaaatgtgtgaataataatagtgatgataatgaacaatatg

SEQ ID NO: 30297 - DNA, 451 bp, Glycine max
  unsure at all n locations
atccaagctcatcttggaggagaagctccctcaaattggcttattccctagnggaagacacctgcggtcacctattctcctttgtcttccgctgcatctccatggtggaaaatcaccattaaaggacctaattgaagctcaaagatccagtctccatagaagccacacaagcaagcttccatcanaattagacctacgtagttctttcataagaacagaacgttggttaagttgttttgatatttttccgcaagatcgattagaaccgaacaaaagtcgtttaaggtgttgagcctttaaacgatctttttgattttgaaaggaggggagcactgttaaagcgctggacctttaacgatatcttgtttttgagaggagagaaatgttaaggcgttggatctttaacgatctcatggagtcgacaaaagcggagctttggctcctacatatc

SEQ ID NO: 30298 - DNA, 503 bp, Glycine max
  unsure at all n locations
aggcatacgatcangctntcgnananacacagaatnaaatccncggnncccgagactccgnnggagnggacctgcacgcatgcttgtttatttcttncnaaccaancgnngcgggatacagtgtggagtgtatagacttcacagcataaanaataatcagtctatgttctctcatacattaccgcatatggagatgagctatatctcgttcacataagactggacaataccgctgtccatagatatgtattatgattacaaactcgcttactgaaacctctctcgcgaaatgagtctctacattgattaaccatctacataatggaaatagaatggagagatgtctagaaatcagtgcaccatgccgcctatacactcggagatcttattcgatggcttaccctactatacctcgcacagacagagtatggtccttatctctgcgggaccacttcatcaaaatgtcaaggagctccagatactcatcatacattcactcacgc

SEQ ID NO: 30299 - DNA, 398 bp, Glycine max
  unsure at all n locations
aggtttctgcttgannccananataaccccgagccnncgaaggtagagagctctagtgtttnccaaaacngagagacgagngtgaaacaaacacaccccccaaccaggcngcaccacaaaggaagagagaaacgccagcggagaccgaacgcgagatggaaggatcagaggacgttcaccaagcgggctggatttgaatcattcctgaggaagaagatgaagctcttacgaactgtgtggggtgatactacatatcagtatgacaaatcagatcggcataggatacgccacatggaggaaagctcatccactggaagaaattcgtcaaagaagcaagctggatgtagctgtcccacaatgaagctggagggcgtggcttggggtacaaatcaagcaag

SEQ ID NO: 30300 - DNA, 415 bp, Glycine max
  unsure at all n locations
ctatcttactttttcttgtatcgtgactcttcgttgccatcatagagagcggngcagagagaagaaacactctctggcctctcatcttcaagcttcgatggagatgagcgttgcaaggctaaagaaggacgagatccanaggctgaagaaagagatcaattagctccgacgtccggcgacagagctgcatgactcagagacaagcgcgacgctgaagaacctcctcgaagagggagaaagaatggtgacattcctagagacgagcgcgccagcaccaccatcaccatcgctgatgttattcaaaccctaacccttctcaccctcaccctcaacccgttntgctcgtcttttcctgtgggaccgccttcaacgacgtcgtcgaggagctcaagaatntcaccacccgcatcgctca

SEQ ID NO: 30301 - DNA, 408 bp, Glycine max
  unsure at all n locations
ctaataaatctatgtatgatntanaacaagcctcacgtcagagttatctttagtttcattggaatatttccttcttttggttttgaggaaacccacatggatcaatgcatattaccacaaggtcagtgggagtaaaatatgttttcttgttttatatgtagatgatattttacttgcaaccaatgatcaatgtttgctacatgaggtgaaacaatttctcttttagaattttgacatgaaagaatttgggtgatgcatcttatgtcatcagcatttaagattcatagagatagacctcgaaggattttaggtctatcataggaaacctatattaccaaattttatagtgattttggatgataattgtcaccaagtgttgctcccatcgagaagggtgatagatttaat

SEQ ID NO: 30302 - DNA, 372 bp, Glycine max
  unsure at all n locations
ttgcacctgatggtcctgtgttttcaccaactttaatctaggttgacaagttacatccttgttgattcgatggttgcgactcagttcagattgtcacaattggcttacgagatttgaaacacaggttagaatatctcaaattcataanaatgggtttatgggttttcgagattatgactagaacatgaaaatagattagaaagaaaaggttccatttttcctctttctaagttgaaatntagtgctgctacctttacccttttcccaattacccttgaattacccatttcaaccggatttcaaactcgttctgtttattttctctagttacataaccattgctgacaattgtgtagtgaagtattaattttg

SEQ ID NO: 30303 - DNA, 445 bp, Glycine max
  unsure at all n locations
gtgagttttttctttttgattcgacacnatnatgtttcgcgcaacannccnnnaccggaggatgcaacaaggtgctacattctnaacncccggaccngggggnncggaaagaggggaaacaccccgggagaaaacgnncccccccacccnngaaaggacgacaggggagcacgccaggcagctgccggaccgcgagaagggggcacnaccacgccacccccccgaagggaagcggacagcgaacgagaacccaccaaacgagaccaagcggccgagacgcancaaaaacaaccaaaacacaaaaaccgcaaacgcanaggagactgggcagccangcacgacaggcacgcaagcaagcgccgaagaggggcacagggccgccccgaccaaccccaagcgaaccacccaagaccggaagaaagcccaagaacccacccgcgaacgc

SEQ ID NO: 30304 - DNA, 464 bp, Glycine max
  unsure at all n locations
aggatttcttgcctangatnctnannantcaagacccgcgagcgntaagaggccggatgctgcaagcangattgtgatatcaaaaganacaaccggcgccgcggcttgatcttataagaggcaagcatctatccttcaaacctgtgctcaccataatcgataacctacaactcctgcgacaaacttgatgaatgcttggatcatccacctttctaaaaaatgcatgctccaaccactgtcatttcccaagaaaagtgttatgttcaaaaacccgtgcatataatcgcttcatcctctactgcctatgcgaaagcttaaaagaactaaccacctgaatcctttgtggctctctcacccttgccgaagaagagcgacaaccgcctgatgctttgtgactctctcctacaaagatcgaagactactgctgagatcttagaacatcctaccctaaacaagaccaaggg

SEQ ID NO: 30305 - DNA, 566 bp, Glycine max
  unsure at all n locations
ngggatcttacccggaattcgacgnacnnatncatancgancnaaanaattttctncnccgngngagtagccctcgaggtggagncngcgctggatagcatngcatgcaattggatganttttnnnnaagganagaacctcccggctgtgtattgtgtaaccacacaagtggataccctgnnagatattgtccccggggtgtcaaggaaaacccttgnggacgatcaagttgtggcgctatttgcccnatacccagcctgaccaatcccaaccaaccccggcataatcagtcatttgagaacctgtaatgtacctaagcaggcgatgctctggcagtcaacagatggaaaggaaaacaaaaaccaccaaactatgggaggcttgttggtgggctggcccaactgtgaattctcgtgaattatagtggatggtagccctctggtaatcnattacctaagggctgggtaatcgattacaaagcctaaaaatgaaaacaggaggctatgattgtctctggaatccaataccacgggtgtatctattaccaggcttggaaacaagtcacn

SEQ ID NO: 30306 - DNA, 490 bp, Glycine max
  unsure at all n locations
cggaatttttagttcttagtatcttgcaccnctnatnacacagcagcctctcgaagcgagagcnnaggagagaacccacataatggtccaatcccncccanaccaccgggagaaattgaaattccaatttttaaaccctgtatccgattacacaattgtggtaatcgattaccagcagttagtaaacgttttattccaaatttaaaaagctgaattcgattacacaatggctgtaatcgattaccagacgggatttcagaaaaatagttgcaagagtcgcaactttataaatgctttacatctgaccaccatgggctatttatatgtgacttaacctgaaattgctcagagattttcagccaacagagtgttatcctctcaaaagcaatttcatttatcctcttaagatatcttagcaattcaatgcattcttaaggattaattgagtgctcatctgtaaatccatctcctcaagaagatttgttctttg

SEQ ID NO: 30307 - DNA, 414 bp, Glycine max
  unsure at all n locations
agcncatagctctctcttcacggaatgccattatggagtgatcaatggatattcttctttcaagtgcatgatacaaagatatggagttccaagtgggaaatataagttggttcccataggaactagagaggttgctaaccaaataggacccaacacaactattgtacctaaatctacattctatacattgttgtaggtgaacctatcaacagataaacaactatggtatcttgataacggttgctcaaggcatatgataggagacaagtcaaagtttatgtctctaaacgctaaagaatgaggatgtgtaatctatggtgataacaacaaacggagaattcttggtgtaggtaatattggtaattccctaactatctccatagagaatgtcttatacgtggaaaggctgaaaca

SEQ ID NO: 30308 - DNA, 393 bp, Glycine max
  unsure at all n locations
actttattatgctgctcctnngctnntaatccactgcttaatatccaaaataaacttgcaacctttgacttagacttgagaaagaaatccaacacattctggtgaaatcatctacaaagataatgtaatatttactctctctaagtgaagtggtcctttgaggtccgccaaatttgtgtgaatgaactgcagcttctctattgctctccaagttgattgtttgaagagtaatcttggttgcttgccatattaacatgtttcacagtttggtaattcagaatctaaatgaggtaatccatgaaccaactcctttcattgcatgtccaacataactgcatgatgataatggcctaatcttttgcgccagacttctataatatttatagtaactgg

SEQ ID NO: 30309 - DNA, 276 bp, Glycine max
  unsure at all n locations
acccatggcggagcgaggcagagcgtcgattccttcttgncagngnnagaagaaaagatggagtagcaaactaaccctagcgcagagaagagatattcttcttcgcggtaatatgtgcagtggcgagctggccgaagatacctgacctgcgttcgaaaatcaacccccttggaaatcccaacactagtgtggtacctgtgctcgacgattgggtggtcaaggggaagtaccttcggcgagcagacttcgacgcatcattcgtgaccttcgcaaacg

SEQ ID NO: 30310 - DNA, 429 bp, Glycine max
  unsure at all n locations
agcttangtgatcataattgcctcaatcatttccaaagtgcatgtgaattanggagcatcaacaagaatcaagccaaggctattgtgcaagcaatcaatgnggaaaaacacaccacatgattatgatgatggatggctcaaattctcacaatggtaaactcatcactttcaaattgagctttcaaaactatcatgacatgtagaggagaatcaaggatttcaagtcacaaaatgtcaagaacttttattatcaaaacaattacccatttgttgaacatatcctataattcatagaaaaacatgcaaagtcgtacatgcacacaaaattgacccataatattaaactagaaatccgacgaaactaacaacattaacaaattaacacaactaacaaattaacaaaccaacaatactagcaaaccaaagaca

SEQ ID NO: 30311 - DNA, 449 bp, Glycine max
  unsure at all n locations
ttgagacaaatgtggaatgntgagcactncaagatagattccggctatctccatggggcaagagggtaatgaaagaacttccaatgactactcataacatataatgatctgcctcgctgctacgatatcactactctaaaatgagaaatttcaattttaagtgaaagttgtattaatttgattatgaaaatggtgagaatatttttgcgatatacattcatcaagtaatgcatagattcacacacgcacacgcacacacgcacgcacacacacacacacagacacacacacacacgcacacagacatacatatattaaaccactatacatcattcacatgacaagatataattcagtgttcacatgtatctaaacttgtaattgcatgcccactcaacatcagtgaccaactaggaagaattgaaacagacatactctctaaagaactn

SEQ ID NO: 30312 - DNA, 420 bp, Glycine max
  unsure at all n locations
agcttactatattgcaattggatgcttcccgccaccagtgatcaagcctctttgatagccttaaacatctttctttcatcaatgtgcacactataatgttctctgaaatgttcatgtggctccacatgatntangtttggatgaaacctaagcttatcagccacccttttttccatccatttcattgtagcttgtttattnttgaagacccttccatatatgtgctcctccaaaaaagtgttgatttgaaagcttcttgtaacttcgaaccatgaacaataaatttcccatgaacatccaacttgtttacaacgcgctctagcttgaatgttgtcaactttacccatttcagatctcttgcatggaaaatagttaagtctctaacaacttcaataaacattntgatgctatcaaactcca

SEQ ID NO: 30313 - DNA, 455 bp, Glycine max
  unsure at all n locations
gccgatttagttnttgtcggcgagaggatcgaagtttgttttaattgttganaatnngatnatcctactgtgatgattgggattcctanggcanatggagagagtaagaatgagggaggaacccatgctatgactgccattcctacatggccaaatttcccaccagctcaacaatgtcaacactcagtcaatatcagctcttctcattacccaccatcctatcaaccaagaacacccaatcatccacaaaggccacccctaaaacaccaaccagagaaagaattttccagcaaagaagcctgtaagattcaccccaattntggtgtcgtatgctaacttactcccatatctactcaataatgcaatggtagccataatcccagccaaggttcctcaacctccatttttcgaggatacaactcgaatgcaacatgaactcatcatggaggagtctc

SEQ ID NO: 30314 - DNA, 326 bp, Glycine max
  unsure at all n locations
gggatgcctgtnctncnnnnatagaagtccccgacgngaggacggaggagcacttgttcttgaaaccaaggccactgttcggaatccacactgacttcaaagaggaggccctctcatacatgattcaacctccccaacaaatattgctaggtcgaaccccgttggactcaactcccacgatcctacatataagaggacacaatggagtctagtgggcatgatcacacaacgtgctgaagcacgaagatggactgcaccattggaccttaccctcatgaacttaaccaggccatctaatgcatagcccatatgactgaagagaactg

SEQ ID NO: 30315 - DNA, 387 bp, Glycine max
  unsure at all n locations
gacctaagtaaactaactcgcttagcacgacatgctggcttancgagtccatacaaactcagaaattaaaaactagaattttaaacactcgttaagccgaagtacagtggcttagcaagttcatacataaaagcataaattcaaacataaatgatgaacacgcttatcgggacagggctggcttancaagttcatcagataacccagaaattcatccaaaattgatgaattagcttagcgagtacatcgaaatttccaaaaaattggggcttcgaagcccctactttccagtcactttcaggcctaagaactctaatcaaaacacatcaaatgaacctacattacctaagaaactagatccctaacaacatataatcaaacaactag

SEQ ID NO: 30316 - DNA, 406 bp, Glycine max
  unsure at all n locations
cagggatgcgcctaatgcatgaacatattgatattaatgtcaagcatttcgttcttcgagatgacgatcctgagaacttgaataaattacagcccagaaatcaaccaaattagtgcgatccatcttgttctttaattaatcatccactgtggcaatatgatccacaattagtggggtaaagtttatacacaagtcagatcaaaataagagaattntaagtttatgcaaaacattggatattattcctcanaatatattanaatgaatgacatatatgtggcattctcgttgtgaagaataacatttcctccactgacacctcatgtataggttgcagccagcatgcatgcaatgagatatatatggatgaaagcaacaagtacgtgtctgagtngaacttgaacta

SEQ ID NO: 30317 - DNA, 465 bp, Glycine max
  unsure at all n locations
ngggtgtattctttnatcttgcannncgcgaancaacaaacncaggcttggaagagaagcgttgaggccattgattgatcttcatgttccgcancggccgctgagtgctcttgcgtctggacgagaatgacccactgattcttcctttggtggagacattgttcaggcgcaaatgattcagtggatggctcgactcagaggaagaagattcggtagtgtacgtttcattagggagctactttgaacttttctaaagacaaatggaagaaatcgcccttgggtattatattggggacgtccatcttgtgggtcgtaaataataagtactaactgaaataagaagaggagagggacttggtgctcgaaagaattggaaagtggggagatagtacatgtgtctctgtggaggtcttccatcttctggggtgttattaccccttgggtggaatcacctggaagcctgtt

SEQ ID NO: 30318 - DNA, 324 bp, Glycine max
  unsure at all n locations
ttttttgtttattggcntactcaaaacaggaccacgtttcatatttcttccctagcatngacataactgtcagttactgtcgaggcttctggagcatctataacttgttcactatattctgtgcgacatttgcgtggataagctgcatcaaatctctcttgtctctctggattccttcagcacgaaagtagtttatggttgtcaattgcttggcaactgtacttcgtatctctactttgacaatcttcttccgtatcgcatgcagagaagcccccttctcaagctcttgtaacaatacttttcttgcttcctcaaataccatct

SEQ ID NO: 30319 - DNA, 618 bp, Glycine max
  unsure at all n locations
cgaagcgatgacnactangnctctacgaannnccgcgacacnatatgaataatcaatgcttgnnaggattatgggagtacgccgatcacatgtgtgtactattgtgtgttggtcgcggcgaatggtgcacacgcagagtttatccgacatattttatantgcggcacatagaacaccacanatcgcccgtgtgggccgcacactaccaagctggagcgtcagcgtaccttcccatcgtaggccccaatatctctcngtcttcgtcatcagacacgcagagggccgctcatgcanatctcgtcgctcagagcgtatcccgcagacaatcgcgaaggtagatctcaaactattgcaagacagccacaacacgtatcacgagcgcaagaaaaacatgggcgaaagagcagaagaactcatgccctaaaactaccaacgcaaaagtcacgagctggttcccacgttaaaggaccgccagtgagcatttcctttcgatccaagttcggtaaccagctggatcgactcagtaaatgttactggaagtctctactacaaaagcctacattttgaccgttgagatatgctagcacatatccagaagtcattctgcactactctttn

SEQ ID NO: 30320 - DNA, 399 bp, Glycine max
  unsure at all n locations
ctagccggttataaggcacatttattctgaaattntaatggaatgtttgttgatgttatgtgctntaaggtttttattttcgtttatttataaaataaaatctgtccatttgtatgaatagacaattatgcatagttgtaacaagaaaaaaaaaaaaaaaaagagacacttgtgcaaagtcaattcaaccattgtatctttttttctcatctagaagtttgcatagatttataagaaaactaaaaagaattagtgcaaactccaaaattgatccttcagtttttgtcattaaattagtttctcaacaatagataagaaaaaaaaaacactaaaattcattttcttgtgttacaaaaatgttcagaggtttaagatgtgaagtgtgaacactgtaatctt

SEQ ID NO: 30321 - DNA, 139 bp, Glycine max
tcgcggacttaagtcaatggtcaaaccttcaccattctacgcttattccaccaccttggccgagacctcccctaggccacatgtccttaccatgtgtgctaagacatgtgtgctttccttttgggcttctactgagtct

SEQ ID NO: 30322 - DNA, 419 bp, Glycine max
  unsure at all n locations
agcttgttgttctttgtgtttgctggtggcaaatgggtttattgtattacatatgatgtgggggtgttagctcacaacttgtgtgtcaaactcatatctttatcaatatcagatatttgtgtgcaaaaaaaataaaataatgaatattaaaaatcaccgcaatattaaaagttatttcaaaatttaaatgttaatataatattaattntttaaatgaaaacttagaaagtattaaaataatacaattaaaaaatataaataattaaaatgaaaattnttaaactcaatatattaaattgaaactaaagtaaaatttaatgtaccaagtgtcattaagtcttttaaataatcacttaaaaatatcaattgatgagatttcaaataaaaatatttacatatttgcttatgacanaaataaa

SEQ ID NO: 30323 - DNA, 479 bp, Glycine max
  unsure at all n locations
gacacaatataatacagcagctgtggtgttntgcatgctgtttggtggcactaaagacatttgttctccccttaatctaataggccttgtctagattgtcatgttcaatcagaaaacaccaggtgaaatggagtctggaactctccacacctataaacagggctagtaaattttggttttttgttttatttacgaaagataatggatctgatggagcaagcagatataatggcacaacaagttttcccgaaggaacttataggtttagtgtcttaatataacaagatgttaatcggattgcctgttatattagaagttgattgaattccaccaagtaatagcattcataggtaatgttgcacagacaataaattaaaatgtatattntctgcctttttcttttcttggaagtcgatgcaatgacatgctcttcactgtggtgagtaaaagttcagatacatctacatagtatactaata

SEQ ID NO: 30324 - DNA, 479 bp, Glycine max
  unsure at all n locations
agagcggttagttcttgagatcncgcaatantgctctgtacccgcgatcctntanaatcgaacctgcaggcttccaacctggactattcccatcccaccccggccttattcggccgtggagaccttgtatgtaacttaaccagccaacctcttgccgtccaccaattaaatggaaaccagaacaccaaaccagggagcctggtgtggcctgcccacctgcaaattttggttattatgtgaatggtggcctctggtaatcaataaccaagggtgggtattcgatacaaggcttaaaatgaagacagaggctaagatggctctggaatcgttaccacgggtgtaatcgttaccaggcttgaaacgatgtcangaagctatgaagcctctggtatcgataccaagtgtgaatcgataccagcttataaagaactggagtgatgaacctctgaatcatacagcctggtatcatacacaagaag

SEQ ID NO: 30325 - DNA, 488 bp, Glycine max
  unsure at all n locations
agagatgacttgaacgcccaaaaaccgctgtgagacttttgaggcgtacttactcatgttcttatgggattcccctggaatcagcggagatataagatatatgtgagaggaggcgccattcctttaggaataagccctgggagaagggaccttcccaccacagatgaagcccttggattaagaaagcttggagaaagatgccttccattggaggaaaatgaaagaagggagagaaanaagagaggggcggagcctcganacttgatggaataaaaagaggtatagaaatggaacttttgaagtatgtctcacaagactctcattcatcaaagttacaacaagtggtacacatgcttctatttatagactaggtagcttccttgagaagctntctagagaaaacttncttgagaagcttctttgagaatacttccttgagaagctagagcttagctacacacacgcctctcataactaagctcacctcg

SEQ ID NO: 30326 - DNA, 219 bp, Glycine max
  unsure at all n locations
ccaaaaccagcttgaccaatcccgacccaccccgggcttagtcagtcagtgagaaccctgtgatgtacctaaacaaggcgagctcctggcagtcaaccgataaaagaacaaagaccacatagcaagggggcttgtgtggtggctggcaagctgtgaatcttgtgtgatatatgggatatggcctctggtaatcgattaccanaggtgggtaatctatta

SEQ ID NO: 30327 - DNA, 464 bp, Glycine max
  unsure at all n locations
agaagcattgctgagactgcaccaaaaacncagcttatagtgcggtcttggagacaaaggtcagnggtcgccaatattgnagatgaggtcccaagtccttcggattgggcccgaccatgccctctgatntccactgggaaattggcgaagggatgaacccccccggctttaccccacaagcattatgtaacccttaccggttttaaaaaccctataatttggccctagctttagaagtttcatttagtaaaggcttgtgtctttggttttgaattatataccaagatcttcttcatctgatcttgtctctaccattctcattctttgcatgttacttcttttctgaccggcagattcatgacgagtccccgagagactaatacctggacccgctatcaactcgacaagaacgatcaacggagatgaagagagagatgtggacttcttcgactagaaggtggccg

SEQ ID NO: 30328 - DNA, 431 bp, Glycine max
  unsure at all n locations
cgggcccagaaggagatttgaccttaatcttgcnnattcatagtaccngcactcaagaggaccgaggatgagcaaatttttcttaangacccaacccaaagatttctctataccttgttaaatctaggaaacctatgggtcagggcaatttactctaatttggggaaggaaccattagaatgaaaaggaaaaggtaccattaccccccacaaataagtgtttgttaaaaaagaagcaaaaaaataattgtgtggtaccaaaggtgaaagcacttacgaaatgaataggagaagctattgtacaaaacagaaagacattggattatctagacttggctctcttaaactaacgttgaatctaaaaaccaggatttttgaccacacctcctacacctgaaaatcttctatctattatatttttacttatgacta

SEQ ID NO: 30329 - DNA, 341 bp, Glycine max
  unsure at all n locations
agcttttataggatttattgaanatctcgactntatgtgggcatggatgtccgttagacgtattatattacaattagtatagaagtcttgttattaacctcatctattattttattagaatcatctttttgtgtattatcttattagaatctctaacttttttaaaaaaacaaagacattctaagatggttctttgaaaaaccatcttagaaagtatacattctaaaataattnttgaaaaaattatcttagaattcttaatatgtttaatttaaacaaaaacgttctagccatcttagaaaatataccttttaggaagggtctttgaaaaattgtcttac

SEQ ID NO: 30330 - DNA, 489 bp, Glycine max
  unsure at all n locations
gagtagttaagtntctgacacaanatactcacagcggaggaaagaaggcgcacggatagactgcattgtactcctggtagagactgattaatggggcgtggagagaacacataagacaccttcgtatgtgcctacctataaatctctcagcgtagcccaagagataaagaaatagaaaaaccatgtttgaaatatgctgcctaacgtctctttactgtccttacatgtacctactatccatgaggataccggatgccgataaatagtctgactaattcagaaaatgggacagtccgccgaccagttagtggatcgagtttcgaagaacatcattcgatgctgagagtactgtatgaccgtctccgaatgaacatgatgcgtgaagggtgaatggcattatgagacgacctacaggcaagttgcatcgaggagacaccttggcatagtggagtgatatcaagggataatcaaccgattgaccaagaagcg

SEQ ID NO: 30331 - DNA, 397 bp, Glycine max
  unsure at all n locations
agcttcattgatagaaattggtctaaattcatcaagctcctatgagccatcaacttttggaacaagtgtaatgaaggaggggttgacccccttgtgattacaccatgttcataaaagtcagcanaaaccttcaacacgtcatcctttagtgttggtcaaaactttgtaaagaacttaaatntaaagttatatggactcggacttttgttactatcacagttccttactacttctctaatctcactctcctgaaacttttcaacaagcatatcatttttcacaataggtttatgtttgaacgactctntaagcccccctaaccttggtctaatcccccctcatattgaaatctcctctcaaagaaacacttcanattctctntaaccagcattggatc

SEQ ID NO: 30332 - DNA, 448 bp, Glycine max
tatgtagttaaaaaggttagtcttctagtcattcaaaatgtctttttggctcaacagaccaacctatgtaaataaataccaataattccataataataatattattgtgtgattaacttattactataatactttaatatatacttgttagcctatttaaaggattatattcactagcttgcatacaagtgtagactcattagcctatgtagaagtatgtaacttattcaaattcaatagacctttaccacatagtaagcatttaaataaacttccaagcttaaccaaacttttaaaatgtcaagccatgccttaaaaaagcccatatccaggaaacaaggcagagctcagacctttgatttgtaaagtaagacacgctcaagccttaaatcctaacttaactcaatccgtttccaccttgacctgatcattacccacgtctaactaa

SEQ ID NO: 30333 - DNA, 416 bp, Glycine max
  unsure at all n locations
agctttattgtaatgttacgctccaacatcattttgagacgcacagtctgcacaacattcatgaaaacaacagaggtcaacagtntaaatatccaaggctaacggagaatgtgtatgaagaataatatatggcatgcttacgtgtaatccttttttttcaaaatgaagatgaaaaaatctaatgttgtcaaactactatgtagcctctatganaagatgacctcttctcagaagaaggcttcaatcaaccagagttaatcaagagaacctaagtccccaatatagatatacaatgtatccatgacaaactaaaatatacatgtatacatatattgatatatacatattgaaacaaacccactagccacaagctgcacatatatatatatatatatatatagcaataaccttaagag

SEQ ID NO: 30334 - DNA, 467 bp, Glycine max
  unsure at all n locations
tataaaactcaagggatgattttgcaagatctcacccaacagatcatctttttcaggcctagtnngcagagcttcaatttccaaccaacacatgatggtatntaacattctaattatatgtggaataggatttgtggacgatagggcgcttgtttatattctccaaaacttcattagggaacatgttctaatttggatgatgcccatgttgatnttccagttaggtgataaataaaaggaactgtccatggattactggatgaacaaaaataagtatattaaagttntgtatcctgctcgatgtctgttttagtcaacatttgagacttacttaatgttgacagtagataaaacattttgaactgataattggtggtgttctttaagctgtatgcttgcattacatttntcttctttatataataattaggtcatagctatttctacgtctcaagtgtntattcatg

SEQ ID NO: 30335 - DNA, 501 bp, Glycine max
  unsure at all n locations
agacttctattcattcgatcacacncnaatnaagctcgngcgcgggatcctctgagncgacctgctgcatgcaagcttggttcnatttnctcaacatangcaacaacgagcgatggtcattcatagaccactcacccaaatatctgagtgcgctggctacatcaaatgattgtgctcacctctttcggccgaatcgattatatatatatatctcataacaaatcctaccttcgtataaccacctgctactagagttgcaggtttcctcaacattgctagaggacatatgccagccttctgatagatctgatatacaacgtatctgcttcgctaattgtttatgacctggtattgaaccagacatatgtggcgccatctacatatggctatatgcagtgttgaatacactcacctgccatcaatgagatagggtccttcagtgttaccgcttcatagctttcaatcacatttacggccatttttgagttatgagtcggtccg

SEQ ID NO: 30336 - DNA, 488 bp, Glycine max
  unsure at all n locations
gagtatatactgagtactccccnctaacacnaagctggagatatggcggcaccataggcaatatgggccacttttgctccattctagccatcangacataaggaggcccctcctgaccatggaactccatatactgacaatgtgaagagagctataggcagcaatgggtcacacatgcgtgatctataatgtccgaagcatggacagatccggaacaaagactcatcattaattttttgattaactctcgagctggaaccatagtgttgaaaactgttaatggctcgaactttgttaatacaggggaaaatcttttccaatcgcctgatgccgctggagacgaagctgttaaacaaatgttattctagtagaaaccaacaatgagaactactaatgtttatccgggaaattgttggaggaaacaaggaacatatctattgactccgtgagcactcattgatctaattatgctccagatattggaaccg

SEQ ID NO: 30337 - DNA, 399 bp, Glycine max
  unsure at all n locations
attaccttttacctcggtggctgaatgaagtcccgtatatattcaaacgcctcgaattgaattcccaaactttgaaccaaattccaagaccattacctttttcctcgatggcagattggagtccggaatatatcgagacgctcgaaattgattattgaacctcaagcanattcaaatgaacatactttttactcggatgtctgattcagtcccgtaatatatcgagacgcttcgactagaatgccgaaactctgaganattcaaacgacaataactntntagtcagatgtctgattcaatccccgtatatatcgagacgctcggactngaaaagccgagctctgagcaaatcaaacgaacaaaattnttactcggatgtcagattgaggtccgtatatn

SEQ ID NO: 30338 - DNA, 437 bp, Glycine max
  unsure at all n locations
gaaactcagcttcacattcaattcaagcgtgtcgatatattacgggactctatcagacatccgagtaaaagggttattgtcgtttgaatttgttcagaccttcggtattccatttcgagcgtctcgatatattacggaactcagtcagacatccgagntaaaaggttattgtcgtctgaatttgctcagagcttcaacattcaatttcgagcgtccggatatattacgggactcaatcagacatccaagtaaaaatttatagtcgtttgaatttgctcagagcttcggtattccatttcgagcatctcgatatattacaggactcaatcagacatccgagtaaaaaattattgtcgttcgaatttgctcagagcctcaacattcaatttcgagcgtttcgatatattacgggactcaatcgaacatacgagtaaaaa

SEQ ID NO: 30339 - DNA, 410 bp, Glycine max
  unsure at all n locations
tatcttatatggcattccaatctccttaataagagatgggtganaaataaaatgatttgtgaaaatcagtggatctgtatggatgatacgaaattgcaccatttcaattcattcttgggtcataagactcagccatccaagattcctcttatgatatgaatcaatagcgttgccaaattgaataaaaaacatgactcataagattctaataactaggatcggctgctgccgctatccaagatcagtaactatgcgttaaatactccattggattgcagcacccaattaagatatcaagcgagcattgagtagacagttgtcaataatttaagaacaagctttagaacaaattatctagtccaacaagggaagattgaatttaacgagaagaagaagtgagaataccttga

SEQ ID NO: 30340 - DNA, 520 bp, Glycine max
  unsure at all n locations
gggcagtagtgcttgngangcttcgcannnncgcgacacnataganntactcagctntacacaatgantttattataacacataatcatgctattattataaattgtggaaggattgagagtatagtggattagttcgatgaatttcatgaaatttatattggttcaatatatttacatttaacctctattatataatactgaatattttaagcagtgacaaaatgcttactatcaaaataaatatatttatgcctgatgatgcttacatgtgagaataagcatgtgaataaaagaaatacgttatagggattcataaattcctaaaatgtatattttaagattttcactcgtttgctattctgcttaaataacttgacagttggacacctggacacccaccgaaatttcaatgctcttcataagtcgactattaaatgtgtcgcgcgtcactaatttatttagattctaattctatcgaaagaaccactgtgttttaatcattctataatagatatagg

SEQ ID NO: 30341 - DNA, 360 bp, Glycine max
  unsure at all n locations
ttttcttcttttaaagaataaaaatgaangaaggtagaagagattataaaaaaaaagattaccttcagagnaagaggcctataataatatttattntttattttcatatttactctaattaattcaagataggtcatgttatgcattccattgtccctctcatntcacattagaagggttattcttatcatgcacaacataatcatttattttaggtaatatctaatatttgataatcaatatttttttactatataaccaaactcacaattcanaatatttgataagaaacatagaaatcaaactaatatataaataaaaatacccaaaataaactattagaaaaatccctattacaca

SEQ ID NO: 30342 - DNA, 324 bp, Glycine max
acctataaaactcagcttctcctccggtatcggttcaagtcgattcatcgctcttatatcctcgcctcgatcacactccactcggatcatcaacgccgtcttcattttcctttacttgttcttcggtttttgcgtcggagggagaatcggaaccgaaaacgagaagggaaaggtctcttcttctatggaagggagtgagagtgggagagtggcggcggggactacagagaagggagaatcggcattggaattgaagggcagaagcggaatatgaagtgtgggaggggtgaatggaggagggggtgaggggacgtgcctctctcc

SEQ ID NO: 30343 - DNA, 429 bp, Glycine max
  unsure at all n locations
naagctttagtagtagaatcatgggaccaactcattntatttcanaaaggaagtcatatctagtcaaggtctgagagaccatacaagtntcctaacgatntctaattatgtgggccattaagtctatcatatgctgacaatagccgagaagcccatgaatctcttcngggcggagtangtgtctgccatcgccttggccttggctaacaatcggggaagttcttgactcccgttcaaggtaagagcaaaccgatccatccacatggttgcctcttggtgtaaagagtcgatcacccttcctctagcctctntttccgcgtatacttgggcatactcatccgcgattctatgctcgtgggccgtggctagacctaactcttcttggtacttggcaaagagtcgatcacccttcctctttcagaaccatgc

SEQ ID NO: 30344 - DNA, 467 bp, Glycine max
  unsure at all n locations
gagcagtgctagatcctggccatcaaactcagctnataagcgcgggttcgggagaccaaaggcaagccgtcgcattttgcaagattatatcccgagaccttgggattgggtccaaccatgccttcttgatttccagctgagaatatgggcgagtggaggaacgccccggcatttaccccacaagcctaattgtaacctttaccggtttaaaaactctataagtgggccttaggtttagaggtttttcttttggtaaggcttggggcttttgtttttgatttattatacagagatcttcttcatctgtccctggctttaccattctattcatttgatgttactcttttctgaacggcaatcgatgacagtccccgaagactaatcctggacccgctatcaacttcacaaaaatgaataaacggaaatgaaggaatgggatggggactccccagactagaagatggtcn

SEQ ID NO: 30345 - DNA, 408 bp, Glycine max
  unsure at all n locations
agcttgctctatctttttctgaattcatgcataagatactgacagttntttcctanacatttctaagaacgaaatagaaactgaaagatatggtatcgataatcaatttatcttaatgataaagtctaagagaatataaagaatctagtctggtatttctttttacctatttaatatntctaaatattatgagttctccatttagttttctattcttcagagacatgtaaacacaataaataaaagacttgccaaagccaaaatcatatttcaactataaataaacaagagttgcgaacacgcgtgtagataaattgaccactaattctggttcgaagaccactaaataaattgacgagtccactaattaaggagtgtctaatcgtctagggagtataatgtatagta

SEQ ID NO: 30346 - DNA, 335 bp, Glycine max
atagcaatatgcgaaatgtttttcctaactcctacttactagtatgagatgctgttttactcaagatgctgacaacaacgagttagtgggttatttcataataccctaatctatctcttctcttcatcgcaagcgacaacatagcgtaaaatagtctatcctatgagagcatcacaaggtggactcaaactgcaaaggaagcgagcatggtcttagcatacacggcaacaacatgtgaccttgggttggtcttggcaatggtattggcttcacggagaatggtgccaccaactgcggcaatcgagactaatgaacataagcagacaactatcaac

SEQ ID NO: 30347 - DNA, 365 bp, Glycine max
gttgaacatgattggattgaggatttgattgacaaaatggattaggggaatgtgatttcaaatctgcacttatgcagaatttgctggtcaaaataggtgccagcaggattttaactttggtgcaaaaaatgcttgtgtgtggttggctgtggaaagagtattacacaatgagttctggatgtttgctagtagatccccacggtcacaatgtaagcttatgcactatagacttccagtaaaattttggagtcgatccaacggttaacgaattggatccaaagaattgtactgtggtctttaaatgagaaaactatgattttggtgatgtgtgagcaaagtatctgcctttgctctgtttgttggct

SEQ ID NO: 30348 - DNA, 475 bp, Glycine max
  unsure at all n locations
nggaggctgtncatgcgtantgctnacnanacaaacncaagctnatggganaacatcacatgggcacnaagaagtagggggggaaaattatgggagagttttncactaaataccaagggagttagtgatttacagaagaagctacatctcacagaaacaagaaccacaatagccttgtcaagcttcagtcactagccttcaattatatagaaggtccgaggaagacataatacaaagaattaaatgaaaggaaagagggggagtttgctaaatgggggcacaagaaacctaagggggattttctatgcgacatgtaaagccatagctattatctggaccatacatgcccattctgggcacacctagggtgatgacagatctgctggtagcttgtgaacaacaacacagctaagggcacatacacaagcaggcacgtctcaaagaatgattagttcttgtgtgtggaccttggggg

SEQ ID NO: 30349 - DNA, 430 bp, Glycine max
  unsure at all n locations
agcttacatggtctcgatatagtgccatgtaggactgcggggtctgtggcaatgtggcataactcgtagaaatgtgttttgttttattttcggacaccaatatgnttactcggtagtagaattgcatttgnaagttgaaattanaattacaatnaaggatangtttgatgaatggagcatctgtatatanttttgcgcttatagatagaagcatttacattgagcacattttgcttttgccttttgcttatatgtattggctataaggttttggttaactggttntgctttaaagttgctttgaactgaaatccaagtgctaattaagatttgttgtagtgtagaatgcaacaaggtggcggagtggcataagtctcaagaatctcanagaaaaataaccttaataactgctttgcatacatgtaacaat

SEQ ID NO: 30350 - DNA, 513 bp, Glycine max
  unsure at all n locations
nnaatggctgggcatagagcanctncaacaananaaacacaagcnnatccctttggaccaacatgtgccagttcaattaccaccgcctgcttcggtcttccgtgggaaaacgtcaccggcgtgttctccgacaccggctggtacgccaccaaccaggttgccgttgacgtcattcttcagcacagaatgaaacaatacccatgcctcactcgcgaaccctccgtcggcggcgcgttctttcgttcctttctacgcgggttcgacatcgctcgctacctttggggatacaacatctcaatgcccgacgctgcatcgctagacctcgtgaattggctcatgaatagaccggagtggaagatcatgaacgggagagacccatttctcgttgccggtaagatcactngngatnntcggagactcactgaagaagaatcggattgggggaacaagcttttggnttttactgctgggaaaacatgtcgatgcttgtggtgagtcnagtccgtgaacgcg

SEQ ID NO: 30351 - DNA, 436 bp, Glycine max
  unsure at all n locations
cctgcttttcttttctcatccanaaggattccggcctacctttcttaattgccagtcaccttcctgtgtcttcctttggcaaccttcaccactgcttcaattcatgaagaaaaccttaggcttctcacaaatcttgcatttcatttcaaacccaagtcataccaccaattttcccaaaaagataaaagtggtttactggcatatcatcaaagtcaagtcaaactgttccatatgcttcaagatgagaaaagcactacttataaataaaacttacaatgtantataacatagaataaatattgtactanaactataatcnatatactaattatcccaaaagcanaaaacaaatgtcatcaggaattcaaaattcctgtgactggtcttgagtgtcctatgtctgcacatncctctcatctgtcagatgaagcactan

SEQ ID NO: 30352 - DNA, 454 bp, Glycine max
  unsure at all n locations
tggcaataaatactcctacattaatctcttcatgctttgnatgnnnggctcgncctttgtcacgggaagccggaaggtccatatcaccttcttaattgtacacatggggcactgcacccccaaatgcacaagtaagaagagataattttccgggctctcgtgtccgtaaaatgcattcatatcatgcatcgcataagcatctcttcataacatcatagtggacatatcctgcatttgtccgttatcatattccagcctcacattntgcatgagtcatggcatcatcatgcatatgcgttcaacanactttttgatctgcaaaattgcataccatttgttttcatgtttgctcatccttgcgttntcctctacaaaacanaaacaaaaaagggggaagcgtgaaacttcatactacattcttagtttcatgtgttaggcaccacgagccaaccat

SEQ ID NO: 30353 - DNA, 404 bp, Glycine max
  unsure at all n locations
agctttagtcttttcaactgcacaacgctcttaatatgggaagagtatccttgtggaaccttcacctgacgaagacactgacaataacttatcttttccttcttggacaaagtatggcaggctgggggcaagtaaattttcttcccatcagaccttggatgcaactgtgctcttatacccatatcagctagatcttgacgggtattcaagccatccttcgtcttgccttgaatgttaaggagcgtcccaatcacactgtcacaaacatttttcttcacatgcataacatcaatacaatgtctaacgtcaagatcacaccagtacggaagatcaaagaaaatggacctcttcttccatatgcaactctgactnttatccttcttttgggtcttcccaaatacagt

SEQ ID NO: 30354 - DNA, 496 bp, Glycine max
  unsure at all n locations
aagctgggcgtcgacanngctgcgacacnatagaatactgcagcgtgtcgattcattctatgtacccgtagcaggccacattgtgtttcttgcattactatccacgacgagtggactggttatacccagtgaggacgggcttaagccattntacttaaggcgtgagtcacttaactgaagatagaaggaatctgccccgaacggttgactgatattatcgcgtaacttcgggtggaatcaattgcgaccgttcggtcgtcgcgaaccacgttggaaagcataaacaggtagaaaacaagtatgtaatcgaagaaacatctcgttagtaaatagtgcgggaagataatcggacggtttctctttgggatgtctcatgcttaatcgagttgattggtactaaggtgaaactagagttagatcaactcgctaggcagctcgccacaaaagaggcttggaagttgcgttttgatgctcctaagaaaatggagatgtgacg

SEQ ID NO: 30355 - DNA, 386 bp, Glycine max
  unsure at all n locations
agcttaactatatgtatgcgaagtgggtggaattcctagagcaattcccttatgttatcaaacataaaaagggaaaaggtaatatngtagccgatgctctntctcggcgtcatgcattactttcagagaatggtttctttagacatgaaggctttcttttcaaagaaaacaaattgtgtgtgcctaaatgttctactagaaatttgcttgtttgtgaagcacatgaaggacggttaatggggcattttggggtccaaaagactctagatacattacaagaaccattttattggcctcatatgataaatgatgtgcacaatatttgtgaacattgcattgtatgtaaaaaggcaaagtctaaggtaaagcctcatggattgtatact

SEQ ID NO: 30356 - DNA, 380 bp, Glycine max
atatcttaagctgtagctacaaccttgatctccccctttggcgtcatcatatagccaaagaactcggagatgagcacagtgataacaatggagtagcaagatataagtatcagagtattaaatacaataagccaaactcataatcaagaaataatgaaaccagaatttaaataacataaaatgtcaacaaccacaaaatatccaagactgaaatgtaaaaacacgagataaataagcaaagtacttagcataataatgtaaatgctaagaaactaaaagccgaaatacacggcgtataaaagataaataatcagaatctaatagcttagaagactgaggaaggggtggaagatcgaaactctgacgaatgtatccgacat

SEQ ID NO: 30357 - DNA, 361 bp, Glycine max
  unsure at all n locations
agcttgtatatttccccaatntatggncatattggagtgaatntgatacatnaaatcttatttatggntaacactgtctctagaacatttccatagaatntaattgaagaaattgtgcactttcaggagaaaaaaaagctaagttttgaattgcaaaatatagcagttgggctaagctcagcagctggctaaacacatatccaccgctaagcacagcttgagcgcgcttagtgcaaaggagaatttggcagagcatcagcatcaaagtcgcgcgctaagcgcgggatcagtgcgctaagcgcagaatgtgccttcagccaggctaagctcgagactggcgctaagcccaatttcacttact

SEQ ID NO: 30358 - DNA, 473 bp, Glycine max
  unsure at all n locations
actcagctagaaagcaactggatgcgttggtcaacttggtaacctatcttgttcttgaatcagaaatctgtacctgtcgcaagggtttgtggtttgtgctcctctgctgaccaccatacagaccttngcccttccatgcagcaacctggagtaattgagcaacctgaagcttatgctgcanatatttacaatagacctcctcaacctcagcagcaaaatcaaccacagcagagcaattatgacctttccagcaacagatacaaccctggatggaggaatcaccctaacctcagatggtccagccctcagcaacaacaacaacagcctgctccttccttccaaaatgctgctggcctaagcagaccatacattcctccaccaatccaacaacagcaacaaccccagaaacagccaacagttgaggcccctccacaaccttccctcgaagaacttgtgaggcaaatgactatgca

SEQ ID NO: 30359 - DNA, 302 bp, Glycine max
  unsure at all n locations
agcttgnatcggtttttgaatacacgncatactgtttaggacgtgacataaatatacaacatgatatattataaattgattctaaagtcggacggaaatgcaatgagccagtttatgaaacaatgtcataactcctgtgtatatggttattgcatgtgatgattgataaatgactccgaagtcttatactttcgattaatatatacagggtttgatactggcgcttcttatttttatatcaatctggtgataatgatgtatagngtatacgttgacttgagatgtttgccactaattaagca

SEQ ID NO: 30360 - DNA, 380 bp, Glycine max
  unsure at all n locations
gagccctataggggatggaccttttcatgttacggagattattattatttatgcctataagnnggacctccgagaatagtatggagttagcaccacttataacattgctgatgtaattccttttgcaggtggagctgatattgatgaggaggaactaacagatttgacgtcaaatcctcttcaaagggaaggcgatgatgcactcctccctaagaagggaccagtctctagaaccatgagcaagaggctcgcagaacattgggctagagctaccgaagaaagccctaaggttcttatgaacctcaaggtaaatatctgaacccatgggccaaggttgcgtccaattatctttgtacatattagactaggatgtcattata

SEQ ID NO: 30361 - DNA, 516 bp, Glycine max
  unsure at all n locations
ngattgggaggatcnnagcntcgcannnnccatnatatncggaaagacacacggggatcgtntagagtggatgtgcacgcatacttgcttttatttaccaaacngnaacagaagcgcaccgcatgcagcataattnttattgtacacgaagtntcaattagacaaagtatcgttcttattaagaagacttgaactcattcattcctanatcctgaccnagcatgatcctaatgatcaagaaatgcgctcctatcctatcattcactaaaactggatttcctacaaatataaccacacatacaagacagggaaggtccaaggttatattgcctgatgcccagagaacagtgagtgtatacataatcatacctaatgactgatccctaaaaaggtaatacatatggatgacaagatctgaagtattactgacttccctacatattcagtaaataccaccatgttggttacagagacaccttacaatgcagaggattgcacttcgagaacagacacgtt

SEQ ID NO: 30362 - DNA, 293 bp, Glycine max
ggcaatatactcacacgttcgcggagacaaacaatatcgttaagttgtaagcagtcatgagtgcgtatgtttgctacactggccagggcagcgtgcacaggattacgttgtttgcgatgaaccatattagtaatcaattagtaataaattaatattttgaatataataaattctttaaagcgagaaaagtcacattaattattcaactaattgagtgaagtccttaaatgtttaaatataataatcaataatgtatgtacctagtggatgtattatctatctagttcttaaac

SEQ ID NO: 30363 - DNA, 380 bp, Glycine max
  unsure at all n locations
atctttagtaacatgcagctangaacccagaacggctgctgagttcttacagacaacgctgagagaaacaaatgaaaagataggacgatactgctttgcttatatgttcaattgaatctaatgagggaatcctctttccaaaggtctccccttcctacgagactgcaacacatcagatgcttagttccccaatacatacaaatattaatgctttaccttcaccgcttctactatgttagtcaagtgcttgctattacaactataaccaccttactcattctataacttcctataccttattagaagcacattaagaacaaacaagaccctaagagctgtcatggttcttgagtaagaaaccaatcactggaacacatcta

SEQ ID NO: 30364 - DNA, 388 bp, Glycine max
  unsure at all n locations
tttttttaataaattgtcttagtggcatttacgagagctggtggatgacagtaaagtnaatgattcatagataattgcattattagacccataccccagctgagtatcagccatcagggcacataacaagacaagactaagatttgacctcggttagatcggaatctaacccatcaggtaattgtgactcctcttatagaggaatgaaccaattaaaaccatgcataanaacagataatatattacatatctacagagcaagttaaatggctcagcagtattcatccacagcaccaccttataagtgtcactggcctcgcacatatttaaagatgttattaanagaacaaagagaatttcattactggtcaacactagtcctataagc

SEQ ID NO: 30365 - DNA, 418 bp, Glycine max
  unsure at all n locations
nttagttcctcccaataagtgcctgaaatatgtgtttctgatcttacacactacgtgctgttngcttgatattgccatgcatatctctatgatatcatgtgatgcaatcctaccccccaagggtattggatagaagactccaacaagtttgcgccagagatgcaagagaagaccctaaggttctcatgagccttaatgtagattttgagcccatgggcaaagtatgagcccacttatctttgtacatattagattaagatatcattatttttgggccttgtatttatggctctataatgtaagtaagggtccctagaaatgtacgatctttcagcccttgtattttaaggcacctatactagtttttgtattaagggtacttttgtaatttcacatgcattaagtgaatatgtgatgt

SEQ ID NO: 30366 - DNA, 432 bp, Glycine max
  unsure at all n locations
agggttttatctttgaacacgcgatcgactcgaaccgcggacttttagtggcctgagggggcgccttttccttgtattggataaaaaaatatggggcgggtttgagtaaaaaaatgacgataacgcataataaagattcgcatcagattttgcctctacccaaagtgtggaatgttcgtcgtctcaccagcatacaatcaatatatgaaaaaataggctttatcttggagttgaagaaactgatgcgtacgtggatattgcccactcgctctttgtcatcttctttatgcataatggtgggccttaatagcccagaaatcaaaagcagactccatgtaaaaaattaagacctattatcaaggaacctaacatttgctaaatgaaagcttggaactatacaaaggtctaaaacacgttaatttcatgaccttn

SEQ ID NO: 30367 - DNA, 478 bp, Glycine max
  unsure at all n locations
cacacccaccgcaaaacgaaaacaaaccacttaacagaactaacnnannnnacagggaagccatatcctcancctgcacaacaaaaaccngaggacgaaaaagcgngctcagagcgcagcangcncttatactattgagcaaatcaagcacatgcagcgagacagaagaaatgaactgacaacacaccccaataatctttccacggagcaaagaacacatatacgcagctgcaataacaccattagaagacccaagcacgccttaaaataaattcaagactgaacaatgggaaaaacaaaaccacccgctgcaaaggagaaaagagagggccaaaagaccaaagggccataccataacacaaggaaaaagcacaccactgagcaaaataaagctacaatagcaagagctctcctacacaaaacgaaccaaaaattcaggaccaccaaaaaaagacaaccagagccaaaaaagaacaac

SEQ ID NO: 30368 - DNA, 485 bp, Glycine max
  unsure at all n locations
agagaatgggtgaacctattgttatacccacngncgaattcgagcatcggaccgccgggattcctctagagccgacccggagggcaggcgcagcctgttgtactatgcagcgtctctcgangaaacacggcggngagcttgtgcatagtaggttaacaaaaaatgcatttggtacaaacttactagaagttcttgcacgcattctcgcggagactactctatattaagcttatgctcaactaagataaacaatggtttcatagcgctctttcattntagggtccctacaggtcttccaaaactttgaagctgctcttccatttctactccaacctatagcaaacgtaattacgtccaatcaactaacaatattcttgccggaaccaaaggcacgcttggaaaggataattggaggatcaccatagtaaaaataatatatattcactcaatgggattattaagaacatatcggcccttatgaaggg

SEQ ID NO: 30369 - DNA, 483 bp, Glycine max
  unsure at all n locations
ccgactttgatcttgatgactgcgcgctcatagnaaccccccgangaatangagtggngccagagtatcangacattaatttgttttctacaagcncaanagcccagagcgcttttgatcacaaagacgatgatcttcacaatcaaagaatgggttcaagatggaatcgataactcttcaggttcaaaagaactttggtctccggacccctagactccaacttcatgatccaagttccgagattcaagatctagaatccagactgcagatccacgattcatgagcatactccttcaagatcagtttcaaatggttttgttaaaaactcgagagcacatgatttttcctcacacctttacccaaaaagtgttactcctctgttatcaatactacactattgtaatcaattcccagtggaacaatggttgtcaacagctttcacctgaatttacaaccgttccacttgttatcaaagagtgtacg

SEQ ID NO: 30370 - DNA, 447 bp, Glycine max
  unsure at all n locations
aggagattttgctcgtatatctanggcgattncnagctcggaccccggggatcctctaaagtggacttgaggcaggcaaccnggtgtngaacctccaanggaggcgggacctgggagcttcatgggggtccttcatgggattttcacatggaaatgcacggaagactaaagaatataggtgagagaagcgccattcattaaagaataagccatggaagaatgagcttcacccaccaagatgatgccttggattaagaagcttggaaaagatgcttcaatggaggaaaagaaagagggagagaaagaaagaggggggagcacgatattgaaggaataaaagatgtatataagtggaactttgaagtatgtctcacaagactctcattcatcaaaggtacaacaaagtgttacacattgcttctatctatagactaaggtgcttgcttn

SEQ ID NO: 30371 - DNA, 541 bp, Glycine max
  unsure at all n locations
ggggtcggaagaaatcgangnnactttgnnananntctncnnnnnntntangnanaagngcccagcnnancanntccgcgnaccaggaggggcgagacacggaactanattanttctttactcttagaaggaaatctacctgtgcgggccgttggtggtngatagtaagcaaaccaagaggatgcctgcgacgcgaattggtttgcccatttgaatntgaatgttaaccttaacacacaataagcataccaagcccagtattgggtatggctcctctgaagccttaaacggacgaaagtgcataaactcctatttgttggtatgatgatggagaagcggtactttttggacctgaaatgctacaacagattaacgaacaagtgaagttgattcgagagaagatataagcatctcaggataggcagaagagctatatgatagaaggggaaaccattaattttctggaagagacatgggttttgaaggttctccaaaaccggagtcagaagagcctcaatgctagaagttacacccaagatcg

SEQ ID NO: 30372 - DNA, 173 bp, Glycine max
caacgattggtacctcaaaacctttacactgggcaatgaggggcattgtgcattagccttaagtgaacatacgggcaaatcaaaaattctcacctgtcgatgtttttaaacaacaaaaaaaggagggacaaaccctatgatttaatggattgatcaaacattaaaccacttca

SEQ ID NO: 30373 - DNA, 390 bp, Glycine max
  unsure at all n locations
gaggataaacttgatatccananataaanaanaaccncggcccantnnnagaagaggggagaaggaagataatggtcaccccctaggcactccggggggcaaatagcaaaaaaaacgccccctaaaaaaatccaaccgaggcccaccgaacgtaacgaacgaaacgcgatgaatcgagaagcaccgaacgtctcgacgaccacatcacactcaccgtctcaacaccaacggaagaccccaaccaactctaaaacaccaagacccgcgggcccattggccatgacttgaaaccgagtcataacctaatcccctgtgaggcaaagccacaataagctacccgctaccaaaaaaaaaaacccaccacgcggaagacaccgcactccgaaagag

SEQ ID NO: 30374 - DNA, 239 bp, Glycine max
aaccccatggatcaatgcatatactataccacaaggtccatgagtaaaaaatggtctcttattttatatgtagatgatattttacttgcagccagtgaatgggaaaggtgaaacaatttctctctaagaattttgacatgaatgatatgggtcatcttatgtcattggcattaagattcatagagataaacctcgagttattttatggttatcacaggaaaccctatttaaccaaattt

SEQ ID NO: 30375 - DNA, 432 bp, Glycine max
  unsure at all n locations
ggactttttctttttctatgaancncannatngananatccgncggagggaagaggccgcggcannctttttcttattaaaanaacacccagggaggggcgggagacaaaaaaacaaacncgggagaaaaaagccaagaaccccccaaccgaaaagatagcaaaacccaaacacgaggaacgggacggcagaaaaaaaaaaaancaacgacnaatagnacaaaacaccnaaancgctacaagggtaacgaaaaaagcacacatgactacctcaccgcaacgggagaggagcgacaagcgaacggccaaggaacaacgacaaaccgcaactttctagttgttgtatacgagtccaccaccatatatagtggacccgactccgaatatagcctaaacaattttatagatagtctatcattaaaactaatatacg

SEQ ID NO: 30376 - DNA, 172 bp, Glycine max
aaaaaaaaaaaacaattgctcttgcacgtatactatggggaaaataactattagccatatcgatcccacgaattatatggcatctcaggttaattacatgtggacgacaaaattaaatatatgaagctgacaataaaattttctccatttatggctactgtatttattgaat

SEQ ID NO: 30377 - DNA, 284 bp, Glycine max
  unsure at all n locations
atctttagtgcctatcanacgttgacacgtggcaatcaaagctactgcctaacggtcaacatccaattgtgacgtcgggggaccaacattgcaattttttataaaataaaggacccaattcgtgaattaaattatcggnggactaaatgccaaattggacctaaagtangggaccaaaagtgccaatttgccttttatttatataccccnacgaaatangtactactagttggtgcatatttaatggtcaaataatgctaagaagtttactagcagcttatcat

SEQ ID NO: 30378 - DNA, 195 bp, Glycine max
gcaagaattgcaggttaacatctaactgctccaagtgaagattctctgcagctactatgctcaaaataattctgatggtagtcatctttacaactggagagaagatctctatgaaatcaattccttgttttctgtgaaaccctttcaccacaagtctcgccttgtatcttcttttaccgtcagattctttcttta

SEQ ID NO: 30379 - DNA, 231 bp, Glycine max
cgcaactcagcgcgccaaaacacgcaaacacacaaaaggactttctatagcaaacgaccggacaaacagcggcgcgacgaccagagagcaccaaagggaaggacacgcagagcccccaagaagaacacagcaggctcaaaaaacaaaccaaacaccccaaaccaaacagaggacaagaaaagggcagaaaaaagctaagtacccgaaaccagagaaccggcaccaacaaaa

SEQ ID NO: 30380 - DNA, 266 bp, Glycine max
  unsure at all n locations
ncaagctttctcatagagatctaggaaggataaagcgggtgaatgaaccaattccgctcccgaatatgacagcctccattntaggagcgctgagcaccagcagcgcttcgaggccatcaagggatggtcatttctccgggagcgacgcgtccagctcanggacgacgagtatacccactttcaggaggagatagttcgccggcgttgggcatcactggttacccccatggccaaattcgacccacacataatcctcgaatttatgc

SEQ ID NO: 30381 - DNA, 283 bp, Glycine max
aagaattcgccaaggactaaccgtctgaattcttcttgtgtctctcttctcccttttccaaaagaacaaaggactaacacgctgaattattttgtgtctcccttctcccttgacaaagaattcaaaatgacacagtctgagaattcttttgattcttccctttccgtaatacaaaagtgttcaaaggactaaccgcctgagaattcttttgtatccccattcacaaagtatcacaagcttaacagcctgagatctttgtctaacacattagagggtacattct

SEQ ID NO: 30382 - DNA, 310 bp, Glycine max
  unsure at all n locations
agctnattatatcgagacgatcaaaattgaacaacggaagctctcgtgaaattaaaatggtcataagttttaactcggatgtccgattcangagcttcacatatcgagatgcacganattgaacaatggaagctctagagaaattctaatggtcataaattttcacaccgaggtcctattcangcgcttaatatatccagacgctcgaaattgaacaatggaagctctcgagatattcaaatggtcattacttttcactcggatgtccgattcaagcgtatcacatatccacacgcttggaattgattaa

SEQ ID NO: 30383 - DNA, 348 bp, Glycine max
  unsure at all n locations
ggattntctangctcgagaagtgaaatttagaatgaggtacatntgaagcaaactctcacctcacacaagtacataacatcaatctaaacttgctcanactggatttacacctaaaattacaccgaatncaaaattgactcctcaacacccaattttgccctagaaatggctcttggttcactttggtcatttgtttttctctctagcatagcctaacctttctcataagtcctaaatggcatttcaagctaggattaactcattttaacctccatttactacagaatccagatatagcctgtcaactctcagagcctgactctttttccactcataacaccacattc

SEQ ID NO: 30384 - DNA, 309 bp, Glycine max
  unsure at all n locations
agctttcattgttcaattncgagcgncncgangtggtatgcgcctgaatctgacctccgtgtgaaaagttatgaccatttgaatttctcgagagcttccgttgttcaattttgagtgtctcgatatattatacgcctgaatcggacctccgagtgaaacattatgaccatttgaaatgctcaagagcttccattgttcaatatcgagcgactcgatttattatgcgccagaatcggaccttttagtgaaaagttatgaccatttgaatttctcgagagctctcggtgttcaattttgagcggcttgata

SEQ ID NO: 30385 - DNA, 495 bp, Glycine max
  unsure at all n locations
gggcagtctagtttcttatgntntcannncnnnnanantaannnaccgnccgngcannnnagaggggcagaagaggagcacccggttgattgatattcgcgcacaananancgagacgcgcgaaagagaacaanggaaacccncgagcaanncaaangaacanaacnnnngcacaaggancgccgagacaggcaccaaagacaccgagacgcgcgaccaagaaccacggcagcgcncgagaaaaaccaagggacccaacagcgaacgcggaggcgcgacgcacgcgcaaaagaaancgagacgcccgaanacgaacaacggaagcccgcgagacaaacaagggggcagaaccgaccccacagacgggcgagacaagcgcacagaagagcaagaacggccgaaaacgaacaacggaagcacgcgggaaaggcaaaggaccagacccccaaccagggagcccaaccaaccngcaaaacancgaacccgggaaagaag

SEQ ID NO: 30386 - DNA, 173 bp, Glycine max
agctttgtatgaggctgaagaagctgttgctcgtgttcaacaagatccggtggagattaatttatctcagcctaatttgtcacaagatagtgacatagagttgatggtaaatatttgtcacaagtatagcaatataggagatagttttgatatattacaagttttattcatgt

SEQ ID NO: 30387 - DNA, 370 bp, Glycine max
  unsure at all n locations
ctcacgcttatacctctccatgtatcgaatagagactctgattccatangtnggaagctagnnatcctgtccttgatagcttcgatattcttatttcgaacacaattgtttgaagaagtcgtctttgattctctcccatgaggttagactatggtgtggttgagaattgagtcattcacgtgcacttccccttaatgaanacggaagaaagtgcatcttaatgtggctatctttgattatgagtattcttactaatgtgcatatttgttggaatcgtgtnaggtgggtattcagttcttcactgctggatcccataaattgagtgttatggagagtattaatggtcccgctangaagaattacttgatgt

SEQ ID NO: 30388 - DNA, 82 bp, Glycine max
  unsure at all n locations
agcttttatccaaaatcctgactcaccatanaccttgacccagagtgagaatgtcaatccttaccctcggaagcaaaaaaaa

SEQ ID NO: 30389 - DNA, 341 bp, Glycine max
  unsure at all n locations
tgccacccagctcgcccaagcgagctaggttgcttcttccataangcaccgccttctggagaacttcctagaaggcccaagtgggcctgggttgctattgcaccccatgtntactgaatacacccctttgccttttttgttgattctttttccgtaacgttaaagaatcttacgaattacgtaacgatacttgttttcttttcgtattgttatgaaaccttatggatcacgtaatcatcccttttttggcttccgggatgttacggaactttacggattgcgcactaacacttccttttgactttcggcatgtctcggaacttcacgaaatgcctaacaat

SEQ ID NO: 30390 - DNA, 439 bp, Glycine max
  unsure at all n locations
ggagtagaccatgtatatcaggnaatcactcgtcccgggatccctagagtcaacctgcaggcttgcaacctggcttggtttggagcttctattggaggctgggatctgttgagccttcaatgaggtccctctaatggtgattttccaccatggagatgcagcggaagacanaggaaaagaagtgagatgangcgccatccactanggaataagccatggaagaaggagcttcaccaccaagatgagccttggataagaagcttggagagaatgcttcaatggaggaaaagaaagagggagagaaagagagaggggggagcacgaaattgaagggataaaagaggagagaagtggactttgaatatgttcacaagatctaattctcaaagtacataaatgtacacatgctcttttatagacttggacttctttaaaactn

SEQ ID NO: 30391 - DNA, 394 bp, Glycine max
  unsure at all n locations
aatgacgagtatgtgtaattgtaataagctccttagttgatattctagtcataatnaggatgcgtgctntaaagttttacaatgcttgaatntgtgtgataatcttgaatatgcatttcaacttactcatttaacttttataatattgatccatggttaaggattgaaatctttcgaaacatgttttggaaaatacttaagtttttatcccgcatcanataattgattatatgatgatataattgattatcttgatgatgatgcctttgtttttcataattgagaaagactcanaattagtctattatcttgagtgaataattaattatatggaattgaaacaaattttactatcacagataattaattatatgatgatataattgattatatg

SEQ ID NO: 30392 - DNA, 451 bp, Glycine max
  unsure at all n locations
agggagagtganncttcgttactactccgcgatttcgagctcggcccccgggttccttataaggcgaccttgaggcttccaacnntttaaatctttcctcctgactactggctctggctttttctcctatcaaatcatacgcactgtgagttgaatatttgccctctggatctgtaagaccactcccaagtatctgaacccttgttgtggattttattttctgcaatatctttgagaaagttagccgctaaggtgatcttattgtcaaacaaggctcttcttcaagcaaagttccattcccaccccatgccttgatacccttccatggatcttatgaattgatgcttgttcaatgagaactgataaagtctaggttcttctttggcattgacccaaaatgaaatgatgccgaattgaggcaccctcattcctttgatacattagatttaan

SEQ ID NO: 30393 - DNA, 339 bp, Glycine max
  unsure at all n locations
atatatattagaggatttgtatataaatatgtaaaaatatataaaaatcattatccaaattaatatatattcaaatgattntatattcacacatgtcttgcattatgttaatttatgcaaacatantttgaaaattattatctttataagcatattcgcatttgcatatgacttttatatatatatatatataattttaataagaaaattagtaataaaaaatatattacattntgtaattattagttntatactcctatcatcataagggggaaaagtatactactaaaataaaactttaaatttattgggtttatactcatatcatcaagtgtacta

SEQ ID NO: 30394 - DNA, 359 bp, Glycine max
acctttttaattgcggctctggaaaacaaaggtcaggggtccgcaatatgtgaaaatgaggttccaagtacttcggatttggtccgaccatgcccctctgatttccagctgggaaattggcgagtggaggaacgccccggcgtttacgcaacaagcataatggtaacctttacgggtttaaaagctctatagttgggcctaggctttagagttttctttttgttaaagctttgtgtcttttggttttgaatttataatacaaggatctttcttcatctgttcctggtctctacccattctcattcatttgcatggttacttctttttctgaaaccgcagattcgatgacgagtcccccg

SEQ ID NO: 30395 - DNA, 257 bp, Glycine max
gacatcaaccggtccatagagtgtaaggagtatccacaaggcgcttctggcaacgacaagaggatgttgcagaggttggaaactagtttctttctaagtgggggtatcatgatggacctcattggaaccttgtggccttggatcttcttcatcaatggaagtccttgcttcttgaatttaatggcagcaaaatggaaaagaagaagagttgagaggagacaccacttcaaggagaagatgagtctagaagaagctca

SEQ ID NO: 30396 - DNA, 332 bp, Glycine max
  unsure at all n locations
agctaataccagtatccagattaagtggaaaacacgttccaaaggtggagaatggaaatggccttcctcaaaaaacctaatttcaaccaaatatgagtttaatttttcgacaatatgcttattaaatcatttaagaaagctngaactagctatgcttcaaatggaatctaaacacaagttcttcaaaacaaatctaaaacatgataatagaaatcaatgaagtcacaagtgaaattaaaaagctaacaatagaaaaaatatattgaatcacaaattcttatatagttatacaaatcaaagctcattggaaaagaagaaagaaagaagagaaa

SEQ ID NO: 30397 - DNA, 476 bp, Glycine max
  unsure at all n locations
nnaaacggaacttttagtttctacncattaaacacaagccgaaagactanctgctccatttacataaacaaccaaaccacttggttatatttccgcatcatatggatagacctggacagtgtatcatcagcagtaaaatcccagcaaataatatattcaatcctaatattaaccggattactgcactacttttctttcacaaaaatggaaaaattaccctctcccatggtaaagttcgaaatgagtntacattagggcaagtgttgccagactacttatgtatcgaggcaagcaccttcccaatggtgcagtgttgcttaaggcaagcatatttgtcacctaatctacanggcaacacngaagatgtaaaggcatatctgcttctataaaccatagtaggtccttgtgaatgccctcacagacctgagatagttacaccttacggcataacaaggctatcaatctttacagacctn

SEQ ID NO: 30398 - DNA, 439 bp, Glycine max
  unsure at all n locations
aaaaacacggggcgttgtaatnctacgnaatananaaaggccncggggagacccaaaggcgaccagcaggaagcgcaacanttttttttaccaaaggnccaaaaccacaggggcggggggagangcangccacccaacggaagacacacacgaagaacaagggccatgaacaccgggaagaacatccagtgcatcaagatggccaacgtgacgaaacaaagacgcaaggaaagcccccggggaacaagccaaggaacaagccggaacgccggaactgcatgaccaggatatagacggacaaaggaacatacctaggagaaaagagacccaccacgcaagtcgcaccattggaaagaagtccaaacaaggcggcgaaaatggaccaacaaacaggaaaccaactgggcccgggaaggggagcaagaaaacacatccaagg

SEQ ID NO: 30399 - DNA, 405 bp, Glycine max
  unsure at all n locations
aataggttttagtttctanctnataanancngccacgcgacgggagaaaacccccacccttgtctttaccacacnaacaggggggggtgcacggccacccagaggggaaacccccacgagcaggggnacaccacacaaagcaacgctcaaccttaaggaagactgctacaaacgtcgttcactcacttctccaccaggcttcctatggctccttcaatgtagtccaccacatccatcctccataacaaaagaggcagctctcttgccaaaacatgcgaaaccgagggaaacacagcctcatcttttatacccgtcaatgcgacaatgcttcccattccatcacgatccagtattctactaactgcttacggaacttgccaaaacaccgcatatgcaatagccttn

SEQ ID NO: 30400 - DNA, 350 bp, Glycine max
  unsure at all n locations
ccccggggtaccttagagaccccaggcaggagccacgttggtgancatcctagacgcagatcgggagctatgcaatgacactcaggtgtctcgctaacgccaataccttctgatagaaaagtatgaataggcttagcaccttgctcgcaaacctattctgagaaaaaaatttttcggtctcgactctcgcgggatatcgcactgacccatgactacagattataagccgctcatgccttgtcgcgctcacgccagtctattctagtggatactgctttcttttgataatctgaaatctgtctagctcaatggatacaatggtcctgaagaggagggcacttcctaccccg

SEQ ID NO: 30401 - DNA, 485 bp, Glycine max
  unsure at all n locations
ggcatccttttaccttcngaccgtgaacctagannacnaaccccacgttgaatgactgggatgtctgagtatggccagcgactttcattcatctcttgcggcagcnggaacagggcgggtcttagtaataatatgctctcactacagaccacactgtgaacgggcactnctattactcatgatcatgcatccgagatgagctcaaggtggtgaatccgcacacagcttgctcattgtaaatgtgtgcaagaatatcttgatccttataaacgaaacgagcatnattctataaaagtagagaatgtatgtagaagtgcctctgtttataaatcaccgcattgaataacaatgaatattcacttgttgtgcataatttaaatgacacacaatatctaaatgtgatgcagtactcacacgctataacataatagntttgtgaccctcccccagcgacaatgttcccgcgacctgacaggatgtgccct

SEQ ID NO: 30402 - DNA, 440 bp, Glycine max
  unsure at all n locations
ncccctttgatgcttgataccacggcgatttcagctcgcacccgggatcctcagagtcgacctgcggcatgcaagcnttttatccaaagctcatcttgggggngaagctccttttttcatggcttattccttatggnatggcgccctcctctcacctttatcctttgtcttcccctgcatctncatggtggaaaatcaccattaaaggaccccatttgaagctcaaagatccagcctncatagaagccccacaagcaagcttccatcagtaattntcccagagtgtacaggatagcacctgtccactatcagaaggaaacaacaattaatgtatcaatatatcagcaactaatcatcatcagatacaaacaacaatcacaccccctcaattaattgtaaagaatacctcaaatccttaaatcaaacaccctcgatttttg

SEQ ID NO: 30403 - DNA, 432 bp, Glycine max
  unsure at all n locations
tatgtataatttttgaaggtacagatgtagaacgtttaattagtttanttaacaaaaagnaaacaacatttctagcatttgatgagaatgaaatgggatatactacaacttgcacatgtgtaaatttattcataatagtatattggaaaatcatgagttgcttgtagcattcaaagaaggagatcaaagcaatattttgcgattatgaaagccccaaaagtttggggcttagaaatatgtagtgcgatattgtgattttgtntgagattagtggaggctagtgatattgaaggttgggcaacatatgtgttacacgagaaattgaaatttaaatataaaaaatagtcgaaaatatganataaagaacaactttggaatgtangaaaaggctgcataaattgaaagaacaaattatataatggtattgtagtg

SEQ ID NO: 30404 - DNA, 322 bp, Glycine max
  unsure at all n locations
agctttcnttcaacgaagagaagagaaagacgggagattgcggaaatacaagnagaagggatgtctcctccacctctaggacctcacaatcactcacaaactcatctcaagctctcaagacggcttcctcttcaagctctggtctctgctaatcttcacacaacaaaatctctcaaactctttggaacttggacctttctctctctataactaaagacatgccagagctcctcaagaaaaatggccaaactccatctctaaatctgattttatgcttaaataggtggctttgattgtgctcatgcgcttaatgcaactctga

SEQ ID NO: 30405 - DNA, 319 bp, Glycine max
  unsure at all n locations
tttgtgctagtgtgcttagcgtgactatggaccgctcagctcacattagtggattttggcttagtgcgcgctattctcgctcactggatggactgaagcggngcgcttagcgggatgacccttcgctcaatgcaaatgcacaactcattcttgctctagattcttcctcgcactcagctgaggagtgatgcgctcatcggatggctcgctaagccagaagattggcttatcgagcggatgaaaatcaacacttcacgaacttgcctagataactttgaaatgagaggaaatggttattaaacacacaagatgggagttc

SEQ ID NO: 30406 - DNA, 103 bp, Glycine max
tcgcgaccaatttcttgtttgacatcttaatcttgaattctggcattcatccactaatatcacatatactcgcgcaccaccatgcgtgagaggctctatcccg

SEQ ID NO: 30407 - DNA, 353 bp, Glycine max
  unsure at all n locations
atggtttcttctaccctactcctatcgactagtggagccagtccaagtgatagaggtgtcatcctctgaagaggatcctgaggaggacctanaggagttacctcctgagcctgctgtggatgctcttgaccttccagaggatgatgaggacccacttcctgatgtggattctccagaggatatcttgtcagcatttgagacagactctacagaggagagcggccctggagggatagcgaacagtgaagacttttcatcatagcagacgactccttagactaggcttacatactttttgtgcgtgggtgtatctaagtcagactgctanggttactcttttgatttttgggtgg

SEQ ID NO: 30408 - DNA, 372 bp, Glycine max
  unsure at all n locations
ccacagcagaacaattatgacctttccagcaacagatacaaccctggatggaggaatcaccctaacctcagatggtctagctctcagcaacaacagcaacctgctccttccttccaaaatgctgctggcccaagcagaccatacattcctccaccaatccaacaacagcaacaaccccagaaacagccaacagttgaggcccctccacaaccttccctcgaagaacttgtgaggcaaatgactatgcagaacatgcagtttcagcaagagaccagagcctncattcagagcttaaccaatcagatgggacaattggctacccaattgaatcaacaacagtcccagaattctgacaagctgccttctcaagct

SEQ ID NO: 30409 - DNA, 429 bp, Glycine max
  unsure at all n locations
cgccccgtgggcttgacntacagcgaatnaggaacccccgcgggatccaaggagcgaccagacggaggcatttttttaagcgcggaccccggcgcaacgcggggtgcatcccggcatgatgctcactcccttgggcgcgccagtatgaaatacaagcgaccaatgctaggccggacaccgggaatatccggacataagacatgcaccgtgcctaaggaaatggcttcccaaaagcccacaagctgagcccaaaaaggacgcccagaaacaagagacccaacgcaacctgcagcagagaacaaaaagaaacgtacatgactctccaaatgccaatcagaacagaaagacggccaacgattgccaaaccgtccaaatagcgcgtgctatgaaacaaaaaacgctggataaaaaaacacccccagcgaatgg

SEQ ID NO: 30410 - DNA, 511 bp, Glycine max
  unsure at all n locations
nnttatttggggaaattccccnanngntnnnntntnnnnnntnngcnaancngnccnnagaggantgaaggacgaggagaggagacgagcgtttacttagngttcgacgccnacnagncnccaacacaggcatggcggctangagcacccnaaacacngcaacatccacgggccacagaagggacaccgccgcgagctccaccgccacattttgacgacatcgtctttggagactggagatacgcaggacaaacacggtatttgaagggcccatgggttacagttgccctctgagaaggagacatgatccacacgtcagtcttatgggacgacgccccttattctgacggtcagacatgaacctggatatctcgatcactcaactgactgatgcacataaataccgtaataaaattccttcaacagcacgtgggacggaaaaagtatagaccgttagcatcgacaatgtcctcacattgcggtgatggagccagaccaccatcgcgtcttg

SEQ ID NO: 30411 - DNA, 308 bp, Glycine max
  unsure at all n locations
agctttttgaccatgcaaacactaaggcttagggttcgtttccccctttcaatcaacccaatgtttccaaaaaatgctcctttaccaagtcatgcatacatccaagtncatttangcatttcgggaaaacctttcattgcgttcaccctttaagcgcacattcttttttcttcaaaaacctttttgtgttatgatccgggaattttccaaagaaaactggcggtcattctttttaaaaacatgttggcctttttagttttctttcccttagctttttttcttttcaataatttctttcaagcaaaaac

SEQ ID NO: 30412 - DNA, 495 bp, Glycine max
  unsure at all n locations
nnnaaatcgagatcgacngccttagtacnnnctgnganaatttagannactcaccctngtccacaaanaatcactaaaaatggnnnattgtctaacttcttaaacggncctcttttgctttatgcggttaacatggaccgttcaaaagcataaaatcaacacatcactttactacctttcgcgagaactacgtangtctgatttcctcttcgatggaggatacataagagcaaaaagtccccttttgtcgaccttgtgagatggttagaggtccaatgccttaaattttttcaccaagtaaaatggatcattttaaggtccaatgccttaaatgaccaccttccaagtaaaaagaatcacttgattcgccccttttgcaagaactacgtangtctgatttcctcatcgcaattgaggatacccngagcaaaaaccccgcttttgtcaccaccccaagagaactgtatggtccaacccttatcgttctctcttttn

SEQ ID NO: 30413 - DNA, 344 bp, Glycine max
atatattacccaatttaatcggacatccgagtaaaaagttattgtcgtttgaatttcctacgagcttccgtgttcaatttcaacgcctcgatatattacaagactcaaccggaaattcgcgtgttaaggtattggcaattcaattttctcagaactttggatctaaattttgagcgtctcgatatattaccggactcaaccagacatctgtgtataaaagtattggcatttcaatttgctcacagcttctaatctcacatttggagccttctcatatattaacccgatccatcgaccatccgagaaaaagaattgtcgttgaaaattctacaaccttccgttcg

SEQ ID NO: 30414 - DNA, 433 bp, Glycine max
  unsure at all n locations
tctggtgggacatcttgacttgctttccaatcngacattctctacagattctgccttcnnctatnntcagagggggaatgcctctaacagcacctttgtcaatgattttcttcatgcctcttaagtgcagatgtccaaatatttgatgccatattttgacttcatcttctttggagaatagacatgtggaggagtaactggtttcttgaggtgtccataggtaacagttgtcctttgatctgctgcccttcattaggacttcactcttctcatttgtcaccaagcattctgactntgtgaagtttacattgaatccttcatcacacaactgactgatgctgatcaagttcgcagtcagtcccttcaccagcagtactttgttcagactangaagtccatcatggactagctttcccattccagtgatctttca

SEQ ID NO: 30415 - DNA, 151 bp, Glycine max
actccatttttatatattacaattattcatgtctgacatttgcatgtagggccctgcaactattgttccaccaatagctaggaataagctaaccataacaagagccataccaaggaaggttgttgattaagatgatgccgtataaagaaaa

SEQ ID NO: 30416 - DNA, 425 bp, Glycine max
ttgcgactagaatcaccaatagaaccccagcgcaagcggaaagcagaaattgtacgtgaaaaacccaccgagcgcggcgagacgaacacgaacccaccccgagaagaatcggccaaaggaaaaccggtcatccacagactggatacctgcgtcatcggaaacagaccttcaacggggaagaacctcgaaccaagcaattcgacacattccaggcgcccgcagaggcccacaaagaggtacgtgcattgcgagacacagcgggtagaaccgaaagaccccccagatgacgagaccaaaccaggccactaaggcacccttggcaacataagaaaaaaaaattacaccgaacggtgaacgaccaacataacacggaaaaaaaaatccgacggcggcggccgaaacgctcggaaaaaaagacgaaaaac

SEQ ID NO: 30417 - DNA, 286 bp, Glycine max
agcttattgtattaagtgaaatagaggatgataacggtgtgataatcccaaggaagtgaaaagcgaaacaagaagaaccaaagaggtagaggcctgatcaaccaattatcacatcctcttttccaaagaagagaaagataagacctagatgcaagttcttaaccctaaaggaacccattaagatcccatccttcattgtctcttgttcgtctgatagtgaggcaactccaactcccaatacacatccattcagtccaccaccagtgtagaccaagaagcctacata

SEQ ID NO: 30418 - DNA, 479 bp, Glycine max
  unsure at all n locations
nggcagacttcttcatgcagtatcngacctcatnaatactaagcttaccttttaaggccaaaccattcaccttggggtggcaccatgttatttggttttgcaccaanaggtgggaaaggatggtccatcatgtgcttgtaggtgtacgataggtaactcaaataaccttaggtaaaaaaatgcccttggttatttgggggtagcaaaaatactttcttggaaaataatngaatggatgtatatattgcgtgtagggtaccaaaaatgctcataaatgtatatattgcatgataggtagccaaaaaccttgtggattaattaactacgtagcacagtaccctattatttaagtaattaaatactttgtgggtttagttaagataggaacaaaatgcctctacaatgtattatattttgcanagaaatgcctcacaaacttatatgtattgatgtaggtagcaaaaccttgcaattaattt

SEQ ID NO: 30419 - DNA, 344 bp, Glycine max
  unsure at all n locations
ttccaaccttttttgtgaattgaggatggacccctaatctggggtttgaataaaaaattttaaaatttaaggaaattaaaaatgcctagaattaaatttgtttgattttaatttctttcatttttcaaatgcttttgttggataaatcaattcaaatttcatcaattntaaattctttgtttggataaggcaattcaattttctccatatgcaaattntcaattttatattntanatagatgaaattttaatattaaactttatagaaaacaaacacatctattttgaaatattaattaaaaatattttcatttttaatatttaaaatactaatattgatattt

SEQ ID NO: 30420 - DNA, 395 bp, Glycine max
  unsure at all n locations
actaagctgctgagtgaagccccagccttgcctggaacccttttgctacctccttccttnncccatncccctgttagaattggcatttttaatagtggtttaatgtaagtatgcatgtattcattgaacttggagaanaatagggtaattaagccgttgctaccatatggctttgaaagttgaacttaatatgcgtgtgcttggatatatgttgtttgggtgttgcatgtcttcgttaattgaccaaatgttgtggttgtgtgctgtcttcttatatatgattcttgagggatatgaganaaaagatggaaatttcaatttcaattactagtgtcttagactctatcattgagtctatactgagagatgacttagtgtatttatattaatcccat

SEQ ID NO: 30421 - DNA, 472 bp, Glycine max
  unsure at all n locations
aggggagctgtaaccttttgtaaaacaangncgattncgagcncgncccccgnggannccctaaagnggacctgcaggcaggcaacccttttttttacactncaaccangccnnngcgcgcgacgagtgctacagncttcattccttccttcactttggttccttccttcttcttacacaaattttgttggtcttccactgatgatgatcatggaaggctaaacactcaatcaatccaaggatccactccaagaaaggttgaatntgagctctggtttagtatttcaattacgtgtgaatgtacatctttttcttcaatcatattttttattttcatgattatgaatatgcttaggattgaaaacaaaattaagctatggaatcattgtgtaatctgaaatctaatcacagaatgtttggacgatattccaacctaatttgcgacctcaatgaattaaggattaattcaacg

SEQ ID NO: 30422 - DNA, 397 bp, Glycine max
  unsure at all n locations
gccgtatanngttttngacntcnnnnntagnnacnnccaagnnnnnttttgaagaccccnttttttgttaaaccccaccactttccggggatactcacaaatctccccttgaattgataaagctttctaaagaaattgatactctgtagtcctgaattatcctattccttccccttgggataacaaaagccaaggcgtatagatttgaggatcataataactaacgtcatacacattgtggagaactataaccaatcatgaaccggaccgtgagccacatcataatagatatctctatataccataggcgaaacatattaattttgtccacatccatgcaatatggaaattaaatgaaaatccatatattagccaatacatgctaaatcatgtctag

SEQ ID NO: 30423 - DNA, 465 bp, Glycine max
  unsure at all n locations
aaattattttgcttgatcttaaagcaattcagcccggacccgcgagatcctatagaggacgacctgcgcgcgcgcacacnnttttttccanagcaccctctcgagaggagaagccaacttcttatcatagctccatactctaaatagatgggtgcctccgtctgatggcaaacctactcccatactcggctattggatataatgactcccaagtagagatgggacacagctagaacgagaatgccactaaggttctcatgagcccttacgagagatttcgggcccaagggctaagtatgagcccacttatctgtggccatacgagatcaagggttaaatatatctgggcctcggatttacggctacattatgtacgcaaggtaccccttgaaagtaagaaacctcaaccacttgatatacggcccctagaacagaggtccgatatgggtacaacgaacaatcccg

SEQ ID NO: 30424 - DNA, 484 bp, Glycine max
  unsure at all n locations
ggcgtttggcttttngttctaanctngttaanaacnangcggggacaaaggacagggccccgtcaacacatttgcttgttgtgcacncncaannnccgggaggggacgccgcgnacacacccncacacaccaagnaccancngcccgnnaagggcgncagcccacaaatccactgaaacaaagactcgagcggccatctcanggataccatgtgatatgagaaatgcctttttcgtgggtagtgttcctacgtaacagttgaacctagttctgcagccctccatatttaacacacttattgagaagatctaccgtctgctcatcgttgggaaaggatgataggagaagtcatcaattcacatcctgtaatctgatttgttaataaaactaataaattactatattctaactaatacaacaatattattcgagattatcatgcttctctcttgcggttcaatggcataaaatccgcttgctcccg

SEQ ID NO: 30425 - DNA, 324 bp, Glycine max
  unsure at all n locations
agctttttatctttcattggtgtanttttatccgcttttggtgctctaaattgtgggaatgtgctcanatatgtggtgcaattttggtttgttttcttgcttgattgggttgaattgngggtttgtatgagatggccctatgcctataatgcattttgaagcaatgggacatgccacattgtccccgttctcttgctattaatgcctaaacgcgcgcccaccaagtgttcggtgaaatgcctcaatggcattaacgcgtgattttcctanggaaacaacccatggggcattttggtttccacatattttctattttttgggaca

SEQ ID NO: 30426 - DNA, 369 bp, Glycine max
  unsure at all n locations
accccctgtgccctccgtttgatttaagccaagcccctacttttgaggggcaactcctaccttatgaagactatcccgggcaagacgatggngaaggagatacccatcttggccccctgctccacctcanagatccatccccgcatgaactaccccagctgaacatagtccgccatatcccggcctcatccgcacccgtaaaagaatctattccctttgcggaagataagggaaagattgaagcgctcgaagagaggttaagagcagtcgagggcctcggtaattacccattctcagatttggcagatntatgtcttatgcccaacatcgtcatcccttccaaattcaaagtactagactnntgatagt

SEQ ID NO: 30427 - DNA, 297 bp, Glycine max
  unsure at all n locations
agcttttagaggatgctttaatgaagganaagaaagagagatagtgggagcacgaaatggaaggaatataagagggagagaagtggaactttgaagtgtctcataagactttcattcatcaaagttacaacaagtgttacacatgcttctatttatagactangtagcttccttgagaagctntcttgagaaaacttcctttataagctaaagcttagctacacacacnccctcttaaagctaagctcaccttcttgagaagcttncttgagaaactagagcttagctacacacacc

SEQ ID NO: 30428 - DNA, 510 bp, Glycine max
  unsure at all n locations
nnntttacttttngcttgatantgcggccactctatagantaccctcgctnggtgaaatgccacattcatggtcattgtcggagnaaatgcatganttataaatcttggccatatgcncagacgcgtgtctcgtagaagcatatccattgggatataatgatgaaactatgtgcattnttcaggtagagaaagacggctagagttttgaattgccacaaagtagcaggttccggctaagcgcatatacatcactatgcgcgagatcagtgcgctaagcgcaggatgtgccttcagccaatgtaagctcgagactggcgctaagcccaatttcacttacttgcgctgagcgngagggtggcgcttagcgcagcgtcacgagttcagagcctatntaaagcctgtcttgtgcagaatagggtacacaccttttatgtcatcttctacacacttgtcacgacgaccagggcacagaattcatagcccgcatacggctatttggagaaaaagcg

SEQ ID NO: 30429 - DNA, 173 bp, Glycine max
agcttttgttagatgccccagctaccggaaaaagcggctttgacgactccaagagaggctatagagacattgaaaatccgacctctaatgctgatgaatttctaaatgatagaatcatggctccgtcttgaagactattgacagtccatactcaagatggtctcttagcccaa

SEQ ID NO: 30430 - DNA, 459 bp, Glycine max
  unsure at all n locations
nccttaccagggttagnagctgtgctgcgcctctatagantaccctgcctgagactggggcgaaggcccattgccgttaccncngcttattcacttttcggagaccaaaaccctattgagagtctatcttgtgcagaattagggaaccacctttaccacttttatgacaacttctacagacaaccagggcccagaagtttgaaagcagccaccggcctattgggggaaaagagccctagaagcagatatatgagcagcttgtgcattgaagcctacgttttgcattctgaaaaaatattggtagagaggactgtatatgctgataaaggaggggaatccccttcttggaaaggactatcatctttgttttatctattattgtaaggtttttgtatggtcgctaacaccctatgacgattgctatgacactaatgaaacctatatctatgatgggtcatg

SEQ ID NO: 30431 - DNA, 361 bp, Glycine max
  unsure at all n locations
agctgtgttactcccagaagactgnaagngtgctactggtgcaatttgttttaactgttaatcaatttgtgttttatgcgttgataaataaatataaataatggataacatttctcaatgatcttgtagtgcccttgttttgctgtgtagctttattatccactggctagtacaaaaacaccatcttgcatgcatgcttggatgggcgctggcaacattaattttataaacctatttctagttaaaattaattctaaagtgatatgatgtatatttaaatatttttattataaaactaagaagctaagtgtataaaactcaattaattctggacgtacacaatcaattttaaactctttta

SEQ ID NO: 30432 - DNA, 228 bp, Glycine max
  unsure at all n locations
tttttataaaaaaaaaaccggaaaaggaattataaaagggaaatgaaagatataaattaatagagaaagttggtggtttgccattagaattaaaagggaattttggagattntattttattttttggaatttgaaaaaattaaaaaacattgttaaaaaaaaaagttaacgaaatcaaatgataatatttacggagaggcaatgcgattttttgatatagccttatct

SEQ ID NO: 30433 - DNA, 403 bp, Glycine max
  unsure at all n locations
agggagtacgatgtatctccgnatttaaaagncccgggacttaagggacctctggaggcccgtttgatccanccgaaaaaacgggcgtgtatgagaaactcgacatacccacacggcaagcaaccatgaatggcaacatgggtcccagaatatacttgaaagccggtggatagagtccaccgcacatacagcccagggaagcttactaacaagccacgctatgacacgaagcaatggtatttatgacaaaacaccctgcctctactatgttagcgaaattcctgatgtccttatcgcaagatgatccgtaaggtacagcgcaagagacattaggtttcctaatacacaataagtgggagcgccctcaattcgtaagggagacagttggtggcacattatttcc

SEQ ID NO: 30434 - DNA, 490 bp, Glycine max
  unsure at all n locations
nttcttttnnggatccccnngntgcntcgngtnanttanacnaccncactcttgcgagcgagctgttgagacacacacaaccggttagtcagtttttgacaccccaggcgccaggaggagagcgcaacaccaaaggagacaagacacacncaggcccgacgaaggggaaggagatagcgctcgcggcacccgggtccacgagcacaaagagcggccgggcgaggagcacagaagaacagagccgcgccaaaactcgacgctccgcccccgaagaaaaatccatcgcgggagacacaccacagggagggactcacgcggatcgccagacgatagtaacaactgtgacgatcgccctaaccatgatgacaaacgtccccccgagatcaagtcccatcaccatcggaacgacaaggaatcagctgtgaacaactggacctacaaatggccgacatgaaacatacagctctatacgatgagagacacatgcggg

SEQ ID NO: 30435 - DNA, 238 bp, Glycine max
  unsure at all n locations
agcttttagccaaaatcctgactcaccataaaccttgacccagggtgagaatgtcaatccttaccctcggaagcgaanagaatagaagggaaatttccaatcaaagaaaaggaaagaaggaagatttccaatcaaagagaaagccaaaaaagaaaagattgaaaattcccaatcaaagagtgggagaaagcaaaaagataagaaagaaaattcccaatcaaagaatgggagaaagtaa

SEQ ID NO: 30436 - DNA, 220 bp, Glycine max
tgccaactcatatgagggataaacacataagatcagtcctgagaaaaaatgtatcattactgatacacaccaatccatgtcatgaaaagaaatgtatacggatatactatcaaatatgattgcatcccaatttatacaaatggttgtgtttcttttgatatatgaaagaaactttgatcacgctttctggatctacaatcagatggacggtataaactta

SEQ ID NO: 30437 - DNA, 316 bp, Glycine max
  unsure at all n locations
agcttgttattatccaaattctcagagatattactcaccatgagaatgagatcactnttaataacttcatcttggttaatttcaccatcaatttgtaatattgatcccataatatacttaaaaactggtggtatgatatccacccaacagtcacacaatgtttttttactagtaattctgtcaatgatatgagcaattnttcttattagaatagaccttgactctactattatagcgaaatttctgtaatttcttttcaaaatatgaacctaaattaaaagagaaagaaaaaataaatatatttattatacaaaaa

SEQ ID NO: 30438 - DNA, 424 bp, Glycine max
  unsure at all n locations
tgttcgcacatcgttcgcgtgtatgatattcactccacaattttttaatataagaaaaccttcaatcctataacgcacgtggcgacaaaatgggcataactgaatggcattattgcaatgcggaaggtattctgcgcttcactatccatgttcacacattatngcagcttgtggttacgtgagcatgaactactaccaatatatagatgttgtttacacgaatgagcacatcttaaaagcatactccgcacagtggtggcctcttgggaatgaagcggcaattcctccttctgatgaggcatggacattaatccctgacccaactacaattcgtgcaaaaggtcggccaaaatcaacaaggataaggaatgagatggattgngtcgaaccatctgaccaccgacanaaatgtagtagatgtgga

SEQ ID NO: 30439 - DNA, 350 bp, Glycine max
  unsure at all n locations
accttatctaggttggacctcggctggagttgaatacgtaaggctggagtttggctcattgcctgtcataggtttttnttaaagctcggctcggtttacataaaagtctggctttgcccacgagcctatttaaaaacttgcttaaagacgtctttgattaattaattattttaaaatctagtgaaatactaacttaaaaaagaaacttataaaatttcgtataagcaatgtacaaattcaaaaataattggataacaaaatcatattgaattcaagtcgttaaagtacaaagtatatcaaaagaaaataaaaagagcataatattaaaaaatgtatggattagagatgat

SEQ ID NO: 30440 - DNA, 233 bp, Glycine max
gactgatcgttgccctttctctgcgctaaacaaacagagaacgtcgctgcaagacagccccgtatcctttgtattcgcaggtttcttttactaatttgttggcttaaaaagaaaattataataaataataagtcgacgcctaaattctaacttaagtaagttcaagttaggcaagacgctaacccatgagaaaggaggggacatggttaatgttccccttcagaaaaaaaaat

SEQ ID NO: 30441 - DNA, 286 bp, Glycine max
  unsure at all n locations
aataactattttaaaatgataatttagacaaaaaattaacaaaatcatttggattatctcccaatctcacctaatacatacttcaggcggtagctgcgttgggatggactgtgaatatatagtccgtgcctgcgtaaataagattgcccgtggccttcctttagctacgggcganacagttttatggtgttaacctttctattatcccatcccaaatgcttagacatttaagacaagccgatctacatattaggaaaataacaaatgtcatcatcataaaaaaaaa

SEQ ID NO: 30442 - DNA, 439 bp, Glycine max
  unsure at all n locations
nggagtgtgttcatgagaacgcacccaanaaactcagcctngctgtgagtccccagaagatttaattggcgaccatttattatttttaaaggaccataaaaaatgtaggagtctatctttcaatcttctctcaacatcattcaatatctttcaactgtttctacaaaaatatcttgaatcattcctcttcatcttccaaaaagtcttggttcaacactttcttttccaaaacaagtctttgtcaaaaactcgtgctatcatattttcattctcgtcttctttcccaaagacaaagactaaccgctgattctttgtgctctctcttcttacaaagatcaaggacaaccgctgaaatctttgttcttccttccctagcaaagattcaaagctaaccgctgaatactttgttcccttacaagattcaaggataccgctgaaa

SEQ ID NO: 30443 - DNA, 365 bp, Glycine max
  unsure at all n locations
agctttgttcttgacanaaaataacattttgaatggtgttaatatatataccagtttactaatgtatatatacttgttttttttaatatgagtacgttaacaaattatacctagatattatcttacaataaaccaataatataacttattaacacacttaaaatacaccaataatatacctagatattttaattaatatataaatagagttatattattattattaataaatactccaatatttctatgataaaagcacatgcactttgataatgaaaaattacctttcttataaaatatgatggttctatgaatctagcatactatgaataatatataaagttttttaattcataaatatcaaa

SEQ ID NO: 30444 - DNA, 442 bp, Glycine max
  unsure at all n locations
aacatctggaccttaggtgccatttttagagtaaaattttaagttaattttgggggatnaaaaccattcttagagtccaaattaaaaattaaaaattcaaatcacaatttgtggttgtacacaaccaccacacacgttccagggcaaaaaattcaaatggaggccccatttgtggcttaaacaacgggtgtgcgtggcaaattcaatggtatcactgacaacccatcatagtcccccacgcatcttcaagagctttcaatanggacanatttangctccaaattgcaagtccacccccgcaaagccctcaccctacaccctcacagatctggttgtcgatgtagaggcatccatcggaggaaaggcagtggtgcacaatgtcanggttgagccaataaaggatgtggaaggccgacttgatgaagaggaagtcatcgtcaat

SEQ ID NO: 30445 - DNA, 222 bp, Glycine max
agcttttaattttaatacggacatcaaaacagagcagtgcattaccaatttaagtactacccaccaccaagcaaagctatgttgaagatatacttttgtaactacataatattttattttttcagtttttacaataggatttagtaaataagttggtgtcctatattttaagagtaagtcagttctaatggattagcttagtcaaaaagtggttcctatctt

SEQ ID NO: 30446 - DNA, 209 bp, Glycine max
ggcccgctatgtaactaggttctatctactgcaactgctattatcccaaatctttattggattttatataagcaaatgaagtgtgaggaaaagtaaaaattggatcataaagaagaaaaaattgtgaattagttgtacatacttttgaattttgcactatttacgagtacttaaagacaatattacttatataatgattatctaaacag

SEQ ID NO: 30447 - DNA, 179 bp, Glycine max
ctgagtaggctgctgtatgagatctctcagaaggactgaatgcttgggcacagaatctactacccatagtcttgggcaaagtggaaacccccaatccacggatttggatatgcagcttagtggacaaggatagacaatatagctactttcttttttaatatacctatgtcattattgct

SEQ ID NO: 30448 - DNA, 493 bp, Glycine max
  unsure at all n locations
naacaggaattttagtnantgcgaactatagaaacacaacccggggggatatcactcgcgggtacgaacgaaccgcagcgatttgctattcattcgccacccactgacgagagcgggttgatgaggccaaaagcctgagagctacggagcggcccctgccgtagacacagaaagcaacccttggagttgctgatgctgagacaagagcagcaactcccacgtcactggaagcagcactcgagcctctaaactcagcatgaccagacaaaacgacgcgcgtcaagaccaggagaagagaacctggagcagtgtcatcctcagtgagacaagacgaaggggaggtgctgcccgttataagagcacgagatgcctaacgaaacgagacattagaagccacaatgccgacagcgggggaatgatattcatgtgccaagaccaagttcggagtcaacatgtctggatggaccagctacgagataacttccctccgcgn

SEQ ID NO: 30449 - DNA, 303 bp, Glycine max
  unsure at all n locations
agcttatatgaacaaaattgccttaatcattccaaatatgcatgtgaattangacgcatcaacaagaatcaagccaaggctattgtgcaagcaatcaatggggcaaaacacacccaatgattataatgatggatggctcanattctcacaaaggtaaaatcatcactttcaaattgagctttcaaaactatcatgacatgtagagaagaatcaaggatttcaagtcacaaaatgtcaagaacttttattttcaaaacaattacccatttcttgaacatatcctataattcaaagaaaaacatg

SEQ ID NO: 30450 - DNA, 134 bp, Glycine max
  unsure at all n locations
ntgtcctcagatcccattggtgggactaggctcaatttagtcggttctcctatgnttagactaacttanactaagcttcatcctcagatcccatttgttggactagacttagcttaaatagcttatgaaatttt

SEQ ID NO: 30451 - DNA, 244 bp, Glycine max
  unsure at all n locations
agctngtgaaccgatatatcgataatattttagatcgaaagatccttccggaaaggaatgtaaaactttatcattctgaatttgacgagtttaaaatagaattagagaggcgaaacctgcacaaacgtctcgccaaccttcaggaaggaagcatagatgtggcagtggttaaggaattttatgccaatttctatagtccagcaaatcaagctcctanatatgctaaaacaagaagccatttaat

SEQ ID NO: 30452 - DNA, 432 bp, Glycine max
  unsure at all n locations
ggctcaactacaaccttatcgaggccctcaaacactattcgtgnctcccacttccagctntgtttactattccatcgaccgacagaaccaaggggatgaactccaatcttcggtcgacggaggagtgagctctacaacanagtcaatgagcacctagtccttgatggcacctcttttttcaaagatgatgccatacttggacaattcgatcaaccacttcaccatccttcctcccaaatagggtttttacagaatttttcagattggctgatccatttggatgactactgggaaactctaaaagtaatgttgcaatctctggacgtgattagcattgccaagaccattntgtctaactcttgataatgcgactcaacaccccacaaaacatggctgatgaagatgttgaagaaatagagcagcacactcagt

SEQ ID NO: 30453 - DNA, 240 bp, Glycine max
  unsure at all n locations
agctttttttaccatgagattgtttgaggccttatgtttttcttgatcttgtntacttgaccttaaatacatgttgaagcaatgcttaacctttgaatgtatggtgaactaaccttgtattaatcttaaagcaatgcttaacctttgaatgcttgttgaaccaaccttgtatgaacctacattggcatcatcagaaccctgtatacatacattcacaataggtacccgactacgtgtatt

SEQ ID NO: 30454 - DNA, 426 bp, Glycine max
  unsure at all n locations
gggccgctgccattacgacnacnncncctatnganacncaagccancngcacaaagggcacggatggcacccaagggaatgattaattcagcccccaaaccaaacngaggggacaacacaannacaaaacaaggaccacatgccccgcacgcaaacaaagacagcgcctacgcaaagaaaatagcccgccacggaaagagagacacacaatgcgctggcagagccaggaggcaaggaccaaccaccgaccccccgccactagaccaaaaatatcaagggcacaagcaaggccggccacgaagaacgccccggataacgccccgctcgaggcacaggagcccaagaaaacagctacaaccaaacgcgggctccttggcctaagaggccaaagaagaagccccgccaaaaaccaggacacgctcgacn

SEQ ID NO: 30455 - DNA, 376 bp, Glycine max
  unsure at all n locations
agcttttattgttcaatttcgagtgtctcgatagaggatgcccctgaatcggacctccgaatgaaaagttatgaccatttgaatttctcgagagctacctttgttcaatntcgtgcgtctcgatatattatgcgcctgaatcggacctccgagtgaaaagttatgaccatttgaatttctcgagagcttccgatgttcaatttcgagcgtcttgatatactatgcgactgaatctaacctccgtgtgaaaagttatgaccatttgaatttctcgagagcctccggtgttcaattttgagcggctctaactgtgatgcgcctgaatcagacatccgagtgaaaagtatggaccattgatttctcgagagctcccgtg

SEQ ID NO: 30456 - DNA, 349 bp, Glycine max
  unsure at all n locations
tccttgtgttcggactctcagccacttatgatagccgtcgatgatcccattactgcttcccctaagctctctgtcctttcttcacgccgcatcccatgccttgcgaactccttggagtaccctcgcgttgtggtcactganaccccgtgcgatgaaaggcgtgatgctttcgtctaatggcgctcctctcatggggtagccaagctgtcttatggcgagaacgggattataattaatacaaccccttgttcccatcaagggaacatttggacatccttcgcatgaagatagaatcttgattcttccttccttctagcgagggaaccaattaacagaacgccccccatgc

SEQ ID NO: 30457 - DNA, 206 bp, Glycine max
  unsure at all n locations
agttttattttctgattgnggacctgtggtttgtgcaagcgcgtcaaaagtctacgcaccttgaaatggtcttgatggatgcaaaggtatgttgcgatttagcttttgctttgtttaataatgagatacggattatgctctgctttgctgattgggtgttttgatcccctatattgagttgtaatttatgggatttggttaatcat

SEQ ID NO: 30458 - DNA, 510 bp, Glycine max
  unsure at all n locations
nnggggcggagggaganannnnnnnnggatccccnnngnatnanactnngnanaananncnnacnnanccnntnanattgcnacatgnngaggttaggacacagtttgcatancttaatatcgcgnangcaaactgggagtctggtgcatactgaaagcccatgaggcccactaaacaaatctaagatagctgatgaatgtgtatactaatgaatccaacgctgggacgtcagatgacaatggatacacgatggtcagaaagacaaaatttggccacatatatgttaagaccatgtcctgcgcacaccctattgaagaggaggttacaagactgcgatcttcaggttctaaggcaagaacgcatttcccagagccatacatacctaaacaggctctcctatggatgatcctaccatgagcctgcggaatttgagcacaganagacacattcatcacaatacacgcactctgttagattttaaagtggtgcgaccttcgttcattgaaatg

SEQ ID NO: 30459 - DNA, 493 bp, Glycine max
  unsure at all n locations
gaagttccttgattcccaattgtanctccgggntaaagagatttgagaaggtttgtgatttgaacacaangccacggggggttttatataattatcacctcactttaatgctgctatgctcataagtaattgatatgttcaacgttataattgtatacgttgttcatacgttacatctctagtgtatcaaccgcctcgttgataatattagagcatggatgattggtatattgctgttatatatattgctttaccgcttttcggtgtcatggctaaattattacctttcgttgctaaatgcgtaatccgtacagacgatgatctacctctaatgctattatcatgactcgtaactaatattatgaatactatatctcttcgtgtttttcatagatgttcattcattacttacagtacttctcgtcttacaatacgaatttatagccgtactcgtgtttatagtatagtttatacacttctactcatctactcg

SEQ ID NO: 30460 - DNA, 389 bp, Glycine max
  unsure at all n locations
ggggcgtgaatcatgacatggacnccncnnnnntaganaaanccccggagnangaacgaaagaggggggacgaaggatatttcccccccacgccaaacggggggggagggaaaccaaaccaccccacgacaaacacgcgcagacaagacggaaccagaaaaaaaagagaacggggcgaaccagccgacgcacccagcgaagcgccaaaagacaaacgcgaggcccgcacaaagagacgcagcagacccagggggcgcacaggaagaggggcacaacaagagcaaaacccagcacaccggagaccggagcccacgaaaaggccgggacaacgcagcgaaccacgcccacgaagacagcacaagacgccgcacaggaagcgcaagcaggcg

SEQ ID NO: 30461 - DNA, 297 bp, Glycine max
  unsure at all n locations
ctcatcttgggggagaagctgcttctttcatggcttattccttaatggatggcgcctnctctcacctnctttcctttgtcttccgctgcatcttcatggtggaaaatcaccattaaaggaccccattgaagctcaaagatccagcctccatataagctccacaagcaagcttccatcaagtggtaatcagagcacaagagcttcaagtaggtgctccttaaacctccattaatttnttttctttaccttctcttccattgttggttcttcatttttatccatgtatctcctcacatg

SEQ ID NO: 30462 - DNA, 438 bp, Glycine max
  unsure at all n locations
cggcgcaagcgctgagacctctgactagnggcngatagtttattttatcgcacatcactacgctgggcgcatcatctttactggaagtaaacttcaagcagtgggcttagtggagatgattgttagtcaatgaatacgactaacttttgtgtaagatatctgtgaaaattgtatctaactcctcccatttatggttatttggtagtgttgtaattaccttttgttaaatataggtcataagtacttagtactcccattttgtgtatttaataatcatttcctttcaatttcaggttaattaggcaagtttgtgaagtgctgaatttgatatgctcgctaagccaatctgtcggcttagcgagccatcccctgagcgcaccacatttgtggattatcgctagacagaatcttgaagaaggatgagcttgaccactcgct

SEQ ID NO: 30463 - DNA, 216 bp, Glycine max
atacacttccttcaaagtgaagtgtgtagcctttctccatcatttggccaatgcttagaagattttcttttaggttggaaactagtaagacaacatggatgaatcgcttacctttatctgtctccaccgttacagtgcctatgcctattgattctaccacactttcattttccagtcgaacttttacttttgacaacttggcaatgcctttgaaaa

SEQ ID NO: 30464 - DNA, 477 bp, Glycine max
  unsure at all n locations
ggcagaatgatccgtcagatcnancnannnnanaannnacctnccgtagtccttcatcttgttttaaaacacgaaaggagggtanttttattttgatnctanggncggaagtgagggagagaagcttaataaagttacttgacaagagaggcttattaaagtggaatttcaaaattgattcgaaaaaccacacctggctttcaccaaccttaagttattccttgacaatagatgctgtgaaatatcatattgttcgcgaatttcaggaaaccctaattgtttcaaaaaggcgaaaactgccattaaactactaaagaacatgaaaggccttgaggaaatgttcacatttcaaaaagcgacccttatggagggtttcaacatatattgaaatttgatactgaggacaatgtctcaggaggtacgaatccgcttagacatgcgaatgttatgaagttgagcgataaacagtaatacacc

SEQ ID NO: 30465 - DNA, 446 bp, Glycine max
  unsure at all n locations
aggacgtcgatcacttgtatnacccccaatnttaggataatcnccgggatcctatatagtcgaccatgaaggaggcaagcgttttgttctctttatctaacactaatcctaacgggggcttaaatcccttaaattcctaagctacagctaagtcttctacccaaaagttaagatagaaaaagagaaaaaggatcaaggaacttacttggaccgtgtatgaacgatgcttcaaagtccaaaaaggcccaaagagagttcaaatgcatgatgtgcaaatttctttggagagaaagaatgcacatgcgaagtttctgtactataacaaatttgagaggaactggtggttcactcactttaacacgttggaactttccgttaacgggacatttcgctaatgagcaaaaaatactattggttctaaaccaacttgcttacgaacagggctn

SEQ ID NO: 30466 - DNA, 254 bp, Glycine max
catatgctgacaatagccgagaaacccatgaatctcttctggggcggagaaggtgtctgccatcgccttggccttggctaacaatcggggaagttcttgactcccgttcaatgaaaagcacaccgatccatccacatggttgcctctttgtgtaaagagtcgatccccctcctctaccctcttttccgctatacttgtgcatattcgtccgcatcctatgctcgtggcccgcggtagaccctactctctggtac

SEQ ID NO: 30467 - DNA, 286 bp, Glycine max
aaatcctgactcaccataaaccttgacccagggtgagaatgtcaatccttaccctcggaagcaaaaaaaagaatagaagggaaatttccaatcaaagaaaaagagaaggaaaatttccaatgaaagcaaactaaagaatagaaggaaaattccccaatcaaagagtgggagaaagcacaaagaaaagaaaggaaattcccaatcaaagaatgggaaaaagtttaaaaggaagaagaataaggaaagaaagctcctgatcatggatcgaaggaaaaacagaaaaaat

SEQ ID NO: 30468 - DNA, 487 bp, Glycine max
  unsure at all n locations
agaagtttagttcatgnagacgncacactatananactaagcttctacctcgaaggnccaatccagccgcatataatatcgagaaccttctaaattaaccaacggaagctctcgagagatcagatggcatanactttacctcggaggtcgattcaggcgcataatatttcagaccctaaattgaacaaggaaagctctcaaaaattccaaatggtcataacttttcacacggatgtctgattcaagcgcataatatatcgagacgctccaaatttaacaacgcgaagctcctcgagaaataccaatggtcataacttttcactgggatgtccgattcacgcgcataatacattgagacgcctcaaattgaacaacggaagctctccaaaaattcaaaggtcataacttttcactcggatgtccgattcacgcgcatcatatatcgagacgctccgaaatgaccacggagcctctcgagatattcaat

SEQ ID NO: 30469 - DNA, 386 bp, Glycine max
  unsure at all n locations
tantgcacaaccncaagcgncgcccaagggcggggctttcagaancaggacctcccttccaatatgaccaggaccagagccattaccttcgagatgacaattggacttgctcatttcccttcagagaaattgaacccacttataattgaccacagatgatacattgagaagtcattagaatgggaataagcactgcataataaaacttcacactagtattttgggacataaagcacaggcatacatatgattaattcagataacatccaatgtttattgatgtcctcctttgggtgatcacccacacacaacatatgaacatgatgatgctaataaaaatcttgacattatgtgggcaattaatatgccctaactgtaggtgctan

SEQ ID NO: 30470 - DNA, 490 bp, Glycine max
  unsure at all n locations
gcgatgctatttctttatnnctnncannnanaganacncngcgcagaccaggcaggngggaataacgagccacccccatgatttagttccacgcccccannaaaaaaaggcgcgggagaccacggggacacccacacaaagacccccaangggacacactaccnggaaagacgccncggacccgccaaagaacccaacangggaggacacncacgcaagcgggagccaagaaacaagcgcgggaaaaagcgcgcgaccaacaaagcggcaagaacnggcgcgccaacgcacaggaaggccaccgaaacaganacgggatcaaagggaaacngacagcccgaaggaccaaccacacagaagacggcgangncaacgnganccacgagagggaggccactccagncgccccgcacacagagaaaagacaacgccgacaacgacggcgaggangaagcccattcccccgcacagcaagccgggaagacgagcg

SEQ ID NO: 30471 - DNA, 347 bp, Glycine max
agctttatgccctcaagcagcgcttttcacatgctgcaccattgttccgtgatagcatgcacactttccgcaccaactttttcaatgttattgagtataagtagcatcccatctgtttttttttcatgatgtcaatgaaatgaatatgcatggcatattgacatcagctaatttataggctcaaagaaagtaggaggaggaaaaccaatcaataaatcatttttggaaggctgaatttcacccaaagaaggacctattgttattattaaaaacagaccagaccttactcacttgccaaagctagctcaattgacatcttaatacaccccctaacccaaaatggacat

SEQ ID NO: 30472 - DNA, 483 bp, Glycine max
  unsure at all n locations
nggacttaggggcttgatntctannnatnganannnacnaccgtngaatatntggataattctgacaggacacgatttattatattgcgactaatgatnanaggagagcgacccaatgagaagccgacactgacggaaaatcagaggaagtccctaattaaacctaaaacaaggaaacaagtgagcaagtctttttttcttagtgtgagggatcaacacgcaacnttttctcttatatatgtctttcttaacccctcaacaaattgtatatcttttaggttattgaaaattgtaatagaacattaagagtatattgtttttacaaaatagaaaaatatattttagcttgcataaataatgggaaactttatagtaaaaatataatactttgaggatataaattctggtggaactctatatatatatatatatatctatatgtatatatagatatatgtatatatatatatatgtatctatatt

SEQ ID NO: 30473 - DNA, 367 bp, Glycine max
  unsure at all n locations
agctttgtgtaatcgattaaacatatttggtaatcgattaccagtgtttgtttctgaaaaatctaaagatgtaactcttcanaaaggttttgactttntcaaatgggttttaagtttttctaaaaagttataactcttctgaatggtcttcttgatcagacatgaagagtctataaaagcaaggctntgttttgcattttgaatcaatcatttttccaatctttctaacaaactcatacaatcttttacaagccttgaatctcttgaaatttctttgaacttcttcttcttctttgtaccaaaaactttctgaagttttctggttttccaaaccttgaaaacttgtgctattcattcttttcattct

SEQ ID NO: 30474 - DNA, 346 bp, Glycine max
  unsure at all n locations
gggtannaacgaaatgttgtcaaatacaataaaagtataatttgtttatattntnncctanacaatggaggatgtcttcaagcgtgatccgtgtgccgccttcatcgtgacctgacataaacattgcactctacattgacacccctagtgatccttaaccagtcttgcatgacatcgtgtgctttcgtgccttcagtcactatcctgaggttgagcaaccactccaacctttctgtaattgcttggcaagcctcctatgacattgacaacaacagataaggtattaccatattgcataattaaattaaatgaaattaaaaagtacatgaatttatatgttaccact

SEQ ID NO: 30475 - DNA, 318 bp, Glycine max
aggctgcgactttggtgacccaaacacgctatgggggggagctctcctctaacttgcgccacttgtttcatcgctaataatcaataagaatctcatcacttaattatttaacgtccctgagcattaaaaatattccgaaacattgaattacgctctttttataatcatctctttaaaaactttggaacttagagacagatttaaaataaaattggaaacctgaaaatatttttattactgaattttactactaaattttaaaggtttttttacaaatcaattccatttctaaacatatgttgaaacgatcaattaaat

SEQ ID NO: 30476 - DNA, 374 bp, Glycine max
  unsure at all n locations
gggtcacccacgacccccannataaaccaccgaccgaaacgagcgagagaaggaagcatatttatcgagccagcccaccagcgagggggggccaggaaacaggacccacaccccgangcggaaagaaccaccgcagaacgcaacagaaagaacgcgcggcaccaagaacacgcagaaacacccgggaaagaccaccgcacncgacggaagccaaagacaccaacccccccaaagaaaaggaacccaancccgaacggccaccgacgaaaacaagagaccaccccacacaaaggccacggagaaggcggggaaaacaaaccaagagacgagcgcccacggacggaaaaagaccgccacggaaacagcaggggacg

SEQ ID NO: 30477 - DNA, 250 bp, Glycine max
  unsure at all n locations
agctngtgngggtcgtgggcagactcaaaaataatggaatgtgtagtggctttgtcccatacctccattgcagatcagttgtgcctgagcttgcttccctatgtttattaattttgttcatgtttatgaaggaatcgaaactttctgccgaggaccataacgttaaaaaattatgcatatatgaaccaaaataaatgtttaaaactatagggactataaagaaaaattatcacaactatcaggacttaaa

SEQ ID NO: 30478 - DNA, 441 bp, Glycine max
  unsure at all n locations
agggagaccatttcatgcgatcgtacnnacnnnttagaatagccttcctactaccagctaataattaacgatgcactaagaccattctttacttcttaangcgngnangaatcgaggatcagtatactaagccagactacaatgtaacctggctattattcatactgtggttctaaaaaaagaaagaagagtagatcgccttgcttcatataaaagaaagtacaaagaacactgtcctctgtatttgtgtttttcaatacaaaagaagaagataccctgagaaaactgatcctcctcagtcaccttttttctaccacattaattaattggagcaacaagctgatttcttctccacacaaacagaccactcccctcagggattatgtttacccccacaacataatgcactgcagttaataggggacataataatgtttttct

SEQ ID NO: 30479 - DNA, 289 bp, Glycine max
atggcatgatgcagatatcaccacgtactcaactctgataaggacacttaattgtgcctcttcatgccttagtttgatgcacttggcaataccctcaacaatattcatggaaatcacacaaaggactaagttcaagcctaataatcacttcatgcaatattcttttatccattttgacttcaatgctttatgggaacccaacatcattacatcaccaatagcattccacaagaaaccgcattctaaggtttgatgtaaaataaaaatctaccaataccattcaatttgc

SEQ ID NO: 30480 - DNA, 461 bp, Glycine max
  unsure at all n locations
nccgggggaattttgnanggattncnnataggnacnncggnganaaaacnatgaagccaaagattaattttttctnancaaanccnnaggggcgggttcagaattaggctgcatactataaaagtatnccccataccgaataatcaaaaataccctcatacctttgagatttaaagcaaacctcttaaaaagtattcaggtatccggctatgccaaatccttgaatgcttagaatccttangcctataaagcctctcaaaagtattcacgtatttgactaggtcgaatacctgagcactcaaatcattaggcttataaagcctctcaaaaaggattcaagatatgggtaagctgaatacctaaactcttagactccttagtcttataaagccctaaaaaatatcatggattcgactaagccgaatagctgacactcanaatcttaggcattatgtcctcat

SEQ ID NO: 30481 - DNA, 240 bp, Glycine max
tgttttacttgagaataaatcacttaatcatatgagtgcttgagctattgcctatctgctctccgactttggcatgaacaaaaagccgagtgcgtaagacatacatgatttagaaaaaaatcgtccacatagcgtccattgtgcaatcagtcataaaagcatctggactaatcatgaagcaggacatgagtaaaccactttaaaatataaaccactactcgtatgacataactcataaat

SEQ ID NO: 30482 - DNA, 461 bp, Glycine max
  unsure at all n locations
gggactaggtagacatcgaancgnnaanttagatacnatcctatgactngacactcagcagagcaagctttgatcatttccttaacacngncaaaggagagagggagcaataatgaaaaaaacatgacacttgggtccaatgatgcacaacctcacaagtacagggatcagctcaggcatgacacatcaaaggaagcacatccactcagacacacagataagccccccaaatgaaccgcggggttactcccactcgcattcagaaatcacaacaagcacgaaacactaaggtcaaataggctgaaacctgaatgggctggccacacatctgtgcttttctagacatataaaacactcaatgatcaacgagagcaagaaaatgcagttgacataacgggcacttatacctccaaaccattttgtaacaagttccctagagatgaattgacccatcatattcg

SEQ ID NO: 30483 - DNA, 201 bp, Glycine max
  unsure at all n locations
agttttgatttccttttagnagggaannnatgcggggctaagttggagccaaacccagtttccctcattaagaactagctcatttcttcctctattgcctttaattgaatacacctttgtttggttctctatttggttcttaaccctctcatgcaacttctttacaaactctgacctagatttcccttctttatgtataaa

SEQ ID NO: 30484 - DNA, 233 bp, Glycine max
atgctttgctatcacttggccacctcgtaccatatatgcttacttttggtttaacataactgacacaatgtcacttacttcactaacctgaagccaagctgaattatggagaagggaggaaaaataatcactcaaaatggttcaaaaaaacaatgaccaatatggaacattcatgaaatgaatgctagtgaaagagatgtctataactcaacaatagagaaagtgaagatact

SEQ ID NO: 30485 - DNA, 374 bp, Glycine max
  unsure at all n locations
ttccagccttttatgccanggttttaatccgaagtccaaacacttccttgtgctttttgacctttgtgaaagtgacctttccagggatattccacggaggcccttctaggctcttctatattggacttttcttgaattcaaatgttagttattcanacgtaatagagacaaatggaatttgaataanacagtacatgtgcactttccttttctgtgatacccagtccttgagagactagacacatgaatttatcgtatgacagtgtgttatatttgtatgaacaagactagatgcttactaaataaagagagctgaacactagattaanatagagcatactctatctagttgtgggcgatattcctttaacata

SEQ ID NO: 30486 - DNA, 399 bp, Glycine max
  unsure at all n locations
tttaaaactagtcactnaaaattttattatttttgaaagaatcttcaaaaacaagtcacttgaaaattgtgactttggaaagtattttcaaatcagcactggtatcgattacccttaaggtgtaatcgataacacatcaacagatgtgaacttcattttgaattnttgaaaatcttaaacatttaaaacactgggtaatcgattacatgattatgggaactgattacagctttgaaatagtttaaaaaaatgctggtactggaatcgatactactttggtatcataccaagagaacacttggtaaaattgggaaacttatgtctactaatgtttgaaaaagtnttagtacttatcttgattgaagcttctcttgattcttgaatcttgagtcttgaatc

SEQ ID NO: 30487 - DNA, 347 bp, Glycine max
  unsure at all n locations
agctaattaatgctaaccactaccattgcacatgtctcttaaaccgtgggggaaacacatgaaattccccaccacaatctacccgacttcgacccttgcctcggatatgccactgaagggcaagcagttggtggtatacccctgcaaaacacttttgagggcccctcagtatcacccaaaactacacctcttgcattccacaacaagtaaaaaccctcatgctatggtagaaatgggaaagttggatcatctagaggaaaggctcanggccattgaaggaggtgaagattatgcctttgctaacctagaagagttgttcctagtacccaatatcatcaccccttcca

SEQ ID NO: 30488 - DNA, 489 bp, Glycine max
  unsure at all n locations
nnncggttctaatactangtnatctancatanaaacacaagcccgccttggttanacatgaatgggacctgaattgggaacttgattatatatttcggccaaaanggaaggagggaaaaagtggttttcaaaatctgcactttatgccgaattttgcttgtgaaatgtgccgcagaattttgtattagtgccaaaaaatgcttggtgattgctggatgtgaaaaggggtatacctatgggggtctggacatttgcctaccgaatccaacgggtaaaaatgagacttatgtactagagacttccaagtaaattttcgagtcgatccaaccgtttacgaattggaacgaaggaaatgttactggtgtatttgtatgtgaaaagctgtgattttgagttgtgttttgggtagagttttctgcctttgccctattttgcttgttttggtagtctatgatgattggatgtgggaatacctcgatgttgtggaag

SEQ ID NO: 30489 - DNA, 368 bp, Glycine max
  unsure at all n locations
ggagacgacccgaacacagcataaaaccggccccgggacccataaggggccccagggcgcccccccttttgccgaaacccccacaccnccgaagggggggacgaaacacnagcgaaacaccccncccacacaccccacggaagacaacaacaccccagcgcacaccnaacgaggaacaaaagcaggccacccacaggcgagggcaacccacacacgccaagaccgccgaagcgcccaacagaaccaaccaaggcacgacgagaaaggaaaaaaaagcaaccacccaccggaaacaaaagccaacccgggaccagcaagcaaggaaccccacccgccagccaaacagaagaacngcaacacgaaccacc

SEQ ID NO: 30490 - DNA, 412 bp, Glycine max
  unsure at all n locations
aatttttttttttattcanncnnanaanaacaagggcccnngnnggaggaagcagaaacgnattttttttttggacccgaaacacgggaggggggggaacggaagcacccccctccccggccnnggaacccccacaatacaccaggccatagaaaccccccggtggaaaagcaaatgtctaaaacaaaaatagctttagtcaaaacggaggaaatcgcccctcgaaaaatgagcaactgatagaaggagtttccttccaatcaaagtatttcaagcagttgaggcctgctaacataataacctttaacttgaacgcactgctaggttagcgccccctcctgtacagggtacaagaggttggctcttccctatagcatatcgatcctctatattgtttgacagtaactaagtt

SEQ ID NO: 30491 - DNA, 347 bp, Glycine max
  unsure at all n locations
gtgctattgagatgggtttaaactttacttcaccagagaagcctaaatgagccttgaaggataacctagtccaaggtcaccagatggaagcttaatagaggagcatgatcgttgattgatgtaagaaagaaggctncttatacatcatgtanggaaagatatgcaaaggggagacgaattntgctcaagatgcccccaaagaattgtgacacaagagatngngtcacatgagtatgaaaggttngggagttctagcaaatgatcactttccanacatanangagcagccacttgaatcctacaaagattgtcttcangtaaacgatcagggtgttttcaaaaattgt

SEQ ID NO: 30492 - DNA, 395 bp, Glycine max
  unsure at all n locations
cccaaagctacatctccaanaaaaacnccacggggcccaaaaaagaacaaaacagntttttaccaggcgggaaggaacacgggggggggtcgaagaaatatccacacctctccatatccgcaaaacaaaaaaaaagaaggctgaataacaaaccctggccaataactaaaaacacgaaaagaaaacccagccgaagcaataaaaggacacatgacacacgatcaactaaaaaaagcaaagaccatacaggtcacaaaaacctatggtccatcaggcgtgaatacccaacaaattaacccaatcagagacacaacccccaaaagtccgaagtagagcaaaagaaagacctggccagagaagttataggaactaatcaaaaattgggcagacctacg

SEQ ID NO: 30493 - DNA, 337 bp, Glycine max
  unsure at all n locations
acctnttttgccaatgngctactttcgccaggaaggcatggacaatcgcaacttgtgcaacatgtaaaacacanatgggatggctttttacagccaggaacaaacaactgaaacccagctatttcttgcggattccgagctgtcaacttgcaaaggaaatacgccaaaacctttagtttgatatgtatgcagtcatctatccaaagcttagtgaaagccatgttcaagtaacactgcatggttatgtatataatgcaactttcttgtagcacttcgcatgttggtatacttatattaataaaatatgttgcaacagcttggaagaaattaagtcaca

SEQ ID NO: 30494 - DNA, 451 bp, Glycine max
  unsure at all n locations
ccgggggattcccgagatnccnnataanaccngcagagcgaactaggcattgcgcccaccttacttttacccccgcccacaaaagcggggaattttcatcaactactccccctcctggagcacgtacaccaagcacccattgttccacacctaacgtccataacgtaaggatttcggagacgaacgttctaatattactgtctcttctcacatactcattgaagtgaatccagtcgatgatttccttcaccacgaactgcatgacgntttccatgcacatcccttcggaccaaacaccagtttgtaccctttcgacacaacctatacttctttaacccgtttcagagcatcgcctacattgagcaaccttgggctctgaagtaaaaaaattcacttgcaacgttcgtgtttgttttcactcttggacactcgagaagacttcctctcgaag

SEQ ID NO: 30495 - DNA, 497 bp, Glycine max
  unsure at all n locations
ttttnttcccggtttcgnttagcttnctntagngcgattnncgagactcngcccngnccggggtatctctttnagagcgacactctgcagcgctgtcgcacncnntttgnggataanggacgannacacgaacacngcgcgggaggactgtttgtcatgatatggaatacagcatctattcagcatcctgccattctctctatgcgcgtgattcgcagcctgtacatgggatctctcatatacaaggcattgcgacactttctacttgtgaagcccactatgtagctgcaccttcttgcacatgtcatgtcacttcgctaagacgattgttggatgaacttcccttcccgcgcaaagaaagcacaatgatctattttgatgatagatctgcacaacatctttccaagaaatcagtgttcccttaactaactaagcctatcgataccaggtatcattttcatacaccatgccattcccaaagagatagactattgacn

SEQ ID NO: 30496 - DNA, 422 bp, Glycine max
  unsure at all n locations
ntcattatcgattgttatctaacatnaanaaaaccngcncggaacggacctaccgaaaagagagcaattgaatcagacgacaacnggacaaggcagcgagagagcagnngaacccacccccgcaaanggggccngcaaacccgcgcnaggaaggaagaagctcccacnagcaccggaaaaaagacccaagacaannnagagggaaagaaaaangaaaggcctgagaaaagaacccccaaaaaaagaaagaggggcagcaccatatacaaagggagggagaatgggaccataaatgcaaatgaacagcaagctcaacgcaacgcttacaacataacaacaacagtatattattttaacatacgagttaacctctggccaacaatagagattgactaaaaggagatagacccatagtcgaaaag

SEQ ID NO: 30497 - DNA, 290 bp, Glycine max
  unsure at all n locations
agcttttattatttttgccagctgcatcanaatgggaaacaactggaggtttttgagtctttgcctcttggcattgattgcatcaactcatgctcaacttcagcttggtttttatgctaataatcgcccaaaagcacagcaaattgctttgaaatttgttcatgaccatatccataatgcttcatcactaccaactgcattaataagaatgcactttcatgactgtttttgtaaggtacgtgcttcaatctttaagcttctgtcatttttacttaacacatacaatgtta

SEQ ID NO: 30498 - DNA, 401 bp, Glycine max
  unsure at all n locations
acacaaaaaccagcttatcagacaagaagtaaagatattcaagagtttgtttatacgtcctaagcttaaagggttatttatagaaggaatccattgaagtacaaagttggccaaaaattaagtaaaaagttttttcaagaaatttactctcttgtaatcgataccaaaggatgtaatcgattaccagtggccaaaactgatttacgacagctattaacatttgaattcaaaatttgcattgtgtaatcgattgcacatatatggtaatcgattaccagtagtttctgaacgttntaattcaaagtttaaagcttttaatcgattacacacatactgtaatcgattaccagaggagtttttcagaaaacattctcaacagtctcatctttttatctgtttct

SEQ ID NO: 30499 - DNA, 76 bp, Glycine max
  unsure at all n locations
agctttagcgtgaaactntaacttttcatattctttcaattagatatttttaatattggccttttatttatctttt

SEQ ID NO: 30500 - DNA, 387 bp, Glycine max
  unsure at all n locations
tatagtttaaatcaaaatagatctttgtataatggtgttattttgtgctctttntatgaatcttcaagagttgtggttaaggatttccccctttcttctaagtcttganaatccttaagaatanttttcgtccactagatacctttttgtttagtaatgccttgacctcctcacaaacaaatgtgtcttgtacatcactagttgaagtggtttccaagaaaaaatcaactaaatgagcttgatgagttttcttaagatccctatgctctctttcaagatgttgaaaacttgtttagttttctataagctttagagacgtgagcatatacagataaaagttgattgtaccctttaattaaatattttctagattcanatattatctct

SEQ ID NO: 30501 - DNA, 456 bp, Glycine max
  unsure at all n locations
nnnaaagtatctttgtatcgtaccnggntnntagannanncnncccggaggcacnaaaaaggaccctcaagcagcgcgcacncgtttttttatgcgccaaaggaagcccaccagggggggagatattcgttatctaaactctcaaaagtgactgagaccgtgatgaatatagacgagttcgagtcacaatccgaatattactctcgaatatcggccgtagccaggcggcatgaaagaaaggcgcgcaatcttgagaagggatagaacggcaaaaattcttcgactttgctctccaagtctcactgaatggtgcccccctagattgaaacgcagatgttaccaacctgactattgatcaactcatggcgacccttccatcctattgaaacactccaatggacacaacctagacaaatgccgcctcagagcacgacctcggctccacgaaaagaaccn

SEQ ID NO: 30502 - DNA, 452 bp, Glycine max
  unsure at all n locations
ataagcagtacagaagcanncnatagaaacnccgcgagnncacacgcaagcaagaccaatttattttttgccgcnaacaacagccgaggggaaacacaataaacaaccgactggacacaaagaaacaaaaaaaagacacacggntgtacccctatctgcacagaacaacaacatctaacatagctttactcggaggaacacgaaaccccaagaggacagatggaaactaccctatgatcaacctggagaatatcaatggtgaggagagagagactatgttggaccagaatcaacatgctcgtcagaaccggtgagttttggagggaacccacaaccacaaactgctttacaaaacctttggcatactcactcaaagttatttagagctaggcatccgcaccgtaactgtgcctaaaggtggacatataaangaagacaacgaacggggcgcn

SEQ ID NO: 30503 - DNA, 435 bp, Glycine max
  unsure at all n locations
aggagtgnnnctgaacacccagtaaccgaccccgggatcccaagacaccagaggcggcaaattttttactggagcacaaggaaacagccgggagngaagaaggggaccaacacacccangggcccaacaggaacacaacgggcgcggagccccagaagcaggaaagagccggccacaccntccacatgtaaagccagacaacttcctccttagcccatgacccacgacatcgcgtgcatccacagatcgcatcccaaatatccgaggcacaaccctttagaccgtaatatgtggcggaaccaggcgagcaagctgagggcgggcccacaaagcgggacctcggactggaacaatagaaaggcggtatggcacaccactagcctctatcgacagccactcatgacacatgtgcgccggcctgcgcaccttgcgacg

SEQ ID NO: 30504 - DNA, 480 bp, Glycine max
  unsure at all n locations
agggatantctgaatcttganncnnnnnnnnnnnccgaggnngcnncagggntgggggagaaanctttnatacaattcccaccnggnganacccaccaggagggntttcatatgaagcatacatcactggggggtataattccaccttattgaaaaatttaatctgcataatatcacttgtgctcaatttcttgtgaccaagtaacattgcacaatccatttcatccaacatgtcatggttgtggccaaagcaacatattgtacataccaatgatcgttactaaagttaacgtgaccatgaaacctagcattgcaaccaccttgtatcatgttttcctcacgcttcctagttgtcaatgtcagaccactatcatctcaatatccaacatgagagcanataaaaaagttgctgtaatgttntccctattatgaatctcataacagtacttttacggacaaaggtaccattatatctagctg

SEQ ID NO: 30505 - DNA, 141 bp, Glycine max
agcttttctgttaattcatctctgttaatggaaacgatgcttattaagggagtagttgaaaacaccctgtatatcactagaccctgtgaatgaagtgaattttatgcatgttaaagtcttcttatttttttttgaaaaaca

SEQ ID NO: 30506 - DNA, 349 bp, Glycine max
  unsure at all n locations
tctttnggaccttgaacaagcaattaactcctcttttagattcatgctatgngctcgcgactggtctctgtcttcccttcgcaacttgagttcactattgctaccccatagagctccgcgaaatatgttccggccatactcttccttgtgagccctcttggtctcttgttcaagggctcttgcagtaattgcattctcttcccgtaacccggcacactccttccgaacgtgtgtagcggccaacttgaacttctccttggcaagtattgcctttcctaactctcttttgagagtttggacttcttcgtcctcttccggtgcttcaaaactctcttcgctgacgactttt

SEQ ID NO: 30507 - DNA, 157 bp, Glycine max
  unsure at all n locations
atctatcataccttctctccatattanctgagtccttcataaaaatattggagaataagctgttctgaaatctgatggtgggggcaactggcacatagtttcttaaatctcttccagtactcattcaggctctctccactgagtngtctaatacctg

SEQ ID NO: 30508 - DNA, 380 bp, Glycine max
  unsure at all n locations
tctttgtgggttgatgaactctatcgcacatattgtcttgatcattgctgacatattctcaattaggtcagttgcctcttcaggaatctttaacttttatttttccccctgctgaagcatctagcagttgctttggtttgtggtctcagtccctctataaacatattcaattgagttggctcagagaacccatgggtgggagtctttctcaataaacctctatacctctccaacgcttcactcaaggactcgtcanggaactgatgaaatgaagagatagcagctntcccttctgtagtctttgactttgggaaatatttcttcagaaacttttcaacaacctcttcctaaggtttcagactgttacctttaaatgagtg

SEQ ID NO: 30509 - DNA, 300 bp, Glycine max
  unsure at all n locations
attccaaccttttttggtggttaagttctggatattatcctttccacccattctgaaaatcattccatttcttgataatgccctaaaatagaaattcacatcagaaaaactgtgaccatgatggtaaacgtcaacagagatcatcaccttctagattctgtatgtatatactccttttggctcgatataacaaaaaatactaattaagttggtagaatattaattatccaattcatttaaagataacccttttcataattatcttcttgnacttgattcagaataaagatgcttggaaca

SEQ ID NO: 30510 - DNA, 481 bp, Glycine max
  unsure at all n locations
nnaaagacaagcgttcaagnagnatcttcacaccatanantactcaagcctntanaaagcatgcaaatggaggaaggagaggagcatctggatatatgttgtttctactcatgaggtattctagattaaagaataccttgatcctcaactagttgccaagaaaattctcataaacctacatgatattatattttttgttatatgccctacattaaaaatagcccttagtgcattgttagtttgggggtttgactgtaaattattttggtgtccttttgttgagttgactgaacgaaaatggagaagagcactacacagaggagcangatgaacagaatggagaggaatgaagccaagatgaggcagttgtagtggatcagattctacgatggtgcatactcgtaatggtacaggctgacaaagtgggtcgaatatgaagagcccgtcagctaagcattggtggggggtgaaacaaaattgt

SEQ ID NO: 30511 - DNA, 325 bp, Glycine max
  unsure at all n locations
cggggacccttatccannaannaaccgctcaccctccatnagtcntttaccaatggaccatatgtcaaacaaacggctcttgtgaataattgttnggacccggtgtacagggagggcttgttgcaggacaagattattgctatctatgtcaacattaacaatcaatgattttttggacaaatatcaagcggactgaaaacaaaacagggttaatgaataaaagaggactttatcgatcctcttttaatcttcataattgtggcactatgcattggacccaaataaaaatcttaattttagtatggcctaccaaaatagtataccg

SEQ ID NO: 30512 - DNA, 180 bp, Glycine max
atatgcacatagaggtcatacagcaatcatagaaccaaacttagaccaagcatcatacaaatgagtaaaaatatacctcgaatgctgtcacaataatcacagccagaaagaatgcataagtcaataaaattggtccatggtcatatttagctcctccaaaatctgaaaccaaataaatac

SEQ ID NO: 30513 - DNA, 237 bp, Glycine max
  unsure at all n locations
tggtttccaatttttctgatgccacaggtcgggatatggataagattataaaaggaagggttgaaaaatctgaaaaggggggcaaaatgggttgctttaaatttgtagtggcctccagctgcaacatgctgttaatgtgccattgcactgttataacatatgcatgataactacaagtaaaagtcttgctttatttaaaccttttngtggtaaatctgcttattagaactcaatatg

SEQ ID NO: 30514 - DNA, 492 bp, Glycine max
  unsure at all n locations
gcgcgatattctgtanttcaacacaanaaacnaagcngggaggaactngaggcgaaaaacccagggaccgtcatttttttacacggaaccacaccaggnggggaatgggatacaatattttacatcgagacggacacatttggggatactaggcgattcaggtatactaaatattaaaaatcgaattagttgaacttttaatttcttaattaaatccttgtggaagagacgaataggcctttctttggagtatgataatcactgaacctgtgagtcactatctttataagattcgacagtcacatactcaatatgatatattctcatactattaagtgattatatttatgcctctagtgatgatgtggtaatgagcatacatgcatcatgcagattacatgcatgcacgcgtgtaaataataatggaacgtgccatgtgtcatgtgcttgcttctgtcgagttctgaaatcagacattatataaagttgctn

SEQ ID NO: 30515 - DNA, 413 bp, Glycine max
  unsure at all n locations
aggggacctgactcgcgatcgagccgacggggatctcaaggcaccgaagcagcacngtgccaaagcccncacgcnccccgagagggatcggacaaaaaaaacccgccacgaaacgacctaggctataaaagaaagtacaacaaacacgggaggcaacgacaacgacacacaaaaatgacaaacgcaccggggaggggaacaaaccgacggggaatccagctaagaagcagcgggacgcccatcatccagcaaccaagctctgcaccatagaagcaaactgaccaacggaaaaacgcaggcaccacctggggggaaaacaacgaccgacaaggctgaaccgcaaaacaagccagaacaacaacacaacccaggccggccacagaagaggcggaagaaacgcgcccatacaggcc

SEQ ID NO: 30516 - DNA, 303 bp, Glycine max
  unsure at all n locations
atatgaacggtataagatattataccaaataatttttgtttggttaggaaccttataaaatagttaaaaaaaaaggaaacctgattataaaaaaaagatatgatttttgtataggaacctaatagcatatgatttttgtatagaaacataataggataggataaaatatgatntttatttgctctagaatacagaaacggtatgaaagaaaaaagaaatctaataggaatagaaaaaggattaacatanganaactaataaaaataatgagaaatataaaggaacaccggactcacatcttgt

SEQ ID NO: 30517 - DNA, 223 bp, Glycine max
  unsure at all n locations
tatggggacccatcacatgtggcctaggtggcggtcggcaatggtcacaacaagtgttccacatccacaatgcgcgcataaacccaccatcccctgttgcccacgtcaactgagctcacgtactcccacgtagcccatatncctcgttctctcaacaccgggtccccatcaatccttccaagcttncacaacatccaagccaaacaacattcacacagcacaa

SEQ ID NO: 30518 - DNA, 460 bp, Glycine max
  unsure at all n locations
gggtgctganccatgagactactgcacnccnattngnnaacnaccctgtgtggttgcgcccggcactacacgccgtgccctttgtttaatttgaatccaagccccatcctttcggggggcaatgcccctctcattacctctatcccgggcaagacgatgaggatggagatacccatcttggccgcctgctccacctcaaagatccgtcccccatgaactaccccaacgaacatagtccggcctatcccggcctcacgctaacccgataaagaatatgatcccttcgctgaagatagggagagatcgaggcgcttgagagaggttaaaccagtcggggccttgcaataccgatatatgcctactcattacgatggcgccacaatcaattcatccagttcaaggccggcttgtattacaaaggacactgtcgatgggctcttcgatgtttgcgaagatgggg

SEQ ID NO: 30519 - DNA, 349 bp, Glycine max
  unsure at all n locations
naagcttttgtttggtcctatggcatngnngnnggcatccttggatacatttcttagtggataatnttggtcctatagaagaaataataaaacaattcggagatattcttgcattgtatatcccccctgctgctgtgtacagagatccatattctattcaggtgtttgaattttagaccctctataaataagatttttcatcatatcagttntctaatgtactaaatatagagaagaaattgctctgtttttgccatttaatttatagaaaacatttaatcttctcaaaggggagtaattggaaagaatgggttgcctaatttctacaaaggctgataactttttttct

SEQ ID NO: 30520 - DNA, 307 bp, Glycine max
  unsure at all n locations
catcaacagcactgacccaattattttgtatagaagggtcctcctccttccgcggagccacagcccttgcgtactcaatttccaatatcctttcctataattgattattcaaaactgttagctataatgctatgacatcataacacgtagtaacaatggtttgtttcctatgttaagaaataaagattagagaaattgataagttattggttgtatacccaatttcaatccctggaatttcaacaacttccttgtaagtgactaaatggcataaggttgtagatcattcngtttcacatgattgaaa

SEQ ID NO: 30521 - DNA, 320 bp, Glycine max
agcttattatatgatgcagcatatttaacagttttcataggtgatataagagcatttcacaacgaacatcatcttttttctctagattctcaaactcataattctcattttgaaatttgttgagtgcttccagaacttcatccatagaaagacttaattcattgtctccttgcacacaccgaaaggccaaccctgctactgaagttagtatccttttaactacttggtctgactcaaacccaaaggatgggtctacaagctcactaagctttactttttgcacctttttcatggcaagatttgccaagtagcttcatctc

SEQ ID NO: 30522 - DNA, 428 bp, Glycine max
  unsure at all n locations
nnccccggactaacgtccgtcntacggacactatagatactcagcttgagctggagaaaactggaggaggtttgggttttacttgctttctccctgagtgacattgtattggtggtatatgagtgttcatctagaatttttgtgcatctgcatcatatgaatagtgagacaaaattttctaagtagaaaagttctcagaagcgaaactctctatttaattgattacaccctatcgtgattgttacccaagtgtctgagcttgcggagtatgtctataccgtttaatcgatatagcctctcgaatcgatacaaattgtgatgaacaatgctgactattcaagagttctctttatcgataccatggaatattgacactctcttcatagcagtcaaactccagtgtctatctcataccttgcactacatcc

SEQ ID NO: 30523 - DNA, 276 bp, Glycine max
  unsure at all n locations
agctttaacctttggccatcatttctgccccaaggcgtgaaaggagagcattttcggcgtcgtgaagtgcgtggctacgagtgggacttcgaatattcaggtttgggtggacttctttctctcttaaatttcgtgggtatggggttntgggagatatgatgggtagtcttgctaggtttctgctgtatgatgattatttgtgaagaaatttgttgaaagcttggtgaaatcgccatgttggatgagttaaacatacccatttctgtttaaggtttt

SEQ ID NO: 30524 - DNA, 400 bp, Glycine max
  unsure at all n locations
tgcgtagcccaccatcttttcatagnagagttatttatttgtgtctaccatcacgatcatcggctccctttccatcattgngggtaccacctgngccgccagatccctccaccttttgggcgtgttctttgaaagatccgtccccctttttgcaaatgttctgtaattgcatcctatccggaaccatatcaaaattgtactgatactgcctaacaaaggcaaccattangtccttccaagaatggactcgggaagattccaagttagtgtaccaggtaacagctaccccagtaagactttcttggaaggaatgtattagcaattcctcatcttttgcgtattcccccatcttctgacaatacatctttagatggttcttgggacaagtagtccccttgta

SEQ ID NO: 30525 - DNA, 321 bp, Glycine max
  unsure at all n locations
agcttttatntaaactccncaaggaagncnctcgagagagcttatcaaagaagcttctcaacgtaactacctatgctataaatagaagcatgtgtcacacttgtggtaactctgatgaatgagagtcttgtgagacacacttcaaagatcaacttctctccttcttttcctccttcaatttcctgctcccccctctctctctctctctttcttttcctccatagaagcatcctctccaagcttcttatccaagcaccttcttggtggcaaatctccttcttccatggcgtattccttagtcatatgccatgacaattaaca

SEQ ID NO: 30526 - DNA, 227 bp, Glycine max
  unsure at all n locations
cacactgtattaacatgaagctgacgatttcaccaatccggatgaaagtatttgtgagtttggacttgagtgtttgtgagccaccttgatgtcaccctaacatcaagtgttggacctgagtgtgtagaagtgatctctattgntcagagagcaatctctggtgtgtatttgatttaattgtatacaccggagagtgattgagagggagtgagaggggttctcatatc

SEQ ID NO: 30527 - DNA, 300 bp, Glycine max
  unsure at all n locations
ttcnttttggnttaagctcacattggcatcacccgcataatatacggacttcaggtaaggcagtctgcaaccacgttgcataactgacgacctaaataagttgtcatgtcaaacaanatttaaaactaaaatataaataanatttaactaatttcgtcctattcaataatatcatatgtaaaaaaccttattcaccaaacaaaatatctaaaatatccttaatttaataaaagtttattttaactacgttttttcctgtgcgagtaatgaaatgatacttaaaaaatattaatttttaat

SEQ ID NO: 30528 - DNA, 477 bp, Glycine max
  unsure at all n locations
nccttaggggaaattgccgangtatnnctgngaanaatanannacncaacgctaagggcacaggtacatcgtaaggaanccgtttgattccttaccaacagnngcgacacggaggggcggcataacatcataaacacacatatctcagataccttaatggtgcaatcacaatttacacacgcatgacgatgcagggactaggtactatcatgcccacgacggcgtatcgagggcgcccacttcttgactacagaggaacacatcttcgggttagaatcgtggacgaacaatgcaagaactacaacgtggctcaaggacaagaaataaaaagacttcccctcgttgggatgggagaccaaatgcactttcttcataatagaagctcactgcatattgaatacgtgcggaacaatcttatcancggagactgtaacctaataaggtcaagagtctacaaatcatagatgtaacctggtc

SEQ ID NO: 30529 - DNA, 254 bp, Glycine max
  unsure at all n locations
agcttgttcttggtttanacatgattgatacatgatttgggacttgtangattcaatttgngcaaaattggatgagggaaagtgtgatatcgaaaatctgcacttatgcaaaattttgctgtcaactaagtgcagcagaatttggctctgtgcaaaaaatgatatgaaattgctggttgtggaaagagtagcaccgattgggttctggacgttttctatcagatcccaacggtcaaaatgtagatttatgtact

SEQ ID NO: 30530 - DNA, 298 bp, Glycine max
tccaaataaaatatttgggaacgtctattagactataactctttaacagctactgtgtatttaacgggttcattaataagtcagattaaaaaataatttgtcaaattataattttggatgacgcttacgtgacaaagtggacgtttgatattgaaaaaattaaaattacttatttaaaacaatataagaactaaacgtcttcatttagagataaaagactcaaaatctcagatttaaaataatggtgaaccaaaattattaataaaaatatataatcgttttaaatattttattttcg

SEQ ID NO: 30531 - DNA, 318 bp, Glycine max
  unsure at all n locations
atctttgcccaataacactcctaacatcaatagtaatattaatattctaactcccctcccctaaaccaaagttcacttagcatcacgcttgttacaaagtattagaatgtcgcaatatctttaatgtatctcagattattgttaggatcatattgcaaggtgtgagaagtgagtatcacaatgaaagtttggcattctaatgtaaggtttattaagccttaaccttgagttctcaactacaatggctngcttttgtggtgtagttcttcccagagtcttaataattggtattagagcttcttaccatgtctctatgct

SEQ ID NO: 30532 - DNA, 368 bp, Glycine max
  unsure at all n locations
tagctatnatagggtgtgtatagctaagctctatcttctctttctaaggaggtgagcttagctatgagagaggtatgtgtagctaagctctagcttctttaggaatcttcttaaggaagtttctcacggaggtgagcttagttatgagaggggtgtgtgtagctaagctctagcttctcaaggaagttttctcaaagaagcttctcaaggaagttttctcaagaaagcttctcaaggaagctacctagtctatanatagaagcatgtgtaacacttgttgtaactctgatgaatgagagtcttgtgagacacaacacaaagttcaacttctctcctctttcttcttcaatttgtgctccccctctctc

SEQ ID NO: 30533 - DNA, 277 bp, Glycine max
  unsure at all n locations
ttttgggggtggccatttcttggatggccttgattttctcaaggtccacttggaccccatttctaccaactacaaaacctaagaagactatattatctacacaaaaggtacacttctctatatttgcatagagggtgtttttcctaaggactgaaagaacttgcctgagatgtcctaagtgatcatctaggctcctactgtacactanaatatcatcaaaataaacaactacaaatctacctatgaaatccattaagacatgatgcataagcctcat

SEQ ID NO: 30534 - DNA, 293 bp, Glycine max
  unsure at all n locations
ctagagctntagctccacatacctctataatagctaagctcacctcccttgagatgagaagctagagcttagctacacaccccctatgatagctaagctcacccccatgacaaaaaacatgaaaataacacaaaaaagtccttattacaaagacaactcaacatggcccgaaatacaaggctaaaaccctatactactagaatggccaanatacaaggcctagacgaaggaataacctattctaatacttacaaagataagcgggctcatacttagcccatgggctcgaaatc

SEQ ID NO: 30535 - DNA, 367 bp, Glycine max
  unsure at all n locations
ccaacctggtaggcctagaacctcctccaccaaggaaggcctaacctactggaaaacatggccactggaccggagaaggaaaaagaataatggaaaacgtcccttcaaggaaaagatgagtcaagaggaagctcaccaccatangaagacatgcgataagatcttggatgtatgagaaagataattggcaagagaaggagagaaagggtacgatatcttgtgcctcaaatgaggtctgaactttgaaagcgaattcttaaatgatcaaaggtgacaaaatgcacacctatggcttctattataccctaagggcacaaatttggaggaaattgaatctctataacaattcacttgaattgacatgaac

SEQ ID NO: 30536 - DNA, 474 bp, Glycine max
  unsure at all n locations
naacttaagatcagatcaacctnnaaaaagccccagctgaaacanngtcaggtgcgggcccaaccttaattatgggttccaacaagnnncccaaatccaggagtaccatgaagggatagagaagacatactgttgataaacacccacaaaatatagttatggcaaagcattatttttccaaccttttaaaaaatataaaattattaataatatttccactaattaccataataatatattaatggtagaaatacttaattcttttaagtggataacatanagcctcttaanaaattgtgagcaagccaacttgttatctagtccgttctcatacacattcctaggagnatgtatcatattcattttcaaatcanaataagaaataacatatcatataagttcctaggtgtcaggtcaatcctattgatatcaataaaaataatttaatactgctattgggtgtctagcactcag

SEQ ID NO: 30537 - DNA, 449 bp, Glycine max
  unsure at all n locations
agggagcgctttgcattgananncnnccnnnnttngnaaanccgccnggangganacanagaaaggcacaagcaggcaacaatttttttcgaaaaaccaccccaccaagagggggcatcggaaaccaacgcacacaccccaccaaagaaacccacccccacaaaggnggaccgggagggagngaagaacaccaacccgcggnncggggagcagaangaccaccacagagcacgagaagngagacnctacngcggcccccacacccgcgagaagaccccgggaacaacgcgggaaacaagcaagngcccggaaccaaccgccccaaagcggagaccataaccccgccggccgaaccggagacggcaaacacacagccaacggaaaggagggaccaaanacacccgcaccaagggaaggacgcgcaccggacaccgaccccaaaaaagacg

SEQ ID NO: 30538 - DNA, 491 bp, Glycine max
  unsure at all n locations
gttcgtagncatgagattcaaanctnnaaaaaagcnngaaanaaancaaanncnagaggcggagaactcttttaacttttggagccgaaaccggggaggtgcaaatcaaaattgcaaattgtctctaaatcaatttagccactagtaaatcgattacatcctctggtaaatcgattacaagcggattctctcatagttaacgcttccagaatttcttcaactaaaaccaaagtatagggatctgagggctacaatantggatttggtcatccgtgtacacctaactgaagtggttgaagaatatagcccctctaaggtaacccccactatgttgcattggacttatgctcttcttgtgcgtgtttatagaagaaaaacttatttatattgtatccttgccaagtgataacatttctttaaacccatcctgctactttcttaatgttcagaagcttatcctcagcagagattgatctttaaccatctgaacg

SEQ ID NO: 30539 - DNA, 138 bp, Glycine max
agctcctttcctttttccactcaggtgtccaagtgtgggatggcatagggtggaatggtggacagcctcagtaactgctaccatatcctcatctggcatcatgtaaagagatcctcgcttctttccacgagccacaat

SEQ ID NO: 30540 - DNA, 240 bp, Glycine max
  unsure at all n locations
aagattaacttcattcattatatgatgaattttacgggacgtttaatatccatcctcattggagcacaagttgcacataaacaatggctgagaacatgagacatanatgttannggttttagaaggaaatcctgtcatcanttccaagttattgatattttaagttctttattttanaattactctattttataaattttaagctaattagaattgtatatatatgtggacaatacattc

SEQ ID NO: 30541 - DNA, 188 bp, Glycine max
tgtgaaactctgtctgtcacatcattacttaatggacaaatactaatggcaggtaccaaagccaaaaaatgagaaacgcccaatagagcaataaaataaaaaattaatatgtagcaatctgaataaggggtatatcttaggtaagaaaaagatatttaaaccaattattttatgaatatcatcttaca

SEQ ID NO: 30542 - DNA, 376 bp, Glycine max
  unsure at all n locations
gccttaaaaagggtggntttgcaccttctcgctattcctatattctggcttagcgagcgtccgctaagcgcaccactcatgggctaagcgcgaggaaaacactagaaaaagatgagttggacaggttctttagcgcaccgcttatctactagtgcccacttcgtcatctgtaacgagaaagctgcgtaaagctgaatcgatttagaagaagttgactaagatcagagctttgctgttagattttaaagagacaagtcaagttcaagagtttgaagattttgtgctgaaattgcggaccaactgaacagagccgttgngctgaatgattggaggatggaatcctaaggaggtcatctacactgattntgatctcatt

SEQ ID NO: 30543 - DNA, 110 bp, Glycine max
tgtctgccgggcagacaaccacaaatcatgtttacaaatcattatgaattatggcattcctcgaaagtagccgtatgatgcgtaccaccaagcgtcataggcactatacc

SEQ ID NO: 30544 - DNA, 186 bp, Glycine max
  unsure at all n locations
agcnttaaccaagangggatggtccatttcaagtacttgaaaagataaatgacaatgcgaacaagattggattgcctagtgagtataatgtgagtactacatctaatgtgtttgacttaactctttttgatgtagatggagaagccgatttgagaacaaatccttttgaagagggagagagtgata

SEQ ID NO: 30545 - DNA, 437 bp, Glycine max
  unsure at all n locations
nggcgattcagttgcaagttctacgnccactatnaatactcagcctccatcattgagttaagtccaccaggaggaatctgttaacttggcttgatcaagattaggctaaactatcatgaggcaatcggggttaatatcttaggaaacacattaggaccccttgaccttggttgaatgaaaatattttttaacttcaggcccctataaggaagccacgtgtttctcacatcattctctccgtgattttcttttgcacagatagttacacacttgtcatatcatgctatcttacacaccgaccctattgctgaatagcttaccaatacacaagtcctcagagttcatactcgtcttaccgttatctactttgcgaccgggcacttgcgagcaacatagccatcagctggttaataagaaaatgattttacaaattttgt

SEQ ID NO: 30546 - DNA, 193 bp, Glycine max
  unsure at all n locations
agggcgcgcaagctttcattttcaatcnggagncgcncgangggggcatgactcaatcggacatcctttgataatgttattgtcgtttgaatttgctacgagctatcgtggtaatttagagcatctagatatatttcgggacacaaacagacatcctgggataaagacattgtcgtttcaatttggtcagagc

SEQ ID NO: 30547 - DNA, 539 bp, Glycine max
  unsure at all n locations
attgttgtttttttctttgatctacngngacacnanananacncaagcgnctagnctcaatngggagagtctcgaggatgaccgtttataantctgcatccgagnaaaaaganaggggggcgngaatagacnaacagaccccatcctcaacngggagcgncncgaaaaaaaacgggacgcaaccggacgacccgggaanaaaggggaccggccccgcaanaggcgcacgagacacgcaggcggacacaaacaggaacagcncgcggacagggaagaccggaacacggaacagaccacccgagacacaacggcaaaggcggaaggaaaaaggagacgaaggcacccagccggcaaagagcggagcagacccggacangaaaacaggaccgcagaccggacacgcagcgcgaaaaaggacagggccaagcaaaganngcgcaggagcaggagcagcgcgaacccacgccgacgagggccnagacaaganggcaaggacgcaagacccaccggccgaggacaacagcgaacgccaccgcgcg

SEQ ID NO: 30548 - DNA, 302 bp, Glycine max
  unsure at all n locations
agctttgttcaaaaatcaaaagannnaactctgcgagaaggttttcaagttttgtaaaagttataactctttccaatggtttccattgactagacatgaagagtctataaaagcaagaccttgacttgcatttccataactttttgacttaactttttaacaattctttataacaacttttgagaaacctttgctaacttattattcttcttcttctttctttgcaaaaagctttcttaaagtatttgggtttccaaaccttgaaaacaaaaatgtggtattcatctttttctttctcttct

SEQ ID NO: 30549 - DNA, 345 bp, Glycine max
cagcatcatctatggcgtcagttatcttgtcaacattggtgaggttgggatcaaagtgcacttttgtctactccaaagcaagaacaacaattgcttttttcacgcctactaccaatttgaagggcattcccaacagagtcagaacagcttgtgcatgccattcctttaatcctcactcggcacactggtatgtcctgcttatgaagctcatttactcgaaacccactctgctctatgctgtcttttatgtgttgcacctacaaaaagaatatcaccaatactttggtcagtgtaaatattgaagtacaccaaagacttatatctattagttaatatacataattg

SEQ ID NO: 30550 - DNA, 290 bp, Glycine max
gaagcacccgacgacgcatacgacccggggacaagacacagaggactttttcccacaggccgccgggggggcaaacaacgccacccggagccacccaacgacggagccagaggaccgacgagacaggcgagaccaccacagacggaccccccgaaggacaaaaagggggacagaaccaccgaagggcgcaaacgaaccaaagaaaacagaggcaaagccaaagccccgaagaaggaacaagaaaacagcaacggaaaggagagaccccacacggccagaaaagcgccccc

SEQ ID NO: 30551 - DNA, 303 bp, Glycine max
  unsure at all n locations
ggtaggncctgnangatcaaatgnaaacggggaaagaggaagaaattctctttccccggaaaagcgggggtattaaactctcactcccgatcctaacgtaggaataacatggcgcccgttcctcacagttgattatctaggagaaaaaatttgctttcttaaactagctaaatatttcagattccgaagaacatgcacatatctactacatggttaactaattttattgttatccgttaatccacaaatggaactctgcgtcgaagctttttggtgctatcagctcaataggacataatctca

SEQ ID NO: 30552 - DNA, 421 bp, Glycine max
  unsure at all n locations
agggacgtctctttgtanancaccggcaatncagctcggccccgggatcctctagagcgacctgcggcatgcaagtcgtccatcatacccgacccncgcaggggcgaggatgatganacacatcttccgattcaattgttacatcagataacaatctatttatatttaaaatcttgggtgtatatagtccagaactttgctaacttccgatagcccggagtattagcatagattgagattaagaattcggagggatacgctactgatcgttttgatgattgcactgaatatgtcgggctacttggcctgacgcatatagggagccaaaaaagccgcgatactctgcggcataagaacccttctctttattggcctccattccaccgaacacatggggagatttccttccatgtaaatactg

SEQ ID NO: 30553 - DNA, 484 bp, Glycine max
  unsure at all n locations
gcatcnagngaaagtcccganagatnntctnnnnntnaganacnnaacnncagagngaaacaagatggaagtggaaggacattaccttatttgtccaaccacggacaaaaccgagagggggcgcaactnggaancaacctatcaaacagcnccngannccaccaaacggtgttggatatacatactttatctcaccctcgactccatttaggatggctgaattattcagcgaacttgaatattattcttcaacttcaccctctgcatacatagcccccacccttattcatgatgatgctcacgactaaaaccaagactactatgtgccgttatatgttaatagagaacacaacgaccaggacagttccttcgtcgaatatctctgttatatacgaataatgcgaccctgagcacaaccccgaacttatattaggctcttctgctgggtacataaagagcaaaaatgaataaacatattcttatt

SEQ ID NO: 30554 - DNA, 447 bp, Glycine max
  unsure at all n locations
aggagctattcgtttgacaccanccnnnntggaaacacgcgccgagatccttagaggcaccagcaagcngcagctttttttcatggcctccnanggcggagagcggggtctatactcatcttcagctcgaagcggcgtctcctctgtctctttcttctccattctgcagccgttcatctcccagaagcaaaggaatccattgatgaaaaagatcctaggcctacaagctccaatggagcttacatcatgtggcatcaagatcatttttgactacgtgatgttcatttgcctcctccatccttttgttccgtgcattctctataacaacgtgagcttcatcttattctccatgtatatcctccattgtcctgtgggcaaggagaaggttacaaaagactccacaaagataaatcgattatatctaaatctacacttgtctagcattac

SEQ ID NO: 30555 - DNA, 518 bp, Glycine max
  unsure at all n locations
naatcttacgtcangngtangtacnantncnananttnagannacnntccngcgcccagagaaggagngcacggaggaaangcttancttcnctanaatacngganagcaannnncgaacgacgggcgctgttggccaacacannaaagcaccacacgaagggcagcnccacccaagaaggccnaacctcgccttganacgaaggacccaganngcccctnncacctacgaaanancaactttttggtggaagtgtgtgagggaacaacctccccactgagtgtgatccacgaggcgtcccaaccagacatactgtaggggggggttaatatccatttatttggaagggtaacttgacagggtgtgagggtctatctgtaccgggagatcgatcttcccccttacctttttgnggggaccgtgcaaggcacgacccaccattgacttcggcttatgtgggaacattgaatggaaattctccaagtgctcttagcttacgttacccagaaccatatcan

SEQ ID NO: 30556 - DNA, 332 bp, Glycine max
  unsure at all n locations
catgattggtacatgatntaggacttgtatgattcaatntgngcaaaattggatgaaggaaagagtggttntcgaaatctgcactttatgcagaattttgctgttggaatgtgcagcagaattttgtataagtgcagaaaaatgcttgtgtatggatggttgtgaaaagggtagtacatatggggttctggacattttctaacagatcccaacggtcaaaatgtagacttatgtactagagacttccagtaaaatttttgagtcgatccaacggttaacgaactggaacaaagagaatgttactggggtaattgaatgtganaagctgtgat

SEQ ID NO: 30557 - DNA, 353 bp, Glycine max
agcttgtctatttataattatattgagaacaactgaggagtgttgtgttttgtacaattcatacataaagtatgtgttaatagacttcttggattgtgcctgaatgaagaggaaaatgccctgaccgactcttcagagtctacgtcttggggataaatacacccggtttgagtacttctttatgcttgaaccaatcccacatgattggagcattctactcaaacaacgtgaccctaactagtctccctatgattttacctagtgagtgacctaccctaccactgtgtggattgttatggcatgcactccttggcacccgacgatgtctttactaacatggtaccacattgcat

SEQ ID NO: 30558 - DNA, 355 bp, Glycine max
  unsure at all n locations
tattggtgggtttttttcctttacctgtgtctcaaagcttataaaagagccttctagatctgttcttcaattgattntgttcatcaaatctttttttttctttttttgctttttatcatagtccaactccttcacaaatatcacccactttagcaccgacatctcattgaattcccactgctgacctctccaacctcttgtgtcccttaatggcatccgtattcactcctccctcgaagtctcttgctctttctccttttccatcattggttggatctttcatgaagctagtgcgatggattgnggaggggaggagagtgtgatatagatgaccattgtcatatctaatttggag

SEQ ID NO: 30559 - DNA, 218 bp, Glycine max
  unsure at all n locations
ttattgatatcttntatagcgagcacggattcttggatagacattaatggggatcaaagtttgaatacatggagaaatatgcattcttgcggtgaaactactccacacctatgtcacaaaactttatcttatgagatcgctctcctataactacgatgaaggaatcaatgattattctcatttgacttttatcgtaaggcttaacttttatatatata

SEQ ID NO: 30560 - DNA, 130 bp, Glycine max
tgtcatccaaaccaccttatcccttgaggttcctcaaaatgtttatgtatatagtgtgtggaaggtcaaatggaaggttctccatcaagtgaaacaacacaaacttatggaggtcagaaaatgttgatgt

SEQ ID NO: 30561 - DNA, 187 bp, Glycine max
taccacttgcacggtgctggaactacttcacatggacttgatggggcctatgcaagttgaaagcctaggaggaaagacgtatgcctatgttgttgcggatgaattctccagatttacctgtgtcaactatatcagagataaatcatactcctttgaagtttcctggagctgatctacaacttcatag

SEQ ID NO: 30562 - DNA, 383 bp, Glycine max
  unsure at all n locations
agctttaactttatttttcataagcactttgtgcttgtacattccaccgcaacgcacccttcttcaaacattcggtcataggacttgctatagagctaaaattctggataaagcgtcgataaaatgatgcaagaccaatgaaagatctcacctccgaaactgttgtacggctcggccaagtcttgatagcatccacttttgcntgatcaacggatactccatctttagacaccacatatncaagaaacaccaccctttcaaccaagatatcacacttttcccttctcccatagagttgttgtgctcttacggtctcaaatatttgtttcaaatgagtgaaatgctcctctatagattngctatacaccactatgtcgtcaaga

SEQ ID NO: 30563 - DNA, 252 bp, Glycine max
ttagatatatgtttatgataatacatgtttactctttttttcttagcatataacgatactcaataagtgacgttgaagatgttatagtatagctctgatatgatattgcaaattattcgagtcgatgtatatatatatgggttgtgtcttgtaaacattgctatgacatgataatatgatatatgacaatcagtgaagtaaacagtgatatgtgagctatgaactgtgtagtcacattccttggaaaatctt

SEQ ID NO: 30564 - DNA, 208 bp, Glycine max
ttatcaagtaacacaagttgagttttattcacaacattacagtatatctctcttatcttactgagagtgattctcctatattcttgagtgattcaagaacaccttggctgtatcaaaggactttcacaactctttgtgtgtagtcctcgctggaaagagtgattcattgcttcctttcatcatcaccacttgtctttcaaaccacaat

SEQ ID NO: 30565 - DNA, 303 bp, Glycine max
ttgctagagacagtgtcaatgctatgtatatggtttctttctttgtggcaccaaaggcttactcatatcagtgagaatgggctgaattgtttagccaagaaggatatgcttctacgattgaagaatgcaaatttagagaaatagtctcattgcatggttggtaagaaaaccaaagtatccttcaagaagaatcctccctccagaaaatctgagttgcttgaatcggtgcattcagatgtatgtgaccctttgaaggtgaaatcctttagtggtgcactttattcttgtaccttcattgatgac

SEQ ID NO: 30566 - DNA, 365 bp, Glycine max
gacccgggatcttatgtcgccgcagctgttacttacattgaccctgcacgtgctggaactctttaatggcttgatggcctatgcaattgaagccttgaggaaagagttgccttgttgtgcggatgattctccaataacctggtcaacttatctagaaaatcagacccttgaagtttcaggactggtctaaacttcaagaaaaaaactgtgtcatcagagatcatgagtgccatggctagagttgaaaacacaattactgaatttgccattgaagcatactcatgagttctgcgtatacacacacaaatggctattgaaggaaacagacttgcagagctgtaggcatgcttatgcaagacttcctt

SEQ ID NO: 30567 - DNA, 323 bp, Glycine max
  unsure at all n locations
nntgtgtgggagattcagataatcatctaaagattcatagagtggcttggaaggagctatgtaagcccaagggcaagggaggcttgngctttaaagaatccataaatntcaatttagccttcttgatgaagagcgggtggagcttatgttcgaatangatgcgttgtgggtcagaataatcagagaaaagtatcactgtggagaatctttgatcccagatattgattgtaataggtttgagactaatttctggtggggcctttgtaaaacctggcctgaggtacagaaaaacctttgctgaaatatttgggatgggaacaatg

SEQ ID NO: 30568 - DNA, 303 bp, Glycine max
  unsure at all n locations
gatgctcanaaacatcaatatctatcactccatcagtaggtctgcccagatatttgttaatcacagcatgggagaatttaacacactntcctctgacaaacaccttntgatactcatcactttttctgttagatatgtcagagggaatgttgacaatgaattccctgactaagccttcatagcaatctcccaacttgctgacagtcttcagcagtccagcagccttgatgaggtccatgatctccttgcaatccaatgcagctctttccagttctctttccaaggccagtcttcgttgataca

SEQ ID NO: 30569 - DNA, 276 bp, Glycine max
tgtctcagtggttatgcgagaccgagaccaacatgttagctcttatcagcaagtaccaagaagaattaaatctagccacggcccacgagcacaaagtggcggacgaatatgcccgagtttggttttttaggaaaaacgccataactaagcgcaccccaaggcatccttatcgcaccagatccaaatctaggacgatgggtgaccaagaggaagtacaggaacagatgaaagccgacatgtcggcttatatagagcaaatgtcttccatgatggatg

SEQ ID NO: 30570 - DNA, 309 bp, Glycine max
  unsure at all n locations
aaaaanncgacccggtccttaagtgacgcggctgcactttattctctctgaagactgatactgcttttaagcatatatatactccaatggtccatcgcctactgctaaatgtcaaaaagaggcaacctttaaattacccacggggaagatttggggccaatagctcctcctggtgaagaaatgatcccatgatgaacacttgcaggtctcttgaaacatagtattgcgccactccgccttgttgcggaaaataggaggtgaaaagaatcatacttctccaggcatgccaaatcggcacaggcaaagaga

SEQ ID NO: 30571 - DNA, 268 bp, Glycine max
ttacgtgtatgattctcttcatagagtttggccctcgaaattgttatgaggaggcctgtatatattaattgatgcttagttaattaagactatatcgaatagttgttaccgtgataatatcattgcataattttgatttctattcttccaatacaaaatggaaggttgagcatggattattttaaaacattgtcaagtaggattgcagcaatctcaattatattattgtcatatgaaaagacattgagacatgggaaaaattttatgc

SEQ ID NO: 30572 - DNA, 335 bp, Glycine max
  unsure at all n locations
aacctgtactgtgagagcaagcgcgagagctcgacgacaaccatgactacacggtgtaaacttgaagggagggggcagtgccatgtggcgaccggtatgcgaaaagtgaagtggaggtctcaagatgaaagaaagtggaaactaagtggggcggaagttaactanacgcaatacaatatttaaactacacatataatagtaactttttaatgaaaaaatattatntagggtatttgcttaatctactttatcgtgaaagaaagtatgcaacatattatcaaagttttaatctagtgccgtaaaatacttaggcttttctaaacactataaaaaac

SEQ ID NO: 30573 - DNA, 399 bp, Glycine max
atgggtacccatcagatgtggtactaggtggttgtttgtcgatggtgcaaaacaattctccacatgcacaaatcacgtataaacccaccatcccctgttgcccacctcaactgagctcatgtactcccacgtagcccttatcctcgttcctctcaacgccgggtccccatcaatcctcccaagcttccacaacatccaagtaattcaacatccaagcctcatgaactaacacagccaagaaaatagggcagaggcagaaaactctgcccaaaacacaaaccgacatcacagcttttcacactcaaatactccagtaatattctcttcgttccaattcgttaaccgttggatcgactctaaaattttactggaagtctctagcacataaaactacattat

SEQ ID NO: 30574 - DNA, 296 bp, Glycine max
  unsure at all n locations
tggtgcacaacacgttttccacatccacaaatcgcgcataaacccaccatccccttgttcccacctgcaactgagctcacgtactcccacgtagcccatatcctcgtttctctcaacaccgggtccccatcaatcctcccaatctttccccaacatccaagtgactcaacattcaaacaacacataccatcacagccaagaaaacangggaaaggcagataattctgcccaaacaccaaccaaaatcacagcttatctcacttaaaggcctcagtaacaanntccttcgtccaatt

SEQ ID NO: 30575 - DNA, 338 bp, Glycine max
  unsure at all n locations
cctccacggggtataatgatatcagcgtacttcttggtgggaagaataaagtcatcanaagctggcttcacaaatntagaatactgcatcaagtatatattataagagacagttactaatatacgggtaacaaaaaaagggaattactaatattggtagacataaaaaaaacgaaatatgttagcttgatttataatcataacctcaaaacagatcattgaagatntaatntcatanagactgacttctttacatgtttctaatcaatgaaagttcataacagcctctcagcaacatgaactataacaacatttccaagtcttgaaatgcagtacatg

SEQ ID NO: 30576 - DNA, 186 bp, Glycine max
  unsure at all n locations
gcattcaccccttccncattntcttgacaaaccataaataattnttttatagtcgtaaccttattgtattgcaacttaacagcacacaacaatcacttgataaataagtggcttcagctcctatntcttagtttttntaattaccataacccacagttgacaataatgctaaagcacaataccata

SEQ ID NO: 30577 - DNA, 522 bp, Glycine max
  unsure at all n locations
caaaaacgggtggtaagacgtcngcacagcacatcngggaattnagctcggacccgggatcctctgagtcgacctgcggcatgcaagctttattgtctgataacgacaaagagtacacttcatcataattcaccatgttttgtgaggaagcangcattgagcatcaattaacaactccttacacccctcaacaaaatggggttagtgaaagaaaaaattgaaagataatggaaatggtcagatgtatgcttcatgagaaagggttacctaacgaatattangcagaagctgcgaacactgcagtattcttgctaaatcgacttcccaccaaagcagtaaatatgaagactccttttaagacttggtatggttataaaccttccttgaanaatttaaagtatttggatgcttgtgttttacttatgtgccacagattaagagagacaagctagacaagaaagctgaacatggtatctttgtgggatatagttcagtatctaaagcttatagaagtttccaacn

SEQ ID NO: 30578 - DNA, 311 bp, Glycine max
  unsure at all n locations
ccttcctggcttgttgtgttcataataggattccttctcttgatggttgcttttgttaaggacatagactttcagagtttctttgcctaaggatgtgtgatgcttcacatttccattgcagtgtggagattcttctttgagaggaagcttgnggatcttgcacatgaatggcctangcatgttgttggggacatagcattggcaatatcatgggtcttttttcttgtgtacacatggagagagaaatatgattagttaatntactttataattgtgtaagttttttgtgcttgtggttgtagaaacaacat

SEQ ID NO: 30579 - DNA, 389 bp, Glycine max
  unsure at all n locations
tagctttgatgtgtgcgtacccaccatcttttcatagtagagtatcgataatgtgtctaccatcacgattatcgtctccctttccatcattgggggtaccacttgggccgccagatccgtccaccttttgggcgtgttctttgaaagatccgtccccctttgtgcacatgttctgtagttgcatcatatccggaaccatatcacaattgtactgatactggctaacaaaggcaaccattaagtccttccaagactggactcgggaaggatccaagttagcgtaccangtaacagctaccccagtaagactttcttggaaggaatgtatcagacattcctcatcttttgcgtattcccgcatcttctgacaatacatctttagatgggtc

SEQ ID NO: 30580 - DNA, 415 bp, Glycine max
  unsure at all n locations
agcacggctgggnnacatgatatatgtcangggtttgggtttattttaaagggaataaaanggggaattgtatcatgagaaatgtctgcggggggtnntgaacccatnngcgggcgccgaagttgacagcgtgggcattctccctccttacnntctttgcaccagttgcttccaattctttttagcattttggcacttgtggagggaaaacgtaatcgaacttccctcttttcaaccatacttcaattctttcctcggcgaatacttggtccgcgaagctggacggcatgtaacctaccaacttctcatagtaaaacactggcaaggtgtctaccatcatcgtgatcatctccctttcgaccatgggaggggccacttgtgctaccaggtcactccatcgctgtgcgtattcttt

SEQ ID NO: 30581 - DNA, 416 bp, Glycine max
  unsure at all n locations
gatattaaaaattgactataatcagttgagtggcagtacancgaaattatacaccaattattacaagccaaagtctctgaacattttttgttgcttctttttcatcatttcatgatattggatcaaaatggtcccccacttcaatattttcaattcgagattgactcttctcatttatagcaaaagatccaacatgacacttttgctttcacgtacgaaaagcgaaatgctgatggcctctatcataaatacacactactctatacaaacaatgtgtaaaacttcaccttagattttcatgtaactatgccaaaatattgcaccgcgcaaaaacttataacgtttccatttcataacatatgtcaggactaccgagaccatcatacaacttctattttccacaaatgcaatattga

SEQ ID NO: 30582 - DNA, 332 bp, Glycine max
  unsure at all n locations
ntattcaagacaaagcaattaaagatattcaagatggatgatctagacaatctctagagtcttagaaagggtatattaaataggaagggaattccaattgaagtagcaaatttggcctgcataacatattattatgtaacatttagtgcatgtcaacattntcaagtgttaataacagaaaattaaatacaactccctgttaagtcgacttaccaaaatgtcatcccatactangtcctttagagattctgacacatcttttcaatttctatgtagcataggaatcttttctcgaactacgacccccaaatagttgtggaacttttattttt

SEQ ID NO: 30583 - DNA, 392 bp, Glycine max
  unsure at all n locations
tatcttgtatgtcttggatcttcttcatcaatgaattcctttgcttcttgaggtttgattgcagcgaagtggagaaggagaaagatgaatggagatgccacttcaagtagaagatgagtctagaagaagttcaccaccataggaagccatggataagagcttgaaggtagaagaagatgaatgaagggagaggaagagaagagcatgaaatttagtgcctcttaagaagactgaactttgaagtttaattctcatatgatcaaagttgaaaaaatgcacacacaagacctctatttatagcctaagtgtcacacaaaattggagggaaatttgaatttctattcanatttcactcgaatntgtggagccaanatatcactaattatgattag

SEQ ID NO: 30584 - DNA, 417 bp, Glycine max
  unsure at all n locations
tcatgatgaatcaagagtgattcanagatgttttgatgatatctaagatgataacaaaagatgatgacaaaggtgatgacaaaaagctcaaaggtcaattaaagaatgagttcaagatattcaagatagaatcaagaacacttcaagattcaagaggaaagttgatttcaagaatcaagagatcaagatttcaagaatcaagatttaagtgatcaagattcaagactcaagattcaagaatcaagagaagacttactcaagataagtatgaaaaggtttttctcaaaaattgagtagcacatgcatttttctcaaaacatgtttaccaaagagttttactctctggtaatcgattactagattgttgtatccgataccagtagcaaaatggttttgaaaaaaaaatcaaatgaatta

SEQ ID NO: 30585 - DNA, 418 bp, Glycine max
  unsure at all n locations
agcttgtcatattatctcttcaccaacctttgttcccacgatggattcatatcatcttcatatgactggatgaatcttgtaatatttggattaacaacattaaaattctgacacagaaatacacaaattgagaaatgagatgattatgcaggaaggcaaaacttttttcccaataataataaagaaattcatattcacaatagaagcttaaaaaatatcttaagtagggtaaaaaatntactcatgttcacaatactttcaatagagttaaacatctagcatatgatagaagctcatttgctattgctaggaaaaggcttatctcattatggcgaggcaacaagctccaggaatataagaaaaggaaataaactctcaccagttttagcttacatanngggaacataaaagcttacat

SEQ ID NO: 30586 - DNA, 307 bp, Glycine max
  unsure at all n locations
gcttgtacaagcacataaagganaagggaaactgatgaatgtgtttacacatcctttgcacaaaagattaataggcctaactatctaaaaacagtccccagtggagttgccaattgtcacaacctaccctttggcgggtgatgtaagctccattggagcttgtaggcctaggatcttcttcattaatggattccttcgcttcttggaagatgaatggcagcgaaatggagaaggaatagagagaggagatgccacttcactgaaaagatgagtctacaagaacctcaccaccatangaggcaatgga

SEQ ID NO: 30587 - DNA, 384 bp, Glycine max
  unsure at all n locations
tttagatcagaacttctaaatttagggtctttggaatccggacgcgaacacaaatatatgcaagtaaccatagatatttaagaataatatttgttaaaatacattntcttaatcgataataaataaataaataatatttttaacatatatttatatttaaaatgaataatttgaaaatatatatattcatactaaaaattaattaaaccaacttatttatatataattagagacatttgtttatgcaggtatccgttaaactgttcaaatccaatataaacaggatntatccattntactcaaccaacatgcatcctagttctggtcatgcagcggtttgcctgagtccagtctaaaacaaaagtcatgtgattnttcatttat

SEQ ID NO: 30588 - DNA, 438 bp, Glycine max
  unsure at all n locations
ttgcacattanactccacatttatctctatagaaaaaaatatattaatacggaaccctagctacttttaaaaagacgcaacaagggaatgtttntctcttctgttctttacaaatagctaggataatgatttttgtacaattattctgtgtataacagttcctttgatttttgtgaaatatttttttgatatacatgtttatgaaaaaataaaatttaagtgagaaataaaaaaaaaatcatatatgataatgagataggatcgaagtntanaatttgatgaaaccttaaccgcagtgttagtagtaaaaagaatctttacacatgcaacaaanagtcgctaactgctaataaatatatcgatggtgacaagacatagagtacangctttggggttgttagttaaaacatgcttcacatgacgtagtaattacaaaaa

SEQ ID NO: 30589 - DNA, 412 bp, Glycine max
  unsure at all n locations
caagctgnggtctanntctaaggattgagcatggcataggaagggtttagtatgttgaatggtangaaaatttgataatgatcacctccacagactctntgacgctcaactttggaataagagaaataaaataaaaagtgaagattaagaagttcatatataaagggtaatacatctctatatagtgatgattttggcggaaaaaatattatgtactctgagagcatgtgacctacgaagcttattaataaggaggaaatccatgcaatctttgtgatatagagtagaaagtacatttaagaatgtgttgctgaacttgctcataattgaatgtagagttaacaattcaggtgacaagtataccaagtaatgacattatctatctggattctggagaatgaatatgagcatg

SEQ ID NO: 30590 - DNA, 279 bp, Glycine max
  unsure at all n locations
tagganaatgatcttagaggatttatatatgagcaacttgtgtactccaccctgggctgccaagatgtatcaggatctcacgacaatgttttggtgaccaaacatgaagagagaggctagtgagtttgtgtatgtgtgtatagtatgtcagatcgctaacatagaacatctgagaccctcatgtaagttgcaacactttgagatacccagaggaagtggaatatttttcattgatttcattgttgactacctaggacccccaaggtttcgatctatcta

SEQ ID NO: 30591 - DNA, 270 bp, Glycine max
  unsure at all n locations
acttccctcacgtactgtctcgtggggggtatgaactgcttgacaagaaacttatggaggagaagagcaagcgtggacatgaggaacattcgtgtactgaaagcccaacactcaacgtcgacccaccatccccagttgcaagacacttgaagtggaagatcgcccgcactaagcggcatggccaaatgacgtctgaagtggcacaagaaattgtagacanaatggtcaggtcatatatttttttggttactgtcattggcanataatggt

SEQ ID NO: 30592 - DNA, 401 bp, Glycine max
  unsure at all n locations
gcttgtgattatcatgtagaggattcatcanaaggagttgaccacgaacaacactataagattcattcaaccccatgagaaattgcatcaacttgcgtcttttgttgtttgcttcacatgtgcaaatagcatcattataggatcctaactcatcccacaatttttttttaactttgtatagtatgcagcaactatcatttgatcttaagtaaggcaagcaatctctctctcgatctggaaaatgagtggtgcgttgctttgaaagaaacaattttgaagatcttcccaaacttcatgagcagtgtaaanaaaaataacactatctgtaatatcaggggtcattgaattaagaatcccatgacaaaccatatcattgcattnttcatgctacatagtcttct

SEQ ID NO: 30593 - DNA, 331 bp, Glycine max
tgatgggtaccatgaggtgtttttgtgtttgacccacgcgggtgttgaagagacggcatgggcatctccttccttcctttttgcccctgttgccccgattcttttggcgttcacgtttgtggaggaaacgtaatcaaactttcctctcttcaatccaacctcgattctttccccggcaaacaccagatccgcgaaactggacggcatgtaacccagtatcttctcatagtaaaacactggcagagtgtctaccatcatggtgaacatctctctctcaaccatggaggagctacctgtgccgccaatccctccatcgctgcgcatattcttt

SEQ ID NO: 30594 - DNA, 426 bp, Glycine max
  unsure at all n locations
agcttgtcacttgtcagccgaatggagacttctgactaacgatccttagatgacaaggtactaccacatggctacttggcttanagaattcttcgccaattttgagctcagacacattataagagaaaacaatgagagccaacttgttgttaaaactcgccagtacaaagaagaaaggttaatacataatagttatcaaggaaacaatcttggaactaggcttggacaaggtggtagcgagtgtaactctcatttattgagcgtggataattgagatttacgacttcctggaaataactcactctcgaataatctagtagcgacaagaaagattaagagaaatgccagttattatgtgatagcgggaggatacctatacaaaagacgctntacaacctctctgttgaaatgctaagtcgggatcat

SEQ ID NO: 30595 - DNA, 213 bp, Glycine max
ttaccatctatcccagccctctccaagaataacttgtcatgtaaagaaagcggtcctatacaccaaatgtttgttaccactctctcagaccctattacatacatcttatacgactgctgaaaagtgatcaccaatatccctgcatgcaaatttccccagctttgaattgttcaacggagtgcatccaaacctgtcagtcctgactcattgccc

SEQ ID NO: 30596 - DNA, 503 bp, Glycine max
  unsure at all n locations
agaacgaaggggggtggaacgtacgcagcatgcgnncatanagnncgnccngggatnnttnagtcacctgcggcatgcaagctttctttattgcgtcacgtntannaccgagctcgatggtggtgcgagcctttgatggtactcngcgggaagtgatgggggaaatcgatattcccattcagatacgcccccacacttgccatgtggtgtttcaagtaatggatataaattccgcctataagctgctcttgagaagaccttggattcatgcnctgngagtggtcccttcaacgctttaccagaaattaaagttcgcagtgggtggacttttagtgatagtgtcnggtgaagacgatatgttagtgagcttccactcctcctcaccgtacatagacgtggcggagaaatcattgaaccggcttcttatcctttgnggggtgagctgtgcctcngtggaaccagtccgtcctacctttctctccacgccgcataatggtgcaccg

SEQ ID NO: 30597 - DNA, 136 bp, Glycine max
aaaagctgcatctacagcgtagaagtcacctgcagttatgttagctagcacatccatttctagtctgtatcttgttgttcatcaactagcatgcagtcctgaaatattatagaaatgacatatcttatggaagaaa

SEQ ID NO: 30598 - DNA, 316 bp, Glycine max
  unsure at all n locations
gcttccttgggaattaanatgattaaagcttccttaagaagctagagggggactactcatatccctccaatagctaagttcacacctatgccaaaatacatgaaaatacaatgggaagcaaggaaggtagcttccttgggaagcaaggaagaaagcttccttgagaagctagagggggggcggtggctactcacacccgctcaatagttatgctcacccccatgccaaaatacatgataatacaanaaaataaaagtccctactacaaagactactcaaaatgccctaaaatataaggctaaaaccctatactact

SEQ ID NO: 30599 - DNA, 503 bp, Glycine max
  unsure at all n locations
aagcgtttcataccanngcttgcacnnncnnnnannaagaancngggatccttanagtcgagctgatagctgcagcttgtatttgttttcttttaatgtgactatgaggcaggcgcgtctttgagaaccaatccatcgacctctccatctcaaaactcaataagatataagctccacacatctcagctcaaacccaataaatggagctagtatgatagatagaacggcttgctataaactgcctgccacacaagtaatcgacattatagatgggaaatctgtgacaacttctttctgtcagagcaattggagaccacttaattgaacccactgtatgctatcgccactacattaacttttttctaaggatcaagtataggtataaatatatatgtattaactttatgataactaagtttcatccacacaaccagcttggtcaacctttagtgaaaatatccttctcaactatgtattttatatctatataaccaaaccacaag

SEQ ID NO: 30600 - DNA, 379 bp, Glycine max
  unsure at all n locations
cactatanaaatactcccaagcttgtagggattanntggggtacccatcacaatgtggtactagtgtggtctgtcgggcgaatggtgcaaaacgattctccacatccataaatcacgtacaaacccaccatcccctgttgcccacctccaattgagctcacgtactcccacgtagcccttatcctcgttcatctcaacgccgagtccccatcaatcctcccaagctcccacaacatccaattaattccacatccaatcatcatggactaacaaaaccaagcaaaacaaggcaaaggcagaaaactctgcccaaaacacaacccanaatcacagcttttcacatacaaataccccagtaacatttccttcgttcgaattc

SEQ ID NO: 30601 - DNA, 409 bp, Glycine max
  unsure at all n locations
catgtttgctttgcttctgtgatgatgtggcaggagcaatttctgatggttttaaaacaacagcattaccagctgcaatagctccaacgactggatcaagtgacaacactggaaagatagacagagaatgtaatatagatnttgcagagattggaggaaagaaaaaggtgagatgtcagctcaaaagtatgtgacacaataccaactacatattaacatacagaatgggtagttccatgcagagatgactaacacaacccccagtggttcagatactatttcagctgaagatggaaatagtgcgattgaagtcttgacctgcaataaaagggaaattcatgtgataaatcataagtaccaaacaatgtcagcaatgaaattcacataatgtatancctttcaggagtca

SEQ ID NO: 30602 - DNA, 318 bp, Glycine max
caacatatatatgttcatccattctaagctatccttttttttttacatatgttgtaccaggcctcccatccctctaaaagtgaccctaattctcattttaatactaatgttgccccataaggaaatgccaaatatgtttcccagagataaaagaaacatgtctctcaaagttctttgtatttctatatatggccatattctctaaatatattaatagattatttactgagagaactcaagattcctagtttaaaaaagaagtcacaccattagccctctgttttattcttctctatgatgtcgtttggattcttctct

SEQ ID NO: 30603 - DNA, 419 bp, Glycine max
  unsure at all n locations
agctntgagcttattcttacgacaataactnttgattcggatgtccgattgtgtcccgtattatatcgagatgctcgtaattgaaaatagaagctctgagcaaattcaaacgacaataacttttgactcgggtgtccgattgtgtcccgtagtatatcgagacgctcgaaattgaaaacagaagcactgagcaaattcaaacgacaataactttttactcggatgaccgattgagtcccgtaatatatcgagacgctcgtaattgaaaacagaagctctgagcaaattcaaacgacaataacttttgactcggatgtccgattgagtcccgtaatatatcgagacgctcgcaattgtaaacagaagctctgagcaaattcacacgacaattactttctactcggatgtccgattgagtc

SEQ ID NO: 30604 - DNA, 419 bp, Glycine max
gacacatagaaactcaagctgttcttgatttttctaagttctttaacaagcttagatcaatatacttgtccttcatttaattgtctttgggcttggcggcctcgatcaacaaagtactttcggcacctactatatgttgacttgaccaacgctcttatcggtatgctgcgacaatccttcaacaccttattcacacattctgagaggttggttgtcatgtgaccatatcttcgtccagatgtatcataagccatggctccattttcctttgaaatgcgatcaatccatgtcgctatggctggactcaattgacaaaatttttctaagttttgatcaaacacatgcttgcaaagagtgtacgctacatcacaattgttaccatcaaaagttgaggtagatatgaaactcaaataacttca

SEQ ID NO: 30605 - DNA, 423 bp, Glycine max
ttcttgctcatttgtttaataaacttaagatcaatagttattataaaaaattctatcaataaaattctcacatcacactaaaaatcaaatttgcatccttataaaatatgatttctatccttataagtggactcacacctttgttggttatctcatactctaaatatgtatatgtattggttctgtcatcaacaataaccctttgcaatgtcaagtaagattgtttctactaaaaaaatatgtgatatgtggcatagtaataaaacatattgattaatgaagatcattataaatttagtataaactgatactggaaatgattacaagcgtgggaagagaaaaagagtgatgaggtagtgcttctgcaataatttaccaacaggagcagttggcagtagttagtgcgtcttttaaatgatacat

SEQ ID NO: 30606 - DNA, 339 bp, Glycine max
  unsure at all n locations
tatcctctacgacaatcaactcggcggcaaaattcccggctctatcgggaaccttaagagccttcaagtgataagagcaggtggaaacaagaacctggaaggccttttaccacaagaaattggcaattgttccagtttggtcatgttgggtcttgctgaaactagcctttcaggttctctacctccaactcttggcctcttgaaaaaccttgaaaccattgccatttacacttccctactctcaggtgaaataccacctgaacttgngtactgcacaaggcttccaaacatatatctttacgagaactccctcactggatccataccaagcaagttggg

SEQ ID NO: 30607 - DNA, 424 bp, Glycine max
  unsure at all n locations
agcttgaacttgctgtattttctacttttctagtgatttcatatgagacattgtgttcattctgttttatctgaatataatttagtatatacacaaatattgattttgatatgctaatgagatatgctatttgcatatttagaatccatatggcagtttccttgacgaggactataactgaaagccaaaacgtgtttcccatgtctatctgtcttgcaaggcggatttctgatcatggagcttcaagggtagggatactgcttcttaaacgttgattcaattattattccttactccttggtgtaaaataccttatatcntaataaattttatgctggtttatactttatgtnttaacttgtcaaaacaaaagcaaaccgccatgtatcgaattggtcgggatttcatcttccgaaactcccct

SEQ ID NO: 30608 - DNA, 502 bp, Glycine max
  unsure at all n locations
ggggnnnnnnnnnnttgggacagtcagactcngcaatcactcgaccggggtctctgagtcacctgaggcatgcaagctctntgtataatctttcttggaaagctagagctagctacacacacccctctaataactaagctcacctncttgagaagcntncttgagaagattcctagagaagctagagcttaactacacacacctctctaatagctaagctcacctncttgacatgagaagctagagcttagctacatacccnctataataactaagtntaaccccatgccaaaatacatganaatataanaaaagtccctnactacaagactactcanaatgccctgaaatacaagactaanaccctatactactagaantggcaaaatacannggccanaaaangganaacctattctatatttataaagngagtgacccaaccttgctcatgggctagaatctacctgtgtcatgagacccagggcctcttagcactctn

SEQ ID NO: 30609 - DNA, 387 bp, Glycine max
  unsure at all n locations
aatactagcttaggttttcctgcttttttattctnctacctcttttctttcttcccttagaaacctttcttaagtttaaaatcctgcgactacgcgctaagcgcgtaagctagctaagcgacccatgtgcgctaagcaccttttcacttgactgcaggtgctctatgctgcttcttcgccctgagcggacaccctcccactaagcaacaatagctcgctaagcaagtccgacgcactaaacacaaaccatcatgcttcaacttctctctttatcccttgcttggatatctacaaaataaaatcatcaaacagtttgaattaacgatttaaggtacctactgcgcaaatacttcgaggatattaaaattataatgattcacacaaaaa

SEQ ID NO: 30610 - DNA, 154 bp, Glycine max
tctggtgggacatcttgacttgctttctaatctgacattcatttcagattctgccttcttctatgttcagattgggaatgcctctagcagcacctttgtcgatgattttcttcatgcctcttaagtgcagatgtgcaaatctttgatgccatat

SEQ ID NO: 30611 - DNA, 398 bp, Glycine max
  unsure at all n locations
catgtntgtcatcatcaaaaatgcggagaatgtgaatgtattttgatgatgtcaaaagaagaatcaaaccaggctcattntgcttcaaattaatacaagattgttcaacaaacanagccttgattcaagatttcttcaagatcaagtcgcgcctcacaatgaaagggttcaagtcattcaaggcacatgtaatcgattaccaatggtttgaaagtgtgtgatcnattacacatcatantgtatcgactactacagactctgaatgtgggaattcannatttaatgaagggcataactgttcangaaaataactgtcgtattattacactaanntctgtatcgatttcagagaggatntcacggatatcgccacagcacatctatcattcgattttgag

SEQ ID NO: 30612 - DNA, 242 bp, Glycine max
atgacttgatattgacttttcgggaatgcacagacatctcacattcatcaaactggtccagtgaaggatgtttgggaacagttgccggtctctcataatgagccgatgatgttcatcatcttggctgaccggttgcgcactgctggggataatgtgaaaattacccacccttgtctaagtccactctttgtcaccggctaatggttatacatggacattttcttgcccactttgacagtctc

SEQ ID NO: 30613 - DNA, 241 bp, Glycine max
tatgcagttattccccccaaccacaagaaagcaaaacccttaaattccatacgaatcaaaatcctcaacagagtttacaaatccgaaacgaatagaagaaattggaattaaaagaaaaaaacaaattataaaaagaagaacaaactaactaattggatcgtggtggaaacggtgtgtgatgcggctgattattttcgatcctctgttccgtgcttcagagagaacacagaagaaatgattt

SEQ ID NO: 30614 - DNA, 339 bp, Glycine max
ggattatatatcagagtgttatgatccagccttaaccataatcatgactaacataagctatgtttaataagacattctagttaatttcttatttttattaggtgaaaaactcaattgtgcaataaacaagttcttataatacctactaatgcttgatattctttttaatgatacattttttaagtactttaacatctaattttacttaacaattctaatataactaattagtctttaactgcttactatcaattagttgttttaacttctacctaactttgtaacttctagctaatgttgcaaacgtaatgataatcaccaatttggtattctcttact

SEQ ID NO: 30615 - DNA, 488 bp, Glycine max
  unsure at all n locations
nggctgtaagaccatggcnagcacatcnngcaattcagctcgacccggganctctgagtcacctgcggcntgcagctttcttgtttgtccatcngngacaattaactgtaaagtgggcccaattggattctaatttcaacttacctatntggaagtgacatcatggcagttaggtcccagctntccattgtggattcagtcacanaaccaacttcaatatgtnggactatctaacacggngatnttcgattctattcccacacacgatgtgggaagcaccttctcanggtttgtatntaaacctctctcntaatcatatccatggtgagatngnactacattaangaatcaatatctatccaaatattgatctaagctagatcactcgtgtggtaattaccctatctttcacgtgatgtgctcnngtagatctntcangcattcattctctgatccatgaatgacttntatgtacnatcangacanca

SEQ ID NO: 30616 - DNA, 487 bp, Glycine max
  unsure at all n locations
tgaccggcgaanagttgagaccctggtagaatccgataccnctgtaanaacacngcnnnggggatctactacgcttgtagaactatggatgctgttcaagcaaattacactatcttagagaaggagctattatcgatagcttttgctcttgagaaattacgttcatatctgcttggtactcgtgttattgtttatactgaccattgcactctgaagtacctgttgaagaacgctgaatcaaagcctaaattgatcaggtggatgctttggatccaagagtttgatttggagatccgtgatcagatgggtaccacaaactctttgggtgaccacctgagtatgattgagcgtgcgcctgatgactcacccattcgggatgaattttcacatgaccatttgtacattttgtataagatctctgattccgtccccactccatggtttgcttatattgcaattatatggctgctcatgttttcctccctcn

SEQ ID NO: 30617 - DNA, 312 bp, Glycine max
ccggaatccattttcggggaaaaatgtatagactgagaaaagaaaaatcaatacggcgaatgttttgtgctagcaaaactatgggacctgctttgtggtactactctggtgtgaaatacggatttcacattactgatattgaatttggctcattttttatagacgatcgtcagaactctcatccttggtctcctctatttccctcgaagtatgactctaatcttgagtcttttcttttggtataaactaatcttgagtctgaatgggtggttaagtaaatttctaattgaaatgatactctaatctaaaatt

SEQ ID NO: 30618 - DNA, 356 bp, Glycine max
  unsure at all n locations
aatcacatgtntgtcatcatcaaaaatggggagaatgtgaatgtattttgatgatgtcaaaagaagaatcaaacaaggctcattntgcttcaagattaatacaagattgtttcaacaaacaaagccttgattcaagatttcttcaagatcaagtcttgcctcacaatgaaaggtttcaagtcattcaaggcacatgtaatcgattaccaatggtttgaaagtgtgtaatcgactacacatcatatgtaatcgactactacagactctgaatgttgggaattcaaaatttaaatgaagggtcataactgttcaagacaaataactgtgtaatcgattacactaattctgtaatcgat

SEQ ID NO: 30619 - DNA, 372 bp, Glycine max
  unsure at all n locations
tgagcgaatccaaacgacaataactgtgtactcggatgtcttattgagtcccgtaatatatcgacatgctcgaaattgaatgttgaagctctgagcacattcanacgacaataactttttactcggatgtctgattgagtcccgtaacatatcgagacgctcgaaattgaatgttgaagctctcagccaattcatacgacaataacttttttctcggatgtctgattgagtcccgtcatatatcgagacgctcgaaattgaatggtaaagctctgagccaactcatacgacaataacgttttactcggatgtctgattgagtcccgttacttatcgagacgctccgaattgaatgttgaagctctcaaccaa

SEQ ID NO: 30620 - DNA, 406 bp, Glycine max
  unsure at all n locations
tgctttgaatattggtctttgccagtgaaaggatcgatgtgggtatgaaaaaaggcaaatttagtcatcctgcttggacgaatgagaaaactggggcaaatgaagagggtgagaaagagggagaaacccatgctgtgactgccattcctatacggccaagtttcccaccaaacccaacaatgtcattactcaatcaataacaaacctcctccttacccaccacccagttatccacaaaggccatccctaaatcaaccacaaagcctgtctaccgcacttccaatgacgaagaccacctttagcacaaaccaaataaaacaccaaccaagaaatgaattntgcagcgaanagcctgtatgattcaccccaaattccggtgtcatatgctaactttgctccatatcta

SEQ ID NO: 30621 - DNA, 422 bp, Glycine max
  unsure at all n locations
agcttgcttctacaatctccccctttntgatgatgacaaccctgaaatcaagaaacacacacacacacacactttttcctagtcgatcactcacttaattctccatattctccccctttgtttttgagtttatgcttcacttgaaattaagttaattacttatgtgagttcttgatttaatccctatttctctccccctttggcatcaacaaaaagccaaagtgcgtaacaaatataaatcatacatacattactaatcattcacaagacattcattgaaaaatctaaaccaatcatgaagcaagaaacatgaatagatcanatatataaaatccacatagtcatataacacaattcataattgttcaatcatactatgcaaataanagaaaatactaaatggtcanatgtcataataatat

SEQ ID NO: 30622 - DNA, 390 bp, Glycine max
  unsure at all n locations
tctcaaacattaatntaaacaataaatgcacaacttagcatgtttagtggtgccaatagcagttaaaatcactaaacaaattcacatgaaaggaattgatttgaactaatgaacaatagcaaacaaaaggaattaattgatgcacaagcaccaagagcaatacaaattgatgctaataataatgacgcaccacatagaaattagaagcaaaaattaggctcaaattggaatatgatgcaatcacaaagagaaaggcactgaatgaattcaanaaaaaaccgacgcatggtattaaaatgctataacaaattaacacaatatgccacaagtaggtgacacacatccaattgatatttgattgatgcacttcatacaaccaatgcctaattc

SEQ ID NO: 30623 - DNA, 361 bp, Glycine max
  unsure at all n locations
agctcgacccgggtcctctaatcacctgcagctgcagcttcaatttcaagcnaacagctaaagaagaaaatgtgggatcctgtgnaaccaatggtgcttggaaagaagagttaaaaactgccgttaataattatgcttctgtcattacagaacttgatgttgcaaagaaagaactgagtaaaattcgtcaggggtatgatttatcctcggaagcaagagtttctgctctcaagcgagcatcagaagctgaagatgcaatgaatgcatacaccataagagcatgtgagctatctaaagaaattttggctgtacaggaatcatttgagaaaacgaatgctgaatntgtccaagcacatcaact

SEQ ID NO: 30624 - DNA, 393 bp, Glycine max
  unsure at all n locations
agcttgaattttatgttgatttgacagagagaaatacttgtagcttgttgaagttactagaatttggtggtttgctataagaacttgacattgtcttggtggttgagatgaaccaacataaatntgatgtgtcttattcttttttatttctcttttgctatttgatctgttagggtttgaatttgatctttattatttaaaaactttgtttgttttacaaagatttgaaactatcatcttatttgttntgcaaaagtctgatatctgttttgttaagtcttacttcacaagacaataactntattantttacgaaaaaattatttttttatgaaaattacaattcaatcttatttcttgtaatatttatttttgcaatattattatattgtat

SEQ ID NO: 30625 - DNA, 431 bp, Glycine max
tcctcggtgccattcactgcgattgctaacatttggaaagctagtttaccaagaaatgctactcttaaaacaaatatggcatacaacctcctccaataaacacaaacatcaatgtaaatttagagcaaactcatgcacatacttccttatgaacattcactcgcacaaaatattcttctacctaaaaaaaatgcacccatgcgcaatcaaagcacctttgttacctagatatatttatgtgtacttccaaggtgtatttactacttacatcacatgcatttccttggctaaatgtacatacatgcatactcaaagcatcttggctaccaaaaattgcacacgtgcacattctggcatttctagtacctatgcatatacaaactatgtgatgaatctatgctatctacacaataaggtgctacatttcatgc

SEQ ID NO: 30626 - DNA, 381 bp, Glycine max
  unsure at all n locations
ntagcttccactcgtaagaccatatgccactagaccagtctattctagaatatagaaaataaacttcatggtctcgaatacatgtagcgtgcctaaactntgaggtgtaacatcccaaaaataatctaataattatctagataaagatatttaaatatatcttttattacacgacaagatagattaaataatttaaatatatcatataatgatttttatttcgaacagaggttactataataatatataagatttggtaacgataaattaacgataatagaaagtatagataaagaaggatcatttaacagattgcaaattacacacaattcttaatatatggttgacagtctttctcttagaacacacacataaaggatc

SEQ ID NO: 30627 - DNA, 403 bp, Glycine max
  unsure at all n locations
tcacttgcgactggttataaactacaacctttaaacaacaacttgcaagcaattaaaattcgtgactttctaagagacaattgtatcttgactccacgatctagctcttgaatcatcttacacaccctttgtaacctaaagtacaagaattccctaccttccccctcattgcattattacatcgtcaagcacattctatataagttatgaccctatgtatcatctaaaccctgtaggagatgtgagaagaaactcatatataaacatacgtttaataaacctatataacactgatngagatatccttacggatgcttatctggatatcttagaattacattgcttcggtgcttgaaacgccaacccaatatccacattcatatctctcactgaaataggacgc

SEQ ID NO: 30628 - DNA, 370 bp, Glycine max
  unsure at all n locations
accaagtgtgtctaacttttcctaagtctatgtttttgcgttgttgcgctaaacgcaccttgcgcactaanggagtactgttatttttataaggcacgctaagcgagccagtctcgctaagcgcccaatctattttttagttttatttttctgctttcagttaaaataaaagcatgtctaatatgattattgtgcttattttttatgcagatgacctccangaagaggaaagccatagcctcccgatcccgggaaccatataacaccacccattntgtttntgaggtcgcttangagcgatattctcaaaacattcacaccaggaacatccttccagagaggaatgttaatctttttgtgatagagtatg

SEQ ID NO: 30629 - DNA, 323 bp, Glycine max
  unsure at all n locations
gcagctttacattaatttcagctctcgattgtacgggctgatcagacatcgagtaaaagtattgtcgtttaatttgctcagtgcataacattcaatttcagcatctcgatacgtgatgggactgaatcagacatttgagtaaaagttattgcgtttgaattgctcagtgatgaacattcattcagcgttcgattataccgactcatanacatcgagtanaagatttgtcgtgatnacttaagctcacattcattcacacctaattgtacggactgatcgacatcgagtaaagtattgcgttgattgctcaactcacattcatt

SEQ ID NO: 30630 - DNA, 250 bp, Glycine max
  unsure at all n locations
tctttgagcttcattgttgtcctttaatggcgattntccaccatggagatgcatcggaagacaaaggagaataggtaagaggcgacgccatccactatggaataagccatgaatgagcttcaccacgaagatgagcaaagagagtgttggatcgagtggcctcanaatcattaagaaggcggggggggtgaattaattattcctaaacctttactaattaaaaaattactcttctaatgcttttacttat

SEQ ID NO: 30631 - DNA, 366 bp, Glycine max
  unsure at all n locations
cccacaacaacaacaacaattcatcaacccacgatggagaagaagaagcggtgaaacccgaccagctgttcaaggaaaccgcagagtacatcgtgttgctgcggacgcgcgtcgtggttctccagaaactcattgagtattatggaaacaacaacgacaccacccaagatgagaatgaacatgaagatggtgtcttgtttacatagctntttcactctcttcttcttcttcatcttattattattattattctttttggttttcttcttacatggtttgttttgtgacttttgtcctttcattaatgaagaaaaaaacaaaagacaagatctttggtctagtgttttttttcttggaggggggggg

SEQ ID NO: 30632 - DNA, 369 bp, Glycine max
ccaaaatcatgagcacgagaagagtctgttttcttattaatacaattcattgtatatgccgtgatcactcaacattccagtcttatgtaagaacatattatggattaacggacaataatacctctatgtctgagatcgctctcacacaataggctcagcatgtgggcgcatagaaagtggatagtggcaaaactgaatacatgctgctatatacaattaatagactcccaattgtctattatttgaataagacctttgatctttttctaaaataagcggagctaaaagattatctgtttttgatgtcaatattgaaaatagtactcttggctgataaaagtgaaaaatgcataatgccggataaaatat

SEQ ID NO: 30633 - DNA, 346 bp, Glycine max
ttcgaatggtcttatacttttcactcggatgtccgattcgcgggcataactcatctagatgctcgaaattgaacatcggaagctctcgagaaattcaaatggtcataacttttcacacggatgtccaaatttaggacataatatatcgagacactcgaaattccacaacggatgtactcgagaaatttgaatggtcataacttttcacacggatgtccgaatgtgggacataatatatcgagacgctcgaaattgcgctacggaagcactcgagatttcgaatggtcataacttttcacacgaatgtctgattcgcggacataactcatctagacgctcgaaattg

SEQ ID NO: 30634 - DNA, 380 bp, Glycine max
agcttcaacataataaagactttctcaagtcaagaactatgatcttcttgaggaactctaggtttcaaatcgtgccatagtaagcatgggatatattgaataacaattacagggagaacccatgcattgatcttaatgatgtgtgtaatgagacaatgaatgatgcacaattcgaaagctttgttgatattttgtcaccccttggaaattgttgctcttttagtctactggcagttgaatcttttccctctgcttcaatgccctctcagtcaatggcattggcttcaactaggacttctacaccatgtgggacaaagtgtaaagttgttatggttgatgtcactgatacacaatttgatgagttcaacacaggtcttgat

SEQ ID NO: 30635 - DNA, 316 bp, Glycine max
tatgaagagagaacaatttagagagtgatcgaagactttcaaatggatttccactgaatttattcatagagagatcgagatatcttaatgatgaaagttttccaaatgatctaggaagagcaccaccaattgagttgttggaaaaaagtaacgtgtcaatatttttaaatgccccaatatgatctgtcagattgcctgaaagtcgtgaactctgaactgcaagtcttgtgagtccatgggaaatacaaggagcaagaatttctaaaagttcattaacctgttggttgagtttgagatatgataaatctatcaccct

SEQ ID NO: 30636 - DNA, 366 bp, Glycine max
  unsure at all n locations
ttgcttcctccagaagcaaaagccttctggaggaatcttctanacggcccaagtgggcttggatgctatttgcacccccattnttactaattacacccccttgctttttttggtgattctttattcgtaaagttatggaaacttacgaaatctcgaacgatacttgttatcttttcgtaatgttacggaaccttgtggattacataatcatccccttattgacttaccgaatgtatcggaacctcactaattgagcaacgatgcttccatttgaatatccgcgtgtcacggaaccttgctgattgtgcatcaatattttctattgatttctggcacgtnccggaatttcacaaattgcccaatgat

SEQ ID NO: 30637 - DNA, 120 bp, Glycine max
atgaatgatgtgataatatgctgcactaaaaatcttaactcgtaattgactaactacaaaatgcatatattatatcatagactacactcgatattcctgaatcatctaatttgagtacaa

SEQ ID NO: 30638 - DNA, 426 bp, Glycine max
  unsure at all n locations
cgcatgttatctntactaatagctatagacatatttgaagaccaactataataatgaatctggaaattcctttcccaacccctcagccaggtccatatgagaaacagagtgctatctgtcagtctagtgatatcaaaggtttgattctggaaaattatatcatttctgagcctccatattgaggttgtaactgctatccaccacattgtccttcttatgttagcatcctttgaaactgctgaggagaaatgctgaagacaattgtccaaaggtctgcagtgaaacaccttttcttcctttatccaagataggaattcccaccatataggcataattntgccacaagtgaagagtacgtgggaagcagttcaggttgactatgacagaatggcataaatattatgcacctgaatctgcctcttaatc

SEQ ID NO: 30639 - DNA, 349 bp, Glycine max
  unsure at all n locations
gcttagctacacanccccctataatagctaagctcacccncatgatataatacatgaaatacttaaaagtccctactacaaagactactcaaaatgcctcgaaatacaaggctataaccctatactactagaatggccaaaatacaaggcccaaacaaaggaaaaacctattctaantattacaaagataagcgggctcaaacttagcccatgggctcggaatctacccttangctcatgagaaccctaaggccttcccttggatctctggcccaatctacttggtgtctattatccaatgcccttgtggngtaagatngcatcattccctccaccttggaaaggattt

SEQ ID NO: 30640 - DNA, 313 bp, Glycine max
  unsure at all n locations
agcttgttagaactatcatcacatgacgctntattggcacagaataagttgctttctaagcaacttgagattttaacagaaacacttggtaagttgccaactaaactgtctattggtcaaccttcacattcttctattttgcagattacaggttgttggatcaagtggcctcagaataattaagaaagggggggggggttgaattaattattcctaaacctttactaattataaaattactcttataaggcttatactatgttgttaagtgaataaagagtagaagagaaacttaaccaacagttaaagcgga

SEQ ID NO: 30641 - DNA, 382 bp, Glycine max
tataaaacccagcttgggaaacaattagaagggaggagaactgatttgttattttatgaatattatgtcttataacataagggggcttggaggtagactgaagaacaaagaggtacatagtttaatttctaaatataagttaaatgttatttatgagcacgagacaaaattggaggagatcaatagtagtttatattctttgttgaggagttgagatgattatgagtttgattctaaaaaatcagagggtcggttatgggattttatgatgtggagaaaagatcttttggttgtaaaagaggtggtgtataaggaacattggttatgattaattggtgtatgtggcgttgagcagattgaagtgtttattgctggggtgtat

SEQ ID NO: 30642 - DNA, 377 bp, Glycine max
  unsure at all n locations
agcttgctaatgtgttgcataccaatgagctcgcaagacggctaaaggtgatgacttatttgaggttactgagtatatgttatacctgctagtagtctgtttctgtatgtgttgttctgttttatttacccctgcaaaataaaggaaacatgagaacagggaaacaggggactaatccagcttatcaggaaaatggttgtggaggtggtctactgacaccaacagtttgtgagatgctatttgtttatgtaaaacaaattgttgtgagtggatcaactggagttggggtttgtaagatantttcctgagggtgttgtttgttgataaaagagtaacctttgganaattgaattcttattcatatactctgaaatgac

SEQ ID NO: 30643 - DNA, 252 bp, Glycine max
  unsure at all n locations
ttatgttgcanatatttacaatagacctcctcaacctcattatctaaatcaaccacagtttatcaattatgacctttccagcaacagatacaaccctggatggaggaatcaccctaacctcagatggtccagcccttatcaacaacaacagcagcctgctccttccttacaaaatgctgctggcccaagcagaccatacattcctccaccaatccaacaacagcaacaaccccagaaacaaccaatagttga

SEQ ID NO: 30644 - DNA, 380 bp, Glycine max
  unsure at all n locations
agctttcttgataaaacttccttgagaagcttctttgagaaaacttccttgagaagctagagcttagctacacacacccctctaataactaagctcacctccttgggaagcttccttgaaaagattcctaaagaagctagagcttagtacacacacctctctaatagctaagcttacctccttgagatgagaagctagaacttagctacacaccccctataatagctaagctcacccctatgacaaaatacatgaaaatacaaaaaanagtccctactacaaagacaactcanaatgcctcgaaatacaaggttaanaccctatactactagaatggccaaaatacaaggcctaaacgaaggaaaaaacctattctaata

SEQ ID NO: 30645 - DNA, 346 bp, Glycine max
  unsure at all n locations
tctcccccaattntctataaatagggggagaagtgatgttgataagggtccagccccttaggcacttgtctctctttcgaatttgctcggaaaaattgtttccgtgaagaaaatctaagccgaggcgcttgcgaaacgtttccgtatcgttttccgtgaggaatctcgcaaaggtttcaaccgttcttcgacgttcttcattcgttcttcatcgttcttcgatcttcaacgggtaagtacctcgaaccaagcttttctattcattctatgtacccgtagtggtccacattgtgtttcgtgcatttatattctcgttttgttactttttattacccctgttgcatgc

SEQ ID NO: 30646 - DNA, 380 bp, Glycine max
  unsure at all n locations
agccttgaatttatcttttctatgtcttgaattgaacctaatctaattatcaaatattataaatcacatttcgttgtgggggaatgtgaggctcanagaacattgtgtattttccatctctctttgcagtgcatatgatagagcggctattaaattccgaggagtggaggcggacattaacttcaacattgaagattatgaagatgacttgaagcangtgatcaatttgtgaatatttatattttgttntatcttatcttgaacagtcacacctcatacgtataggatcaccttatctcctacagttagtgctatnttttctgtcttgaagtactctcatgaatttgttaaatgcaatgttaatagatgagcaatcttac

SEQ ID NO: 30647 - DNA, 391 bp, Glycine max
  unsure at all n locations
tctctactaccaagagcagctcaatctgtgatataaaataatgtaagagaatcaattaactaacacccaataagaacatcagaggaagtgatgggggataaaaataaaatgtcatgattcatatacagacagacaaagatgaaagtcatgcataggcttattttctgagattntgtgaggcanganaaaagacaggcaacaaaccctttgacagactcaaaatgacaaaatagaaagacaacaagacaaaagggcaagtaatttgatggtgaggagctaaggaacatactgtgttgaaaaataaagggtgaaattaaatgatntaggtagttaataagtgaaacctgagcangagaaataaaatcataatatatgcaatattgcatggaat

SEQ ID NO: 30648 - DNA, 348 bp, Glycine max
  unsure at all n locations
tatatgcctagatatcaggttaatttaatttagcttatnttcttattangttttaattactttttttttctgtcacaaattactatatatgcactgtatttcatttcttaggccgcattaattagtatgcatttgtttaattaatttctaaatatttccacttctttttcatgtgtgctactacacagtctacactatagtttgtgtatgtatgagaaagatgaacactaggttatgacgtgtacgaggagtttgaactgtgagtcanattactctacaataatagtaatatctaattttatcctctataacaacgcaaagctagaatatacccccaattacatggat

SEQ ID NO: 30649 - DNA, 379 bp, Glycine max
  unsure at all n locations
gctattattgtgtgtagagggagtgatgaacataggatgtcttctctcacaacttctacttggttcttttgggatcttaggttgaaagacattgattagtgaatgttttgagaaatgatacacctctgtattttgacagagtaactacccacgagtttgacagctaatagatctcattacatcattcacatatgtcattgttatctaacattgttccctcagtctatgggttacaacaattgtatattcttctctttattctcatataggtaccatttgaagaagctccagagcttgttgatggacggtatgtgtttattaatcaatgatatgcatatgttgcaatgaatcanggtcactagtgtcattacttctattt

SEQ ID NO: 30650 - DNA, 247 bp, Glycine max
  unsure at all n locations
gctttcactttccaagcattaatttccaacatcatgaactacctaactaggaaacagagtaaggtnaaaaatctgccaaaacacattcacatcttacagtttcttactcaaataccccagtacattcctttgtccgattcgtaccgtggatnacttgaaatttactggagattctagtcataagtnacattntgaccgtgggatctgtagaaatgtcagaatcaatatgtactacctttccataacc

SEQ ID NO: 30651 - DNA, 422 bp, Glycine max
  unsure at all n locations
gcttttctttgcttggctacaaaatcattggtttgtctaggaacaaaggatagatcctaagagagcacaaatcctatacttatccaagtgatccttttttatatacaattgcttactcactagcttttcactttcatttgcttttgaccttattgcattagcacacatttcctttgattggtttctttattttggttcttcttctctatttttaaccacacaacttatgtgttgggagtgctgatgctatatctatttctttgcatcccaattagtttcacctccccaaatttggggtaaatttgccttgaaccatatgctctcctacaatctaaacaaggtatcttggagataatcatttaggttcacggttcaattatggacaaaatcattcagctcacanagggtgcatatgatacaat

SEQ ID NO: 30652 - DNA, 423 bp, Glycine max
  unsure at all n locations
agaccncgtgctgttaaaattgaganccatgnagnnatcttgacactttagtannaacnnnaannnnnggaagggagatgtatcgtaaactgaagcgaatttctgttacttcagatagttttctttgtgagtgtgctagaataggagctttgacatgtggaaaatagatccatgctcatgcattgagaactggtatatctttatggtttataccatgcatatacatacgttgttagggggaaatagaatagctggaaaaattttgtagtgacatgaataaacatgaattttgtacagatatgaaagtggaacgaccatgctactggctttttaagatggtagtaacgtgaactatgaattcttattcatgttggctgcgcacaagttgggcaatgttaaaattttcagatggttagacttttt

SEQ ID NO: 30653 - DNA, 312 bp, Glycine max
  unsure at all n locations
atacttgtaatttgttgaagttagtgacacttcgtgaattatcgataactagacgtagtctcggtggttgagatacactagtataaatttcttgtgtcttattctctcttctattattngaactggcctacggtttgaatgtgatcttcgcttttgaacaactctatttgcttacaaagatatgagactattgtctgatctgtcttgcaagaattgatatctatgttcttangtgtacttcatcaacactatcttgatgtattcaaaaaggtttgagtttataaatttgtaatgttacatacatgatttgat

SEQ ID NO: 30654 - DNA, 324 bp, Glycine max
tcaatctgccatagctactcagttcgccaatctccctcaaatgctactacacaacctacaacaagctcagcaaaacatgttgggtgttgtcatccaaccacctcccattatccaacaacaaccaactccaagtatattgcttgcacctgttgaaggaaaaccatcatcacccacaataacaccaccagtttcagcaccaacaccaccaccgaccaatcaagagtgacgatgatgtcccatcataattactttctgtcaatgacaaaaggaagagaatgttatagaaatttgatttatgtaaatacgacactcttataaaataca

SEQ ID NO: 30655 - DNA, 117 bp, Glycine max
ctgcaactttacttggtttgctccggacttaaacccgtgcgacacactaatttaaaccctcccctctttacagcacccctctcatcctaaactactatccctggcaagacgactagg

SEQ ID NO: 30656 - DNA, 338 bp, Glycine max
  unsure at all n locations
agtccatagttccaatcaatcatgctcagtatgatgcatgcacctgacctcaactctcaaacgtaatgtggtaccatccccaaggaaatagtctaagcgttgtagaagcaaagcttccaagattattttgatgatgccaaagattttaaaaagatgcattcaaacaagattaaagaaatcaagaagattcaagtgaagattcaagagaagactcaagatatgcaagaacctcaagaatagctcaagatgagataagaataatntttcaaagaaaagaatgatagcacaatttgccaaagaaaaatcttntaccaaagttttttactatctggtaatcg

SEQ ID NO: 30657 - DNA, 326 bp, Glycine max
  unsure at all n locations
aaaaatttcttggatagattgaagtctttggtcataagttttatttacttatgctgccacttgtgacaacattacatcatacccaaatctgtgtgcaatttcgatgtttgcagtgtggatctgtctatacttctctcttcaattcttttcaaatttcatactcttcccaatagagttgtttgcagtttcactagcagacgtccaaactaataactatccaataaatttcaccatcttatcttcatgattgcaaatctatctaccggctaagataaattataatataggttttctaatgtatgtgatctctntgactaatatgacag

SEQ ID NO: 30658 - DNA, 434 bp, Glycine max
  unsure at all n locations
agctttcacttatccaagcaattcaatttccaaacatcatgaactaccctaaactaggaaaacagagtaaaggtagaaaaatctgcccaaaacacattcacatcttacagctttccttactcaaataccccagtaacattctctttgttccgattcgttaaccgttggatcgacttgaaaattttactggagattcctagtacataagtctacattttgaccgttgggatctgctagaaaatgtccagaatccaatatgtactacctttcccataaccagcaatgcacaagcatttttctgcacatttggtcaagttggctgcacaatttgacagctttttgctgcacaatttggcagatttcgaaattcctcttacccacantccaatttgctcanattggantcctacagtcctaaatcatgcataaatcat

SEQ ID NO: 30659 - DNA, 317 bp, Glycine max
  unsure at all n locations
gctncttatatggagcacacgagaccagacaaacatgtcacttcatctatcaaagtacatattgatctacatcatgcaaatttatgtgacacttctcatgcctaattgaatgatntgatcgatctatcaacgctctatttatacatacataaaataacaagacgatttaattcctttgacacggttctgtccatgatgtacaacaaggtggttacatacacattatttaaccaattaatgaaaataataatatgtttcatcaaaactgacctgatccttctcatgcttattgagtgagttgattacccggcttgact

SEQ ID NO: 30660 - DNA, 433 bp, Glycine max
  unsure at all n locations
agcttgtatgtttgcttctatnttctcccagaaaagtataaatataagaaacataaacaagaagctctcttgttttggctggccattttgacatattcgtgcatatttacatagagactaacccattgctaatagtctatattgagacgggtcaatgggggtttatataactatgttaattgctaatagtcaatgcctatcagtatcatcacataatccaatgaccttagacttcattgtataatagtaacacaatcatattaacataataatttacataatatggttgtcattatgaggatcaatctctcagacaanaagtcaaaggaaggcgggacacaaggacagatgcaatntaaacatccaatttgttttatatctttcaatgagaaagagatgatatatcatcactttgacgttcaatgtatgacaa

SEQ ID NO: 30661 - DNA, 439 bp, Glycine max
  unsure at all n locations
ntaaaggatgttntatcagtacaaaaatatatgtntttgctctggtaattgattaccaaatattgtaatcaattactagagatacattaccagagacaaattacataaaggctttttcaaaaagaagtttctcttttgaaatttgaattttaaatgctgtaatcgattaccacttgtatgtaatcgattacctgtgatgaaatttcagaagttaacattgaaaagtcgtgacctttcaaaacataactatgtaattgattaccaagaagctgtaatcaattaccagtgagagaatttttgaaaaatattctgaaaagtcacgtgtctntcaaaagttttgaaaagccaccaaggacctataaatacgtgacttgtctacgaanaacattagagttnttcattagaacctangtgacatattctctcaaaacaaatcatt

SEQ ID NO: 30662 - DNA, 411 bp, Glycine max
  unsure at all n locations
gcttcttgtctcanaaatggcctttgcaacataatgccgcattgctcttatggccttcagataatgaggtatgatataactcagaancaaatgaaatgaagatcttctgtcttaattgcttaaaaatttgttacgttgagacttaattaactattctctgtttatgggccatttattttattttgacccttaggataatgcctccgatttcataagggtaggtggaattcagagactgcaggatggagaatttattgttctagtaagttttttctttaatgcacactntaactnttattacagggtttctgctcttacccttggatgcctaaattaaagaaacatctgaacatttgtaatttanagaaccggnggaaaatagattcatctttgacctatattgacccttat

SEQ ID NO: 30663 - DNA, 387 bp, Glycine max
  unsure at all n locations
ctatagaagtaaacaagatataaatatcctcacattatattttagcatatgtgcataaataacaaataagtcataagtcatcaagacataaagcatttgtctgaggccctggcatctacaagtcctaattctcttctaatggcgtagaaagagcctttggttagtggttctgtgaagatgtctgcaacgctggtaattagtatctacagatgctcaaaacacagtcacctttgtcctcagactaacggctaatngaccatcaacatttaccaagataagtttttattgacatagaagggcttatcatatcaggatactttatttgaaatacatataataattttgaaaagcataaaaatttttatcaggccatcaagtattcgacat

SEQ ID NO: 30664 - DNA, 333 bp, Glycine max
  unsure at all n locations
tgctgcatttcggaataccattnttcggggaaaacatgatgtttgacagagaaaagaataaatacaatacggcgaaagtaatgttagagacagacaaaaggagttgcaagacatcattattattgtgcataataacaagttttctttttggtgcagtgcataataacaagttagtaataatcactacatgttttctttttcagttgtcgcctttattcatcgaagtatgactctaatcttgagtctttttttttggtataaactaatcttgaatctgaatgggtggttaagtaaatttctaattgaaatgatactttaatctaaaatttaaac

SEQ ID NO: 30665 - DNA, 426 bp, Glycine max
  unsure at all n locations
agcttaacatgtagatattggaacacatcatcgaaagcatcccacaaggtatgtgttcagttctgtaagttaacgaggttgaagtataacttctcaatggttcttttgaaaaattgcatttgcaggtgcaagaaagataaggactacctatataagcatgaagtntaaccgcttcaagaagctgggacttggctttgatatgcttatgaaggatagggacacaggctagtaaactagtgtccaacaagagtaatgttataaactattgtgcagattatcttcatgtattcattatgaatagaaagggttcaatccttagtgacaccctgatattcgaatatctgaaacgtgtaatttgttaagatgaaattcaatcgtcacgatatttcatctatgcagtaatttgtggtatgttatgactttggt

SEQ ID NO: 30666 - DNA, 212 bp, Glycine max
actgcatgtactgctgctctaatctgactgtatgcattttcccaaaggataatttatgctccaatataatacgaaaataaatgtcttgaaagaattgaaaatgtattatagaggatctcaatccaatgagatactaattgataagcctattttaacctctacctaaaataaaatatacaagatctaatctatatggcttaattcgatataag

SEQ ID NO: 30667 - DNA, 182 bp, Glycine max
  unsure at all n locations
cacattatttccatgacacatatgcaaagatgatgatttgganatnttatgcanaactggtcatgcatgcacctatgcggacactcaagtgtcaaatttttatggtcatgggatgctacggctcangattcatttcctctattgttagtcaacccaatgtatcaaaatatgttcttttatca

SEQ ID NO: 30668 - DNA, 348 bp, Glycine max
tcaagctagggccagattctcgtgcatgcagaggcttcttctataaaaactccaaactccctttgcaaatctgatttcaggcttaaataggtggccttgttcgtgctcgtgcgcttagcgcagatctagatcacttagcgcgcctaagtggattgtggcttaacgtgcttgtttcgcttagcaaatgagctgaagcggtgcacttgatgacctggagtgtgacaccctctaccccgacatatatataaataaataaaatatataaaaatatattggtaaacaaaatcacatgggtaaaaggttcacattcacttcatttaccaaataaaacttattaaaaacaaattc

SEQ ID NO: 30669 - DNA, 276 bp, Glycine max
  unsure at all n locations
ttacctccttgagataagaagctagagcttagctacacacaccccactaatagttaagctcacctccatgccaaaatacatgaaaatacaaaaaagtctctactagaaagactactcaaaatgcccttaaatacaaggctaaaaccctatactactagaatggccaaaatacaaggcccagaagaagganaacctattctaatatttacaaagacaagtggacccaaccttgacccatgggctcaaaaatctaccctgaggttcatgagaatccta

SEQ ID NO: 30670 - DNA, 398 bp, Glycine max
ctggatcctggatcctggaaatcaaatttcttcttgaaccttgaagtgttcttaatggaatcttgaactcattctttgattcttgagatcatcatctttggtatcatgaattggtgatgatctttgagtttttttgtatcacctttgtcatcatcaaaacctctttgaatcaatcctgattcaatatgaagctggcttctacaatctcccccattttgatgatgaccactttctaaatcaagaaacacacacacacacacacactcacacactttttctagccgatgactcacataaaattcctttctccccctttggtttttgaatatatgcttggcttaaaattaaagtgattactcatgtgagtccttggattaatccctattctctcccctttg

SEQ ID NO: 30671 - DNA, 303 bp, Glycine max
gcattcgctaagcacgacactcctgtgctaagcgcgaggaagaatccagaagaagatgagctgtacaagttcactaagcgcaccacttcagttcatccactaagcgagaaaggcgcactaagccaaaaatcactaacgtgcgctaagcggtccatacgtgcgctaagtgcacgagcacgaacaaggccacctatttaagcctgaaatcagattttgtgaagggagtttggattgggattcagagctttgcatgtctagggtttctagagagagaaaggtccaagttctagagagttttgagag

SEQ ID NO: 30672 - DNA, 353 bp, Glycine max
agctttcacttacatacgaagatttgtgagtgacaaaccatgttgtcattcttgacaagataaccaagaggcatgtccatgtatactccctcaatcaaatcactattgaaaaacacattatttaaatcaagctgaaacatgttccaatttctgtgaggtgcaatggaaagaaacactctcattgccgtatgcttggcaacaagtgagaaagtgtccaaaaaatcgatctctgcttgtatgttgttgtgtgtaaccttttgcaacaagacgagccttgtatctatcaatggagccatctgctctatacttgaccatataaatccatctgcaactgatgggtctattatcgggtg

SEQ ID NO: 30673 - DNA, 229 bp, Glycine max
  unsure at all n locations
tgcattatcaacttctcatccctggaatatgcacccatctttcgatagtacattgttaggtgattcttatggcaagtcgtccctttgtacctatcgaaatcaggtaccttgaactttggagggatgacgacgtccggcaccaatcaaaggtcggtcatgtccgcaaatggataatcgctgaatacttcgacagccctcaacctcttttcgatgagatcgagntttccct

SEQ ID NO: 30674 - DNA, 364 bp, Glycine max
  unsure at all n locations
agcttttcgattcattctatgtacccgtggtggtccacattgtgttttatgtatttctattctcgcttcatttaccttttatacccnctcttgatgtgcttaagccattttacttaagtcatttctcgcttaacctaaaaataaaatacaatttcaccgatcgcttgaattgtattatccgttaacttcngttaaaatgaattccgaccgttcggtcgtgccgtaaccacgttggatatcataaatgaggtcacaaataatataataatcaaaaaacatctctttagtaaataaagcggatatcaatcggacgtttctctttgggattctcattcttattgaatngctaataactaagtgaact

SEQ ID NO: 30675 - DNA, 186 bp, Glycine max
ttagtgaaaacatgattacatatctaggatttttttgcttgaatgttgggaataaggggggttttgtcattggatacagtgtgatggctgcttatgattatttgaccatcttgagtcattgctatggtaaatgtgacatgctgaatatagctgttctaaagctacatgctaaaaatcaaaaaaaaa

SEQ ID NO: 30676 - DNA, 370 bp, Glycine max
gtgtaatcaattatgatcagattgtaaccgatgaaaatagagttttaaacattgaagaaattttctaactttagaacctttcttcttagtcctacatgatgatgcatgatgcacgtatgaaatgatagagactaagatgcaacacacaatacaacagtcaatacaaacgccactcaagagagttgggcatgtaaaagacaaaacttcttcaagttcttctttaagcttcaaggccaagtctttattttgctccccttatctctaacaatcttccccttttttggctttgatgatgccaaacttgaattctccatttgagtgcatttggagagtcttaagagtagagacttttcttagacaaacctgaatg

SEQ ID NO: 30677 - DNA, 402 bp, Glycine max
  unsure at all n locations
agcttccagtttattttcatattntcagctcctagtttatagcttataagctttcaactaacttattaattagttttaccaaattaaatttgttagtttataagttttacctagtttataaatgaaaaaataaattaagctaaaataaaatgttcgtcttttatgtattttttgtttctactctgctcctctaatttagnctcttataactttcgggaagataatagaaaatggaatcgattgaaacatagtagaatgggtgaatcatgaatagaaagaattaacaatatgtcactctattattaaataatgtagatgtataatataatggtcaaaaattagattccatcatttgataaaaggagttgaataaattatctttttattcattatgaaaaataa

SEQ ID NO: 30678 - DNA, 269 bp, Glycine max
  unsure at all n locations
cttatttcatgtattcactgttcctctggtacttgattattatatatatttatctttgccgagcaaaaaacaaatgtctatgggcctagagcatggcaatgcaggtgacccanaaatggatctaaaatagactctgaaatcattntagaatttgggcttagtgaaaaggcctaactcatcccatataaccgacttgtagggtgaggattgctcaaactttataagctctatttaagttatatctctagactatgtgggactaaatactc

SEQ ID NO: 30679 - DNA, 417 bp, Glycine max
  unsure at all n locations
tgctttctcttgccatttcctgtgaaggcaaaaatttggaaagttagttttaccagtgggacactactcttaaaacaagaatggcatacaacctcctcccataaatacaaacatcaatgtaaatttagagcaagcttatgcgcatgtttccttacgaacgttcacttgcggaagacatcctattaactaagaaaaatgcacccatatacaatcaaggtagcttcattacctagattatttacatgtacctccaaggtgtatttgttatttacatcacacacacctccttggctgaatttacatacatgcatactcaaagcattntggggtaccaaaaactgcacatgcgctcatcttggtatntctaaataccctacatatacaaacttcacgatgaatcttgactgcctacacaat

SEQ ID NO: 30680 - DNA, 421 bp, Glycine max
  unsure at all n locations
agcttcaattctaccactaaatggtgtaataagttcatatctcaactntcatacctctacattcatttttctttctaatcctctatcagatcagcactcctcacatctttcaccttgaattgacaaaacgtgacctatatttctatgtgtgtcttctgaggtatcattccctaattaattttacattntgacaccttttcctctctctctttccaggatgctgctagttaccgtgatgagctaaacaatattgccccacactctcttttaaaatgttgcagcgatgctacaacattggtatgatccctactttcagttaaatacgttttatctccgagtgatgtaagctatctcaagagaaatacagttaacaaggaaaaccaacttccttttttaaacagtcttttaagttgattgcact

SEQ ID NO: 30681 - DNA, 168 bp, Glycine max
agatattccaaactatttgccctaattgaaaatctatttcactttgtactcaagttatgaattaccttaatgacgatcttcttaagtaaatgaaacaatgtggatatgaatataaagcaattatgatataaggagattaagggaagagaaaatgccaactcagtttta

SEQ ID NO: 30682 - DNA, 363 bp, Glycine max
ttgcttgtcattgtgagacatcagaggctagtatttgaataaatgtgggtaagaaaaattcaccaaattgatagagaacaatctaaaatcatacatcttaggcaaataaggcatgctagcccccaacattattgcattttgattccatctttacacattcaaattgttgtttatttctcctgttatcttttcctttgccttagtctaaatttcaaacttacaattccgtatctctttcttcttttgtttctcctcatttcttaataattggatttgcatcacttaagtacaaccaaagtccctctggatttaattgttgaacttcaatttcaatctttactactcgtgataaaattacgacac

SEQ ID NO: 30683 - DNA, 290 bp, Glycine max
  unsure at all n locations
cgaccttagaatactcagcttctcgctcanaattcacttcttggttggtgtttttggtttgtgctaaaggtggtgttcgtcattggaagtgtggtagacagactttgtggtagatttagggatggcctttgtggataactgggtggtgggtaaggaggaggtttgttattggctgagtaatgacattgttgggttggtgggaaacttggccgtataggaatggcagtcacagcatgggtttctccctctttctcaccctcttcatttgccccagttttctcagtcgtcta

SEQ ID NO: 30684 - DNA, 498 bp, Glycine max
  unsure at all n locations
agacaacgggggaaatgagcgactcacgncgtncnaanacncngnacccgggatcctgtcagtcacctgcggcatgcaagcttcagtttattttgcatttggctgaaattaatttaagtgttgtattgcgtattccatgatgatacattctgtgtgcgtgctaaatgaattggctcactgcgatggcttatgagatgggttgccttcagaaaatggtgattgcttatattatcttagagattgctgatgagaaatggttgaccccctgataacacgcatatgctgtgatcgctctcgtgtgcttgctatatcgacccatcaccatatctatacatcctatgactgctttatgcactagaactggtcataagactttctgagaatatatatcgttatgcatcgggcgtttacacacgngcccggctttacagaacatcatcccaaaaaactgacatggctctcttgttgaatttccatacttagagtttgactctctcg

SEQ ID NO: 30685 - DNA, 338 bp, Glycine max
  unsure at all n locations
tagaatactaagctntgatccatgaanacgacaattatctttttctcagatgtcttattgagtccaataatataacgagacgctcgaaattgantgttgaagctctgagctaattcaaacgacaataactgtttactcggatgtctgattgagtcccgccatatatcgagacgctcgaaattgaatggggaaactctgagccaattcacacgacaataacattttatgggatgtgtaattgcgtcccgtatcatatcgagacgctcgaaattgaatggtgaaactttagacaattaaacgacataacttttacttgatctctgangagtcccgaacat

SEQ ID NO: 30686 - DNA, 419 bp, Glycine max
  unsure at all n locations
tagctttctctgggccatttcctgtgaaggcaaaaatttggaaagttagttttaccagtgggacactactcttaaaacaagaatggcatacaacctcctcccataaatacaaacatcaatgtaaatttagagcaagcttatgcgcatgtttccttacgaacgttcacttgcggaagacatcctattaactaagaaaaatgcacccatatacaatcaaggtagcttcattacctagattatttacatgtacctccaaggtgtatttgttatttacatcacacacacctccttggctgaatttacatacatgcatactcaaagcattntggggtaccaaaaactgcacatgcgctcatcttggtatntctaatacccctacatatacaaacttcacgatgaatcttgactgcctacacaat

SEQ ID NO: 30687 - DNA, 328 bp, Glycine max
ccttgcctcatagaggtccaggatggactttgcagccgaatgatctagttccgctccggagtatgacagtcaccgctttatgagcgctgtacaccagcatcgcttcgaggccatcaagggatggtcgtttctccgggagcgacgcgttcctctcatggacaacgagtatgctgatttcaatacgaaatagggcgccggcggtgggcatcactggatactcccatgcccagtttgacccgaaatagtccttgagtttatgccatgcttggccacaaagatggcgtgctgacatagatcctgcgtagggtcagtgaatctgtttgtgcca

SEQ ID NO: 30688 - DNA, 349 bp, Glycine max
acttgatgattgttactgtttctcaattataagataagcattgtgttatgacttggttctgattatcaatttaagataatgatgactccttcataactctccatacctgaagtggtatgtaaaggtgataatatgtaatttgatagttatttaaggaaaaaatgcctaagtctatactaaaataagttgtcattattaaaatgatgttacaaatccactgattatatttgggggtgaggtcaatggctcaagtatcacattgaccactgcaagattttacttcatgttaatatactttaattctttatctgatgcaatttaatctatctatcgcttatgactacttaaa

SEQ ID NO: 30689 - DNA, 273 bp, Glycine max
  unsure at all n locations
ntgcggatgtggtcttcgccggtgaattggtcgaagcggatttgaaaagaggaaaatgtaatcatcctgcttggacgaatgagaaaattggggcaaatgaagatggtgagaatgaaagagaaacccatcctgcgactgctgtttctacatgggaactccgccaccagctcaacaatgtcattacatagcaaataacaacccttctccgttactaccacctaattaaccacaaacgccatcccttaatcatccacaaaacccacctgtcacaca

SEQ ID NO: 30690 - DNA, 456 bp, Glycine max
  unsure at all n locations
agcttgaagttatatgttaaaataactnngtgtattctttttacattctcttgcaacagcctncacttgagnnttatcattanannagtgttcagggaatnntaatccaaacctattaannattgatcccaataanaattgatnaatcgagcanaattgttatanaaaaatacctaaacacttcaatgcnagttcggttttgtgattctcatgttcaaaattgaactgagtcaaattggaaacgtaactaaatttatattagtcttattttgtcttctttntttactgcaattcctatatatttatcttgaaatacaatttaaccttatttgaacttatattattatttctgaataacttgaagataatntgcaatntagtctgtgatttagatcaagttgtggttttatgaccagaattaatagtttgaaatgatatttctgtatatgcattatg

SEQ ID NO: 30691 - DNA, 465 bp, Glycine max
  unsure at all n locations
ggatgtgattggggacctgagactcaaacntataaaacccngaatggacatccggtgaacctttgaaattngaatttattagagcttccgaggttcaatttcgagtgtcaatatatgtgatgcgccatatatggacattcgagttaaatgttatgaccctttaaatatctcaagagcttacttggtaaatttcgagcctctaacatattatgcgccccagtcggacatacgtgtgaagagctatggccattgaaacatctgcgacagttatcgatgataaatttcgagctgatcggtattataatagccctgaatcggacatccgagtgtaaagatatgaccatttgatattctcaagctctttccgtgatgcatttgtagcctcttagaatataatgcgcccgatatagaatccgtgtgaaaagttatgatttataaagtctcagaagtttcgagtacattccg

SEQ ID NO: 30692 - DNA, 358 bp, Glycine max
agcttgtttgttataaagacccaataattctacctattgttgtcattctatttaccatgcattttatagtttttagcataaaagtttagtttaaattctttttgaaattatcacttatacatgttatctcaacaatgcttcaattctgaacttaattcaggctaacattaacctcccatacttccatgggaaggataatgtagaggcttatttagattggcaaatgaaggttgagcaatgaatgttcctttagctacccttagcttccaagggtatgctctctataggtggacttcacttgttatggaaagaaacattcattgggatcctctaatagagtattggaatgacttgaaaa

SEQ ID NO: 30693 - DNA, 395 bp, Glycine max
  unsure at all n locations
gagacngagaccaacatgttagctatcatcgccaagtaccaagaagagttaggtctagccacgggccacgagcatagaatcgcggatgagtatgctcaagtatatgcggaaaaagaggctagaggaagggtgatcgactctttacaccaagaggcaaccatatggatggaccggttngctcttaccttgaacgggagtcaagaactatcacgcttgttagccaaggccaaggcgatggcagacacctactccacccncgaagagattcatgggcttctcggctattgcagcatatgataacttaatggccacataatagaaatcgtatggacttgatggctctcaacctcactgatacgactctttttgaataaatgagtggtcatgttctctcg

SEQ ID NO: 30694 - DNA, 207 bp, Glycine max
aaaattgattctcatcaccgaagctgtgcctttatggagaatcctccttcggcttatcgattctatgtggataatggcgacagactgtgcatattcttcatcttatgcatattttctattgttctgcccttgagctctcagaaagtcaacaatggtgggtcttgaatttgcatcctgcatgatacataccaagtgtccatggcttgg

SEQ ID NO: 30695 - DNA, 341 bp, Glycine max
  unsure at all n locations
agcttgtaattgatgcttaatggaggaaaagaaagagggagacaaagagagatggcgggagcacnaaattgaaggaacaaaagagggagagaagtggaactttgaagtatgtctcacaagactctcattcatcaaagttacaacaagtgttacacatgcttctatgtatagactaggtagcttccttgagaagctntcttaagaaaacttccttgagaagcttctttgagaaaacttgcttgagaagctagagcttagctacacacacccatctaaaaactaagctcacctccttgagaagcttccttgagaagctagagcttagctacacacacccatct

SEQ ID NO: 30696 - DNA, 341 bp, Glycine max
gaataccatttttcggggaaaaaatgaaatcgacagagaaaagaaaaaatacaatacggcgaaggtaattatgcaagcacaactatgggacattctcttgtggtactactctcgtgtgaaatagggatttcacataactgatattgaatttggctcattttttatagacgatctgacatgaactctcatcctttggtgctcctctaatccatcgaagtatgactctaatcttgagtctttctttctggtataaactaatcttgagtctgaatgggtggttaagtaaatttctaattgaaatgatactctaatctaaaatttaaactccaaagggtataact

SEQ ID NO: 30697 - DNA, 343 bp, Glycine max
  unsure at all n locations
agcttgtatattttcccaattcatggntattttggagtaaattttgtaaataaatcttgttttatggttaacgctgtctctagaagatttccattggatttaatgatgaaatctgtgcattctcaagtgaaaaaaaaggctaagttttgaattgcaaaaagtagcagttgggctaagctcaacagttgggctaagcgcaacttcagcgcgcttagcgcaaaggagaatttggtagagcatcagcatcaaagttgcgcgctaagcgcgagattagtgcgctaagcgtagtaggtgccttcagccaggctaagcgcgaaactggtgctaagctcaattccactta

SEQ ID NO: 30698 - DNA, 208 bp, Glycine max
agcttctatactaccccatttctctcccgctttgggacatcgataagccaaagttcgtggcaaccaacacaagatgatataactaaagtgtacataatcaatcataagtcacaaccagatataagccaatcgtccataagatgaaaccaaatatagtccaagcataaataacgtataaccaagtataatgcaagcgtaaaagactaag

SEQ ID NO: 30699 - DNA, 401 bp, Glycine max
  unsure at all n locations
catcaagcttgtgttcgcttagactacatcgcatctacaccttttgtaccaggggcaagcgagcttgtnacacgcagagactacatcgtcttctgcaccttttgtcatccagagacggcgagtccgatgacatgcggaggtaccttatggttatccgcaccttttgtcagccagaggcaagcgagcccgttgacacgcagagactaacatcgtcatctgcaccttttgtcaaccaggggcaagcaagcttgttgacacgcagagactaacgttgtcttctgcaccttttgtcatccagagacggcgagtctgatgacatgcgagggtaccttatggttatccgcaccttttgtcatccagagacngcgtgtccgatgacattcngnggtaccatatggtta

SEQ ID NO: 30700 - DNA, 522 bp, Glycine max
  unsure at all n locations
tgatattatttatctanggcatntcccattttaccttangtggcggaagaaagtcanagagagctgtngacntctcnngattcttattcgcttagacncnnatatcgcatggggggagnggcgttgctatggccctggaataatcgaaaacatagtatgtagtatgttgcctcggtangaaaactaaaccttgtgcccanagatcccgtctctctatacttctcattcaccttatgttatttcatatcgcagaaaacactcttggctttccatacgcgcgtgctttgtgaatgcaaacttgatatgaagttaccgcactactnatcatcttgagcgttatactcaacgaaccacttgtgtgaaactgggatgttataataaggcctagatatcgtggaggtctaagtataacgacaactcgcgaagtcaatgtgggcttacctgcgaaatacatgtgggacatgttacatgagcccaacaaactcagggtctcttttgtttcaactaagaacgaacgtgttg

SEQ ID NO: 30701 - DNA, 319 bp, Glycine max
tcagcaactatggctattgctacgcccactctctctctccatttcgccaaattccccattcgtcaaacggattcatcttctccaatacgccatcgcagcccttctggccgacggttgaatctctattaccctcgtagttctcaaaggttactttttttttgtttgttcttggttaaatgaaattgaaatttcgaatttggattctgagttaaatgttaaccggtggttgtttgatatctccttctgttctattggttacagaattgcgtgttggcactgatgtgcatttggatcattgttgcaccgatggggatgggga

SEQ ID NO: 30702 - DNA, 506 bp, Glycine max
  unsure at all n locations
aaaaaaacgcggggacggaactgagcanagcactncaanncnctnngaaccgggatcctctgagtcacctgcggcatgcaagctgccattggtatttgatggtgcgatcatccactgagactaggcaaggccggaccctnctatacaaggaggctatggtattcaaagaactgtgtaatttttaaaacccaactaaaatggtttgagccgtcaaatcttggaacatctagtttcattcttggtggataggttaagtgggttcgtggtgcaagtatgactgaagacgactaacgtgaagctgtctgtggtgaagtgtttctatggtggtgacactgtgttaaggtcatcaagtttctcactaacgtggaatctgttagatgccaatatggcgatagctctctctatgcgatcctattggatatggaccgccttnattcacgcatggtgagtctctatttgaagcacactagatggtctgagctgacatcaatgctatattctacgcg

SEQ ID NO: 30703 - DNA, 93 bp, Glycine max
gtttgtgggtagtaatttgactgatatgtattcaaagtgcggggagttgtctgatgcatgtaaagcttttgaggaaatgccttgttaagatgc

SEQ ID NO: 30704 - DNA, 359 bp, Glycine max
  unsure at all n locations
agctntgatccanaatcctgactcaccatanaccttgacccaaggtgagaatgccaatccttatcctcggaagcaaaaaaagaggagaagaaaatttccaatcaaaggaaaaaggagaagaaaatntccaatcaaagaacaagagaaagaaaatttccaatcaaaggaaaaaaaggaagcaaagaaattcccaatcaaagagtgggagaaagaaaaaaagaaaagaaaggaaattcccaaccaaagaatgggagaaagtaaaaaagaagaaagctcctgatcgaaagaaaacagaagaaatgtgcagagaggtctttggaccggacaatatctgaacaatacagaattgtcaccaaatg

SEQ ID NO: 30705 - DNA, 220 bp, Glycine max
aacgttctcttgcacaagacatttatatcaaagaatgcacccatatacaatcaaggcagcttcgtcatctagattatttacacgtacctccaatgtgtatttgtaacttatatcacacacatctccttggctaaattcacatacatgcatactcaaagcatgtaggggtaccaaaaattgcacatgtgcacctctttgcatatctaatacctatacatac

SEQ ID NO: 30706 - DNA, 386 bp, Glycine max
  unsure at all n locations
ctcacattcactatcttctacatcatattcaaagttgtctaaataaataataaagtcatctcgactcatagaaaatcatataagtctcatacaattaatatagaacctatatcctaatgtcacatcctatcagagcgtggtgttcccgtgtcctctagcatgaggttcttcatagtcatccacctattcatctgctcccccgaacacaagttcaagatcatcacangatccaaacacaacaacacacagggagtgagttatcacattcctatgctatagagaaacatgacaattatatatacatattatataaatgagataccacttgcttaaacatagctcacgtaacttcaccacttcatcattcaaaattcactcttcaatta

SEQ ID NO: 30707 - DNA, 450 bp, Glycine max
  unsure at all n locations
atttacaacagtgttacaacagaacctaactgtntctaattatatgggccattaaatctatcatgtgttgacagtaattgattagcccgtgaatttcctctggagctgaacacacttcggccatggcccttgctgtggctagtacatgccggagctcttgacttccatttaaggtcaaggcgaacctatccatccacatggtcacttcttgatgcaatgcatcaatcaccctacctcttgctgtcttctcggcgtatgcttgtgcgaagacctctactagctttttctcatgggtcaaagattggtttaactcttctatgtactgccctaatatagctataacctgctttgcttcttggcttctaagcgtgtagccaaactattcttggatctgagcaaccagtaactcctcctttagacatgccatgacctctgattggtcttttcctc

SEQ ID NO: 30708 - DNA, 430 bp, Glycine max
  unsure at all n locations
tgaaaccttgtacactggaatccagttagtccctggatctctgagcacctgcggagcaggaattttaactttgacagtccagttcagcgtggcacatttgtatggtgtctgtggcaacgatgctgctcctgagatagcctacttcatactagatgaacctacatagtgtggagcccactgcccccggtggggctttgaacgctgtacactgaatttagcacaatgacccccatcctgaactggagcggtgcacccgctggtttaagaattcatgactccctatgagatatggcgcgctgactattggggacagtcatgacgttggggagattaactgacaaagcgcgctggggacactctgatggtacgcgctaactcagtgggttattacaaaggaccgtgtccttaatgggtccgagcttggtccgcn

SEQ ID NO: 30709 - DNA, 221 bp, Glycine max
actggccaggcccaaacacacatgcaagacaaagtgagcgaaaccgagcagcgcgcagagaaaaaacgcagactgacagctgaaccagtacctgacgcagaacaacacgaaatggaaaccccagcggagacacgcacgggcggcccaccccccgagacagaacagggcgacacaggcccccacaacgagaggcaaccacgacccagaaccggacacgcgac

SEQ ID NO: 30710 - DNA, 299 bp, Glycine max
  unsure at all n locations
agctngcattatatcttatccgagattcattatcagatgaactatccaagatagcatcaacatacttcttaaaaaggtgctctccaaggattttccatcttttggcttcaatttaacatgagccctaccctgaaaagcttcaacaagtacctaccttgttctaaagagagttatcttaagaaatctaacatactcttgggatggaggtggngcgctctatacttccatggccacattagcaacaacaacacgtgcctcatcatcaaaattcacctcttcaatgatggattgtacaggat

SEQ ID NO: 30711 - DNA, 247 bp, Glycine max
tctatccttcctaagatggagcctttcccactcactctcattaagaactaacggtgtcaatggattgaacccatacacaacctcaaaacgtgactgcttggaggttctatgaaccaccctgttgtatgccaattctacatgacgaacatactcatcccaagacttatggatgcctttcacaagagcccttcatacggtggataacgacctattcactacctatggttgcccatcaatttgtggatga

SEQ ID NO: 30712 - DNA, 357 bp, Glycine max
  unsure at all n locations
agcttctctcntttcttgtttaattattatattctgtttgtaagccttgtattttgctatgtttttatgacatttgaacacttagtatttcttttaaatatttgtttagtatgactaaacatgatgattacttgctcttggttgattatggttatgagttttaaacttaattattttgatgatatatgattagtggtatgtacttttatttggttattatgaatgactctctggattatatgacattctatgaagtattatctttctaagatngatgaatgtgtaagttatcttggttgatagatctctattctcttgtatgattagaaatttatgtatgtttatatatgtacgcac

SEQ ID NO: 30713 - DNA, 203 bp, Glycine max
aaagaatgtgactcttccaattgaatatgcatatctatgttcacacacactattgatcgactaccaaacagatgtaattgattacatcatttcgatattatttggaacgttgcacattcagtttgtaagcttttcgaaaaccatttagctattggtaattgattacaataatctggtaatcgattactagacagtaaatactc

SEQ ID NO: 30714 - DNA, 399 bp, Glycine max
  unsure at all n locations
tttctacatttttcaagaccgacggccngctttgttttagcggacacaatcagacagccgagngagaagtgatcgccgagcgaacngactccgacactaaacagtcaatatcgagcgtcctgatataatccgggactcactcagacatgcgattaataaagtcgttgtcgtttgaatgtgctgagatcattaaactttcattttgaacgtcttcatatattaccgcactcaatatgacatccgagtcataagttattgtcgtttcggtctgtaccgaacctctgcatactgtttcaaacatctcgaattttacgaaactttttatacatgtgagaaacagtttttaccagtcgtatctgcttgcaactcttctatttttaatcgcggttatatatcacn

SEQ ID NO: 30715 - DNA, 496 bp, Glycine max
  unsure at all n locations
tgaaaccctgttgancccctgaaanacttgataccatggtgacacccgcaccatanagtcacaataccggcacnagctctttttcccggttatttgattccggccgcaagtttttgttgtatgctgagggcgacacgccaccgggcgagctacttgatggtatagatcacacacccaggtcctgtgcatgtgctataagataccgcactactcaatctagcttaatagatgagagcaaccatggatcaaaaggttcttttcgaagcgagggatcagatactagtcgactggtgacgcctagccaagttttatgcacaaacttaggacacttgctcaggtggatacgctcggtctctcacgtgcgggattatcaatgaaaaatgaatgtctccattgtcgctagtatatattgaccgctgaaatgatcgggcgataatatttggccgtactatagaaggaaatagaagtgtcatataaacgctcaactaggcctccc

SEQ ID NO: 30716 - DNA, 453 bp, Glycine max
  unsure at all n locations
tgaaaccttgaacactgaaaacnggtgattcactggacacgggagacttagagcgactgcggcaagctttctaattcgtcggcagcaacagtgtttctcatcgctctacatgacatagatatctacgctgcaaacaaatggtactaatacatcatctactcttatatcaacacaacgctattgggctatgcatcacatctctctgcggagctctgcgttggcatgctagctcattaaaatgggagcgtacaagcctgacaccatgctagagaagtctggatagcgacgtagttctttagctcttgtaccacatcgtgagctgatgacatggcaccattggctgagagacgcccgatactaacatattgaacttcgctgtactatattacatgagtgtatatcaagaccaaggcacggctctactgacggatagagagcccagacactgactgc

SEQ ID NO: 30717 - DNA, 348 bp, Glycine max
cgccaaccctggcacttgcggcaactacgccgcccagaggctaactgtgaccttaacacgctgggacccgcgacagagcagcagttgctcagtatcacaccggccactgccggcaacgtcaaacagatgacactagaccccccggcgaccgacatacagcgggcggcggtcaggaaggaaaagcgcccaatatgctgcaaccgaacacccaactcaatccgaaaaaggggaagaacccaaaaccgcaagccgacgaaatacccgaatcgccccgatgcgaaaacgatcagccaacgcgcacccgaacgtcatgatacacgcagacccctcgcacacaaagtcaccaac

SEQ ID NO: 30718 - DNA, 376 bp, Glycine max
  unsure at all n locations
tgtagattgttagtggtgatgaggaaaaagtccctcagcatcgaaggctagctacatcgacacgtagacaacaaacaactatagatgttgcaaaggatgttgagaatgtggataatgttgctgatgagcctcatgaggagcctcacaatctagttacaaaggatgtaggtggtgattcacagggttttccaggcgggtcccaagatacatcaatgttgatgtcatatgttgatcatgtggtagccaaagtgtggataggagaggtagttatttgtttaattaaaacttatttaaataactatttatcattntaatttacatanaataaatttaattatttttaaaacaatactgagttgaagttggcctctcatgg

SEQ ID NO: 30719 - DNA, 444 bp, Glycine max
  unsure at all n locations
ntatgagaatccgcattcaaaagcaccatgaatattcaattatatgattnttaattattaattaataatataattaattaactttntaaacattatttttaattttttttttcacaaactaaaagagagataaaagataatagaaggctctgagatgaaagaaacatatacttttaattgtggagtaattttgaaaaaaaaattgattattctattacttttaattgtttgataccatttgtcattaagatatccttcaataggaactttcttatttccaaccattgagagattaccctcgttggccaatgagaagaaaggcaaaatcaaagtntgtttttggttttaataccccgtctagatatggagacgagaaaaaggtaaaatgattaaaatcacgtcgaaatacaattataattacaaatctgttgtctagcacaatct

SEQ ID NO: 30720 - DNA, 379 bp, Glycine max
  unsure at all n locations
agctggtatgataatggggtacccatcacatgtggtactangtggcggtcgggcgatggtgcacaacaagtttttcacatccacaatgcacgcataaacccaccatcccctgttgcccacctccaactgagctcgcgtactcccacgtagcccatatcctcgtttctctcaacaccgggtccccatcaatcctcccaagcttccacaacatccgagcaaaacaacattcagacagcacaagctatcacagccaagcaaaacagagcaaaggcagaatactctgctcaacacatcaaccaaaatcacatgctttctcacttaaagaccacaggtacaattcctcctatccaattcgttaaccgttggatcgactccaaat

SEQ ID NO: 30721 - DNA, 158 bp, Glycine max
actcacttacactgttgttccttttttctgtgtgtttataatgatattaatttagctgctattttttgagggaacacaccactattttttgtttgattcactcacccaatatgggtaattgatatatggattgttatttggaactggaatctttggat

SEQ ID NO: 30722 - DNA, 373 bp, Glycine max
  unsure at all n locations
agcttgtgattgcatttgggcgtctatttcgactttcctatgctgtctctacatacataaaacagccccaccatcccaattttgcaaaatcatatatcattggggcatttcaccgagcacttgatgggcgcatgtttggacataaattgcaagagaatgggggcaatgtggcatgccccattgcttcagaatacaacatangcctaaggccttctcattcaaatactcaactccacaaaacaagcatggattcagatgcaaattgcttcacgaattntacaaaaaatgagcaactatagcaccaaaacacatcaatggagagccaaataaccaagggaaattgcacttacttgtggggagtgatttatagcgt

SEQ ID NO: 30723 - DNA, 1072 bp, Glycine max
  unsure at all n locations
agctcggccggaggcgggcgnacntcnagnactcgggacccgtgctcgtntgcgantagtcaaataataganacccacgtcgncgntcntacnacnnctccncnnccccccccaaggatgatgcagcagcgttttgcancnnactagttngngttgtagaaaactccntactctgcgangancatacgtcantancnncgcntgtantcgacancagatcgacgtctacgatngacgatancgacaacatcagcntattacggagcgaccagaccgatctgtactngtgcgtcgcattttgantcgacatctgcantgaactaagccacggtcctgngtgacatccatccatgtancgtatatgtacgtactaagntacacatactaatgtccgnctgcgttgataactacganancgtgcgttgtactgcatcagactcatacgagcgtcgacntcatctatctgtcctgtgngananatcgtacactgctcgatatgctgctanagtcagtcgatagctgcagtgattacgcgtcgaatgtactgtgngaccngacgagtatgcatgcgngcatgacgcacacatactccctccgtcgctctgntgcntcantnaagcgtacgcgatgagatcagctangacgcantcatcacgcgaatcatagtcgcgcatgcagatcgagcatacgtcgataagtctcgacacggctgcgacntatcgtgcactacatcgtctatgactgaagtcggtgtaatcgatgactcatgatatcgcantnancatatagatgatcggacacacagntctacgagtatgtgtatcgtgtcaacatgcgtatgaacaagtgtcaacatgcacnagacgtacgtctccgntgcgatgaatatggatgactagcctacgtctacgctcactactgtanagtcgtcagccgacactgctatactctnatagtgcgaagagtatcgcatacacgaacgagtatangcgctgcacgcacncgatccgantgngtctacngngctcctaacgtgatacgcataccgcagactctggcgcacacgtactcg

SEQ ID NO: 30724 - DNA, 391 bp, Glycine max
  unsure at all n locations
agctntaatataatttttttcaaattattagngtatgtatttatcgaataatatataacctttatatgttgggggttaaaagatgtttcagattccatgctatcttcttttcagttgcagctttatgccaaatcaagtcactacttgaataaaaccaatgggatgctgagcttcactagcgaattgataggtaaagaatatagaatgtgatactaagtaaaaggtattcaaacaaaaggataaagaggaacggcacatagtgggcattttcctaaataaagtataaaagcatatgttctgaatgttntccctcataaaatattattgaccattgcatttcacaatntgttaatacctctgcttcctctccattttctgatcactnttctac

SEQ ID NO: 30725 - DNA, 505 bp, Glycine max
  unsure at all n locations
gatgccccacatagaacnccnatgcgtgnagggtcantctatagaacctgcaagctctgatggtgtcgacaagacatcacatgtntgtcatcatcaaaaatgtggagaatgtgaatgtctcccnncncccttttcttctattcgtacatataatactacaatgctgcctcacctgattatcactttgcttccaatactattttatactgctccacccaacaatcctctgtactcacattcgctcaaatccatccttgacattcgcaaccctctttctctctgacccagtttccgctttgatctcctacaatctaatcttctactcactcgctatgtcaccgtcgcgcatttccggcctctgcaccctgcgcaaccctcctcgctcccgtcttccgatctcgtccggaataaagcccgatcccataacctcccctatacttatccagtcccaatctcgctatccttgccgtaccacctcacctatcgtctctccctgtcaccctcc

SEQ ID NO: 30726 - DNA, 359 bp, Glycine max
  unsure at all n locations
agctntgattcaaaattctgactcaccataaaccttgacccaaggtgagaatgccaatccttatcctcggaagcaaaaaaagaggagaagaanatttccaatcaaaggaaaaaggagaagaaaatttccaatcaaagaacaagagaaagaaaatttccaatcaaaggaaaaaaaggaagcaaagaaattcccaatcaaagagtgggagaaagaaaaaaagaaaagaaaggaaattcccaaccaaagaatgggagaaagtaaaaaagaagaaagctcctgatcgaaagaaaacagaagaaatgtgcagagaggtctttggaccggacaatatctgaacaatacagaattgtcaccaaatg

SEQ ID NO: 30727 - DNA, 466 bp, Glycine max
  unsure at all n locations
gcttatgcgcatatttccttacaaacgttctcttgcacaagacatttattcgaanaaatgcacccatatacaatcaaggcagcttcgtcatctagattatttacacgtacctccaaggtgtatttgttacttatatcacacacatctccttggctaaattcacatacatgcatactcaaagcattttggggtaccaaaaattgcacatgtgcacctcttggcatttctaatacctatacatacgcaaactttatgatgaatcttgactatccacacaataaggtgctacatttcatgcctctttttcaagtttttgctacctanagccgcatgcanaatcaagcatattttcctttgctgactaaaattgtattcaaattaaaaggtatantttttgtaatatgttntcttcacataacatngcacatatntatatatantttttttttgtgagaacatttgacta

SEQ ID NO: 30728 - DNA, 399 bp, Glycine max
  unsure at all n locations
agctgacttacactctgagcatanaagtgtgtnttcttttntagaatgtatatangtgtatggcaattagaatatattaaatgttcttgtatgttgacatgggtaataggatactttctacacatgcgcgtgtgcataaatggattacatgagtttggtctaaatcagaagggctagcacgacatttttgcgttaatataagcattatcttgtaaaactaacttctanatgtttgttctcgcaggaaatggccccgaggaaacttgcctcanagagatccangaaggataaagcggccgaaggaactagttctgctcccgagtatgatagtcaccgctttaggagcgctgaacaccagcagcgcttcagggccatcagggatggtcatttctccgggag

SEQ ID NO: 30729 - DNA, 408 bp, Glycine max
  unsure at all n locations
ntacatctcaggctaagcgcatattcctgaaatctttgtgttgcatatagtgctaagttccacctactgcgctaagcccggatgctcattggaatttgaaacttcaaattgggcttagcgtgaggttaggctaagtgcatgggctttaaactcaaatgtcatattggcatgctaagtgcgccaaacaaaaatgctaaaatgaattagaacttccataggtggttacctttacacaaaacttttgcttcttttgctgagctctccttctgtgtgtgagcattatgctgttgtgcctcaagtactttctacatcttcttgcatttaattcccatccaagtaagtagtgcttcatttccattntcatactgtgaaacttaggatagacgatgtcttgctttgttagcttgc

SEQ ID NO: 30730 - DNA, 313 bp, Glycine max
  unsure at all n locations
agcttgaatatctntgatctaccaaagaaactaatgagaagaataaagatttcttgtactcatctgctacagacataatgtaagagctanaagggccctctcaagaagtgcagacaccttgagtttgctcaaaaagagtctatgaattgcttatctacatggatcgatgcctnttatggaattgaacagagtcattttattcgatatgctaaattcttcattggtgtagaatcttaaacaatgcttttctatttttttttgattgttaacaattcacgtaatctctttttgaacaaattgcaccctaatttct

SEQ ID NO: 30731 - DNA, 489 bp, Glycine max
  unsure at all n locations
ggcacaccttacggataanatacctattgtgntaaatccacatagttatatcaagtatctaaatctgacccattaagcccatgaacctaggtggctttgcgaataacaaacttctctttattaagatccatatatttgtattgagttttagggtctgacccgtgaacttagtaaactttatccatgaactcgtgaagtatccatngaatccgcctaatatgtgtaagtatttataatttggtatgttaaagttatggtcaatntacattgtgattgctaatttgtagtgtataaaatattaatatgatttagtgtgatagatcttagcttagaaaatgatttcatttgtttcttcaaattttatatatattcactttttttttaaaaataacttataataaatactttgttttcaatatatcatgtgtcagggcggtccatgtatttgcgggctttacgaatcagatatgaattcttagaaaaagtcta

SEQ ID NO: 30732 - DNA, 362 bp, Glycine max
  unsure at all n locations
agcttgngtattaatcctaaccttgcatgtgggcttttttccacttacgggagccgccgatgggcccgttgctactgcctctgagttctttgtccttctgttgcaccatctcccacgccttgtggaccttctgaagtgcctccacgttggtcttattgaagcctcgtgcaatatcaggtgtgagcttttactctagtggtgctcctctcatagggtagccaagctgtcttatagcaagaacgggattgtaactgatgcaaccccttgtccccatcaagggaacatatggaaatcttccgcacgaaataaaagtcctggttcttccttctttcatcgagggaaccagtcacagacactccttc

SEQ ID NO: 30733 - DNA, 174 bp, Glycine max
  unsure at all n locations
attactacactcgattaacacgtcttacctatcnatgttccaatcataatgtttctcgttgcatccaacgttcgtctgtaacagtcaacgtttaaattcgggcttggcgatctaacttatgggattggacataaatggacaactaaatctgtgaattacattaacagggactta

SEQ ID NO: 30734 - DNA, 364 bp, Glycine max
  unsure at all n locations
tatctntgatttcccgaaaactcacctcgttttatctgtgcattccaaattctcaaaagagtcagtcttgtggcatatcanattgcattacctccgtgtctttctaacctccacaatgtctttcacatgtctcatctccataaatatatccatgatccatctcacatggtcgaattagatgaagttcaagtgaaggagaacttgacatatgaaacatttgctttgaggatcgaggataggcagacaaagcacttaagaacgaaagagattttattggtcaaggcagtctggggaggtgctttacgataggaggcaatttgggaactagagattcaaatgcgagaagcctatcctgtcttgtctg

SEQ ID NO: 30735 - DNA, 302 bp, Glycine max
  unsure at all n locations
gccctgaactgtgacctganctcaccctagaacgcgaaggggntcaaaaattgttaaatttcgacccggaggatcgtaaatcaacgcggccctgtggcaatatgaatctctggggcgtagactgatttatacgttgagaggaccgatgaatctgacttagcagtaaccttattgttgcctctagttgaaaatgcaagtgttgatggacttatcatcgtggttgacgttctcttaaaaaatctgataagcgagagagtttaatgcttggcttgagctcagcgagttagtgtgcgtgggaaacg

SEQ ID NO: 30736 - DNA, 360 bp, Glycine max
  unsure at all n locations
tgcttgagtgtgtagatgatgcaagtgactgagacaaagaggatgagaaagacaagaagttctggtaatgttgggtgctatggtgcaatgggagtggcagttgtggagaggtgtggcgacagagatctcacgtgacattttgggaaccctagaggtaagaatagagaaaaacatttnataaccaagaatttaaagcgccagagaatataaagtgggagctacatattgaacaaagagaagaacattctaagacggtttttacaaaaccgtcttggaatgacagtcttctaaaacgatgttcacaaaactgtctctgttgaanaatccatatntacaaagatgtcactgtcttatatacta

SEQ ID NO: 30737 - DNA, 187 bp, Glycine max
cctacttacttatactaacccaatcgcagcattaagccccagttgttctgaaatgaagaggcactccccgtatatagtaagtaccatcccggtttcacctttctagctgccgttctcttacactttacagctacgaaatcaccttcaatctactaaattataccattttctataccattagtcgtca

SEQ ID NO: 30738 - DNA, 315 bp, Glycine max
  unsure at all n locations
tgcttggttattatgtaatatgaatttcgacatactatgaaagaaggttctgaattctgatgatacccataatcttgttaggtgcccgtcactgtcagaatatatatccttatggtgcattaagttaatctttcattatttcaacttcaatgttaacagtgttattatcacgatgagaaggtgcgattatntcgatatcctgatcgtttctttagtttaagatatattttttgttgatatacacttaatttggttcanaacaagttatttataatataacaattatataaaaaaactaactgatagattatcatt

SEQ ID NO: 30739 - DNA, 368 bp, Glycine max
  unsure at all n locations
tatagattatctagttgccactcatgcaaccatttctgtgtcacttgcacacaaagagaangtagtctttattctttggtgtatccttctattatccttgctaattgttatgggaatctctttctacctaggcaactatgtgctgatcacaatatacatattattgtaatgctcttaacgtattatcaatcccagcaatggaacaaagctcaagcgtgctgtaaaatggtggtcatcaagatatgggacaacttcaagacgttctgtgaaaggaatatctctcctttaactgctggaatgtgacatgtgattaagcaaagaactacagtctgtgtctatgaggtaaaaatcagtcttgcctcctttga

SEQ ID NO: 30740 - DNA, 767 bp, Glycine max
  unsure at all n locations
tctctaccctgcactctactatccgcgcgtacancgcagtancnnntctactcantgtcanttttacctccccacccccncccnccaacgagagcgcgcagttggagaacanctagntagagcactcctctacgtactgtgcanactganacatatgatcgtcaaacanctgntgtagggactatctncagctaatgacgtgatatctncaatcatatgtgtatcatcacatctgtcgnactatatacgcctgtaaatgtctgccgatcagcanggtactgagtattacttatctcagtctagcaanactcgcgacgcgctcagatacgacacaaaccgcatcaatacagttgagactaccgtcgtcagtcgacntaatcattatcgtgctgacattcgtctgcgacgtaaaaactcactcacggataggcgcacgcacgaagtgcaactcaaggatcgaacagaatgccaaccagatatctcgatacacgacatgcatgtactcgccgcaaactaactgacgagacgaagatcgtataccagatctgatgaagctgcgacggcgaaactccattgaccagactcgcnactacaggcgggcgataatcggtcgcgggaccattctgtagggcgcaacaacaacgacgatgcgtnttctcactgagtgcgagaagacanacaaatcgtacatacgtgagggcgaactacgtccgtcgacgagtacatccgcatggagcttaatcacctcgcctagaactaatccatcg

SEQ ID NO: 30741 - DNA, 302 bp, Glycine max
  unsure at all n locations
ctgctttttgtcttgcgagttgattntagccttattttcaccttacttattagtcaattcaattaagaatgagaaatcccatagagaaaaatgtccgattgattttccgctctattttactaaaagatgatttttttattattatattatcttatacctctttttgattaccaatgtgattacttgacgaccgaacggtcgtaatttattttaaccgaagttaacggataatacaattcaactttcggtggatatttttttattnttaagtcaagcgagaaatgacttaagctaaatggctt

SEQ ID NO: 30742 - DNA, 376 bp, Glycine max
  unsure at all n locations
gttgcattggaattgcgaaagccccactccatctttaggatntgtttctgccatctcanacaaacaaatcagacgtaacaagacaattatagttgctgtttgaatacctcactcactcaagtgtatcacacaattatggtttttctctaatgaaacactcttgccttttaccactctaattccccttgagttcttatgcaattcaagagattatggccacaacagagaacaattcaccaatatgtgtaaggtaaggctagagaaacancgaaaaggttaaccaagaaaaaggctaacaatgtttttaggcacaaatgaacgaaacaaatttcagactttatgaattcaagtaacaatccttcatgcaaccaatata

SEQ ID NO: 30743 - DNA, 388 bp, Glycine max
  unsure at all n locations
agcttgcttattaaattgatttggatccatatgacanagaacaaataanacaagatttanaattganattggagaatgcaagattgacaatgggaatgagaatgtgaaaattatgtgcaaattgcttcctatgtgaccaatttataggacccaattntaaaaaagtttaatgtaaaaaaaatataaaaaattaaaacataacatgcatccaaaattcacagagcaattgtcaattgtatgcaacgttctaaaattcatagagtaacggtcaattgtggcaaattgtctttcttttctgcattctttctctttnttctttctttctttctcttcttcccccttccaaaacccacctcctattgccctattttctcttctcttctttctt

SEQ ID NO: 30744 - DNA, 439 bp, Glycine max
  unsure at all n locations
ntanagcacaacatcacagaatctaggtgtccaacacccctcaattaatgggttntctaagtttgtgaagtgaaattgagaatgaggtaaatttggagcaaactctcacctcacacaagtctataacatcaatctaaacttgctcaaactggatntacacctaaaattccaccgaatcaaaatttgactcctcaacacccaattttgccctagaaatggctcttggttcactttggtcatttgtttttccctctagcacagcctaacctttctcataagtcctaaatggcatttcaagctaagattaattcactctaacctctacatactaccaattccagaattggccttccagcccctcaaaatcactctntntcactcataacaccacatnttactttctaagcctaggttattctacattcctcttacagtttcc

SEQ ID NO: 30745 - DNA, 382 bp, Glycine max
  unsure at all n locations
agcttgttatgtatatgttacaatgttcttaaatntctaaaaagtttttaagaacaacctgtctaggtaaatcttttcagaaagacttctaacacaataagaaaagaacagtttttcataattaccttatacaccagctaatgatagaagctctttcatattagtttttttcaaaagatatttgtaaattatgtataaactaacattaacttatagaacagtttatctaatttttttctttttattctctttttttagtagtacttctaaatacatttatccaaatagacccttaatattaatatatatcaacaatacttacatccaaattattacttagtcaaggcttgaaattatttatataaaataaccagattaatta

SEQ ID NO: 30746 - DNA, 645 bp, Glycine max
  unsure at all n locations
aggatacgcaggtgatgcggacacngctgcgtcgtcgctgtacacatctcgggcgggangantcgtgccccactcagcatgagagatgttggangccatgggaacagccgccatgtgcacgatatcactcagcggtattacgcaacgcgccgatacaaacatcgacacgacgngtctgtacggtcgtgtgtctcagcgcaaggcggttggatatgtggacgtgtccatcacttatcaagagtgatctctctgtcggtgcagaactatcagtgtcaggtaataacacgagcagagtacatacttggcgtgaactagtactggacggtaatacagcgggcgagacgattgtgcagtgtctatggccgcggactcacatgtccgcacgaaaacggatgcgacggttcgagtcgcgcgcatgctcctgagcatcagatcagcccacagcatcactggcatacatcgcgtggaggctatcgcgcgacgcttgacaatgtcgagcgctcacacgcgaggtccgaacaagtacgactaccgcgcgctctctcaacagcgctccacggacgcaccgagcagaaatcgttcgcgagagatcggccggctgaagttagtcggcggactatctcgtggccattcacgaatggaacg

SEQ ID NO: 30747 - DNA, 311 bp, Glycine max
  unsure at all n locations
agctntggttctcttcttcttcttctttgggaacggtttctttctgtgtgtcttcgtgcgtttccgccatcaccactcgggaaccgtcggggcttggaaggggttaatgcgtcggtggcggaaatatgaatgcggcgtcgtttaaggtagttcgagtttggcgcacctgcagtgtgtgaatgtacatgaactgcttggctttttgtttacgtcttcggagcagagaaacaactccaaaagtcatcgatatcgggcataggtggtgcaacgtgtgacccggcccaaattgttgtgccgcaacacctgcgttg

SEQ ID NO: 30748 - DNA, 377 bp, Glycine max
  unsure at all n locations
taatgaaatanaatagaacagaagtcataaaaacaaacatccatgatctcattaatctctctnccccatgaaatcctcacataaatatcattctgtacatctcacttacaaaggttgtgtcggagaataataaaactaagatcaaacccataaggcatcactaattacatgtgttggaacaatagagttctcacacgcactcactgtcactctatgtgagagaataacagaagatgatgaccaaattgattgagagaaaatagaggggacttaaaatttgaaaaaaaacttctgcattctcatgcacactcttgcacactcttcgtttcattgatgatcattagtatttttatccacactgcatatgtagctattat

SEQ ID NO: 30749 - DNA, 388 bp, Glycine max
  unsure at all n locations
cggaaggatcanagcgggtctgannagaggcaaatttaatcatcccacttggacgaatgagaaaactggggcaaatggagagggtgagaataagggagaagcccatgttatgactgccattcctgtacggccaagtttcccatcaacccaacaatgtcattactcaaccaataacaaaccttctccttacctactgccattntatccacaaaggccatccctaaaatcaaccacaaagcctacctaccgcacttccaatgacaaacaccacctttagcacaaaccaaaaacaccaaccaagaagtgaattttgcagcgagaaagcctgtagaattcaccccaattccagtgtcctatgctgacttgctcccacatctacttgataatt

SEQ ID NO: 30750 - DNA, 442 bp, Glycine max
  unsure at all n locations
aatactcagcttgtcaggaagctacctaagctataaatagaagcatgtgtaccactttttgtaacttttatgaatgagaaacttgtgagatacacttcaaagttccacttctctccctttcttccttcaattttccatgccactttctccctctctcattctcattctcttagaggtgaagcttctccttccattgcttattctctagtggatgacacatcctctctcctcttctcctttatcttccgctgaaactccatgcgtgaaaatcactattgaaggaccttattgaagctcaaagatccagcttccatagaagcttctcaagagagcttncatgaagtggtatcagatgacaagagtttcaagtaggtgctccttaaacctccatttaatttcaactttaccttctcctacattggtggttcttcattatctccat

SEQ ID NO: 30751 - DNA, 360 bp, Glycine max
  unsure at all n locations
agctnttctatgaatcctcttacatgagaagaanataatgaaatgagnttttttttttaaactaaaattaattctccattaactaaatattaattaatttatagatatcatatcatctatgagagaaattatactaaagaggctcttatcctcttttgggggggttatttgctctatctagctcttgttctctatatctttgcaaataccttctcaatggctctgcatagtcgtcaaaaccaagcgaccccaaggcccagcatatgtcatccccgttcactgtcttactcctttccttcctgcacttctccgacgcctcgctggttacaaagcttatgaactccgacacgcactcttgca

SEQ ID NO: 30752 - DNA, 394 bp, Glycine max
  unsure at all n locations
tgttgtcaagacaagacaattgtgttcagagttggaaaactacatgttgttggaagtatgaanatgaataattactttcttttacttcctttattatttctgtcacttgattccataattatgcatgttaattgatagggacttgggtattaaagggtgcccaagtcccacatagagtagtatttaagtgcttggttctccccccttaacaactagcttttaaaggtgggttcaccaagtgcttgggtgcttacattaataatcctttcaccttttactccctccattccaaattgattgatgtttaggcattaaataatccaatatattactattctttcaagtatcaaatccaatgagatataaaacatctatcctttatgcctctataata

SEQ ID NO: 30753 - DNA, 394 bp, Glycine max
  unsure at all n locations
agcttcctgttaaatacaaaacanacaaattagacaaattattatgaaaaaatngacgtaaatgacatanattattagtaacacttaccactgcatgtctcaactcgtcaacatcagaccttacagatgttaatggtactgctggctcccggacctgagggatatctgtctctgggacctgagggaacaactctggatgcgtagcataaccatctggcanaggatctgatggctggtccgatgtcatgaatggatgcgaaatgcggaagaactagtccatgtagtcgttggcacactgnacctgcacaacgcacatctcacctgctgcaatcatatggtccgaatagtgcatcccacctgtgtgtatatcatcanacgacacccatgaatcgat

SEQ ID NO: 30754 - DNA, 416 bp, Glycine max
  unsure at all n locations
cagcttgcataactagagccatcaaccaactccagtgacaagaccatcgttaatttaattcatcatgataaacattatacaaaagccattcttgtggttgctactagtttgtttcactacatgcatgtattttgtattgttttaacacttatgttagattgtttcattatttgtttattctgaagttggatttatattgccattcattgagaatatatattttattttaaaaaataaatggtacaaaatgattgacaactgatacaaaatagaaatacatttctttgtgcttttgtgatcaacaaanacatgtttccatgtaaaggcatttttgtaaaaaatacctanagcataacggtatactcggcaaagagaggaggtgtttcaacaattntgtgtcttggtttttctttttt

SEQ ID NO: 30755 - DNA, 364 bp, Glycine max
agcttcatttaatccatgccgacatctgtggtcccattttgcctccctcacacagcaacaaaaggtacgttctaagctttattgatgattattcacgtaaagcttggatctactttttgcatgaaaaatctgaaacaaatactgtgtacaaaagcttcaaagcctgtgttgaaaaggaagctggtatctaaattgtttgtctaagataagatagaggtggtgaattcacctctaaagagtgtacagaattatgcactaatcaatgtatctctaggcaattgacgggtgcctacaccccacaacagaaaggagtcgccgaacgcacacaccgaactatcatgaatgttgtacgagctgtattaca

SEQ ID NO: 30756 - DNA, 475 bp, Glycine max
  unsure at all n locations
tgaacgtgatgacccntgcaaactgaaccataacgccgccgggtgaaatcaaacctgtagagatttgacaaagctgtatgcaacgggaacaattttgttcctaatgaaatctctctaaccaagcccaagatagaggcctatctaagattctactcatgaatcacagcgctgatgctgacaagattatttggcatgaggttgtctatctctaaactggtggggatcagtgcactatactctcacttcaaataatgactgattgtccatcgactgcggagaccttattgaaccacctgagattgcgacatgctggattgacccggaagagtcaatgcggtcccagattattcttgctatgtattcactactctatgagatgcgccccttgtcaaaaattggtaaaccctattagagggaacaaccgagaacctctctgtgaacgagaatacatttcttaagggccggaagggtttct

SEQ ID NO: 30757 - DNA, 395 bp, Glycine max
  unsure at all n locations
tgctntatatgattatgatcatgtaacaaatcaaagaaaccaaccttgatgcatgcatttttgttctgaaacgaaactaaagaaacaaaggaaagggagaaaatagaaagctaagttctaagatacaaaatgcccaaggcatttgtcggggaattcgaggggagtaaacaccagacaaatttacaccaatgagccatgagcaaccacataagggaatttaacaccacactttaacccaaaaccttaaggctcaagtttatgggtcttctccttacttatatggtgctcaacttttcaacttccatcctatgtgtgctcaacttttatgggagcaaaagaagaagctccatgctttgtcatccagtcaacacagtcaatggggattcatcttcata

SEQ ID NO: 30758 - DNA, 325 bp, Glycine max
  unsure at all n locations
tgagctcttagaagacatgcttcttcattagtgctnattcctctttcttcacaattcagtcagtttaagatctcttatagctgtcagaaggtctcttaatgagctcatttcatactgtgtgcaagaagaggatagactgaagcacgaaaggactaaaagtgctcatgtagtaagtacttctaataaccagggccaaagagaaaggactgacgagcccaagaatgaaactaccaatggtccaacacaaaagaaacaaaatcaatgtgacaactggttcttttgtagtagcgctgacattgtaagaagaaatgtccaaatatcattc

SEQ ID NO: 30759 - DNA, 390 bp, Glycine max
  unsure at all n locations
tatctntcatcttattccttcacaaataactttcataatgcataaacctagtagaactacccatcatatctcccagaacccaatacccacaataatttatgtgagaagaagtctacccaaacctgaaatttgaagtcccacaacgtagaggtgcgcttcacgactccgaaaatggcttccttttgcgatttggagcagatatggtgagtaaagtttggagctttgatggaggcttcaggagaggaagaaagggagaaaaagcaacgtgagggagagggaatagcttctgaacttttggctgagtgaagagagatgaacgtggcttttagtataataaggcttcctttntttatttttttacaagggtatgccacatgtctccttttgagt

SEQ ID NO: 30760 - DNA, 495 bp, Glycine max
  unsure at all n locations
tgacaccgtcttgagccgttctacnacgttgacaacattgtgatcagccgtcaanaacatatagtcacgctctggctatacaacttttaatgtgaatattaagggatagggctattttctaatcctgctgcggagattatgactctcgcgtacatatgagaagtcaaactcacgggttttttatatgtgtctggcgacagactcaatgcatatgtccaacagagctaaggtcctccattggatggggaacaatcaaggctaacacgagctctgtttatgcgtgttttactcggtgcgaatactactgaccgcggacttgattcttgcatggaccactgttacactgaccaggcttagtagctgctctgagggcagatttgaaggcggctaagtttaagtactaatgaagcgcttatgtaaccccggcgcataaaaatttctctggcgctcgggtggggtataccgattaacgggtttggcaccatggacatgcac

SEQ ID NO: 30761 - DNA, 335 bp, Glycine max
  unsure at all n locations
tgcttgtcataagtctataccgctgatttaatgtaattagagcctatagatttcctttctcttttgttttctgaaatctacctcattaaataaacaaagagatcttgtttcatctgttcttgcagttccaccttttctcatatcattttgcatgtttttgtttctttggtcttgcttggtatagatatgagggtcgattctttgaggatcctaacaacgagggtttgacaatcgattntgatagagatataagccaaacgataaacgaggaagaggaagaggacgtcctgtcaccagagttggagaggttggtcgctcacgatgaaacgtgaatg

SEQ ID NO: 30762 - DNA, 325 bp, Glycine max
  unsure at all n locations
gcttctccctatttgctatcataggggaagatgtgaagaagattttggttcagccccttatgcacttctctctctgtcgaatntgctgaggaaaattatcttcgtgaagaaaattcaagccgaggcgctttcgtaacgtttccgtgagtaattacgcgaagattctcgaccgttcttcaaggtccatcgctcgttcttcgttttcttcagtcttcaacgggtaagtacctccaaccagcttttcatttcattctatgtacccgtggtggtgcacattctgtttcatgtattagtattcccgttctcatttgctttatatacaccc

SEQ ID NO: 30763 - DNA, 389 bp, Glycine max
tttcttcacttgaaattaagttattcaattatatgagttcttgatttaatcccaatattctctccccctttggcatcaacataaagccaaagtgtgtatagagacataaaatcatacacaaactcataatcatccaagcattttaatccatacaacaagcaaggaggacaataattcatacataaactaagcaaggaagataataattcatccattaactataataaagcgtcaaataattagaaagtcatccaagataaccgaaataaaaagactaatttagagagtaatatactaataagtgtatcaaatatgtcataagacatcaacacatataacaaatcacttgtctaagtcactagcatctagaagttctaattctcttctaa

SEQ ID NO: 30764 - DNA, 327 bp, Glycine max
cgcatgtcatcaagtaataatccccggacgaatttatggtatgatatttgcccctctttacttgcctctcatcggagataagatgaaagcaaacataggacactgatctcgtccgtcctgccgttcccgcgatgacgactcacggctctattccttcgtttttcttctgcatacaacaaaatacgaactacaacgagaacaacgactattatgtacatatacacatatacacatatccggcgaaggaaccgaaccagaaaacaccagaattacgggtttcccagtcaccagaagcttcgcgcttgacaatggaggacacatgaatag

SEQ ID NO: 30765 - DNA, 377 bp, Glycine max
  unsure at all n locations
tgcttcatgatgatgaatcaagattgattcaaggagttntgatgataacaaagatgatgacaaaaagcccaagagaatgagttcaagattgagtcaagaacacttcaagaatcatgagaaatttgatttcaagattcaagaatcaagtttcaagaatcaagaatcaagaataatcaagttgaagattcaagaatcaagaaaagactcaatcaagataagtactaaatttttttttcataacattgagtagcacatgaagtnttcacataagcttttaccaaagagtttttactgtctggtaatcgattaccagtntactgtaatcgattaccagtagcanaagttgttntcaaaagctttcagattgaatttacaac

SEQ ID NO: 30766 - DNA, 394 bp, Glycine max
  unsure at all n locations
tgggggacanaaccaaaacccaagagagaaattaacaaaacctatatgagaggggagcaattatattcctaaagaattctgtcctaacaaaaccaaagacagagtcctagcaagtgtagttctcatgagtcaaagtgccaaggttagcaagtttatttacacatgagttttcctctctataaacatgtgagtaacaaaaaactatatttttacaaaaaanaataaacattttcccatttactatggagacattaaggaaccaacaaaggattgctgaaagcctgaatgaccaatgaagagtcacattcaatccacaaattattccagcctttgcacttcactacttctaaggtgatgcctacaccttagcaaaaaaatttgtttaacccctata

SEQ ID NO: 30767 - DNA, 346 bp, Glycine max
  unsure at all n locations
gagggagagatagagagagggggggacatgatattgaatgaagaaaaagggagagaatttgaactttgagttgtgtctcacaagactctcattcatcanagttacaactagtgttacacatgcttctatttatagactangtagcttccttgacaagctntcttgagaaaacttccttgagaagcttctttgagaaaacttccttgagaagctagagcttagctacacacacccctcttataactaagctcacctccttgagaagcttccttaagaagattcctaaacaagttagagcttagctacacatacctctctaatagctaagctcacctncttgagatga

SEQ ID NO: 30768 - DNA, 467 bp, Glycine max
  unsure at all n locations
cgctctanatctacatttgatggtttgtatttatgaggaggagggtatattgtcatttcttgctataagagtagtgtcccactggtaaaattaactttccaaatggttgccttcgcatgaatggccacgaggaagcttgcctcaaagaggtccacgaaagacaaggcggccgaatgaactcattccgctccggagtacgacagtcaccgctttaggagcgctgtacaccagcaactgcttcaagccatcaaaggatgggtcgttctccaggagcgacgcgtccagctcaaggacgacgaatatactgattttcaggaggaaataaggcgcccgcggtgggcatcactggttactcctatcgccaagtttatacagatatagtcctttgagtttatgccaatgccttggccacagaaggcgtgcgtgacatgatatcctgcgttacgggtcagtggatcccgttcaag

SEQ ID NO: 30769 - DNA, 384 bp, Glycine max
  unsure at all n locations
agcctttatcttattctctaacaccatgctttccatccttgattcgtccctctcggcctttctaagcttgatctcgttactgctgccccacagagcccctcggaacttgttcctgctccattcttcatttcgggcccattttgtttctcgctctaacgcttcaactgtggtcatgttgatatccttcaattcatcacactcttttttgaccctagtgactttcgtcttcagcttctctttcaccactcttgtctttttgagttgtactttcaaagcttgcacttcttcactttccttaggaatttcagcctttntcccacttagacattntagctntgggagccaagtcatcccttgcgttctagacttcaaccacttgtgata

SEQ ID NO: 30770 - DNA, 557 bp, Glycine max
  unsure at all n locations
ttgccacacatagcattgtgtgtgcaattatatatttgtcccgtctccagagagacgtgacacgtggttcataccttagataacctanagcacttgtattcactatagattatggcgtacatgcgtatcttgaaccatatatttgtactactccgcgggatctattgaactattgaatagaattcagtgctcggctgctgaatcactcgataattcggcgtaaagaacgccgcgtgctcgttatatattcagatgtaagactgaactggccagagtgttgaagacttctcggtcgtcctcgcgcacgcacatgtcgggactcataaatgctgggttgagatctctcgcacttattaaaatatgtctacgtcgagcatgcctaatatctcgtagccaatagcacggtgaaaagacatgcggcgctcagaggacgcgcacatagtgagcgtctattctggtagtatattatacgtgctgcatatcggcacataaatgtaatagagaccagtggcgcagtcggaccggcacaagtactcggcatgatttggcgtcaaacg

SEQ ID NO: 30771 - DNA, 320 bp, Glycine max
agcttcaaatggaagagagagaccgatcacgagcacatagcatggtcttaaaagaagagttagccgcttgctcaaggtccaaaaggaacttgactcaacgtttatgcgagatagagaccagcatgttagctatcatcaccaagtaccaagaagaactaagtctagccacggcccacaagcatatggtggcggacgagtatgcccaagtctacgcggaaaaagaggctagaggaagggtgatcgactcgttacaccaagaggaaaccatgtggatggaccgatttgctcttaccttgaacgggagtcaagaacttccccga

SEQ ID NO: 30772 - DNA, 350 bp, Glycine max
  unsure at all n locations
tgtagaatggctagacatgatacatgtcagggtttggtttggttcaaggataaaagggatgccccacattatttccatgacacanatgcaaaaatgatgatttggaaattntatgcaaaactggtcatgcatgcacctatgcggacactcaagtgtcaaatttttatggtcatgtgatgctagggctcaagattcatttcctctattttagatcaacccaatgtttccaaaatatgttcttttatcaatttgtgcattcatccgagtccattttgggtactcgggagaatnttcacagcattcacccttcaggtgtgcacacatttttttttcaacaactagctatgatc

SEQ ID NO: 30773 - DNA, 403 bp, Glycine max
  unsure at all n locations
agcttgacttgatgtaagacacatcttcttcaacctttgtcattcttgactccatntcattgaagcacttatgcacttgcaattccaaagtatcaaacctctcaccaacaaaggtttgaagaccatcaaacctgtccataatctttgaaagaagagatgaatcttctccttcatgtccttcttcaccaacatttctagcacccttcttcacccaagagccatcatgctcctttacataaccaaaggatgctatgactgaagtgcctataaggaatgatctcttgattggaacacaaggttcagaatcaagagggatattgaagtgttgaaggaaaagggtaacaagatgaggataaggcaatgggtcattcaatcgcaatgccttatgcatgcgatatctaac

SEQ ID NO: 30774 - DNA, 402 bp, Glycine max
  unsure at all n locations
tcgatggagaagaataaagcgcgagcaaaatagggctcgcaatctaatattntacaatgtatgtacaacatcggttatcaatacaaaaccgatgttaactaaatgatgttaacattaacatcggttttctacaacaaaccgatgttaacctatcttatgttaacatcggttnttctaanaatcgatgttaacatactgactttaacatcggttattcaaaaaccgatgttaccagtttcatgttaacatcggtttttaaacaactgatgttaacataagctaattaacatcggttttctaaaaaaccgatgttaacaaattcacattaattacaattatgccaccatgttaacgttaacatcggntttgaggaaaaccgatgttaaacgtacgatgttaaat

SEQ ID NO: 30775 - DNA, 314 bp, Glycine max
acatgtcgctgggttcagccttgccgtcttgagaagattgtaacctgcttttgctggcatgttatactcaaggtttgcatatttgagtgtcgttggagatctttcttaccttgcttattttatcaggggcttcgtccagaaagatggtgctaccatctgcattcatggcacagaggataaagtactggggttgaaagccaaatatgaggacgttgcatggggattttagagcactgagatcagagagaactttgattctttctcagtcagggcggggcgatgtatggagtatttataggctgatctgaggattc

SEQ ID NO: 30776 - DNA, 324 bp, Glycine max
ctaagatacgcaagcttgtattgagaatctcttcttattaataagatgccaactaacatattcttgagacctatatgtcggcaattgccagctgagaaacacacgctcacacacattaaaacatctactccctcccacataccaacccagttatgtgagccatcattaactttacttatgatgattatcattataaatacataaatattataaaacagagaaaactgcctggataccagttcttcttgattcttgagagtggttggtgatataggctagcaacaactcttggaaaatgcatggcattcttcatagagagacaat

SEQ ID NO: 30777 - DNA, 394 bp, Glycine max
  unsure at all n locations
aggctgcagctatcttactttgtagaggcatcacactcatatcactgcatgttggattgtgtaaaaaactccgatttaataatacccactgcatgtaaagggtggtgaagttggcaatcctatcttttatcaatgatngcaaggatatccttatacttcccttcattgntattgaaagctctttgaattgattctttggcctatccattgcttcataaatgaaacccattgcaggttnttttttcattatccaccaacctcaacacacttacaagaggccccatagcctttaaagcataaacaacatcattccanaatgatggcgtaagaatacatatgtggcttgcttccccttgggctctttagctgccttagacttcaaccattcatctga

SEQ ID NO: 30778 - DNA, 435 bp, Glycine max
tctccgagggactcttgatcctgttacttccatattatctcttcatatcttctcttacactctcaaagtatacaaatatttcatttaaacctcataaatcatggattcttgttctattttttaatgctgtgggtgcttggaatcatgaaatatcattggactttagttctatgttgcaaaagaatgaaactacatcaatttgaattttgatctaagaccttgctcagtttttatttaaatcttggagtataattgttagtaatcttagtcaatttttacgttttctgtgtctctagatcccgtggtaatgtttttggaattgctgagcactcctccaatgttaatcattttcgtactcttttctaaacactatgtgatttttatatgtatcactacttcctatattatacagtttttatattgatacaccatgca

SEQ ID NO: 30779 - DNA, 412 bp, Glycine max
  unsure at all n locations
agcttcctctgtgccatttcctgcgaaggcaaacatttggaaagttagttttaccaagaaatgctactcttanaacanaaatggcatacaacctcctccaataaacacaaacatcaatgtaaatntagagcaaactcatgcacatacttccttatgaacattcactcgcacaagatattcttctatctaagaaaaatgcacccatgcacaatcaaggcaccttcattacctagattatntatatgtacttncaaggtgtatntgctacctacatcacatgcacttncttggctaaatntacatacatgtatactcaaagcattttggctaccanaaattgcacacgtgcacattctggtatttccaatacctatgcatatacaaactntgtgatgaatcttggctatctaca

SEQ ID NO: 30780 - DNA, 321 bp, Glycine max
  unsure at all n locations
tataagcagcacanatggagaagttgttcaattcatggcatcttcctatctaaactcaagctttgccgtcaattaacctaaagcacaacttgatttatggctttgaactttgaaaattgaataaaatccaataaacttatatttcgattctaacaaactaacatttacaattttaaaaaataggttctaaccgcacaaatggaaaagttgttcaattcatggcatcttcttatctaaactcaagtttttgccgtcattaacctgaggcacaacttgattaggactatgaactgtgaaaatgaatccacccaattacttata

SEQ ID NO: 30781 - DNA, 401 bp, Glycine max
tttcttctctatgaagcttcctagtctataaatagaagcatgtgtaacacttgttgtaactttgatgaatgagagtcttgtgagacacacttcatagttccacttctctccctcttttattccttcaatttcgtgctcccccctctctctttctctccctctttcttttcctccattgaagcatccttccaagcttcttatccaaggctcatcttggtggtgaagctccttcttccatggcttattccctagtggatggcacctccgctcacctcttctcctttgacttccgctgcatctccatggtagaaaatcaccattaaaggacctcattgaagctcatagatccagcctccatagaagccccacaagtaagcttccatcataagtgcactgacctt

SEQ ID NO: 30782 - DNA, 203 bp, Glycine max
tgactatgcgagttgatttagccttagtttctctatatttattattcaattcgactaagaatgagaaatctcaaagagaaaacgtccgattgattattcgctttatttcgctaacagatggttgttgattatgatattaattgtttacctctattttgattgccaacgtggttacggcacgaccgatcggtctgattttttta

SEQ ID NO: 30783 - DNA, 374 bp, Glycine max
  unsure at all n locations
ttgcttgttgacacgcggagatntacgtcatcttttgtgctcacaagatttgtcatactgacatttgagtcacgttgacgggcggagataccctagtggttatccgtataaacattctttnttgctgtctgtaaaacgaaaagcctgatagcatgcagagactaacgtcgtcttctgcgcccatcgtcaatcgcggccgacaagcccgttgacacgcagagatttacgtcattttccgcgctcacaagatctgtcatactgacattngagtcatgctgacggacggaaatacccaagtggatatccgtataaacattctttnttgctgtctgtaagacgaaatgcctgatagcacgcagagactaacatcgtct

SEQ ID NO: 30784 - DNA, 233 bp, Glycine max
  unsure at all n locations
caccgctttaggagcgttgtacaccagcagcgcttcgaagccatcaagggatggtcgtttctccgggagcgacgcgtccagctcanggacgacgagtatactgatttccacgaagaaatatggcgccggcggtgggcaccactggttacttccatggccaagtttgatccagaaatagtccttgagttttatgccaatgcttggccaacagaggagggcgtgcgtgacatgag

SEQ ID NO: 30785 - DNA, 591 bp, Glycine max
  unsure at all n locations
acacccgacgcggcatacagacacgcgaactggagaacagaagcacggacaganaggactcgcgaaaggcgaaaaacacaaaacggagnggnattggaagcccgtggaaacaccanggcgananaggcnaaancacacgggaacccgcggaaacgacacagagcgcacggaggcaagcgttgctgancgacgaaggaacaccgccacaaagggacgaacngcagcaacaagacaagacccaccgcgaaanccacaacagaacgacacacggggccaaaccaggacacggacgaacgaagaanganagcgccggagaacggagacggcggaagcgacanaacagacgcacacagacaccgggcgagacaccacgaaaccgaagcgagagccggccgacggcaagcgaaacgagagacaggcaccgaaagggacacgacaaaacgaagaagaagcgaaggcaacaacaagcaccggaaacaaacgacgagagagacaagacgccccaggcgggagcggaacgcaggcaaagcaaggcgagcacgggaaccacggaaggaccggaaacaagagcaaaacggagcgaacgacgac

SEQ ID NO: 30786 - DNA, 223 bp, Glycine max
tgacccctgcattacgcgacctatgaatctcagcttctcatatattatgtggctgaacggactttttttgaaagtatgaccattgatatctcgagaccttggtagtcaatatcaagcgtatttatgtattatgcccccgaatcgcctttctgtgacatgtatgaccatttgtattctcgaaagcatcgatggtcattatgagcctcttgagcattatgcccat

SEQ ID NO: 30787 - DNA, 202 bp, Glycine max
  unsure at all n locations
tttctntatgagaaagagacatatcaacgaatgttactacatagcgattatagagcattggatttttagcagatttaagattcctattagtgttttataaacctatgtaaagagtctatgtcaatgcccacttttttttttaatttctctttgttccctacatctctttccttttggatttttttggtgggggggggggggg

SEQ ID NO: 30788 - DNA, 370 bp, Glycine max
cgcatcagttgaggctcgggttcttccggctccatgggtaatcatctcataattaattaaattgtttacaaatgttgtttgcttttgcacttttgccgttatgcttatattatattttggctcttcttgtccctttagttgaaatatcatgacactggaagagagaaagaatacttgccacaagttggtcagtggaatatgatgaacaacgtcagctaagaatgaacaaataatgtttagatgtaattattttattgaaagataagaaaagggaaaattacttgtttccaacttactctaattctgggaaatctaatgcagaaagtataaatggaagtactgtaagatattgggcatgtatcaacttctc

SEQ ID NO: 30789 - DNA, 405 bp, Glycine max
  unsure at all n locations
ttgcttgcgtagtacaactcataatcaaattattaaatgttttttgagaaaaaccaaattcatttagcgtcaatttcaagaagccccaatcaactttatcatagactttctgcaaagtcaattnttagcctaagattcccttttttattatgcatgtgatgggcaatctcctgagctattatagcattatcagatggatctctattaggaatataaatgctttgcaaagggccaataagactatcaaaatgaggttgaatgcgattaacaagcacttcagagataattttgagatcgacattgcataactgatgggcctaaactcttttaaggaagaagggcaatccactttggggatagttacaataagagtttcaaccaaacttggattgatggagcctaaag

SEQ ID NO: 30790 - DNA, 453 bp, Glycine max
  unsure at all n locations
ntcatggtggcgagaggccatgtgaagctaatattcanatatacatgcaagacctctctaggtgcgagttgtggcaaattttaatttatgggttaaagttagcttggagaagggattatcaaaacatcaagatataatcatattcccttacggcaattaatctcttgtttatcaagagagtttagctcaattagttgaataaaatgatgtgttgttgtgaatccttagtacctatcgtttgattgctacaaattaaaaaaacaaatctctcgtctaaaggtttctgttgtggtgatccatgtgcgagtttggtcaaagctatttatgacagccatcggagtaaaggccacatttactgggttcatgtgctgatggaatcccatcaggtggtagatcgatcttatggcaaatcatgggttaaactttagagtcttcatatcatggtgcctatat

SEQ ID NO: 30791 - DNA, 376 bp, Glycine max
  unsure at all n locations
atctgattttggattggcaaagctaaatgatgaggacanaacccatntgagcaccagaatagctggcacttagtgagtgtccatacatttcctttnttaaccatttgcattgatcattactgagctatatgttggatccattatcatactatattataatttcgccaagcttgatgatggggataaaacccatttgagcattaaaatagctgacacttagtgagttcccatacatttcctttttaccattntgcattgatcattattgaggtatatgttagacacgtacattatcataatataataataatcaagaaaaacaatagacatcatgtattgaaatacctcatgatcaaatntanatggaacttacact

SEQ ID NO: 30792 - DNA, 283 bp, Glycine max
  unsure at all n locations
ataatataggatgattatggatccaacatataccttagtcatgatcaatgcagcatggtaacaaaggaaatgtatggaaactcactangtgccagctattcttgtgctcacatgggtttctgcctcatcattaagcttagcctagtccaaatcaaatatcttggggttgagatctttataccacaacacattattggccttgatgtccctatgaacaatcttcatgttggactcttcatgaaagtagccaaacctatagcgataccaacacgaaatctatgct

SEQ ID NO: 30793 - DNA, 375 bp, Glycine max
  unsure at all n locations
agcttaatcttatggcttgcctccagacttcactccccgtaccgctccagacgatttgaaccaagcccctaccttcgaggggcaactccctccttatgccgattatcccctgcaagaagacgatgaagaagatgcccgtctaggccctctactgcccctcaaggatccggccccccatgaattgccccaaccaaacatagtccgccatgtcccatctccacccgcacccgttaaagaatctgttccctttgcaaaagatagggaaagattgatttacttgaagagaggctgagggcggtagaaggcctcgacaactacccgttctcggatntggcggatctgtgtctggtacctgacatcgtcatccctcccaag

SEQ ID NO: 30794 - DNA, 810 bp, Glycine max
  unsure at all n locations
gacccaacgtacctaantncaagcacaganacgtacacagacagngntatcgcacttaaactaatcnantccntactancnanccncagagagcgcngattggacgccattaggtaganangccattgataganacgtacaaccnaccgacgatcgacagcantaactataaaacgatgcgatcgagacgtcactacgtatatgtgtcacacaacgcatatcactacccataagaacgcaganagcgacgcactatatgagacagcgagcttatgaatatcatcagcngagcagtacgcactcactcnctgacgcanctcnnatgtagacggcatgatatacatcgacgcacatgaatgagatacagacacgcatgaacgcacacgagaagcggagnangatgatacgaacacagccgactacaactgcgaggcctgtaggcacatacgacagcatacactcgacgacgtagtctgcagaaacgagacagagagaagatacacgaagatagtcaacttaacacagcataggacaataccaacagatcgagcatgaaaataacggctggatgcacaacggagctgacgacagcgccaacagacgactgtgatgcacgagacgtacaaacatcaggacgtcactcgcgatcacacctcacgcagagtaacaaccctgccacacgagtgagcagaacgaacacgagcagacgaccgacgagcattgtgctctagggagatcgcacaacgaggacacactgatacgacatagacggagtacacaaactgatctcactagacacagccaaccgcc

SEQ ID NO: 30795 - DNA, 326 bp, Glycine max
  unsure at all n locations
agcttttatttaataaaattaattaaaaaaataaggattttttttacgtaaaggctatagatacaaagcttcacactaaaaaagaaacatctcaactacgttgacaaccctcctcctagtgatcacaagcaaaggcgtacaatttattcaaataaaaagaagaaatagatgaccaacactacgaaaagaagtcttgtatgatgtctatgttaagatggttatcgaaaagctatcctcggttaagtagtggtggcattttcgtaaacaattataacttttgaaagacggtcattgcanaaccgtctttaaaacaacttttcaaagat

SEQ ID NO: 30796 - DNA, 480 bp, Glycine max
  unsure at all n locations
gcgccttgacccctgttganccaatctagacgtgacaccttggcataagcggcctcaggatgtccagatggagaggggtttcagactgttgccccgatacgtttgacggtttagatctggtcacaagaagtgtggactaacctacttccacgatactttggattaatcagaaactatatcacgagctactggcaacacacataattggggggcatgaggttgcgacacagcaccatatctgattactgttgcattggacacagcatgatccccacatatgagtctccgacgaaagcttacaccccaacgactgacctctgcctggatgcacaatctatctgcattgacaatgacaaaggatggtttctggctaatatcggcatttaacacgcgctcaatgtagtcactcgattaaaatgggtctcttttccggaatctaaagggacctcatagctagataacacttccgaataaagatcg

SEQ ID NO: 30797 - DNA, 413 bp, Glycine max
actatatgcctcgggcacacaagctatctccatactggctcgatgagatcaatataatctcgcaaccttgtcagcaaagaactcatgaggttataatgcttcactctaactgactcaccatacaagaccatttgctcttgctgtgcatgcaatctggagcaattgaacaccctgaagcctatgctgcagacatcaacaaaagacctgctctacctcaacaacaaaatctgccacaacagaaaaataatgacctctccagcaatatgaacatatccaggaggaggaatccattcaaccttaaatggcggagccgtcacacaaccacaacaacaagcacaaccctatttctaaatgctactggacaagaagccatatgtccatcaccatccacagcacacaacacagcacagccc

SEQ ID NO: 30798 - DNA, 238 bp, Glycine max
ctctgcagggaatctaagtgtgaagcatgctattctgcacacgattgtagctgccaactgggtacccactaatcatacttccactgttgccacaagttcgagtaaatttctgtatgctgtcggaaccacatccaaatattatctggaaactatatctttgatcaaactgtcaaacattcataatctttagctatcaaataagccattgccttccctactgtattgtgtgcattatgac

SEQ ID NO: 30799 - DNA, 401 bp, Glycine max
caagctggtttactatttctgcactaaattgttgttgtggtaatcaaatgcagatgcaatgcagtagaagggggtaaagacaatatattactacaattatatgaaattgagtaggtaatactaagaatagaatattagtagcatgaccgagaataaaatagccgttgtgtcatataacataacaattgtctcacatacagggaaaaaaaatactccaacgccatcattagccggttgacttattgctgtctttaataaaatgttgcccatttcttttaaatgtggtgatgatgccgatgccaacagtgtgtattatcaaccactgcaagtttcataattgtaagttagactgcaaaaataaaattcagtccaattgttctgaagttatgcataccatggac

SEQ ID NO: 30800 - DNA, 410 bp, Glycine max
  unsure at all n locations
actcaagctgatgcattcttttcctgcagaaggcaacacaatattcaagacttataaaaatgatatgctggtttggagaagatgcaatctatgcaccatattaaacccacaactcaaccttccacccaacacatgttgaccctcctccccaaattgaaatcaaattcttcgtataatttctctaactcttttctcgccgagctaacaaaaacctatatctaanatattttaagaatgtctgtcactacaggacatacattagttacttagattacacaaacaattgaataatgagcgttctaccttcatagtggtttatattatcctttctttattttacaacttatatgaagatggctttcttgtttctccataaccacttcattaagcatttgtaaccataactcttc

SEQ ID NO: 30801 - DNA, 316 bp, Glycine max
  unsure at all n locations
agctngatgtagatgtatcatatatgngnncnnaacaatnggttnttgagtgcgtggttatgttcgtgagtggaattatttgcattccatcttgcaatggaagaatgagcagattttatgtatgtgtttgactgttttggtaaaatgtgatagtctcttatggacaccattcacctatttgtgctgtacaatatatgaggatctgatgcaccaatttcatatgcaactgccaagtcatctgaactgttggctgcccagaggagcttcatagcttgttccaaagctcctacttctcaacctcctccatgagtctgat

SEQ ID NO: 30802 - DNA, 364 bp, Glycine max
  unsure at all n locations
ctgagaatggctagacatgatacatgtcagggcttggtttggctctatgataacatgtatgcctcccattatttccatgacacaaatgcataaatgatgatctggaaactttacgcacaactggtcatgcatagcagcctatgcgcgacactcacagtgtgaatataattatggtcatgtgatgctcgggctcaagattcgtttcctctattttaatcgccccaatgtttccaagacatgttcttttatcactttgcgcattcatccgagtccatancgggcgtccggtgaaacatcacagcattcacccttcaagtgtatacacgttttccataaattgtttatgatcaatgaatttgtttct

SEQ ID NO: 30803 - DNA, 397 bp, Glycine max
  unsure at all n locations
agctntgtttataagctcgaaaagacaagagtggtgaaagagaagctaaagacggaagtcactagggtcaggaagaagtatgatgagctgaaagatatcaacctgaccatggttgaagcgtcagagtgggaaataaaatgggcctgaaaggaagaatggagcaggaacaagttctaaggggctttgtgggggcagcagtaatgtgaataagcttagaagggatgaatcaaggatggaaagcatggtgttagaggataagttaaaggcttgtcagaggtcgaagagaagtttgacagaacagctgagcaaaatagaagagaatatgttgataatcattgatcaatataacgagaaggtgaacctagctgctagtcatggacatatgctggaaggtatc

SEQ ID NO: 30804 - DNA, 478 bp, Glycine max
  unsure at all n locations
ttatcatcattggtattggtgtatcaataaaaatggtattgttgtaatgttattttgtacaattccacctttgtacaattaaaacatcgtataaatattttgtaatgtaattattgtgtataattttaaattgtgtaagaatttactgccaacgatttgtcgtatgatttgtgctactaagatccattgganaaaataaaaaatagaatgtggaagaagttttgaatctcccaaagtacatctgacatggatacaaacttgagtagacgttgctttgctacatattgtactctttcattaattagaagtttcatactagcttccactctcttcatctttctccaatgaatgtaagaagaataaattatataatggaacatttgacattgttgcttccttcggtatcggcgatatatatagatcgattctgaaaacataagtctgtgtattatcattagcatatatgatccttatgttc

SEQ ID NO: 30805 - DNA, 337 bp, Glycine max
  unsure at all n locations
tttcttgcatttctctcttcccttanacttcttttatttattgctatgtatctcttgctttaaagaagttaattatgaattgtcttttgagtaattcatgttaacggtgcattgttaatccgaaaagagagagtgatagtttaattgaggaatagtctttgtatcttaattcaacccctttctttcttaacgttactgaagccatttgtcaacatcctattcttgacaactcgcttctctaagaagaccaactctcctgccttgataaatgaagccccatgaacgtctatatttttacttgaaaacacagtcatcaaatgtcctttctctttttgaa

SEQ ID NO: 30806 - DNA, 480 bp, Glycine max
ctactgatgcggcatggcaggcttacttcactatcttgactccgatgcgagctatgatcactgctcttccttcccgcgacgcgtcttcatatgttcgcctgagtgggcttatactctataccatactatccacgatgactttggctatatcaagctggcatgcctgcgatgtcgttgcctagacccatatcgggttcataaccgactcccaacataactccagccatcattacatgctggattggacaggcaatgcttccccagagaatgagttcacggatgaaattgctgacaccttcagagcactggatagcggtttctaacgacctctctggcggctacacttaaagcatataggatgggcaacttctcaagatgactccctcgcctgagacaagaacagatggcacctcaatacaaattaaactttcgtggagggtgagggaacaacctcgttgatggatcataggcgcccaggag

SEQ ID NO: 30807 - DNA, 403 bp, Glycine max
  unsure at all n locations
tgaagccctgacacnttggaanacaggttgancccttgaacccacgnatttaagacgtcccagggaacttttgcctttgatacggcaaccacgttgatagagacatcccaaggaaaaggtcgttcttcagctaagccaggcatcaatccaatctacggcaggtaatggcccatgactgcggcttggcgcataagaacatcaaggcctacagggtgtagtactgatattctacgcaaccacttcccgttatggaatccacctttatgagatgaagcatgttgtatttacatcaatctaagtctggataataaggcgggaccatctgcttttaacccacctagaacacaaagttgttatagctaggctcgtagagccgaaagctacttaaactcaagactcatcc

SEQ ID NO: 30808 - DNA, 500 bp, Glycine max
  unsure at all n locations
cgccgcattgatccatcgtgagcgatgaanacttaaaccctgagaagtgcgaggacaagctctcaggcnaagctcgaatgatctctgcgtattctaagagaagttcacgttcatagccatcggagtctgataagagtatgatgaactatgggacgtcattatggtcaccgctgaagccttggaacgagaaaccacaaaggcctcgaatgaatatcactaccaatgcaaagttgtgacgggctctatagggcagctatattgatctcaacctccgatgaggtgataggactcatcatgggtcaaaggcatgaacctgaaggacgaactaatagcttgcctcaagtcaaatagagaattgatctcacgataatacgaaattgaaggattatgtggccatcttcatggtgcaaaataactattctacacgattacgactaagttatagtgattaccccgatttancaaaagggaccaggagagggtcttattcttgacctaag

SEQ ID NO: 30809 - DNA, 339 bp, Glycine max
  unsure at all n locations
tatctntctttcaattcacacgacaataacgttntactcggatgtctgattgagtcccgtaatatatcgataagctcgaaattgaatgttgaacctctgagcaaattcaaacgacaataactttttactcggatgtctgattgagtcccgtcatatatcgagacattcgaaattgaatgttgaagctctgagccaattcaaatgacaataacttattactcggatgtctgattgagtcccgtcatatatcgagacgctcgaaattgaatggtgaacctctgagcgaattcacaccacaaataacttttactcggatgtctgattgagtcccatattata

SEQ ID NO: 30810 - DNA, 546 bp, Glycine max
  unsure at all n locations
cgatgtgagacgatagancnccnttcgtttaganccccctagctatatangagacactactcagaatactcaagccttcaacagttcaattttcgagccgtctcgatatatgtataggcctctaattttacatnccgagtgacaaagtactctgtcttntgaattgcgctcaaagcttcaacattcaatttcgacgtgtctcgatatattacttggactcaatctgacatgccagataatagttattgtcacttgaattggctcagagcttcaacattcgaattctaacgtctcgatatatgaagggactcaatcacacattcgataaatagttattggcgcttggtatggtcagaagttaacattcactttcgaacgcctcaatatattactggactctatcagacttccgagtagatggtattgtcgttgaattggctcacatgttgaaattcacttcgacgcgctgatgagttcgggaccaacagactcccacaacaacttttgatcgtacagagtagacttccaattcattgttagcgttcg

SEQ ID NO: 30811 - DNA, 562 bp, Glycine max
  unsure at all n locations
caccacacacaccgacagggactgcgaagggaagacaaaaacgacgagaaacgccaagcacacaaaagagaaaatgaaccttgagacctcgaaanccaggtggaaacagcagaaccacacggaccgctaaagacgacccgcaggcaagcaagcaaagatttcagacgccgcacacggagcaggaacagcgggaaatggacacagaagggcccgaacagcgtagagagacagaaagaaacaagcaccccaagagcgagagaaggaaacaaccaaaagagcgggcgaggagcaaccacacaaagaaacgcacaccgaggaacaaggcaagagagcagaacgccaagacntccaaagacgagaaagacaagaggcaacatcaagaaacgggaaagggaaccggccgacacgatgagaacatgaaaggcaacgggagtcgacacaacggaaaggcaaacgggtgaatcgacagcaacacaagcgccaacactagaacggaacccgacgaggacgagcacgacaaggcaccaagccgcacggggacggcagcgtgcccaagagcacg

SEQ ID NO: 30812 - DNA, 504 bp, Glycine max
  unsure at all n locations
cctgcctgtttaacacgtagtcggcggtgtcacatantccanccctcaccgaggggatgtgacctctaaaccccgtcagtcagttgacgcaacgggcacgaccactccacagcagaagatttttactgccacacacatgtcaccacgcctcacagtggcatatactctcctctcgtcgcagacttggtctacatcatatgggtggtgccgcaaatggcagattcctggcaactaaacgccgtcgatcgacaatgactctgcgactaacctcagcatactaaggacgcgtgtaaggcaaagatctgcgctagcagacctctcatgcatggcacgcccgacgatgtcgggtgcatctatcgcttcgaatacatcatatacagaggggatctatgtggttagctctgagtttgttctcttagcgtgatgatacgtggtggcaacgcgctcgggtcggatcggactcaccactacacgccacaactgtgctcacatagaggcggcatg

SEQ ID NO: 30813 - DNA, 96 bp, Glycine max
ttcttgcttttccttggcctacataatttttttcagaatacacgttgttatcatgtgctacaattgtgacccttctgattaaatgtcagatgatta

SEQ ID NO: 30814 - DNA, 514 bp, Glycine max
tcacacgttgttgaccccttcgaaccttgatacttggcattacgcgcctttaaacaccgcctcactactatttgtcaaacctattattcgaggcgaacagtatctatcttcccgcaaactatgtagtccatcccctgcatggaagtgcatctaaaatactataatttggtttgccgctatatccaacaatcttcaaggtgggcttaagggatagataacctacatggattgaaccttgtctgctacacacgaattaagagaatcatcttcttttgactgtatggatagcgactcctcgtattgctcttctttccaatatcttctgtcgccctcttaacgatttcatattgctgtgttaacataatgccttacttcttatagggattcaaatacccaagcactagtgtatgcgtttgattatctttcctcttatacaagaaacaacaacaaaggcctattaattgagttggaaaggatctttcgcatactttactcctatatggaacatatcgcg

SEQ ID NO: 30815 - DNA, 321 bp, Glycine max
  unsure at all n locations
tctctagggagatcctttggttccttcttccaaggccaagggtaataattctaatcttaggtcaaggttaagggccgatgacctgaggttttggctcataagacttgtagagggccggacatgatgtatgtaagggatatgtgttcngtaaccgttcagggataacggaatgcccatattatttccatgatacccatgtggacactcaaacatcangtntgtagtaatgtgagactaaggcttangattcatttttcccatttaaatcaacctagtgtntccagaagatgtgntttatcaattatgcattcatctgagtct

SEQ ID NO: 30816 - DNA, 319 bp, Glycine max
tgaccttgaccctgaacctgaaacgccataactcgcttgagagatacattattcccaccccgttttttgagcagaatcctggaaactcccgatcgatccaaaaatttaggacagtcgactattgaggggattaaagtttaaaccgcaacccgttgttccaaaattttaaattttaagtccaggggcctcgtatcctccccggctgagaacccgccaggggtaaaaggacatggtgagcgccaggtttcaccgaggtcgcattaggggggccagactagcgcggtgacccggggggggccccttaaatcggggctccacg

SEQ ID NO: 30817 - DNA, 357 bp, Glycine max
  unsure at all n locations
agctttgctagaaaaggttgagtattttctaananaattatcgaaatttataatgggaagagataacttagaggcacttcttgcccaacaaaagtgcgttattgaaaaggctgggttgggatacaataacaataagaaacagatagctgacaaaatctttttcaacgttacaaaagcttccagctcacccatcatagtatgctactactgtatgaataagggacattcttcttttaattgttgattaagtagtttggaattccaagtgggaaatacaaatgggttcctatgggaactaataaggttgctaaccaataaggacccgacataatttgngtacatagatctacctctcta

SEQ ID NO: 30818 - DNA, 297 bp, Glycine max
aaccgcccagagacagggcaacacacccccccaggctgactgaaccacaaccaccaacgccaagcaccacgacgaatgccagaagcggaccggggaaggcagcacggaaacacggagagaagcacccgacacggcaccgagagacggacggaaacacagggcaggaaacaagacgacgaacaacacaccgaccaaggcgaacaaggcaaaggaaccacggaggggcccgcacacacccggcgcacgcgcccccagccgaaaaaacacccaaaggcagggcaagacacacaagcgaac

SEQ ID NO: 30819 - DNA, 392 bp, Glycine max
  unsure at all n locations
agctntacattggttatcaattgtctaacataaacttcttcttttacttaggacttgggatataacatgttaaagattgcagcaaagcacaacatgggcaggttgatgacatgattntgaaattacaatagaacattatgccagatatttgatccatgtaccgaccccacctagtgagaaaaggattggtttgttaatgttgtatacaaattcaacatacttcaaatataatagtagttgtagagttccaagccaaaagataaggtgcatttaatgcatagtgggaattggaattttatcactaaggtttaggtggtttaaatgcaaagtgaaagattgcattntactagatgaaacttatttgaatggatgcattggaagttgtattgttc

SEQ ID NO: 30820 - DNA, 416 bp, Glycine max
  unsure at all n locations
tgctaacccatggaagctcctaatatctcccacactntntgagatgggccattcatggatggccttgattntctcaaggtccacttggaccccatttctaccaactacaaaccctaagaaaactatattatctacagaaaaagtacacttctctatatttgcatagagggtgtttttcctaaagactgaaagaacttgcctgagatgtcctgagtgatcatctangctcctactgtacactanaatatcatcaaaataaacaactacaaatctacctatgaaatcccttaagacatgatgcataagcctcataaaggtgcttggtgcattagtgagcccaaaaggcatcactagccattcatacaaaccaaacttggtcttgaaagcangtatccacttatcaccatttttcatcc

SEQ ID NO: 30821 - DNA, 404 bp, Glycine max
  unsure at all n locations
agcttgatgtgtgtattcaccatctttcatagtagaatactgggtaatgtgtctaccacacgattatcatctcctttccatcatttgggggtgccactgggctgccagatccctccacctttgngtgtatttctttgaaggattcatgctcctttttgcacatgttctatagttgcatcttatccagagccatatcagaattgtactgatactgcctaacaaaggcaaccgtttggtccttccaagaatgggctcgggaaggttccaagttagtataccangtggcagctgccccagtaagactttcttagaagaaatgtatcagcagtttctcatcttttgtgtatgcccctatcttccgacaatacatcttttagatggttcttcnggcaagtagtctcctt

SEQ ID NO: 30822 - DNA, 325 bp, Glycine max
  unsure at all n locations
tcaacctagaggagacggaccattccaagtgttggagaagatcaatgacaatgcctacaagattgacttgcctagtgagtataatgtaagtgccactttcaatgtgtctgatctatctctntttgatgcagatggaggggccttggatttgaggacaaatccttttcaagaagcagggagtgatgaggacataaccaaggtcaaggaccatgnaacacttgaagggcccatgaccagaggcagacttanacaagcccaacacgtcatagagacaaagctagtcatttgtatagctgccattgatgatgattgaaggcccaagtgg

SEQ ID NO: 30823 - DNA, 393 bp, Glycine max
  unsure at all n locations
agcttgttttcccnctctcttcacatgaccctcctttctcactaagggtggtgacccttcttcaggctgggtgattcttctcatctgaagggcctctatttatagacccatcttaatgttaaaaggggaagcaaatctctaatttacagataatatcttaataaaatttaaacaaatcctaaagataagataatatctttataaatataaacaataatcctagagatntgaaattacaaatttgaattgtttcccaacatcctctaccaaactctgttccttgcccctcttggcctgattcaaccgcctcttccacttttttccttctcctatatgcttgtgttaatggcctattagtggctctacatttatggacaagtttgcttgctactt

SEQ ID NO: 30824 - DNA, 482 bp, Glycine max
  unsure at all n locations
taagagtntaaccatgcgtagatatcctatggtaatatctcatttttttaccatttgaatagtgtaaaaacactacccaatcgcctaacaaaacaataatactgtctaccacacacacatgaaaaattgngatgttaccgtgtttgtttgacattctttgtcttcctaggagtgtatgtaataatatctttgtagcacacatgagaccgatgttgtttggtaagagaaaaataagattctagtaaatttagagagtttgataagcactgtgctacttcaacaaatataaagatatgtgaaatttggtgaagggatatcttcctcaaatacttgtcaattaatataagcatacaaaatanaattaaatataatataaatcataaaatattctactaattataagatcaacattggataataagagtaagaacacattattatttaaacagttgaaagataaaagtaatattattaaagaacta

SEQ ID NO: 30825 - DNA, 403 bp, Glycine max
  unsure at all n locations
agcttgtatctaacggtgattgcaagcgatgcagcataatctagatctctgacggaagacaagttgaaccttaattggtgaagatagatnggggaaatatngaatcatgatttatatatacgtcaacagcacacttatttatattcttcctttctctgcatctccctctatcataggagtgttaatttttagacacttaaacaatngaaacacttaannataatattggcatgtgttttttttttttttttatctcccacttcatttacattacataaacaatcatatatatttcaacatccacttattttanacatttcatcaataactcttatttntctctcttatcacatcatataatctatcatacatnatnttcttcttcttttttttcactatctct

SEQ ID NO: 30826 - DNA, 469 bp, Glycine max
  unsure at all n locations
ggattcaacttgggactccttccgttntgcttctgacacagcctgtctccgctaccatgacaacattcacctccagaacattcttccaaagaagaatgtggagctcgcccccacgatatacgacgaattctatgggaagctctagcggaggcaatggcatagacgaatgagaaacagattgatgtggtgttggtgaagagttctactccaacttttatgacccggaggacgactctccgaagcagtgctgagtgcggnggaagaccatcaaatttgacactcagacattgaacgatntcttatggacctcgtaatcattctggaagggggagcaactaactacatattcccagtacctccaaacttatcctgacctcccacacctctaaccttaacataggaccggcccgcctaatatacagactcgtgatgaagatggacatggatgtgggcagtatgatttcctttg

SEQ ID NO: 30827 - DNA, 404 bp, Glycine max
  unsure at all n locations
agcttgagtatagagacttctcaagctatttatcttctctctcagagagactctctcattggattgataggaatgaaggctcctacccttatttatactactctacctccacaatgaatggtggagattacttgtatcatanggtggagattaattctctagaatgttgcacacattctatgagtctttacactcttctactcttttccatatccttccataaggttccacacatctctagaatattctagaggtttccacattcttccacaagcttctagagagttctacactactctagagttctctaggacgttctaaaaaattctatactnttccagagatgtctagaattttctagaacttctccaattaagaaaggattccaacaattgtaatgtatc

SEQ ID NO: 30828 - DNA, 291 bp, Glycine max
tgagcttagtcatgagaggtgtgcgtgtacctaatctctagagtctcattgaagatgcctcagagatgcttatcaaggaattactctcaacatagcttctcaatgagaccgcctaggctatgaataaaagcatgtgtagcacttgtgtaactttgatgaatgagagtcttgtgatacacaactcatagctcgacttctctcctttggtcttccttccattactagctcccccctctctctatgtctgactttttcttttcctccatatgaacatcctcttcaagcttctta

SEQ ID NO: 30829 - DNA, 385 bp, Glycine max
tgcttatctcttggagtatataactcattatgataagctgaacagtgtgaaatctattcaaacaagaattaatgatacttgcattgacattataaaggtcatttatactgtcatctgatcacacatcgtcatatatgataactttgttgacttttgcaataactcatctttgaaagttataatgatgatttctgatttatcaacaatgtaaaagcttttacactaactgtacatgcctattgagttcttattaaaaagagcttatagaatattcatcatctatgagcattattaagttccatgtaagctctatcaaatgcctcctaaatccttcttacaaattgaagcttcgaacaaaatggattgagactaacaataattatct

SEQ ID NO: 30830 - DNA, 180 bp, Glycine max
cctgacttactgacagacacgcgtaaaaattcgtttccaaaggcgtatagacgacagcccccaaaggcacatcacaatctataaggagatcgacataccctaccatagatcatataactatcagctagctctttccgatcctcccagggggaacacatattacatgcccaaaactcaacc

SEQ ID NO: 30831 - DNA, 394 bp, Glycine max
  unsure at all n locations
tttcttgcttctatgcggtggagggtcttggctaccccgaaatgaccaccaagtggtgtggcatggaactccgataagagggatgggataaatgggttggccggattcaaccatattcaatcattgaagagtagatagccattatgaacgcgatactgagggtagctagaaggatcatgttgaaccttgtcccgtaacgtctgaatatcaaagtcgtgctcgagtgtttgttggatttcgcgcagaaagtcaaactgatgaactgaaagcacgagtagctggccggcgagagagtngcatccgcacaacatttgtggcacctcgcttgtattgtatggtgtaattaagcctagtaacttggaaagatagtagtgctgctcccgggtctaaatca

SEQ ID NO: 30832 - DNA, 302 bp, Glycine max
  unsure at all n locations
ctcagctgctcgctacgagacaaaccctagaatttgtgatcagatatttcgcgcttagcgcacaaccacttacactcgctcagcgagacatgctctntagagcacgccttcgtaagctgagaagcctaagagcctttaataacactaagaatagagggagttctttatcttagtatttaagccttgttgcttatgaagggctgaacacttcattgttgatgacgtctctactgagcactcttaatgtaaaactcctaactatctatttaaatgtacttgctagtcgttcattggctctatct

SEQ ID NO: 30833 - DNA, 386 bp, Glycine max
tttcttgtgtatccaataccctgatgaggatgtcccatatgttcttaaaactggactgatccatttgcttccaaagtttcatggtcttgcaagtgaagacccacacaagcatctgaaagaattccatattgtttgctccaccatgaaaccaccagatgtccaagaggatcacatatttctgaaggcctttcctcattctttagagggagtggcaaaggactggctatattaccttgctccaaagtccatcacgagttgggatgacctcaagagagtattcttataaaacattttccctgcttccaggaccacgaccatctgaaaagatattttaggcattacaaaactcagtggagagagcctatatgaatattgtgagagattta

SEQ ID NO: 30834 - DNA, 297 bp, Glycine max
  unsure at all n locations
tgatactcagctgcttctccaaagcacagccttctggatgattgatctggaatgtctaagtgggccagatcgctatttgcaccccctatttactaaatgcaccccccttctattattttctttgtaattctttttccgtaacgctacgagactgtgcgaattttgttgcgatacttattgtccttgcgcagggttacgaatccttacggattatgtatttactcttttttagctttcgaagaagttactgaaactcacggattgtgcaanaacacctcttttcaatttcccgcacat

SEQ ID NO: 30835 - DNA, 317 bp, Glycine max
tttcttattgtttataaagtactggatctattggtctagttaacttcttaccaatcatatttgttcggctaagattcttctagatttaactctgatccattaaatgttgatttttgtgcacaaattagagatgatgttgattgtttaaggagttctccaagtaaccaagttaaaatggttctctttggattgcaatcttagaagtaatgttacattggttggaatacagtgcttcaaaatttatagatagccttcattttttagttaattgagaatgcgacatcctcttggattcatattggtgttcctgtatttgc

SEQ ID NO: 30836 - DNA, 454 bp, Glycine max
  unsure at all n locations
gcgcttatcgtcctctctatctcacgttgctatccctttcttcttgctcatcattgaagctccatcaaagctacaacctttgcacaccatttctgctccaaaatcgcagaaggaagccattttcggagtcgagaagagcacctctccattgtgggacctcacatttcacgtttgggtagacttcttctcacataaattttcgtgggtattgcgttttgggagatatgatgggtagttntactaggtttatgcctcatgatagttatttgtgaagaaatttgatgaaagcatgttgaacttgtcatgtttggtatgagtcaagcttacccattctgttgtagggttnttatgatgatgctcgtatgctgaaatggctgatggaaaaatgataaagatgaacggtagaattaacctangggttaaaagtgagaatgtagtgatatgagtggaaaag

SEQ ID NO: 30837 - DNA, 246 bp, Glycine max
  unsure at all n locations
tattcatgctatatccaagatcaaataacccttgagggaaaaaatggttaccaattatctaaatgacaatatgagtatcaaagtccacattctgtgtgccttaatttgtatgtctgggttaataatttttcaaggagttttattcttgtaaaactatgtcaattcttactgaagatgctgaagctctattattattcaaagtacaagttctgctagctaagctcnaataacatatctagagtctca

SEQ ID NO: 30838 - DNA, 364 bp, Glycine max
  unsure at all n locations
agctntattcacactgaagaggacaaaagagactttgttgatcaaattgaggttggtgaattggaaaattcagttgcggaggatattcatgagtcaaataaaaggaaaactcctttcgaaggtttgtcttctccatcctaccaaatttgacctggtgtttcttagaagttaaaattagcaatttatatttattntgttattcaatattctgattggaatttccaaatgatttttccaattacagtattattgcctgatcctttcttgaatagttgttgcacactagcttctttgcctatnagaatttattgatgtcataaacaacatgtattctangtatgtttgaataatcttctccgtaaac

SEQ ID NO: 30839 - DNA, 479 bp, Glycine max
acgcacaccctgagctgcaccacgtgtgggcgtaaacgcctcccccccccccagagcatgaccatcgaaaaccccttaagaccgcccgacagagcgcagcgtaacgagcacactccacgattagactgctgaccaagcaccacgggagcaaccaagcatcgacaccccaccaacccgagacaataacgacctaaaaacgcagggacaaagtcagaaaaaaatggcaaacccgcgtggacagaaggcgcaacacctggggggaagaagagggtaaacacagccgagcaaccgacggacaaacgcgacagagaaccgcgagaacagccgagcgattcgcgggcgagacgaagggagcaagtacgcagaggaaaccggcgaccaaaggacgaaaacaaggggcgccacacgcggagctcactaaagacaaaaggcgagaacgacggggaaagaaaggggacagacagactcacacaccaacg

SEQ ID NO: 30840 - DNA, 349 bp, Glycine max
  unsure at all n locations
naagcttatgatggtgttcaatatttatgggggngattgtacatcaaaaaaagatgagaaaaatgaaaacattntttttgtaatgaaaaatgaaaagattaacaccaaaaagaagaaggtgttggagacaccgatattaatagctgcaaagaacggtgtgacagaaatggtagagaaaatcattgactcgttcccagtagctgttcatgatatggatgccaagaaaaaaaatatagtgctattggcagtagagaacagacaaacttacttatataacttcttgctcaacaagaaaaatctaaaggaaagtaatatattcggaaaagtggataacaagggaaacagtgca

SEQ ID NO: 30841 - DNA, 417 bp, Glycine max
  unsure at all n locations
ctagattcatcacttaccccaagcaatacacactgcaagctcttgtcatccagctntgttcttttctgatcaggtacatggacatgagttangcacccaaatactttaaagtaatctactntaggtttgattccactccacatctcttctggagttttatctttcactgtcaatgtgggactcctgtngagaacatgaactgtccattttgcagcttctggccaaaaagccttaagtacttgtttgtcacaaagcatgcaccggaccatattcataatggttcgattttacacttcgctacgccgttttgttgtggagtgtaagatgtngtgagttgcctgcttatgccatgaattntacaaaatcattaactcatttgaggtgaatcaccccccctatctgtgcgtaacaacatat

SEQ ID NO: 30842 - DNA, 184 bp, Glycine max
  unsure at all n locations
tgcaccaatagataacatctttngatgaggatnagcacttncagactgtgganctccattatntntcatatgactttaacaaattgttaagtcataatacatttatgtcttaaagatgaattangactcctaattantttgattagatgaaaataaatataaatggtaaaaagtgtgtctaata

SEQ ID NO: 30843 - DNA, 443 bp, Glycine max
  unsure at all n locations
cttctacattcaacctacagtcttctcanatgtttatgtacatctttctagttgcattntcaccttatcagaagagactctgnaaagttaaaatacaactcataatgctttcaattgaatntgtaacaatcaccaggatggcatgctgattgcanaggatgagatctttggtccagtcaatccatattannaatcaagtaagaaaacaactagtgttagttaattactttgcagagaatggtattatactaccatacatgtgttgtgctttgtgcattaatttttgtgttgatgactccagggaccttggtgaggtagttcatagagcgaacaacacacgttactggcttgcggcaggaagtgtcacaaagaacatggacactgcaaacactttgacgcgggcactgagagttggaacagtttggataaactgctttgacaca

SEQ ID NO: 30844 - DNA, 403 bp, Glycine max
  unsure at all n locations
agctngtgattgttaaatatatatataaaaagaaaaattccttgaggttttgcacttgcacgtttgagaagaaaactcactcgaccaggagcttgtggaaaatgcccaaagacaattgtgataatagggtacatctgatgttagtcactcatgcagactccttatgattccttatgaatccaaaggtggcctttcttgtacaaattctttcgggatcaacccatgacatcaagttttagcaagatcaactgacccatggcatgactctatgatattaaatcaggaaagtttcacttggtcacataccaaagtgtgacaatccattgccatccttcaatggggtgcatgatcgatcccaaagccatatattttcttgttgtgcagaaataatcaaagctttaaa

SEQ ID NO: 30845 - DNA, 412 bp, Glycine max
  unsure at all n locations
tgagatgaggaagtgttgaagagtgaaacttcctgctnttattgttgaccacagagtggtacctggagatatgtcgcgggggtcaggagaccttgnggacgtcaggtggngtgctattgcccanaaccaagcttgaccaatcccaacccaacccgggcatagtcggtcagtgagaacctgtgatgtacctaagcaggcgagctcctngcagtcaacagataanaggantacaagaccacaaagcaaggaggcttgtggtggctggccagctgtgaattttgtgtaatatgtggattgtggtctctgggtaatcgataccanaggtgagtaatcgattacaaggcttanaatngaggacaggaggctaagatggtctctggtaatcgattaccaaggggtgtaatcgattacc

SEQ ID NO: 30846 - DNA, 366 bp, Glycine max
  unsure at all n locations
agcttctttgagaaatcttctntgagaagctagagcttagctacacacacncctctaataactaagctcacctccttgagaaagctccttgagaagattcctaaagaagctagagcttaggtacacacaccccctataatagctaagctcacccccatgccaaaattcatgaaaatataaaaaaaaaagctctattacaaagactactcaaaatttcctgaaatacaagggctaaaccctatactacttgaatggccaaaatacaaggcccanaagaggaaaaaccaattcttacatttacaaagaagaatggatccaaccttgacccatgggctaaaaaatctaccctagggtcatgagaaccct

SEQ ID NO: 30847 - DNA, 488 bp, Glycine max
  unsure at all n locations
ntgaattccagtccaaactcacttcacaaaatctaatttcaggcttatataggtggccttattcgtgctcttgcgcttagtgcacgaatggagcgcttagcgcacgttagtggattttggcttagcgcgcctttctcgcttaatggatgaactgaagcagtgcgcttagagagatgaagcagtgcgcttagcgaacctgtacaactcatcttcttctggattcttcctcgcgcttagcccaggagtgttgcgcttagcggatgctcgctaagccaacagattggcttagcaagaaggtgaaaacaacctttttccaaagctntcctaattaacctanaattgagagaaaatgattattaaacacaaaanatgaaaatactaagtatttattacctatacttaacataaaatacttataacattacaaaataaccataaattaagagagtntgatgcaatntatancaagtttatacacaaaagttagt

SEQ ID NO: 30848 - DNA, 370 bp, Glycine max
agcttcagtttagtgactatcttcaagtgtacatgaatcctaaataacatctacttaaaagtaataaactctttaaaccagaaaatcccatgacacaaccaagcagccgtttgtgggagatgaggtttgtctcgttgatatggtccttgcggccatttgcacatgaataaataaaaccacagcgctgcgaacccttcacaaacggcggcaacagagtgatttgcggtgccaattttggggtgttagggtggagctgtgccttttggtgtgggagggtggcggtagggtgggtgttatgaattttcaataaatcttataaaatatcaaatgagcaccataacacattacattacgttagatcatcaagaga

SEQ ID NO: 30849 - DNA, 76 bp, Glycine max
tgaactccttattcctttgagcataagcggcaagcttcattcaatgtaaagaggggctttccactccttgaaccct

SEQ ID NO: 30850 - DNA, 391 bp, Glycine max
  unsure at all n locations
tttctnatttttctcctccttgatnctggccatctcttagacttcgtcctttatctcttattccaccctcatgttttcttgttctgcgattcttgaaaaatacctcattgttgatggttccncgactttgacggngatcatgatgtctatgccatatgtaaggcggaaagtagtttcattggttgttgtctaaggtgaataatgataagcccaaagtatgctanggagttcctccttccataaacccctagacttgttaagtcttgtgcgcangataaccttgtttgctacctctgcctgattgttagtctggggtgttcaacagaagtcacgaagtgcttgatcacctacctcatcaagaattcttcataagcttaagctttgaattgag

SEQ ID NO: 30851 - DNA, 329 bp, Glycine max
  unsure at all n locations
acctatagaaactcaagcttggtttgaggtacttacccgttgaagactcattattgatgaagatttactgacgaacgtcgaagaacggtcaaaaaccttcgcgaaatcacttacggaaacgtttcngatgcgcctcggctcgaattctcttcacggaaacaattttactaagcacattcgatagagagagaagtgcctaaggggctgaacccctattctacatcacttgtccccctagtcatagaaaattgtgggagaagcttgccacccagctctccctggcgagcagggttgtttcctccataagcaacagccttctggaggaatct

SEQ ID NO: 30852 - DNA, 393 bp, Glycine max
  unsure at all n locations
ttcttcaatgtttgcaaatttccatgatgccagacttttcttctgtctcgttcacttttgtgcaataagagtacaagaccatgtgttccctatgttcatttcgtcgccttttggacactgtctcttctagaagacaacctaatggatntgctcatttccaagcttgatagcatagcctatctctcatcaccaanagttttttaattacttgctctagcttcgtagctaggtaggaagttntagttaagatcatagcgtacagcttgttgtacactcttatccctgcacaccacgcatatataaatagttaaactgtcttattttgtgatcattaatcttatgagattctgtacataagtttcaatatgcatatatccatcactattggaagaa

SEQ ID NO: 30853 - DNA, 303 bp, Glycine max
  unsure at all n locations
nttagttagaaaatagcatagtatgctntaatctaccattatttctatatattncagactgttgtataatgttcgaagataaatttcagagagccctgagttaccaaaatataagtgattttttttataaaatagttaactctattcttaccagtctgtccccacagtgctaagatagcatttgctgcttgtgacattttaatttgattcaaaacatcttgtactgtttcaggaattcttaacttanactaaacactggctaaatctggatattgtttttgtagtcacatctacaaacacatg

SEQ ID NO: 30854 - DNA, 402 bp, Glycine max
  unsure at all n locations
tgctntngtttaaaccccaattngaaatttcggagtgtcctaggtcgaaggttggaagttgaggagattaggcacggttccaatcagagattaaaatacttaccctgtgcggtacttgttggagaagagggataaaagaaacaggccaagaagatgaaggatagcacggatagggaaacaaatgggattctatagtggaatattntatccacggatattaaactctattagttcaccttctgtatgaacatcttttttaatagtcctcttcagagttttgacactctataaactctaattaaattggttagattttttaagtntatcacatacatactcaattagtcaacaagttaaaaaagtagaatatatatatatatatatatatatatatatatatat

SEQ ID NO: 30855 - DNA, 809 bp, Glycine max
  unsure at all n locations
ggctcgacacacagacancgtngagcagcagcccgagtatttgcanatttgcgngtcggcnctancantatcanacnncnnnnccccccccncnnccccccagcaacgagcgncnctattagtatnagcccatgcgnaagtcanncangacancnnaannanacnacgagacangnncangcagaccgacgcgacgcccgnacgacggngaangacgacacggacacgangacanacnccacgcgctagtataagtgagcacagtactgcgcgtcgatcaacgacatcngcgaggggagcgagacagacgaaggcggcgacacacatacncatcgcacgagacacagaagagtancgcgacggcatctcgccagacaagagcatcacagacagnggaggacaacgcgngcgaagcgacacaagactgcacagatgacacagacaagagacaacacgccacgacacgacggagcgacgaacaagataggaaactcgccacacgcagcggaacaacacacgagagagcggaatcgtgacggaggaggcgcgaagaaacacgcccacgccatctacgaaagggacgcgangaacaggcaacgagagacgaacgacacgaaggcaggcgaacgagcaatgcacgaccgggcaaaacagaacgaacgacagaaccgcgcacaacggaacatcgcgcaacgcgacaatcggcagcgcgacaacaacacgaacaaacacaagcgcaagcgatggaacaagagagggagacccgggcagcaggcggaagancaggccagaccagacaaacctatacg

SEQ ID NO: 30856 - DNA, 401 bp, Glycine max
  unsure at all n locations
ttgcttatattatctctaaaaataactctatggatgagatatttagaagtaatgatgatgatgatgtatatataactctgttattggacccaacaattgtgaagcatgtgcaatgacaaaattggcagaccatgtgtggaacccaccattagtaaaacaaattaactaacaagataggtctatgattaatcctaagaagctcttttgattatgcctttatntgcatgacatgagaagttggcaaaagtatattgaacataaaagttggccgagaagcttgacttatctgtcacaagcatgtcacatttctttgagtgcagtgcactccctacgcctgctggtggtggagaaagacctgcccctgtcgtgatcacaaattcacgaccaccatgctcacacat

SEQ ID NO: 30857 - DNA, 263 bp, Glycine max
  unsure at all n locations
acaaatcgatgggccatctggttgctagcttatatngctattaccacaagttggcctctggttggatcggctctatatattgtgtgcgcgaaaaagattaaggatatcctaccaaatggactagtcacaaaataatttcttgattgctgatattaatggtgtatttgtctgtgcagatgtatgagaatatacacacatcatttcttttgccctgcaatcgagggaaatctgcctttctaggcttgtggagaacttaattctca

SEQ ID NO: 30858 - DNA, 280 bp, Glycine max
tcccatggtgcatacgaatgtgtgatggattctgtggaaagtcacggtttcagaggtgtggatgagagttttggaaactgcttctcctgttgaatctgtcactcatttgtaagttttttgtttttcgcaatttaattactctgccctttggattttcaaatttgtggacgtgtgttggaactcgcgtttgtctctggaagaattgttctcacaatccaacgtcgcgtgaatgtctgttctctcattttattagtgcatcttacgtgttatgcctgtaatg

SEQ ID NO: 30859 - DNA, 396 bp, Glycine max
ttattataacgactaataactaaacttgttatagatatttacttattttggatgtgtaacggggtggagtactggctgtcatcgtcacaagggaaatggacaaaatggcaaaaaatattttataataaagctgtcattataagggtttatataattcgagaaataaattgtctctctctttaagatcgatctatgatactatgaaggatgaaaacttcatctttgtgaaagacacgagatattatcgctaaaatacttattctaaactagtagaagaatgtttataataaaaatgttcggtaagaatttcactttgataatatgtcagagaaaatatttattttaaaattctccagatatggtctattttgcgcaagtttcttatcatggtaaaat

SEQ ID NO: 30860 - DNA, 359 bp, Glycine max
  unsure at all n locations
agcttgtgctaatgtgataaataaaaataactatnttcaaaatgaccacttttgaacagtaatttgtaattntgcatcaagttggtcaatcagcccttcctttagaacgtgttttgttttaacgtgtttgtactttgcgatgaagcagttgaacgtgactgtaacaaattgttgtgattctttntgtttatgtaataaaggataaaattgtttgattcacaccataaacccaacacccacatattctgttatgtgttgtgtctgctgctgctcctagaggcttcacccttcaccaaactcttctcttttctcttcaatcacgcacgcacttctcactcattttccagttcactttctga

SEQ ID NO: 30861 - DNA, 124 bp, Glycine max
tattctaaatagctctcgatagcattatgaatttaggatgctgaatctagttgactgaaatataacctattgagactgatgctttcaatatttaattgtgattttttattataattcataatga

SEQ ID NO: 30862 - DNA, 369 bp, Glycine max
  unsure at all n locations
agctntctatatattcaaatggtcagagcttttcacacggaggaccgattcatgcgcgtaatatatcgagatgttcgtaactgaacaacagaagctctcgagaaattcaaatggtcataacttttcactcggatgtccaattcatgcgcatcacatatctagatgctcgaaattcatcaaccgaagctctatagaaatgcanatggtcataagttttcactcggatgtcacattcaggcgcatcacatatcgagacgctcagaattgaacaatggatgctctcgagatattcaaatggtcataacttttcactcgcatgtgtccaattcaggggcatcacatatcgagacgctcgatagagaacaacgg

SEQ ID NO: 30863 - DNA, 668 bp, Glycine max
  unsure at all n locations
gccgagagggcacacggtcaagacaagacaacgcnncacccccgcgagactgaacntggtgagccntggaaaccacacacacaaaccaagctccgcaacgagcaaaaagcagcgagataatcctaggacatattactaggcagctacactgacgccatcgacgggcgatggcggcagacaagtaagcagcgctcttgacgcacaagagaggcgacactagcgaggagatacgcatgtcgcctagtgatcgcacgtattgacgatagataatatatncgcgcgaggcgtccccacgtcggtagcgacggacaggcgcgcactatcgacgcgcgcgcacgacgacggaacgatctgcgacttacgcgtgagtgacgacactacgagacacaacgttcacgcgcggcngaatctcgactgcgacgtntagagaggcaagatcgacaatatcctctgccctcgagtgagacgactgacactcgactatctacacacgacgcagacattacatgcgaatataccgactacaccgtcacatgtgctatgagacgcacgagcagcgagatgacagccacggcgacgccactaatactacacaancgacactgctgcgcgcgaacacaacacaagtcacacgaccgtgcgctggcgaacaaggaacggcactcgcc

SEQ ID NO: 30864 - DNA, 354 bp, Glycine max
  unsure at all n locations
agctttcaatatcaacatttccttttccctttactgagatgaaatcaccatttccaatttttactttggaaacaatggttttgtcaagttttttaaagaggttcaggttattggtcatatggtttgtgcagccgctgtttattaaccatgaatcactggaactattgcttgtgacaaagcatgttgcaacaaagagttgctcatcttctcattcctccgcaaccacctttgcttcctctgatttggacttgcatattcgctctacatgtcccatattgctacactntctgcacttgacatctggcctccaccaacattntctttcaggatgatttgtctttttgcaatgcggac

SEQ ID NO: 30865 - DNA, 451 bp, Glycine max
  unsure at all n locations
aggtgtnttcatccnctgcaatagtcctgaattgtgaaatttatttggaanatcctactttgaatatgtacaaacgcattggtgagattgtagatntaagcataactagacatccgaagtgatcttatgggaatggaatggactcaattgcataagtagagaatntacaatgaattttgatggngatggatttttcaagttatttggttnttaagctgacaagtatgtcaacttttgnggcattaatttgtagttggtgtaaaaacactagaaaaatcaatgaggtgtcttaagacattgagaacatttctttanattctttgtccctaattctaagttttctatttatgggattcatcctacccaaacaaccaaatttgaatttatancaattatattttctaaaatgtgtttagtaagggttttggtttcgttaagagttaatgaactg

SEQ ID NO: 30866 - DNA, 394 bp, Glycine max
  unsure at all n locations
accatcacatgtgggactaaggggcgggccggcgattgtgcacaacaaggttttcacattcacaatgggcgcataaacccaacaatcccttggtgccaccttcaactgagctcaacgtactccacgtaagccatatcctcgtttctctcaacaccgggtccccatcaatcctctcaagctttcacaacatccaagcagaacaacattcaaacagcacaagctatcacagcccagcaaaacagagcaaagggaggaaaactcttgctcaacaccaaccaaaatcacagctttttctcgcttaaaagaccccagaacaattccttcgatccaaatcgttaaccggttgatcgactcgaaaattntaatggaagtctctagtacataagcctacatn

SEQ ID NO: 30867 - DNA, 475 bp, Glycine max
  unsure at all n locations
ntgactcggatatccgattgaggcccaatatatatcatcgccctttatatatagaaatgtactgaccacgcaaattcggacagccataacgttagactcggattcccgattgaagctcataatatatggagatggtcttaggataaaaatgaagcccatcgcanatacaaacgaccataacttttccaccggatctccgaataagccaagtaacctatcgcgatgctcaaaatttatcatggaagactcgggtgaattccgacgggctaaactttttactcggatgtccaattgaggcccataatatatcatcgccctcgaatatagaaatggactgaccacgcanattcggacagccataacgtttgactcggattcctgattgaagctcataatatatggagatgctcttangataaaaatgaagctcatcgcanatacaaacgaccataacttttccaccggatctccgaat

SEQ ID NO: 30868 - DNA, 237 bp, Glycine max
  unsure at all n locations
agcttctactttatgtgcangggcggctttcctcactttcttgtctncaacgcgagctctgaccactgtccctcctttctgcggtgcttcttttcatgtccgcttgagtgggcttataacctaaaccatatttcccacgatttccttgggtttttatcaggctaattatgccgccattgtcttttgctaaacccatcccgggttcataaccgttccccaacataactcgggccatca

SEQ ID NO: 30869 - DNA, 480 bp, Glycine max
  unsure at all n locations
tcaagaaaaagatggcctcagcanattccttatttccagaagggaattctatcaatagacctccaatctttaatggagagggttaccactactggaaaacccgaatgcaaatttttattgaggcaatagatctaaatatctgggaagccatagaaatagggccttatatacccaccacagtagaaagagtttcaatagatggtagttcatcaagtgaaagcataactatagaaaaacctagagatagatggtctgaagaggatagaanacgagtacaatacaacttanaagccaaaaacataataacatctgccctgggaatggatgaatatttcagggtttcaaattgtaagagtgctaaggaaatgtgggacactcttcgattaacacatgaaggaactacagatgttaaaagatctaggataaatgcactaactcatgagtatgaattatntagaatgaatgcgaatgaaaatattc

SEQ ID NO: 30870 - DNA, 309 bp, Glycine max
  unsure at all n locations
agcttcatcatttcatttcgagggtctcgatatattacgggactcaatcggacatccgagaaaaagttattgtcatttgtatttgctcagagcatcaacattcaatttcgagcgtgtcgatatattacgggactcaatcagacatccgagtaaaaagttattgtcgtttgaatttgctcagagcttccgtattcaatttcgagcgtctcgaaatattacatgactcaatcagacatccgagtaaaaaattattggtcgttgaattttctcanagcttcaacattcaatttcgagggtctcgatatatta

SEQ ID NO: 30871 - DNA, 447 bp, Glycine max
  unsure at all n locations
ntgagggatttcanacgacaataactntntactcggatgtctgattgagtcccgtaatatatcgagacgctctaaattgaatgttgaagctctgaccaaattcaaacgacgataactttttactcggatgtctgattgagtcccgtaatacatcgagaccctcgaaattgattgttgaagctctcagcaaattcaaacgacaataacattttactcggatgtctgattgagtcccgtaatacatcgagacgctcaaaattgaatgttgaagctctcagcaaattcaaacgacaatagcttttttactcagatgtctgattgagtgccgtaatatatcgagacgctctanattgaatgttgaagctctgaccaaattcaaccgacgataaatttttactcggatgtcttattgagccccgaaatacatcgagacgctcgaaattgaat

SEQ ID NO: 30872 - DNA, 354 bp, Glycine max
  unsure at all n locations
agcttactatatttttttatagtttgcgctatctaaaaagactttntcanaagggttgttttggcttttataataaacaagccgagccgagctgagtcttacatagaccgagtaaaaggctcttgacaagctgttcggctcattntcatccctatttctaatgataataatgctcataaaaaaatatattattaaataatatcaaaatattcaaataaaaaatttagaataaaaaatgataaagggagaaaacataaacctacccgcaatcacgactgtctcaactcttcgacacctaactttattttctattntgctatttctagattaatcacaatgaataaatattaatta

SEQ ID NO: 30873 - DNA, 381 bp, Glycine max
  unsure at all n locations
ntgtntggagcttctatggagaatgaagaagaagaaagctacgtgagagagggagaaaaaaggcttctgaatttctttcttttggctgagtgaggagagagaacagttttttggttttaaactaaaaggtttttctctttttctattattttatttaagctatgccacatgtctccatttgagtggagcaaaaagggcccactttctcttttgattgtgacccatactcagccacaaaaagtgagaaaaaacctaacctttgaaacgctaaaatcttgcctcggtttgcgtgccatttctctggttccagttcctcgcgtttctctgcgtccgttggggccagttttcgaaagtaagcaatatatatatcaaaacgatcag

SEQ ID NO: 30874 - DNA, 380 bp, Glycine max
  unsure at all n locations
tgcttcattgcctaacaggccaacttacaacaggcaggtcccaagagactcagcataatgatgcatangcccaaagttgagtatggtgaaaagattgtatgacccaagtgaaggtgcaaaattgcaaaaaaagaatgaaaagctataccaaagcaagcccacaaagaaaagggaaggaagtggtaccttgaacnccagtgatgaatcctgggacatttgagggcaaatggtttccaagaaggaggtaatgatgagaatcttgaaactgaccaaatacaggctaaaggcccaagtggagaanggatgaaagcccagtggagaaggacaaagcccccgagtggagaaggatgaaggcctanagacagagacattatcaagac

SEQ ID NO: 30875 - DNA, 387 bp, Glycine max
  unsure at all n locations
tctagtccctcagataagtgtatattncgcagttatggtatgttgttaacaacacatatattgcacttagaattttccaagatgtctatattgaagtgtttaatggttatgtactgtcagcatacaagattttgcacttgtcaaccaattaagagtcatgtttggtgtgattttttgggtggttattttcaaagtcaacaaacttactatagaagatgtcttgtgcttggatgatagtgttaaagcactttacgataatgtcagagataatgtcagagcatatacatttgtattctatattgaatatctactttgctgactcgaaacatacaatctatatactcagtacttcgactagtggctgctaatataaacttttgtaaacaa

SEQ ID NO: 30876 - DNA, 295 bp, Glycine max
  unsure at all n locations
agcttggatgtgacttanagcaaanaagaaggttcctgctttccgtggacaaatggattgcaaaccccgatggtttcggtggtaaaatttattaaaaaacttccatttttgcaggagaaggtgaatggtgatggggggtttgtacgggttttttaatcattgtgcgaaccttggagatgctggtagattgtagaatgtactgaaatgtggctacggaccaaaattatcagaacagaacacaacagtctttgtttttgttttaatttattcatgtagagaagtttattatgggagt

SEQ ID NO: 30877 - DNA, 332 bp, Glycine max
  unsure at all n locations
ctttatatcatgctgttcttattacagtcatagagtccctttcatagcttatanttttgatcgttagatatatacggaatttgggggtcgatggattaaataatttttgcctataaaaaaattgtgtcacactacagcttagccatgttcactaccctaaacaaagtcaatacttgtttagatcaatgtatgaacgtgtataacgcatacatgtgcatgcatgacccacaagtgcataactgaagcccacctttgtccttcattgccaccaacgaagtcaagtcaccaaactttactttacttcaaccacaagggtgtaattcttcggtatt

SEQ ID NO: 30878 - DNA, 355 bp, Glycine max
  unsure at all n locations
tcgattcattctatgtgcccgtagtggtccacattgtgtttcgtgcatttatattctcgttttggttactttgtataccccctgttgacgtgcttaagccattntacttaagtcatttctcgcttaacttaaaaataaaataaatttccaccgaacgtttgaattgtattatccattaacttcggttaaaataaattccgaccgttcggtcgtgccgtaaccacgttggaaatcaaaaagaggtaaaaaataatacaataatcaaaaagacatcttttagtaaaataaagcgganaatcaagtggacgttttctctttgggatntctcattcttaatcgaattgattaataacta

SEQ ID NO: 30879 - DNA, 386 bp, Glycine max
agcccggccaccgcgagctgaacaacagaccaccccccccgagaatgagctgaaacgccaaaacccccgaagagagccacactcagaccagcgttaatccacacccacgcccggaagggaaaacacaacgcacaacagaacgcacaccgccgaaaaggaaaacaacgggagaaaagcgcacacgaccggatagaaggaagcaggcgaacagcgaacgacccccacaaacggcgacggacgaaacacacgccaaaaacacgccaaagcagcagcggagggcggacaaggacggacgcacagcaaaggggaccacacccgacaacaagctcgaagggcggcaaaaggcgcgcaccgcgaacaccgagcccgaaagcagcaactacacg

SEQ ID NO: 30880 - DNA, 329 bp, Glycine max
  unsure at all n locations
ttgcttaattatatgtggactaaaccggtccattggaccatgtgtattttgcctatcctagacaacctatataactttttttttatttctgcagcgcatgcaaaacgaactcactggtctggtttttctattcaactaaacaccttatatatactttattttaattcactctntttatttccatttatcatattcatcttctcacaaccaaacacagattgccgtatataaatcatgtaaataattttggaaaaaggatgcatgaatctatgagaatgaaaatgaaaacatggattcgatatncacaaatatgatgaaatggtggtgca

SEQ ID NO: 30881 - DNA, 565 bp, Glycine max
  unsure at all n locations
cgtcccactacattccacacgccattccaatatctgcgaatcttcttcntcnnntaccgcccaaccagagcgcgttgcaccgtgtttgatccctttctataactgacctataaatctcagcttgcgctagggcaagtgcatctgatgatggttgcctatgtatttgaagacactctctagacttcaagccattgacaccattggctagagaatggtgattaaatgggaggtcaagatatctagcgaaagattacgatcattgactgagagtggtctgcatgatcagtatttctctgatgtatctttgccaggattatcaagaactctatttttcgtgctgtattaatggaacgatatatctgtgttactcctggaattcgaacacctagtttcctttttttgattgtgaaccatacataatccaaataaggatgctttgtttatttgcaaactaagcaaatatctaaatatattcttttgacaactgcgcggtaataagacatcaaaaagattttctgcttactccactgctgaactcactacttttctctgtttattgatgctc

SEQ ID NO: 30882 - DNA, 377 bp, Glycine max
  unsure at all n locations
agcttattgtattatgtaacaatgatgtcaggttttgagaaactaaggtgttaaaagataacaaggaaaatgatagaaaacaggtaactgaacaacttgtgcgattgtgcgattgttctgacagttgatacattatcatcatggtggattgtgactntgtgagttgtgggattccttctatatttaacatctttgaaacataaagcagccactggatgtggatgttgaatcgtgttatctctgcatcacgaattatgttgcgtccttgttgtatcgttgcttttggcattgaatttcaagagtatgattataaatgtccagttcttaatcttcccggcaattaaagcaatgctagcataagttttttaaaagatata

SEQ ID NO: 30883 - DNA, 456 bp, Glycine max
  unsure at all n locations
ctgaatntactaggtttaaanatataaagataagagggaaaaaatatcaaaaatactcacaatacttgtaatctttccaatgcaaggaggtgcatctaaaatactataatttggtttgccgctatatccaacaatcttcaagttgggcttaagggatagatagccaacatggattgaaccttgtctgtagcacaggaattaagaaaatcatttgcttttgactgtatggatagtgactcgtgtattgacttcctttccaaaatctttgtcgtcctcttaaggattntaatttgctgttttagttaatggcttactgctatagggattcaattcccaagcattagnttntgctnttgtttttcttttcttcttataatagaaaaaactaanaaaggcaaaattaattgagttgggaatggatctttngcaatatttttatcactatatggaatcata

SEQ ID NO: 30884 - DNA, 369 bp, Glycine max
  unsure at all n locations
agctngttcttcttctgngtaactacaacgatcttggtcttcttcttcttcacgacagtgataccttgccaccttacctaggtacaggtttcacgactcttttgttgttttaactacaacggtcttcgtattgtttgtttgtttggggaagtcgtgctcattgcaacaatagttgtttgtttgtgttgcaaggagttggtttgtggaactcatgctcgctgcaaggaattggtgtgtggaactcgtggtgattgctannggctgttggggtgctgactatgcaaaccgttcggggtggtcactcgtgctggcaaggtgtcattttgagtgagggtaattcaaatgttntgtgtcctttgaatgcttaat

SEQ ID NO: 30885 - DNA, 475 bp, Glycine max
  unsure at all n locations
tgacnccctgcaanacgtgactcgatgctcagcgaccttaaagcacaactttgctggctcaactccgagttcttagattataaagatatccttgtaccactacagcttggtatcatatcaggacaataagccttctgaaatcgagacaagagagtgatcgataccgctgctgacaagtgtaaactacaccttgaccgtgaatactataccagaccctatcctaagctagttactaagagattatatagagtattgcgcatacacagtgcatgtgagatattatcactactcatacactcaattcaatcgatctatttgtctattcacgagaactcataaattctcttctctatactagaatctcagcgagatctcctcataatgtgcacctacaccgagaagcaaacagtgcatcaattactattcatcagctatcagtgctattttctggtctctgagtcctaagactaattct

SEQ ID NO: 30886 - DNA, 382 bp, Glycine max
  unsure at all n locations
agcttgtttggttctcctttgccaatgtcaaatctgtaacctggtggaagccacagaacccaatgttttcttttgtcattctacttatgtagtagaatatagtataccagctccatttacaaagacttgaaaagactaaccattccttccatctttgaggtaaatngaccaccacattgttgcttcagttttgtcaaaatacttctctcatgatcatcattggcactcttgtcaaaaaggagccttcgagcaagcttcttcctacaagcaatcacgcaagaacatgtntgactattcttttgcaagcatcttacagtangaaaaaaggtaatgatgacactcaaattagccacagaaagcagaattcaatgatagactacca

SEQ ID NO: 30887 - DNA, 588 bp, Glycine max
  unsure at all n locations
ggggcaggcgtgtcagacgncgcgacgaggataangcgacgtggcnccnccaccccccccgacgagcaacttgaccccatggatagaacccantgggaanancacacacactcagaanacataacgatgcgccgcgggaccacgagacagcaaggcagaaggatagcctcgcggtacttgacaagccctctgcgagacgagcaacggcgctgaccgccatgggcaggaggaatcgccactgaaacgcgaggccaagaagctccacggccccagccgcatcactggctgacagtgagcgggccgaatcccctnccagcagaggagctgcgccgagatcccaggcgacagcacggtggcgcgacgaagaagggaaagaacagtcaggcctccaaggcaaacgcaaacccgggtaccccgtgccggctgaacccgcacggagcacacgaggatgctcgcttgacgcgacacgccccggagcacagaccggcgnccaatagacccagccgcccgcaggaggcagacacacaatcgggacacggcagaagaccagcggtcacacaaaaacggagacgaagagaccggcccgcc

SEQ ID NO: 30888 - DNA, 628 bp, Glycine max
  unsure at all n locations
ctctcagcgctctcatcgtacaanctccttatactacttactggnnttcttcaaattgttagatcgtatanngtatannnannnncaacgagtgtgcnttttgatgcctttgtaantccatggcaaatacaaactcggtactcgtggattctctacactcgacctgcacgcatgcacagcatgttccgattatttgtgtatatcatcacatgtaggtactattgaggatgtacgggcaaacggtacataatacaatatctcccatcatctatcaatatctacatatacaactccatccatccctctagttgtcccactcttcacactgaagcacacattacgtcacatcgtagccacttataccgcgatataactcatacacctgagccctattctatacctacataagctttccaccaatcattcaaggtaatttaatcatctcactcatctcaatattatctaaaaccaatcaactatagtgaacatagcacaatacattgaaccatacttactcctaaataataatcttctacaacatatatgaaaccctcataaacaattacgtatatcatacggttcatcattctaagaatttatatggatatccctaatcatatgccataat

SEQ ID NO: 30889 - DNA, 337 bp, Glycine max
agcttgttgaatgactggacatgatatatgtcagggtgttggttcggacagcagtccaggggtaaagggatgtcccacattatttccatgacacgcgcgcaacaatgatgattcagaaattctatgcaaaactggtcacacattcacctatgtggacactcaagcatcaagatttggtggtcacgcgacactatggctcaggattcattatttttcctatttaagtcaactcattgtttccaaaatatgctccttgatcaaatcatgcattcatctgagtccattttgggcgttctggaaaattatctcaacattcacccttcaggtgcgtacatat

SEQ ID NO: 30890 - DNA, 299 bp, Glycine max
atgtggaagtcggcctatggatcactacatagattacagagacactaatcacgcataaaccctccatacgatgatgtcctaattcaactgaactcacttactacaacgaagcccatatgctcgattctctcaacactcggggccgaatccatcctgccaagctgtaccaacctccgcgtactacaacattcaaacagcacaaaataggcatccaggcataacaaggcaaaggcggaacactctgccctaaacaccaacctagatcacagcttttatgactgaaagacctcagtaacaat

SEQ ID NO: 30891 - DNA, 320 bp, Glycine max
tacatatgtactgacctagagccaacataacactataggcatgcatcattaccgttgacactgcagccgatgcgattactatatgctacatgctccatattgataccaatctacatggcacaccttcaatacgtacacttggcaaacacattcaactcttcaacctcatgctcacgcttctctttcacatcttcacctaatggcctacgatgaccttcatttgcatgtactgtctgactagcgtcccgtcttatcttcgacagcatcatgcatatcctcttcatgcgccaccgacgaagaaaactgtaattatctatcgc

SEQ ID NO: 30892 - DNA, 97 bp, Glycine max
agctgtttgatatattatgctcctgaatcggacctcctagttctaagtcatgaccatttaactctcctgatagcctccgcagatcaatcttgagcct

SEQ ID NO: 30893 - DNA, 412 bp, Glycine max
  unsure at all n locations
ctatagcaaactcaagctntcaagaaattcaaatggtcctaacttttaactcggaggtttgattgatgtttataatatatcgacacgctccaaattgaacaatggaagctcttgagcaattcaaatggtcataaatagtcactcggaggtccgattcatgcgcataatttatcaagacgctcgaaattgaacaacagaagctttcaagaaattcaaatggtcataacttttaagtcggatgtccgattcaggcacataatatatcgagactcacgaaattgaacaacggaagctctcgagaaattcaaatggtcaaaacttttaactcggatgtccgattcaagcacataatatatcgagacgcgcataattgaacaacggaagctctcgagaaattcaaatggtctaactt

SEQ ID NO: 30894 - DNA, 240 bp, Glycine max
accatagtcatggataggaaccggaagaagacgcccctaatatctgtcacctgtatcagatatcatggtcagaagcttttcgccaaactcagcaatatgaccaatgtatatgcggacatagcaaaatgctcccagatgctcaaagagtgagcatctggcgttgaatatttttctattcttcttagcacaattggaatctctatgagcctgatactatcaccttatctcataaaagatcct

SEQ ID NO: 30895 - DNA, 200 bp, Glycine max
agcttgacttgagtcatgaagagaatataaatatgtggccatgttatgaggtttatataatcatccttccaacgatcttatcaactatcaatcattctttggatcatcctatctttcaattcttttttaacatccattgtcaaacatttttcaatgaatctttcaatagtctttctatggaaattttcgattcatttctc

SEQ ID NO: 30896 - DNA, 259 bp, Glycine max
accctttattgctaattcatctcctagaactcaagtacaaagtctacctgacaatctttcattctactttacttggcataatacattacaggacactaaacccaagtaccttgtaccaacccaagctgcttgtacaacctatataccaggccccttgatcattctaaaaccaagatcccttatcgtactctacactacacaccatgcaagtcaagtaacaaacaactccccaactttgcacactcatcaggatgcatac

SEQ ID NO: 30897 - DNA, 574 bp, Glycine max
  unsure at all n locations
cacacccactcacgtcagtaactnagnaaaatatantaataatcgaatactcccaaaactcatgtncaggataattatntccacagggctacaggncnacgttgaaaccatgttagaaccnnctgcaannacgcgacacnanagaanactcaagctggcttgccttaagatgacaaagggatgttataaaaattctatccatacacactgagtcctcaagaaaggctgcagacgaccatgatggctttcgggtgtcaaagagctcacttagactctggctgaataaagggagactaaagtagtctcggacggtgcacatcgagtcttcgacaaaagggacagacgaccatctttgtctctgcgtgaatcacacttgattgcctcaggatgacgagggggagacctaaagacccccagtcgataaacaacgagtccacgaacaacagtgcacaccaccatgtcggtctctactcttcgacaaacatgattgcctccggatgaagacgcggacactaacgtaatctcgaacgaacaacatctacacctcaacaaataggcgcacaaaaccatgtcg

SEQ ID NO: 30898 - DNA, 379 bp, Glycine max
ctgcgcgcttcaatcttgttgtaaactgaataggccacaacggtcgagaccacacatctattcttagcttaattaaactgcagaatcaaatcataagcacaaccagttctgtataactatcaatcacaacggccatcaagtgataaccaactaataaacaagcgaaagtacatacgatgatgttcaacggattgtggaattgaaactcaagaattgaacaaccttcgacataatatcagtgcttattatagaaactgtggaggtatacgaatatgtgtgaaagaaaataacacttaatattaactagattaatgctgactgaatactatctaatgtcttgacaagtacttcgtgataatacctggaatatataccttca

SEQ ID NO: 30899 - DNA, 414 bp, Glycine max
  unsure at all n locations
tggggatttattntaggacaaaactcagatacagacattctttttcataggtatttttggtgttcttcaattagaattggagttttacctatgtaatatatgttgatcttttatagaagattttattacgtggattatcaagatgaaactccaattctgatcggagaacaacactaaaaacacttaagaaactacacctaagttttgtcctttattttatagtaactttgttcataaagttactagaatgatcaataaactacaaatttgtggttgaataggaactgagacgtttcccaactctccaagccgaaatagcagcagctacaaatgaggctttagagaggttccgcgaagagagtaagaagacagctatgcggcttgtggacatggaagcttcctatctcactgtgg

SEQ ID NO: 30900 - DNA, 397 bp, Glycine max
cagttttccacttgtactcgtgataaaattaaagaaacatgttagattaagtatcccacaatttaagcaagaataacttcattttggcttccaaccttactggtatctaggcattactatgtaacacatacgttttctactatgacatagtgcatagatcctaccaataattttcaagtactaattaattaaataattgaaagttgaaactacactatcgatatacattgattagcttcacaacttgctaacactagaacactgaaacattcttcattttacacaaaaaatactaataagaaataaaaagactgcgtggtgttggaagaaccaaaacgtagcaaactacactataactcattgcttaaagcatgaacaatcttaacctgaggaaaac

SEQ ID NO: 30901 - DNA, 318 bp, Glycine max
  unsure at all n locations
ntgcggatttggtcttcgccagagaattgatcgatgtgttttctaacagaggcaaatttgatcatcctactaggacgactgagaaaactggggcaaatgaagagggtgagaaagagggagaaacccatgctgtgactgccattcctatacggccaaggttcccaccaaacccaacaatgtcattacttagtcaataacaaacctactccttacccaccacccagttatccacaaaggccatccctaaatcaaccacaaaacctgtctaccgcacttccaatgacgaagaccacctttatcacaaaccaaaaaaacacc

SEQ ID NO: 30902 - DNA, 383 bp, Glycine max
agcttatgtgattatagtagctcagctgtatcattggttaaagaattggggggcattgaacttttggctcataggttacagaaagaggtacacagagtcattggtttggttggaggaactgataacatgatgcttactggtgaaagcttgggacatagtactgatcaattgtactcccagaagagactcataaaggtctcccttaaggcgcttggttctgcaacatatcgcacctgcaaactctaccagatctcaacattctcaagacagttcattacctataactctaaacttgatttttaaaaatgaagataaagttggaggtgacatttattattcagctgtactgatatgagtgaataattcacaaaatcctacctttt

SEQ ID NO: 30903 - DNA, 475 bp, Glycine max
  unsure at all n locations
cctactccaccaatattatctttatataangtgtatttatnctatattacanctctacnacaacagaaaattgagcatgaanctttgaaccagcagaccgggatcttggagcaccagcagcagcagcgttttctcattcctctgtttacgagcaaaagtagacagcctactcgttagactaattaaaactaagattcctactctatcctatgctggactagaccagcttataagctgacaaagttagaccaattagcctaagcatagcctcattcccgctattggactagatgagaccaacaacattattctaacagcatatcttaaaccaaacttaatccgcaaccctcattaagactagattcatcctgctaattaaagttaatgcacagaaatttccatgctaagtacctagcctgccacatagggggacgaccacagctacaaatctatcacttaatgagcatgacacacg

SEQ ID NO: 30904 - DNA, 305 bp, Glycine max
  unsure at all n locations
agcttatggattatagtagctcagctgtatcattgtttaaagaattggggggcattgaacttttggctcagaggttacagaaagaggtacacagagtcattggtttggttggaggaactgataacatgatgcttactggtgaaagcttgngacatagtactgatcaattgtactcccagaagagactcataaaggtctcccttaaggcgcttggttctgcaacatacgcacctgcaaactctaccagatctcaacattctcaagacagttcattacctataactctaagcttgatttttaagaat

SEQ ID NO: 30905 - DNA, 411 bp, Glycine max
tgtaagtattcgtgactcatgagattcatggaaagtaagcatttgttcttactcaagtatgtagaattattaatttttgttgttatcctgactctggagatctgcagtttaaccatatgttttatggaattgttcaattacaacatagttcactttttagtaaatattaaaatgaaagtctacttgttttacagagataaatagatgttttgcatggttgaattttgttaattagtgtgagcttgaagatgtatgctaaaatgactctgttactagttaaatttggcaaaaaaataaaaataaaaatcagcattctacatctacatcggttgtagaccaaaaacgatgtagaaactctacattctacatcggttggatctcataacgatgtagaaacttcacaattctaca

SEQ ID NO: 30906 - DNA, 93 bp, Glycine max
tagctttttactctatactaagtaatgagcggtcacttctgagacagatatatatacatatatacatatatatatatatatatctatacatat

SEQ ID NO: 30907 - DNA, 400 bp, Glycine max
agcttcatcctcagatccctcttgttggactaggcttaatttagacagccctcctaggtttagactaatttaaactaagtttcgtcctcagatccctcatgttggactagacacagcttaaatagcttacaaaagtttagactaatttagcctaagctttgtcctcatatccctcttattggactagacttagaccaaacaacattattctaacagcatatttaaaaccaaaacttaatccgcagatccctcatttaagactaagtttcaatcctgcttcattcaagttctaaggcaacagtacatttcccaatgctaaagtcacctaaccatgcacacaaatggttgatcagaccaaaagcatacagaatttaagcactaagagaagcattgaacacaa

SEQ ID NO: 30908 - DNA, 372 bp, Glycine max
tactgcgacatgaaagagtggtcagcgctttcagatttctcctagcccagcaggctgtcatgaggactctccacatgcccacacacgataatctttcataaccttcttccgacaatgatctctcatgcagctcatactcttaagactgtcactctatatgacatgctccatattatatgcagcatgcaggtcatatcatcaccatatactatatggactgctacttctgtcgacaagatcagtctctttagaatctataactgatccagacccaaccgactggagtgatacctatgtaagagcattccttcaaacgtttctttgaatcttcaatacgcagctcacatatctcaaacactagcaccgtacatg

SEQ ID NO: 30909 - DNA, 402 bp, Glycine max
agcttcttatccaaggctcatcttggtggtgaagctccttcttccatggcttattccttaatggatggcgcctcctctcacctcctttcctttgtcttccgctgcatctccatggtggaaaatcaccattaaaggaccccattgaagctcaaagatccagcctccatagaagccccacaagcaagcttccatcatagaagggtcagaatggtcgaggcagatcaaagtcaagagggaaaggtcaaagaaaatttcaaagtggcattacttgttggaattgtgacaagagaggtcacttcagcaatcagtgtaagccaccaaagaagatcaagtcgcacaaaaacaagaagcgcgatgatgatgaatccacaaatgcagcaactgatgaacttgatgatgcat

SEQ ID NO: 30910 - DNA, 416 bp, Glycine max
gcgcgggtctgggagacgaagggcaagtggaacgttatatacgattatgatgttccgagtacattggatttggtacgaccatgccctcctgatttccaggtgggaaattggcgagaggaggaacgccctgacattgactcagcgagcataatgtcaacctttacggatctaaaagctctatagctgggcctaggctttagaagttttcctttggttaaggctttgtgactttcgtttttgaatttataatacaaggaccttgtttcatctgttcctacgtatctacccattctcattcatttgcatgatgacttctttttctaaaacggcagatccgatgacgagtccctcgaaggtattaatacctgggacccgcctatcaacttcgagcaagagatgaatcacaccgaatatga

SEQ ID NO: 30911 - DNA, 349 bp, Glycine max
agcttgtaatatgtctagccaactatatgttcagttactggtggcctgtggaagatgattgggttttttactgcattgtataatgaatgatcgaggccgtacccgaatcaaataatcattaaaaatacagtatttaggaagtgatcctaggtcgtctcccaacgagcaatggtcaaccaaatgttcataacagatagtaataaaacagtaacgaattggggggggggggttgtttgtttatagaaactacacaatcataaaattctaattgtactatatcagagataaatcatgtagtatcaccttgattcacaagctaggttcttatcctatgataccatgatttatt

SEQ ID NO: 30912 - DNA, 428 bp, Glycine max
  unsure at all n locations
ctcaagcttgtggagcttagagaccttgtanaaagtcatgtgggaatatggtttattctatacttgcgtgatctgaagaggttgtctgagttctggtcaagttactgtgagcaaagaacatactactactgttctgtggtgcatatagtgatggagcttataaaattgattagtggatatggggagaatggtagattgtggcttatggggattgcaacttttggaacatacatgaatggtcaagcatgtaacccctcccttgagactatttgggatcttcacctctttacagttccagtgttactatcatccttgagactagcttaacttttgataggagataattatccttctatatacttcttatttatgcttgagtgtacaatattgatttcttagtgatattaatacgctggtgtttttgtctc

SEQ ID NO: 30913 - DNA, 133 bp, Glycine max
  unsure at all n locations
tctacgcttaccgcaggaggagacatacaacgagggagaaactccacgttgtacgtcgcgcgcagctcgtcaacttggaggaactataccgtgttacatgcgctgctcatgaagacgatgtataaacccactn

SEQ ID NO: 30914 - DNA, 319 bp, Glycine max
gtaatgaacgatatacctgtgagggacagggccgatacgttaaccactatgaaagtggaaacaattgacttcccatgcgatctatcaaggacacgcgttgtaataagaccaccgacgagtacctttggtagagaatcccacaccaacctataaaagacgaatccccatggtgaaagtcaatgaagaattattgctcacagtttttgggtgaccacacgagatcggtactagaggctcgctggctagactgttctttcttgcgaatgtggaggagcatttgcggatgtgattaccataacgctaacttgaatatccccga

SEQ ID NO: 30915 - DNA, 413 bp, Glycine max
tcatgatgaatcaagatcggttcagagatgttctgatgatatcaaagatgaagaccaaggtgatgacgaaaagctcagcgctcaatcatagaatgagttcaagatggtcaagatagaatcacgatcacttcaagactcacgaggaaagtggaagaactcttcgagattcaagaggaaaggtgagtcctagaatcaagaatcacgattcaaggatcaagctttcgagaatcaggatcaagattcaagacttaagactcatgaatcatgagaaggcttaatcaatatcagtatgaaaaggtttcttcaaaaactaagtagcacatggatgtttctccgaacatgtttaccacagagtgtttactctctggtgactgatcaccagactgctggaatcgattaccagtagcagaatg

SEQ ID NO: 30916 - DNA, 387 bp, Glycine max
agcttctatccaaatggacttaccttgaattaattccttagatagcccttttgagccttgtttccttttccttgtttagaagctcactacaatccttatgtgaaaaaccatgatattaccatatccttaaggaattttggagctttggaattgttttgggaataacagtggggggtttttgtttcattgaacaacttgtattgttggctatgcttcatgatgtatgttgggccatacttgatgtacattgtatatgggataaatgatggacatgctgaatgaaatgttgtttctcaaaggctatacagtaaaaaaaaaaataaaattcgaaaaaaaaaatcgaataatagaaagagatcagcaataaagttgagtgaataagatctt

SEQ ID NO: 30917 - DNA, 419 bp, Glycine max
  unsure at all n locations
tgtatacatgaatttgattnttatgatgctcanaacctatatgttgggaaacataaacttcatcttcagtgatccatttagggaaacactcttgacatccatttggtctaactntaaatccataacataagcataagtagtaatcttaccacttctagtctagctatcggtgcataagcttaaccaaagactatactgttttgttggttatagctcttgactactatccttgccttattcctagtgatcaaaccatgttcattcaatttatttttaaacactcatttagtgtaaatgatgttcatgtttttaaaataaggtattaattcccatatatcatttcttttaaattggttcaactcctcatgcatggacatcatccagaacttacatttgagtgcctcttctatagacaatgg

SEQ ID NO: 30918 - DNA, 391 bp, Glycine max
  unsure at all n locations
agcttgagtgcttntgctgcaggacaagctgcagcctttaagatgtttgaaacaattaaaaggaagccagaaattgatgcttatgacactactggtcggcagcttgatgacatccgtggagatatagaacttagggaggtttgctttagttatcctactagacctgatgaactgatattcaatggattntctctttcaataccaagcggcactacaacagctttggtaggagaaagtgggagtgggaaatccacagttgttggtttgatagagagattttatgatccacaggcaggtgaagttctcattgacagtatcaacctcaaagaattcaaactgaaatggatcagacagaanataggcctagttagccaggaaccagttctcttta

SEQ ID NO: 30919 - DNA, 393 bp, Glycine max
  unsure at all n locations
gtgattggacatggttgaaaggataattatcaacacaattatacggttttttgtagatactactcaaacattggttacctcttttagttntagctcattgggggcaaatattaagccactcattaagattatttttattgacaacatgcctgtgtgtaaaatgatcaattaggatttgacagtgtcaaacaatggttntggatttgtattcagctcaatctatgcaagaaaaaccaaaaaggggatgagctctgatacatgcagaacataattaatcttgtcacctgctggaaactggctaaatccctgtttatatttggctgttgaatttcatggatatgctgcttgaagatttgattagattataatttatacatatggtatgacttgtga

SEQ ID NO: 30920 - DNA, 374 bp, Glycine max
agcttttaagtgcgggttcgggagacaaaggtcaagcgttcgcgatatgcgaagatgatattccgagtactttggatttggtacgaccatgctctcctgatttccagctgggaaattggcgagtggaggaacgccccggcatttacgcaacaagcataatgtaaacctttacggttttaaaaagctctatagttgggcctaggctttagagttttcattttgttaaggctttgtgtcttttgtttttgaatttataatacaaggatctttcttcatctgttcctggtctctacccattctcattcatttgcatgtttacttctttttctaaaacggcagattcgatgacgagtcccccgaatgtactaatacct

SEQ ID NO: 30921 - DNA, 402 bp, Glycine max
tcaccggatgatgcagatcgaacatttcctaatctatatcatccaattggtattcagcgattgaatagaataaacaatggccggtgtcggtcgttatatggccccgactgatatctttcagccgacattgcgcaatttcttttacaaacgcttgccgataatgttttttttttttttacggtagaggaagtttttggttttggtgttgcctacaaaatttacaacgtaagtcggctaggtttttccgtgcgagctcaaccgagggttcgctcccacagacactggcatgttgttcttctcatttatgaggacaagataacgttggcccatcccggcaaaaacaaataaaaaacattattcaccgaaattgatcgaaaaaaatgatagctgacgtcggaatgg

SEQ ID NO: 30922 - DNA, 384 bp, Glycine max
agcttattcttgtctgaggcatcttccaagtcaatatctttttcttccttgagttcatcatatatccaaaacggaaagtaatcattgcttgaaagttgatctggaagaggatctgagttcctccttctacttgccatttccatcaaaagctttccaaaactataaacgtcggccttatatgatactccaccaatatttttgtagtataattctggagctatgtagcccaaagttccaattgcttcaggtaaaacaagagacctatctttcacaggatgtagctttgcaagtccaaaatctgaaacctttgggatgaagctctcatctagaagaatattgtgtggcttgatatcaaaatgtagaatttgcacatcacaaccttca

SEQ ID NO: 30923 - DNA, 328 bp, Glycine max
  unsure at all n locations
tcccgtatccgtacttggaaggatctgattactgcctttctaangcaatatcagtataactccgatatggctcccgatcgcactcagctgcagaatatgttcaagaaagagggtgaaacctttaaagaatacgcacaacggtggagagacctggccgcacaagtggctcctcccatggttgagagagagatgatcaccatgatggtagacactctgccagtgttctactatgagaagctagtaggttacatgccgtccagcttcgcggacctagtgttcgccggggaaagaatcgaggtaggattgaaaagaggaaagttcgattatg

SEQ ID NO: 30924 - DNA, 379 bp, Glycine max
agcttgagctatcagaagacttgcttattcatttagtgttgatttctctaccttcacagtttagtcagtttaagatctcttataactgttagaaggagaaatggtctcttaatgagctcatttcataccgtgtgcaagaaaaggaaaggctgaagcaagaaaggactgaaagtgctcatgttgtgagtacctctaaagacaaaggcaaaagaaaaaggactgaggagcccaagaatgaagttgttaagggtccaagacaaaagaaacaaaatcagggtgacaactttttctcttacagtaagcgtggacatgtagagaagaaatgtaacaaatatcatgcttggcgtgcaaagaagggtatgtttcttactctagtcta

SEQ ID NO: 30925 - DNA, 416 bp, Glycine max
  unsure at all n locations
ntacaacacggccaaagtgatcttntttgtggggaacgatgctctggtcttccaccatgacttgtccataatcattccggcaacggaggaaatcagaacttgtgagaggttattaatgactntataccagaaccatctgaaacaaattaagaagatcgaacaaaataaaagtgaattaatattgcacatctatactaaatcaaatgatttgaacaaaggcttaactaactaattatgagtataccttgtagctgcatcttcttgaagattttagaatcgatcacagatatgattggtggttacagcgtgaatggaagaagactgaaaatgcctatgatggagtagctatccaatacttgatcattctattggttgtatcaacttctcgttggtatatacaggaatggtcttggatc

SEQ ID NO: 30926 - DNA, 402 bp, Glycine max
agcttgaagaggatgctttaatggaggaaaagaaagagggagagaagtggaactttgaagtgtatctcataagactttcattcatcaaagttacaacaagtgttacacatgcttctatttatagactaggtagcttccttgagaagctttcttaagaaaacttccttgagaagcttcgttgagatgctagagcttatctacacacacccatctaataactaagctcacctccttgagaagctagagcttagctacacacacccctctaataactaagctcacctccttaagaagagaagctagagcttagctacacacccctataatagctaagctcacccccatgacaaaatacatgagaatacaaaaaaaaaatcctactacaaagactactcaaaatgc

SEQ ID NO: 30927 - DNA, 407 bp, Glycine max
tacggacctatgaaactcagcttttatccaggctcatcttggtggtgaagctccttctttctggcttatttcctagtggatgacgcctcctctcacctcttctcctttgtcttctgctgcatctccatggtggaaaataaacattaaaggacctcattgaagctcaaagatccagcctccatagaatccccacaagcaagcttccaccacaagtagtataaaacggtaagaaccgagtatcgaactctcggggaacttgtgttatctggcaagctatttcgataaataagcgtctggtatggaaatataactgtggttatgaacaggtatttaaactatctaggcaaaaagaaagaaaatcacgtaagagaaatactatgtaaaaacaagtagagaaagcgttggtc

SEQ ID NO: 30928 - DNA, 403 bp, Glycine max
  unsure at all n locations
agctntgcggatttggtcttcgccggcgaaatgatcgaagtgggtctaaaaagaggcaaatctgatcatcttgctttgataaatgcaaaaaaagactggggcaaatgaagagggtgaggatgaaggagaacctcgtgttgtgactgccattcctatacaaccaagtttcccaccaacccaacaatgtcattactcagccaataacaaaccttctccttacccaccgcccagttatccacaaaggccatccctaaaattaaccacaaagcctacctaccgcacatccaatgacaaacaccacctttagcataaaccaaaacaccaacccagaaatgaattttgtagcgagaaagcctgtagaattcaccccaattccagtgtcctatgttgacttgctcccata

SEQ ID NO: 30929 - DNA, 426 bp, Glycine max
  unsure at all n locations
ntanagactcaatttcatttgaatgtggttgggacatatattgagttgtttattaaatcaatatttatttctaatttggaaaaatttagttattcttgttcaatttgaaataataaagttagtctctctcgtgattcaaatgttgtaagttatgaattcttttatggatattgagtgttcctattggaaacaattttaagtggtacaaaacttaaaattaaatgagaatttcatcactttataacataagtgctaagtcatatctcttaatagagaatttggatgcttgtgttataagaaattttggatcctttatattggttggaccttatagtctacattgagtatataaaggcacaataaacaaaacaaaaaaatggaattcatgtgctgaaagaaataaggatgtcctggaactaatacata

SEQ ID NO: 30930 - DNA, 399 bp, Glycine max
  unsure at all n locations
agctttgttggatttctgccatttggctctattttgatacctatccatataaaataataaatatttgtagcaaaaaaatatatacaagtgctttacaagatcgttagtgcaacatttgagttccatgtccttatttctaaaagttggatgaagaattttccttgagaaatcgaccaccccatgtccttatcacctttggtaaataaatttccttttgcaaagttcttatttctaaactttattctacattccatgtgatgaagaatttgacagtctgtttcttcggatggggaccatttcacaaaactctaagctttccagaagaatatagaaaaccaccgcataatttgttttcataattatacgaccttatgatattagtcaatgactatntaatat

SEQ ID NO: 30931 - DNA, 390 bp, Glycine max
  unsure at all n locations
tcatgatgatgaatcaagttgattcaagtagttttaatgatgaanaagattatgacaaaaagcctaaagaatgatttcaagattaagttcaagatcaagattaatttcaagattcatcaagaagattcaagattcaagaataatcaagatcaagattcaagactcaaagattcaagaatcaagagaagacttaatcaagataagtattaaaaagtttttcaaaacattgagtagcacaagaagatttcacaaaattattaccaaagagttttactctctggtaattgattacaagaatgtagtaatcgattaccaatgttnttacaacgttaagatnttcaaaattcagaatgaagactcacatctgttgatgtgtaatcgattacacct

SEQ ID NO: 30932 - DNA, 384 bp, Glycine max
agcttctcttggaccttgaacaagcaatcaactcctctttcagaaccctgctatgtgctcgcgactggtccctttcttcccttcgcaacttgagttcattattgctaccccatagagctccgcgaaatttgttccggccatactcttccttgcgagccctcttggtctcttgttcaagggctcttgcggtaattgcattctcttcccgtaacccggcacactccttccgaacgtgtgtagcagccaacttgaacttctccttggcgagttttgcctttcctaactcgcttttgagagcttggacttcttcgtcctcttccggtgcttcaaaattctcttcgctgacgactcttaacttggcgagccaatctaaacctcgcatgc

SEQ ID NO: 30933 - DNA, 340 bp, Glycine max
  unsure at all n locations
gcntnnancaaatcatataagataaatgcattcatgcaatctgtagatatatcctcccaaacgtcaaattctccgcctatatattcaacctttccatcactggcacgtggagtgaatctttctccatggtgcaatactaaagttatattgtcattcattctacacaattagaaaccgcaaacatggtcagatattangaaataaaanaacctacctcaaaaagcgcgaagacattgacattgtcaaaaaccgcgaagacacaatcaataaccaaaaacattgtcatctataaaaacagagcatcataaacgaacatattaaccgatcataaacctcccta

SEQ ID NO: 30934 - DNA, 396 bp, Glycine max
agcttgttaatccatggaagctcctaatatctcccacactttttggggtgggtcattcttggatggccttgattttctcaggttccacttggaacccatttctaccaactacaaaacctaagaaaactatattatctacacaaaaggtacacttctctatatttgcatagagggtgtttttcctaaggattgaaagaacttgcctgagatgtcctaagtgatcatctaggctcctactgtacactaaaatatcatcaaaataaacaactacaaatctacctatgaaatcccttaagacataatgcataagcctcataaaggtgcttggtgcattagtgagcccaaaaggcatcactagccattcatacaaaccaaacttggtcttgaaagcgtttt

SEQ ID NO: 30935 - DNA, 390 bp, Glycine max
  unsure at all n locations
ctggggaataatatttaacaactggagtattgaacttaacccacaacaagtttctagctatatgaactaatatatgtgtcacttctaatgtttctatggctggtacttttaggtaaagactgggaagaccagcttggagcaaatatcaagagtttattggaatcaggtaagctaaaagctaatagtcttggccaattctttttcttatccatgcacctttatgtacttgagaatccctaaacatacatgntaacaataattttccccatatgtaaaataacttgacaccctcgaacttctcanagtcattccaatttctattcgattcgccattgttactggtattntctacagattatgctcctgtcagtgttttgtaccatcaattgt

SEQ ID NO: 30936 - DNA, 584 bp, Glycine max
  unsure at all n locations
tcgcgcctcacacngccatataanactttcgttgtaatanggtcaagtatacatgtacttgttttaccactacacaccnanncccacgaagcacatttgaagcccttgagnccntngtgaaaaccagtcaagaacacgaggaacctcganagacgacctgcaagcatagcagattgtataggaagttatacaggctgacaagagagagggacacgaacggaactttgaatagcatctcagagacattcttcacaaagtacaacaagcgctacacacgcttctagttataaacaaggaaacacccctgacaatcctactgaagaaaactctctagagaagcattatttgaatgccagagctctacgacacacacaccatctaaaactaagctcacctccatgagaagctagagccaatctacacacaccccgttaaataactaagactcaccttccttaagagagagcaagcgtagagcattaactaccacaccctctatcatcagctacagctcaccctccatgacagaaaaccatgataagtcactaaaaaaatcctactactaagaacactcacaagctccg

SEQ ID NO: 30937 - DNA, 415 bp, Glycine max
catcactcgacccggatccttagagtcaccgcggctcagctttcttaacggctgaatctctccttaggcttatgttactatttttatgtttcatttcttcctgaggttggctgagccatagatctgaatgaagagacactagtgattcatgtatcctttgtctccttttccctttctccaagacctacagcgtgtcaagaaggatataaaagagaaaatattggcttcctttggctatatgtattccttagttagttgttcctaccttatcatgtgattctagatcactgtgaaatgaatagaaggacacctattgaatcatattttgaatactagatcaattctgctctgtctgtatatattgtggcatacgaaattatctattgtggaatttccacaaagccttgttgggatc

SEQ ID NO: 30938 - DNA, 416 bp, Glycine max
  unsure at all n locations
acggacctataaaactaagcttagaccgagcactcaaatctaggatctaaaacccttctatntagggatgttcaaggttgagaaggaaaatgaaaatggggtaaattnggagcaaactctcacctcaaaaaagtctatatcatcaatctaaacttgctcaaactggttttaccaagaanactctaccgaatcaaaagttgactcctcaacacccatattttaccctagaaatggctcttgcctttactttggtcatttgtttttctctcttgcactgcccaagctttctcataagtcctatatgacatttcaaactatgatttacttactataacctgtatttaccactgaatcccattgtatgcctccaactctcagagcctcactctgtttctactcataacactacattctca

SEQ ID NO: 30939 - DNA, 250 bp, Glycine max
tgcagcttgtatgattatggcgtacccatcacatgtggcactaggtggcggtcaggcgatggtgcacaacaagttgtccacattcacaaatcgcgcataaaacccaccatcccctggtgcccacctccaactgagcttacgtacttccacgtagcccatatccttgtttctctcaacaccgggtgcccatcaatcctcccaagcttcccaacattcaggctattcaacattcccatcatcacaaacttac

SEQ ID NO: 30940 - DNA, 486 bp, Glycine max
  unsure at all n locations
ggggaatttgaaaccctgttagagaccgtagctagcncagagccacaagatcatactcgggcttctccgatcggcatggaaactgacagtttcatgacaatatctaacaagctcgcccaaagacggggcttacgattgttggcacgcaccatatgatattgaacacacactccctccttcccagctatctctcttataaactctctagcttgtacactaatactccgatctctagtctgaacctaaccatgatcatttggttgacaacctccacaacttttacgtggtcatagacatacttctctttgagcatcaaatagcactgctcttttctgatagccttcaccaatcacatataattatttttatcagcacctctcttattgcaccatacttgccggatctacactatgctgttctccacctctgaaacatatactcctcgaatcgcagatagcatgctaccacgattctaacagaaccccg

SEQ ID NO: 30941 - DNA, 270 bp, Glycine max
taatatcccccacactttttggagtgggccattcttggatggcctcgattatctcaggttccacttggaacccatttctaccatctacaaaacctaagaatactatattatctacacaaaaggtacactcctctatatctgcatagaaggtgttcttcctaaggattgaaagaacttgcctgagatgtcctaagtgatcatctaagctcctactgtacactaaaatatcatcaaaataaacaactacaaatctacctatgaaatccctta

SEQ ID NO: 30942 - DNA, 381 bp, Glycine max
agcttatcattcaagaatttcatagttttcttgtaattctcccattcaatccatagatcatgtttacttgcatccatgttttcataatcatgatgagtttgtaacactctctccatagatcatatctttcttcatgtaggtgatcatgaagttctttgaggtgtttcaactcaacttgttagtcttctagttggttttccgacttctgaagatcttccaaaaagtcagacttttctttacaaattttcttattttcaagatggagctttgtagtctttagtttacgatcttcaaagacaacatgctcctaagtgaaaaattctaaaaaactattattcctttgaagttgcttatgatcttctgagaggagtttgacatatt

SEQ ID NO: 30943 - DNA, 367 bp, Glycine max
tgcacaagatctaaagaaaaacagataacacaactcttcatgcaaccgaggatctacgacagatttaacgtggttcagcaatgtgcctacatccacgagaaatggcagctcatcatcatcacattgatcgtgaaaaattacaagttcaatacaagcagcagctagcttgatctctctcggtttctcttttgcaaaacctctctcaatctcatagctgtcttttttttttaaactctctctctggttttctgcaaaaaaactctctgaattacatgatcaagagtatgtatatactctagctggtagctctaggcacaaaggctatactttggtgccaagaccaattcagttatgacaactgaattca

SEQ ID NO: 30944 - DNA, 389 bp, Glycine max
agcttcttagtttcagatgatgcagatgggtttgtagctacctcatgcactcctctaatgactatggcatcatttctggcgctaaactgctgggagttggaggccatcttctcaattaaatttctggcttcagtaggagtcatgtctccaagggctccaccactggcagcatctatcatacttctctccatattactgagtccttcataaaaatattggagaagaagctgttctgaaatctgatggtgggggcaactggcacatagtttcttaaatctctcccagtactcatacaggctctctccactgagttgtctaatacctgagatatccttcctgatggctgtggtcctggaagcagggaaaattttttctaagaatactctctt

SEQ ID NO: 30945 - DNA, 429 bp, Glycine max
  unsure at all n locations
ggaagctcaaggaagagctngaagaagttttggctattacttgcccaactcctttgagtgacatttgtattggttgttatcttgattgatgcatcttagtacatttgatatctgctttgcatcctgcatcatcatgggtagcatcgagaaaagtttctaagttaagaaaatttcttcagaggtaaaactctctatttaatcgatacagaggtgtcggaatcgattcaacaagctggttgaagcttaaagagttaagtctcatatcggtttaatccgatacaatagtactttaattgatttcactgctgttagaccatgactgatctttntcaggagtctcaactttaatcaattaccagtggattaatcgattacttctctctcgttcaagtgttcaaaggtgaactataacactttaatcgattatat

SEQ ID NO: 30946 - DNA, 400 bp, Glycine max
  unsure at all n locations
agcttgtagtgaggtttgactacaaaaattcattggtttttctaggattcaaaggtttagattctaagagagcacaagtcctagactaatcccaatgatcttttcttgttttgtacaaatagccttctcactattgccttttcttaagttgcttttgaccttattgtaacaacataacttattttctctctttttttacattcaacttatttgatgtgtgtcttgatgcttaacttttttcttttcattcttttcaacttttctcccccaaatttagagtaaatatgccttgaacaatatgctctcctagaatctaaacaaggtattaggagataatcatgtaaagttcagggttcaattcatgacaaatcaataagctntatacaacgcagcaaaagat

SEQ ID NO: 30947 - DNA, 90 bp, Glycine max
agtacgtgaaggaactcttgaaaaattttagatggacgatgcaaatatatgaaactctatacatccaccactatattagactagatatga

SEQ ID NO: 30948 - DNA, 400 bp, Glycine max
  unsure at all n locations
agcttgtgctgtatgggctgatcaatgttttgacaaagtaatagggatagaggttttagatgaattgataatttggtgtgtaattgaaggctcttgagttctgtaactcctgttgtgagaggtaatgggagcacaggatatatgtatataaaggcaagttgtgtgggcctacgggaagtatgattttttgtcgggatagaaattggaaggggatacatttgtaggtttgggttattcttgtttatgcatcacttgcagaaacacctataacctgacacttttatgtgtgtacaagttcttaatggattccanacatccatgatgatatgaaaataagttgaattatttatccagaagattgtgaaagatgtttccctgacaatattcttgttattggttt

SEQ ID NO: 30949 - DNA, 429 bp, Glycine max
tcaagaataatggtctcatcaaactatttatttctcgaagggaattctataaataggcctcctatttttaatggcatgggttaccattattggaaaacccgcatgcaaatttgtatagaggctatagatttgaatatctgggaagccacagaaattaggtcctacattcccactatggttgcaggaaatacacccatagaaaaacctagggaagaatggagtgaggaggaaaagaaattagtttaatacaatttaaaattcaaaaatataattacatatgctttaggaatggatgaatactttagggtatcaaattataaaaatgcaaaagatatgtgggataccctacaggtaacacatgaagatacaacatatgtaaaaagatctaggataaatacattgacacatgaatatgaattatttagaatg

SEQ ID NO: 30950 - DNA, 403 bp, Glycine max
agcttaatcccttgataattgagggtaggagatttgccctggattcagctagggactactttccttagcacccttatgttcaatatgttggataaataaaaatagtttttttttgctatatgcatgataatttcgatgctagttatcacacaaatgtattatacataagtacctatcacataaagagtggctatgcaatttagaatgcatcaagaagttttagattacgtggctacattctttggaaccaaaggcatcgcatggaaaaattactacatacccatatctaatgggaatttctattttcctacttggcttttgtgagggagatgtcaccacacgttatgcaggatggtggaagcagtcaatattgtatcatcatcgtgattttgcaaaaaatatt

SEQ ID NO: 30951 - DNA, 412 bp, Glycine max
agttggggtcacttataatttaactcattgatttgtcaagaaaactattggaaaaacgagagtgtgtaatgatttttgttttttgtcttgtatgaacatcctatagtaaaatttacatttctctctatatgattaactttggattttgagtcataccttatccaaaactaggcatacatgactttttatactggtaaagtttataaaattttgttatatgataagtataagttatgcaatagttttataagtactctatagaaggaaaaaaatgtaaacttgagttttaatataaatttttaatcagataaatatatttatgtataaatttggtttgggttggattagattgaattttaaaatgaaatccaaaatctgattctatccaaaacatatgagtttgttaaatttt

SEQ ID NO: 30952 - DNA, 399 bp, Glycine max
agctttgagaaacaagtgatcatccattggcaagtgatcatccattggcatcatcaaaacattcagcttgatccattatctacattatgttgacaccagagccatcgccaactaattactaatcagtaccatgatagggattgttacagcgtagatttttgcacaatagtccatgatccagttattttgcaacggaataaggtgtggtcttggcatgatgagtactaggtccacttggacattttggatagccatgaagtttatagcaaaccatggcagtgttccctagtttctcatagtattgacaaataacattctttgttatgcctgaaaatatggatctgccatatgttgaagtggtttgttaaacatccgcaagaccatgttttgatagtatgg

SEQ ID NO: 30953 - DNA, 153 bp, Glycine max
tatgttaatgggtcttaagaggaaagctcactaacacacactcaaacttacttattaaacatgctcatgaaaactattttttctcaattaaaataaatcccttttattttcctacaccaataacccaaactagaattaattaattaattaatt

SEQ ID NO: 30954 - DNA, 396 bp, Glycine max
agcttttaaaattttgaaataaaatgtgaaaaactaatttattagaaataagatttgctaaaaaaagataaaaaaaaaacaattagatcttaaaaaatgaacattaaaaataggtacagaagaagaagaagaagcatcttcaagaaaaaaaatacatcagcatcttcactcactcaccacgaaggttccgttctctgtgaatctatatatttctagggcacgttacgtggaacgaagctcttcactgaattcaatcgaagaagaagaagaagatggattgcgttgctggttcgagtttgtttccgttgcatcgttgcaaaaccattcacctggttggtaatattcactctcccctcttcaactcaccacacacacaacacaattatctcattcgca

SEQ ID NO: 30955 - DNA, 372 bp, Glycine max
  unsure at all n locations
tgcacacaagtttctccttgcctagcacttcanaaccttctggttgggtcatataaatgtcttcctctaaatccccatgcaagaatgcagttntaacatctaactattccaagtgaagattctttgtagctacaatgcttagaataactctgatggtagtcatctttacaattggagagaaaatctctatgaaatcaattccttgtttttgctgaaatcctttcaccataagtctcgccttgtatcttcttctaccatcaaattcttcctttagcctatagacccacttattctgtaaagctttctttccttctagcaatttaattaaagaccacatcttattcttctgaagggatgtcatctcatctttca

SEQ ID NO: 30956 - DNA, 303 bp, Glycine max
  unsure at all n locations
agcttttcgtcaactttcttccattgatctgggttgatcttaacaccgactaacctacctgaaattatcagccacatatgccacggtggtgccctagtgtcttgagaatcatgacttatcgcatgatccagtatgcccttatagtagatcgagctcttagcggatggactaattgtcactaagatactttaagtctatactcacaccttacccaagagatgaaaacctttagttaccattcaaaaggaggccatctgctacaatgtntatatatacatcatgtacctgatgttctacagttga

SEQ ID NO: 30957 - DNA, 419 bp, Glycine max
  unsure at all n locations
ccagttctgcgcaagctgcgagaattttacggtggtcttctgatagcaccctgatgtactatggcagtgcctcctgtatagcttgcctacctatccgccccgctgagctctgtagagacactgggtggtgagcagctttctactatgcggcactactatcagttgcgaacctatcgcaaacgtggagaggaacatgactgaaatcgtgccgtaatcacgtggtcataaaccatcactcgaaaagaggagctatgcgcaggatcctctgtctcatccgaaattgtccgacggatgcgctgggataaggacattgtcgactgctngtcacacgagctatgtagtagcgcacataacaggtgagccgtgcatggattggtccacaagatgctttcgagaatttgactgcctgaacgcagacg

SEQ ID NO: 30958 - DNA, 310 bp, Glycine max
  unsure at all n locations
aaagttcccgatcaaagatcggaagaaagcaaaagaagaaaatttccgaccaaagattggaagaaagccaaaccgaaaagaaaagaaaattcccgatcaaagatcggaagaaaatgaaagaaatatgcagaaaggtctttggaccaggcaatatctgaacaatacagaattgtcacccccaaataaggaaataaaggaaaccacgaccggaagtggtcctctccctttgatcgccaaccaaaatcctgtgcgctagcgactttctcaccccgcactaaacanaaacagaaaaagaaaagacccaaacact

SEQ ID NO: 30959 - DNA, 416 bp, Glycine max
  unsure at all n locations
tctcaaggaagttntcttaagaaagcttctcaaggaagctacctagtctataaatagaagcatgtgtaacacttgttgaaactttgatgaaggagagtcttgtgagacataactcaaagttcaacttctctccctttttcttccttcaatttcgtgctcccccctctctctttctctccctctttcttttcctccattgaagcctcctctccaagcttcttatccaaggctcatcttggtggtgaatctccttcttccatggcttattccctagtggatggcgcctcctctcacctcttctcctttgtcttccgcttcatctctatggtggaaaaccaccattaaaggacctcattgaagctcanagatccagcctccatagaagctccacaagcaagcttccatcaagtggtatc

SEQ ID NO: 30960 - DNA, 393 bp, Glycine max
agcttatgcatggattatgtaattatgaaattgagatgcccgaagaaacaccatttcctagctaaccatgcattaggtaccatgttcaattattttgtttttgagtgaaacgggtttatgatcccaacatggttggctcgtggtgcctaacacatgaaactaagaatgtagtgtgaagtttcacgcttcccccttttttgtttttgttatgtagaggaaaacgcaaggatgagcacacatgaaaacaaatggtatgcaattttgcagatcaaaaagtttgttgaacgcatatgcatgatgatgccatgactcatgcaaaatgtgaggctggaatatgataacggacaaatgcaggatatgtccattatgatgttatgaagagatgcttatgcg

SEQ ID NO: 30961 - DNA, 403 bp, Glycine max
tatgctacaaacatttataatagaccctctcagtagcattaccaacaacagcagaataattatgatctttcaagcaacagatataatctaggttggaagaatcatccaaatctgagatgggcaagtcctccacaataacaacagcctatccctcctttccagaatgttgttggtccaagcaagccatatgttcctcctccaatgcagcagcagacaacaagcagctgaggccccttctcaaccttccttggaggagttagtgaggcaaatgaccatctagaatatgcaatttcagcaagagacaagagcctccattcagagtctaacaaatcagatggggatgatggctactcagttgaaccaagcttagtcccaaaattctgacaaatttccttcacaaact

SEQ ID NO: 30962 - DNA, 383 bp, Glycine max
  unsure at all n locations
agcttacatcacttggaaagataaagatatagattcatcaggagattcagaaaatgaagtcgtgaatctgagtctcatggccaaaaactatgatagcgaagaagaggtaacatcttctaacaataacctatctatttcctttgatgaacttcaagatgaatttaatgacttgcataaagaatcagtcaaacttgccaaactagtttcagtttctaagaaaataatttcaaatttagaaaaagaagttatgaaattaaatatagaattagaaaatcttaatactgaagtcaaaacattaaaacaaattgatagaaatcaatcttctaccataccagatattaataaagtatctcactcatgtanatgttgtgataaatttaaag

SEQ ID NO: 30963 - DNA, 413 bp, Glycine max
tcctcggggccattcctgcgaaggcaaacatttggaaagttagttttaccagtgggacgttactctttaaagcaaaaatggaatataacctcctcccataaatacaaacatcaatgtaaatttagagtaagcttatgcgcatacttccttacaaatgttctcttgcacaagacattctattaaccgaaaaaatgcacccatatacaatcaaggcagctccgttacctagattatttacacgtacttccaaggtgtatttgttacttacatcccacacatctccttggctaaattcacatacatgcatacccaaagcattttggggtaccaaaaattgcacatgtacacctcttggtatttctaatacctatacatacacaaactttatgatgaatcttgactatctacacaat

SEQ ID NO: 30964 - DNA, 319 bp, Glycine max
agcttctatataagctgaaccattttatcaataaacacaagttgagttctattcagaaaattagagtttatctcttttatcttagtgagagtgattctcctagattcttgagtgattcaagaacaccctggctgtatcaaaggactttcacaacctttgtgtgttgccctcgctggaaagagtgattctttccttccaatcatctccacccttggtctttcaaaccacaattccagaaaatccacctctgcccaaaattatctcgtgaaaggtctcgttctgaaattcattttacgctcacgaatcacttactttgagt

SEQ ID NO: 30965 - DNA, 339 bp, Glycine max
  unsure at all n locations
tatgaccattcgaatttctcgagagtttccgttgttcaatttcgagcgtgtagatgagttatgtccccgaatcggacatctgtgtgaaaagttatgaccattcgattttctcgagagcttccgttgttcaatttcgagcgtctcgatatattatgaccccgaatcggacatctgtgtgaaaacgtatgaccattcgattctctcgagagcttccgttgatcaatttcgagcgtctagatgagttatgttcccgaatcggacattcgagtgaaaacttatgaccattcgaatttctcgagagcttnncgtggtcaattttcgagcgtctcgatatataat

SEQ ID NO: 30966 - DNA, 400 bp, Glycine max
agcttctacttatgtggcagggcgggcttccttcaccttcttgtctccaacgcgaactttgaccattgttcttccttcccgcaatgcttctcttcatgtctgcctgagtgggcttatagcctaaaccatacttcccacgatttccttgagtatttatcaggctagttatgccgccgttgttttttcctaaacccatcccgggttcaaaaccgttccccaacataactcgggccatcattaccgctgcatcggacagacaaagttgcccaaagagggagtccacggaggaaatgctgaccacctcaaaagactggaaagcagtttctaacgattcttctgcggcttccacataaggcatggaggatgggcagcttaccaagatatcttcctcgcctgacac

SEQ ID NO: 30967 - DNA, 296 bp, Glycine max
  unsure at all n locations
ntgagggtgcgtagcccaccatctnttcatagtagagtatcgataatgtgtctaccatcacgatcatcgtctccctttccatcattgggggtaccacctgtgccgtcagatccctccaccttttgggcgtgttctttgaaagatccgtaccccttattgtaaatgttatgtagttgcatcctatacggaaccatatccgaattgtactgatactgactaacaaaggcaaccattatgtccatacaataatggactcttgaaaagtgcaagttagtgtaccatgtaacagctacccc

SEQ ID NO: 30968 - DNA, 375 bp, Glycine max
tttctgaccgattgtctctcaatatgcacgctccattcagatacccatgtcatctcaggggggtagataaggaattggtgcccaatcgtgaattctgtaaagccaactaccccatcaaacaccttatgtatacctgtaagcatttgtatctctattgcctcttcaacaactgtatgatctgtgagaattatatatgacaccaattctctacccggttaactcagtaatatctttctactccctatatgtatctacccttaaatgacctaaattccatcggctatttattaaaaccgatcctttctggaaagttattctccctctttaacacaatcggcattccctccccgcatttaataccataatcctcgaccg

SEQ ID NO: 30969 - DNA, 151 bp, Glycine max
agcttttatctgataatatataagattcagctagcctatgaataggcgtagaaataatcctaggcgagttatattttgatagatctgattccgagagtcatatgtgtatgatgtgacttagagtcgtctacctatcaatagcgtctctaag

SEQ ID NO: 30970 - DNA, 114 bp, Glycine max
tagcatgtactatgatctttgttggcgttcatgaagaccattgtccgaaagtagttagcattgaaaaacctcgaaaccatagcattggggtgagaaataaacctccacccttgt

SEQ ID NO: 30971 - DNA, 320 bp, Glycine max
gctaagtgctgagttgagcgatagtgttttatccttgtttgttcgggctcgttgaagccttatctatcattcccgacatgttgacaacctgtcgagagctaatagagtatgctggacataaatatttgcttacaatgtccaatgcaatcgcgccttgtccataatgtggcgtatctataatctaatatctgccaatacataacatatttgaatacattggaatattagtccaattatagactatctgtttggaggggagcccggctactaacggtcacactttcactttcctataacagaccagacccgcaagattgaca

SEQ ID NO: 30972 - DNA, 565 bp, Glycine max
  unsure at all n locations
ctgccacacaccntggtacatcnntataacatatatgatcatataataattagcacaccncacaccctnntnncnncccccaccagnacagcnnccttgaaaccctgttganaccntagctannacgngacactatngaatactgaagcttaacaagntcatctatggattgaaacaatcctcccgcctattggtattacaatatccagaaggcatttcctcattcagcgttgaagagaatgtcccggatcactggttaaaccacaagggcagcgggagaaagaatcgtctccttgtattatacataccatgatatcttactcgcgactaatgataagggaatgctatatgaggcgaaacaatctctctcaaagaactgtgataagaaatatatgggagaggcaatttacgcataggcaaaatactcataacaaagaactcgaagcattgtatggttgtccacagaacctatatcaacaaggttacagagaatacaaagaaagattgtcaccaagtgaacctccaatggaaggtgacaacttcgttgaagcatgcccataatgaa

SEQ ID NO: 30973 - DNA, 294 bp, Glycine max
acttatcacacggaagtccgattggagtgcataatatatcgagaccctcaatattgcaaaaggtagtcctaatgaaagataaatggggataactttttaaacggaagtctcaattcaagtgcatacaatattcggaagctcgaaaatgaacaatggatgctttcgagaaaattaaatggtcataacttatcacacggaagtccgatttaggcgcataatataccgagacgctcgatattgcaactcggaagcactcaagaaattcatgtggtgataacttatcacacggaagtc

SEQ ID NO: 30974 - DNA, 563 bp, Glycine max
  unsure at all n locations
acccaccacccactgcactcacctaatacagctgacatgttgcacaatcgtacataataacacaaaaacnnaaaanaaaaaacgagnnacattgaagccattggaagccatgtagaatccatggccaacacnagctcnacacccggagaaccacctgaggcgacctgcaggcatgctagcatttgtgagctttttaagtctcagagaaacgagacaacgtgataccttacgacaggaactccgaaatactaatgagaactaggagtatcacctatcccacaacgacgaggtggaaggcatggccagcgaagtaccaccatacacagtaggagaacagaaactagtcatgtactcaacagctataatctatgaacaccatattatcccgtatacacggcccagtacgcgggaacggacacacaagcacaagcaaacatcacgtgtgtcagctaacaacaactaaaacagtgttagactagataagcacatgagagagacatgaatggaaaagaagaccaacgccataaaccctgagtgtaagaaattagacaaaatgacgaacc

SEQ ID NO: 30975 - DNA, 521 bp, Glycine max
  unsure at all n locations
nggatgccctttgtgatacttatttgaaacccatggtcaagcnccncagnggaactctataatagttgacacttcacagcatgcaaagctttcttgtctatattgtataaantatttattcttttgacgcatcatctgacctcaatggcatatatctttattactgaatatcccacgtcctactcgttaatcaagctattcgctcaacacttaatgtcactatcttctgatatctgaatttctcactcactgtaatttgatgatcacgcatctagtgcatcgaatttctcatcaacaatacgtgtcctggctgccactattatgtagataagatgctcatgtcaggtctctcgagttaatgtactatatgctcccatctcccccgagttccaaagatcaaccatctcacccccgcttactttgttatctttggacttgacattctcaactcactgcacgaagtacacacgatcatcctatttctagtttttgcttacctatgccctacttattgtaccacg

SEQ ID NO: 30976 - DNA, 287 bp, Glycine max
taatacatgcaattcatatgatgaaaacatttatatcactaaaatctatagtaactaattaatttaattctatacattattacatagacggaacgtttataccatgcatcaactaaataaacctttttaggaaaaaataaaataaataaaagtgaagaaaaaaaaagaagagagcaacaaaagacatcccgtgttcgagttcttcattgataaaaactaacaacgtttacaagttattctaatctcaaaaaaaaatgaatcagcatagagcttcacatcattattca

SEQ ID NO: 30977 - DNA, 204 bp, Glycine max
ttttggggacggcaacaaacccggaatgggtttaaggccaaacaactacggacccacttacctggtcaatgcctaatgaaatcgagggaagtatgggttaagctataatcccactcccgccctatatgaaaagaagcatctttggaatgtagaacggatgccaaagctcccagttgtgacaagaatgtgaagggatcccaccct

SEQ ID NO: 30978 - DNA, 406 bp, Glycine max
  unsure at all n locations
agcttcatgtttataggataaattattntcttttgttattcactgacctaaagccataatttaaaaatgaatattcaccaaactgttaacaagcattgctcaaacttaatgttatatttctgattctgatttctcactagtgaatttgaggatcagcagtagtgatgaattccacagaagaagagtgtcgtggctgcgagattatggagaaagatgctcatgtcaggtttctcgagttaatgtactatatgctcccatctccgtacgagtcccaagagatcaaccatctcaccctcgcttactttgtcatctctggacttgacattctcaactcactccacaaagtacacacgatcatcctattcctagtttttgctntacctatgccattactattgttaccatg

SEQ ID NO: 30979 - DNA, 423 bp, Glycine max
  unsure at all n locations
ntagcanaaaatttcgaacaactataggaataacaatttgttaaattttattaaagtcatttattttatttatataactagtattttaatacatgcaatttatatgatgaataattttatataattaaaatttataataactaattaatttaattctatacattattatttaatgtaatttttataccatccatcaacaaaataaacctttttaggaaaaaataaaataaataaaagtgaagaaaaaaaaagaagagagaaaaaaaaaacatcacgtgtttgagttcttcattgataaaaactaacaattttaacaagttattctatctcaaanaaaaaatgaatagcaatagagtttcacatcattattcatcacatttgcaagttgatttaattatgaaacaatgatacacaaatactcag

SEQ ID NO: 30980 - DNA, 400 bp, Glycine max
  unsure at all n locations
agcttgttacctattatgactntgacgaagagcaacgcgtagccaatggccattgaattcttttccttatcttccaatgctgcccttaccgccgttagcccttggccaaaagaatttgagtatcatatttatatgtttgataattattattattgttattattttttctcttgatgcacgtaaaagagaataacctaaacttttatatatgcgcattcaaattaaaactaacatacataaatggtcaattaatggatcttacataatgactcgttttcctttgcttctttcaagagagatcatcatcaattgatatggaatcatgtgtgcctcctgcatttagatctcatcccacagaagaggagcttgtggngtattacctcaagaggaagataaactc

SEQ ID NO: 30981 - DNA, 384 bp, Glycine max
  unsure at all n locations
gcactcagctatgtaggcaatcgtgatctttgtgggcctccacttaccaaaatatgtttccagggtggtaaacctaacaacacagagccaatagatgaagatggagatgagtttgcatttttgtcgtggctttacattggaatagaatctggatttgccacgggctttttgggattttgttgtgtcattttcttaatcagaaaatggaggcatgcatacttcaagtttctttatgacttgaaagaccaactttatgtcatggtggccatcaaaatgaattcttttcgttgaggtcggacacaaccatactggtaagtaaaacctttgattagttgaaatttcngtttttattatacaagataaacatagaccatattttaacat

SEQ ID NO: 30982 - DNA, 268 bp, Glycine max
agcttattcagattctgttttacatattcgagaattactaccgggcaacgtgaaagtcttaattcagtggaaaaatctccctcccagtgaacatagttgggaatctgcggctaaatgacaataggttattccgacttatcaccttgaggactatgtgagccttttaggcggaggtattgattagaataagcataatccacacatcaccaatgtgtacacccgcataaatcccatggtgtgcaaaccacccaacatttacaacccaccc

SEQ ID NO: 30983 - DNA, 426 bp, Glycine max
taggagtgaaccattaaggcattgaccaacagtatgccatcttcttcacagtgatattgagggggaaagagagtgtgcgttaattaaatgttttgaagttataaacccagtttacatgtctctcattatatcggttgagctatcttaaaagaattgaagatgttttaaactacacaacgagacatcttttttttcatttctataaattataccaatcgccattgtaatatcaagtttatcaagtgatcttactaagattttgttaaaaataatcccacatcgagtaattgatgaacatgataagtgcttatatagctaggtagaccacccccttatgaaccggtttttaaggtgacctttcggatgcctttgctacactataaaatctgatatggtatcagagccatattcaacagccctgactcg

SEQ ID NO: 30984 - DNA, 400 bp, Glycine max
  unsure at all n locations
agcttgtaactcataattnttagttgaaattgtcaattttacacatgcaatcttaattctcaacacactntttggatgagtcttccaaggattgtgttgccttctctaactnttcttccttttccagcgataaggtaaagctacaaaattgagtcttccaatgtttgatataagttttgcaagaccatctttaattcgaataagtggcttaaaggtgtaaatgcacagtccttccaagcgagcaactcanaggtgtaacaccatcttagaatttcgtatgagcatcttcaatgaaaatggaagacttgaacgaaaatggttggcttgctcctcattgttctgggaatagataaggatctatataatgagcacaatgtatgaaggatggaanaacttcaat

SEQ ID NO: 30985 - DNA, 433 bp, Glycine max
  unsure at all n locations
tgtgcatccaataccctgatgaggatgtcccatatgttcttaaaactggactaattcatttgcttccaaagtttcatggccttgtaggtgaagacccgcacaaacatttgaaggaatttcatattgtctgctccaccatgaaacccccagatgtccaagaggaccacatatttctgaaggcttttcctcattcattagagggagtggcaaaggactggctgtattaccttgctccaaggtccatcacgagctgggatgaccttaagagagtattcttagaaaaaattttccctgcttccaggaccacagccatcaggaaggatatctcaggtattagacaactcagtggagagagcctgtatgagtactgngagagatttaagaaactatgtgccagttgccctcaccatcagaattcagaacagcttcttct

SEQ ID NO: 30986 - DNA, 397 bp, Glycine max
agcttgtattatagttaagagtcatcgagtcactataccattaactatgaaaaaaagtaatgatccttttgctttaatccattatgacgtatggcgtccatccccaaaatcttctatatatgggtatagatggatagcgatatttgttgatgattgcactccaacgacacgtattgacttgatgaaacaaggatatgatgtggtacacatacttgaacaatctcatactatgattcaaactcaatattcaaagaagactacgatccttcgctctgataccatgtataactgatatgatatttgcatatatctcaatcgcatcttacaaacggaaatatgttatatgtatatacacagacaaccctatgtctaattataactagatcacgataattat

SEQ ID NO: 30987 - DNA, 431 bp, Glycine max
  unsure at all n locations
tttctttcttttgaggatgagaccagtctttatccccaaatacatgggttttatttctaatatcaacccaactataacctggctacttgttcatgttgctaatttttatcatcttcctcaaacttcgtacatcttcccattgctactcttttgcgtaaatatttgaaagccaaacatgagccacactatttttaggttcagccttcatcaatttgtctgctgcaagattggccctttccatgtccccatgaattttacaagccccaagaaaagaacaccagccaaagacatgttatttataaagtcttctgcttctttaagctttccagctctacctagcaaatcaatagcacaactgtaatgctcttctntagggactaccccataaatcttttcatggaattaaagtagttatacccgtcctcaaccat

SEQ ID NO: 30988 - DNA, 568 bp, Glycine max
  unsure at all n locations
cacttccccacatactccattaacactattntacaacatatagtgtntacttacacgacacattatatttatcannccccnagaggggtttgaagcattgangccatgganaacnaggnnagacnaggtgatcctctagagatcacctgagagcatgctcacgtgttttcgctattgtgattcaaaaagacccgcgcatctccgcacgcgcacgcaacttcataataagcttacagacggagcacttaacagactaagcactaggtcaacagaaaaactactacaaagaaatagagtcgaacatgattaggatcaggatcatgcaccaattcgacccaagaatcaaagaataggcctaaaatgacaataatcgccgaacaaagtgaactacaattcacttaacgcggaaataaaaggctgcaacatacttgcaacaatttgcgacgattactatgagtgagaaagactctaacaggatagggagtatgtgatgcacacttatatatattgcgcatcttcagaagatgaatcatgggtgggagaacttaaaaggaaggtcagcaccccg

SEQ ID NO: 30989 - DNA, 384 bp, Glycine max
  unsure at all n locations
ntgagtccaacattcagttttatacctgtcgtcatactttattttncgccggcgacctttgcttgatgacatgcgacctttctttggtccttgtgaggtgcttggcacccatcattaggcaatttgtgaaattccaggacatgccagaaaaccaaaaaatattgatgcacaatccgtaagtttccgtgacacaccggaaatcaaatggaagcatcgttgcataattaagtgagattccgtaacattccgtaagtcaaaaaggggatgattatgtaattcgcaaggttccgtaacattacggaaagaaaacaagtatcgttacgagaatcgtaagtttccgtaactttacgaacaaagactcaccaaaaaaggaagggggtgaac

SEQ ID NO: 30990 - DNA, 232 bp, Glycine max
agctgtttgtcgtctcattcaattgctgattttccagcatgctctgaatagacttgcgcatcggtttacacatcgactacgcatcgataccatacctctatacactggcggatgacgcgaggtaattacccttctacgctcattgatttcagaaaagacttcacgatctagacgaaccttggcattgccgacttttcctctttgtcaaccactgccatcttactccaccgtt

SEQ ID NO: 30991 - DNA, 392 bp, Glycine max
taagcttgtataaattcttgtgatgaagcacatttttgaatccatctctattatcaaataaataaaggctgaagcacagtgcttcatgatatttcaaaatcatggagaatcaaactttccatgatgaccatttgaacaactatatttctttggataaaactttttgcactaacagattagtcacttaaaagtatgatggaccaattggcagcagatccagtcaaatgtggaaatacttatccaatacctgccataactttaaaattatatacagatcatcactgttgttctcccaaacccgtgcatttccaattgcaaaacaaccacatggcgatctaaaaggatttgagtccagaggagctgcatcattatacacaatcacatacatcatg

SEQ ID NO: 30992 - DNA, 563 bp, Glycine max
  unsure at all n locations
ccctccgtcatctcgcacatcttnatacatanagaaagactagangtatanancgctctatagatgaagtacacttaagaaancnnnaaaccagaggcaacgttgaaccctttgangcccatgtgcanccccaggcgataccagctcgacacccggagatcctctacacgcatccgcacgcttgcaanctagtatgaacatggtataggccatctagaacgtgccaacgcatgccatacacacgctgtttcgcttacgaatcaatagccagaagaggataaagcaccgaaatgaacaatctgaaacataaagtcactgaaccaaaatagatacctacacaaatgggacaacgcaaagctatcactgccagactgagaagcaatgtttgataggaggctacatacatacgttttgctcttaccactcaaactgaactaaatcaccaatcttttctatgactcacgcccatctacataatcaaaaacttaaacgcatcacacctgcctccgcatgactcaacgttcatagctaaacaaagaactatcatcgtccaattaataacc

SEQ ID NO: 30993 - DNA, 83 bp, Glycine max
gtggaactgttcctcaagggattaaaggaagagattatcactaacgtgaggcttcatgaaccatagaactagatggaagctat

SEQ ID NO: 30994 - DNA, 368 bp, Glycine max
agctttcatctagcctatattatacaaaagtgttacaacagaacctaacggtatctaattatatgggccatcaaatctatcatgtgttgacagtaattgattagcccatgaatttcctcgggggctgtacacacttcaacgatggcttttgctttggctaatagtcgcgggaggtcttgacttccattcaaggtcaaggcgaacctatccatccacatagtcgcttcttgatgcaatgcatcaatcacctccctcttgcttctttttcggtgtacacttgtgcaaaatcctctattagcttttgttcatgggtcatagactgggtcaactcttccttgtactgccctatgatagctagcatgctttgc

SEQ ID NO: 30995 - DNA, 387 bp, Glycine max
tcaaagatgaggtcaaaggctacattctgtgtcaaatacctgtgtcttaacattaagggctgatgggtatttcgggttctataaaaaagacacatatttttgagattccgatcacgccaatgtgaccggggttcggtgaatgccgtaaaaacaatctcaatgttataaaaagataactcttaaaatgtctcattctctatggttattcaaaggaagtgtatgatcacccgattacagtaccctgcacatagaatacactatgaggagctcaaactagttacgagaatgcttagaactcaaggctacctcagggaaactttgaaatggaggattctgaggattatctccatggaatcttctaggaggattctgaggatttcactctga

SEQ ID NO: 30996 - DNA, 383 bp, Glycine max
agcttgattgcaagttgctttgtctatatgcatcttaattcttctagatcccatcctaccattacaccaagtgagactagatccccttgaacagaggtgggtgagatcattctagacagaccaattggaaaaatcttcacaagattgcttgaggggaaggtagccaccaattctttcatgtgcccctgaaaccgcattgaaatcaccaatgtaaacccaaggtccaaggaagttgatcagcatagaagagagctcatgccataagattgctcttttaatgttggaggtggaaccataaatagtagctacataacatgaaatgttgttaatagaaactacaaaagacatgctttgatcagagatagctaacatagacaaggaag

SEQ ID NO: 30997 - DNA, 311 bp, Glycine max
tgcacgtcttcactctcctcaagcattttatcctcttcctcgctcagactctttagctttgggagccaagttatcccttgcgtactcgacttcaaccatttgagatagctgcctatgacaccttggctacttccactaagttctttatcttttctttctgctttattccattccttatagatcctctggagtgtctttacattagcttcattgaaacctcgcgtgatgaaaggcgcgatggtctcctccgatggtgcacctctcatagggtaacctaactggcttatggccaacatgggattataattaat

SEQ ID NO: 30998 - DNA, 377 bp, Glycine max
agcttgtaactctgattcaatgactgttaaaaacggttaagatatactgcaaaattggcgaactttatcgctatctcaagatttcaaatcatacaatgactgtactttgaaaaaaaatgcctaacaactatctttagcttaaaattgcgtcagtagcataagaataatgcttgtattcctttgttcacaatgtaaaagataactgtataccacaacaaatatttcttaggcgaaaagaaagtgagcaattcagatatttgaaaatgatttatgttttgatttcctttcaataaattacagatgtataaacatatgctatcgcatagtccgatgattctttcttacgttaagaagagattaatattatgttctatttg

SEQ ID NO: 30999 - DNA, 465 bp, Glycine max
  unsure at all n locations
atganaccttgtgattgacaccnttgcattacgngacacttagaatactcagcttcagaataattgggaaaccgtaatttgtttaattcattcttattccagacttgtatcattcgaaatatattatctacctatattttattatattatgccatattttaatgatggcagaccattggtatcacagaaaatgaattgcacttttgcattacgggtgggcncattctagtgatgagatttacttacttctacgtttgtaccactacatgcgggccttaacagtaaagattattgtaatttcaaacacttaatgcatcttctatggcatatttggcaataactatctctaaaccgaaagagaatatatgttggtgggcgctttcaacaccggagtaaatttgtggtattaataagtacatcatattaaagaggatctcatacagcatcggtttaaaaaacagggcg

SEQ ID NO: 31000 - DNA, 304 bp, Glycine max
  unsure at all n locations
ttacattgtcatccattngagttatcccagaatgtacatttttgaacacaagtgaaatctcccctttcaaagatgaaagaaacgaatggtcaagtatcatcaacccctccccacccacctgacctcaaaataacggctaatgttaaacactcctcttttgcatttcatattatacaataaattctatatttacaggagtgtattcatattagagatgaaaaacgtacgattacacaccatgttaagagatgaaaactgaacagactatgatactcactcgcgcatacattgcttattacttata

SEQ ID NO: 31001 - DNA, 413 bp, Glycine max
  unsure at all n locations
gggattcggctggtctacatattcagtattctatngagagacttgtatactatgatgggaagctgcacttgaaaataccatcacattttctaaactgggatatttctggatatacttcacgtggaatcctcaagttgactatcaagtaattctgtcatcagtgaggtgatctactttggcattttctcatcatttgaaagactcgcgatgcaagctatatttgaaagtctcaaggatgtatcagcctctaattgcatctcattgtcctcagtatgcaatctatcgccttttcacctaaaatgaattaaaaactatctcggacatgaaacaactcctacagcaaagttgctatcaatattgtctagctctatctatgcattgagggactgaccacattgaaagtattgcgcttt

SEQ ID NO: 31002 - DNA, 403 bp, Glycine max
  unsure at all n locations
agctttgacttgagtcatcaagagattataaatatatgaccatggcatgaatttcataacaatctttttcaacatctctttcaataatcaagaatctatctttcaatcttctctctcaacatcattcaactttttctacagaagtttgtgattcttcttctcttcatctttctaaaagtttttgttcaaaactttttctttcaagaaaagttctttgatcaaaaacttgtgttattcatctttttttattcttttctccttttgccaaaagaacgaaggactaaccgcctgaattcttttgtgtctctcttctccctttccaagagaattcaaaggaccccgcctgagaattcttttgattcttccctttcccttanacaaaagatctcanaggactaaccgc

SEQ ID NO: 31003 - DNA, 417 bp, Glycine max
  unsure at all n locations
tgtaacgtggtcatgttaacaagaaaatcatgggttttcatagattcaaactcttaggttctacgagagcattcacccattgcatgtctacttaaagaaccactttttctttgacctcccaacctttattgacatgccacaaataacagaacatagaggttctttttttttggtatgcatttgctttcagctcatatttgcttttttttttacgatgataggtattacaaaagaatgtaaatctgattctctatgtatctgttactcatattcctggacataatttaaccaaaacactcccccaaatttggaacaaatttgacttgatccataataatgctctcctatagcctaagatacggtgcacatagatagcatttacatttagcttanggttcaatgacacatatcgtcacg

SEQ ID NO: 31004 - DNA, 393 bp, Glycine max
  unsure at all n locations
agctttgagcaaattgtaatgacaataactntatacacggatgtccggttgagtcccgtaagatatcgagacgctcaaaatttagatccgaagctctgagaaaattgaattgacaataactntatacacggatgtccggttgagtcctgtaatatatcgagacgctgcaaattgaaaacggaagctcgtaggacattcaaacgacaataactttntactcggatgttcgattgaatcgggtaatatatcgagacgatcaaaattgagactagaagctctgagcaaattgagatgacaataactttatacactgatgtgcggctgagtcccgtgatatatcgagacgctcaaaatttagatccgaagctctgagagaattgaattgacaataac

SEQ ID NO: 31005 - DNA, 206 bp, Glycine max
ctcgatatattaccagactcatgcggactttcgtatataaacttattggcaattaaattttctcagagctttggagcaaaattgtgagcgtctcgatatatgactggactcattcacacatccgatgaaaagattattggcgtgagaatatgagacgagcttccgttgtcaatatggaccatctctcgctatattgcgataggcta

SEQ ID NO: 31006 - DNA, 391 bp, Glycine max
agcttcttatccaatgctcatcttggtggtgaagctccttcttccatggcttattccctagtggatggcacctcctctcacctcttcttctttgtcttccgctgcatctccatggtggaaaaccaccattaaaggacctcattgaagctcaaagatccagcctccatagaagccccacaagcaagtttccatcaggttatataagaggtcacatggtgttgtcctagagaattttctcaaaaaccaaaatgtcgacatagttagtttcgagagatctgcaaacaccatgtattcaaatatcatggggtgttggcatgtcgcttagaatttgatgtacattaaaaatgtggctctcttcttttctcaaaatggtgtttcatagttataaatc

SEQ ID NO: 31007 - DNA, 414 bp, Glycine max
  unsure at all n locations
tgttcggcttaattgtagtttcgaatcgtggagtagttgttatcattatgttttatgcatctttagtagttggggtttgagacgggctcgaagatggaatgttatttataacaacttttactaagttattcacaacctctttaagatcttcaagagttgatttcatatttgagatttcttgacatacctgtgttatagatatgttttgtgtctcatgcataacttttccctctccaacagttgaacactactgcaaaaataacatactacgacagttcttgagtacatttaaagaccattttgaatcatctttgaaaccaacatcgttgaaagtcttgactnttgacgacggttntcaaaanatcgtcttagaaaaaagtatcattntaagacggttcttgattaagaactatc

SEQ ID NO: 31008 - DNA, 394 bp, Glycine max
  unsure at all n locations
agctttctccatttcatcttcattgtcaaatcctccaaatcttaatccatacagttgaccactcttgctcctctgcgaagatatgaacacatctataaccctccctatttacggaagatcccccacaagttactaacattcatattctttgggaatttagtgaaaaagaatgtagtttcatcacctcccctcccttgatcacctttccgtgctctacccctccactctccatcctctctcattttcctaatgcacttagggacacataaccccttatcaagtaaaacaaattttaaaaatattcttggtttatttagcttcttattctattaggattaattaaatatntaaaattcaataatattctacatatttagctaaagggaactatttt

SEQ ID NO: 31009 - DNA, 424 bp, Glycine max
tgaactatcaggaaggatggtggtctaatttgtagaacttttataattcgacatctagtacgaaccctatggtccgatgaagacacaactcatggtagacttcctggaagaattcgttgggaatgaccaaaccaccccagactggtggagcttctacgttgacggtgcatccaacgtgaaggggagtagggcatgaatcatctttgaaggccctggaaatgtcactctaaagcaagcccttaaatttaacttcaaagcctcaaacaatcaggccgagtacgaggcactcattgcaggtctaaaactagcaacaaaagttggggccataaagctctgatgctacacggactcgcatcttgtccaggggcaggttgccaactgataccagaccaaagagacaatgttgctcaagtactaccacatt

SEQ ID NO: 31010 - DNA, 206 bp, Glycine max
tagctgtttgaatctatatatggtttaaagccagcttctcagcatggggaccttaaggtccatggtataatctgtggataatggtatgatgataaccttatggatcaatgcctataccgcaacgttaaggggagaaacagaggcgtccttggagtgtacgtacatgatattatagttgcaggctatgagcccggtttgctacatga

SEQ ID NO: 31011 - DNA, 130 bp, Glycine max
cgcaagaggattggtagaggggctatcatccaacgcctttatgtcttacatctcaacgacacatcttgattgcaaatacactttacctgtcatcaatttccatacacatgacattgcttacccagacgct

SEQ ID NO: 31012 - DNA, 391 bp, Glycine max
  unsure at all n locations
agcttatcaagatacgcactgaaatcatttccattgcgtatctaaacaaaatctgttgagatacatagcagaacaagttttgtgttgtatctcgacatgacaaaaattcattntgttgatatacaaaaaatataggtttaaatatgtttttatttcctataaaattaacaagttatgattttaatccttataaaattttttctttagttctaatccttcaaaaagttgaaattttgtttttggcccctacaattatgcaacactcattaattgcttgcatttgacaaaaggtcaagtgaccatcccaagtgacacccactagtgtttatttttttgggttagaccataggtattctccattggaggaaatcctgttcgagatggataggat

SEQ ID NO: 31013 - DNA, 419 bp, Glycine max
tgaacgaatataagagacatcttcttcttcctaggtgattcttgactccatctcattgaagcgcaagtccacttgtaacttcaaagtatcaaacctttcaccaacaaaggtttgaagaccatcgaacctatccaaaatctttgaaagaagagatgaatcttctccaccatgtccttcttcatcaacatgtcgagcaccctttttcacccaagagccatcatgctctttttgataaccaaaggatgcaatgacagaagttcctattagaaaggatctcttgattggaacatagggttcagaatcaagagggatgttaaagtgttgaaggaaaagggtgactacgtgtggatatggcaatggagcattcaatcgcaatgccttatgcatgcgatatctaacaagatgtgcccaatcaattt

SEQ ID NO: 31014 - DNA, 386 bp, Glycine max
  unsure at all n locations
agcttcccatctctagcatccctcttgaacttcaaatcatactgatggaacttccatatgtacttcaatttcctcagattcctatagaacagagttgtgggtatgttctgaaagtaaatcccaaagtctaggccattctcatgcagagaatcaaagatggttttttgaggatacccttttgctaactgcctcttgatatgacttgttgaaccatgagaggttgctgagtacacaaaaagcctattgggttgtgttggaccaggaattgaagaanaccacctgtcaaaaacagcaaattccttaaccaaagcagcataaatcggcacagagtccggtttaaaccctttcatgacagtctcagagaggttgggagacatagacaatgc

SEQ ID NO: 31015 - DNA, 421 bp, Glycine max
  unsure at all n locations
tgaactattaggtaaaatcctatccaataatggtcttatttacagaaagtgggtaggggaacttccgcaaaaaaatatagctggtgtaatgggggttgatttggcgtgtaaggattgatcagtgaagcacttcacttgaaaggcttgtacagttgtacttataggtctgattcccactgccaacaatcccacttggtaggttttatttttatggaaatatcactataagctctcattgaggattatgacaatgccctgccttggaatggaatagcctttcctccccttaaaacttttgtttccaaaagaagctgtcgtagattttggacttgtcacttatggtaaagatatttataggtatacatgtgcttaanaggagtntgacttgngattgatgaatgttgtangggttgaaattgca

SEQ ID NO: 31016 - DNA, 380 bp, Glycine max
ttttagtggatgtgatcattaatagtcgctttgaggtttgctaaaatacaaccgattcattctattatgaataatgaatttaaattttacataagaataattatgatagttaaaaacacttataaagagatgattaaaaaaatgtacaaatctagaagataatattaataccatacaagaataatagaatataatatatatatatatatatatatatatatatatatatatatatatatatatatatatatatatatatactgtgtatatatactcaacctcatgcatataccttcattcaaattaaataataacctataacattcgagctgcgaaatctgctgctctcatattggattatgaattctttatctaaacag

SEQ ID NO: 31017 - DNA, 352 bp, Glycine max
aatagtgagaaatataagaactattttaacttctaatttactctgattattgatttattacagtatgggtaaactatgattaactataaagtatgatggaacaaatatgaaaaggcttaccgactactgctgattatgaaataaatacacaacatacatagagtgaaatgagcatatatttcatatgattacaatgacaaataagaccttattcatcagtcatcaccaaatgagcataatcacataaataaatggtcggaaatttgtcttaaattgaaaaggaaaactgtgaggggccacgatcactgtcagctgtggggaatgaataaattcacccattcattcattgatg

SEQ ID NO: 31018 - DNA, 167 bp, Glycine max
  unsure at all n locations
ttctccttacgcatctgtgcggtatttcacaccgcatatggtgcactctcagtacaatctgctctgatgccgcatagttaagccagccccgacacccgccaacacccgctgacgcgaaccccttgcggncgcatcgaatataacattcgataatgtatgctataccn

SEQ ID NO: 31019 - DNA, 291 bp, Glycine max
agcttttgatataacttctaatgtgaatgtgatatgcgtatgcgcctaattaagctatttactctaatgcaccttacatgtaattgtacacatattatttgcctatatttgatgtttggtgtttctttaaatattggtgatccttagtgagcttgaaacattaacgtgcggagtaaaaattgcatttttgtttaatgtttcaacaaaaccttttttttttcatttttttggggggggggggggggtgaacaaacaactgatgaaaatctcctgtgataaactacaaaatcc

SEQ ID NO: 31020 - DNA, 421 bp, Glycine max
agctttggcatctgagaggggtcttcatgctgttattgatggtttctgggtggaaaatcctaatttggttaagcctgaaattctgcagcatttgcaaagcagattcaaattaattgaagttatgtacaagcactggagcttatttaaggcagaaattctacagcatctgcagtctgtgggtggaaaaagggtgggagtggaaatttaaatggagaagacacttgtttgacagagaccttgagatggcagattgtttccgtaatgatgttgctggcaactgtatttacattcacaaaaaggatgagtggatctggaaaatagaccctactggacaatattcggtaattaaaggagagactacaaacaaacacaaatttgatgaggataacggtggcaattaatgacacattatgcccattct

SEQ ID NO: 31021 - DNA, 393 bp, Glycine max
tgtaaccgaggcatgctagacggtctttatatttacaagaaatccttccattgtaagcacaccacatatgaatgagtttatttttggaaatatcatcattaatgataaaaataaagatctatggacatacaaacaccatatatatacgcactgtaaacggccaagactttagctgatacaagtgtcatcttctatactctccctctctttctttatatatatgctgccagattgctcacttcgcaaacaaagaacattaatgtccgcttcatataaacaaactgttcactctgctgctgcttctatggacagttaccaaatctctacattttctcgttactcttcttaccctgtaatcattcttcacggacttccgaacccggacacttttcc

SEQ ID NO: 31022 - DNA, 401 bp, Glycine max
agcttcaaatctagcttttggaagagcttttgttaaaatatctgcactttgatcttcagttctgcagtaaattagtttggcttcaccttctctctgtgcttcccttaaaaaaaaacttgatcttgaaatgcttagtcctgccataaaaaacaggattatttgaaatggaaatagctacttgattatcaacaagaatctgtgtaggctccttttgttccatatgtaaatcagcaagtatacgccttagccaaataacttgattcacaactgcagtggctgtcatatatactgcagtgcttgtagcctttgtccacagcttctttggcaactcctttttatacaacatacaccttgtcatcttcatgatatttctattttcttctctcacttgtaccattcta

SEQ ID NO: 31023 - DNA, 416 bp, Glycine max
tgttgaaactaaggatggaatagtgatgcaccagaagaagttcatttaagattgtttgaagaggttcaacatggatcaatgtaataatgtagatatttccgtggaaggaaatatgatactggatacaggcgatcatgaagcttcagtagatgccacattgttcaagaagctagtgggatgcttgagattcgtctaccatagtagaccagaaatctcatatggatttggtcttggcagcagattcatgagtaatccaaaacagtctcatttggcagcagcaaatagaatcttgagatatctaaaaggaacacttaattatggcatattggttcctcatcagacagaaaaatgtgagctatacctcgtagcttattctgactcatactggtgagggggataagtggagagaagatcta

SEQ ID NO: 31024 - DNA, 401 bp, Glycine max
  unsure at all n locations
agcttgtagctttcatgacttcagaaaagccaaagatttcccccatcctagttctaaatttcaaatgctatcaaagcttaatttaaaatatgtgtgcactttggaccacaatgtgtgcaatttctgaaatggggttcaatttattataacaaatagtgatgtacataatgtttgtacacatttatatatgtgtggcataatgaattatactcgtaaatgaaatatactggtttaggatttgttttatttctgcataccttagcaaaggaaacaactcttgtaaatttgtcaagttaatatccaaaagctttagctacttgagacgcacgatctgcatatgccaaaaaatattatcgttttctccatcatccaaactnttcagttttcctcctgttatattt

SEQ ID NO: 31025 - DNA, 423 bp, Glycine max
ctcatcactttcagcaatacattctcccactcaaatagtctccgatgccattcattattatagccaccattctgacccacccgagaatcaacttcactgacaaggatatctttatccatcacaacgagaacaatggccagattttatccttcatggtaatttcacccttccatatatctatccaaaatgcatatatgcaccattccccacctttctaatcatattaactgaaaaccaattcaccggacataatgaattatgattttcccccatcatatccttccaccatataaaagtttgactatgagtcaaactaccttccacatccaatcaatagtcatacctgaaatgtataaaatcaaactatatagtgtgcttatctatagagattctcctcctccacttagctagaaggcttgcatt

SEQ ID NO: 31026 - DNA, 401 bp, Glycine max
agcttatcatatgtagctgagatgattggagttccaacaactagattatgaagaagtgaggtctgcatgtttgatgattaacaaaaaagatttttgttttatcaaagggactagaagcgggtgaacagaaacaggtggagctactagattgctagggaagttatgctaacttgggttgatgagttccttgtattccaaagaggtatttaaagggatggaaactaggaagtgaatctttgacactttctttagtggggcaactcaaccttggatcatcaaccttgattgataaaaatgtactgatatgacaaccgtgacaattattcaagataatattttcacatcatggactgttttgcttgctttaagaaatatggttcggtaaggtttagctttttgag

SEQ ID NO: 31027 - DNA, 430 bp, Glycine max
tacctgagttaattgcctgctttcatgatttccacgtaatagggtaatattagctgggtatctgtgaaattacagaaaaataaaaggatatgtaagttttcaaaagaaaaaaaagaaaagcaccactgcaaatgggtgtaaactttccaaagtcaaatatgctagcaatgaaagactgtttggaagtatcataagcatttattgtaagattgttgacttttataatacttacttttaaagttatatcaagcacaatttctaatgggctgacagtgtaaaaatcttcacactgaccgtttagcaaacttatacactttgataccatgggatacaaaccaaattaatcttaaaactcttcttacatgcctccaaagctaggacaaatttcaagtgataatcttattaacaatacatgtaaagccaacaagtc

SEQ ID NO: 31028 - DNA, 329 bp, Glycine max
aaatcagccattattgaaccattatgaactctccaaccaccgggaccatctccggtggaagaatcattccaaacaacagcaacaacaatcttattttcaaaatgctattggcccaagcagaacatacatttcttcaccaatccagcaacaacaacagcaaccgccccagaaacagcaaacaggtgaagctccttcgcaaccttcccttgaagaacttgtgaggcaaatgactatgccaaacatgcagtttcaacaagagaccagagccttcattcaaagcttaactaatcagatgggacacatggctacacagttaaatcaacaacagt

SEQ ID NO: 31029 - DNA, 315 bp, Glycine max
  unsure at all n locations
ccttgtccgaaaagtcacttanaaccattttaaggtccaacgccttanaacggtcctctttgcttttatcgattaacatggaccgttcaaaagcataagatcaacacataactttaccgcttttgcaagaactatgtaggtctgagttcctcatcacanatcgaggatacgtangagcaaaagccccgcttttgtcgaccaccccaagagatcgttaatggtccaacgccttaacgtttctctcctttcaaaaaccaagagatcgttaatggtccaacgccttaacgtttctcttctttcaaaatcaaaagatca

SEQ ID NO: 31030 - DNA, 392 bp, Glycine max
tagcttgtgaagatgcttcaatggaggaaaagaaagagggagagaaagagagaggggggagcacgaaattgaaggaagaaaaagggagagaagttgaactttgagttgtgtctcacaagactctcattcatcaaagttaccacaagtgttacacatgcttctatttatagactaggtagcttccttgagaagctttcttgagaaaccttccttgagaagcttctttgagaaaacttccttgagaagctagagcttatctacacacacccctctcataactaagctcacctccttgagaagcttctttaagaagattcctaaagaagctagagcttagctacacatacctctcttatagctaagctcacctccttgagatgagaagctagagc

SEQ ID NO: 31031 - DNA, 413 bp, Glycine max
  unsure at all n locations
tcagaccaaggcaactcanaatctaggtatctaaaacccctcaatttagtggatttcaacgtttaagaagtgaaaatgagaatggggtaaatttggagcaaactctcacctcacacaagtctataacattaatctaaacttgctcaaactggttctacacctaaaattccaccgaatcaaaatttgactcctcaacacccaattttaccctagaaatgacccttgttttcactttggtcactcatactcctcatttgcacagtctaagctttctcttaagtcctaaatgacatttcaaactaagattaactcactttaacccccaattaccactgaatccagatttagccttccaactctcaaagcctcactctttttccactcataacaccacattctcactttctaaccct

SEQ ID NO: 31032 - DNA, 285 bp, Glycine max
cacttcttatgctcaaagaagaatcacctcgatcagaaagaactacgcaggtctgattttctcatcccaattgaggaatacgtatgagcatagggaaacacccttgtcgacctcgctaagagaaactatatacaacgggtataaaggatataaatacatacaacgggaacataaaaaatcaaagtcacgtttgcacattcgattaaaggttgccgtcccttgcgacggacgtgtggggtgctaataccttctccgtgcgtaaatacaactcccgaacctttcact

SEQ ID NO: 31033 - DNA, 476 bp, Glycine max
  unsure at all n locations
cggcgccatgaccccnattgagtccctgcattacgtgacacttaaatactaagcttggggagtctcgcgccccaccacatgatggtggttggtgtctgtcggagcatcgggctcatggaggaatcctcctgacgggcacagcgcggactggctgctatttgcagccgcctatctactaatgagcccaccctgcctttacttggcgattcttttttggtctatgaacacgcaactcaccaatttcctaccagacttgcgaactttccataatgtcaccgtaccttgcggactaactaattcatcccatattgacttacagagggttacgaaaccgtcctaactgcgcaccgaagcacacatttgattacccgtggaccccagtaccataccgattgtgcagcaagataaccgtttgatctactgcacgtaccggaagctcacatatagtcttatgaccggcggcaagaacctcgcan

SEQ ID NO: 31034 - DNA, 321 bp, Glycine max
agcttgtacgccaaatcgtgactggccatatcccttgaccgatggagagattgcacttccttgccctctgatgcattaccctagtcgaggggaatttggcgagcgaagacaaatactcagaagctttgcaatgcatgctacacaagagacgatggaaccctgggtcatctaggattgtctgagagcattcaaaggatcttattcgagactacccgatcaagtactgtgagagggggaaatgaatagaggagacaatttccattaccctagtgtagttgtatacaggcagacgacgaatgacctacagctcctgatcacgat

SEQ ID NO: 31035 - DNA, 407 bp, Glycine max
gtgagaatgtgtctgaagaagcacacgatgttagacgacctttacatctctggaatcccaatgcggactctttcagccactttccactattgcatagttcctacctccaatatcaacatcatgactgctttatcttatgcttacagcaaattgcatctcaccgagaccattctccaaccgagaatacccatgtgtatgagattcctccagccacaatccatccagagatctggccctccacactgtgcattaagagtgacattatgaactgattgccgacttccaacgggatgtgtccaacgagcctacctgatgggtgattacataacctatgaattaaatatgtctaggctgactacctatttggctccctgtatgacattgtgatggtgtagttgctaacaaat

SEQ ID NO: 31036 - DNA, 269 bp, Glycine max
gcgctctggacaacaccgaaaacacccggatatgcagtggtcaaacgaaaaacaagaaaagcaccactgcagacgggtgcaaactttacacattcaaatgtgctaccaatgcaagaccgattggacgaatcataaacatttattgaccgatggccgactcttataacacacacttttaaagtcatcataagcgccatcccgaacgggccgacacagtaaaaggctccacactgaccgactagcagactaatacgctacgataccatggg

SEQ ID NO: 31037 - DNA, 377 bp, Glycine max
agctttttgaactaggatgtgttagatcacccaataacgcggccacatacacagcttctagctattcgtaggacatttcaaggcccgtatccacatgtcaatgttacacggtgatgtttttaccataaaatcaaacctcattgctaactattataaatatggcgagagtaacttaaaacatttattgttgcctcatcttaataccaatctactctcgattttgctatatacgtttggatgatgattgtttcctagagattttgatgtctattcttatagattttaaattcctcatatcatattgagaattggccttggcatcgtgtgatgtgccccatgcagcagcaacttctgttttactcatacttcttactata

SEQ ID NO: 31038 - DNA, 601 bp, Glycine max
  unsure at all n locations
cctcccgcatctccgnctcgctccccnnctaanntntccctctctcntctatactctcgctccttcctccgcanncntnanntaaannnnnntananncagcnaccnacgggacantttggaaacccttggtagatttgcagtacgactagccanancngngacactatannaaactcaagcttggccactttcatccagaactggtaggctcanatcttcttctgtctacctcgacgacgagaaccagatcctcctcgtcatcggagaccacacaagcatgcaagtaaaaggagaatatattctaacaatagagcacgtacatcgatgcacaactctacactatcacanattatgataggacgataatgccggaagagtctctgcaatgagttatccttgcaaacgcatacgtacacaagaattccacaaagttgacaccttaggtgtataacactcaacactgagtacaagaggacctactcgttaccatgtggggcctcctatgttatggaaactcggtgagcaccacccagagggcgtgccatacacttacaggtaaccttacccagcctgcccggaatgtctgtcctaggaacgcn

SEQ ID NO: 31039 - DNA, 384 bp, Glycine max
  unsure at all n locations
agcttgtccacaaaaataggttnttgaagtttgtcatttcaatttctcactaagtaaaatggatcattttcaaggtccaacgccttaaaatgatcacttcttaagtaaaaaagaatcacttgataagaaagaactacgtaggtctgattttctcatcccaattgaggaatacgtaggagcaaagggaaacacccttgtcgaccacaaaaagagaaaaaatataaaaagggtataaaggatataaagacataaaaagggaacataaaaaatcaaagtcacgtttgcacattcgattaaaggttgccgtcccttgggacggacgtgtggagtgctaataccttccccgtgcgtaaatacaactcccgaacctttcacttaaaagtt

SEQ ID NO: 31040 - DNA, 366 bp, Glycine max
tgccacccagctcgcccaggcgagcagggttgcttcctccagaagcaacagccttctggaggaatcttccggagggcccaagtgggcctggttgctatttgcacccccatttttactaagtacaccccctgcctttttttggtgattcttttttggtaaagttacggaaacttacgaatttcgtaacgatacttgttttctttccataatgttacggaaccttgcggattacataatcatcccctttttgacttacggaatgttacgaaacctcactaattgtgcaacgatgcttccatttgatttccggtgtgtcacggaaccttacggattgtgcatcaatattttcttttgttttccggcatg

SEQ ID NO: 31041 - DNA, 381 bp, Glycine max
agctttgtgtggagcttcaatggtgaatgagggaggaagaaaagcaacgtgagggagagggagagagagcttctgaaaatgtggggctgagtgaggagagagagggttgctttttggtttaaataaaagggttttctctttttctattattttatttaagcaatgccacatgtctccatttgagtggagcaagaagggcccactttctctttttgactgtgacccatattcagtcacaaaagtgagaaaaatctgacctttgaaacgctaaaatcctgcctcggtttgcgtgccgtttctttgattccagtttctcgcgtttctctgcgtccgccggggccagttttcgaaagcaagcaatatatatatcaaaacgctcag

SEQ ID NO: 31042 - DNA, 439 bp, Glycine max
tataaaactcagctttacatggatgtccgattcggtgacataatatatcgagacgctcgaaatcgaacaacggaagctctcgataaattcgaatggtcataacatttcactcggatgtccgattcggggacataatatatcgagacactcgaaattgaacaacggaagctctcatgatattcgaatgctcataacatttcacacggatgtccgattcggggacataacttatctagacgctcgaaattgaacaacggaagctctcgagaaattcgaatggtcataagatttcacacgaatgttcgattcggggacataatatatcgatacgctcgaaattgaacaaccgaagctctctagaaattcgaatggtcataacatttcactcggatgttcgaatcggggacataatatatcgagacgctcgaaattgaacaac

SEQ ID NO: 31043 - DNA, 159 bp, Glycine max
ataaacatatatagctcatatatatattcttctcgcatgaggaacactggctctaatcctcacttggctatcttgaagatcggccccttttgccatgtctgattgctctatcaccataactgcctgctatgaagcccatagtcttcaaatggactcgaa

SEQ ID NO: 31044 - DNA, 325 bp, Glycine max
gatgatactgctaactctataattataaatcatgcttttgtattctaatatatttcacttcctgtatgctgcgcaaaatctcattcttactggtgtcaagtttcagaccttgcatgatgatgggactgtggaactatgggatatatccggtagctttgtgttttcagaaaatgatgttgggaaaatcatggcagcaacttctgttagtaactgcaagagctcacaatgcagtggttgtacaaagcttgactactcagctgactaatgagcacctttccaattttcaagtacctacttcctctgtctaatcttccctttcttttaa

SEQ ID NO: 31045 - DNA, 435 bp, Glycine max
  unsure at all n locations
agctcacattttnctttattctgnnnctttnggagctgncaaatgattggttgtaatccttttatgtagttatgtactatgcataatgccaaaggacaagtcatactattcagttttcaaaaggaataaccttaaacgtgcatcctatattgcattgnggtggggtggttaagtaggaaagagaaacataataaatacaaaaatatgataaagggatataatgaaataaaaaatgttaatacacattnttatgtatttttattattgattaaaatttattanaacgttagagattctatntattgttaaatgtatntaactcataattctattattnttaanaagttttaattaacaataaagaatattttaaaataatatatggatctttnttcacaataacaacaatgaaattcanacttaanatttcatgct

SEQ ID NO: 31046 - DNA, 414 bp, Glycine max
  unsure at all n locations
ttgaaaatataatatcttgatttctaaaatacccattgtctctccctctttgtaaacatcaaaaaggccaaagtgcgcaaaacatgaataatttaatcatacacaaagcataatttgtaaaacaaacatataagattctgatacatacataaagaaaaacatgaataaaaccaaattgaaatgcaaaccacttagtcatataacacanaccataaatatcatgttcagtcatactaagcaaatattaaaagaaatactaagttttcaaatgtcataataatatagccaaatacacggctagaaaacaaaatactaataataatagtaatgtctaaactgatagtggtggtggagggaaattaatgtagtcacgaatgatggtgaaatcttcttcaacctttgtgatccttgagt

SEQ ID NO: 31047 - DNA, 262 bp, Glycine max
  unsure at all n locations
ttacagcagatactagtagtgacccactaacctacaattaacatttctgaatgtccttaacctangggattagaactaacttaatggctgaatgatactgaaattgctggcgaccaaatgtcacccccttcagcaacctgtaggcaccatttggtctccctaaatgctgatgcctacgttgccaattgagcccttaatacaacttgaactaatgcccttgtagttgattaacccataacatacttttggtcagccaacttta

SEQ ID NO: 31048 - DNA, 159 bp, Glycine max
  unsure at all n locations
ctgcaagctgatctgcctcttgtaaaagtatgacctttgaattctcggagcttcgttgtcaatttcagcgtctgatatgtgaacncctgaatcaacatccgtgtgaaagtatgaccattgaattctcaaagcttcttggtcaattccacatctcacata

SEQ ID NO: 31049 - DNA, 377 bp, Glycine max
  unsure at all n locations
tcctcggtgccatttcctacgaaggcaaacattggaaagtagttttaccaagaaatgctactcttaaaacaaaaatggcatacaacctnctncaataaacacaaacatcgatgtaaatttaaaagcaacttatgcacatacttttttaccaacggtcacttgcaccagacatcttataactaaaaaaaatgcacccatgtacaatcaaggcacctttcgtacctagattattcatatgtacttgccaagtgtatntgctacctacatcacatgcactttctttgctaaaatacatacatgcatactcaaagcatttggggtaccaaaaatgcacatgtgcacattccgtatttctaatacttatgcatatacaaact

SEQ ID NO: 31050 - DNA, 460 bp, Glycine max
  unsure at all n locations
agctttgtgttgatttctgattttcatgcaaaatctanattagtagatgaaaaaccagtctagaagggtaatctaatttcagatcatgtggtaaaatctgccataacaactntggggacaggagtcaatcccctttcgaatactatatcacaaattaaagttgctcaagtaaaaaatgatacatataccaagccagtagttagctctttgagaaaaccatccatttctaccaatttaccttctgacccaaaggttcattcttatattccttatgtatctaccatagttagttggaactaganaaagagcaaattgtcaccagcaatgactactattgatcatgatctaacataatatatagtagcacagtgtanaacaccaaagaggatatcatgcttgccaccgaggactacatacatgactcacnaacatttannaattcagaaacattgacaataat

SEQ ID NO: 31051 - DNA, 418 bp, Glycine max
aatcttatccaatatatgatatgtgccatgatacgaaccatattactatagtgagatggtagtgactacgatgatagtgacaatggtggtgatagttacactgacaataatggtgatgacactagtagcgatagttacagtaacaataatggtggtgacattagtagtgatgatggctgcgacaacgacaatggtaatgagtgatagcagcgataatggtggtgtttcttatggcgacaatggtggtggtgatgatggtggtaatgatggtggtgacaatagtagtaatggtgatggttaggatggtgacaatgatgacgacaatgatagtgatgagtggtgagacactggtggtgactatgatggatatgatggtggagacaattgacgagtgacaatgatgtgatggggttattat

SEQ ID NO: 31052 - DNA, 344 bp, Glycine max
gttgcctattgctgtctcggtaaaagcactctcatgtattcgttaaccgttgaatcttctcgaaagtggtttggaggttcataagacagatgtgcacgatctgaccattgcgatttgcgatatgacttgcggtgtgtgagacacacttgagtgtttcaagtcttattttcatgtagccttgaaaaacagccattcctttctacttctttcttgccaaacccttccccaacatcccaagcttcttctttaccacccacaaccaccagtagccaccacaaactgccatagttctccattgaaacctcacaccgagaggaacccttcaatcggagtggatcttctaa

SEQ ID NO: 31053 - DNA, 249 bp, Glycine max
  unsure at all n locations
tgccctaagcacaagaaataaaaacatgttacgagactggccctgactttctcgtgctactagagtactcatgctgagacagcgctttttaagccaatgattgaattacgatggtcacaatcaattatgctcacactgtcacacatatgcgattatatgttgacacaaaaaaatagcatcaattctgcacagcttgcttcctgaattatggcaagccatangagtggcaacgggcagataaataatagc

SEQ ID NO: 31054 - DNA, 439 bp, Glycine max
  unsure at all n locations
tggaacanatatattgagctcttggtccccttagagattgtgtaaatatgtctcctactttatcattagaactaacgaattcagtaataacttccttagaaagaactttctcctggacaaaatgacaatcaatctcaatatgtttaattctctcatggaatactggattaaaagctatatgtacggctgcctgattatcacagcatagcttcatttgttgagtatctccaaacttcaattcttcgaagaagttgtttaatccanatgagctcacaagtggctacagccatagctctatattcagcctctgcactagacctttgcacaacatttgcttcttactctttcatgagacaagaatttctccaacagacacacaatatgttgaagtggacgcctatcnatggtgatcctgccatctgcttgcaaatccactatt

SEQ ID NO: 31055 - DNA, 342 bp, Glycine max
  unsure at all n locations
tccgtgcgagatacatttctttatgaatacattatttctaaaatcccaacagtgagaatgtgcaaaaatgacttccacaggtggtgcccaaatttcatgagaatccaacggttaacgagtctacgatcgtaattctactaagacaagtttgggtatatgcggaaaagagagaggttttgggagaagaagaagaaagaatgaacttgcgaggagcananagcatagagacgtatcctaaatgtaaaactgacctagtatgtctctatttatagttagggtactcttagcctattatttactttattatttttttacaaacatacttctatcttactttttcat

SEQ ID NO: 31056 - DNA, 338 bp, Glycine max
taacaagatgagttgccaacagagagagtcaatgaataattacctatcgaaataaatttccttctttcctttaaagacgatgatttgtcttcgcacaccacaagatgcttttgctttcaaagagaatctccataagccttaatagtcactctcaaggggccgctgaaaattgctaattagatagcattatttatcaaaatacatgtaattaactatgagttacataaatttctagtcatttaatttttttcaacattaatttctctttctttatgatcccttggccatcccaattttttaagggaggattgctttccacacctggggaaaaaaaaagg

SEQ ID NO: 31057 - DNA, 369 bp, Glycine max
  unsure at all n locations
agctttaagataagtgtaagaganaagatagcagcctcaatgtnggtgaaactggagtccttgcatatgacagagtcccttgcaaatcggctatgcttaaagcaacaactgtacaccttcaagatgacagaatcaagaatagtcactgagcaatcggccgatttcaattagatccttgatgatttggaaaatatggaagtaaagctggaagatgaggataaagctcttttgcttttgaattccttaccaaaatcctttgaacatttcaaggattcaattatctatggcaaagatcaagacattaccctanaagaagtccatgcctcaataaggaccaaggagatgcaaaaacagcaagactcccaatct

SEQ ID NO: 31058 - DNA, 352 bp, Glycine max
  unsure at all n locations
tgcacaacaagtaaatctattnttgtacaaaatgaagtaactaactgtcacaacctacccttcggcgggagggagacgcatgactcgcgggtgcgtgttccaagaaagatatacgcgcggagtcgccaccaacgttcatttaaggaaaatgtcggaaaaaccggaaaagacgtgatctacaaactctaagtgaaaggttcgggagttgtatttacgcacggtgaaggtattagcaccccacgcatccgtcacaagagacggtaacctctaatcaaatgtgcaaatatgacttcaattatatttatttccctttctacgttcttatgtctgtttattccttttatgtattatc

SEQ ID NO: 31059 - DNA, 486 bp, Glycine max
  unsure at all n locations
gacgagatgaacattgtggaccctttgatcacgcgacacatanatactcagccttgactaacagagtcgncncntccttgttttctntgaacttgttctatatctcacctgtactccctctattgccaccgtacttggaacacggctatgttgcttactacgatgtggagcttgatcctcaatatcttccaatctatccccaggatcgggtgttaacactactcatacccattccaaatccctgaaatgtcctgaacctgatgcaacaaaaacacactccccatgaatcgaaacccaacgatcactgccaccgtgtacatccgccaattaaatgttcttcgtgctgacctttaactgcaatcccacatcacaatgtcaacctgacaattgtgatcttggctacaaatcatgagccgtcgcctgttcaatagaacgaccttcgaacctgacatctatcgagcctatctgaaaactctgcgctgcact

SEQ ID NO: 31060 - DNA, 294 bp, Glycine max
cttcatcaatggagtcctttgcttcttgaagatcaatgacagtggaatgcaaaaggaggaaaggtgattggagatgccacttcaaggagaagagagtcaagaacaagttcaccaccatatgaagccatggataagagcttgaaagttggagaaaatgagtggagggagagggagagaatgggcacgaaatttatgcctcgaatgaagtctaaaatttgaagtgtaatttctcaaatgatcaaagtagaaataatgcacacaaaaagcctctatttatagcctaagtgtcacatg

SEQ ID NO: 31061 - DNA, 490 bp, Glycine max
  unsure at all n locations
tatgaaccctgttganacccttgttgaaaccattggatancctctcnanatnggcaccnttggtggggatcttggtgccgattattgtagaggctttatgacctatcttaagatttgacactgacgatttcgaattttactttcctgaacatagcgttgtacatgctgtttcggcaccaagacccactgggataagtcgctcatgggacacgggatctaagtccttttgttaggtctgcctgagttttactgcctgactcttttctttcaagatattctcggtcttaatctagtcaaagtgcctgttaccacatgaactgacccttgagtacacccattgttatgatatccccacttgagctatatacctggcacacacacctatatttcttcatctccatggagaacgagccactgctacgacatcataatggttagatagactcccatatcggttcaactggcatatgcattttctagccactcttcg

SEQ ID NO: 31062 - DNA, 237 bp, Glycine max
  unsure at all n locations
tgctatttgcacccccatttttactaagtacacccccctctgcttgtttttggtgattcttttttcgtaaagttacggaaacttacgaatttcgtaacgatacttgttttctttccgtaatgttacggaaccttgcggattacataatcatcccctttttgacttacggaatgttacggaacctcacttaattatgcaacgaatgcttcattngatttccggtgtgtcacggaaact

SEQ ID NO: 31063 - DNA, 128 bp, Glycine max
tgagcttatctacacacactcttcatataactaagctcacctccttgagaagcgtgcttgagaagaatcctgaagaagcttgagcttatctacacacactccctatcttagctaagctcaccccatgc

SEQ ID NO: 31064 - DNA, 426 bp, Glycine max
  unsure at all n locations
agcnnagantttcaantttatntacngaancagnngaggaancttgggcattatctttccaagtgatatattctttctttcctttcttatctttgaaaggtttcttgtcagaattttccatttttcttctaaagataggacaatcaactctcaggtgcctaggttgatcgcattcatagcattntggaactgaggaggaatcttctcccttcttctttggattgaggttcaatctcattcgatttcctttgttcctcagaannatatttaatccttttacaaagagactganatcatcatcttcttctaaattatttttttcattcaagtcttctttgccactttcttcatgaatagaagatgaggttntgaatganattcctttcttctttcnttcattctcttcatgttgggtgagttcataag

SEQ ID NO: 31065 - DNA, 432 bp, Glycine max
  unsure at all n locations
tgcatgatttacatctccctctntctcaagcaaattcttcttgatatcatcaaaatcttcatgatttattaaagaatttgaaaataaagattttgaattattttgtgatgaacatggtattgaacataatttttctgcaccaagaactcctcaacaaaatggagttgttgagaggaaaaataggtcattggaagaaattgcaagaactttattaaatgatacttctcttncaagtatttttgggctgaagctgtcaatactgcatgttacatcatgaatagagccttgataagacctattntaaagaanaccccatatgagttatttaacggtagaaaacctaatatttctcatctacatgtttttgggtgcaaagtgcttgtacttaataatggtaaagataatctangaaaattcgatgcanaatctgat

SEQ ID NO: 31066 - DNA, 418 bp, Glycine max
  unsure at all n locations
agccttnctgataccagttaccacttcacgcanagaanacgaaaggaagaagaacgcgacttangtgaggtcaggggtgaggaaggagaccgaaaccacttcacgcaagcaaaaagaaaaaaaatggtgagggatcacgaggaagaagaaggccaacgcgggagggagggaaggagagagatgaaccatttatttttaaaataaaaaaaattaagccaggtgtacaaaggtatttttgcgtcaactgttgagtgcaccaacaaaaatgttgggtgcacctagcagcactcgccagtgtacaaacatgagaccaacatanaggatatccagttcacgagtncaacatccaagttctctttgttggttccgagtgttatgccctagtgcccaaaaaactntccaatatctcatatactcc

SEQ ID NO: 31067 - DNA, 371 bp, Glycine max
  unsure at all n locations
catttatctcatcccattcaacctaaacatttcataaaagtgaacatcataatcaaagcttanatattcaaactaggaagaaaaattattcaattcaagattaagaaaattctctaggataaaaatcattntatgaagggacatatcanagcaaaacatgagtgcatgtaccacaaagttgaaagaattgacaccatagatttagttatccatattccacaataagttgcctggttcanaaagcacttcaagacacaattagccaaagaaatttaatattntgttgcaagaataattttttaaataaaagtagctacagtacaagtttatgaacatctatcacaacttataccaagaaattcttgataatg

SEQ ID NO: 31068 - DNA, 429 bp, Glycine max
  unsure at all n locations
agcttaaggtttgngattctattatanancacttcatcacttgcttggtgaagatcatcaagccggtgccatgcaatttcctgcaggttacacaatttctcagtattttgataacctggcagtggcaatcacatatagagtaatttaccatgatctttaacataagaacaaagaaaagcaatcatgttgaaagttctcagccacaacacactcaactggaggtgcaaggaaaaaacagtaaagaccanatatagatccaaaattcagagtaaaaaagattcaaattagtggaaactctggttttcctttagtttctctgtnttttgaaattgacttatcatcccaggattgtacttttacattctactctaaagaagatatcctagactaaactactatatangagataattaaagataactcttagta

SEQ ID NO: 31069 - DNA, 413 bp, Glycine max
  unsure at all n locations
tgtcaaagaatccaacctctcatggtagaagcaaacacatagaaacaagatttcactatcttagggatcaagtgaacaaagagaaactgaaagtggagtactgctacacatttgatcaacttgctgatattttaaccaaacccctcaaaggggagaggtttaaaaatgtaaggggcataattggcttgatgaacttangagatcagaataagggagggtgtgagagtttaattnttgtttgtgtggggtagaattgtttgtgctttgaatataagagagagtaacagaatttttaaattcttgtataagtactagcctaagtgtgagnggttatttactctgttttgcttgtataaanggcatacatacatcttaataaagaggatttattcattctatcattttcagtctct

SEQ ID NO: 31070 - DNA, 402 bp, Glycine max
  unsure at all n locations
agctntgagttanaatttgactcaccatanaccttgacccagcgtgagaatgccaatccttaccctcggaagcaaaaaaagaatagaggggaaatttccaatcacagaanaagagaaggaaaatttccaatgaaagcaaaaaagacatgaaggaaaattccccaatcatagagtgngagaaagcaaanaaaggataagaaggaaaattccccaatcaaagagtgggagaaagcaaatagatgagaaaggaanattcccaatcanagaatgggagaaagtaaaaaaggaagaagaagaatgacagaaagctcctgatcaaggatcgaaagaaaccagaagaaatgtgcagagaggtctttggaccagacaatatctgaacagtacagaattgtcaccaaatga

SEQ ID NO: 31071 - DNA, 357 bp, Glycine max
  unsure at all n locations
tgtaaatatttattggtataatttgcctgttccattaggctcttaatgtctttagaggttacttcctcgttaacatcttttgtcttgaatggaattgccatgacaggtttattggtactgtctttgatatttggtagttgatattgtgttgcgggaagtaattccgattggattaactcaccatccttcacttgccaatttgctatgacattttgtgttgaatcacctatgatgtcttgtttccaagggtaatctatatcctttctgatggcataagcatgaaaccaatcaaagaanaagacattaattttgactcttttcgacaaatcgtagaacttgtcttggatttgttctctg

SEQ ID NO: 31072 - DNA, 444 bp, Glycine max
  unsure at all n locations
cctacttgactaggcgacaatggtgaaacagttctcacagactcagactcgacagggaatgtgaaagacaatgtggcattccagagcagtccattattactgtatgatcatgacttcagcccttacataatctgagctcatggtttgctcttgtcactgatgacggagaagtcaccggaccctacccttactgtgtcatgcctttgattataggattgatgagatacagcagggcctgggtaatcacgtccgattcatgtgctcgagctggcacagaatcaagatatcagaggtaggctgccaccgccattgctgcattgtaacctttattcagttgggctactgccaagacatgtgcccttatcaacattagaacgctgcatattcgagattgttctctctgcacccgtcgaatctgttgacactgagaagactgtggataan

SEQ ID NO: 31073 - DNA, 444 bp, Glycine max
  unsure at all n locations
aatttgttatcaataccttaaactaataacttatgacattacaacatgcaaagttggaacgttccaactcatggcaaccgtaaaagagcaaaaagcaactcaaagatgcgttgattgtcaacagaattaatggcaaaagcaaatttgagtttggtagtgactccttgctttggcacaaattttatcaggatagtccttccaagaaagatatgaatcagggcaatcttatggtctttttgcatgattcatctgtttcgcataatgaacatcaccgtatatttaatgtatatggagaaatcaaagaggtgagtttggcttaccaattgtttgttgcacaaagattgatctgaataatttatgtgtggntgactaactgtcttgagtttctgttcatcaatttctttggtacactttnntgtgtaatctttgctggaggatgacaca

SEQ ID NO: 31074 - DNA, 303 bp, Glycine max
  unsure at all n locations
tgaaattgatcaacggaagctctcgagatattcanatggtcatatcttttgacaagaaggtcagattcaggcacataatatatcgagacgctcgaaattaaatagcggaagctgtcgagatattcanatgctcattacttttcactcggaggtccgagtcgagcgcataatatatcgagatgctcgaaattgaacaacggaagctctcgagaaattcacatggtcataactgttgacacggaggtcagcttcacgcgcataatatattgagacgctcgatattgaacaacagaagctctcgag

SEQ ID NO: 31075 - DNA, 517 bp, Glycine max
  unsure at all n locations
tgatgttcattgcatgcnggcgaatcactcgacccgggatctgtgagtcgactgaggcatgcaagcttancttttagttctctgcanaggnanccaagccgnagagaaaaagaagagagaatggaggcacaacnnnactggcgacgagcgagatacagcagcngacgaacacagnactnctaaaatcccgacagggagaatgtgcgataatgactttcaaaggaggtgcccaagtttcacgaaaatccaacggctcacgagtctacgagcgtaattctactaagacaagtgagcgtatatgcggaacagagagaggctctgtgagaagatgaacagagattgaactgggaggagcaaagagcatacagacgtatcctaaagggaaaactgagctagtatgtctctatctagtaggaggagactctgagcctattatngatgatactattactctcacagaatactcctattatactctgtcgtcaatgnagaacacagtagaacattcatgtatttg

SEQ ID NO: 31076 - DNA, 391 bp, Glycine max
  unsure at all n locations
tatgcatccaataccctgatgaggatgtcccatatgttcttaaaactggactgattcatttgcttccaaagtttcatggccttgcaagtgaagacccgcacaaacatttgaaagaatttcacattgtctgctcaaccatgaaacccccagatgtccaagaggatcacatatttctgaaggcttttcctcattcattagagggagtggcaaaagactggctgtattaccttgctccaaggtccatcacgagctgggatgaccttaagagagtattcttagaaaaaattnntcctgcttccaggaccacagccatcangaaggatatctcaggtattagacaactcagtggagagagcctgtatgagtactgggagagattaagaaactatgt

SEQ ID NO: 31077 - DNA, 363 bp, Glycine max
  unsure at all n locations
aaataagccctccatcagtgggaccttaagcttcattggataatttcttcatttggttatgatgaaaaccccatggatcaatgcatataccacaaggtcaatgagagtaaaatatgttttcttgtttcatatgtagatgatattntacttgcagtcaataatcagggtttgctaaatgaggtgaaacaatttctctctaagaattttgacatgaaggatatgggtgatgtatcttatgtcattgacattaatattcatagagataaacctcgaggtattgtaggtctatcacatgaaatctatattaacaacaatttagagagatttangatganagaatgctcaccaagtgtcgctcccatt

SEQ ID NO: 31078 - DNA, 400 bp, Glycine max
  unsure at all n locations
ggacctatgaaactcagctttacatatttntttcaggagatagttgtaaaaatatntatgcaaaaggtgataattgnccatgtattgcattgctcttagctcaacattcatccaatgaggggtattgtgagaagagtgaaaaaacgcggttttgtagattaaaacaaatgccattggagctaacgtggaaagacanagaaattaacaattgcatataaaaagggggtttctggtggtagacaatattgtaagagaatagtgttggaggaaaataccttaatttgaagtaaacatggtatccaacctgtggccaactcgatgcttttttgaggaatgtgctctcgctgctcagctgcaactgtgccttactattactaacaggtcaatttgatgatggaca

SEQ ID NO: 31079 - DNA, 380 bp, Glycine max
  unsure at all n locations
agctttgaatttactattcaatggagttgacaagaacatcttcagactgatcaacacttgcacagtggccanagatgcatgggagatcctgaaaatcactcatgaaggaacctccaaagtgaagatttccagattgcaactcttggctacaaaattcgaacatctgaagatgaaggaggaagagtgtattcatgacttccacatgaacattcttgacattgccaatgcttgcactgccttgngagagaggataacagatgaaaagctggtgagaaagatcctcagatccttgcctaagagatttgacatganagtcactgcaatagaggaggcccaagacattngcaacatgagagtagatgaactcattggttctcttc

SEQ ID NO: 31080 - DNA, 409 bp, Glycine max
  unsure at all n locations
agcttatgagttatctaatcaagattcttgattgctcttaaagttgtaacatgtggtctgactagtctccactttctaggtaaacttcgtaagattttatcaacatgatcataattatcataatgtatacctagagagcggagctcgttcagaatgatttggaagtttccaaacatggtttgaatatcttctccctcttccatattaaagagttcatacttatgtgtcagaaggctcaacttgttacgttntacgttagaggacccttcgtaggtaatggataaggtatcccacatttgtttggcgcttttgaagttgtgaactttggaatattcttgcgcgttagttgataagaaatatagacttatgatcatccatccatttgtccttggggatcttgttcttctga

SEQ ID NO: 31081 - DNA, 320 bp, Glycine max
  unsure at all n locations
tccttgagaggcttctttgagaagctagagtcttaactatccacacccctctaataactaaactaacctccttgaaaataaaacatggataaaataacacaacaaataaaatcaaacatcaattataattgctaataatatttcaaggtgttacagcttgtccaaagtagccttgggcatgatgttgagggaagagccattgtcgataagcactttggccactatgtggtgatggaagcttgcttgtggagcttctatggaggctggatctttgagcttcaatgaggtccttcaatggtgattntacaccatggagatgc

SEQ ID NO: 31082 - DNA, 373 bp, Glycine max
  unsure at all n locations
taagcttattcttttgacagnntattatcatgcacaacctgcaagaagtggctcataacaggccaatcataactatggagcattttcttgagcaagtagcctggcctgaagctcaacttccattggtgagacccaacgaggctactccgcctgagcccacctgtgcaggttgatccagagccaactaacccacaatctctagtggtaaatccactatcttctcttgagcgtgaagtagttcccccatctccacctctgattatcatctccgatgcatcatctgatgaagcagctgccccctctgatcaccanaaggagaaaacagctgaccttctacttcccctagtggaggaanttctgantcgtcatctgg

SEQ ID NO: 31083 - DNA, 393 bp, Glycine max
  unsure at all n locations
tgtgacattntcaattctacatataaccctgtaagttagctatctattgatcttattttgtttataggtttctaatttctatcatacgttggttacatatatttatattntattgatgttgcaggtgcacatttgggacttttcaggacagacaacccagttcttcttgaatgacaaatctagattgccaaacgattctcctggtcaacttggaaaagaggtagttggtgattgttaatagattggcacgtgtatcaattntatcacaagtagtaaagattaatatggaagttcaagtatcgaatccacgaggactttggttgtactttagtgattctaacccaattattaagcaatgagaagaagtagaagagaaaatgaattgtaagtgtg

SEQ ID NO: 31084 - DNA, 435 bp, Glycine max
  unsure at all n locations
ttagcttattactatntcatgnnactatttatgattttgttacttttctttttcatgatgaagttattatcatgtaaactgaacaactctcaacatatctataatgcattaagttattttgtagcaagattttaaccgttttggtgtgtttagtgacacaccagaacatgacattgctaatcattaaaggaaatctcttctaaattgagtaactcactctagagggtaaagtgagaaatcatagttgttgatgaanaaatcaacaatcagttaggtgcacatatatgacaaatcatggatcttgtggaatattgaannatgaattttagtanatggtctaatttatatttggttcttaatagaaatttggtntatgaagaatctttaataaaataataatttttttttattcttgacacttatntctagttccta

SEQ ID NO: 31085 - DNA, 310 bp, Glycine max
  unsure at all n locations
ttcttccgtcggtgctcctctcatggggtaccctagttgtcttatagcgagcgcgggattgtagttaatacaacccctcgttcctaccagcggaatgtttgggtatcctccacatgagaagaggaccccttcttttccttctttccatcgggggaaccaactgatngttctaccttctatcccggccaagagctggtcccaatctattctcctcttttcagtacacgagcgatggctcaggagccgacatggatgtcttgggtcttgttggaacaagtgcgaaaccaaccatacacagagggcgggtaag

SEQ ID NO: 31086 - DNA, 191 bp, Glycine max
  unsure at all n locations
ggattcattggcctcttacctgttcattttatgtgtggaaggcctatncgctatgatcaagaaggtggagagtaaaggacaggtgcctggttttgggtttgtaggaatgcccttctatcagtcatcttgtgtttgcgggtgatatctattctttgagcatccaataaggagtgtatgagtattcaacatat

SEQ ID NO: 31087 - DNA, 175 bp, Glycine max
  unsure at all n locations
ttcctttgactcgattagctaatgatgtgaactgcacgtaatatgactgaactgaaccaatttgagtgagtttaaacaactgagatctangacattcacacggtgatgggcccaattctgtctctaggcttgcgtanaacaatccatgttgtgatgattttcacgagtattattt

SEQ ID NO: 31088 - DNA, 442 bp, Glycine max
  unsure at all n locations
gcttgctgattacattctcccnctttctcaagaaaattcttaattcttcttgacatcatcaaaatcttcatgatttacaaatacaacccanaaataaaataaaataaaactggacgacaaataaaattgtttgctcttttcaagtccaagccggttcagcccaattctggatccaagcccaattgcttataattctcttgaaattaaattaaaacacaaaattagtcaagtaggtccaaatgataaaactgcataattaatttgacaattaaggttaatcagtaattaaaatggtgacagaaaggggtaagaaataggagaaaataatgacacatcaataggcaacttccccccctatggtgattagcttgagtctcaaggaagtttcanaccgagtggcatgcccccaagtacaaatatttttcctcatgaaaaactacta

SEQ ID NO: 31089 - DNA, 377 bp, Glycine max
  unsure at all n locations
agctngtacttaacttatganaaatcaagaacaaacttgttcgcacatcgttcgcgtgtatgatatccactcgacaaggtttgaagtggaggagaccttcaatcctataacgcaacgtggcggacaaaaatgggcagttaactngaatggccattattgtcaacgcggaaggtatnttgcgcttcactatccatgttcacacattattgcagcttgtggttacgtgagcatgaactactaccaatatatagatgttgtttacaccaatgagcacatcttanaagcatactccgcacagtggtggcctcttgggaatgaagcggcaattcctccttctgatgaggcatggacactaatccctgacccaactacaattc

SEQ ID NO: 31090 - DNA, 388 bp, Glycine max
  unsure at all n locations
ttacgaagctntctgggccttgcgggcttttataggagatttatcaaggggtatgcttcgatagcttccccattggtggcagcaaccacggtggagcctttccagtggaccgcggcggctcagctcgcatttgacctcttgaagaaagccttgttcgaaaccccggtacttgccttgccgaatttctagctaccatttacagtcgagaccaatgcttctggggtgggcatgggtgcaatcctctcttagcagggccacacaattgcatattttagcaagccatttttgcctaagcttcaacgatcgtccacttatgtccgagaattgttcgcagtgatggcggcggtcaagaaatggtggcaatacctcctcggtaaccggttcatca

SEQ ID NO: 31091 - DNA, 445 bp, Glycine max
  unsure at all n locations
tctaatttactacattcatgcaagacttaattggtttcctttnttaacaaattgaacattttgtaaagacaagggcttaattataattgaaaaaaagaagattgtgtttaattaattaattaccaaaggtgaaggagctgaacattatgcctaaagaatcagagagctctcggtaactcttgtacatcttcaagtccactttgcgaaggtaaggtgctccatccatgctaactttgacaaagcttgcattagggctgctgttcttctcgctctcttctccaacgctcttttgcacagccaacatgttcttccggaaggaccgcacaggtggccaacccaccacctgcgtcctacacatttcaactcatcaatatcactctatatattatgatcaattaatacgcatcatgaacatatatggcaatcatataacgaagttaaaata

SEQ ID NO: 31092 - DNA, 273 bp, Glycine max
  unsure at all n locations
ttaatttttttgctttaccttctcttccattgnntgttcttcatttttttctccatgtatctcctcacatgtcttgtgctaaatgttgttaacacgattctatagagtttccaccgattaaacttgctatagaagctagaattgattntctatggttcaaatttcttgttattgttcttgaaccatgaattgtgttgagtttaagttgctttgagttttgtcttggtattttttgtggctgaaacctaaaccataaaattcttacaaaatatt

SEQ ID NO: 31093 - DNA, 334 bp, Glycine max
  unsure at all n locations
tgatgtcattcaaaacacactatgtagacctaaatgaagactaatcattgtttatttaattggattcattatacgatataatttgttgtaacccgttactaaccaattaatattatcaactactcgtttggttaagcaaggaaattgttggtccaacaaaaatcatttacgcgtgcagcatacatcattgtcataattgacaacacataatgacatgcatgtgtattacagtttgagcgtgacaacacattggctgacttcagtacacattntgaaactagcagtcgctcgacaacacattggttgacttgactacacattagcgacaacacat

SEQ ID NO: 31094 - DNA, 520 bp, Glycine max
  unsure at all n locations
catgactatgcgatgcaatactagccanncactcgacccgngatccttnagtcacctgcngcatgcaagtttggcttcattatggagcagagaaactccacccagtaacnggggaccaccncgacaggaaagctctttaccatctcgcacccgagcctncagcttatctatctcctctgtggagctatccagggtcctggtcaactggctaatcctctcgactcgacaagatagagagtcgaacgcttctctgcttctttcgatggtgggtcggaactcgtaaccgcttgcaatgatatcaacagcccctttcaacaactctcccgcagcagctccagcgaacggctctgccatcactactcacacacactgcgaggaatgaaatgaaagctcacgaataatatgtactactcacacgacacaccaaaccgcgcgttttttcgttgacgatgactacgctatgatctctgagctcgcgtaatcanaacatagaaagacactgtattctcttcgattaccg

SEQ ID NO: 31095 - DNA, 347 bp, Glycine max
  unsure at all n locations
tatgcgcatatttccttacaaacgttctcttgcacaagacattctattaaccgaataaaatgcacccatatacaatcaaggcagcttcgttacctagattatttacacgtacttccaaggtgtatttgttacttacatcacacacatctccttggctaaattcacatacatgcatactcaaagcattntgggggaccaaaaattgcacatgtgcacatcttggtatttctaatacctatacatacacaaacctcatgatgaatcttgactatctacacaataaggtgctacatttcatgctcttttcaagtttttgctacctaaggccgcatgcaaattcaagtata

SEQ ID NO: 31096 - DNA, 302 bp, Glycine max
  unsure at all n locations
tgtctatcgcacttacaatgacaaacatcatctttagcacaaactatgagcaccaaccaagaaatgaatatagcaatgagaaaacctatagaatccacccctgtcctgtgtcctatgctgacttgctcccatatctacttgataattcaatggtagccacaacctctaccaaggttcatcaacctttatttttccgaaaatacgactcgaacgcaacgtgtgcttgtcacggagaagccccggtgtgtaccattgagcattgtanggctctgaaatgtaaggtgccaggccatattgatgct

SEQ ID NO: 31097 - DNA, 376 bp, Glycine max
  unsure at all n locations
tgcttctacatgtttttctatctattacattcgtagntagaaatatttttgttctatacacacatgacacctacacctttgcacacatgttgagatattaagccctatacccgggtctgtgtgagacatanggagtggaggttgatctatggtcatgttgggtcttcgacttgcttgataacagtgatgcctcatctagagttttcttctttttgctgatgcattgtcactggtagatcctaccgccacaatgttgttacctaagaggatgatatctctagaagccaatgagttacatgataccaccttgggagttgcactagaagggactttggatcctttcatangtcctgaatatgacacatacaactcactt

SEQ ID NO: 31098 - DNA, 428 bp, Glycine max
  unsure at all n locations
agtttataattattaatttgacggttctccacattntgtttcttgaaattggtattctttctatgggtgagaaacttgccccatttgtatggcctatattttcaagggttttgctcatttatcagcttctccaaaggcttgacctcagtttcatgcgaaaggtagaagaatggaatggagaacctttctttctcagagttgaccaccactctgtgttccacactctcatatgcatcattgctccaaacctgcacaaacaactccaatcctcanataaaaattctctccactaattacgggaataaatagttcataaactcaaagattagaatatgttntttttaaggtcatcatgacattggtgtgaagtatttatacttttgttagtgactaatctctcctgngaagctgggcagaccactattagt

SEQ ID NO: 31099 - DNA, 403 bp, Glycine max
  unsure at all n locations
tctacttatgtggcagggcaggcttccttcactttcttgtctccaacgcgagctttgaccactgttcttccttcccgcgatgcttcttttcatgtccgcctgagtgggcttatagcctaaaccatacttcccacgatttccttgggtatctatcaggctagttatgccgccgttgtttttgcctaaacccatcccgggttcataaccgttccccaacataactcgggccatcattaccgctgcatcggacagacaaggctgcccaaagagggagtccacggaggaaatgctgaccacctcanaagactggaaagcagtttctaacgattcttctgcggcttccacataaggcatggaggatgggcagcttaccaagatatcttcctcgcctgacacgatgact

SEQ ID NO: 31100 - DNA, 333 bp, Glycine max
  unsure at all n locations
ctaaaaaatcctatatttctagggtaccctacctatattatggagccctaaatacaaggcccaaaaataatgaaaccttaatctaatatttacaaaagatagtgggctcgtacttagcccatgggcccaaaatctaccctaaggctcataaaaaccctagggccttctcttgcatctctggcccaatctacttggagtttctatccaatgcccttgcggngtaagattgcatcattccctccccctagaagaggatttgacctcaaatcccgaggctcttgaactttgggctttttttctcacactatanaagaacaaaacatatgtatagtg

SEQ ID NO: 31101 - DNA, 156 bp, Glycine max
gcagctctatggtaaatgttaatgtggtgaagggaaattccggcgtgttaaggtttcagcattgacggcgacgcagagaagccgtcaacgtcgtccgagatcgtgttggaacccatcatagacttctcgggtaccatcacattgccagggtacaag

SEQ ID NO: 31102 - DNA, 322 bp, Glycine max
  unsure at all n locations
atatagggccctctgaataaacttttgcataaacacttatatgagaagaaagaanaaaaaaagcttctcattgttaaggtcatttgaaccaaaattctcaaccaacactcctatngaataaaatcaacgtatgcacttcaaattttatacaagatattcttcatgtaacttctccaaatgtagattnntaattatgagaaaaacttaattatttcatcttattttcttctataagtacttattgaaaagtttctccgaacatgacaatcattaacattaanaactgcatcctacctaaatccatntgctagcaagatcatta

SEQ ID NO: 31103 - DNA, 364 bp, Glycine max
  unsure at all n locations
taagcttacctggaagcctaggaattaatgcttttatatataccattctctcatagaatgcaaagcatggaaagagaaagactgagtagaaaagactgggaaagaggcagtagacccctcaaattgttcttccttttttgccttctcagtattcctctttaactctaggtgctacagatctctatttattgccatactaaaccaacaatatggaattaatctgttttatttctagtatcccatcaagcaccaagtgaaaaaataataccatcccaacatacagttgtacttaccacctacaccanagtaatagaacctacacattaaaaaatattaatagtttaaaggatagtattttttttct

SEQ ID NO: 31104 - DNA, 316 bp, Glycine max
ttgagccaaaatcctaactcaccataaaccttgacccatggtgatatatgtcaatccttaccctcaggagcaaaaaagaagagaaggaaaatttccaatcaaagaaaaaaaaaagagaaggacaatttgctatcaaagagaaagcaaataaaaaaaagagagaaggaaaatttccaatcaaaggataaaagaaaggaaatgaaattcccaatcaaagagtgggagatagcgaacagaaaagaaagaaaactcccaaccaaagagtgggagaaagtaaaaggaaggaaagaaagctcctgatcaaggatcgaaagaa

SEQ ID NO: 31105 - DNA, 414 bp, Glycine max
  unsure at all n locations
agcttatgaatttctatttgcaatgttatctcccaaatgtgagtagcatctctactatgataccagttatgaaaacaatgcacgaattctaaaatgcaacacttagcagaaagggtcaattgtaaagttcatatagcaattcaattctaatccatatataacgtattttatatatattcatattccccaagagtctacttttcaaatataattttattttcatcaaacgttatgtgaatcaaacaaagtaaaaaactatgtgaagtatgtcaaagttgaaaattgaaaacagcatgtgtgcacaaactntcaacaccaaataatttagaaatgactctaagagcccatactcatggaggataacctcccanaccanaatngacattaaagaanatagaaactctcaataccttg

SEQ ID NO: 31106 - DNA, 307 bp, Glycine max
  unsure at all n locations
tggaaaccaacatttaagatatgataagattgttagtttaaggtaatgattgaaattaaatttaaaaatatattcgattttatagttataaaaaatattgtaacctacatttaaatttagactattatcagattgctagtgtaagataatgattgaaatcaaatttaacaatatattacatttggtagttataaaaaatattgaaaccaaaatttaagatttanaatatatctattaattcatatgttctaattnttttacgagtatgtttttagagnaaaaaattcatttaatttatttacaaaat

SEQ ID NO: 31107 - DNA, 167 bp, Glycine max
actgctccatattactgataatcatgggacccataccccaccaaggtatcaacctcattctccgaaatacactcaacgcacgtgtgcttgcttgacaaccccgggcgttcattgacattgaaggcctaagcgtaagtcaggtcaattgtgcggctgctgaattcaga

SEQ ID NO: 31108 - DNA, 296 bp, Glycine max
  unsure at all n locations
cttatccggatgcagaatatattccgaaaagactatctggatgtaagaattacctttaaaagttttccaatataatttacattcaaatatggaagaagtaatgggagttgaatttcccatttgaatgcgatggctggaaggcttcctttactgggctgcaagtttgcaccgaaggaaccattgcttactgcacctctaaattactacctacacgccacatcattttaaaacaattaaaattttcnaaagtnaccccgacgtgtccttcgcaccccattccccgtcccatggatgct

SEQ ID NO: 31109 - DNA, 462 bp, Glycine max
  unsure at all n locations
agcccanncgttaggccttaattttgggaacaatcncgngnattggcaaagaagacatcatatgccaagggaacaatttcctcctatcactggaggtatatacctaggttaagagcgaggttgattcatatttctaaaaatttgagacaaaagttgacctaatacgcttctacaatcttgtcaagataagttgcatcgaggatgatgaagtcgtccctatatacttgtaaggtctcaataactatatatacccccgaaagaaaactacttctttgacaaagacggtgttgcactattagaaattacactttcaacatcggttatttagggcattctacatcggctctaanaccgatgttgaaagtgatgatgttgaatgtatcatcgttaacatcggtttttaaaaaccgatgttaacatanatatgataacatcggttttctaaataatcgatgtaaacac

SEQ ID NO: 31110 - DNA, 384 bp, Glycine max
  unsure at all n locations
ctaagcttaagctgctcaattgctccaggttgctgcatggaagggcaaaggtctgtatggtggtcagcagaagagtacaaaccacanactcttgcgacaggtacagatttcggattcaaagctagctgggataccaagttaaccaatgcatccaagttgccttcaagcttcttagtctcagatgatgcagntgagtttgtagctacctcatgcactcctctaatgactatagcatcatttcttgcgctaaactgctgngagttggaagccatcttctcaattaaatttctggcttcagtaggagtcatgtctncaagggctccaccacttgcagcatctatcatacttctctccatattactgagtccttcataaaaatattgg

SEQ ID NO: 31111 - DNA, 167 bp, Glycine max
  unsure at all n locations
agctangcacttaggatggaatgatattngnagctaatgaacaactttcttaactatttgtccttcagaatttactgtttctttntgctaatatgtaaatataaattgtataaggctatggtgtaaaaacatggtctaccagctcaatatctatggtttatgcttct

SEQ ID NO: 31112 - DNA, 403 bp, Glycine max
  unsure at all n locations
ccttgggcaatccttaccatacaagacaattttgtggtgttgagttagaccctaaacccgaaatctaagatggtattagagcctatcctagatacattgttggggcaccaacattgccacgctccaggcccatagccctaggcattagggggtgtgttggacagcttccttaattgcagtcactgctaacctgctntaattgcagcagcatatgagagttggttgccaatgtctcagaanaggctacctatgaagggactgaccagaacggctgagtgaagcgtcgtagtgtgcaatcaatgagtctgaaacatcaactcttagggggttgagatcccacattaactagagataaggccttagtattgcttataaagtttgggcaattctcaccatacaattc

SEQ ID NO: 31113 - DNA, 281 bp, Glycine max
  unsure at all n locations
tatcatctccctcttcatcatttggggcgctacttgagctgccagatccctccatctttgggtgtattctttgaaagattcatgctccatcttgcacatgttttgcagctggattctattcggagccatatcagaattgtactgatactgcctaatgaaggcaaccattangtcctttccgagaattgactcatgaaggttccagattagtataccagctgacggtttccccagaaagactgtcctggaagaagtacatnncacaattttcatttttcgag

SEQ ID NO: 31114 - DNA, 251 bp, Glycine max
ctgatggctatgagaagaaatcacatgtttgtcatcatcaaaaagggggagaatgtgaatgtatgtatacatgattttgatgatgtcaaaagaagaatcaaacaaggctcattttgcttcaagattaataccagattgtttcaacaaacaaagccttgattcaagaattcttcaagatcaagccttgcttcacaatgaaaggtttcaagtcattcaaggcacatgtaatcgattaccaatacatgtaatcg

SEQ ID NO: 31115 - DNA, 257 bp, Glycine max
  unsure at all n locations
tggatccatagtctccacgccacatctgtaaatgaaggantccaccctagccaatgagattgcgaccatcaaggctgatcaaaagcaagcacaataatgctatgctgagagccttgaagtaacaccctatccttccactagggagctggccaagcctcaccctacagcgagtgaaggtactcaagtcatgaacaaagggcttacaatccgagccttcattgtttaccaaacaagcctggacgatgaatttgatatag

SEQ ID NO: 31116 - DNA, 386 bp, Glycine max
  unsure at all n locations
accataagagccttagatattngttngatcaaaaagagcttaacatgaggcagaggagatggttagagttcctttaagattacgattttgagcttagctatcatccaggtaaagccaatgtagtagctgatgccttaagtagaanatcccttcaaatgtctgctttgatggttagagacttggatctcttanagcagtttagagacatgagtttggcatgtgagatcacctctaatagcattaagttgggtatgttgagagtcaccagcgaactcttgagcgagattcgcgagggtcagaagtctgacccattcttgtcaactcagttagagtccatagtcgcanggagagagagtatttttagagtggctactgatggagtcttg

SEQ ID NO: 31117 - DNA, 344 bp, Glycine max
  unsure at all n locations
tgtccatcaaacaactaggaacagtatggagtctaatcaatcaattcatatttcattnttgcttatccactttggacttttctttntgtggccttttagagggaaatgcagaaaggattttcctgtgcactagtgaagaaagaagcatattctcaactcaactacccaacaaaagggataagagactgtccgttgagacttgagaaggttctttctattgcattnttcctaccctgaattnttctatgattaccacgttacctttgcctctttgaagagcccaagcctggagagggaaaatgtcatttaacttaacccatgccttacatgatangtcacaaaat

SEQ ID NO: 31118 - DNA, 452 bp, Glycine max
  unsure at all n locations
ctttctatttaatatagngcngctactggccttaggtgaggtaatttattgaaaacacaggtctatcaaatntatgtttaattggatgatatatatatatatatatatatatatatatatatatacatatatatatatacatatatatatatatatatatacatatatctatatatatatatatacacacacacacacacaacctttcattttcacatatatacacccacagacactctctctcgcagacatatatctcttctgtctctgacacagtgtctctctcaaacaatacacacttctctcgcgagcatccttgagcaactcacccggcgcatggagcgcatgaacaaactaatatacgcactgcacacacattatcatcccaccgtgataccccgccactaccttgtgagggatcttctctcactcaacagacactgaatacaccg

SEQ ID NO: 31119 - DNA, 389 bp, Glycine max
  unsure at all n locations
tgctgatggtggtgttgaactttntacttttgtttatcatagtaataatatgggggatggggcacttgcatagattatcgatttgatatgagttattatctacaaaagagagttctctttagtcttggggttgtggtggggacattgctttgcaatatgcatattcgcagctgtggttgtgtaatagtaatagcattttttaaagcatctttaatagcatttttgtgtaatagtaatagtttagtttttaaaataaagtaataatccttagaaaacattntctattatcgtaataaacttttggtagtttatttaaaattaaatntatcattntttaccatgatattattacatcgatgtttataaagaccacattatgtatgaatgga

SEQ ID NO: 31120 - DNA, 406 bp, Glycine max
  unsure at all n locations
nttgttttcaatgacgagcgtctcgaaatcctacgggacactattggacatccgagtgaaaagttattgtcgtttgaatttgtttagagcttatgttttcaattacgagcgttttgatatcccacgggacacaatcggaaatccgagttaaaagttattgtcgttagaattttctcatagcttccgttttcaattacgagcgtctcgatatcctacgggacacaatcgaacatccgagtcaaaagttattgtcgtttgaatttgctcagagcttcagttttcaattacgagcgtctggatatattacaagactcaatcagacatccgagttaaaagttattgtcgttngactnttcatagagcttctgttntcaattagagcgtcttcatatattacgagactata

SEQ ID NO: 31121 - DNA, 243 bp, Glycine max
  unsure at all n locations
tgcattcggaattgcgaaagccatgctcnctcattangattcgttcctgccatctcaaataagcaaatcaaacataataagacaattatagtttctgtttgaatacctcacccactcaagtgtatcacacaattatggcttttctctaatgaaacactcttgccttttaccactctaattccccttgagttcttaagcaattcaagagattatgtgccacaacaaagaacaattcaccaaaat

SEQ ID NO: 31122 - DNA, 399 bp, Glycine max
  unsure at all n locations
ttatcattttactanattcaaattgncataacatttcactcagatgtctgattcggagacataatatatcgatatgctagaaattgaacaacggatgccctcgggaaatttgaatggtcataacgtttcacaccgatgtccgattcggggacataatatatcgagatgctcgaaattgaacagcggaagctgtccagaaattcgaatggtcctaacttttcacacagaagaccgattcggggacataatatatcgagacgctcgaaattgaacaacggaagctctcgacaaagtcgaatggtcataacttttcacacgatgtccgattcgcagacataactcatctaaacgctccaaattgaacaacggaagcaatcgacaaatttgaatggaataaca

SEQ ID NO: 31123 - DNA, 400 bp, Glycine max
tgagatctttagctcattctaaggcttatgagttattttcgagatattgagtattctcttgatgtatatggaggagaacacaagctagttatttatagagaaaataattataatcgtctttaatcaattaaatctacaaagtaattgattaattcaacgaagtaatcaattagattatctttttaatcgattaaagtattcttaccaacatctggacataactcaagaacaatgtaattgattaaatactccaagtaatcgattaaagtgttcttattcacttctgaacacctaagcgagagagacgtaatcgattaaatcacttggtaatcgattaaagtagagactcctgataaatcagccactgtctcaaacaatgggtaatcaattacgagatatc

SEQ ID NO: 31124 - DNA, 525 bp, Glycine max
  unsure at all n locations
cgattgtatgtanntcaatcgcancaccacggacccgggancctctaagncaccagcggcatgcagcnncgangtangcattagttgtaggagaacggagggaggngaagcnaannnngggagcgcacaancaggaacnggccangncannagnnnggaaaccatangcgggacgaaagactaaagcngaaaaaacacttanggcngacacgacgaagnccatggagaagctaagaaacattctgctaactctgaaggaacacaatgtcaatagttatacgaccattaaacagatatacaatgcacgaagtgcatttcgttcgttcataagaggaagcgatcttganatgcaacatctgatgaagcttcttgaacgtgatcagtatattcattggcacagaatanaggatggagacgtggttcgtgatatcttttggtgtcaccctgatgcagtgaatgtagtcaacgcatggtattcggtattttgatagacaacacctacnaaacagacctgtacagactccg

SEQ ID NO: 31125 - DNA, 306 bp, Glycine max
  unsure at all n locations
ntgaccattcgaatttcgagagtgcttccgttgttcaagttcgagcgtgtcgatattttatgtccacgaatcagacatccgagtgaaatgttatgaccattcgaatntgtcgagagcttccgttgttcaatttcgagcgtctcgatatattatgtccccgaatcgaacatctaagtgaaatgttatcaccattcgaatttctcgatagcttctgttgttcaatttcgagcgtctagatgagttatgtacccgattcgaacatccgagtgaaatggtatgaccattcgaatttctcgagagcttccg

SEQ ID NO: 31126 - DNA, 411 bp, Glycine max
  unsure at all n locations
agcnngnncattttctttatcccatnngaactntnnggnctttntcagtaagttcatgatcggcctagccttctcagctatccaaggtagaaatcttatcaaagaggctatgcgtcctgtgagtctttgtatctctttgaaagtcttcggactcctcatctcaatgacgacttgacatttatctagattagcttgtatgcctctttgggaaagcataaaaccaaaaaattntcctcctccaatcccaagaacacatttttagaggttaagtcgtatgtatgtttttggatttgtgaaatgatctcggctaggtcctcaacatgggacttgactccatnggatntgaccactatctcatcaacgtacacctctatatttctacgaatnntatctttgaagatcttatccatg

SEQ ID NO: 31127 - DNA, 337 bp, Glycine max
tcttcaagaaaagattattcttggtcttatatgattctatgaagataacctacaactaaaaatggtttctgacatggttctgtaaagatgaaatttttgaaaatggacaagcaatgactatcgaacacgaaagtaaatctctgctttactttttttatttgttatttgcttatttatttctcaatttagaaataactcaatggacaaaataatttataaaaataacatattagccaatgacctacattcaatttaaataaatggtcatgattctttactgtcagtgacttataacccaagttaacaaaagggtctattgacataatacttgtagttt

SEQ ID NO: 31128 - DNA, 456 bp, Glycine max
  unsure at all n locations
agctncgatattagctgttccattttancaanaaacacaagnggaagtttattcagaanattagagcttatctcttttatcttagtgagagtgattctcctaaattcttgagtgattcaagaacaccctggctgtatcaaaggactttcacaacctttgagtgttgccctcgctggaaagagtgattctttccttcctatcatctccacccttgttctttcaaaccacaattccagaaaatccacctctgcccataattatctcgtggccataactcccattntatgcactcaaattaagtgattcttgagcctaaattgactntcanaacgagacctttcacctcgntctgaaatcacctcattnggagccctgtagcttcagttattgccatgtctatatttctgtccagccaccacttaacctacatgttaccatcccattcatccattttat

SEQ ID NO: 31129 - DNA, 353 bp, Glycine max
gcttatgaatccatcatactcttttccacattatctataagttcctctttcaaacccattccgaaacacaccagtatagtagacgcggagttttatttgagcaactgcgtcttttacaagctcccgttgcttcctgtgttagaaaactaactttaagagtattcaccaaaaaaaaaaataaacaaactttaagagtcataagttgcttatggaaatatacatcctgttttagccgttaaaaatacatgcttcgacggatcaataaatttaatggtaaagcaccacaattctgtgattgatgtggtcttttttacgcagcaagaataaaagtaccttaaccattaaatcagatt

SEQ ID NO: 31130 - DNA, 399 bp, Glycine max
  unsure at all n locations
agctnctanttttnngtttcanaacttnngnnnntctgcaagnnggaaattctgcagaaaacaaaatgttggatcaagtggnctcagaataattaagaaaggggggttgaattaattattaatgtgtccttactaattaaaaatttaaccttcttaatgttactagattcaattangcttttactactaagttaagaaagtaaagaacagaaataaaaacttaaccaaaagtaaaagcgataattaaaagtacatagcagaaattaaagagtgtanggaagaagaagacaaacacaagaattatactggttcggccacaaaccgtgcctacatccaatccncaagcaacctgctgttcttgagaattcttttaaccttgtanaatcctttacaagccaa

SEQ ID NO: 31131 - DNA, 442 bp, Glycine max
  unsure at all n locations
tgacaaacaaagctaatcgaagcaagcaagaaataaaatcaattattggcacaaaatcaattgtgcaaaaggcatttgaaatggtaacatcttttaatattttatattcattntcttataagttatataataataactcatttttttattntgttattttttatatgatatatgaaagtttggtgaaatttatataaagacatcatacattagattatattatttaatttgtcttttactatatttaattntaatagaaagaagattcaaaatctggtgaatggccagatgctatggaaagttggaaggtcacgcacatgagatctaatggaacttggtgcattccaaaaggagaagaaatcatggtaaagaaaaaattcatttaaagtcttgatgtcaatattagaattaaagacattaatggtattatgatatcatatct

SEQ ID NO: 31132 - DNA, 438 bp, Glycine max
  unsure at all n locations
agcttgagcatantaagttactcccgcattntatctctagcatgcattgtatgttggtctcgtcctttgtcacgggaagccggaaggtccatatcaccttcttaattgtacacatggggcactgcgcccccaaatgcgcaagtaagaagagataattttccgagctctcgtgtccgtaaaatgcattcatatcatgcatcgcataagcatctcttcataacatcataatggacatatcctgcatttgtccgttatcatattccggcctcacattttgcatgagtcatggcatcatcatgcatatgcgttcaacaaactttntgatctgcaaaattgcataccatttgttttcatgtttgctcatccttgcgttntcctctacaaaacananacaaaaaagggggaagcgtgaaacttcacactacattcttagttcca

SEQ ID NO: 31133 - DNA, 384 bp, Glycine max
  unsure at all n locations
nttcgcanagcttacggtaaaatctgggacttagctatggtagaagtctccacagaggtcattgcctcccttgcccagtattatgatcagccgttgaggtgcttcacctttggggacttccagctatcacctatggtagaagaatttgaagagatcctaggatgccctctagggggaaggaaaccatacctcttctcagggttctatccctcattagctagaatttccaagatagtccaaatctcggcgcaggaattagaccacaggaagcaagtcgaaaattgggtggttggaatactgagaaaatatttggaggcaaaagcaagaatctcggcaggtaaaggcgagtgggccccattcatagatattctcgcattgttgatc

SEQ ID NO: 31134 - DNA, 221 bp, Glycine max
atctactggcttagcgagccatcccgttagcgcaacactgctgggcttagcgccaggaagactctggaagaagatgagctgtacaggttcgctaaacgcaccggttcatctcactaagcgcaccacttcagttaatccgctaagcgagaaaggcacgctaagcccaacatcactaacgtgtgctaagcggtccatacgtgcgctaagcgcatgagcacgaa

SEQ ID NO: 31135 - DNA, 262 bp, Glycine max
  unsure at all n locations
ggtacctggagatatgtcgcgggggtcaagagaccttggggacgtcaggtggggtgctattgcccaaaaccaagcttgaccaatcccaacccaacccgggcatagtcagtcaatgagaacctatgatgtacctaaacaggcgagctcctggcagtcaactgataaaaggaacaaagaaccacanagcaggagacttgtgtggtggctggccagctgtgaactatgattgatatatgggatatgggctctggtaatcgattac

SEQ ID NO: 31136 - DNA, 248 bp, Glycine max
tacccagctggccttgaatcagatatccgtgcctatcgcaaaggtttgtgggttgtgctcctttggtgaccaccatacagacctttgcccttccatgcagcaacctggagcaattgagcagcctgaaacttatgctgcaaatatttacaataaacctcctcaacctcatcagcaaaatcaaccatagcagaacaattatgacctcttcagcaacagatataaccctggatggaggaatcaccctaacc

SEQ ID NO: 31137 - DNA, 328 bp, Glycine max
tgccacccagctcgcccaggcgagcaaggttgcttcctccagaagcaacagccttctggaggaatcttctggagggcccaagtgggcctggttgctatttgcacccctatttttactaaatacaccccctgccttttttttggtgattcttttttcgtaaagttacggaaacttatgaatttcgtaacgatacttgttttctttccgtaatgttacggaaccttgcggattacataatcatcccttttttgacttacggaatgttacggaacctcactaattgtgcaacgatgcttccttttgatttccggtgtgtcacggaacctta

SEQ ID NO: 31138 - DNA, 433 bp, Glycine max
  unsure at all n locations
agctttacaattttgttttaaatccaagcccataaataatataaaatctagataagataagataagatctagatgaaataatatctagatgagatcaaatctagataagataagataagataagatctagatgaaataatatctagatgagatcaaatctaaataatatctagatgagataaaatctagataagataagatctgatagaataaaattgtctgctcttttcaagtccaagcccaattccggattcaagcccaattgcttataattctcctgaaattaaatcanaaacacaaaattagtccagtaggtccaattgataaaactgcatattanattgacaattaagcctaatcagtaattaaaatgatgacaaaaagggttaagaaatatgagaaaatgatgacacatcanatcccctcacactta

SEQ ID NO: 31139 - DNA, 294 bp, Glycine max
tatagcttactgattatccacaaaaagcttcactgcatcactatccttgattcttaattcttgtaataatgtgtccaacgagacagctaggcaagcactcattgtagctggaacatacttagcttcacatgttgataaagccactatggattgcttcttagaactccatgatattggtgttgcaccatacatgaatatgtaacctatagaactctttctgtcatctctgtctcctccccaatccgcatcaatatatcccactaattcctctgagctgatgctgtctatatttgg

SEQ ID NO: 31140 - DNA, 448 bp, Glycine max
  unsure at all n locations
gtttaaattgcgtttaatcttanagtttgacgtgctgatcagttttttttttttccggagttaagaatacgggtgtcttccaaatacacatatttaaaaagaatattttattaaatacactaacgaaaattatattttaacaaattataatttgaatatattttaaaaccattcaaagcgctcgacagtaattgctcgagaaccttcatgggccatcaagaaacctcattgggaaatcgatgttacccttgatagcaagaaagtgaagaaactaatttcttttagaattttttatttattgaaaaccatacaaaccacattacccgcttcctttctaagtagcatacgtgaagcaccgtgtgccacataactctggngtctctactcactctcttgtgcctttgagttaaatcaattctcacttttagttcctttcnncaataattat

SEQ ID NO: 31141 - DNA, 421 bp, Glycine max
  unsure at all n locations
tatataatgatgattataggtggttgtttgatgccagatacatctggtgcaagagttcattttatgtatcttcttttattatcaaatttaactgaggcaagtcattatagttagggtgtagcagtattagcatcccttttttgagctctagatcgggctataaagccagaccaaacagaaatcggtggatgtttgttgttgctacagtcatgagcgtgggaccgaattgaatgtattaccccaaagatagatcacctatccatggaagaagcacaagaaggactcanatttcctcttgcacgaaggtggtctcgtccaaggaccggaccaaatattcccaccaattcagtgagattgatacgcatcatatttgataaactacatattaatgagggtcattnnttaatttcatgaataacta

SEQ ID NO: 31142 - DNA, 273 bp, Glycine max
  unsure at all n locations
attttctcaaggaaacctggattaccttttctttctcgggctcttcagcattgctcaaagaaccttctgatactttccccttttgtgattgtaacataaccatcntctacaattaacctgcaatgtacacactgttgacccttcaacgaatgagctntaacagaaagttcagtacagcgtccatctaatctccaagctcggagggtaacaaaacatgcactcanaccaccaagatccangccactggctcgaacacatncattcaatccaaca

SEQ ID NO: 31143 - DNA, 330 bp, Glycine max
  unsure at all n locations
ttagctttgancttatcagncaagtgtatggaccatgtcgtagccaaagtgctcatcggtaatggttccaagttaaacgtgatgcctaagagcactttggagaaattaccattcaatgcttcccacttaaagccgagttcaatggtggttcgtgcctttgacggcacccgccgagaggtaggggagagatcgatctcccagtacagataggccctcacacctgtcaagtcaccttccanataatggatattaacccccccctacagctgtctgttggggcgcccgtggatccactcagtgggagttgttccctcaacactccaccaaaag

SEQ ID NO: 31144 - DNA, 375 bp, Glycine max
  unsure at all n locations
tgccaagacaatgcacacgttctctnttttcatgtcctttgacttttgaatatatatcatttgtctaattagtagaatcttgggtgctntgtaaattttgcgaactctctgcttcaaccattttcttttttagttcatcctacataaatacatcttataaattattatcatacatcaatatcctgaatacttcaatatcactaaacaaaactcatctccatattagttactccccctcaccccataaccttctattagagaattgagcacaacaaagaaaaagtattgaaataaaaattacaattcttacaattacaatagcagccttttcagtaacaatgctttcatcttttcgagttcgagtgtcaatataaa

SEQ ID NO: 31145 - DNA, 461 bp, Glycine max
  unsure at all n locations
caagcttgatcttttattctatatctgacagccaatgggtgagtcccgtccaggtagtcccgaagaanaccggcctcatcatgataaaaaatgagaaggaggagctgattcctattcgggtgcagaacaggtagagagtctgcattgactataggaggttgaaccaggtcaccaaaaaggaccattttcccctgccattcattgaccagatgcttgaatgcctggcaggtaaatctcactactgtttccttgatggttnttctggctatatgcaaatcactattactcctgaggatcacgacaacaccacattcaccagccccttcggaactttggcctatagaaggatgcctttcggcctgtgcaatgcccctggtaccttcaagcggagcatgattagtattttcagtgattttgtagacnattcatagaggtgttatggatgatntcactgatatgtg

SEQ ID NO: 31146 - DNA, 417 bp, Glycine max
  unsure at all n locations
tgtcgaccttgctctagcctctggagaaatttttgaaggagaatgtttcaagtacataaaggaatgttntgaaaatggcacattgcatctcattgggctactgagtgatggtggagttcactccagacttgatcagttgcaggtgattatttggggttggagctgtttttccttcatgtgtattcagtttattctttctaactaactacttttgtacagttgttgcttaaaggagttagtgagcgaggtgttaaaagagtccgtgtccatattcttacagatggccgtgatgttctggatggctcaagtgtggggtttgtggaaaccctttgaaaatgatcttgcaaactcgcgcgcanaaggtgtcgatgctaggatagcatcacgtggaggtcgtatgaatgtcacaatggatcg

SEQ ID NO: 31147 - DNA, 429 bp, Glycine max
  unsure at all n locations
agcttgacatttatctggttcgcatngngnagcagattgatagcgtgatctgtggatcgagatggcggaaggtttgtaagtggttgaaacaggcatgagtatttcgtaagtaactcagaaatctcgggtaagatgggtggtgttgtagctgattgtgtgtttgtttccactctaatatggaagaaggtgctagaggggctcctatgtagaagacgacgcagttgcgagggagacacgggttcacctatttgctcacgttccccctgtaactccacaagcttaccctcagtgatgaatttcatggatggagacgtgtagtctgtcagaaccggtcctaatgttntgagccattcgactcccagaactacatctgtgccacataagggtaggatgtgaaagtccaccatgaacgtatgctcctgcacctgt

SEQ ID NO: 31148 - DNA, 243 bp, Glycine max
  unsure at all n locations
aaacccgaaaagacctgatctacgaattctttgtgaaaggttcgaagagtgtatttacgcacagggaaagtattagcaccccacgcgtccgtcacaagagacgacaacctttaatcaaatgtgcaaatatgacatcnaattatattcntttccctttttacggtcttaatgtctttttatgcctttnntatgttttatctttttgtggtcgacaagggtgtttccctttgcttctacgtattc

SEQ ID NO: 31149 - DNA, 464 bp, Glycine max
  unsure at all n locations
agcttggagattatgcttctatgtatganaagaaagagggagagaaagagagaggngggagcacgacatcgaaggaagaanaagggagagaagntgaactttgagttgtgtctcacaagactctcattcatcaaagttacacatgcttctatttatagactaggtagcttcctttagaagctgtcttgagaaaacttccttgagaagcttctttgagaaaacttccttgagaagctagagcttagctacacatacccctctcataactaagctcacgtacttgagaagcttccttaagaagattcctaaagaagctaaagcttagctacacacacctctctaatagctaagttcacctccttgagatgagaagctagagcttagctacacacccnctataatagctaagctcacccncatgacannaaaacatgaanatacaaaanaaaaaagtccttactaca

SEQ ID NO: 31150 - DNA, 398 bp, Glycine max
  unsure at all n locations
tgagactntaagcagtgcctgtgattagaatttcattntaatactttggagtacgaaaattcaaaaactttataaaaaaaaaaaaaaaaaaaaaagtagcatgcagtgctacaacaaaagcacaggcacatatgggaaaataaatgaagtgacgtacaattaagtccttgaaagaaagaaagaaagaaaaaaaaactagtggaagctcaataatggaggaagagaaagtgtggagcagagaaagaaacagaggtgtgtgtggcttcttgtggagaaggaagaagaggaaggaggagcaggtcaatgtcaatgtgattntataaagctagaaaatgaatataatacaataattccttacgtaagagtttttaaatgtatattggcattaatatacttga

SEQ ID NO: 31151 - DNA, 453 bp, Glycine max
  unsure at all n locations
agcttgaggattatggtgtacctatcacatgtggtactaggtggcggtcgggcgatggtgcacaacaagttttccacatccacaatgcgcgcataaacccaccatcccctgttgcccacctccaactgagctcacgtactcccacgtagcccatatcctcgtttctctcaacaccgggtccccatcaatcctcccaagcttccccaacatcaaagtaatacaacattcaaacagcacanactatcacagccaagaaaacagagcanaggcagannactctgccaaaacaccaaccanaatcacagcttttctcacttaaagaccccagtaacaattccttcgttccaattcgttaaccgttggatcgaactccaaattttactggaagtctctagtacataagcctacattntgaaccgtgggatctactagcanacatccagaactcattct

SEQ ID NO: 31152 - DNA, 186 bp, Glycine max
  unsure at all n locations
gcatctgtgcggtatttcacaccgcatatggtgcactctcagtacaatctgctctgatgccgcatagttaagccagccccgacacccgccaacacccgctgacgcgaaccccttgcggnncgatngaatataacttcnnnatatgcatgctatacgaacgcattaccgatgagccctgacttcccg

SEQ ID NO: 31153 - DNA, 443 bp, Glycine max
  unsure at all n locations
agctaggcttttgctattgctgaagagaccagnattcagactttgctttgtgaattacaggtcacacacactacacccgtgttttttgtgacaacatgagcacagttgccttagctcacaacccagttctgcattccagaaccaagcacatggacctggacttgtcttttgtcggagaaaaagttctggagaagagaattcaagtggttcatgttcctactattgaatattgatcaatatgcagacattcactaaatctcttaccccatctaattntactctgtttagggacaagctcagagtggtaacaaagattttgtcaacccctcaagagcttgccaggggtattagagtagaagagtagaattactcctttcttttatttcagtctagcatagttagcctttatagnntaactcaactagtgacagttgtaataacag

SEQ ID NO: 31154 - DNA, 441 bp, Glycine max
  unsure at all n locations
tgtttacacctaaatacaatcatggtattnatactataaattaagattatattctaacattggaaaatttttacataattatctaatcataattggaaaatttttacataattatctaatcataattggaaaaattctacataattatctagtcataattcattatatatagcataaattttttgacttttaaaataatttaaacagttatttaattatataattaaatgataatataaaaatatttcacattgtatcagcattaacctcctgcttccggcttttgtgtacaacatggagtctttaattttccatcgattatgcggctgatactttgccacacataaatgtataagaaatatctttcagatgttgactagtagttgattcattattttacgggtccagattattctgaacatccattccactggtgcaatg

SEQ ID NO: 31155 - DNA, 276 bp, Glycine max
acaacgagatgatgcgctccatgagagggtggatcaaatggagaatagagatcataatgaagaagaaaggaggagaagagggaatgatggtgttcctagacaaaaccgaattgatggtattaaactcaacattcctccatttaaaggaaagaatgatccggaggcctacttggagagggagatgaaaatagagcatgttttctcatgcaacaactatgaggaggaccaaaaggtgaagcttgccgccacggagttttccgactatgctcttgtgtg

SEQ ID NO: 31156 - DNA, 290 bp, Glycine max
  unsure at all n locations
attgagttttctatgccatcccttaatgaaatatttatgatgtcggtaaagaaatgttcgatcggcgtcatgcggtgatgcttcttttttagacctcgatcggtcatctttcttggcggacgtcgactggcacttttttcaatcaatatcggtagaaaatatttttttgccgagatgggctaattgtttcgtggtcgaataaatggaaacatgccagttttggccgacacaaaaacgtggttgggctcgcacanaaaaacctagccgacctacattgtacattttttatg

SEQ ID NO: 31157 - DNA, 536 bp, Glycine max
  unsure at all n locations
nggcaccgtggatgatgcantttgcaatacnggcgaangcagctcggacccgggatactctacagtcgactgcaggctgcaggttgatggtantggtgagagacaanggcatggacatggcgaaactaagtgagctccgccaattgcacactcactgcagacttcacgaacctanagtgccactccagaacaagactcacgtatacttgtggtgcttacctatctaccctagtgcacagncaaccacattgtggatcctttgcaacggtatcacttaaacaacattggaatggtgtatgaagacacttgatgataatcaactgatttaactggaacctagtgtaaaactatgcacaccattaactaatataagttatctatgcgatggctgataagataatcagctataacggctcaaatctatatactgtatatatatatactatatacatatgaccggctaatnttgggtgataatgtgtangacaacatggacatggtaattcacgtgcggatctctcacactcagttatacn

SEQ ID NO: 31158 - DNA, 529 bp, Glycine max
  unsure at all n locations
cacacacaccacttttntaaattatctgtgactaatatctacataatcctacaantaannnnaaaagccgatgagcatgtgaaccatggatnacacaactaagatacctaacccgacaataagagacagtcaagacgtgtatttttcaccaactatatgcacacgcataggattacaagagcacaacattaaaaactacatcatgggacacaaaaatgcgacatcacacactgaagtacctttacattccagccaaaactaactacctgcatgaaaagaagagtacgacacgcacaaggagcacccccatcattgcaggaaaacgacggcgaaacacacactgagctatgatacacctggggagatgagagcacgagagaaacaacagataactcactaagttatgatgtgagggaacaatactcagcatattacaagatgtcaaaacagagagagcaaggatatgactccctctacccgaaaatatggcgggcaaaaggccataggcctactcacaaccgacaccccc

SEQ ID NO: 31159 - DNA, 439 bp, Glycine max
  unsure at all n locations
agcttgngtgtcntgtttataacttcacaagagatatttgaaaaaggtattacaaccatttctctatctctttctcttatttntatatccttatgttttcatatgataagaagaanaataaattgaattaagaaaaaaaattgatcataatgatttatccctttaggtataatacaataccaaaattgaaatatttatagcatattaggtctacaatttttattcttacaatcttaaaaaataatcattctcattatgtatgtcttcctagatccaatatgcaataaatatatcaattttagccttccaccatatctaaaggaataaaccatntaataataatgactatgcaattatatgtgaatgataaaattagtttgtgggtacataatcacttatanaaatcatacanttttatattttaatttaacctataaat

SEQ ID NO: 31160 - DNA, 376 bp, Glycine max
  unsure at all n locations
tccattntcctttctactttgaatgagtaattcttaagtttcatacatcatcaggtccatccttatatttttttttccttctaattattaaataaaaatattgttttcttgaagtctcttccttccatgtaataatgaaaccgtaagatgaccaaattaattntacttgctagttatttgaagaaccaacgtcgcacgccaaaagtcaaaacctacaacccatctgtcatcccgattcattactctcgggattacttcagggtcatttcattgttatctcttcttccttttcacaccctcatttaagatttaaaacacctaanatacccttctttctctttaagaattaaaatcttctctcctactcatgtccatg

SEQ ID NO: 31161 - DNA, 435 bp, Glycine max
  unsure at all n locations
gctttcatctagtgtttatcagagcacaagagcttcaagtaggtgctccttanacctccattaattnttttctttaccttctcttccattgttgtttcttcatttttctccatgtatctcctcacatgtcttgtgctaaattttgttaacatgattctttagagtttccaccgattaaacttgctatagaagctagatttgattntctattgttcaaatttcttgttcttgttcttgaaccatgaattgtgttgactntangttcctttgagttttgtcttgttattttttgtggctgatacctaaaccatanaattcttacaaaaatattaaattagaagaaaacctanaaaatctagagtgacttgttcacctattgtagttntgtcatagaagtcatgtctagtcatgaaacttgtcacataagatttctta

SEQ ID NO: 31162 - DNA, 314 bp, Glycine max
  unsure at all n locations
tgttgccattgaactcatgtgctacaaccaagccatgtttgggtttgcaccctatggtccttattggcgccaactaaaaaagattgtaaacttagaaatcctctccaatcgccgagtagagcaactacagcacgttcatgtctcagaagttcaaagttcaatcaaagagctcttcaatgtttggtcaagcaaaaagaatgagtctggctatgcgttggtggagttgaatcaatggttntctcatttgacattcaacacggttcttcgagtggtcgttggaaagcgacttttcngtgctacaactatgaatgatg

SEQ ID NO: 31163 - DNA, 443 bp, Glycine max
  unsure at all n locations
agcttgagctaaatttgactaccatnaccttgaccaggtgagaatgccaatcttccctcggaagcaaaaaaaaaaaaagaagagaggaaaatttccaatcaaaggaaaaaggagaaagaaaatttccaatcaaagaggaagcaaaaaaaggagagaaggannaatttcaatcaaaggaaaaaagagaggaaaggaaattcccaatcaaagagtgggagaaagcaaaaagaaaagaaagaaaaattcccaatcaaagaatgggagaaagaaaaaaagaagaaagctcctggtcaaagaaaccagaagatatgtgccgagaggtccttggaccagacgatatccgaacaatacagaattgtcaccaaatgaacaaaagaaagaaagggaaaccatgacctanaagtggtcttctccctttattaccaaccaaaatcctgtgtgct

SEQ ID NO: 31164 - DNA, 300 bp, Glycine max
  unsure at all n locations
gtgaagtgaagaatatttattactgagaaacttaagtgttcattatagtggaatcttctttcctaataatttttttttctataacgctgtatcttagttaaatgatcaaagtttaattctacttcaactaatctaaatgtggtaataacgtccttttggctgcatgccttgttatatagggggaaactatctaanatgaaacttaatcttattanggaggtattttcagcanaatccaaactcatttctactttatcttattgcttatgttncagggcacaccactggattctatactca

SEQ ID NO: 31165 - DNA, 457 bp, Glycine max
  unsure at all n locations
agcttncccttatgaatctcaagtgcnctggcacgcctattattctcctcttaaacacgtgtacgttgagcatttctccattgtccaagcatatactatatgaactatgaaatcagttctatatgtggagataataaaatgacatgacttttaatgtattttacagtgaatgaataaatcattcatattaattatgtagaagctagaaaggataaaatgatacactntcttcttcttcctttctcttttaatttaaacaactaanagaattatcattntttttattttcattntctttnttatccaaacatgacatagaatggtttagttagaanaatattagcaaaacacanacagcggngctgaagtgaattagttaagggctctttntagtccaaggaccggcgctgatgcatggaatatgaaaatatatatataaaacgaattatgataaaac

SEQ ID NO: 31166 - DNA, 392 bp, Glycine max
  unsure at all n locations
agcttgtccattaaaatatgtntttgaagttagtcatttcaatttctgactaagtaaaatggatcatttttaaggtccaacgccttgaaatgatcacctcttaagtaaaaaaaaaaatcacttgataagctagaactacgtaggtctgatttcttcatcgcaattgaggatacgtaggagcaaaagccccgcttttgtcgaccaccccgagagatcgttaatggtccaacgccttaacgtttctctcctttcaaaatcaaaagatcatttaatggtccaacaccttanatgacctttntgttcaatcaaaatatatcttgcaaaaagataaaaaacaacttaaccaaacactntgttccgaaagaactacgtangtcttgattcctcatcgc

SEQ ID NO: 31167 - DNA, 385 bp, Glycine max
  unsure at all n locations
ttctaaatgataggctcagaatgcagaagaagtagcaatcaatttaataatgttctttatacatgcaagacaaaattgattgcaataataaatgagataagggaagagagaaatataaactcgatttatactggttcggccactccccgtgcctacgtctagttctcaagcaacccacttgagattntcctttctctttgtaaaacccttttacaaagtttgaaccacacagggacaacccatcccttgtgttcagaaattcttacaacttaagagaccctcagtctcttaatcaatctctttgattaagaagaagaagaagaagaattctctcttttaagagaaagataatacaatgaagttccataaactcttaatagatttg

SEQ ID NO: 31168 - DNA, 338 bp, Glycine max
tctgttctcaattacgaacgtctcgatatattacgggacacaatcggacacccgagttaaaagttattgtcgtttgaatttgctcagagcttctattgtcaattacgagcgtctcgatatattacgggactcaatcggacatccgagtaaaaagttattgtcgtctgaatttgctcaaagcttctgttttcaattacgagcgtcctgatatattacgtgactcaatcggacatccgagtcaaaagttattgtcggttgaatttgctcagagcttctgttttcaattacgagcgtctccatgtattacgagactcaatcggacatccgagtaaaaatta

SEQ ID NO: 31169 - DNA, 394 bp, Glycine max
  unsure at all n locations
aaatgtttcaaacttttatggtcagtgtaaaccacaaagggcctgcccaacagatagtgcctccagcgtggaatagctaacactaaagccatgagctccttttcatacgcagattttgataaatcgccctctgatcaagctatgctaactaaagctataggctgcctctgctgcatcaaaacagcaccaattcctctccccgccgcatcacattccacttcaaacagaatagagaaatcaggtaacactagtactggagctatagtcatgatctgcttcagatgattganagcctccagagcatcttttccccaaataaagttattcttcttagtcatttcagtcaacgggttagcaattgtaccataatcctttgataatttctgtataaccc

SEQ ID NO: 31170 - DNA, 420 bp, Glycine max
  unsure at all n locations
tccacttgtatactgcaaccataataaaagctntctattnttccctcccgtggatgtagcctttctcaaggtgaaccacgtaatcctgtgtgtgttctttctcatctctttctctttcaattctgatgcaatttgtgtgtatgataattttgttatgctgcatctattgctgctgttcttgcttgttcttcatcacttccataatagccttggctatcgatgtaggcaccttgggcaccggtgagggccgtatgaactgctaacgttccctttntactcattatttatttctttntattggtaatttattcaaatgttctcatcgtcatctttctcctttcgctatgttntttttcttttggccaactatggcgaaactgcatcgtgtcgccgtgttgtcgccaccatcttcgcgatcgt

SEQ ID NO: 31171 - DNA, 452 bp, Glycine max
  unsure at all n locations
gcttangtgttttatgaccaatctaaattctattaaatacatatattcgtagcatgtgttttcaaggaagtctacgttacattaactttgattatatactaacttgattggttatgtcatgtttgtttaataagatttgatgcccaagttttctgaagttgttgaaaatgattcacaatgtggtgaaaaaagaagcaactaatttatcaaaggattntgaagagttaacccctactaaacacaatttcagttgctattcagctatgggagaattgactcctaatgaaagttagtctgcaacccanaataaggataaatgatcttttgctcaataattctggagatttgattcccgttggaactgtatttggaactcanatacattcacagcccgaanacattgaaggtgcatataagcaactgggtggatgtttgataatgtcanaactaat

SEQ ID NO: 31172 - DNA, 323 bp, Glycine max
  unsure at all n locations
ccaaacgcacccttcttcaaacattcggtcgtaggacttgctataacgctaacattctggataaagcggcgattacatgatgcaagaccaaggaaagatctcacgctacgaactggtagaaggctcggccaagtcttgatagcatgcacttttgtttgatcaacggatactccatctttagacaccacatatccaagnacaccacactttcaaccaagaaagcacactnttccctcttgccatagagtnttcgggctcttagggtctcaaatatttggttcanatgagtgaaatgcccctctatagatntgctatacaccaat

SEQ ID NO: 31173 - DNA, 432 bp, Glycine max
  unsure at all n locations
agctttacattactcacccacctatggntagcaaagtgtattgtgtgggaatttagatgatcattttgtgttttccttaagttggacaatgaggcgagtcgaggtggctttggccccttggccccgtaaaaggttgagtgagtttaggttatatttatccttgccctgctaaggtgcttcattgtcatgctggggtagttnttcatcttactcaagtacttcttccttatgctaaggtaccttttcctctcagtgttgagctacctccttgtctatgtcagttccctcatcctcaaactcaacataaccttattgagttgatttcattntcaccctaanaaagttgacttggattgngcatcatttaatgctcattgtangtggtcctgcttgangtcgtggagatggtagtgtanaatctctatgatgaca

SEQ ID NO: 31174 - DNA, 343 bp, Glycine max
tgtcctcggtgacgaagacaattgaataagccccttcgagcttttcacaggcgtcaacgattctcaaaatgaagggtctgtgtttggaagtggcgatgaggtggagaacaacctcggtgtcggaggtagtgttgaagatggacccgctgtcctcgaggttggttcggagggtgcggtagttgacgaggttgccgttgtgggccacgccgacggagccgaagcggtagccggcaacgaagggttgcacgtttttgagcatggattggccggcggtggagtagcggacgtggccgatggcgaggctgccggggagctggtccagcttcgactggttgaacacgtc

SEQ ID NO: 31175 - DNA, 443 bp, Glycine max
  unsure at all n locations
agtttttaattttatatntaaatntctaaaagctgatacaaatagtntaaacttctgctaatcgattacataccttgtgtaatcgattacaggcttttaaattcaaattcaaaattttcaaattttttcagaaatcaacttagccactggtaatcgattacatcatctgctaatcaattaccagagaggaaatatcatatttttgaaaagataattgttctttaaaaaacttttgtaaaatatttcctttagccaaacctgtgcaacatcaattaaggaattctttctaagattctaactatgtatatcgttcttcttgcatttctgaattcttgacttaaatcgcgcttatctttggcatcatcaaaacttcatatcatatatgcttctacatcctanagtaatactttgaaagacagagaagacatcanaatgatttttca

SEQ ID NO: 31176 - DNA, 245 bp, Glycine max
  unsure at all n locations
tcattaagaagcttactccagaagcttcctcgtggcttctttgagaagctttctcaagagacttctttgagaagctagatccttatctatccacacccctctattaactaaattaacctccttaaaaataattacggataaaaataacacaacaaataattcaacatcaaacataattactaataatttatatatatatatatatatatatatatatatatatatatcanggtgttacacctact

SEQ ID NO: 31177 - DNA, 429 bp, Glycine max
  unsure at all n locations
tctgctntggattatgatnnctatacaaaagttagttgtataaagtgactaacggngacccactctgcatgtctgtcaattgaccatgcgatatccacgtcgtgtaattcttcttaatcccatcacacaatagatggtcccatatgtcgtccagtatttgtcgccttccgttcaaacaattgatacgaggacactaatattttccatcttcatccagtcgacttctttntgaagtaaattgcaagaactgctcgacgccttcctcatattctgggttgatgtgactntcattcatcaaacttcgatccatctcagtaataactctgtgatactcanagttattcgatgcttganaatctcactnntttattataggtgtggccctatcccattcangaagaccgtctnttatggtagcttcatacgtca

SEQ ID NO: 31178 - DNA, 370 bp, Glycine max
  unsure at all n locations
taagtctagattaatttaattgtcactatccatggcaacctctttgataattttttttttcctttttaagaggaaacagatcgagacactgacgaatacaaatcacaaaaccgtgaagaaaattcacaaaaacgctaaaatttcataagttctcaacccacattccccaaaccccacaagttttcttcattttctcagcaaacaagcaggaaaaaaaaaaggcaaatcaggaggattgcacattatgcacaaagttagatctgagaaaaaaaaaaacccaaatgcatgcaaaaaagaataaagaaataaacaagttgaatcaacaatgatgaaatntgaaaataaaactaaaaaaaaaaaagtagaaaga

SEQ ID NO: 31179 - DNA, 450 bp, Glycine max
  unsure at all n locations
tatgcttttatttatatggacttaccttgaattaattcctttgatagcccttttgagccttgtttccctttccttggtttgaagctcactacaagccttaagtgaaaaaccatgatattaccatatccttaaggaattttggagctttggaattgttttgggaataagtgtggggggtttttgtttcattggacaacttgttttggtgactatgcttcatgatgtattttgggccatacttgatgtacattgtatattggttaaatgttggacatgctgaatgaaatgttgtttctcaaaggcaaaaaaaaaaaaaaaaaaaaagcaataaagttgagtgaataagatctttaatggcacaagaatgatgaaactcttgagtctactcttcatggttaattnttatctttacttcttttttntttttcttaatatgcacttattcccctt

SEQ ID NO: 31180 - DNA, 334 bp, Glycine max
  unsure at all n locations
ttagctttatctttataatctttgcatgatgatgatctggcctctgtgcangctctgtaacatagcaaataaagtctcaaagctgaatgaggaaggtcctgtagaaactagagtaggaactggcaaaggagtgaatgctgaagctagaactggtaaagatgaagctggaatagatggagctgcagtagaaggagctactgatggnggaatctcaaaagatgggagagtctttgaccttttccccttggccttgcgaggccctctaaaagtgattgaggggtcatcgacgttccacccaattttcttcatgtaagccaaattaatggttggactg

SEQ ID NO: 31181 - DNA, 335 bp, Glycine max
  unsure at all n locations
tgagttnttttaaaaatcatatttagctaaataggagagaccatgaactttaaaaaaaacctattaagtctgatgaaccgacctgtttagcaataatattntatattaaagatattattattaatatgatatatagtataattattatatttaaattataaaattattttaagagtttgacaattataattagtgcttgaaatatcttaattcgtataaatataaatgtgtacaaaaatatacattcttttctttgggtgagacttaaaagactttagcaatatgtcacccacaatggttttccatattttattgttaaaattgtcttattattt

SEQ ID NO: 31182 - DNA, 452 bp, Glycine max
  unsure at all n locations
ggtgttgaacccatcattagtgaccttataatcccagcctgaggtaacttatgcttantaacggtacccaactgcgttgtatagaaatctatacctggcgcaaaaggctatgggttatgcttctctggccaacaccacacaaaactttttcctttcatgccgcaacctggagccattgagcaacttggaacttatgctgcaaacatttacaacaaaccttctcaaccttagcaggcaaatcaaccaccgcagaacaattatgacctcttcaagcacaaaatccattcccgatggaggaataacctaatcttagaggtctagccctaacaacaacacagcagcctgctctttctttcaaatgatgctgctaaacaagcattcattcttcacaatcaacacagcacagcccagaacacaacagttgagctctcgaaccttctcgagactgtagg

SEQ ID NO: 31183 - DNA, 236 bp, Glycine max
tctatagaaggttcgttcctaatttctctacaattgcatcacctctcaatgagctggtgaagaagaatgtggcatttacctggggtgaaaaacaagagcaagtctttgctttgctcaaagaaaagcttactaaggcacctgttctagctcttcctgactattctaagacttttgagctagaatgtgatgcctctggagtgggagttggaactgtattgttacaaggtgggcaccct

SEQ ID NO: 31184 - DNA, 512 bp, Glycine max
  unsure at all n locations
ctgactatgantcnattgcanaccgggaaccgagcacgaccaggcacctgtaaccgccgccggcggtttactttatctttatcancnccgccagacgaagaccagggctctgagcaagctctgcaacacaccagananagncgcaaagcagaaggaggaacgggctgcagaaactaaacgacgaactggcaaaggagtgaacgctgaagctcgaactgggcaagatcaagctggaatagatggagctgcaatagaacgagctactgatgggggaatctcataagatgggagagtctttgaccttttacccttgggcttgcgaggccctctaaaagcgactgaagggcaccgacggtccaccacattttcttcatgaacgccaagtaatgcgtggctgagactcccacaagataatgaattcgaactggcatcctatgctcttgctaaaggagcaatgatagcagagaagactatcctccggagtattctgtgctacacacaaactaacagag

SEQ ID NO: 31185 - DNA, 411 bp, Glycine max
  unsure at all n locations
tataagaacaaaattgcctaaatcatttccaaatatgcatgtgaattaggaagcatcaacaagaattaagccaaggctattgtgcaagcaatcaatggggcaaaaaacactaaaagattatgatgatggatggctcaaattctcacaaaggtaaacttatcactttcaaattgagctttcaaaactatcatgacatgtagaggaaaaacaaggatttcaaatcacaaaatgtcaagagacttttattttcagaacaattacccattacttgaacatatcctataattcanagacaaacatgcaaatttaacacaacaaaactaacaaaattaaactaatttaacacaactaacaaaaccaaaaccaaagaacacactccccccccccatacttaaacaacacattgtcctc

SEQ ID NO: 31186 - DNA, 455 bp, Glycine max
  unsure at all n locations
agctngntatttacggatganaaganaaccgaaagtgaacgaaataaagatgaaagccaacaaaacaagaaatgaattgaaagtctcggattcgaaaacttatcggttgaagaacgaagaacggtgaagaacgacaaaaaatcttcatgaaattgctcacgaaaatgtctcggaagtgttacggaagcacctcggcttggattttcttcacgaaaacatggtttttcacccaaaacagttgaaatgcatagccaagggggttaggggccctttggaacagcccccctttgcctatttataagaaaaaggggaggaggttgccgcctagcangcccaggtgagctgagttgcttcctccttaagtaaccaagcttccanaattcgaaaaattgaaaatggctattngcacccncatcttgataagtcacccccttttcgtaattacgaaaaagtat

SEQ ID NO: 31187 - DNA, 401 bp, Glycine max
  unsure at all n locations
tgtcttataagctaaaatctacttatatacttaacttttatagatatcctctcatctaacttttccaaaagttgaagcaaataaattaatttaacttcttatagataaatttatccaggatgatcttgttatgtatttcttctttgggagattgtaagattatccttaacttacaatntgaatntatattctgaattatgtgagttatatataagtggtgttatgtttgataatggatttgtttattttagctctaaatatattnttattcttgtatcttttttagtctttataaaatatgtttattttatttttgtgttntagatagtactttgaacagtaaaaaatattctaaacaacgaaataaagactatttaaaacactttacagggacaaaaatg

SEQ ID NO: 31188 - DNA, 418 bp, Glycine max
  unsure at all n locations
ttagcttgtagttgtataaactaaagnnggnggcagcaatgaggaagatgcagaaacgggatccaacaaggatggtcaacctgataaccatcaccatcgttacctcaaacactgagcttctactaacaatggagaccatatgaagtgtgcaattttttatactgatttggtgcacagagggaagtcatctaatttaagggaattgaaatctttacctggcaattcggtaggtaaagttgaggtagatgctgatgatatagcatataataaagggaacaagcatattagtaaaacaaaacacaggaaaggtaagcttgatgacatttcaccaagtgggacagaaactgctaagatatacagcaaanagaatagtagtaatgctgactgccagaaagctaaacacaatagagatgctact

SEQ ID NO: 31189 - DNA, 424 bp, Glycine max
ttatatgacaataacagttattaaaagttggaagtggtgagctgattcacgacttttatttgatattagaaaaatcaaaatagagtcaataataaggagagttaacaagtgaaaattagagtgaatgagtattttattctaccatcgcaggtcatgtttggctgatgagcctatttcaaaacaacaacattttaggattaactagcatgatatgagatccttgccactacacgggtcactcgactgtttttgtaagatttataggtaataaatataaataatataatatatttccaattaattaaggttatcgctagaatcaatattaaggttaatgctagaatgaatatctatgtgatgagtatatcgattataaaaatctaaactatatcttctgtgttaacaagaataaaacaataagatg

SEQ ID NO: 31190 - DNA, 450 bp, Glycine max
  unsure at all n locations
tcttctccatttgatcacgcgatcttatatgatcatctccaccaccccaaaggaacctacgttgtatgcgcaccaatttgtccaccacccttatgggtaccctgaaaaaagaaaagaaataaattggaatagaggttaggattgattttataagagtgactcttcccccanaagatatgtgtctctgtttccactttgctagtttcctctcgtacttatagattattgngtcccacaactgacacctccttggatttgccccagtgggcatccccaagtaaacaaaagggatggacagcaggctacaattcaagtaattggctgcattntgcttccacgactccgacataccaatngatccgaatctgctttttgcannaattattgagacctgacaccaattcaaaggtcctcaagatggctttgatcaccctgatgttctncattgat

SEQ ID NO: 31191 - DNA, 409 bp, Glycine max
  unsure at all n locations
ctaattccttttatccttnttttcttttcttactaggggtnaatgaacaggttatcctgacatgcctttactctttattttactggatgacattttctagaataagggattaaatgatagagactatgaagggaggaaagcaaacaggaattatggtgcattgggggtggaatgaaagtggaaagaaaaggaagagaaatagtaaccttagaaagaaaaattcaataatcaattatttctttgcgaagttacttttttttcaatcaaatctaaaacttttctcttctccccactttttgtcaccacaccaaatgaccataaatgattgaaacttaatggagttactcttcaatgggcttatatgatgatctattttttgatgtattgtcatactaattgatagctttat

SEQ ID NO: 31192 - DNA, 337 bp, Glycine max
caacgagcccctggacaagttgcgagttagcgtagcatcacagcttcttgaccctgattacacttgctagtttgagacctgcaatgagtgcctcatactcggcctaattatctaaggcttagaagttaagctagagggctcactctagagtaacatcattaaggccttcgaggatgattcgtaccccgcatcctttcatgttggacgcactgtcaatgtagaggctccaccagtctagggtggtatggtcgttccagaaaatctgcatgaactggtctcatgggctgtaaggtcatactgagatccactctagagtctactgacatgcaacatctct

SEQ ID NO: 31193 - DNA, 368 bp, Glycine max
  unsure at all n locations
tgacaatgctgttaaaatacatatntcacgagataatttgatgcctcagtctgtttcacttttgcgtgtaaggatcccttgttcaaaaggatgggagcttctagaatggcttcgtttgccgtagatggtaaggtctgctatctatatncttctgtcactaaatgcttgctattgctattttatgacccttatttctttggtgcatgacatatatngaacttttattaatcattagtcatttgcatattagaggtagttgtttctagaacggattcctattcttgtaacaagcataatttcattatccctgtgctttacactagtgacatttagtcatttaatatttatctcaacttaattcttgaaat

SEQ ID NO: 31194 - DNA, 522 bp, Glycine max
  unsure at all n locations
gtgtctttganttcagcacntgcganngagccgggcccggganccncancgtcgaccngcngcangcaagtttatttttactttacacagacnaagcgaanaggncgggacagaacacaccccancaancgnaggaancaaagcagagaaagannncaaaacgcngaccaaccaaaccggagcaacaaagacancccgaancatcatacagaaaacaagacccaccacccgccaatgatcgaaacacaataaagcatgaaaaccatccagacttatggctttaacgctccccatttgactaacagtctaatgagatgtagtagcccaatgaagacaaccaacatccacataccattctgatgtaagctccattggagcttgcaagcctacgatcttcttcatcaatggattcctttgcttcttgcaacatgaatggctgcagaatggagaaggaagagagagaggacacgccacttcaatgacaacactagtctagaacatgctcaccaccatatgaaagcg

SEQ ID NO: 31195 - DNA, 338 bp, Glycine max
  unsure at all n locations
tgagatgaggaagtgttgaagggtgaaacttcctgcttttattgttgaccacagagtggtacctggagatatgtcgcggnggtcaggagaccttgnggacgtcaagtggggtgctattgcccaaaaccaagcttgaccaatcccgacccaacccgggcatagtcggtcagtgagaacctgtgatgtacctaaacaggcgagctcctggcagtcaacagataaaaggaaaacaagaccacaaagcaaggaggcttgtggtggctggccagctgtgaattttgtgtaatatgtggatggtggcctctggtaatcgattaccaagggtgggtaatcgatta

SEQ ID NO: 31196 - DNA, 425 bp, Glycine max
  unsure at all n locations
agcttatgttgtatattattgatgncaaacaaagaagtaaaaacagtgaaggatgatggtgtcaaaccagttgcgaaatcttcaaactcatggggataggcatcccaagtgatatgctgtaaagcaccacaaaaaatgggaactatattaggacttccaaaagaaatgctatgctggcttctattaaacatggaattgaactcaacgggattagtcttccaccctacaaggaaaggaaaccacccttcgaatttgggcttaaggcctaactcanaccggctnttaaggtaaggactaataaagccttanaaggactccattagagcatctctaatgggtgtaatttaagcaacctattntgagttgtttacattactgttaattgtcccaacaatgtcacatcanatttaagtaattcatatata

SEQ ID NO: 31197 - DNA, 302 bp, Glycine max
  unsure at all n locations
tagcccaagaggggatggaccttntcaggtcttggagaggatcaataataatgcctataggttggacctcccaagagagtatggagtcagcaccacttttaatatttctgatttaattccttttgcaggtggagctgatatagaagaggaagaaccaatagatttgaggtcaaatcctcttcaagggggaggggatgatgcaatcctccctaggaaaggaccagttaccagagccatgagcaagaggctccaagaggattgggctagagttgataaagaaggccttanggttctcatgaacc

SEQ ID NO: 31198 - DNA, 411 bp, Glycine max
  unsure at all n locations
ttagcttttcntttcccttganacacnngagggacccgaggtcattatgaatgacaaattccttgtgataaaggtagtgttgccatgttttcacagcccatattaatgcatacaactccttatcataagtagaatagttcaaggtaggaccacttaacttttcactaccataagcaatcggatggccttcttgcatcaacacagcctcagtccccacattcgaagcatcacactcaatntcaaaagattgttgacagtcagacaacgcaagtatggaggcattagatagctntttcttaagaacattgaaagcatcttcttgattctctccccattcgaaaccaacattatgctagagcacgtcattgacaggtgctggcaatgtgctaaaatccttcacatatcatctat

SEQ ID NO: 31199 - DNA, 451 bp, Glycine max
  unsure at all n locations
ttagcttgtgatctcacacgaaccttattgactgggtttcttcgaagcttaacctanaagaaggttaanagaagcttaacctcatttcttcatgaactgcaatttcgagtcgggaaggttcgcgccggccgggaagtcaacctcgggttgtagaagaacaagcttaaggaagtcaacctcgggttgtagaagaacaacctcaggttcaaaagagtgaacaacctangggcttgcttcanatgcgaaatgagcaacaaggttagggttcagaacagtgaactcaaatgcgaaagcaattanggttttttgaactaaaatttttttttttaatttgatttacgacggttttttaataataaactggcataaatttataacacanaacattctaagggtggtttcaataacccgcttagaatgtacgtcgtgaattccaantttcagtattata

SEQ ID NO: 31200 - DNA, 337 bp, Glycine max
  unsure at all n locations
tttctcttgtacttcctncttgctacaattgcaattgccagtgtttaaggtttgaccacatttcangcacatgcctttggacccaagaccacatactgaattcattgtaatctcaagatgcaccctggcccttatgttctttgaaatgtcaatttggctcttgtgtggaggaaaatataattgatcatccatgtcaataagtgcatcgtcgtcggcatccttaccactgtnttcagaggttgaaagttgtcttccccaaaaataacacccatatcaatagtctcttgttcttcaatgcggtcatcagtgagtaaaagtgagaactcagagaatatgc

SEQ ID NO: 31201 - DNA, 388 bp, Glycine max
  unsure at all n locations
tcaacagacctccaancnagaatggagagggnnaccactactggacaacccgaatgcaaagttttatcgaggcaatagatctaaatatctgngaagccataganatanggccttatatacccaccacagcagaaagagtttcaatagatggtagttcatcaagtgaaagcataaccatagaacaacctacagatagatggtctgaagaggatagaacacgagtacaatacaacctataagccaagaacataataacatctgccctatgaatggatgaatagttcacaagttcaaattgcaagagtgctaaagacatgtgggacactccttcgataacacatgagagaactacagatgttaaaagatctacgatacatgcactaactca

SEQ ID NO: 31202 - DNA, 200 bp, Glycine max
tgtacgcgacactatgcaatacataatcgggagacgtacaaacactgacttaaggagctatgtgcgaactatgtacgcaacaataaatgtgaaattggaggcgatagtgcaagagaatgagaaaatgctgtggaatgcagagtctgagagagtgcttccaactacatatgacacaagcacagccagagggcgatgactac

SEQ ID NO: 31203 - DNA, 267 bp, Glycine max
ctatactttaaatctttaattcaggttaccaatggttgacaaattaaaaaatcttgaataattctaaactattgatattaaaaaatatttattggggaactaaatttgctagtaaattcacatgaaattttatcctaattttcctaccacattattataatattaataaattttacctaccaatacatgtccacaagaaaatcgtaagtattttctggcattatataccctatagaaccgcaagtatttcctattgatttctttcaa

SEQ ID NO: 31204 - DNA, 462 bp, Glycine max
ctaaccttctagcgtacccgctattggtgctcagaaaatcccaaatttttatttctcttattactagctattttgaattctttagttcctgaatgtacaaccttcaaattgttgctcgttcccgtatatgtttcttgcaaaaaataaaattaatctgaaacaattcacgctgaattgttatcgttattattactcataccataaggaataacagctaaccaagtaatttaaaatgtaactcttaaattatgaggtatttttttaattacaattttacttcaatatctaatattgttaatctacttacgtcgttgtttacatataaatatcaatatataggtgatctactgataatataaagtactagctaatcacaaattatgatacctatcattttagattataactcaattctataaatattaataaacttataataagacaatccttaacatgtgctgc

SEQ ID NO: 31205 - DNA, 475 bp, Glycine max
  unsure at all n locations
ggatgagcccagaagccaggttaatancnttcganannncncnnnnnnncncgcgccnncnncaagggaccttcggcaagcagccngttatttcaaggtttttccctggattaagagcgttgataggcctttgagccttggttccctttccttgttttgaagctcactaccagccttaaatgaaaaccctgatattaccatatccctacggaattttggaactttggaattgtttgggaataagtgggggggggttttggttcattggacaacttggtttcgtggctatgcttcataagtattttggccctacttgatgacattgcatatggctaaatggtggacttctgaatgaaatgtgttctcaacgctaagagcaaaaaaacaaatcgaaaaaaaattctaaaaaaaaaaaaaaaaagcataaagtgatgaataaacttaacgcccagaatagaaacttggcttatctctg

SEQ ID NO: 31206 - DNA, 445 bp, Glycine max
  unsure at all n locations
gcttctatggaggctggctctgtgagcttcaatgaggtcctttttgttgatttttcaccatggatatgcagcggaagataaaggagaaaagctgataggaggcaccatccactagggaataagccatggaaaaaagagcttcaccaccaagagagtgtcttggataagaagattagagaggaagcttcattggaggaaaagaaagaaagagaaaggtgggggtgatgcaatcctacccnccaagggcattggatagaagactccaagaagattgggacaaagatgcaagagaatgccctanggttctcatgagccttanggcagatttcgggcccatgggctaagtatgagcccacttatctttgtatatattagactacgatgtcattatatttgatccttgtatttagggctccatattgtagatagggtaccctagaaatat

SEQ ID NO: 31207 - DNA, 343 bp, Glycine max
  unsure at all n locations
tgaataacggaagctcttgagaatttcaaatggtcataacttggcacactcgggtccgattcaagcttataatatatcgaagacgcctacaattaaacatcggaagctctcgagaaattcgaatggtcataattttccaaacggatgtccgaatccggcgcataatatgtctagacgctcgaaatcgaacaacgaaaactctcgagacattcatatggtcataacttttcctcggatgtccgattcagacgtatcacatatagagacgctcgtanatgcacatcggaagctcttgtgaaattacatggtcataacttttacacggatgtccgattcaggcgca

SEQ ID NO: 31208 - DNA, 508 bp, Glycine max
  unsure at all n locations
cggcgcgggttgatacgctcagtatcacgngacactatanantactcaagcgacatatggagcgcgcacaagcgatctacgcgtgtatcagaatcatgctatgtgctcgcgaatggtccccgatgtcccttcgcaacttgagttcattattgctaccccatagagctccgcgaaatgagaagcggccatacttttacttgcgagccctcttgggctgttgatcaagggctgttgcggtaagtgcattctcttaccggaacccggggcactcattccgaacgtgtgtaacatccaaagtgaacttctccgtggcgagttatgcctttcctaactcgattttgagagcttggacttnctcgtgatattcccgtgctataaaaatctcttcgatgacgacttttaacttggcgagccaatctaaacctcgtatgcgaactttcagccattcgtggatgatgcaagctccattggagcttgtaggactangatcttcttcataatggattcg

SEQ ID NO: 31209 - DNA, 413 bp, Glycine max
  unsure at all n locations
agcttttttgctctatttataggagctgacaagaatatcttcagacttatcaacacatgcacaggggccaaagatgcatgggagatcctgaaaaccactcatgaaggaacctccanagtgaagatgtccagattgcaactattggctacaaaattcgaaaatctgaagatgaaggaggaagaatgtattcatgacttccacatgaacattcttgaaattgccaatgcttgcactgccttgggagaaaggatgacagacgaaaagctggtgagaaagatcctcagatccttgcctaagagatttgacatgaaagtcactgcaatagaggaggcccaagacatttgccacatgagagtagatgaactcattggttccttcaaactttgagctaggactctcgatagggctgaaag

SEQ ID NO: 31210 - DNA, 327 bp, Glycine max
  unsure at all n locations
tcatgattgcctaagtgtggaccctcaagtgcaatcctttattcttctctttnttcggagccccatgaatgtcattgcctagcgctgttcatgtgtcctccaccttccagcttggtgctatatttcatgattgcctaagtgcggaccctcaagtgcaatcctccattctcccccttctttggagccccatgaatgttatttcctagcggtgttcatgtgtcctccaccttcgaatttggtgctatatttcatgattgcctaagtgcggaccctcaaggcaatactccattctcacactttcttggagccccatgaatgtcattgcct

SEQ ID NO: 31211 - DNA, 426 bp, Glycine max
  unsure at all n locations
agcttttatatatatgttcatagtgtatgctaactttgtctccttctttaattccaatccccactcggacttccaaaatagcagattctgaatatgataaaaagaaagatccacacattaatatttaagttttatagttattccaaccaactggggaaatttagattcatcatanatagattagtaggctaattttgcatatctgaccttgcagagtatataacagaatttgggccgatgtacttatacatganaaatgggtaggaagaaactaaagatatggaaagcaacatcacctgataaaggtatgtgattgactcaacggaagatcttctccaatggcaacaaggatntgccattcaacaagatcctgaccaacaatcatttttgaacatggatgatcaacctgtattaacatcccccatg

SEQ ID NO: 31212 - DNA, 429 bp, Glycine max
  unsure at all n locations
agcttcttacaacatcttgagggctaagtatatggaattcacctttgtttgttctgtgctgagatggntgatgaaaagttgtctgatgaaattttacatcttaattaaaccttaacaattttctcacccaacaaaactttgtatgccctccataaataattttatgtgctgatccttactctcgatcggttgctattggaggattttagtaatttaattatatggcataataaattaaaatgactatacatntgtttacttactcacaactctgtatggattcaaaggtgaattttactatataattaaataacttggaaaaattacagaaggaaacattcgaccacgtaatttcatataataatcttcaccaaaattttgtacacgttgatattgtcattgcactaattcatttataaacaatcaaat

SEQ ID NO: 31213 - DNA, 251 bp, Glycine max
aaatctgacttgccaaggttggggttggctctctgctgacacatacagactttgcgttcatgcacacctggacaatgacacttgaactatctgcaatattacataacctctcaactcacacaaatcacccagcaacaatatgactttcagcacgatacaacctgatggagaatacctaactcaatgtcagccttacacacacacagctgtcttcttcaaatgtgtggccaacaacatacatctcacatcac

SEQ ID NO: 31214 - DNA, 394 bp, Glycine max
  unsure at all n locations
tgccccaatgattgcatactgtacaggcatgaattttatgtaatgtccaaatgccctatctatgggacttcacggtacgaagtgaacgatgaagaacacagtagttctgatgaaaactccaacaagggccccccaacaaaggttttgtggtatcttccaatcattccaaggtttaagcgtccttttgctaacgaggacgacgcanaanaccttacatggcatgcaaatggaaggatttctgatggaatggtccgtcatccggctgattgctcccagtggaagaagattgatggtttgtatccggatttcgggaatgagccaagaaatcttagacttggactagccagtgatggaattgaatcatatggcaccttaagcactcaacatagttcat

SEQ ID NO: 31215 - DNA, 480 bp, Glycine max
  unsure at all n locations
ccccgccttaccttgtgangctttgaaccttgggaaccagctcgacccgggagtcttagagcacctgcagttagtcacctttctaacgttatgccagacagaacaacattttggcattgncgccagtccaagaagaactaatcttccacgcccatgaccccaaggggtggacgagttgcccgagtgtacgctgaaaaatacgctagaagaaaggtgatcaacttcttacatcaagagcaacaatgtggatggaccgatttgctcttactttgaacgggattcaagaacttcctcgattgctagccaaggcttaggcaatggtggacacctacttcgccctcgatgagatgcacagacttctccggtattggcagcatatgatagacttaatgggccatantattagaaaccactacgaagtttgtattggcactcagatcttgactaattataactttcttgaaaaatgagttatccatg

SEQ ID NO: 31216 - DNA, 453 bp, Glycine max
  unsure at all n locations
ctcagctaatgagcagatataattcaaatgatttaaagtctttaaanacagattatgtaaaaaaaaattgatttacagtccttaagcaaaattcttaatgagagtaaacagaattatggaaaaacgaaaaaaccaatggcatgaaatgctttggaatacaactctagattgatcacactcttgtcccttctcactcccccanatttccattttcatcccagacattaacgtgttctggattcatgaccttcaacagcgtacaccttaaatatgtaacttacttgttcttctttccatctttttctgcctcttgtttgaattgcatgtactgttcaagcaatttcatcgtaatcctctacttctgctcgtcttccaacaacctcatttgctcacgttcatggttttcctctgagcttgctttcttgatctgcaccaagccatcaatacataaaa

SEQ ID NO: 31217 - DNA, 414 bp, Glycine max
  unsure at all n locations
cgcctgttttaagctagtannttcctttgatagtgacagcggatatgaccacgttggaaaacgattccattaaaagactactaactaaaaagatcatgtggaccacattagtagaacaggggggtggcaggtgaaaacatatgcatgccttactatttaaagtttacaatatggaatatctaattatgtcaataaatatctgaaatacgagctactatgcttatttatttatctgaagatacctcgataaatttctaactctaactgcaagaggcttattttaactcgcgatacaatgagtttcaattgacccaaattgagacactacacacttggacatccacaattctcaaagatcttctctaagactggaaagaaagcctctacttggtgctgtattatcaccacatgaca

SEQ ID NO: 31218 - DNA, 564 bp, Glycine max
  unsure at all n locations
acaaccgacacagcaagcgcanctgcagaacacatttaatttnannnntannnnnnnnaagccgggggtgtgactccctgnannacgcgacatatanaaactcaagctntacnncggatnnnnacagcacaaatcaaacacacatactatatattccaccgcacacatacccactagagaaaaaaaccagatgaggacaaaactctatccactcacacgaaagaaacaataacacaagacaaaatcgcacacatcntatagaactaactacaagatatatcgccacacaacggttatcaaatattaaaagaaaaaaatgaacataagataatcaaagaatttacngaaagaaccaaaaacgaaagagaacaatagcccttccaaaaaagccaacaagaactgcaatcaacttacatattttctgcctaagaaaaaaacttaaacaatttctcatctcttatcttcatacactactaaatatctctaactctttaaaccttcaaagtgtcatacaggtcactgcccacctcaatagaaagagacaagaatgactacgcgtagcag

SEQ ID NO: 31219 - DNA, 398 bp, Glycine max
agcttttgttaatatattcgttctgaacttatcttggaattaattgtttcttaaaaaggaagtgtacacaaataacattttaagaaaaaaaaacttttaaaaaacaacttttaatgaagaaaagtaaaaataaaagaaaaagaaactgtagcaaaaagttaatattatgatcttttacttctatttctttttttccaaattataaaaattgaaggacacacaatttaaaaaattcaacttaataagtaatttctaacttaaaagatatttttattttctatgtctatattgttaaaaagtaatttagttaaatgcattcaaaatattttttatattattattaaatcttaaattgagatattaattaaaacttgtgacttcttataattattacttta

SEQ ID NO: 31220 - DNA, 321 bp, Glycine max
atgatgtgatcctgcctaagagcggatcgcttgatacatgctacaaagaattggatgacgccacttcccaagatggaagagaaagtatggtagacgccacaatgattaaccttataagtctgagattgggtcaacaagaaacccatagagaagctctcaccaaattttatgaaaatgcccatacttatagtgtatctgaacaaaacgataaaatagacatgggtcttctaaacagtttgtgccactattacaatttataaaaattatttatataaatataacatattggtatggccttcaaataatctggacttcaacaca

SEQ ID NO: 31221 - DNA, 401 bp, Glycine max
  unsure at all n locations
tctagcttgttngtgaagcttctatggaggctggatctttgagcttcaatgaggtagcttccttgagaagctttcttaagaagttagaacttagctacacacacccctctaataactaagctcacttccttaagaagtttccctgagaaacttccttgagaagcttccttgagaagattcctagagaagctagaccttatctacacacacccctctaatagctaagctcacctcattgagatgagaagctagagccttagctacacacatcccctacaatagctaaactcaccccattccaaaatacatgaaaatacaaaaaagtccttactacanagactagtcaaaatatcttgaaatacaaggctaaaaccctatactactagaatggccaatatatg

SEQ ID NO: 31222 - DNA, 447 bp, Glycine max
  unsure at all n locations
cttagagggcaaaattgagaaatgtgcatctactatatgttttttatgncgggaggattgagaaaaaagatataggaataggatcacaatgtatttgaggccacattaagtaaaataaatgtacactcattatatgtttttctatgttgccatgcacatgtgaatatctgtgattttcattcaaaataactcactgacactcatagtggcaatttagatgctattaatcggtaaaattaatttatctatagtaaatattgtctagaagactgagtttgacttgaatctgtaggattgaaacagattatctcctcacctgaagagaccatggatgatagtcatcaacaaaaagattctatggttggacctgaagataatactcttcaacacgccaatagaaatactcattatgaggagcaagcagaagcaaacaataattacatcaca

SEQ ID NO: 31223 - DNA, 388 bp, Glycine max
  unsure at all n locations
acaaaaagaagtggatcagatggtgtataaatcatgtagcgggcaccttcctacaaggaaaacgccctatatattaaaaacaccgtaaaaattagtgtccatatttctactgaaggtcgcaacaagccaaaggcttctttaacaagcatctaaattttaaatattggatgaaaacaattcaacaaaaaatgcatctaataaataaagcgagcttcttcatggtgtggtgtaaacacaatatggatgtgagaaagtaatttcgatataagaaaataacgataatgaattcagtatccaggattcttncagtagacttgattaatagaaaagaataacaagaaaatgagagaagcgttcatatggtaacacangcaggggacacagtaac

SEQ ID NO: 31224 - DNA, 455 bp, Glycine max
  unsure at all n locations
tctctagctactcttcaccttctatcaccatttctatntttgactatatcgaaggctnttgttggttactttgttttccacaagaaagactttaagtacacattctttgtcattttataatcaccaacccaacaattgggtaacttagatggctngttttttcatctgtcaatctatcctttcgaaatattgacgactgtgtttacagtgtgtttaaaacaataattaagaaaccttgacgctgaaattctagtattaaaaatttaatcattttgaagataactggttaagtgtttataggtgagggtcttccatatgtggaaattacattgagtttcaactaatatgagagacaggcatgcatgcatgcaatccattaaagggaatatgaatatcggaataaaacttatctccctattattaanntattttcanaataattataatcaacacat

SEQ ID NO: 31225 - DNA, 498 bp, Glycine max
  unsure at all n locations
cgccgaggccatgaagcattgtgacttccgtcgantccagctcggacccggggattctctagaggcgaactgcaagcctgccagcctaatctcaaatgtttaggttaacaagccaatccctaagacttgaactaatatatgccgggctaaccagagaattcaacctgagcctgcctcccttggaaaccaaaacaaggtaacaaaggcctgagcaacacttctaccccccacattcttccaattccattaggaatgaagaaaaaaaaattgaggttcggggttgcctccgggaaacaattctttcacggagacaatagttggtgcctaagggggcatataagacataaagaacacatcattcctctttctcttcttaagtagaaacttcatgaagtcatgcatcatgcaatgacctccaaccattgcctagaagtgtcgtgagcaagcataaaacgattaaaatgatcacttctcaagcatttcctgacataaatgtgg

SEQ ID NO: 31226 - DNA, 324 bp, Glycine max
  unsure at all n locations
ccaaccttcatacttgaatcttgtgatggaagccctctcttgaaatgactttatgagggtttaaaccagagcaaaaattgcttatggaaatcatccctatgtatactctcaaatcgtgttggttatgcacgagctcgaattacaagatctatgagtcttcgttgggcagcatgaggagctgtaactgcgagctcatgcacggctttgctggctcgtgtcgttagtcctgaatgagaaccccagaatatanctgcttatgacaatataaactaactggtgatgacaccccctgtcttcttcccctactgataacatcataatata

SEQ ID NO: 31227 - DNA, 427 bp, Glycine max
  unsure at all n locations
agctttataagcgcgggtttgggatactaaggtcaagtgttcgcgatatgcgaagatgatgttccgagtactttggatttggtacgaccatgccctcctgatttccagctgggaaattggcgagtggaagaacgccccggcatttacgcaacgagcataatgtaaacctttacggttttaaaagctctatagttgggcctaggctttagagtttntcctttgttaaggctttgtgtcttttgtttttgaatttataatacaaggatctttcttcatctgttcctatgtctctacccattctcattcatttgcatgtntacttctttntctgaaacggcagatccgatgacgagntccccgaaggtactaatacctgggacccgcctatcgacttcgagcaagaaatgaatcanacggaagatgaagg

SEQ ID NO: 31228 - DNA, 350 bp, Glycine max
tctttatttgaacgactgatatttgaatttaaggaaaaaaaaatagaagggattaataagaatattccttcaagggcactatcgtcgcagaaaaggagcacatgtaggtatttggattatcttttcctgtctaaccagagtgcgctaagttgcaccacttttagttgagataacgatcatttcaagactcggcgttaatctcatactgaatccttcattgaaatatataaaagacgtctcatgtccagaatttttaggaatgaagaatattaagtgaaaatgatcaaacatctctgaatagaaactctattaaaatcattggacgatatactatgcacttaagcacttca

SEQ ID NO: 31229 - DNA, 297 bp, Glycine max
  unsure at all n locations
tttgttcccttattnttctatgcaaaagnttctggtacataactactacaattttgctggcatggagcggtgacctggtgatatgtgctgcttttgtcatacaatggcattgttgatgacacatttgcattgtaggctgtaacaatgtgcaagcgcatgtgttctcctctttacataatctggcattcttgtatgtttgctgattgatgaaaaccacttatacaacaaatgtggatggagtggatacatatatagatgtatgtcctacctttgtttagtattgctctagcaaatctc

SEQ ID NO: 31230 - DNA, 318 bp, Glycine max
cactgccactgctgaatcttgattaccttgtgccacttgcatgaatgtatttctatacctataaaattataccttattaaaatggaaaaactttaatcactatttccttcttctaatatttcttgagtaaagtatcaaattagttctttacttttggaggcgttgtcaatttgaattctgaaacttaaaaaatgtcaaaatgatcatcgactctacattccgtctgtcacattagcttctgccgttagtagtctcttaacactgttaataaatgtatgatgtggcacgtgaacgcatacctggaacttttagatctaa

SEQ ID NO: 31231 - DNA, 428 bp, Glycine max
  unsure at all n locations
agctnttcatattatactgctgatctttagccaacacataattactagatttctaacaatatacatcaaatagttaactagattttgttatactttctttctggtggcagatgtgtgctaagacttggggcaagtgccttctctaccttaaaatttattttggaatatgcattattggtccactaaatattnttaatttcccactaatcaataagttatataaacatggaaaaaaaataaaattttgttacctgtaaactacaagataaaaaattatattattttgaaccccagacctaagaaacccccttactctnttgtctattctgcttttggtatgtgagagtcattgcctatgcatanaattttaataagaaatcagttgtagatagtaacttcttgatttccnctgtanaatatttcacatt

SEQ ID NO: 31232 - DNA, 261 bp, Glycine max
  unsure at all n locations
ttagtcacattaatcataggtgacaacggtaacatcttcccttagattcgacgaccacagacgacaatgacatccccccggaaatccggtggtgacaacgacattgccacggagatctattgacaatgacaacttctatggcttaagcaactttaacatcacattgttcatccacagnttaatggttaagtttgagccatcgtggaggtgatacatgaagacatggttgatattgtgtggaacatcctgaaattttcttat

SEQ ID NO: 31233 - DNA, 328 bp, Glycine max
cttgattactttaaagtttattgaccccctccaaaagtatattttatggggactgaattttgataatttccacaaacttcatttatgctatcaactaaatttccctcattggatcattctaattttaactacacaaatgataaaatattgaagttcctgttgttcagtaatattttaaagggaaagtttaataataattaaatacattagaaagtatttaaatacgcatgtgatgagtagcttatattaacaatttttatataaaagattatattatcttccggctatgtatgtcagaacactcaattagataacaaacacaacaatg

SEQ ID NO: 31234 - DNA, 447 bp, Glycine max
  unsure at all n locations
tgtgcagatcgaatcactcccgcatcttatctctatcatgtattctttctttctttacccactcctcacgtttggttttttagggaaaaacaccataactaaacgcgccacaaggcatccctatcgcaccagatccaaatctacaacgatgggtgatcaagaggagacacacgaacatatgaaagccgacatgtcggctttgaaagaacagatggcttccatgatggacgccatgttatgaatgaggcagctcatggagaataatgtggccaccgctgccgctgtcagttcggctgccgaagcagacccaactctcttgggcactgcgcaccatcctccctcaaacatagtaggacggtgaagggacacactgtggcatgatggcaaccctcccctangatacaaccgagcggcttacccttatggattgccgcccaactactcacc

SEQ ID NO: 31235 - DNA, 354 bp, Glycine max
  unsure at all n locations
caggtttgctagcttgtantgatttcgctccaattgaagggttcctctcagtgtggggtttcaacggcggtttgaggcaaccaccaatggttgtgggtggtggagaataagcttgggacattggggaagggttttggaaaaaagaaggagaaaggaatggttgctttccaaggctacacgaaaaataagacttgaaacactcaagtgtttctgctatcgggaaaagaagcttttctcacacaccacaagacatatcgcagatcgcaacggttagagccgtggaaatatgctctatgaacctccagaccaaatttcaataagatccaacggttaacgaatgcatgacggtgattt

SEQ ID NO: 31236 - DNA, 297 bp, Glycine max
ccttatcgacgattaacaacagcttttaatgaaaggcaggagaatgaatgccccccgaaaccattaactggaaacgaagttcatgattgggtaaacgacattgtaaccgtgtttgggaagtcccatttgaagacatcatctcgcaacaacatgtggaagaaacgcttaatattctttgatcttccatactggtctgatctacatgtgcgtcattgtctagatgttatgcatgtggagaaatatgtgtgtgatacgttaattggctctcttcttaacattaaacggaatacaaatgat

SEQ ID NO: 31237 - DNA, 414 bp, Glycine max
  unsure at all n locations
agcttttgattccttcaaacaacaataactttttactcggatgtctgattgacacctgtaatatatccagacgctcgaaattgaataccgaagctctgagcaaattcaaacgacaataagtttctacttgtatgttcgattgactctggtaatatatcgaaacgctcgaaattgaagaccgaagctctgagcaaattcaaacgacaataactttttactcggatgtttgattgagtcccgtactatatcgagacgctcggacttgaatgccgaagctctgcgcanattcaaacgacaataacttttttcctcggatgtctgattgagtcccataatatatcgagacgctcggacttgaatgccttagctctgagcaaattcaaatgacaataaatntttactcggatgtctaag

SEQ ID NO: 31238 - DNA, 430 bp, Glycine max
  unsure at all n locations
acacatagaatactaagcttcggattcaagtccgagcgtctcgatatattacgttgantttgtctgacatccgagtaaaaaagttattgtcgtttgaatatgctcagggcttccgtaatcaatttcgagcgtctcaatatattacgggactcagtcagacatccgagtaaaaagttattgtcgttggaatttgctcaaagctgtcgcattcaagtccgagcgtctcgatatattacgggactcaatcagacatccgantaaaaagttattgtcatttgaatttgctcatagctaacgcattcaagtccgagcgtctcgatatattatgggactcaatcagtcatccgagtaaaaaagccattgtcgtctgaatttgctcatagcttcggcattcaagtccgagcgtctcgatatattacgggactcaatc

SEQ ID NO: 31239 - DNA, 412 bp, Glycine max
agcttattaaaaactcaaggtctgcccttggtactcatatctccaaaacccaaggtccacccttagtacatattcttgctaaacccaaggttcgcccttggtacatacctctacagaactcgaggtaccccctcagtccgcttacatgtagcaactacaatgaccatcgtcaagggtccaagttcaaccaaacgaactaccaccccactattttgcaagacttttaattaggtcaaaaccacacctactcctcataaccatcagagatctaaatgtagatcaactctaatttgttattgcgatttgattacttttttgtttatggtgccctatgtacgaattcgagtgaagaatatgttcaattcacttgcattgtcataaaacccacatgtttaatatggattataatgac

SEQ ID NO: 31240 - DNA, 359 bp, Glycine max
atctgatcatcatgctttgataaatgcaaaaaatttggggcaaatgatgaaggtgagaatgatggaaaaacccatgctgtgactgccattcttatacagcccagtttcccaccaacccaacaatgtcattactcagccaatatcaaaccttctccttacccaacacccaattatccacaaaggccatccctaaatcaaccacatagcctatctaccgcatttccaatgacgaacaccacctttagcacataccaaaacaccaaccaagatatgaattttgcagcgaatcagccctgagaattcaccccaattccggagtcctatgctgacttgctaccatatctacttgataattcaat

SEQ ID NO: 31241 - DNA, 418 bp, Glycine max
  unsure at all n locations
tgttgcaagcttttaaaattgttgtctttcaccttctcgctaagccaatctggtggcatagagagcttccactaagcgcaacactcataggctaagtgcgaggaagactctggaagaagatgagccatacaggttcgctaagcgtaccgcttcatctcactaagcacaccgctttagttcatttgctaagtgagaaaggcacgcgctaagccaaaattcactaatgtgcgctaagcgcacgagcacgaacaaggccacctatntaagccttanatcagattttagagagggagtttggactgggattcagagctttgcatgtctagagattctacagagagaaaggtccaagtgctagagagtnttgagagattttgctgtgtgaagatctgcagagactatagcttgaacaagagtc

SEQ ID NO: 31242 - DNA, 453 bp, Glycine max
tgatagagttatcatcacatgacattttattggcactgaataagttgctttcgaagcaacatgagattgtaacagaaacactcggtaagctgtcaactaagttgtctatgggtcaacctacacactcttctattttgcaggttacaggttataccatctggggtgaggctcatgaaacaagccaatgtattcccactgaagaaaacactcaataaattcattatatgggaaatcaacagcgacaagggtatactcaaggaggattttcaggcctccagcagggtccctataatcaacaaggacagtggaggacacaccctggcaatcagttcaataaagaccagagtgggccttcaaacaggccaatccaacaaggacataacatattccagaggactactaagctggaggagatcttgatctcagttatgtaggtaacaatatcaaatcata

SEQ ID NO: 31243 - DNA, 360 bp, Glycine max
  unsure at all n locations
tcaagcttctttggagccattgcctgcaacgacacatccataaaaagttagtttgcatgaaatgcgtaaccattattntagttatcctaagtatagcaagcaagaagtcaatcaactntgtgtggtttttgctaattgcatgtgttaccgtgcaactaataaaacaaatcacaactcagtgcgcattatttcaaaagaaagaaattaacatcctacattaatttaggtgcaatgtgcccatcaccttggtttgttatgaagatgcatgtatgccccacaggatgtggtaaaccattatgctatagagtttaggtgttgcacatctgcttcaaatgttctttnttcaagtatttgatcccc

SEQ ID NO: 31244 - DNA, 439 bp, Glycine max
  unsure at all n locations
tccatcanaggtgcagatgacgatgttagtctctggatgctaccagactcttgagtctgacggatagcaaccaagacattttcgcagtctcggtcggaagacgctgacatctctgagaaaggtgcagatgatgacgttagtcactgcatgctatcggactcttgattctgacggataacaaatgagactttttcgcagtctcggccggaagacgctgacatctctgggaaaggtgcagatgatgacattagtcactgcatgctactagacttttgagtctgacggatagcaaacgagactttnttgcagtctcggccggaagacgctgacatctccaggaaaggtgtagatgacgatgctagtctctgcgtgtcaatgggctcgcttgcctctagctgacaaaaggtacggataaccataaggtatctccgcatatcat

SEQ ID NO: 31245 - DNA, 400 bp, Glycine max
  unsure at all n locations
agcttgtttgtggggcttctatgaaggctggatctttgagcttcaatgaggtcctttaatggtgattttccaccatggagatgcagcgaaagacaaagaagaagaggtgagaagaggcgccatccactatggaacaagccatggaagaaggagcttcaccaccaagatgagccttggataagaagcttggagaggatgcttcaatggaggaaaagaaagagggagagaaagagagaaggggggagcacgaaattgaaggaataaaagagggagagaagtggaactttgaagtgtgtctcataagacttttattcatcaaagttacaacaagtgttacacatgcttctatttatagactangtagcttccttgagaagctntcttaagaaaacttccttga

SEQ ID NO: 31246 - DNA, 430 bp, Glycine max
  unsure at all n locations
tcttgcttcttgtcataacagctntgcactcttcttttgttattcttcttggnatttgctccaaagttgttggatgacttctcaactaactacttggccacttgacccacctggatttcaaagtttttcagggctgattcagtactcttatggttggacatggccacttgcataaactgggctattgtctcctccagtttggtggtcctctgaaaaatatttggcccttgttgaggtggcctgttggaaggtccaccctggtccttattgagttgattgccaaggtgtgatcttcattgcccttgctgattatagggaccttgatggaaccccgaanatcctncttggtgtatccttgtctcttgtgatttcccatgtaatgaactctctgagtgtgctcttcaatgggaatgcaatgacatgattcatg

SEQ ID NO: 31247 - DNA, 427 bp, Glycine max
  unsure at all n locations
agcttgtttcatcatttatgcgagacatagaccaacatgctagccatcatcagcaagtaccaagaagaattaaatctagtcacgacccacgaacataaagtggcggacgagtatgcccgagtgtacgcggaaaaggaggctaggggaagggtgatcgactcgttacatcaagaggcaacaatgtggatggaccggtttgcttttactttgaacgagagtcaagaacttccctgattactagccaaggccaaagcaatggcggacacctactccgcccctgaggagatccacggactcctcagctattgtcagcacatgataaacttaatggcccatataattaggaactgctagaagtttgtatttgcactcagatcttgactagttataactttttgaataacatgagtntatcccacgtttttac

SEQ ID NO: 31248 - DNA, 362 bp, Glycine max
  unsure at all n locations
tacacttcaagcatacggtgtggcgtataacttctctctcggcaaatgtatatggaaaggccttttggtgttaaatttatgaggtttttcttattgccttttttttggcaaaaattgaagcttcgtgttgtttatggtctgaacagatcaagctgtaaattattaactgtattagctttcggtagtggtctctcccaaatggtttacaattccatattttntacaatgcttgtctttgaggcccaaattcatttacattggattctatctagactcattaatattttacgggagaaatgctaccaacacatgtaacattctttatatcggtcgatatttgttggatattgttcaacaatctt

SEQ ID NO: 31249 - DNA, 350 bp, Glycine max
gaagaagaagaagttctagaagatggttcaaaaggtgtggaaaaaggtatatcaaggtcataaaatgccagtgaagggcttgcttttatagactcttcatggctggtcaagaaaaccattgaaagaagtataaccttgagaaaatctaaagaaaaccattggaagaagtacatctcttgatttttattcaaaacttgtcactggtaatcgaataccaaaaccatggaatccaatacacaaagctttttatgaaaagatatgactcttcacaatctaatttgaatttcaacgttcacatacactggtaatcgattaccaatatattggaatcgattacacccatttaaaaa

SEQ ID NO: 31250 - DNA, 248 bp, Glycine max
  unsure at all n locations
tcataatagatgactagaatcttctcattatcccttctttccttgaagaaacatttggatgatttcttccatctggattcattggntgtttctctacatcttcctgatctttctgcagaataatgacanatcatctctcgtagcttcttcatattcataatcatcatcagaggaacntatcacactaactactttngatgatgctttangcaatgatttggatgatgaaggtttcttggtcttatgga

SEQ ID NO: 31251 - DNA, 408 bp, Glycine max
  unsure at all n locations
cgctatcttgngacgcttctatgaaggctacatgctcgatcttcgagcaagtcctttaaggggaattgccccctctggagagccgcgacctactataacaaaaaggtgcgacaaggtcccttcccttaggcactccccgcgtataatgaggctgacccacaagattattcttcgcttctaaagttcgaataggtgcctccttggaagcaaagaaagctgggttttatttaataggggggcaccccgaactacacggaataccttcatgcacaagagctaccttggactctgtgctataacagctgtctaccttccatgtgagcgcaagctttacacgagctgatatctatacactaggtctcatccttagaagactttgataatagactttgcttaagaacatacttn

SEQ ID NO: 31252 - DNA, 380 bp, Glycine max
  unsure at all n locations
ntaactnttaatctcagattctttggtttgactgagattctttatttggtttatgaaaagaattccctccatataattcaacgtttgacacctttgatttgatttacttgagtttataaaaggctcatgccacaaatttgtggcgtcgtctaatcatgtctgaacatgcaaacatgatgcatatgaaatcttaatattccaatcttatttttctttgcagatatatgatgtatgcattctatgattcttttttacatcttaaacttgatacgtcctaagtattttggaccaatgtcaattgtatatatctttagcacttctatgtgagatccacaaatacgtttacttgtggcatatatgacgtgcattctttcatgaat

SEQ ID NO: 31253 - DNA, 374 bp, Glycine max
  unsure at all n locations
tgttgcaagctntttatgagacctacttttggtgacttgtttcaagagaaggtattcttggttacaaacactaaacacaagggaccaacattccttaagttcattgcaagaagcaagatttgcttcttggttgatcactggacacaaaagaccaacgtcttttgggttcattgcaagaagtgggtataacttcttggttgttatcaatggacacaagggaccaacgttccttggggttcattgcaagaagtgggaataacttcttggttgtaatcactgaacacaaaggagggaagtcttttgtggttcattgcttgtaaaggaaatttacaagatagtggaaatctcaagcgggttgcttggngactggacgt

SEQ ID NO: 31254 - DNA, 456 bp, Glycine max
  unsure at all n locations
ctattaaattanatagaccagacttagacttattaattagttgtatgagccngataggcctatatatatgtatatatatatatacatacatatatatctatatatatatatatatatatatatatatactattttttgttccaagaagactctaatcggggtgagattgactctccttttcctttaacttgcctctcacgttcctactctataaaatatcaaatatttatcgtgaataatacttttaaaaaggctatcactccacgctcgactcttaaagaggtcacacccgacccaaacaagagtctctgataggctatangccagactcacgccctcacaaatcatcgtagactacgctcagggctctcacagtctggcctgacctattctcatccgctattagaatgtgaattacacacactaaaatacactactttcacactacacggacta

SEQ ID NO: 31255 - DNA, 370 bp, Glycine max
  unsure at all n locations
agcttttcntttgtntgattttcatacaacaacctgtctggtttggcgcctggtaccggtcaattcagctacttcaattacacgtctttcttgggaaaccctgacctctgtggcccctatttgggtgcttgcaaagatggggttgccaatggcgcacaccaacctcatgttaaaggtctctcctcttcttttaagctgctacttgttgttgggttgctactatgttccattgcttttgcttgggctgcaatattcaaggcccggtcactgaagaaggccagtggggctcgtgcatggaagttgactgcgttcaacgtttggacttcacttgcgatgatgttttgcattgcttgaaggaggataatattat

SEQ ID NO: 31256 - DNA, 434 bp, Glycine max
  unsure at all n locations
tgtatgacatgagaaaatactagtaaacaattcttgttgatgggtttggcttaccgttgagagatgtttaaatagttattaaataaaaaaaatttaaatttttatttcttataaatgtgtgtgaaaatgtgtgtccgtttaatctaatattaaactaaagacactctaaatttttataacatcatctaatttggttaattaaataaagtgtgtgaattattataagttntttatatttatttttaatttatatgaataaaaataataataacattgtcacattaatctttacaactaatagaaatattaaataagtctcttgaatatttaataaattcttaaatctaactattgatcatcattttaagtcataaactatatgtaatattatcattcaagtgatctttttttgaaattgaactaatgtgatttca

SEQ ID NO: 31257 - DNA, 408 bp, Glycine max
  unsure at all n locations
agcttttcntcaggcgatgggtagttntggtgacacccaaatgccctcccaggggtgttgaatgatgttcagtgatgacactatgaaggaatgggttatcctgattgagccagattcgacccttgaacagtatcagcccgtgaccgagagtatagtcaggatggtcattagggttatcacgaatggcttgagcaaggcgttggaactccgagttagagtcgagggattgcttgatgtcactgangaagtcaagctggggaacactaaagacgagcaaggaagcttcaggagatggagctcgggaaagagcatcagcgatcacgttagtggcgccagacttatactgaatggagtattcgtaacctagtagctttgaaagataatagtgttgctctggtgtctgtatga

SEQ ID NO: 31258 - DNA, 453 bp, Glycine max
  unsure at all n locations
tgcanaccanatgctcaccactgctagacgaaaagttctttttgtggttcatataaacctcctgctctaaatcaccattaagaaagattggtttcacatccatttggtgcaactcaaggtcaaaatgaacaactaatgtaaagataataccaagataacctttattagatacaggagaaaatgtctgtgtaattgattcattctttttaagtaaatcccttagcaatgagtcttgccttatatctttcaatgttgcctaatgaatcccttttggtcttaaagacctatttactgccaatggcctttgccccattangcaactctacaaggtttcaaactccgttactctgcatgaaattcatctcatccttcatagcatcataccatanatntgactctttacaactcatggcttgctcanaagtttcgggatcattttcaactgcaatatta

SEQ ID NO: 31259 - DNA, 389 bp, Glycine max
  unsure at all n locations
agcttttgcagttgttcatcctctttataagcttctgcaagtgccaaatacgattccccaagcaaaagaacaagcttccacaacttatgatccaacttggatgttggaagccattctcggatgtcacaaacttcaatacagtcagcatctccacaggcacaaacagaaacattaaaagatgatggtctatcacgattttcattgaattgatccatcacctccggttcagtgctctgaagctgacgcatccatctcagagacttaatggcctgtgaaacatgatgtacggcagctaacttggatgagattggatcagcaactgtctgaaccacaggtgtggaaactggacatacttcacaagccanagagctatcatcaggatacaagct

SEQ ID NO: 31260 - DNA, 428 bp, Glycine max
tagcccaataatattgctaacaataatggtaatatctatatttcttactcccctccctaaactatagttcacttagcatcacacttgttacaaagtattaaaatgtcgcaacatctttaatgtatctcagaatattgttaagatcatattgcaaggtatgaaagttgagtctcacattgaaagtttggcatttaatgtagggttttttaggccttcaccttcatttttccaactacaattgatggcttttatggtgtagttctggtagggtcttaataattggtattagagcttcttcagtgttgttaaatggtggcgctacggctaccatggctgaatggcatcatggtttttttgtcaaccaccatcaggaaattgtgaagggaggccagttatggtggcttctattagacaatggcatctttata

SEQ ID NO: 31261 - DNA, 381 bp, Glycine max
  unsure at all n locations
agcttgtacgaatgtaagacacatcttcttcaacctttgtgattcttgactccatttcattgaagcgcaaatccacttgtaattccaaagtgtcaaacctttcaccaactggttcggcaacaatccgtgcctacatccaatccccaagcaacctgcggtccttgagatttcttttcaaccttgtaaaaatcttttaacaagcaaagatccacaagggatgtaccctcccttgttctctntgaacctagtggatgtaccctccactagaactgatccacaagagatgtaccctctcttgttctcagtcaacaacccaagtagatgtactctctacttgtaccacanaggaatgtaccctcaatgntgtaagacatagatctc

SEQ ID NO: 31262 - DNA, 452 bp, Glycine max
  unsure at all n locations
tattctatatatagcctttatctncaagtatttgttgtcttatcttgatnggattcttcactttgttcttcgtttgaagtcttgagtccattgaagcatttaatgctttcttcatgcaaagttcatgatgaaggggctagtgtgctttgtacttcattagggaagtcacttttttcatcattgcaggtctataacaataaaatgcaccttttgatgagggtcagcgtcttccaaactgtggacttcatttattcttcatangactttgacagatcctacgagaattttttggcatgaaagaatcttagacagagagtattaaataaaggtcttaagttcactacttaaatgttatataagatcgtcttatgaatgcatcgtatgaaacttcagacgtacaaatacaaattatgatctgatagcatattagacacaacttttatcatttgtgt

SEQ ID NO: 31263 - DNA, 413 bp, Glycine max
  unsure at all n locations
tttagcttttacatgaagnaactagctcgcctaggtgagctgagctcgcctaggcgagcatgttacttcaggcttaagccaccagctggcctggacgagctgggcggcaagctcctcccctattttggctataaaagggcgtgggaggctgaaagaaagggttcaacaccttgggaaagcatatttcacttanaattattgaaaagaaggagaaagaagatgaaaatcaaggtcgagggtaacacttctgtaaccaaatccgtgaatgttctttgccattcttcgtcccgtcttcatcggtcatcgtccttcgaccggttatgttttcaattttaagctttgaattcattntattgcaccttangngtccattcttgctttgtatgttntcatcttcatcttggctactttcg

SEQ ID NO: 31264 - DNA, 432 bp, Glycine max
tattgggaaagacactagtcttagctgggatggtttgatttaaccattgctgctaatgatgaatggggggaagccaaaattcaagtgtgtattatttaactaaaagagtttctgtgcaagccagtcttttgttctttatttgcgattttgcttttatttctttttcttttttcttgcaatcttatgctagcttctctagactttgcttttaatcatagtatctcattattgattttctttttcgctgatgataattgcgagtggctatcaatcattttactaaattcttgctcagttgatgcagttctgttctatctcattatgtcccttcttgtccttcatttttcgcacgattataatttataaattaattgcaccattgacccactagaacaacctatttttcatggaaaatataagaatctgatcaat

SEQ ID NO: 31265 - DNA, 397 bp, Glycine max
  unsure at all n locations
agcttttggtcaatctgaggagtggtgtcttcatgctgtaaattgatggtttctgggtggaaaatcctaatttggttaagccagaaattctgcagcatttgcaaagcaaattcaaattaattgaagttatgtacaagcactgcagcttttacaaaaataagcactgcagcttatttaaggcagaaattctgcagcatctgcagtatgtgggtggaaaaagggtgggagtggaactttaaatggagaagacactngtttgacagagagcttgagatgacagattgtttccgtaatgatgttgctggcagcagtattcagattcacaaaanaagatgagtggatctggaaaatagaccctactggataatattcggtaattaaaggagagactacaaac

SEQ ID NO: 31266 - DNA, 445 bp, Glycine max
tctagccaaatggacttaccttgattaattcctttgtatcccttttgagccctggttccctttcctttgtttgaagctcactacaagccttaagtgaaaaaccatgatatcaccatatccttaaggaattttggagctttggaattgttttgggaataagtgtggggggttttgtttcattggacaacttggtttattggctatgcttcatgatgtattttgggccatacttgatgtacattgtatattggttaaatgttggacatgctgaatgaaatgttgtttctcaaaggctatagaataaaaaaaaaagaataaaaaaaaattcaaaaaaagaaaaggaaaagcaataaagttgagtgaataagatcttaaatggcacaaactcttcatggttaattcttatctttacttctttttattctcttatctttttcttaatatg

SEQ ID NO: 31267 - DNA, 372 bp, Glycine max
  unsure at all n locations
tgcagcttgttttcaaaacctttgagagtgtgaccttaaactgtgagtgaacggctagctgtgagtaataatctttgcatgaatctctgaattttagaatgaaatgtataaatgaggacatgatgaaggccatgattgtacatacacaagctctctaaccaaaaaccttaccttgaatgataattgcatcctttgctccctgtatangctgaatgattttgtcatgaattgaaccctgaacttaaataattatctcctaatacctttgttagattctaggagaacatatggttcaagacaacattactctanatttgggggagaaaagtngaacagaatgaanagatagatgtaagcatcagcacacacaac

SEQ ID NO: 31268 - DNA, 289 bp, Glycine max
atatatatatgacacatcagatgaggataaaaaaactcaattaaatttatgattgtggtatttcttccaatagtttggtgtgagacaaatctaaaatctccatcattaccatgcttgatagctgctaaagaattgttgaggtaagcatgcccatgcctacttctatcagtctaacatgttgaaatgtcggagcttcgtgcatcaagcaatcctctggttatattttataaaagaatcagttctattacagaacagtataattgccacgaatattctttcttgttttatg

SEQ ID NO: 31269 - DNA, 372 bp, Glycine max
attcttaatagaagaccttataaaaaaaatttaaaaaaaaatctttatgaactatggagaaaaagaaaactaaatctaaaatatcttaaagtgtgggggtggctaataaaaggtaatatccctattaataagaaatgaaaaattgaaaaaaatggtaattggattttggtggatattttttacataatactacttatagattcttagtttgtaattcagaagtaactgaaatttctaatgttactattatgcaatctagagatgttacttcctttgaaaatctttttccttaacaaataaatccgtaaatctttatatggtttgaaacaaactcccaaagcagtacacaaaaagttgattaagttattcttt

SEQ ID NO: 31270 - DNA, 450 bp, Glycine max
  unsure at all n locations
ctaagcttctaaggaggtgagcttagttatgagaggggtgtgtgtatctaatctctagcttctcaaggaatctttctccaaaaagcttctcaaggaagttttctcaagaaagcttctcaaggaagctacctagtctataaataaaaacatgtgtaacacttgttgtaactttgatgaatgagagtcttgtgagacacaactcaaagttcaatttctctccctttttcttccttcaatttcgtgctctcccctctctctttctctccctctttcttttcctccattgaagcatcctctccaagcttcttatccaaggctcatcttggtgctgatgctccttcttccatggcttattccctagtggatggcacctcctctcacctcttctnctttgtcttccgctgcatctncatggtggaaaatcaccattaaaggatctcattgaagctc

SEQ ID NO: 31271 - DNA, 311 bp, Glycine max
  unsure at all n locations
taagcttttttgctcgnattaagcgcacgancgggacacaggtctagacactgaagactttggttgatctattgcgaaagcaagaagcaaactcgttcttgacagagcccttcttaaactcacacaagctttctgaatatctcttgatcaacttccaatcaattatggcctttaaatacggtacaccgatatctaattatcatcctaatcgatgacaatacactaaagagaagcctaattgatacgaccataactaacagttatgctaagtaataacaaaaatgatatccctaattataacatcttatctg

SEQ ID NO: 31272 - DNA, 240 bp, Glycine max
attcccagaatgaacttgggacctttgccgacctatgcgagatacaaattcatccgatacaactagaccacatgccttattatgcaaattctgtagcttgcgagttatattaataactaacaaatccatgtggagaaattatatacagcatagcctgacattgagacttggattctgcgtgatacacttttaccacgtgacaactctaaaatggagcgttctctttatcaccgcaagctg

SEQ ID NO: 31273 - DNA, 413 bp, Glycine max
agcttattaacagttgttgcaacaattatactatcatttgaaaaaaaaaatgtgaaatcataggagcaaaattggaaaccttaatgccatgaatcattatttgtttaattgattggaaatcatagataacagtatttcagtaagacagtaaatgagtaaagagaaatatgtctttatcttaatcctacgtggaacctaataaaacacaatagaaagacaacacattttactatcaaaacaatccatatgagaatttattaaactttttgatgaataaccttcgtttgatcataacaattcgtaatagtcatttttgagatattgataattaattgtaatatcattcgactattcttaggatcattgattatacctataaataatataaaatttttttagtcgtcaatgatcct

SEQ ID NO: 31274 - DNA, 213 bp, Glycine max
ctatcagattcatccgcgcgagaatgcgaatcgaaaaaccctcctttgtccctctcccttctctcaaaccctcctccagagggtttcttcgacgcagcccaaatatcagtttcgtcagcgcgcgaaaggggaagctcccgattggatcccttaccccaaaacatttctgctggctcgtcaaaaccctaatgaaccccacgggattgaagactc

SEQ ID NO: 31275 - DNA, 401 bp, Glycine max
  unsure at all n locations
agcttttctctaaatttaaaatatgcatcaaacattgccatgaaggtacaagttgatgattcatggctatggaattgaagatttggccacttcaacacacatgccttgaagttgttacatgagaagaacatgatgagagatcttccaagcataaaggagaacaatgaagtgtgtgaaggatgtctccttggtaagcaacaccgatttccttacgcaacaggcggagcatggagagcgaaagatctattggagctgatacatacggacgtttgtggaccaatgaggacgccatcacatgagaacaacaagtacttcatactcttcattgatgacttctctagaatgacatgggtatattntctaatagaaaaatcaaaagtctttggagtattcanaaagtt

SEQ ID NO: 31276 - DNA, 450 bp, Glycine max
  unsure at all n locations
ttgtgccanaatcccaactcaccataaaccttgacccgggatgagaatttccatcgtcgccctcggaagaaaacaaaaaaagaaaaagaaagttcccgatcaaagatcggaagaaaacaaaaatagaaaaaagttcgcgatcaaagatcggaagaaaaaaaaagttaccgatcaaagatcggaagaaaccaccacttgaagtggtcctctccctttgattgccaaccaaaatcttgtgcactagtgacattctcgtcccgcactaaacaaaaacagaaaagggaaaggccaaaacactcagccaaatttctcaccaaaacaccattcccgaaaatgtcctattgatccatgatcatgcatgtaatctttgatttgataggaaatgattttcanaatcaagtcatgacatatctatgggttggaattaggataaaacacttgcctatgtga

SEQ ID NO: 31277 - DNA, 409 bp, Glycine max
tgtttaaatcattcaaataatatagctcattatctagcactaatttgcttatttaattaaacacaggcatttaagtcattgtttaacacaataaacttcaatcatttatgattacgcatgattacacttgcacttgtacatatataagcactcttctgaaagattaaacgtactgccgacaaactaggccctcctcccacgacagaaactatcatgtggtctacactctaaactatatagactgtaggcagtattacatgacagataaatgatgctaattgttcatcaattgcaattgtaaatgttacatatattttcgcgtattgtagttgagttgtcttacaaagaacactagttcatgtcagtagatactctctcaaccctgactattcatagtactataagttgt

SEQ ID NO: 31278 - DNA, 442 bp, Glycine max
  unsure at all n locations
cgcacgtcgattgtgatattccgaatgagaagagggtgatttcctttgagatcctggtactccgccgcatcaacgttggccacatnttagccaactatagacatcatgtgagtgaacagtaattagattactgaaaacacgtaattctgtgcgatgtaacttgggacaattcctttgagtatgtctactaggctagatacactggcgatacatatggatcctattatgattgacattggaagaatatacaatgacgtacggcatattctaactcagatgataccatatcaactgtgtgagaaaagagctgtacgtgacctttgacccgttaatgacgcatcatttatatttgttttgtatcaaattcactcgtacagatccgccaacatatataagaacagtgtatgatcgtagattaacaactgcttaccggatcccgacn

SEQ ID NO: 31279 - DNA, 407 bp, Glycine max
  unsure at all n locations
agctngtaatattgaacaacggaagctctcgagaaactcaaatggtcataacttatcacacggacgtctgattcagccgcataatatatcgagaagctggaaattgaacaacggaagctctcgagaaactaaaatggtcataacttttcacacggaagtccgattcaggtgcataatatatcgagacgctcaaaattgaacatcggaagctctcgagaaattcaaatggtcataacttgtcacacgaatgtccgattcaggcacataatatatctagatgctcgaaattgaacatcaaaagctctcgagaaactcanatgctcataacttatcacacggatgtccgattcaggcacataatatatcgagacgctcgaaattgaacaacgtatggtgtcgagaaattc

SEQ ID NO: 31280 - DNA, 443 bp, Glycine max
  unsure at all n locations
tgaatttgacaacagaagctctgagaaattcaatggttattacttatcacacggaagtccgattcaggtgcataatatatcgagaccctcgaaattgcacaacggaagcccttaagaaagacaaatggtgataacttttcaaaccgaagtccgattcaggtgcataatatatcgagaagcttgaaattgaacaatggaagctctcgagaaattcatatggtcataacttatcacacggaagtccgattcaggcgcataatataccgagacgctcgaaatngcacaacggaagccctcaagaaattcaagtggtgataacttatcacacggaagtgcgattaaggcgcataatatatcgagaagcttgatattaacaacggaatgtgtcgagatattcaaatggtcataacttatgacacagaagtccgatcaggcgcataata

SEQ ID NO: 31281 - DNA, 416 bp, Glycine max
  unsure at all n locations
agcttattcttatggactccctccggacttcaccccccgtgccaccccggaagatttaagccaagcccctactttcgaggggcaactcccaccttatgaagactatcccgggcaagacgatggggaaggagatacccatcttggccccctgctccacctcaaagatccgtccccacatgaactaccccaactgaacatagtccgccatatcccggcctcacccacacccgtaaaaggatctgttccctttgcggaagataagggaaagattgaggcgcttgaagagaggttaagagcagtcgagggccttggcaattacccattctcggatttggcagatttatgtcttgtgcccaacatcgtcatccctcccaagttcanagtaccagactntgataagtacanagggacgacat

SEQ ID NO: 31282 - DNA, 408 bp, Glycine max
  unsure at all n locations
acacttaaaactaagcttgagntcattcttgttcttctctttgttctcatgatttttttactaacgttgagnttcttcttctgccttgtagagctagatcaaacatcacttggatgtgatattcaattaaagtactaaggataacaaagttgatgggggcaacatttgagttgctagaaaagacaacaaaaacatcaagaacctcctttttcactgaagaatcttcatttgaggtgttagcctacttggacgcaggttcaagttgacatattaaaataacctcaacaaccttggctgcattggactcaacttgttcgttaactttttgcattacaccagagattgagagatcaataagaacacatcaaatatatgatgtggcaatgaggtgtagcaagcaaatgctca

SEQ ID NO: 31283 - DNA, 413 bp, Glycine max
  unsure at all n locations
agctttatggcttgttattnttcaatcataatagtagcaggttcgatatctcttcatcatttgaaaaatttgtaacaggagatagtgtggcagaagagtaaggatatctatcttcccaaagtcttggagggcaattaggcctttgttctggattttatgtcatgatcctgacatgtaagtgtatcgtgtttgagctccaattataagctcaacaagctttgctgtaacatacattggaaaaacagatcagatgcttaaagtagtctatcaagctganatgatgatgacaagaaagtaaggcactaaaagggaaacaaagcaaacaaataagtatgaagctcacctgtgagaaatcccatgacaggtataggttccanaactttctcagtgctttcaagtctttgcctaaaaca

SEQ ID NO: 31284 - DNA, 421 bp, Glycine max
ctgcacatgcgtgaaggtcttttcctgcacattgaactacctatattttcctaatcagctcattcaatgaaatggaggtgttattgataccaatgcccacagtattttgtttcctcaagcgagattagctctatcttgcttcgttcaatataccttctttttgatagcgaaaaagacttgatggtcgaatctaattaccactcacaacttaggcaaaactttacgtagaaatgagttatcctaaaatataaaccataaaccaaaagaccggatcagagaacattcagactgctattcaaactcatacatttaaatgtaccttgtcaagacttcatgaacataagaaacggtaaaccgaataaagtactgaaattggctgtaaagtttaatacaggactatcttgcctacatattttctgct

SEQ ID NO: 31285 - DNA, 378 bp, Glycine max
tcaagcttttatgcaacatatggagaggttaatgaaacaacgagatgatgcgctccatgagaggttggatcaaatggagaatagagatcataatgaagaagaaaggaggagaagagggaatgatggtgttcctagacaaaaccgaattgatggtattaaactcaacattcctccatttaaaggaaagaatgatccggaggcctacttggagtgggagatgaaaatagagcatgttttctcatgccacaactatgaggaggaccagaaggtgaagcttgccgccacggagttttccgactatgctcttgtgtggtggaacaagctacaaaaggagagagcaagaaatgaagagccaatggttgatacatggacggagat

SEQ ID NO: 31286 - DNA, 404 bp, Glycine max
  unsure at all n locations
tgaatcggacatccgtgtgaaaaggtatgaccatttcaatttctcaagagcttccgtagntcaatttcgagcttctcgacatattatgcgcccgaatcggacatccgtgtgaaaagttatgaccatttgaatatcttgagatcttccgatgtttaatttcgagcgtatcgatatattataagcctgaattggacatccgggtgaaaagttatgaccatttgaatttgcgagagtttccgatngttaatttcgagcgtatcgatatattatacgcctgaatcggacattcgtgtgaaaaggtatgaccatttgaatttctcaagagcttcgggtgttcaatttctagactctcgacatattatgcgcccgaatcggacattcgtgtaaaagctatgaccatttga

SEQ ID NO: 31287 - DNA, 401 bp, Glycine max
  unsure at all n locations
agctttatcttaatattttccaaatcatcaagaatcttgttgaaatcagccaattgttcagtggctgttcttgactctgtcatcttgaaggtgtacaattgttgcttcaagcatagccgatttgcaagggactttgtcatatacaatggctctagtttcaaccacattgaggttgttgtcctttctcttgcaacttctcttanagctttatctccaagcaatagaatgattgcacttcgggatttagcaatcatctctgatttctcctttgagcttagagattcaaacatcctttcttctcctttaagagcttctgcatagccatgttgaatcaagattgcttccatcttgattctccataacccgaagtcattttcccttanaacttctcaatatcgtac

SEQ ID NO: 31288 - DNA, 455 bp, Glycine max
  unsure at all n locations
ctatagaatactaagctctgtccctcacgtattgaaggcactttntttgctctccttttgtcaatngataatggtggacttctcttagcatcatggggtggtggctttgttctccacatgctcaggatcacaaaaacaaagtttgataacatttggttggcgattttgatccgcaacattttaaggattgctccactttggctcctgtttttggtgcctagagctgaccgcagctcttcaattcttccatgtaaaagcatgaattcagaggtggctatcgacccttcagacaccaaaaatgttgaattggtgtcccttgtacacagtgttgatggtaaatagtggaatgaaaagacattcttttggattctcaattccaaatacacgaaattaccaagccagtgtagaattaaacgtgcaatttgtttggatttaatgtggaaaaaaaataagat

SEQ ID NO: 31289 - DNA, 401 bp, Glycine max
  unsure at all n locations
agctttttttcagagacttcttgncatatatatcaagacaatgttcacctccagaacattttattggagaggaacattgagctctctacgggcatgtttgatgaattttacagagagctacaatagaggcagtggcaccgagtactcaccagactctcggaaaagcaaatagacatcgctctggtcaaagaattctactcaaacatctatgacccaaaggatggagctccaaaatattgcaaggtgcgggggcatgtgatcaagttcaatgcagagaccattaatgatttcttgaacaccctggtcgtccttggtgacagagaggaacanttggcatactcctagtacttgcacacatacccagaccaccaagcgattgcggaaccttatgcacacccgga

SEQ ID NO: 31290 - DNA, 456 bp, Glycine max
  unsure at all n locations
ntaattcattcagaaatggccaaactcttgaacaagaagtttgtgtgcctatgaaaaccagacagaaatcgtaaaaaagaaagataggggacgaatctccaaaagacaaagtaagtggtagacggaggtagacgaccgtgaatcataaaaaaaaaaaatgagagaaaaatatatatgaattgtaaaaaaccaataatcgaaaatatgcagaattggaaccttgagaacgacaaagggagatgcgtggtaacaaatcaaggttttcaacaaagaattttaagacggtggggatgtgggaggctgaaatcaaaggcacgtgattgagtaaaatattttaattagaattattagattaanattagatcaatgcataaggatttatgtaactctcttagaattatatatactggaatttaatccctttctcatatatattggtaacaaaacgtattgtaa

SEQ ID NO: 31291 - DNA, 294 bp, Glycine max
  unsure at all n locations
ttctccctgcctctatctcaatacacacacaagcatacaaaacatgggaataaaaaaaaaaatagcgaccgaaatgaaataccaataccacacatccaattagaaaaaataataaccggccctaatntaatatcctgatttctcaatatttattatttaagcggcgggaccctttatatacagtttaattcggccgccagctttgtcgtctctttcgtctccgatcattcccgtacgtcctttgcagttgactctcattctctttctctctctacacctctctctctctctctc

SEQ ID NO: 31292 - DNA, 411 bp, Glycine max
  unsure at all n locations
agtaatattttattttaacaatnccaatcattcaaacaaaaagcttaccttatattataaccaaattaatcatatataataactaggtcacaaaaactacgcaagtggtaacaactcaatcaacttagaacatgtttgacaatcaagtggaaaacaacttttgagacaaaaatatttttgcaaaagaataaatgcatgtttggacccaagttagaaatgatgtacacatgttacaatgcacattcaatagataaaaacaaaaacaacaatcttgatcttttagtaaaaatactctttctttaaaagtattttttcacctcattgtcaaacatgtacttagaatctcttgtttttctttcattttggttttacctatttcgatatatactagagcacacttgttgtaacaat

SEQ ID NO: 31293 - DNA, 418 bp, Glycine max
  unsure at all n locations
agcaatgttggtttccctctctcaaggtatgagaccaagtatacacacctccattcagaccaaactcttaaatatcatgcaccaagctggaacaagggcaaaaggctaggcaatccttggctaacaagtcaatagcagattgagaatcagattttactataagaaacttaaagccacgactccaagaaatctttactccaatgaggatcgcccataatttagcattgattacagaacaattcccaatattaactgagaatgagaaaattacatttcccatatgattgtgaagtaagccaccaacaaaaactataaaaatcacttttggatccatcacaattaagcttaaaatggtcacaatgcggttgctcccnaaaaatattgntctaattattatcctgatcactaccattccctc

SEQ ID NO: 31294 - DNA, 423 bp, Glycine max
  unsure at all n locations
agtattgctatattctgattattatgcctttttttatggttggcnttggctatattaattttatgaaaacagtctaagcaatgctggtgttttattggtttggaactaaacttaaacatggttgtgctacagattaagttggacaaggaaaagaaaagtctctcaattcgagagagagggatcggtatgaccaaggaggatttggataagaatctggggacgatagcaaaatttggaacttctggtatgtatgttgcggacattatcgctgaagtaatttttgtttgtgatgtgactgggaatatgttaattggagatgtgtgttatttcaacatttgttgagaagatgccaacaagtggagatctcaatctgattgcgcagtttggagtcagcttctactctgttatcttgtggccgactat

SEQ ID NO: 31295 - DNA, 374 bp, Glycine max
acccgggatctctaagcacctgcagctgcagcttttgttgtctattttttagagagaaaaggccaagtccagagagtttgagagatttgctatggaagacctgagagaaccgagcttgaagaggaagctgcctgagaacttagatgagttgtgaggattggaagttctaagtggacagacatcccaccactttattcttcatccttctctcttatctctttttgaaaggaagcttccagtatgggaggtaatctctgtggtcttcttgaagacttgagacatactgatatctattaatgtgtttgtggtcctatgcttaacctcttctcctgctttcttgatccgtgatgctggttttgagagcattgcttggg

SEQ ID NO: 31296 - DNA, 411 bp, Glycine max
tttgctcgcctttttttcacaactcccttgagaagccagagcttagctacccacacacctcttattactaatgtcacctccttgacaagctctcttgagaacatccctgaagaatctagagcttacctacacccacctctctaatagctaagctcacctccctgagatgagaagctaaagcttagctactcaccccctatactagataagctcaccctcattccacaaatacatgacaataccacataaaagtccctactactcagactactcataatgccctgaaatacacggctaacatcctatactactagaatggccaaaataccatgcccaatagaaggagcaacctattctaacatatacaaaaaaagagtggaccaaccttgacccatgtcgtctaatatctac

SEQ ID NO: 31297 - DNA, 416 bp, Glycine max
cctctacttcattcaaaaatggccaaactcttgaacaagaagtatgtgtgccattgaaaaccagacagaaaatgtaagaatgaaagataggggacgaatctccacaagacaaagtaagcggtagacggaggcagaccaccgtgaatcataaaagaaaaaaatgacagaacaacatataggaatcgtgaaaaaccaacagtcgaaaatatgctcaatcggaaccttgaaaacgacacagggagatgcctgggaacaaatcaaggttttcaacaaagaatctcacgacggaggggatgtgggaggctgaaatcagaggcacgtgattgagcaaaatagtccaactataattattagagtaaaaccagagcaatgcataaggatctatgcaactctcttacaatcatatatacatgaat

SEQ ID NO: 31298 - DNA, 418 bp, Glycine max
  unsure at all n locations
ggtttgcaagcttttactttctataacaaataaatttaaatctaattatttatcaaatatattattatcacaaaataatttcaattactttatgaataatatcgtaattaaattagttttattttttttatagtaaagattacaaatattattcccgagcgataatcctactcgagattattttgtgtganaaaaatcaattagaaacaataatatcatgaattaaacaatcttagttttcatagaaccaaaaattatcatttacgaagacaatcatactcaaaattattgtggatagcaaagttctattctattataaaataattctaaattacttattcaataatatcatagagtacattagttgtaattcttttatgatgtagaccataaatatccttcgcgggaggcaccaact

SEQ ID NO: 31299 - DNA, 486 bp, Glycine max
  unsure at all n locations
agcgcgggtttgtgatcacctgnannnacccacanttagantanttaacctccgtgatgntgtgcgtactgataggtaccatgatgttttttctgtggtttgacacaaaccggtggagaagacactgcaatggcactcctctcctttcttattgaccctgtagaccataatcttttcgcgttcacgtttgtggaggacacgtaattcaactctgcctttttctaatccaaccctgcatttttccccggccaacaccccattcccatagactgaaggcatgcaacccactagctgttcatatgacaacactggccaagtgtctaccatatggagatcattctctctcaacatgggaggagctacttgtgccccaactcctccattgctgagcatattatcaaggctcacgccttttcctaaaatattctgactcgatacggcaggaccacatcctaatgaccgatactgcctatgacgccgatatct

SEQ ID NO: 31300 - DNA, 405 bp, Glycine max
  unsure at all n locations
agcttattgagggtctccgtcagggcttctatttgttgggacaacaacttcttttgagccaagattgcatcttgagtggtgagttctagaaggcttctctttgttggtgcatatgtgtgatcacgaagaatggcatgatcactagctaccatgntttctatgagttccattgcctcctccggtgtctttagcttgatattccctcctgcggatgcatctagtaattgctttgattgtggtcgcatgccatctatgaagatgtttagttgcaccggttcactctacccatgtgtaggtgttctccttagcagtccgtggaaacggtcgagcgcctcgctaagggattcatcgagaaattgatggaaggaagagatttccttcttgccttcacagtctttgattctg

SEQ ID NO: 31301 - DNA, 398 bp, Glycine max
  unsure at all n locations
tcttaacacaacattcacatgaaagtaactttnttgtcttaacacacaacttgatacgtgaatggcaacaaacttgagcaatccttgagctttcaagatcatgacaaacgaaagacaaattgaagctgtcttctgaatccagaagccctacaatcaataagacaaggagtgagtttcacatttgaaatcactaaactatgtcaaacgaagatttgattatgtcaaacgaaaatttggtattcaagtttcatactcctttctctactgtctctgatagtataatacacatttattatcaatctatggacaccattctgtcttagcgttgtcagatatcagcttttgcgctttatttaataaacatgccacatatgtgatgtgaactaaaatatgtcaca

SEQ ID NO: 31302 - DNA, 400 bp, Glycine max
  unsure at all n locations
agctttttatctaaggctcatcttggtggtgaaactccttcttccatggcttattccctagtggatggcgcctcctctcacctcttctcctttgtcttccgctgcatctccatggtggaaaatcaccattaaaggacctcattaaagctcaaagatccagcctccatagaagccccacaagtttttgtcaagagggagaagggaagaaacaaaagaattctcaggcggttagtcatttgaatcttttggcaagagaaagaagtgaatgaagaagaagagtagcacaagtttttgaacaacgaacttttcttggaagagaaagtattgaacaaaanatctatganagaaatctgttgatcatnaaaacaaatcaatcttttagaatganaggaatcagtct

SEQ ID NO: 31303 - DNA, 407 bp, Glycine max
tgtagggttaaagtttcacgattgtcatgtgctcatgcatttattgttaaccgtggctatacgagacatcttgccaaacaaagtcaggttcacgataactcgcccgtgctttttcttccatgctatatgtagcaaagtgattgatccagtaatgtttgatgagttggaaaatgaggccgcaattatactgtgccagttggagatgtattttccccctgctttctttgacatcatgattcacttgattgtgcatctggtcagagaaatcaaatgttgtggtcctatttatctatggtggatgtacccggttgagcgatacatgaagatcttaaaagggtatacaaagaatctatatcgtccggaagcatctattgttgagaggtacattgcagaaaaaccattgaatt

SEQ ID NO: 31304 - DNA, 383 bp, Glycine max
  unsure at all n locations
tcaagcttttacaaattcttctttctagggaattatacatgtttggctgacatagttaacaaacattggccatggtgaacatgcaatttcaaacttcttaagacaatcatcgaactgatccttggaaggacaataaaccaaactcccccaggcatccataacataatcttatgcattttgtgaccaaccanggatttacatccttgacattcttgttaatgtgaaacctacacaacaagtgggtacactcanganatatagttttcactgcattcattaatgctagaattttatcggtagcaataactccaaagagggcatcatgtctaagaaaaagacttcgaaaccgttctatagcccacaccacattatttagacgttct

SEQ ID NO: 31305 - DNA, 436 bp, Glycine max
  unsure at all n locations
tcatgcagctggaacatggaaaaaagatagtatattctatttattgaagatttctcanaccttatcacccatatcggcaattagaaaagcttttaatggaagctaggagaatgaaagtacactgaaacccttatgctgaaacaaaaattatgattgggtgaaagatatcgtaagtatctttgggaagaccccaaagaaggaatcatttgagaagaacatatggaagaaaaggtcaatattctttgatcttccatactggtctgatttagatgtacggcaatgtaaagacataatgcatgtcaatattctttgaagtcatgatttccatactcgattagaggctgtcgtcccatgtgacaggcgcgtgggatgctaataccttncttgtgcgtaaaaaattccgaaccctcattttcaagatatgcagaccttcgtc

SEQ ID NO: 31306 - DNA, 400 bp, Glycine max
  unsure at all n locations
tcaagctttgtcatgatcccaacgcgtttgtccaatgtttggctccatagcgaaacttccttgtactgctgcacttgttttctatgatacgctatctgctcgttcaagtattccatgttttgtttggggttgctgttgtaattagtggctcccaccgtcttcaatcttagtctcttcttatcagaagcctcgagttccgccatgtattccatggcaaaataaagacttctggtaaaagaaacaaacttttccattttggagatgatctttggggtgtttcgagcaccgtaactaagctngcggaggtcgatgaggcctagcttgaggtcggcgtacacgatgtccaagcggctgaagctggggtcggagcatttccggccgaaccgtgagacagtgtctg

SEQ ID NO: 31307 - DNA, 418 bp, Glycine max
  unsure at all n locations
tttacgaaccanacccttatccaacaactcctttacttgtgtaataacctcaagccaaagaggtgtgacaatgctaacaagtgtctttttacaaaggagaaaatgtggaagttttctaagaggggaagtttctttaatgtttgtctttattataaaatgactttcgttcttagctaacctcttggaggagacacttacctccttatactcctccttaaccattaatggttgtcattcttcttgggggtagatttattcactagattcttccctttttgcttcttcacttgcactagaggaagatgaagaagtagtctcatcttggctactataaatgtcttggctcctcataatcatggctttcttggtggggcattgaaagtaatgtgtcctttccaagacatttanagcactttat

SEQ ID NO: 31308 - DNA, 427 bp, Glycine max
  unsure at all n locations
agcttgtttcgaataactatgtagaagttatctctgaattaccagggataatctcaattcaaaatgatcatttttttacaagttggttaacggtcttggttacacttctaagttacttcggatgtgtttgatttagaagaagaaaatagaagataattgtaaaattcaagtagagcgtaaaagacatgaattccgtgtgaagaatacacaattttcttttatttcttcattcccaccctaatccaaacatcacctcttggccttgcactttaaagcgtcatatcaaatttaaagtgtcgtgatcaaagcatgaacacacgatgttttgaggggttatgtgactgtttactaactttcaatgtgattactacttaaaataagaaatgttctcttcaaacatgtgggtggatngtatctattgatagat

SEQ ID NO: 31309 - DNA, 448 bp, Glycine max
tgctgaatatgatgctttgttgctggaccgtatccttgactttctttcatatttgcatggcgatgatattagaaaaacggttagtttcatgccttcaccacaccactcttttctttgattattgtagatatgtttaggtttgcggggttatgaaaaagatcatttttttttttgcttactagtgatggatttctgatgcccccacttggaatattatggaatggtaaaatgtaaagatggtagctttggctaactttgatggattcctgaaacccctcttttggtatttgtacatggtaacgttgttggtattggaacattgtcattcggtggaaagagggtccaaaattgtctggggtatgtatgcactctggaatgcgtgttttgaattatttttctatgggcttatgggtcctgaattgttggtctgcgttacttatcatttgat

SEQ ID NO: 31310 - DNA, 380 bp, Glycine max
  unsure at all n locations
gtcacaatcggcagagtattgagcggcaccaccaactcgaccacctatgaagatgattaaataaaaaagaattggatatattgggaattattaagaaaggaagagagagaaaagactgactagaattgcgatgatgtttgaaaccaatagagaagtgaagccaagtcttagtgattttgtgccaacaatccattgagaggagagttatgtgaaggaagggattatggatatatataattggcaccgaaacctggaacacgttggntgatggatgtgccaagcgtctcgtggtggtggcaatacttactagtactatatatgatagatcgatagaatggtggcttggatatctgagtttacacttgtctccttttcgtatc

SEQ ID NO: 31311 - DNA, 406 bp, Glycine max
  unsure at all n locations
tatgcttgtgttggtgattaattttgtctgattaccttgnttgnttggatttctctcttctctctttcattgcgatattgatttcttctttgctctttctccattaattgcttatatatggcattcatattgtgttgcaaattttcgccagactccatgaaatctggggggaatgaatgcatataggaggtcaaactactgaatttttgctcctctccgctacnggtcatacgttggaattgtccataataaaaaaattgatccaagacaataatatgttacgataatngtatgtgacaatatggtgtgcgtgtgtttggggcgaatctgcaatgtgaggaataagtgcaccctgtctttaacatataggcagggttggactacctaagtgtgttgctggagatgt

SEQ ID NO: 31312 - DNA, 568 bp, Glycine max
  unsure at all n locations
gagatgagctacacgtactcgaacttactctcattccacttnaatttcttatattaannnnnnaagcggcgggttgatgcctgctancacngacacacacaanactcaagctggccgctctntctctctttggtgaggcacacggcaaatttttactggtgtattgtaataacaactcaatgggcgcattaccagggtgatgcaaagtataaaatctgaatgtaaaatcattcgaaaaacatgggaagaggccttgcattcttgcgcctatgaaacaaaggaaaggatcactctacttgctttggcggaaaatcccactttggtatcaagcctaaactctttgaaggctaactcaaagaggaagctctcagtatctgttgagtctaatccagagagatcaaaatgggtttatatatattccaagagagaatatgctaccattaaccccanccctggtgatgtaattcttaaccctgtgtaacgcattaaactaatatgaatacttcaatgtaatcattccctttacctcaatgcggatgctaagagtaattcatgtaacatcgaaatt

SEQ ID NO: 31313 - DNA, 381 bp, Glycine max
  unsure at all n locations
agctttttttgttcgatttttgcctaaaaatntacaatgcagttcggctaaggttcttcgtgcgaactgaaccgaagttgtgtttcgggcgactggcatgttctcattttgtcggccaagaaaacattagcccaccttggcataaaaaacatgattcaccgatattgacaggaaaagaaaaatgctagccgacgtcggccaggaaagatgaccgaccgatgtctgaanaagaagcatgaccggatgactccggtcgaacatttcctaacagatatcatccaagtattattcagggattgaatagaacaaacaatagccgacatcggtagctaaatagccgtgactgatatttttcggccgacattgcgcaatntcttttac

SEQ ID NO: 31314 - DNA, 566 bp, Glycine max
  unsure at all n locations
tcgctcatcctcttccatcgactctaagtagcacacaatttggacgatatttcnnttnannnnnncgcgggcggnttgatgcctccntggacannccacatanaananacaagctncacctgcggccatatcgacgcgccttaaccaacacactctttttatatttgatggctacggactcgaactcctcttcgactaacccggctctttcaagctctggctttaaggcttggacctcatcactctcttccgaagctctaaccacaccgtatctcacagcctctagatctgggagccaatccaatccttgtgtgtcgactctcatccacctatgaaagccgccgacgatcccaacacctgcttcccctaagcctcttgtcctttcttcacgccgcatcccatgccttgccaactccttggagcaccctcccgtttgggtcactgaaaccacatgcaagaaatggacgatgcctccgtctgatggcacttccctcatggcgtagccaagctgcctattgcgaggaccgcattatattaacacaacccccagtgcccatcacgagacg

SEQ ID NO: 31315 - DNA, 390 bp, Glycine max
  unsure at all n locations
agctttatttgccctctttctcagtggggatttcttcttcggcgaaggcaagatagttgttggcagtgatattattgaccagccctccgaaaccttctaccgagatgtcttgggccacatgggcctcgttcaaaaccttcactagcagagcccgatgaggctcagagctcatgagtaactccaacaacgagaccctggccggagttttgttgagctgttcgataaccttgaattcgctctactgaattatacggaggaactcactgggcttctctagtgacacctnnctttttaccatcctttntctccgggaggccttntgccggaatatctttattcgaagcgtggggtgcttcgccatcttgttccttcaccactattccttttccc

SEQ ID NO: 31316 - DNA, 287 bp, Glycine max
  unsure at all n locations
tactaagctgaaatgacatcgaagctctcgacaattccaaggtataatantgcacacggaaggtcgattctagcgcatcacatatcgagacgctctaaattgaaaacccgaagctctcgagaaactcaacaagtcataaactagtcacacggaagtccgattccggcgcataatatatcgagacgctcgaaattgaaccacacatgctctcgaagaattccaatgatcataacttttctcacagaaatccgattctggcgcatcatatatcgagatggtctgaattg

SEQ ID NO: 31317 - DNA, 373 bp, Glycine max
  unsure at all n locations
agcttatataaccaccgtgctccacccagctcatcgagtaactcatccaccgtgggtatggggaagcgatcgcgcaccgtgatggcattgagagccctatagtctacacaaaatctccatgatccatctttctttcttaccagcaagactggggatgaaaatggactcgagctaggttgtataaaacctttcgcgagcatagtagctacctgttcttcgatctccttcttctgaaagtaaggatatctatatggtctaaccgttcaccgggttgagttaggcaatagattgatggtatgatctgtggatcgtgatggtggcanggtcgtgggaggttggaagagggaagcgtatntggtgatcaatgtattga

SEQ ID NO: 31318 - DNA, 357 bp, Glycine max
atgagaaacttacaaaatcattgcttaaaatcataagaggaattacacgattatgttacattagaaatgaaaaactcataagaagataagattaataaaaaaaatgcacccttgatttggatttatgatgaaatgacattgttttatagataaatattaattggtagcattattagcttttgctagcgaagaaagtaaacccataatctcttctctgtccattctccatggatcatgggacaactttatatctcattctttctgatagtacataaacccttgatgtgtgattattataagcacgatatataaggtgcagggaaattactactcatttggtcttgatactgacatgat

SEQ ID NO: 31319 - DNA, 399 bp, Glycine max
  unsure at all n locations
agctttatataagctgaaccattgtatcaataaacacaagttgagttttattcagaaaattagagtttatctattttatcttagtgagagtgatcctcctaagttcttgagtgattcgagaacaccctgactatatcaaaggactttcacaatctttgtgtgttgccctcaccggaaagagtgattctttcctttctttcatcttcaaccttgttctttcaaaccataattccagaaaatccacttttgcctagaattaactcgtggccataactcccatttacacgctcaaattaagtgattcttgagcctaaattgaatntcaaaatgagatctttcagctcgttntggaatcacctcatttggagccctggagcttgagttattggcatttctata

SEQ ID NO: 31320 - DNA, 413 bp, Glycine max
  unsure at all n locations
tgccagaataatgggttggatacagattattctgctattgttggttatcttgagaagccttttgagtctcactagattctactctgcaggctttttcgtccacaatgaaggcatatgccaacacttctacaatgtgagggatgtttctgatggttttgatgtcaaatcactctctgatagagttggagaagtgatagacaagttggaaactttgcaggccaagcttgactcaaaagtgcaagaaatggataaaaacaaaggcacctagttggacaagaagtttttaaaggatcaaatagttatgccatcttataatgctaatgttgctctaatgcgggatagggttcccgaaggtgatgaagggatgaagtccgcagtgaaaaacgatcatgtgatcaattntttcatcactg

SEQ ID NO: 31321 - DNA, 415 bp, Glycine max
  unsure at all n locations
agctttatcttcaacacaaganagaagtaataaggaggattcgattgaaatagacgaagatgatgatcttagtctatttgtaaaaagattcaacaaatttctaagagtcagaggaaatcaaagaaaagggcagaagattcatcctctactccaaaatgttatgaatgcaatcaacctagacatctaaggattgattgcccaattttcaagaaaagaatagagaaatttgaaaaaaaagtttttaatgaaaagaaggctaagaaggcctacattacatgggatgacaatgatatggactcatctgaagattcagaanacgaagttgtaaatctgagtctgatggccaacaattatgaaaacgatgaagaggtaacatcttctgataacaacttatccattcgcatttgatgaatac

SEQ ID NO: 31322 - DNA, 451 bp, Glycine max
ctgataccactggtggagtatcttctgtatatggatatatactttgtaaagaaaaaaaaatatagtgtatgaaagaatagtgtcaatattttattcatggactctatatatatagataaaaaaaatgtaacaaaatttaaatattatcaaattattaatctcctaaatctaaaagatacgtcaaatctttatctttatctaaacaaattcataatattcttatattaaataatatcctcaacgcttgaaataaataataaattattaaaaaataaataaattactcctttgtaaagatatcatacatatttcaataactttaaacaagaatttggattacgatcttgtagataaaaaaatgattaaaaaggaagactctacacaagataattaatcaagttgtttgaaattaattatcaacaatgtccgtggatactccgtcacaataaca

SEQ ID NO: 31323 - DNA, 402 bp, Glycine max
  unsure at all n locations
agctattaagcgtttctggacaagagggggcactctcagaaacgttcctgttggtggtggctgcagaacaaacaagcgtatgaagcgtccaacacacggtgattcttcttctgctaactctccttcttcgtccactcctagcgccagttcaaaccctccttcgcaaccccacatcgataatattattgtttctggctccgccacaaaccatataaataatatcaaccctttgctttatggtggcgatgtgatgaataatgttcctttctcaaagtttaatcttcttcagtctcagctgaatgctcttgggttacggttttcatcttgggttagagagaatgggttagcactacttcnataacaacttatttctgctataactctatctttggttctcttctt

SEQ ID NO: 31324 - DNA, 369 bp, Glycine max
  unsure at all n locations
agctttttgtaatctattacacttatttggtaatcgactagtgtttgtttctgaaaaatctaaagatgtaactcttcaaaaaggttttgactttttcaaataggttttatgtttttctaaaaagttataactcttctgaatggccttcttgaccagacatgaagagtctataaaagcaaggctctgttttgtattcttaatcaatctttctaacaacaatcttgaatacttttgcttttccaatcaatcctttacaagccttgaaatctctttgaagttcttcttcttcttcttttgtaccacaagctttctgaagttntctggttctctaaaccttganaacttgtgctattcatcttntcattctct

SEQ ID NO: 31325 - DNA, 449 bp, Glycine max
  unsure at all n locations
gatactgtganatagaaactaacctctacacttataatatcttctccaaattgngcactagattntgaaataatgtgtgatgcaagtgattatgcagtaagagcagttctgggtcaaaggaaaaataaaatgtttcatgtcatacactaacaagcaagggtttaaatgaagctcaaataaattatgccacaactgagaaaaaattgcttgcaatagtatatgctttggaaaaatttaaatcttatttgataggatctaaaattgtggttgttactaatcatgctactataagatatttgttagttaaagctgattctaaaccctgacttatccaatggattctattgttgcaagagtttgacttaaagatcaaggatgaaaatggaagtgaacattatgtggcagatcatctgtccagactgaccattgatgaggtgaccacacaataa

SEQ ID NO: 31326 - DNA, 401 bp, Glycine max
  unsure at all n locations
tctagcttgtatagcaacattatagttgctaaattatatggattgttgcacctacaaagttatggggttgaactaatgtttcctataaattttgacaacagctgacctcaatctcactaagcttggtgggtggaaactttaacttatatggtggaggccaacagtgcagaatgttaggaacataagctgctattcaaaggttactacttagtggttagaggtactcctatttctaaggagcataccttgccgccaaattaagctagatatgaaaggctggatgttctgccacttaagactagtatttgtgactctattatgttctcactacatgactgacttactatacatttaaacaatngaaatntcttctagtatagctctttaaggtgttctacata

SEQ ID NO: 31327 - DNA, 357 bp, Glycine max
tagacatgatcggtacatgattcgtgacttgtatgaaacaattcgggaaacattggatgatggaaacagaggttgtcaaatttgcactctatgcagaactttgttgatgaatatgcgcatgcagaagatttgcatgaaggccagacaaatgctatgtattttctgatagtggaagagtcgacaaaatgaggtctggatgctggctcgccaatcccaatggtgaacatataaacttatgtacttaaaacttacagtgagattttcaaggcgatccatcggttcacgaattggaacgatagaaatggtactgtggtcttcaagagagaacaagctcgcactttggatcgagctttgggc

SEQ ID NO: 31328 - DNA, 403 bp, Glycine max
  unsure at all n locations
agctttcagtaaataaacttttatttagtagcttataatgttttttaaaaaactacttgaactaacgtcttttaaaataataatttctagttntatatatttttttatttttatccttaatatatttatcaagttttttacttattcttttaaaataaatcataatttttttttagttattttatatttttcacctgataaaaaaaagtcaaaaactaattaaaatatcatgtcaaactttatcttaataagttaattnttcagctttcaactataatcttcttttaacttttgactaattnttcagttatttttgttaaatataatcttgctccattgatcctataaatataccgtatcattaatcagtaattaatatgtcatcgtcttgcacatggactac

SEQ ID NO: 31329 - DNA, 438 bp, Glycine max
  unsure at all n locations
taaaaagaatcatgtaatagtagntntgtgatctctgatttaactaataacttgtgaatagcatattcactcttatctgattttttgntattatctattttaccctatttttcaaggtttttggcactaagaaggccctatggttgtttccattgttttcaaaagaggatttaaacaacatacctgcactaaggggcattgagttccctacacgttcggatgttgatgtatgaaagctgggtagcttataggtttgaacattnttttcattaaatgatgtcatttatgcttacttcatgacagtgcagcgtanggcatgaaagtaatactctacttgattgctgatgttttaaattatagaatngtccagtagatgtatatatgtaatgttcgattcagaatgtttgattattcttataatctaagaacctgtgatct

SEQ ID NO: 31330 - DNA, 406 bp, Glycine max
agcttctgttgttcaatttcgagcgtctcgatatattatatccccgaatcggtcttctgtgtgaaaagtttgaaccattcgaatttctggacagcttccgttgttcaatttcgagcgtctcgatatattatgtcccaaaatcggacatttgtgtgaaaaggtatgaccattcaaatttcttgagagcttccattgttcaatttcgagcgtctagatgagttatgtccgcgaatcggacatcctatgaaaaggtatgaccattcgaatttctccagagctttctttggtcaatttccagcgtctagatgaattatgtccgcgaatcggacattctatgaaaagttatgaccacttgaatatctcgaatgctttccgctgtcaatttcgagcgcctctatattttatg

SEQ ID NO: 31331 - DNA, 455 bp, Glycine max
  unsure at all n locations
ntggagtttccaagtgccaattcgtcttcttctttagtccagtcttcttctggcttcaattcttcagtgggctttccttctgtgtccagcatcttgggatgttcccagcctttgatgacagctttccaggttctgctatccagtgatttgaggaaggccaccattcttgctttccaatattcatagttgcttccatcgagaattggtggtctgttcactggtccgccttctttctccatgttcatcagaatttatctccctagatctcactctgtgatttccagtgttggctctgataccaattgaaattctgataccaggggacagatgtcgtacaagatgtcacgacatcacgcttcagaacatgcagattatatgtgtccgtatgaacagattatacaagtaaataacacaagagaattgtgtacccaggtcggtgctacctcacctacatc

SEQ ID NO: 31332 - DNA, 403 bp, Glycine max
  unsure at all n locations
accttgaattaattcctttgatagcccctttgagcctattttcccctttctttggtttgaagctcattacaagccttaagtgaaaaaccatgatatcaccttacccttaaagaattttggagctttggaattggtttgggaataagctgggaataagtgtgggggggtatgtttcattggaagatatgatttttggccatgcttaatgttttattttggccttgcttgatgtacatatattgcctagttctttctttaatcttcaattntgtactgggtcaataaaaaaataaanataataaaaaaaattaaaaaaaaaggtaaaaataattcagttgctggcaaattctgcatttcgtactattaaaaaaaaagaagtagaagaaaagaagtgaagttgaat

SEQ ID NO: 31333 - DNA, 428 bp, Glycine max
  unsure at all n locations
tataatgaaatgataaacttcaactttatntctgtagaatatctttacaacaaaatgtttgtaaaccataagatatagaacataagtaagactcccactaaactaaggtaccatcaagaattacatccatatgagtagtgtgctcatgaaaaaaactttaagtgtcagacctttagtaagtgcatcagctagcatggaatgagtccctatatgttctatagaaatctgtattttttgagttctttatttaacaaccaaatactttatgacaacaaatttttacttggttgaatcctaaataagatcgctaagatgttgtcccaataaacactcgatgacttcttaatgttggcaacaacaactaagctagttacaataatntaaaagtcataaattctagtatgatgtctcatagcanaaatattaac

SEQ ID NO: 31334 - DNA, 394 bp, Glycine max
  unsure at all n locations
acgcttaacttaaacaacattataatcacaacatattcaaaaaaccaaaaccccacaataaaactctgggaatgtaagtatttagtcttgcttttatcaagttctaaggcaacagtatatttcccaatgcttaagtcacctaacagtacacacaaatgggggatcaaaccaagagcattccataattaagcattgaaagaagcattgaacacacaatacacaattaattagatattaaagataattacatcaacttttccttagaaatctccaactangatgnttagccagccatacacagaaacncgaacacaaatgagatagagagtatagaataattgctgcttacacaagaaaggggatccnnntctctcttcttgcacctcacaatcac

SEQ ID NO: 31335 - DNA, 361 bp, Glycine max
  unsure at all n locations
tactaagcttggacatcaactaacttcattccctatgcatattactatctctttatatctttgacccgaaatagngggaatggtgagattatgataagataatattgaacatatcatgtttttaagagtggctgatgtaatatcttgcatgttggagtataagtataaggtgaagtcccacatcgggttaaaatggacaagttgagcaccatataagtgaggagaagacccataaaccagagccttaaggttttgggttaaagtgtggtgtcaagttcacttatgtggttgctcatgattcattgatgtaaatctctccaatttttacccccgctcagttgcacaacaattggtattaaag

SEQ ID NO: 31336 - DNA, 391 bp, Glycine max
  unsure at all n locations
agctttgttctcagatctctcttgntggactagacttagactaaacaacattattgtaacaacatatttaaaaccaaaacttaatccgcagatccctcttgtaaaactaagtttcaattttgcttcattcaagttctaaggcaacaatacatttcccaatgctaaaatcacctaaccaagcacaaaaattggtgatcagaccaagagcatacagaatttaagcattgaaagaagcattgaacacaagaaacacaatcaattagatattaaaataattacatcattngttctttagaaatccccaactaggttgtttaacaagccattacagaanaacccctaataataatgagattacaaaacctangtatctcttgcaaagctgctcctc

SEQ ID NO: 31337 - DNA, 455 bp, Glycine max
  unsure at all n locations
tgtaaactaanatagatcttagatagaagtgtgatattgttattttctgaatggaaaccctcttaagaggagaaatctatctttatgcaatccaaacacagaaaccctttgttggtgaaagtccagcaagtggctagcaaaggttgtaactagtggtgttggtggtctaacaatggcaaggtgtgaagtctagtgggtttgttggtaggttgttgaaatccagtggttggctagtccatcaatgaaatctcatcttgaagggtgtgaggactggacttagcccaagtttggggttaacccgtataaaaatcattgtgtatcatcttccttttctatccctttgcattgtttttatactggaaaatgtttactattttttactctcactaaggatggtaactccctttgaaaaacacatttaaaactganaccatgtgtcaaagtcttttcaacta

SEQ ID NO: 31338 - DNA, 364 bp, Glycine max
  unsure at all n locations
agcttatctctagacactatataccagatgctgtaaataatgacaggagattccatgcaacctcctttgcaggagagcactgccatggctgcttaagcaaaaaaaagaaaaagaaaaaagataacacaattgaaaggttaagaagttaaaagaaacaaatgtacaaatcctactgccaattaaatggaaataaactaaagtgattatacccaatgggtgtaggcgtgtagctcagctgctaacacagacgctgagtttgtaggggaggacctangtttggtccccgcaaaatacacttcttgagagggcgataaccttaagtgtgactaagtcctagaccanaaattaatctcatagtcgactc

SEQ ID NO: 31339 - DNA, 465 bp, Glycine max
  unsure at all n locations
tactaagcttaggttttgatgtgtgagatgcangcaacgcggaagcaatanattttagtagtccagcttgacgagatgcttgtaactcaagatcctttccctccaaatactagaaaacaaaagttaataaataaaggaaaacaggcactttaaaaaattaactaaagcaatttaaaaatcaaaagactactatccataaattatgaaagggaaatgcatacatttacacttgtaataattcttaaaaaaaggaacttttggttaaacaactagttaagaaaaaggattggttggacgattgtccataaaagttagtgatttatatntctgataaaacaaaaacgaagaccatatgcaagcatcaaccagaaaaggacaaagaanagctcagcaataacttcgagtctcatacgaatacaacagcaggaatcactagttcttccagataaaatattattcacaaat

SEQ ID NO: 31340 - DNA, 415 bp, Glycine max
tgttgcaagcttatttcgacaatggtggcctcttgggaatgaagcggctattcctccttctgatgacgcatggacacttatctctgacccaactacaattcgttcgaaaggtcgaccaaaatcaacaaggataagaaatgagatggattgggtcaaaccatctgagcaccgacaaaaatgtagtagatgtggagccgaagggcataacaggcgtcgctgtccaatgcaatctgagtgtgggagttgttcaactcgctgatttatgtatgttagtcgagtgacttgtatttgcttacgttctgtttaatgtatcgaatctcttgggttcaatgaattcggtagctaaaaccattctggcttctgtacattacttatttctggggttcaatgacatcgttagttaacaacataaaca

SEQ ID NO: 31341 - DNA, 480 bp, Glycine max
cggccggtgtgctcctgaatacgcaacataatactagcattgcaagacattgctttgtaacgccattatttcttacactgcatatttgaatggggtgaccttggcaggaccgatcatgcgatagtcccataccttgccgactgcttatacagatacgatttccagtgatctgaagaacggccacaatctggtgctccaagttatttactactttacagtacttaatggatggcacgattgtaggctaggcctcatgatccatggatcattcgaaccacatctacctatcatacactcgagagacgctactgtgaggcactgctaccatacttaatattgctactcattagacagatggctgacacgatatcgcgacgtctcgctgcctaatataccctatatgcttggactgatcaaacgaccaaccaattagagcgagcacatatgtgttatctaataaagtgtacgtacctacactgg

SEQ ID NO: 31342 - DNA, 332 bp, Glycine max
agctttttcagagaaggaatctacggaggaaatgcttaccacctcgaaagactggaaagcggtttctaatgactcctctgcggcctccacataaggcatagaagatgggcagctcaccaagttgtcttcctcgcctgatacgatgaccagatgcccttccactacgaatttcaacttttggtggagtgtagagggaacaactcccactgagtggatccacggacgccccaacagacagctgtagggggggttaatgtccattatttggaaggtaacttggcatgtgtgagggcctatctatactgggaggtcgatctctcccctaacctctc

SEQ ID NO: 31343 - DNA, 450 bp, Glycine max
  unsure at all n locations
tgaaccttgaatcttaattcttgattcttgaaatcatatttcctcttgaaccttgaagtgttcttgattcaatcttgaacatcttgaactcattctttgattctttgagatcatcatctttgttatcatgaagtgttcttgacctttgagctttttgccatcatgtttgttatcatcaaaacttttttgaatcaatcttgattcatcatgaagcttgcttttacaatcttcagctgctggtaatcgattacaatcctcatgtaattgattacatgccttcaaaaatattcaaaattattttaaaaatgtttcaggaagtgttttggccactggtaatcgattaccagagagtaaacctcttgtaaaaacatttttgcttaaattcatcggccanacttcttggtgtttcaacttggaatatcctttctaaatcactagagatcttcttga

SEQ ID NO: 31344 - DNA, 368 bp, Glycine max
  unsure at all n locations
tttgcaagcttgttaaaaagctagaaggagntatgtcttttacatgcctaactcccttgagtgacatttgtattggttggtatcttgtgtgttgcatcttagtacatatcaaatttttatgcatccttcatcatcatagtaagtatgaagaanagtttctaagttagaaaggtttcttcaagaggcaaaactctctattttaatcgattacaaggttgtcataatcgattacaacaagttgtttgaagctgggagagttgagtctcgtatcggcttaatcgattacagtagactcataatcgagtacagctgtcgttgagataatgaatgatatattcaagagtatttgatttaatccgataccaagt

SEQ ID NO: 31345 - DNA, 387 bp, Glycine max
ctacggtgaacaagagacatatataaatgaatgaccaatgtatttaatgaaagttgaatagtaaggccatgattggataaacttctctccatgcgtacatatgggagaagaaattatgaagataaaatgaattgagtttctcctgtaagcctaagttaatttacatactttgacttttagagaatttaaatgagattgcttttatagaagtacagtgcatgagttgattctaactcataggagatgctcaatttaatttatcttcttattttcttcttctataagcgcttatgaagaaatttatccaaacaagaaaccttggcggctcaaaaaacatatttgatatgattgctgcaagataccttgaatcaaaatgcattggtaaat

SEQ ID NO: 31346 - DNA, 407 bp, Glycine max
  unsure at all n locations
agcttgtcgcccagctcgcccaggcgagctcagctcgcccaggcgagcagggttgcttcctccagaagcaaccgccttctggaggaatcttctggagggcccaaatgggcctgggtgctatttgcacccccatttttactaagtacacccccctctgctgttttttggtgattcttttttcgtaaagttacggaaacttacgaatttcgtaacgatacttgttttctttccgtaatgttacggaaccttgcggattacataatcatcccctttttgacttacggaatgttacggaacctcacttaattatgcaacgatgcttccatttgatttccggtgtgtcacggaaacttacggattgtgcatcaatattttttttggttnttcggcatgtcctggaatttcac

SEQ ID NO: 31347 - DNA, 445 bp, Glycine max
  unsure at all n locations
cttctttggaccttgaacaggcaactaactcctctttcagatccatgctatgtgcccgcgactggtctctttcttcccttcgcaacttgagttcactattgctaccccatagagctccgcgaaatttgttccggccatactcttccttgcgagccctcttggtttcttgttcaagggctcttgcggtaattgcattctcttcccgtaacccggcacactccttccgaacgtgtgtagcggccaacttgaacttctccttggcaagttttgcctttcctaactcgcttttgagagtttggacttcttcgtcctcttccggtgcttcaaaactctcttcgctgacgactnttaacttggcgagccaatctaaacctcgtatatgaaccttcagccattcgtggtacccaccaatgaggccattacgaatgcctctaagctcttgatc

SEQ ID NO: 31348 - DNA, 395 bp, Glycine max
  unsure at all n locations
tttctgcggcatgcagcttttaaagcttgcgttgtatttttatgttgtcaaagcttaattatcccataagctccagctattagtgtacgctaatgaatggtttaatatcttttagaattcatttaggatcctattttagtgggtccttatacagttagcaatagtacttgacttaattgccaatataaattggagtattaggtaggttagggacttaagtcattgtgttataccacatcttattaatcatatattattggttaccatctgtttttcacatcttctacctaatccctataacttccacatcatattnagtataattttcctcattcgttcttcccccttttaaagtcaaattcacatgtagtgacctaagatcatgtcaaaatctc

SEQ ID NO: 31349 - DNA, 301 bp, Glycine max
  unsure at all n locations
tttttttaaaaaaaataatggtaaggaatacataagttgattggttttaaaaatagtatattggggggaagttacatatataaaaaatggatattgcatgaaagaaactgaacatttgaaaaaaaaaaaagatgccccggggcatgggtctgcattatacttagagctatctactttaacaagagaatttattcaggaaaactggggtgatgggtgtgcattaagagaaggttcacaactttgtcattaattcaatcacacaggaacccctaactcgttgatcttcattatcnncgttgtc

SEQ ID NO: 31350 - DNA, 410 bp, Glycine max
  unsure at all n locations
tctagcttgttagacttgcaattctcacacctgtcaaggttatctctcgacactggacaatacttgtccatgcttaagggcttgactgactcgtcatcctcctacttgtcaaagttactacccccgacacgggacaatctcctttgacactagacaacctctttcgcttgccagccggctcagagctttggatgcttatgtattgtccaaggtccacaaaatacacatgtcatgctacgtgacactccaagacacacgtcaaccctctatgtcagtcttggcataagagcacagacgtctaacccgtagtagctggctccccaacagacaggttatctctaacctcttaattatttgaatatattgncatctccatatctcttggcacgtatacaaagctacacattatc

SEQ ID NO: 31351 - DNA, 396 bp, Glycine max
  unsure at all n locations
ttgacttgagtcatcaagagattataaatacgtgaccatgtcatgaatntcaacaattatcaatcatctttgaatcatctatctttcaatctttttcaacatcatctctcatgcatctttcaatatctttcaattcatttctctttatctttcaaaaagattttgttcaaacactgtcttttccaagaaaagttctttgttcaaaaacttgtgctattcatctttttcattctcttctccctttgccaaaagaacgaaggacaaaccgcttggattcttttgtgtctcccttcttcctttccaagagaattcaaaggaccctgcctgagaattcttttgattcttcccttacccttaagcaaaagatttagaaggactagccgcctaagatatctt

SEQ ID NO: 31352 - DNA, 335 bp, Glycine max
agctttgagccaaaatcctgactcaccataaaccttgacccagggtgagaatgtcaatccttaccctcggaagcaaaaaaagaatagaggggaaatttccaatcaaagaaaaagagaaggaaaatttccaatgaaagcaaaaaaggaaaagaaggaaaattccccaatcaaagagtgggagaaagcaaaaaaagaaaagaaggaaaattccccaatcaaagagtgggagaaagcaaaaagaaaagaaaggaaaattcccaatcaaagaatgggagaaagtaaaaaggaagaagaagaaggaaagaaagctcctgatcaaggatcgaaagaaaaca

SEQ ID NO: 31353 - DNA, 428 bp, Glycine max
  unsure at all n locations
tgtagaggttaggattaagtgcaaaaataatgacttatacttangaatccaagcctttggttttgagtgccagaaagcatgaaaatgagagcatgttggctaagattccctttttaggccaacacttggtttgggctatactgtgacatcctggaaatttctacccggaattttgtaagtgttacatttaaataattatatgtattattcagggtatatatatattcttggtagaagtatgtacattgggggaaaaatacgcgggttagactaattaacaaagagtaatccataactggacagttatagattaattcgcaattaattagtctaaaaattatcattttgcgtgcgacttaaaatttaacaaaaccaacctctggaccacgctcanggtttcattctgagccgtttgatatatatacata

SEQ ID NO: 31354 - DNA, 387 bp, Glycine max
  unsure at all n locations
agcttgtatgtttgtacatgaccaaatctttagttaatcgtctttacctaaagcagtctttgtattcgtttaaaatgcatgaagatagatcagtaggagaacaattgggtttggttaataaaatgattctagatcttgaaaatatcgatgtcaccattgatgatgaggatcaagctttgctattgctatgctttttgcctaagagttactctcatttcaaagagactttactatttggaagagactctgtttctcttgatgaagtgcatgctgctctgaatttaaaggaattgaatgaaagaaaggaaaagaagtcctctataagtggtgaagggctgacaacaagaggcangaccttcaagaaagatagtaaatctgataagaaga

SEQ ID NO: 31355 - DNA, 450 bp, Glycine max
  unsure at all n locations
tccacaacatccaagcaaaacaacattcaaacagcacaagctatcacagtctagcaaaacagagcaaaggcagaaaactctgctcaacacatcaaccaaaatcacagcttttctcacttaaagaccacagtaacaattcctttgatccaattcgttaaccgttggatcgactccaaaattgtactggaagtctatagtgcataagcctacattgtgaccgttgggatctactagcaaacatccagaactcattctgtactactctttccacagccaaccacacacaagcattntctgcaccaagctaaaatcctgctgcacctattgtgacagcaaaattctgcataagtgcagatttcgaacatcacacttccnctcatccaatcttgctcanatcacatcctacaagtcccaaatcatgtatcanacatgtctaaaccaaagccaagc

SEQ ID NO: 31356 - DNA, 426 bp, Glycine max
  unsure at all n locations
agctttatgagttgaggtgtagagctttggttcccttaatttgatgacttcagcatttgtagtctccatagcatggtaaacacatgaagcacactatgctgagacaaattcaataatcctaagtactttattaaacatatgtattttgtttttttgatggtgaacttgatatttaacatagggtaagggtacctgtccccttgtgctttaagtaaaggaaaatgaccctttaagaaaagatggagttgaattaaaaccgtttgacaatcatccaaactgtccaaattcatagaactggcagaaattggttgtggatgtgcacatgttngtgtaggtgtgtttgtggtgataatatataactctaggcatgtgagcttcgagaattatccaaacatagaaaacatagtcattatgtccttatcatca

SEQ ID NO: 31357 - DNA, 455 bp, Glycine max
  unsure at all n locations
gaagctntagtgcaatgtagagggatcaagagcagcgttagatggaaagagcttgattataacttatgaggaagataggaagcttaattaaaaactatgtccttggcaagtaaggcttgtcttcttccaagctcatacatatattatttggtaaatagtcacttttgtctctaaatgtgtaattcgctgacaaatgcgttttttaaagataaaaatacaaaatttagttctcgaaagtgaaaaaagtgcaataaatatattcgactgttaacttgtctgttaccattaaaaaaataacctacgtgacatataggaacgaatntatcactgaaatggttgtcaacatggtcatctctaattaccaacataaggatatattngtcatataatattttcttgacttttcgtcttttcactctctangaatangaatacgataaatagtcacttttatt

SEQ ID NO: 31358 - DNA, 427 bp, Glycine max
  unsure at all n locations
agctttttcaatgtatgttatgcaaacttccctgtttcccaagtctctttaaaaagaggttgatagggcttgctgtcattttatttggggtcatgataattgttgatcctccatctcccattagacgacatgtgaagtggaaaatgatccgcacganaaaatctagtcaaatgacgtctaacgcaataaaggaaattgcatataggattgtaagtaactttcattcgtcagtggtcattntttataataattcttggatcagtaaaccaaatntgtttcatctattgactacagaattccctggaaaagcaaccctcatagggaatctttattgcccatgggcatcaagatgtattgcttgtttccattgggcaaccaaagcaccctagtcatgttcgtgattctagagcacggtgtacgatcaaac

SEQ ID NO: 31359 - DNA, 452 bp, Glycine max
  unsure at all n locations
tnccatagttctgaataaatcttctatagtagcttgaaatttctatatattctcttaattctttgactgtctcaggtcttggccactgttggattgccttaattttatcaagatctggatgcacccctttgacagaaatcaaatgtcccaagtaattgattttggttgttccaaagctgcattttttgtagttgaatgccaagttgcgttcttgtagtatttgtagtgtagtgtgcatgcattgaatgtgttctgaccatgtcttggtatagactaagatgtcatcaaagaaaaccaaaatgaacttcctaaggtgctccctgaaaatatcattcatcagattttgaaatgtggctggtgcattgctaagtctaaaaggtaacacaacccattcatagtgcccactatgggttctaaaggcacgtttatgaatgtcttcctctaccattctg

SEQ ID NO: 31360 - DNA, 412 bp, Glycine max
  unsure at all n locations
agcttgttggagataatttaaaatttaaggaganaaataggaaactaagattctaattagtgtggtacaaaataaaaaaagtgaaattatttgaaagattacaagtataagaaaatttgtggccaatgatcaaaggagggtgaaggcgggcgagtggcgagtgaactcagtgggttagaaaatagaattgggttttggattgggttgtcgnttcgtttatctactctcctcttgttcatttcatcgcctctcagccacctccccttcgctcctctctctctctctctctcgcgcgcactacaatcaaagtcatgaaagcattntgttcatagaagaangaaattcctcttcctattagaatacnggtnttttcccattcaattcaatcatgcttccggcactgtctcaattc

SEQ ID NO: 31361 - DNA, 409 bp, Glycine max
  unsure at all n locations
tatgaaaatttctttataaggatgaagctggctgctgttgttttctacatagtacatagttaagtcatgacacaaagaagtagtttggtcttgtttaatctccctttatttcatcaccaagagaataatgtcactccctttaccgttgaacagaagttgtgattgaataataggctaccatggcgctaattgtgtaaattttaaaattttcttcttaatacaaagtcacgtgattggtcagaattatcaatatatttttttccctcaagtttaagagttactaatctagatcaaccttacaattagatgcccttccttatctttgtaagtatccacaaattctctgatcaatattcaantagttggtagctggatattaaattctctcgataagtctcatgttctattt

SEQ ID NO: 31362 - DNA, 357 bp, Glycine max
  unsure at all n locations
agcttttctctgaanacttactaaaataagctacaaaaacagcttttttttataagtttctctgtgaagcgtattgaaataacttacaaagagtttataggaaggtcataagactaaataagctcttccaaacaacccctaagtctcccaaagcttaagctgctagatgacagctcatgaatgattttatatctagcagacctaattagaaatttcttagactttgaacacaactacaaacttcaatatatagagactgaatagaaaatttcaagacagtcaagggacctgtagataaattaaatcaaaatataaagacaaggttataaaattaaccaattgggctagaatcatctt

SEQ ID NO: 31363 - DNA, 438 bp, Glycine max
  unsure at all n locations
ctaagctttgctaagaatattgcatttgaaaacgctcatgcattctgcatgtacatgcatatttgtcatcttgtgacagggacaagattgttttaagcaatggtcaaataccgcgccaaatccaagacagagatgggtcgaggtaagtggtaacgtgaccaagatttgctgcgcaatgtcattttctgctttcaagtacttgnggacggngacgaatggatgctaggcccatgatcaacagatcgctatcctacgtccaactccggacaatcgagaagcgctacagggaggcagcctagtatcctttaaattcctacatattattattgttgtttctttaagatgataatcggatgcctaacttacccagggggtttgagtaagcgaacaccaacctatagaaagcgcgtactttcttttgcaaaaaaaacgagggga

SEQ ID NO: 31364 - DNA, 414 bp, Glycine max
  unsure at all n locations
agcttatataataattttttaacttgaaataaccctaagccataaaagcgctagagcctttatttttaatttttattatatcttatcatagtttatataaaattttgattaatcgattaaatttaaaggctaagaaaagaggtaagattaattttttaagaaaaaaaatggattttgggtacattntactattttaattagtatattttaaataaaagaggctttaaaatgatttaatcattatgatataaaaatgaagacatagactatgtttggtttagttagttcttaactttttttactagctganaaaatttagttgattatttgataaatgaagtctcaatgttatactcaaattagttagaatgggtgatgtaggtttagaattttcaattcgtaagaaattgtaac

SEQ ID NO: 31365 - DNA, 351 bp, Glycine max
  unsure at all n locations
gccctctcttcccttcgcagcttgagttcactattgctaccccatagaagctcgcgaaatttattccggccctactcttccttgcgaaccctcttggtctcttgttcaagggctctcgcggtaattgcatttctctccccgaacccggcacactccttncgaatgtgtgtagcggccaacttgaacttctccttggcaagtttcgcctttcctaactcgcttttgagagcttggacttcttcgtgctcttccggtgcttcaaaactctcttcgctgacgacttttaacttggcgagccaatctaaaccctcgatatgaactttcagccattcgtggtacccaccaatgatg

SEQ ID NO: 31366 - DNA, 404 bp, Glycine max
  unsure at all n locations
agcttgtctaacactatntgnttctcgtgaagggacaacaaatggcaaaggagttagagctttaatagtaagaatatttgcttattagtctggagatggatcatggtacactaacatgcttttatttagtacctttctgcacataaaaagtgcccaattttgtatgctttgtcctggagtgacgaacaagattgtgcgagagactgtactaaggttgtcacagtagatctttggagtctgaaaaaactcagaagagattgaatccataggatttcagcttcagtactcagcctcagtgctggactgggccactaaattctgtttcctgggccaccacaaaattaaattggngtcaagatatatacaagcacctaaagtggacatcttatcattcatctatatat

SEQ ID NO: 31367 - DNA, 453 bp, Glycine max
  unsure at all n locations
tgtctcctatgcagtgacactatcctcagaatataaaatttgttgtgacagatccaaatgcaaaggaacttgcgaaccccaccactccaaacacaatctccacaccattgctgaaaactcatactacaagaaaatatgatttgtagattctccacaccattgctgaaaactcacactacatagagtttccgaggctggaataacattcctacgagccaaattctatttagagggaatgtgatcctaaagcgctttccatgcaaagccttgaatctttaaagcatcttctccacctccaatccctccccacaccacccttcctccaaagacacatctncttcaccgaaacttgcttatctatagccacatcaaataatcgaggataactcaataccaatgtcgcctcacccacccaatgatccctncagaataatactactttacctaattcat

SEQ ID NO: 31368 - DNA, 402 bp, Glycine max
  unsure at all n locations
agcttttgttatggatcactgtatgggttccttgaacctcagtctatacacaacgtaaagaacaaacgtgaagaatgtcaacattacattcaaacatgggtcacagaatcacaacgagaagtgtacttgggagcttacctgaatcaataagttgaattgatgttgtacaatatggatattatgtgcattattggtgcctaactaatgtttntcgtcttcagggcacattggcaacttgttgttctgtgtccacgggacaatattgttgtttggttttgttctttgcataagaagcttgatgttaacatcaagactgcagtgaacaagttagttttaacattataaagtcaatattgtatagaaatcgtagcgtataaacacaatgattatttgatatatatg

SEQ ID NO: 31369 - DNA, 368 bp, Glycine max
gaaatgggcagcaaagaacaaacacacatcacagaagaataggccacaaccattaacctgcgctaaaagccattcaaatgatggcattttgatattccttggtaaactaagaacctgaaaaatacaatagaaacatgggcaccgagagacatctatcacaatagcatataagtataccttgaatgattaacaattctcttgactttcacttaaataacatactcaatttgcatgatccacttcttcaatccttttaattagcattaacaactatagctttagaatcattaacaatcctcttgactcttacttagatgacattattcgaaactacatgacactccgagcacacatccaaggatattttc

SEQ ID NO: 31370 - DNA, 405 bp, Glycine max
  unsure at all n locations
agctttataatttgaattaaaacgttcagaaacttctggtaatcgattacacagtgcaaattntgaattcaaattttaatagctgttgtaaatcagttttggccactggtaattgattacatcctctggtaatcgattaccagagagtaaatttgttgaaaaagactttttaacttaaatttcttggccaaaccttttgctacttcaattggaattcccttcctatataatataccctttctaagactctagagactgtcttgatcatccatcttgaatatctctaatttctttgtcttgaataaagctttgagacacatgtgaaactttggcatcatcaaaacattcagctngatcctttgtctactatctccccctttntgatgatgacaatccctgaaatca

SEQ ID NO: 31371 - DNA, 425 bp, Glycine max
  unsure at all n locations
tgcaattgacataaagggacgtcccanaatgactggtacctcatggtcttcctccagatccatgaccacaaaatcagctggaaagaccttcacttttatcaaaacattctcaattaccccggaaggtcttgtgatggatcggtcaacaagttgtaaagtcattctcgtgggcatgatttccaactctcacaaccttctacacatggagagcggcattaagttgctactggttcccaaatcaatgagagtctttctgatgtgccatcattttcttctatttcttaaaccctttntgcaccattttaattactgattagtcttaattgtcaaattaattaagcagttttattatttgggcacattgagctaatttgatgtttntaatctaatttcatgaattaatgaaacattgggcttaatctgga

SEQ ID NO: 31372 - DNA, 403 bp, Glycine max
  unsure at all n locations
agcttctttgagaaaacttccttgagaagctagagcttagctacacacacccttctcataactaagctcacctccttgagaagcttccttaagaagattcctaaagaagcttgagcttagctacacatacctctctaatagctaagctcacctccttgagatgagaagctagagcttagctacacaccccctataatagctaagctcacccccatgacaaanaaacatgaaaatacaaaaaaaaagtccttactacaaagactactcaaaatgccctgaaatacaaggctaaaaccctatactactagaatggccaaaatacaaggcccggatgaaggaaatacttattctaatatttacaaagataagcgggctcatacttagcccatgggctcgaaatcta

SEQ ID NO: 31373 - DNA, 398 bp, Glycine max
  unsure at all n locations
ntgatggtgtcgagaagaaatcacatgtctgtcatcatcttataaggggagaatgtgaatgtatgtatacatgattttgatgatgtcaaagaagaatttaacaaggctgcttcaaatgataagcatttgcttcaagaataattcaagattgcttcaacaaacaaagccttggttcaagattcactaaagaccaagccttgccttaaaacaaagtgctttcaagacatgcaaggctctggtaatcgattaccaggaagtgtaatcgattaccagaagacagggttgagaaatagcagttgaaaaaggttttgaatttgaattttaacatgtaatcgattaccatatgtctgtaatcgatcactagcaacggaactttggaaattcanattcaaaagtca

SEQ ID NO: 31374 - DNA, 368 bp, Glycine max
  unsure at all n locations
tctagcttattcgaagccccttgaattgattgtcgttcatgcatcctcaaccatngagtacggagccccatgaattgattgcctaacgctgttcatgcatccttcatcatcaaatcttattcggagccccatgaattgattgtcgttcatgcatcctccaccattcagtccggagccttacgaatagactgccaagctctgttcatgaatcctctatcatcaaatcttattcgaagccccatgaattgattaccattcatgcatcctccaccattgagtccggagccccacgaattgattgcctagtgttgttcgtgcatcctccaccatcttattcagagccgcatgaatngattgtcgttcatgca

SEQ ID NO: 31375 - DNA, 448 bp, Glycine max
  unsure at all n locations
tggagggtgcgtagcccaccatcttttcatagtggagtatcgataatgtgtctaccatcacgatcatcgtctccctttccattattgggggtaccacctgggccgccagatccctccaccttttgggcgtgttctttgaaagatccgtccccctttttgcacatgttctgtagttgcatcctattcagaaccatatcaaatttgtactgatactgcctaacacaggcaaccattangtccttccaagaatggactcaagaaggttactaagttagtataccangcgacagttgtcctagtaagaccttctcaggaaaaatgtatcagcagtttctcatcttttgtgtatgcccccatcttccgacagtacatctttagatggttcttggagcgagtaagtcccttatacttgccaaagtccggcaccttgaacttgggaatgaccatg

SEQ ID NO: 31376 - DNA, 357 bp, Glycine max
  unsure at all n locations
ttcttgcacgcttttaagcttttagaanggctagacatgatacatgtcagggtttggtctggctcaaggataaaatggatgccccacattatttccatgacacaaaaatgcaaaaatgatgatttggaaactttatgcaaaactggtcatgcatgcacctatgcggacactcgagtgtcaaatttttatggtcatgtgatgctatggctcatgattcatttcctctattttattcaacccaatgctttcaaaatatgttcttttatcaatttgtgcattcatccgagtccattttgggcgtctgggacattcttacagcattcacccttcaagtgtatacacattttttctaaaact

SEQ ID NO: 31377 - DNA, 323 bp, Glycine max
gaagcatgtgtaacacttgttggaactttgatgaatgagaatcttgtgagacacaactccaagttcaacttctcttcatttttcttccttcaatttcgtgctccccactctctctttctcttactctttcttttcctccattgaagcatcctctccaagcttcttatccaggctcatcatggtggaggagctccttcttccatggcttattccctagtggatggagcctcctctcacctattctactttgtctttcgctgcatctccatggtggaaaatcaccattgaatgacctcattgaagctcaatgatccagcctccat

SEQ ID NO: 31378 - DNA, 429 bp, Glycine max
  unsure at all n locations
cttgtgtaatcgattacactganttggtaatcgattacaagtgatagtttctgaacaaatcaaaagatgtaactcttcaaatagtttttgactttttcaaattggttttaaggttttctaaaagtcataactcttctaatggttctcttgaccagacatgaagagtctataaaagcaaggttttgctttgcatttcaagtatctttccaattcattcttttgacaacaaacttttgccaattgatttatgaatctctttgaacttcttcttcttcttccttttgccaaaagctttccaaagttttctggtttttccaaaccttgaaaacttgtgatattcatctttttcattctcttatccctttgccaaanagaattcgcaagggactaaccgcctgaattctttntgtgtctctcttctcccttttc

SEQ ID NO: 31379 - DNA, 452 bp, Glycine max
  unsure at all n locations
aactcaagctnttactatagcatagttgctgatgatgcccacatgtctaggcgtgaatatgttttctctgtttccttagcagcttttgctttttatgacgtccttcttcagcatgatcattttctctctctttccgtgattccaatctattccttcttggttccaaggcctattgtagccccacattagctcaatcatatatatgttagattcttcgttacttttaaataattatgtatatcttctactgtatagaaacgtgggcatgcaaccttattgctaacgtttatccggatattgaaataaagacgtgcttctttttctttcttttctgcaaaagagaaacaagtcttatagtctgaaactggtttcgttactagctatcagattcactgaaagaaaaccatctagctgttacctcagagattctttctattgtaagtttattctct

SEQ ID NO: 31380 - DNA, 434 bp, Glycine max
  unsure at all n locations
ctttaaggattgaaaaattntatatgttaagagagaaccattgtgaattgacatcgcctaaaatccaaaatggttacttctcagcaactgactggagctatggtaaatttaccatagaacgtcgtctaccatagaatgtcaccaacatcagaaccatttatccttggttttcatcaaaaaagatttataaatatggccataaacttagatctattgttgatgtaataactaatggtatgattgtgaaacctttttagcatatgaattattttttctttgtttataatagaacaattttaagtcacgggaaaaaaatacaaagagaacgaaggataagatatcataattagcatatgtaaaaagcagaaaacaacaaaaacaaagagganatcaacaaaaagatgttcacttcctcgacatatatactagtgaga

SEQ ID NO: 31381 - DNA, 447 bp, Glycine max
  unsure at all n locations
ntgagatgttgtagaatgactacgaccatcatggtgtggactacggccatagtgaattcaccatagccatcattggaaagctgacattgtttagtaggggagtcatcatattaccatggtcctattgagtgtaccacgaccatcgttaagtgacaaagtcttcaaatcttcagaaaaaatgcaaattccaactctttcactcaattcaacggctatacttctataagacaaaactagcattcaaatgagagttctgccaagaaaatacatgaaaatgacacaaaaaatcacataaaatatcactcaaaaagtggtttatcaccttgcccacacttgagcgttgcttgtcctgaagcaagtgttctagttctttaatcaaaacaattatcctaaatcagaactcatgtatctganatctccatttattcanatgtanaactcacatta

SEQ ID NO: 31382 - DNA, 438 bp, Glycine max
  unsure at all n locations
tgtagaatggctagacatgatacatgtcagggtttggtttggttcaaggataaaagggatgccccacattatttccatgacacaaatgcaaaaatgatgatttggaaattttatgcaaaactggtcatgcatgcacctatgtggacactcaagtgtcaaatttttatggtcatgtgatgctagggctcaggattcatttcctctattttagtcaacccaatgtttccaaaatatgttcttttatcaatttgtgcattcatccgagtccattttgggcgtccgggaaaattttcacagcattcacccttcaggtgtagacacatttttcaaaaaccagttatgatcagtgaatntttttcanagaanagctggaagttatctcttttcaaaagcatgttggttnttcagctagacaacttatttgctnttttctccttc

SEQ ID NO: 31383 - DNA, 430 bp, Glycine max
  unsure at all n locations
tgagtttactagtattntgtttatgaaatcagttttcaaattctcgaaagtgaatcaaacctgccctaaaaaatctttgttttctctcttcttctatattcttcccattctactcattttttctcttctttccctatcacctacacttgacatggcagtataacaccccaaactttttaaccccatgttatagaatcatcaaatatacatatccaccaaagaagtacaaacatagacatcatactcaagcttacttctcattatgtaaccatggatttctttccctaaattaaagcaacccaatcaaatgactgcttgtagagcactagttattgaacatgaatccagcaggtggaaatgagatagaagtggaaaaaggtggattcaacagtcttttaaattaaatagatgacactaagatggcacatga

SEQ ID NO: 31384 - DNA, 437 bp, Glycine max
  unsure at all n locations
tagaaannatgggtgaacatatgacatcnttcttatattttatctcaatttctctcttggttcttgttaagattatatatatatacacggacttactccactcaatgccaatgtctatctttaatgtttaaatttagagttgatctcttttctcaatttttcaattaaaattacatcaaagaagtcatatatttagagataatacattgtttattcttgataaggatgttcaaaactaattacacaagtgaggactaaaaattgagtcctgatacaaatttatccttgtacagaagtctttagtatcatctctaatgattctcaaactattaattatctcatcatttatgtcttgtataattcagatataagtcatgtaaatatatttctttgtcaaagctttccataatacttatctcaacactccatcaaatatt

SEQ ID NO: 31385 - DNA, 443 bp, Glycine max
  unsure at all n locations
tatgaaataaaagtatcgatatatgtgcatgtacacaatgctgcatcggaaattttagaaagaaggaaaaaaaatcaacaagattgaaaggccaatatatcaagtgcaaaagaaagtgctgccacataatttttatgcgttcactctataaagtgtaggaatttgagatatcatgacaaaaaagatatatgtaaatttaaaaattaaaaggattgggaaagaggaaaaataaaaattctactaaggtttatacaaacaagagaaactctatcaattcatgctaattagaagaaaaaacccaatttttagggttcacactcaacataggaacacatcaatttcacaacaaattcgtatcgagacaccaattagtctgtcaaacacagtcaatccacaattaanaacataagaacataattgaatntcataaaacaacccaagtg

SEQ ID NO: 31386 - DNA, 440 bp, Glycine max
  unsure at all n locations
taaagtatgcccgagtcattcatccctatgagatgttgttgaagtattggcaatcagaattgccattccttggattatagggttgaaccgagctcatgcttttacaaaaaggttcatcaagtcaggttgaaatatggaagtaaccatcctgcaaacttggggcaaaagatgaatcgagtcacatcactgcttcgtctactgccaaacatatttaggattattgatgtccttgttacttccagtttcaccttgacaaagatgtcatggaccatgttgaaaatctaaattgattcaaccccatatcctgcgtaaaaattcgcaatacttctacatcattcgcatgcatccatgcttttcattggttgcattgctcattgcattctcttcttgaaaaataaaataaaatgaacttatcaaaaaaaanaaaaaaaacaaaaaaa

SEQ ID NO: 31387 - DNA, 414 bp, Glycine max
ctatatggacgaaagtgcaaaactcctatttgttggtatgatgatggagaagcagtacttcttggacctgaaatgctacaacagattaacgaacaagtgaggttgattcgagagaagataaaagcatctcaggataggcagaagagctattatgatataaggaggaagccactagattttcatgaaggagaacatgtgtttttgaagggttctcccgtaaccggagtcggaagagctcttaatgctaggaagttgacacccaagtatctaggtccatatcaaattttgaagaagattgggcctgtagcttatcatatcgccttacctccgagtttatcgaatctgcatcctgtgtttcatgtctctcaactgagacggtacaacccagatccatcacatatacttgcagtggac

SEQ ID NO: 31388 - DNA, 430 bp, Glycine max
  unsure at all n locations
ntttcggggccatctcatgtgaaaacacatttgcaacgttagtttacaaggaaatgccattttaaagcaaaatcaagcaaaaacagcatacaactccttccaacaaaacgcaaatatcaatgtaaatttagagcaaactcatacaccaatgcacgtgtttttctgggacatacatttatgaacatacatgcatgcaagatattttgctacctatcttcacatatatgtgtttccaaagcattttcgctaaatttacatacatgcatactcaaggtattttgggctacgaaaaattacatacatgcatattcaaggtatntttgctaccaaaaattacatatatgaatatccaaggtatttttgctaccanaacattacattntatgcatattcanggtattnttgctaccaaaaattacatacatgcata

SEQ ID NO: 31389 - DNA, 435 bp, Glycine max
  unsure at all n locations
tagccctagagaggatggaccttttcaggttttggagaggatcaataacaatgcctataggttggacttcccagaaaagtatggagtcagcaccacttttaacatttctgatttaattccttttgcaggtggagctgagattgaggaggaggaactaacagatttgaggacaaatcatcttcaaggggaaggggatgatgcaatcctccctaggaagggaccagtcactataaccatgagcaagaggctccaagaagattgggctagagctgctgaagaaagccctatggttctcatgaacctcagggtagatttctgagcccatgggccaaggctgagtccaattatctttgtacatattagactangatgtcattatatttggtccttgtatttanggctccatattctangtagggtaccctataaatatac

SEQ ID NO: 31390 - DNA, 432 bp, Glycine max
  unsure at all n locations
tatgtcaaacagaataatccanaaatgccaaagaattgggtgttgaaaaagcataacaagactttctgtgattggtttaaagatacaatctttgcagatgaaaatgcttcagaaactttaagaaagctagcagatgggcctaaaagaaatgctataacttggcaaggatacgacataaacaagtattcattttacacaaatgaacaagatgacaaaggcacaatgcanaatagcagggtcatcctaagggctgaatctcaacactttgcaagtgtgcatgatgccaatccctgtgtagctgtcatcccttactttgggttcattgatgaaatttgggagcttaactatgtgaaatttactatctgtgttttcaaatgtaaatgggttgacagtaacaccggtgtgtgcaccgatgatatangatntatgttg

SEQ ID NO: 31391 - DNA, 420 bp, Glycine max
  unsure at all n locations
ggaatcggacctgagtgtgaaaagttatgaccatttgaatttctcgattgtctttcgttgntcaatgtcgagcatctcgacatattatgcgctcgaatcgaacatccgagtgaaaagatatgaccatttgagtttctcgagagcttccgtggttcaattccgagcatctcgacatattatgtgcccgaatctgaccttcgtgtgaaaagttatgaccatttgaatttctcgagagcttccgatgtttaatttcgagcgtctcaatatattgtaagcctgaatcggagctcagtgtgaaaagttatgaccatttgtatttctcgacagcttccttggttcaattccgagcgtctcgacatattatgtgcccgaatctgaccttcgtgtgaaaagttatgaccatatgaatttctcgagagc

SEQ ID NO: 31392 - DNA, 441 bp, Glycine max
tcctgcatcccatgtgttcggaaatgtaaagtttacattccatttacccatcataaccaatctgcatcgtcacccaacatcgccactaactgccctcatcgcacaattacattatgttcattggtatgcgttttatgttcattggtgaatctgattgtggcgtttatttgtgttatgttgtggaacaattacgtcgtcagcatcggagaaatcactgacgacggcggcacatgtcgaagagtgacaagaggagccatgggatgggagactccaggaggagggagacaaagttttgatgtgggaaggtgcacaataaaattatgcacatagattaatctgaaagccaatgatagtgatccacaaagatcacttaccctcatggtccaccttagacgcagttttttttttttttttttggagtcctcacttttcatattatgc

SEQ ID NO: 31393 - DNA, 445 bp, Glycine max
  unsure at all n locations
tgtaggccttggatcttcttcatcaatggattcctttgcttcttgatgtctgattgcagcagaatggagaaggagaaagatgaatggagacgccacttcaagtagaagatgagtctagaaaaagctcaccaccataggatgccatggataagagcttgaaggtagaagaagatgaatgaagggacaggaaaagaagagcacgaaatttagtgcctctaaagaagtctgaactttgaagtttaattctcaaaatgatcaaagttcaaaaaaatgcacacacatgacctctatttatagcctaagtgtcacacaaaattagagggaaatttgaatttctattcaaatttcacttaaatntgtggagccaaattttggagccaaaatttcactaattatgattagtgaatnttagttatggttcagcccactaatccaagatcaagtc

SEQ ID NO: 31394 - DNA, 435 bp, Glycine max
  unsure at all n locations
tataaatggatgatgggttacttaattaaacaagtattgtatttgagagtaaaacaaacaagaaaacatcatgggttggatatgatccagtgcatatataattgaggaggatgagaggaataacaaaaagaaataaaaaaatagaagaatggtgggggtgctatggaagaagatcaaggcaaaggtgaggaaggaatagttatatatggcatgtgtgaaacaaaggtaaagtgtgagaatgaaggtaagaagtgagagaagtcacaaactatagaggttntttaatttcactccaaagaactatgcatgcttcatgacacaacctttctttaagtatgagtagggttagattgagcccaagattaaagcattgtcttannaaatgtattgtttggtttaatgggaaactagtctgatgaataatctanatactct

SEQ ID NO: 31395 - DNA, 439 bp, Glycine max
  unsure at all n locations
cttatagagaaaatgatggtatgattntctacccaatcttattatgttgaacagctatatattaaagaagtttaattattttgatgtgaaacatgtttctactccttataactcatccatcaagttaaagaaaaatttgagtaaaggattttcttcacataaatattctcaaagtattgattccttattgcatttgacaaacttctctaggccagacattgcatatgcagttggtagattaggaaggtatactaataatcctgatcattctcattggattgcattagaaagagtttttagatacttaaaaggaatcatcaattatgacattcattatacatgttntcctgcagtaattgaggggtttaatgatgcaaattggatttctgattctgatgaaacanaatcaacaagtggttactgttttactttagctagt

SEQ ID NO: 31396 - DNA, 417 bp, Glycine max
tgcctaattaacctgaaattgataggaaatgattattaaattttcaaaatgggagtactaagtacttattacctatatttaacaaaaagtaattacaacactacaaaataaccataaatgagaggagttagatacaattttcacagatttcttacacaaaagttagtcgtatttatcgactaacagatatcattccattcatgattatgtgcaaaaatgcatttttgatataaagtctttagacacaaatcatcaatggattgatatcttcactaatcctttgtctaaagaaagcttcatctgtataaaggaacatttaacatatgattagcttatcagattaatgaatatttcttggacgataacatcgtattactttcttatcattaatccgctgggactaatgtttgttgaagt

SEQ ID NO: 31397 - DNA, 424 bp, Glycine max
  unsure at all n locations
tatccagaagaaggttagcagatatattttccttgtaataatatttcttgtttacttaccaatatgataggttgctgcttgatgtgagctttaactttttctagaagctattgactactattagttgaattaagtagtgtgttatgttggttgaagataaataaaatgatattgggtttgtaatgcagctggaagatcctagcattgacattcacaaggaagggaaatacttgatgcttgctgttcaggagctggtttcaggggatcaatgtgaacgaaggtttgtatttggccgcgaaagccggaagcctaaggcctccaatgatgaaaacaaatttacgaaagatggaacatatcccaagagcttgctgcagacactgttgatgcgagcagggcactccccaccanaatacaaaacgaaaca

SEQ ID NO: 31398 - DNA, 436 bp, Glycine max
  unsure at all n locations
taatttcatccaaggatgacaaagtgtacccactctctatgtgtatccgtaaaaatatctacaaacgggtaggattaatacctgtttattagggatgggttcgagatggatatttactgacaaaaaattaatggggatgggttcaggtatgggtactatagtaccgatcccatctcacctcatcatgcccctatgatatatattagtttgattaaaatatcttttatatattactaattattaatttaatggcaattggtaggcaacctaacctttgttgatgcacataaatttgtcatgcctttatgtgaattatggatcaatacatttggaacgcatcgtagattgaatgagaactggttttgaaacttaaggtaatgcacaaaatatcatgtaaatttacccctaatacattnttttaatgcttaataaaatc

SEQ ID NO: 31399 - DNA, 437 bp, Glycine max
  unsure at all n locations
tggggccatagtctccacaccccacttgacaatgaatttctctacactgacaagtgagattgtaactatcaagattgaccaaaagcaagcgcgacagtgctatgcaaagatcctgaaggtagcactatatcctcccatccgagagccgaccatgtctcacatcacagtgactaaagactctcaagtcatgacagtggacgaagggtctcanaactgagccctaaccatctgccaatccacccacgacgagtgacatgtgctcacgagcaccccactaagcctccaatacgtgccacccatggcatatttgcacgagcatattgctatgtctccagcatatgtcacccacggcaagtgacatatatgcanaagcatactactaagccttcagtacgtgccacctgcggcatgtgcgcacgagcactctgctaagtctc

SEQ ID NO: 31400 - DNA, 445 bp, Glycine max
  unsure at all n locations
tcgggctgctcaattgctccaggttgctgcatggaagggcatatgtctgtatggtggtcaatagaggagcataaaccacagacccttgcaacaggtacaaatttctggttcaaggccagctgggttaccaagttaaccaatgcatccagttttccttcaagcttcttagtttcagatgatgcagctgagtttgtagctacctcatgcactcctctaatgactatagcatcatttctggcgctaaacttctgggagttggaagccatcttctcaattaaatttctgacttcagcaggagtcatgtctccaagggctccaccactggcagcatctatcatacttctctccatattactgagtccttcataaaaatattggagaagcagctgctctgaaatctgatggtgagggcaactggcacatagttnttaaatctctcccagta

SEQ ID NO: 31401 - DNA, 439 bp, Glycine max
  unsure at all n locations
nttacctgcttatcttgacccanatttgcaacttcaagatctcctcactggtgtaagctttgcctcaggcggtgccggatatgatcctctaacagctgaattagtggtacataaccatatattcaaccttgttcatgctatctatcaattaataatttactttggcacatcttagagctaactccagtctattttctccttgtcacaagaatgtgatgtcattgtcagatcaattagacatgttcaaggaatacataaagaagataaatgaagcggttggaagaaacagaacgacaatgatagtatctaagagcatatacatagtatgtgtaggaagtgatgacattgccaatacttactatcaatcaccttttaggagtgctgagtatgatattccttcatacacggacttcatggcttcagaagcctcanaattctt

SEQ ID NO: 31402 - DNA, 440 bp, Glycine max
  unsure at all n locations
tgtccgcanaanatcactcaagaccgttttaaggtccaacgccttanaacggtcctctttgcttatattggttaaaatggaccattcaaagcataaaatcaacatataaatttatcgcttttgcaagaactacgtaggtatgattttctcatcacaattgaggatacgtaggagcaaaagccccacttttgtcgaccaccccaagagatcgttaattatccaacgccttaacgcttctctcatttcaaaaatcaagagatcattaatggtccaacgccttaatgtttctctcctttcaaaaccaagaaattgttaatggtccaaacgccttaacgtttctctccttttcaaaaatcaaaagatcgtttaaaaggtccaatgccttanacgacttttgttcggttaaaatatatcttgcgannaaacataaaaacaactta

SEQ ID NO: 31403 - DNA, 448 bp, Glycine max
  unsure at all n locations
tatgcgcatatttccctacgaacgttcacttgcacaagacattctattatactaagaaaaatgcacccatatacaatcaaggtagcttccttacctagattatttacatgtacttccaaagtgtatttgttatttacatcatacacgccatcttgtcaaaatttacacacatgcatactcaaagcatttcggggtaccaaaaattgcacatgcgctcatcttggtatttctaatatctatacatatacaaacttcatgatgaatcttgactatctacacaataaagtgctacatttcatgcctttnttcaagtttttgctacctaaagccgcatgcaaattcaagcatattttcctttgctgactaaaattgcattcaaatttaaaaggtatattcttttgtaatatgttttcttcccataacatgcaacatattcatcatatatttt

SEQ ID NO: 31404 - DNA, 441 bp, Glycine max
  unsure at all n locations
ctaagcttgacattggccatgctaattnttttttggaaggcaaaagatatataatttatttataatagaaaaactagtaccagtggccatgctaatgattgctaatcttgtgtttgtcctccaaaatttgttttctgggacataaaagatgtaattgattaaaaagctcaatttagtatccaatttttgattgtgtttagatttattggctctttatcaccttgcattttgtcgcaaattatctgacaacttttttctcccctatttaaaccagagtcctcctgaagttcatgccaacgcggctgaaacattgtgcacaataactcgaaatccctcatcgactctagcaattaaactttcaagcccaaggtttgtattctatggntntatgttcttctctgatatgtaactctgaaataattatgtatatttttatatatg

SEQ ID NO: 31405 - DNA, 435 bp, Glycine max
  unsure at all n locations
taggaacccaaactttntaagcttcagtgcaagataacatactcatgactaggaacccaaaatttggttttagaattagaaaagcatgaaaatagggacttgtttgtaagaatttgggctgccccatgattggtactttgcacctaagtaacgtgggaaatgcttttcaatggtgtgtagatatgtgtgtaaatataaggggcataaaattcctcgccaagtatgaataagttgttttcctaagtgaatgtatgatagcatggaatgcccttttgaatgcaaatgtgtgcangatgtaattagctttccgatatgcatttaaataaatatgagagaaacaataaaaatttgtatgaggtactttaaatgtatgtaggtagttcgtgatagaaaaatgtttaggatataaattacgtgtaaagtttgacgcaacac

SEQ ID NO: 31406 - DNA, 433 bp, Glycine max
  unsure at all n locations
tcttagtttcagctgatgaagatgaattcgtggctacttcatgcactcctctaacgacaatagcatcattttggcactaaactattgggagttggaagtcatcttctcaattaaattcctagcttcaacaggggtcatgtctcctaggactccaccactagcagcatctatcatacttctctccatattactgagtccttcataaaatattggagaagaagctgctcagaaatctggtggtgagggcaactggcgcatggtttttgaaatctctcccagtattcatataggctttctccactgagttgcctaatgcctgaaatatcctttttgatggtcgtggtcctggaggcagagaanattttttctaagaatactctcttgaggtcatcccagctcgcgatggaccttggagcaaggtaatatagtcagt

SEQ ID NO: 31407 - DNA, 406 bp, Glycine max
  unsure at all n locations
tatctgggctngggtcaggttgctatcataaggcggttgggttatgggtctataatagggtccgtggtaaggccaccctcatcatcatctacaatcaacaaaaatactttagaagcgcatttgtggccacgatgatatttttcatcacaattaaagcaaaggccacgttcgcgacacagggtatctcctcggaggataatcttttaacaggcactggggttgatggttttaaagggttgagcancgaggacgagggaaaggaaagggtggacgaagaaggagctgaggcatgtggaaaaaaattgtgagcaggaatggcgttgggacgaccacggaagggccgacgagtgtcaagaaacttctcttcctagagccaagctaaccccgccgcttgaccaatgtcaac

SEQ ID NO: 31408 - DNA, 229 bp, Glycine max
aatcaggggaattccgacttcagaagaaagcctagaatcaagaatccagactcgcgatctccagaatcaagatcaagattcccgaatgaagaaaagactccttcagatcagtttagaagtttttcaaactttgaatagcacatgagttttgacaaacctttaccaagaggtttactcttggtatcgatacatcttgtgtatcgatatcagtagcaaatgagttgaaaag

SEQ ID NO: 31409 - DNA, 423 bp, Glycine max
  unsure at all n locations
tgagatgaggaagtgttgaagggtgaaacttcctgcttttattgttgaccacagagtggtacctggagatatgtcgcgggggtcaggagaccttggggacatcaggtggggtgctattgcccaaaaccaagcttgaccaatcccgacccaccccgggcatagtcggtcagtgagaacctgtgatgtacctaaacaggcgagctcctggcagtcaacagataaaaggaacaaagaccacaaagcaaagaggcttgtggtggctggccagctgtgaactttgattgatatgtgggttgtggcctctggtaatcgattaccaagggtgggtaatcgattacaaggcttaaaattgaagacagaaggctaagatggtctctggtaatcgattaccacggngtgtaatcgattaccangcttgaaaac

SEQ ID NO: 31410 - DNA, 425 bp, Glycine max
cttttgagaaccattgctcttactggtaatcgattactttaatctggtaatcgattaccagagagtaaaaactctttggtaaaaggatttgagaaaaattcatgtgctactcagcttttgaaaaaacattttcatacttatcttgattaagccttctcttgattcttgaatcttgagtcttgaatcttgatctcgattcttggaagcttgaaccttgaatcttgattcttgattcttgaaatcaaatttcctcttgaatcttgaagtgttcttgattcaatcttgaacatcataaacatcttgaacatcttgaactcattctttgattatcatgaattgacctttgagctttatgtcatcacctttgttatcatcacaacatctttgaatcaatctagattcatcatgaagctttgcttctacac

SEQ ID NO: 31411 - DNA, 438 bp, Glycine max
  unsure at all n locations
tgcctaattaacctgaaattgagagaaaatgattattaaatttactaaatggaagtactaagtatttattgcctatacttaacagaaaatacttataacactacaaaataaccataaattggaagagtttgatacaatttacacaagttttatacacataagttagtcgtattcatcgactaacaatggtccaaaatttaattggattgggcttctcccaattcaattaaatttctctcccaacacacacacatcaaatagtgcacttaatgcatgtgaaattacaaaactacccctaatacaaaaactagtctaggtgccctanaatacaagggctaaaaaatcctacattactagggtaccctccctacactacggagccctaaatacaaggaccaaaaataatgaaaccttaatctaatatgtacaaagataagg

SEQ ID NO: 31412 - DNA, 411 bp, Glycine max
  unsure at all n locations
tgctctanantacattaatgtttgtatgccattnttgttttaagaatagtgtcccactggtaaaactaactttccaaatgtttgccttcgcaggaaatggccccgaggaagcttgcctcaaagaggtccaggaaggacaaggcagccgaaggaactagttccgctccggagtatgatagtcaccgctttaggagtgctgtacaccagcagcgcttcgaggccatcaagggatggtcgtttctccgggagcgacgcgtccagctcangaacgatgagtatactgatttccaggaggaaatatggcgccggcggtgggcaccactggttactcctatggccaagtttgatccagaaatagtccttgagttttatgccaatgcttggccaacagaggagggggtgcgtgacatg

SEQ ID NO: 31413 - DNA, 436 bp, Glycine max
  unsure at all n locations
tcanaactaagaaagaaactattnttggtgaaagaaattggaagaagatgatggaggatgtctcctccagcctctaaaccctaactctctcagtttttctgaactaagctctctttgttgctcaaaactcatctttctccttgaaactccgccaacctcagtgttttaaaggctcttggactcttcagcttccgaaagctcgctgagcgagcatggctcgctaagcgagagttagtgaattttcgcttaacgagagtgggcgcgctgagcgcgagaagagacaacatgctcgttgggcaggctggcttcacgctggacaagcacatctctgacttatcatcttctanggtttcccaatcaactaagcgagttggatgccttgcaaagcggatgcatctcgctgagtggatntacctctctaagcgagtcatcagct

SEQ ID NO: 31414 - DNA, 441 bp, Glycine max
  unsure at all n locations
tgagcgtagtggaagaaaagttcttgaatagaattttccctccttctagatatatcagtgcaaagtcagatgtttccactttcaagtaagaaccagatgaacccatttgtgaagtctggaagtgattcaaatcattgttgagaaaatgtcccaatcatggttttgatgatgttacccagctaagcatattttgcaatggtctaaggcctaaaactaagatgattctggatgcagtcgctagtggaacaattatgtttgtagatgttgaacaagccacaaggataattgatgcctttgcttcaactgatcaccaatctcagcataacagacaatcgatacagaaaagaggagtgttggatctcattctcaagggtttttcaaaggaagtgtaaaaacattntgttgtggtacctataacacaagagacgctgagagaagctc

SEQ ID NO: 31415 - DNA, 432 bp, Glycine max
  unsure at all n locations
tagccctagaggggatggaccttttaggttttggagaggataaataacaatgcctataggttggacctcctagaagagtatagagtcaacaccacttttaacatttctgatttaattccttttgcaggtggagttgatattgaggaggaggaactaacagatttgaggtcaaatcctcttcaaggggaaggggatgatgcaatcctccctatgaagggaccagtcactagagccatgagcaagagactccaagaggattgggctagagctgctgaagaaggccctagggttctcatgaacctcacggtagatttctgagcccatagaccaaggttgggtccaattgtctttgtacatattagactangatgtcattatatttgatccttgtatttanggctccataatgtangtagggtaccctagaaatat

SEQ ID NO: 31416 - DNA, 439 bp, Glycine max
tataattctaatatatctcttaatgagaacaatgcatgttattgttacagttcttgagattactttcacaagaattggacgatggttcttctcaaaggttagatcaagaacgtgctttgtcaagtgcggttgatggtatagcacttgacatgcagagaaaatccgagtcttctgagtgtaaaagagagaagcttcgtgaatatgagcatcaatgtcgtgagaagatttcaattgatgatgttcagcctcattgtgaaaaggtggatgcacatttggaagttcagaaggagacggatgctgctcctttacttgactgtaaagagacgcagcagggatctgttgattggaaaattgatgagagaccgattgaggaagtaatgatgctgagtgatcagaggaaggtgacagttctgtatgaacttctgtctggttgtctatc

SEQ ID NO: 31417 - DNA, 318 bp, Glycine max
gtcttatgataaggatttttagattagataaatacagagaaataagtgtattaaaataatactttgagagaaaataacaaggcctttcatttatgcatttgataacaaataaaatagagtttgtatttataaataataaaaataaatcaaataacacgttgtgagtactctaggtataaatagcgatatgctaggctagacggtagctcttacgattgttcatcctttctattgtgtccttcctctcctcctgctcaggatcccttctctatcctgcaacccaccatacctatcttagacaatctacgatctcggact

SEQ ID NO: 31418 - DNA, 434 bp, Glycine max
  unsure at all n locations
tgcaccaattntgggaaatctgtgagagttggagggtgaagtcataaatgtcccttattatactgaggcatcatcgcaggtataccttgtggaccgaacccagtcacttggaacggaaggtaccttggaaattgttggtgactacagctgctactactatcataaggaagcattcgcaagcttggtgatgaacatgattgaaattgtgccataacatcatcatcatagacatttattggaagagagtagctggggggaggatcatgtatctcatccgtttttgtctgtggaataagctgggatagggtatttttagactgctaaacacaaaagttatgtaataaataaataaacaatgagcccaaaatagatggaccagaanatgctctaagagaattntaactccttgaaggagaaagatgaataagaatatc

SEQ ID NO: 31419 - DNA, 367 bp, Glycine max
tgatgctggtggtgtggcaaagaatactaatgattagtgaatttgtagtgaaagagatgaggctctaaacatatattataaaaagccatagagttcacgtctaaagtacagaactttctggtacgcatatgtaattaggagcacaatcgattctaactcacaaaaaaaaaactagcggttgtgttacccaaaatcccatattcctcccatccaaacagcaataatattctccaaagcaaaataacattagtcgtccttaaattatattctattaatcaaagattaaaattgagtatgcggatatatatctatgaactgcaaggatcaagaattcaaggtaaaaagctacttggttagatatgtacca

SEQ ID NO: 31420 - DNA, 437 bp, Glycine max
  unsure at all n locations
ttcttgcttcttaaatttcattcctgctcttggttacagttatcgttcatgcctaaaactgtcacatcacaacttagatcttaattgaattttctagcttactaacccatattaaataatttcaaattagggactatactaattatttcaactgttgttttcatatggtgttgattttgtgcatgttaatctgcctcatgaaattttgttattcatcgttgtatcagcatgacaatgaaaacactattattgtgttgtcgaccaatgccacaattaaagagggccaccctgtactatgatatatagttacttatgttggctttctttcacaacaaatatgttgttttattgttttattntctatgtagctggttggttattcatgttttttcctggtatggatttcttcaactggagaggagtttttcttacataca

SEQ ID NO: 31421 - DNA, 436 bp, Glycine max
  unsure at all n locations
tataagaaacaaaatgcatcaatcatttccaaatatgcatgtgaattangacgcatcaacaagaatcaagccaaggttattgtgcaagcaatcaatggggcaaaacacaccaaatgattatgatgatggatggctcaaattctcacaaaggtaaactcatcactttcaaattgagctttcaaaactatcatgacatgtagatgagaatcaaggatttcaagtcacaacatgccaaaaacttttattttcaaaacaattacccatttcttgaacatatcctataattcaaagaaaaacatgcaaagtcgtacatgcacacaaaattgacccaaaatattaaactaacaatccgacgaaactaacaacattaacaaattaacaaaaccaacaaaactagcaaaaccaaagaacaccccccncccccccccatacttaa

SEQ ID NO: 31422 - DNA, 420 bp, Glycine max
  unsure at all n locations
ntattcaagacaaagaaatttaagatattcaagatggatgatcaagacagtctctagagtcttaggaagggtatattaaataggaagggaattcctaactgaagtagcaaaaggtttggccaagtaatttaagttaaaaagtgtttttcaagagatttactctctggtaatcgattaccataggatgtaatcgattaccagtggccaaaaatgatttacaacagctattaaaatttgaattcaaaatttgcaccatgtaatcgattacacatatatggtaatcgattaccagcagttattgaacgttttaattcaaattttaaagcttgtaatcgattacacacatactgtaatcaattaccagagaagattttcaaaaaatattctcaacagtcacatcttttcattntgttcttgaat

SEQ ID NO: 31423 - DNA, 501 bp, Glycine max
  unsure at all n locations
cggcgcgcggnnttganaccgtagctacttcgcacaccatagaacactcaaccctgtacgcctangatcttcttcatcaatggantcccttgcttttcggattatcaatggcagnggaatggcgaacgtacagagagaggagactccacttccccgacacgatgagtataaaagaagctcatctccatacgacgccatggatccgaccttggacgattatcgatatgaatgcagcggatagatagacgagcacgaccctttgtgttacaaggagccctgtatctgtagaaatctnctctgatcatctctgaaaaaaatacacacacatgacctctatttatctcctaagtgtcacacgaaatcgcatgtatattcatatcacacttgtattttacattgaattctgggaactcaactctggagctcacatctggctgattatgatcaccgacatttaatgttgtgtcacctcactaatgccagaccccataccagattccc

SEQ ID NO: 31424 - DNA, 440 bp, Glycine max
tcttgatgagaacgttggggtccacattccctgaaaccgtttccttctcttgttctgcatctatctcggtggtaaacacccctgtgaaaatgaaaaaatggactcaaataaataaccaaacacactatttatctcaaagatatggctatagagatatgagattttgtttttttcttcaaggaacaaaaaaaataataataaagctttcaagagtgaaatgagatataacatgagatttttctgatagatgcttaacataccatcaatcttctgcaagattttcttaactttgttcttgcacccgtcacagtgtatgttcactttgagaacacatttctgcatgtacaagcaatcccaagaggcaacacagaataaagagaaatttcgttgtaaataagaggagatattgaaatggggggataaaagtaaaacacaacatg

SEQ ID NO: 31425 - DNA, 446 bp, Glycine max
  unsure at all n locations
tgtctttntcagggtatacgaaagaaggcccaggaaattcaaaaatttaatgactgccctcacgtactgtctcgtggggggtatgaactgcttgacaagaaacttatggaggagaagagcaagcgtggacatgaggaacattcgtgtactgaaagcccaacactcaacatcgacccaccatccctagttgcaagacacttgaagtggaagatcgcccgcactaagcggcatggccaaatgacgtctgaagtggcacaagaaattgcagacaaaattgtcagttcatatatttttttggttactatcattggcaaataatggttagctaacctagtcaaatttgttttattcaaattcaacaattgtatatgcatgcaggattcattacaggaacaagcaacacaggggagttntgttctgcatgggcgacaggacatactcaacac

SEQ ID NO: 31426 - DNA, 267 bp, Glycine max
  unsure at all n locations
agagtcgctgatatacacctactccatcatattaagttcgtctgactctttacgtctccaaacggaccgaagctccgagacgctgactatatgctcgtacacgccacgtcatcattcactctttctttgcagtacaacgaaaatcctatgcacctcgtatatctataaaagatttcattgaatgcttaaaagcctatacctgaattaaaggccttacgtcttgggataccatatacttgtaccaanttctataaaaataaatacgct

SEQ ID NO: 31427 - DNA, 444 bp, Glycine max
tgaacactctaaaaagaaatgcaagtactcaagatttttcaaaggtgaaagaagtgcctaagagacattgagacatagaagcctgcattgccatgtttgcaaacaacagcatccaaagcaatgaaaaaattcacaaggtatggaactaagttactgaacctgtataagagatgccatcatcattgtccattgtaatcattggtggagcatatggggagacattggatcgagcagtgaagttagatgactttactgcaggatcagaaaccctttcctggaaacaaaaaaaaaaaaaaacttgctaagcatctaaaagtcacactgaatatgattagaataaagaaagaacctagagtttccagtatttcacaaatgcacaaatacttcattagctttcttccttttcgttacttttgctctgtttcactttcctatatttcttac

SEQ ID NO: 31428 - DNA, 436 bp, Glycine max
  unsure at all n locations
tncatcaggtgctaagcccaatttcacttactcacgctaatctcgagggtggcgctaagcgtagcgtcacgatttcagagcctatttaaagcttgtcttgtgtagaattagggtaccacttttatgacagcttctacagacggtcagggcacagattttcagagcagccacgggcctatttatggaaaagagccctagaagcataaaagaggagcaacttatgcattgaagcctacgttttgtcatttgagagattattgagtagagagtgagtgtgagatgttgagaagaggaggaggaatcccccttcttatgtatggaactatcattctctgcttttaatctcatttattattagggtttctttgtaatggctggctaaacaccctagttgagggattttaatgaacacttgatgtaatacccaatatctaat

SEQ ID NO: 31429 - DNA, 422 bp, Glycine max
  unsure at all n locations
ntgtcctcagatccctcttgttggactagacttataccaaactacattattgtaacaacatacttaaaaccaaaacttaatctgcagatccctcttgtaagactaagtttcaattctgcttcattcaagttctaaggaaacaatacatttcccaatgttaaaatcacctaactaggcacacaaatggttgatcagaccaagagcatacaaaatttaagcactggaagaagcattgaacacaagaaacaaaatcaattagatatgaaaataattacatcgactgttcattataaatccccaacaagggtatttagccaaccattacagacgaaaccctaacaataataagcttacaatacctaggaattttattgatatgattcttaaagtagatacaagaattaagaaacttacctaagaat

SEQ ID NO: 31430 - DNA, 424 bp, Glycine max
  unsure at all n locations
tgtagagaggagttgctaagaaattgaaattctctcattnttacaaagaatttcaattctttcattctctgttgaataaaattctttattaaaatgactaaattcaatttctctttaaatgatttatccaaacatgtaattttaccttgaaatatttcaattacatgattaaaatgaattacccagttaaaagtcatcatctaaacacactcttattgattttatccggctcgtctagtggaatttacctgtagtcgagacaaaaaaaattacaaaatacccaaaatgttggtcaaacaatatgaaatcgaggagcagaaaatcaattcgtgccccaattgttacccaatcatacaaagcaaatcaatcaactctatagcgtagagcatcgtacaataccaagtccagccgcacaaaatcaatc

SEQ ID NO: 31431 - DNA, 435 bp, Glycine max
  unsure at all n locations
tgtaggattatggngtacccgtcacatgtggtactatgtggcgatcgggcgatggtacaagtcgactctccacgtccacaaatcacacataaatccaccatccccagttgcccaccttcaactgagctcacgtactcccacatagcccttatcctcgttcctctcaacaccgggtccccatcaatccctccaagcttccacaacatccaagcaattaaaaatccaaacatcatgaactatcaaaaccaagaaaacagggcagaggcaaaaaactctgcccaaaacacaaacaaataccacaactttccttactcaaatacctcagtaacattctcttcgttcctattcgttcaccgttggatcgtctcgaanaatttactggaggtccctagtacataaatctacactttgaccgttgggatctgctagaaaaca

SEQ ID NO: 31432 - DNA, 345 bp, Glycine max
ctccaataattcaaatggtcataacttttcacacggaggttcgattcttgcacatgatatatcgagacgttcgtaattgaacaacggaaaccctcgagaaattcaaatggtcataactttttactcggatgtccgattcaggcacatcacatatcgagacgctcggaattgaacaacggaagctatgaagaaattcaaatggtcataacttttcactcgaatgtctgattgatgtgcatcacatatcgcgacgctcgaaattgaacaacggaagcaatcgagaaattcaaatggtcatacttttctgaccgatgtgcgattcaagtgcatcacatatccagacgc

SEQ ID NO: 31433 - DNA, 431 bp, Glycine max
  unsure at all n locations
tgtatttaacaatgttntanaaatacttttaattaatatttgaatttttattcctttattaatatatatgtgaggggtagagggtgtcacactatatataattgtttatgttttagtgttttaatgataaacttatttgactaacaatggattagggttactataatacctanggtttagtgttatatgtcttattagggttcagttttacttgaatacgtaaggcttagtggtatgtgactaattaacgttcaatgttagttcagtacttanggtttattgttacgtgactaatatagggtttatggttgtgtgaatacctaaggtttagtgttacatgtcttattacggtttagttttacttatatacgtaaggtttagtggtatgtgactaattaacgtgcaatgttagttcaatacttatggtttat

SEQ ID NO: 31434 - DNA, 291 bp, Glycine max
  unsure at all n locations
tggagtctgcacgagacagtcatanactatgtagatgtcgtgtttagtacacggcgatacagaatacactcattgtggcatgacatgggaaaagaccacaactatagcatatacattaaaagatgtgtgagtccagtatacatatagatgataccttcctgcattcattggggctcaagatgattatatgtgagtcttagactcttctactgcctaaatatatagattctgtagacttggacttacataatcacgaagtctatgatgtcgtggaccatgacgataatgcta

SEQ ID NO: 31435 - DNA, 369 bp, Glycine max
tttccgtaattgtggtataagtgtatcataaagtcttttccataagaattagtcacaattgccttttggaatgagttctccaaacaaaaaactaaccaagcaaaagagtcaaaacaaccacttacctacagtatctacctcaacccaaccctcaaaggagctatgcacagaatgtagatgctacctcgacccgaccttggcggagctgcaccaaaacaaccaatgttcgtgacattcgacggatataacgatgtctacgccagtgcaaccttcacggaaaacatacttgaatgaaaatggaagaaggtgttgggagtaggtcagctgcttttaagacaaaggttgaataaaggaaagttaaatacatca

SEQ ID NO: 31436 - DNA, 412 bp, Glycine max
tgccacccagcttgcccaggcgagctcagctcgcccaggcgagcaaggttgcttcctccagaagcaacagccttctggaggaaggatctggaaggcccaagtgggccatattgctatttgcactcccattttactaaatgcacccccttctatttttttggtaattctttttccgtaacgttacgaaacttttacgaatttcgtaacgatacttattttccttccgcaaggttacgaatccttacggattatgtatttactcttttttagctttcgaagaagttacgaaaactcacggattgcgcaaaaacacctcttttcgatttccgccacattacagaatttcacggatcgcgcaagcctgcttccttttgatttctgacacgtctcgggacttcatttattgtgcaac

SEQ ID NO: 31437 - DNA, 443 bp, Glycine max
tgagatatccgtaaagatcaaagaagaggtgaaaaagtagttcgtcactggctttttggcagtggttcgataccccgaatgggtggccaatattgtgccggtccctaagaagatgggaaggtatgaatgtgtggactattgggacctgaaccaagccagtccaaaggataacttccctttaccacacattgatgtccttgtggataacacatccaatttcactttgttttccttcatgtacgggttctcgggttacaatcagataaagatggtgccggaggacatggagaagactatgttcgtcaccttgtggggaatgttctattataaggtgatgttctttaggctcaagaatgctggggcaacctatcagcgggctatggtagcattattccacgatatgatgcacaaagagattgaagtctacatggatgacatgattt

SEQ ID NO: 31438 - DNA, 381 bp, Glycine max
tcaataactgttcatgtccattacctgtagaaatctcacaaatgtctggacttaccttcttaaccttaacctacaaccaggtctctggacctattccatctgaattgggaaagttgactcgccttatggcacttgatcttgccttcaacaatttcactggaccaatccctccaagccttggaaacttgagttctctcctatggctaaccctttcagataattcgttatctgaagaaatcccaccagagctgggaaactgctcaagcatgttatggctgaaccttgcaaacaacaaactctcgggaaaatttccttctgagctaacgagaattggaaggaacgcaagggccacatttgaatcaaataatagaaaccttgggg

SEQ ID NO: 31439 - DNA, 444 bp, Glycine max
  unsure at all n locations
aactaagcttgccagcgttattatggatctttcaagattatcaaacgcatatgtcctttggcctatagacttctgttgccagcagggtctcgcattcacctggtctttcattgctcactactcaagccatttcttcaagatgttgacaatcaactcgcgccacttccactcccaccaacgaccttggataaccaacctgtgatctcatcgttagctattcttagctcgcgtcaggaaggtccagatgaagacatgtatctccaagttctagtgcagtggaagggtctccacgtagacgacacctcgtgggaggactgggccacattgaagggcacctatcaccttaaggacaaggtgattnttgatgaggttgngaatgatagaccaagcgggtcacaagcagtccataccgagaggcccacaagaaagatcacaacacctcga

SEQ ID NO: 31440 - DNA, 440 bp, Glycine max
  unsure at all n locations
agaattatacaataacactttttgcccgaccatgtaagccttcttaattatcatgctatcatggaacttcttggtcttttctttgtagaacttggcattctcgtaagcttctaggaggatctcatctaactcactcagttgcaactttctttcctcaccagcttgatccatagagaagttgaaggtcttcactgcccagtatgctttgtgctcaatctccactggaagatgacatgcctttccaaagacaacccgataaggagacattcctatgtgtgctttttaagaagtcctatgtgcccaaagagcatcatcaagcctagtactcaaatctttcctgcttggctacacaatcttctctaaaattctcttgatctccctgttagagatttctgcctgtccattggtttgtgggtggtatggtatggataccctgtgcn

SEQ ID NO: 31441 - DNA, 435 bp, Glycine max
tgaatatatttaatagtacttaacaatacacgggatacttttatacctataagtacgtggcactccctaaaattgccctaatagtgaacaatttgaattatttacctaatatcttaggttcagatttcattaccgtaatattataaaagaaagtaatagtgtaggacttattgttcttcaacttatttatacatatctttctattttaatctcaatttaatcaaatagattttttctttccttgtaatattgatagacgtactttcttacaggaaaattaagtaaaatatttcaaatatgtggtgaacattttctaaaaaagacagataattataggattattactagcactgtatgcaccaaatcacaatctattctgctgaaactaaagaatcagatataatgaactttgtgaaattcttgacagtgtgtact

SEQ ID NO: 31442 - DNA, 379 bp, Glycine max
cacttaaagctcttcgtgcaatgaactctaactatctacgccattaatgcttacattaaatgcatggtcgttcttcatgcagagagatcatgttgatagattaacgtgacaaacacttcagccgaaaagtcacttcttttatcaaacttgatccgcatagtgaaacgccctttgatcaaggtcaacactctcaaattatggacttcatttattattcataagattttgacttgatagataaaagaatctcaaacgcacagtattgaataaaggtcttaaatgcaacacctacatgctatgtcacatcatgtatgtgagagacatcatcttgaactccaaacgatgagatacagatcatgatccggccacacactacact

SEQ ID NO: 31443 - DNA, 435 bp, Glycine max
  unsure at all n locations
tccatcaagtggtaatcagagcagaagagcttcaagtaggtgctccttaaacctccattaattttttgctttaccttctcttccattattttttcttcattttttctccacgtatctcctcaaatgtcttgtgctaaatgttcttaacatgattctttagagttttcaccgattaaacttgctagagaagctagattttattttctatggttcaaatttcttgttcttgttcttgaaccatgaattgtgttgagtttaagttcctttgagttttgtcttgttattttttgtggctgaaatctaaaccataaaattcttacaaaaatattaaagtagaagaaaacctcaaaaatctagagtgacttgttcacctattgtagttntgtcatagaagtcatgtctagtcatgaaacttgtcacataagatttcttatg

SEQ ID NO: 31444 - DNA, 432 bp, Glycine max
  unsure at all n locations
ttntaactcttaatattattttttcttataaaactgcaaacaagtgcaattacattccatataagcatatgctctaaataaacagctttttagctcttagtattctaacttgatgcaataaaataattgatgtttgcttttgggtattattcagataatattttttgtaaaaaggttttaaattgaaagaataaaaaatttcatacatgagtataaacaaaagattgttttgtagataaacagagtgatatattacaacttcaacaaaatcattcaaataatatggcctcaattttgatgtgcattaaagaacaaaactacagaaaacttagcacattcaagaagcatagctactttcatatttctgcttgttaatgttccctcttttttttgttccgttattttttatgtcaagcatagattntcccatgt

SEQ ID NO: 31445 - DNA, 444 bp, Glycine max
  unsure at all n locations
ntataagcgcgggtctgggagacaaaggtcaagtggtcgcgatatgcgaagatgatgttccgagtgcattggatttggtacgaccatgccctcctgatttctagctgggaaattggcgagtggaggaacgccccggcatttacgcaacgagcataatgtaaacctttacggttttaaaagctctatagttaggcctaggctttagagtttttccttttgttaaggctttgtgtcttttgtttttgaatttataatacaaggatctttcttcatctgttcctacgtctctacccattctcattcatttgcatgttaacttctttatttctgaaacggaagatccgatgacgagtcccccgaaggtactaatacctgggacccgcttatcaacttcgagaaagaaacgaatcaaacggaagatgaagggaacgaggatgtgggact

SEQ ID NO: 31446 - DNA, 448 bp, Glycine max
  unsure at all n locations
tgtagaattcaccccaattccagtgtcctatgctgacttgctcccatatctacttgataattcaatggtagccataaccctagccaaggttcatcaacctccatttctccgagaatacgactcgaacgcaacgtgtgcttgtcacggagaagccccggggcgttccattgagcatggtagggctctaaagcgtaaggtgcaaggtctaattgatgcgggctggctgaaatttgaggagaattgcgtgtaaatcctgacattgacaagagatgccacacatggggcaattttgaaagctgttgttaggtgtccctaatgactcatcagggtttccaagtttatgccattattgtaaaccacagctacaatgttaaatgaaatggataaagttgatatctttgtccctcatcctctcacaaacgcatgtttgcttattcaactntcatcg

SEQ ID NO: 31447 - DNA, 448 bp, Glycine max
cttgcctttgcaattccaagacactagtgagcttccaagtatatgacatgtaccatttgtaattttcctatctaatttgcatcttccaaaatcagagtctgaaaaaccttttaagtttaaggaagttcctttggaataccacaaacctacattggttgtgcccttaagatacttaatgatcctcttaacagtagttaagtgagattcctttggattggactgatatattgcacataatcaaacacttagcatgatatccggtctacttgcagttaggtagagaagtgatccaatcatacctatgtatcttgattcatccactgatttacctttctcatctaagtcaaggtaggttaatgttgtaacgcctttaaatttcaataactgaaaatagatgtttgatgtatttcttgtgttatttgattactgggattaattggatgagttg

SEQ ID NO: 31448 - DNA, 421 bp, Glycine max
tctagaaggagatcaactggatgttctatgcttcttgaaggtggcagtccatgaggaatctccttggaaaagacatctttaaattcctgcaataagggttgaacactaggagaaacataaatagttaactgattagaattatcactctctctcttttgtgtatcactcttttcctcgggtgtatcactcttctttttcatattcctttgtggagcctcactattttctttctcttgttctctcttttctctcattctgatttggtcatcacacacttctctaggtgatagaggtttaagagtaaacaaggaagatttgatcaacaaacgttgcatttgtgtagtccacgcgtccagaaataagcgttgagattcatccagttgatgatatacaccaccattgtcaccagctcttgccatga

SEQ ID NO: 31449 - DNA, 452 bp, Glycine max
  unsure at all n locations
gaaactcaagcttggtgtagaagggattgctaaaaaatgtaatcggatgtccttgttgtgttagcacagtgcccattcctacacctggtgcatctgtttcgatcatgaagggtaaggcaaagtctggaaaactcagaactagagccttgttgattgcttcctttagttgctcgaaggcattaatggcttttggagtccaagtaaattggtcctttgccaaaagttgtgttaatgatgtagcaatagctgcataccctttaatgaatcgccatgagccatcacttttcttaaccaggagaaccgaagatgagaaagggcttgtgcttggctagattatgccatttcgtaacattgattctacttggttctcaatttcttgcttctggaaatgggggtatcggtatggtagcacattaactggttntgagtttggaaggagatggatcacatga

SEQ ID NO: 31450 - DNA, 437 bp, Glycine max
tattgttaagtttttagtcattaacatgctatctattaaatacactatcaaaagactattttattttaatccaaatatttgtgtcaatttttttaggttattttgtatcaatttcttaaatacgaagtcgtgtcgtgcgcaatctatcaaagtaatcaaattaaacactacaagtcataccaacaatgatggattagtgttttagtattgcataattatataattattaatctgtttcatttcctccaagtcaaaatttcactttataggccaaaatatatatgttctttttatctgtctttcttaaacaatgatgaaaggtctgagaaacattttattgacattgactacttacgcttagaccttggatcaaaacattaaaaaaatgttaagtattgatatacactcgtaccaatatgaggtaagggcccccattt

SEQ ID NO: 31451 - DNA, 438 bp, Glycine max
  unsure at all n locations
ntagatagcttgttgtaatcgattacgacaaccctgtaatcgattattacagagagttttgcctcttgaagaaacttttctaacttagaaacttttcttcacactaatcatgatgatgcatgatgcaatacaaatatcaaatgtactaagatgcaacaaccaagataacaaccaatacaaatgccactcaagggatttaggcatgtaaaagtgaaaacttcttcaagcttttctttgagcttcaagctttagcctttaagttgttcaccatgttgctccttctatctctaacactgcactccattccatcccaccatgtttgtccttaaccacgaaaaacgactntgttatcctttgtgtagaccaagcaatgaagtacataaaatttgggataaatatacttggacacctagtangagagagagagagagagagaga

SEQ ID NO: 31452 - DNA, 409 bp, Glycine max
  unsure at all n locations
cctttcattntaacccttagaacttcccagttcaaattgtcatagataaagnaatgttgatgttcaaaggacactttaaatccctttttaatcaattgacctacacttagcaagttttggtcaatgttaggtacataaagaacatctgatattaatttgatacctgaacatgttgaaattgcaacagttccttttccttttactgaaatatagccaccattcccaattctgacctttgagacattanttggcttcaaatccttgaatagagtcttatcatatgtcatgtggtttgtacaaccactatcaatcaaccaactttcacttgattcactactcaagaagcatgtggccacaaacagttgatcctcctcttcttgattagcaatctgagctccctcatcatgat

SEQ ID NO: 31453 - DNA, 429 bp, Glycine max
  unsure at all n locations
tgtgactcttggcaatttcttttanaaaactagttacttattaagttttgacttttgaaaaaatcttcagaaacaagtcatttgaagaattgtgacttttggaaatgtatttttcaaaatcaatcactggtaatcgattaccattaaggtgtaatcgattacacatcaacaaatgtgactctttattttgaattttgaaaattaaaacatttagaagctctggtaatcgattgcaagtattgtgtaatcaattacataagtttaaaatactttaaaactgtttaaacataagttataactcttgaaatttgaaatcttaacgttttaaaacactggtaatcaattactaccttctggtaatcgattaccagagagtaaaactctttggtaatgaatttgtgaaaacttcttgtgctacttcaatatttg

SEQ ID NO: 31454 - DNA, 422 bp, Glycine max
  unsure at all n locations
tgtaggccttggatcttcttcatcaatggagtcctttgcttctttaagatgaatggcagcgtaatggagaaggaagaaagatgattggagacgccacttcaaggagaagatgaatcaagaagaaactcaccaccataggaagccatggataagagcttgaaggtaggagaagatgagtggagggagaggagaggcacgaaattttgagcctcaaatgagatctgaactttgaagtataattcttaaatgatcaaagttgaaaatatgcacatacatgacctctatttaaagcttaagtgtcacacaaaattggagggaaatttgaatttctattcaaatttcacttgaatttgaaattgaatttgtggagacaaattttcgagccaaaaattcactaattatgattagtgaattntagctat

SEQ ID NO: 31455 - DNA, 487 bp, Glycine max
  unsure at all n locations
naagcgacggtggggtttgtttgacccctgcataacgagaactctgaaactcagcttgttgagtaaataccagccccaattttatgtggacctaattgcgcgnggaaggcaggacgtgtgcaatatatgagaaacaattgtccgtttcacttcctaaagatacagagatcgacgatgactaacacccacttctgtgcgggggttctcccatacaggggcgcatcatgtgatctaaaggactacaacggggactattggaatagctaacaggagcgtccaattttcagcctacaacgttgaacgttccatagatagactagagtcatacaccgcattgaaaacgcacacaattaacgtgcgtaacgtagatatgcatgagctaatgtgaacgctctcttaccctttctagaattcaatcgacatagacacctcgtagttcttccatctcatgatgaaaggtaccacaaatagtctcgactttatttcg

SEQ ID NO: 31456 - DNA, 303 bp, Glycine max
agagcagaggcatcaactttaatgttcattttattaacattcggttagcccataaaccgctggcatgttaagacacgcgttataattctgcataaattttacattaatatgccattttgaatatgcgatatatgtgaaaggaacttctaatcacacctgccgttataaaacaatattatttattctgaaggtatagaatggtatgataatcgttgacgtcccactggcgtacttagacccttccttatatattaaagttttacaacgtcccctgaacacaacatcttttatgtatgctcacca

SEQ ID NO: 31457 - DNA, 407 bp, Glycine max
cttgcttgagtgatgatccatgctctcgcccatctatggatcatgtgtctaagaagcttatgagagggatatcacctttagcacaccagctccctatgaatagactctggacaactatctttaaggactaaactaattcacgattttgttgttcttgtttacttatttatacaccttatatcctttatcttttgatgtaagcttgctcgtgttgtcattgtaatacaccatgtataagttactaaaggtcgagagtaactagattgtccggttcatatactatggcgattgtgagaatgaattggcacattatctttattgggaaatgcttggtgtagagtgagcatgcatatgtacaagttagtggtgagaataacatagcagtacaaatgattgacttttaaatt

SEQ ID NO: 31458 - DNA, 448 bp, Glycine max
  unsure at all n locations
tccttaagaagcttcattgagaagctagagcttagctacacacacccctctaatagctaagctcacctccttgagatgaaaagctagagcttagctacacatacccctctaatagctaagttaacccccatgccaaaatacatgaaaatacaaaaaagtccttactacaaagactactcaaaatgccctgaaatacaaggctaaaaccctatactactagaatggccaaaatacaaggccaaaaagaaggaaaacctattctaatatttacaaagaagagtgaacccaaccttgggacatgggctcagaaatctaccctgaagttcatgagaaccctanggccttctttagccactctagctcaatcctcttggagtcttctatccaatacccttggggggtaggaatgcatcatcaatgctatgcaatgcaatcaatatgcaatatg

SEQ ID NO: 31459 - DNA, 449 bp, Glycine max
taagagcaaaaactacggctactaactcaagatcgtgtgtgggataattcctttcatgtatcttaagctgtcgagaagcataggccactacctgtccccgttgcataagcactccacccaaacccatcttggacgcatcacaatacaccacaaaagattcactcgggttaggtaacactaaaactagtgcagtggttaacctttccttaagggtacggaaactactctcacattgggcatcccacacaaaaacttgacccttacgagtaagcttagtcaaaggtaaggctagcttagaaaaaccctctatgaatctacggtagtatcctgctaagccaagaaagctcctaatctcaaacactgacttaggactctcccaactcatcaccgcctctaccttggaaggatctactggctatccctccttagatataacgtgccctaagaag

SEQ ID NO: 31460 - DNA, 447 bp, Glycine max
tatggggccaaatgctttgcttactgcaggcaacacattgatagctagcatagctcattcacggaaaggccggtggaggaaccgtgtaattacttgttaacaccatatcttaaagagacacagttggtgtatcttgtcttgttgaattgaaaactgtgctatagacacccttaaaaaaggaattgcttgaaatgagcatgacttttttcttttctgcttctggggtgaaaagtctgtatataatatagactttcatagacaattgatttgcggccacagatagaggatttttggaggcttgactggagagatgattcaatttctgaaggaaatcttcagtctcattctgagatgtttctgttagctgatcatagtgtcatagaacccaggaaaattagttgaattttgaagacagagatattgatactccaagaggggtggagaatt

SEQ ID NO: 31461 - DNA, 420 bp, Glycine max
tcacgcttgttatttcatccacatcagactcattgttcaatctctcatcaacaacacccaaaatatatcaataaaggtactgtgccctacaatgctatcaaacaaacaacaccctttaacactgacactagacagtatagtagcacgcagggtgccctagccgaaggccttgcaaggggttgtttgtttggtcactatatacagtcttgtctcttccttaccctaccctacatgtcactaacttcaaaagcccaacaacaaaaagtgagaatgaacacatgaagcttacctcgacaccaacaacgataatggcaacgacctggcagcgagtgggagtgaaaaagaagagtcgtggcgtagagaggaacacctacatgggcaaaatgaaagttgtgacagagacgaagagtcgtgactgac

SEQ ID NO: 31462 - DNA, 428 bp, Glycine max
  unsure at all n locations
tattgtactattaaaagagtaaataatctagtgtgtcccttggaagtgttaagctttgttactttagtgtctaaaattaagtaaattaattttattttctgaaattgcaatctgtcagtttcaagtgtaacatgtgacttaagtgattaatattaacatttgtttaaggatcaaaatgatactaagtggttaaaattatggagttagttgaaatgactaagaattttgggatttatttaaatttttcttaattttaaggactcgtgtaatagtgctttaacactttcaacactaaaagttaaggtgatttacccgttgtctctaccttagtatacttctatcaaagcatgaatatattacttaatttattataatagcactcaatcattatattatcacccacattttggattcataaaanagaatca

SEQ ID NO: 31463 - DNA, 431 bp, Glycine max
  unsure at all n locations
ntgtctcatgctttataatattctaactacaatgaatataataagattagtttactataaaatatggatatcagaaagatcggcaataattactataccgcagataggtattcagaatatcatatacctctcatagtatcgggtgcttgccctatccaaaatatacctcttgtagtatcaggtacttagtctagccgaatacttgacaccccttatagtatcagatactcggcctaatcaaatatctgatcccttgttaaatactcggtctaaccaaatatcgaatatgtctaatgttatctttgacaacttattaaagaaagattacctagattaactaataaaaaataattaagggagatatcagttccttaatgataattatacataggagcattacctaattttaatttgatgctgacacggcacct

SEQ ID NO: 31464 - DNA, 436 bp, Glycine max
  unsure at all n locations
tgtagaatggctagacatgatacatgtcagggtttggtttggttcaaggataaaagggatgccccacattatttccatgacacaaatgcaaaaatgatgatttggaaactttacgcaaaactggtcatgcatgcacctatgcggacactcaagtgtcaaatttttatggtcatgtgatgctagggctcangattcgtttcctctattttaatcaacccaatgtttccaaaatatgttcttttatcaatttgtgcattcatccgagtccatttcgggcgtccggggaaatttcacagcattcacccttcaggtgtagacacattttccaaaaattggttatgatcaatgaactttttcaaagaaaagttggaaatcgtctcttttcaaaagcatgttggtttttcagcttaacaacttattttttcttttttttcta

SEQ ID NO: 31465 - DNA, 429 bp, Glycine max
tcaacattcaatatcgagcgtctcgatatattacgggactctatcagacatccgagcaaaaagttactgtcgtttgaatttgctcagagcttcgataatcaatttctagtgtctcaatatattacgcgactcagtcagacaaccgagtaaaaagttattgtcgtttgaatttgctcagagcttcagtattcaattctgagcatctcgacatattacgggactcaatcatacatccgagtaacaagttattgtcgtttgaatttggtgagagcttcgataatcaatttcgagcgtctcgatatattacgggactcagtcagacatccgagtaaaacgttattgtcgcttgaatttgctcagagcttctgtcttcaatttcgagcgtctcgacatattacgggactcactcagacatccgagtaacaagta

SEQ ID NO: 31466 - DNA, 436 bp, Glycine max
tgtgtattcctgcattctactaatatatggaattgcccattgctttgcctgagaataacaattggttgaccacaacagcgctgggggcggcaacggacaatggtctttcaaataaacctgttgtacatgaacaaacattatatcatgcgctgaccgtgccaaacgaacaagcgaagtcattgcataattgttacactaactatattcaatgtacctgaacaaaatgatttccaaacacgtgaccgacacatatgatgcggtggccagaagagtcaggtggtggttgacttctaagagggaaaaatgtcatgctttgttgttgggacaacgatacaaggattacgttataccgtgaagcaatcacatatcccatgtctgttatatccatccacttgtccacactaacctgaatgaaccaaacatacacatgtaagta

SEQ ID NO: 31467 - DNA, 430 bp, Glycine max
  unsure at all n locations
tgccacctagctcgccctggcgagctagcccgccttctggaggaacttcctggaaggcccaagtgggcctggttgctatttgcactcccctgtttactaaatacaccctctgcctttttttgctgattctttttccgtaacgttacggaactttacgaattctgtaacgatacttgttttcttttcgtaatgttacggaaccttacggattacgtaatcatcctttttttggcttttggaatgttacggaacctcacggattgtgcaataatgcttccttttgatttccagcatgttacagaacttcacggattgtgcaacaatgctttcttttgacttccggcctgtcacggaacttcacggattgcctaacgataggtgccaagtacctcgaagcggtgaagcanaggttgcatgctatcaaacaatg

SEQ ID NO: 31468 - DNA, 435 bp, Glycine max
cttaattaattgtcttgatataaaatttctacacagactaataatttcaaagtctatacagtcgtattacttttaaatttggatgtaattgtgtgtttaattttctaacccattaaaagagttagaaaacaatgaagaccacaatatcatctttttttatcattattttaaagtactaatttatttcaatacatgtgaaatttttttaaaaattatagtttatacgctatttatttaaaacataatctttatattataatacaaaaatatcactatttcatactcatacaatcagtatgaatataataaacactataatttgtctaattattattatatatatcattattatataacaataacatttacaatagtcgtattctattactattagactcaaataaaaatcaaaatctcaactatattatttattga

SEQ ID NO: 31469 - DNA, 359 bp, Glycine max
agcttgatgtttctttaacatttatccctatagaatggttactttgggttggtgagttcgctgtttcgcaggcttttgacataatcttggctcctggtcggtgggttggtgagttggtgacttgctatgctcgtgagttcctgagttggtgtgttctccagctggtgagtttgttgttaaaactgctggttttgtttactgcaatgattgttattggtgcaccattttcttgtttgctgagtgccattgttttgttttagggtataagaaaaccagacgtactttgcattggatttttgctttgaacaatggttttgataaccctaaacactaaccctagactttgttgtctcactcct

SEQ ID NO: 31470 - DNA, 157 bp, Glycine max
  unsure at all n locations
ctgcctcctatatcgactcttgtctctctatgaggaggttgctgggcctcgataaccagctactaacaacaattcacatntatatattttattcaactaactgagattagatagactctttatttgaagaacacatttagagtgtggttggatgaga

SEQ ID NO: 31471 - DNA, 374 bp, Glycine max
aatccatgtcccatgcgagattgtcaatattgtcaaaattaaacgatttctgtactgaggcaagcccagcaatattctttaattaatattaaatgatatttgtattttaggaacagttgaagaatataaatgtaaagaaaaatttggccatcattacttgatttcagctcatatgagatacatcattaaaaatttcagacctgttcgaataaataacttaattaagtgtttattatattagtgtttggataaacaggatttagagtctggttagatatatagtcagtttcatttatatcgaagaagtcacttattcaagccatcatcacacgtaacgtgcatgttcaaataaatacttattcacgctctgatct

SEQ ID NO: 31472 - DNA, 389 bp, Glycine max
agctttcttatgaagattcctaaagaatctagagcttagctacacatacctctctaatagctaagctcacctccttgagatgagaagctagaacttagctacacacccccaataatagctaagctcatccccatgacaaataacatgaaaattcaaaaaaaagtccttactacaaagactactaaaaatgccccgaaatacaaggctaaaaccctatactactagaatggtcaaataaaggcccaaccgaaggataaacctattctaatatttacaaagataagccggctcatacttagcccatgggctcgaaatctaccctaaggctcatgagaaccctagggccttcccttggatctctagcccaatctacttggagtcttctacca

SEQ ID NO: 31473 - DNA, 447 bp, Glycine max
  unsure at all n locations
ctaagcttgccaattaacctgatattgagagataatgattattaaacacactaaatgaaaatactaagtatttattacctatacttaacaaaaaatacttataacattacaaaataaccataaattgggagagtttgatacaatttatacaagttttatacacaaaagttaatcgttttcaccgactaacagttcattacatcacgtcaggatacaactgaaaataaataacaagtgcatcagtgattcttaattatgtgagtcatcagttcgaccatatgctggcaataatcgaagagactatgaacttcatcgggagtagagtacatatcatccatcatcttggctcttagctagcagttcaggagttcttgactctcatttagcgtgagcacaaacctattcatccacttcatgctntcctgatgcagtagctctatcactttc

SEQ ID NO: 31474 - DNA, 411 bp, Glycine max
  unsure at all n locations
agcttatgcatattaatatatttctctaatcaatcatgctcttgtgttctatgttgtagcctacattactaaacctcgatccctcgtcagactgaatcaatccaagcttcgtcctcagatctctcttgttggactaggcccaattgagacagccctcttaggtttagactaacttacactgagttntgtccgcagatccctcttgtaagactagactcagctcaagcagcttacgaaagtttagcctaatttagcctaagcttcatccgcagatccctcttataagactaagcctagactaaacaacattattgtaacaacataattaanaccaaaacttaatccgcagatccctcttgtaagactaagctntgatcctgcttcaatcaagttctatggcaacagtacatt

SEQ ID NO: 31475 - DNA, 461 bp, Glycine max
  unsure at all n locations
agaggatgcttcaatggaggaaaataaagagggagagaatgtataggggggagcacgaaattgaaggaataaaagaggtagagaagtggaactttgaagtatgtctcacaagactctcattcatcaaagtgaccacaagtgttgaacatgcttctatttatagactaggtagcttccttgagaagctttcttgagaaaacttccttgagaagcttctttgagaaaacttccttgagaagctagagcttagctacatacacccctctaataactaagctcacctccttgagaagcttccttgagaagattcctatagaagctagagcttagctgcacacacctctctaatagctaagctcacctccttgagatgagaagctagagcttagctacacacccnctataatagctaagttcacccgcattccaaaaatacatgaaatatacaaaaaagtccctac

SEQ ID NO: 31476 - DNA, 262 bp, Glycine max
tgttcccttgtctttgtttgaaactcactacaagccctaaatgataaaccatgatatcacccatatcgcttaacgggaattttggagcttttgaatcgttctgggaataagtgtgggggcgttttgtttcattggataacctgctttgttggctatgcttcatgatgtattttgggccatacttgatgtacattgatattggtaaatgtggacatgctgatgaaatgtgcttctcaatgctatagacaaaaaaaaaaattcc

SEQ ID NO: 31477 - DNA, 336 bp, Glycine max
acaattgcatcacctctcaatgagctggggaagaacaatgaggcatttacctgcggtgaaaaacaagagcagtcctttgctttgctcaaagaaaagcttactaaggcacctgttctagctcttcctgactgttctaaactttagagctaaaatgtgatgcctctggagtgggagttggagctgtattgttacaaggtgggcactctattgcttattctaatgaaagactccatagtgcccccctcaactacaccacctatgataaagagcattatgccttataaaagccctgcaaacatgggaacattaccttgctttcaaagaatgtgtcattca

SEQ ID NO: 31478 - DNA, 312 bp, Glycine max
atcttgtataatggctagacatgatacatgtcagggcttggtttggttcaacgataaaacggatgccccacattatttccatgacacaaatgcaaaaaatgatgatttggaaactttatgcaaaactggtcatgcatgcgcctatgcggacgctcaagtgtcaaattttatggtcatgtgatgctagggctcacgattcatttcctctattttaaatcaacccaatgtttccaaaatatgttcttttatcgatttgtgcattcctccaagtccacttctggcgtgcggagaaaatttcacagcattcaccct

SEQ ID NO: 31479 - DNA, 285 bp, Glycine max
  unsure at all n locations
tgtttacacgcggagatntacgtcatcttccgtactcacaagatctgtcatactcacatttgagtcacgctgaccggcggaaatacccgagtggttagccgtataaacattcttcttgctatctgtaagacgaaaagcctgatagcatgcgaagactgacatcgtcttctgcgcccttcgtcaatcgcggccgacaagcccattgacacgcggagatttacgtcatcttcggcgctcacaagatctgtcatactgacatttgagtcacgctgactggcggagata

SEQ ID NO: 31480 - DNA, 398 bp, Glycine max
agtcttgtagcaaatgcaaaccacaataaattatagctcggatatcccattgagtcccgtaatatatcaagacgctcaaaattgagtacagaagctcttagcaaattaaaacgacaataactttctacacagatgtccgattgggtcacgtaatatatcgactcgctcgaaactgaataccgaagctgagagcaaattcaaacgacaatgacttttacctcggatatcccattgagtcccctaatatatcgagacgttcgaaattgaatacagaaactgtgagaaaattctaacgacaataactttttactcggatgttcgattgagtcccgtaatatatcgagacgctcaagatttataacggaagctcgtagcagattcaaacgacaataactttg

SEQ ID NO: 31481 - DNA, 340 bp, Glycine max
tgagatgaagaagagttgaacggttatacttcccgcttctattcgttgaccacagagtggtacctggagatatgtcgtgggggtcaagagaccttgtggacgtgaggtgttgtgctattgcccaaaaccaagcttgaccaatcaccgaccaacccggtcatagtctgtctgtgtgaacctgtgatgtacctaaacaggcgatctcctgccagtctatagatgaaacgaactaataccacaaatcaaggatgctagtgtggtggctggccagctgtgaactttgattgatatgtggagtatggcctctggtaatcgattaccaagggtgtctaatcgatta

SEQ ID NO: 31482 - DNA, 264 bp, Glycine max
atcactcgtcccgggatccttatagtcactgcaggcagaagcttttttatcgatgcctgatgcgtatatgtcttctatagctcatgggaaagccaaattctcgacaacactttgtgcacttctgtaactaaaccttcacaaggagacataggcaaccctggaactctgccaagccaatgccaaggtttatcacaatgttggaattaaaatcagtagcaccaaaaacaaacctcaaaagctacttatggggcattttacatacaa

SEQ ID NO: 31483 - DNA, 444 bp, Glycine max
tcacatgctcaacaagctccacttcctaaacaacttggacttggtcaacatgccattagagggaagttgatgcatgatcattagtgtaatctgtaattagatcgcaattagatgataataggaggctgagggagttagttagcaataccacgtgtcattaggtagtggctctaaagaattgattattctgttacgtttttctattgggaagtttgctaagaggtagctagtaacaacttgttatatatagcaagttgatgtgaatgctcatttttacatctgaattcccaatactcttttaattcttcgtattcttcattctataatcaataatattatagactctctctgattgggattctcttcttcatttctagttcttccatttgatcctaaatcctagaactatatcaacttggatcagaattgcaccttccatattca

SEQ ID NO: 31484 - DNA, 164 bp, Glycine max
tttctttttctcagcttaagcataagcttttgaagaaacttatctcattttataacagaagctaatccaaacaggacctacattcaaattcatttaaacctgaccacacaccacaataactctcccaacattatttcactagttgaattcaccaaacaaaacca

SEQ ID NO: 31485 - DNA, 345 bp, Glycine max
ttgatctcaacattaaatgtagaccttatgatggctcaagcttgttatcatgagatactttacacacagatttgctcatcataatatgataatgcaaatagatgctgattttaacatttgtattgatttgcatctaatcaaaataatcaagagtcctgatttgttttaagacataaatgtctttagacttgacaacacattaagaatcaacaaatatacagagtcaatgcacatgcatcatccaccttcaacacacaaaatcattctcctcaatcaccatatagactataacattatatgtatgttgaccccatggaaaaccataacaaagtaccccaagttccc

SEQ ID NO: 31486 - DNA, 259 bp, Glycine max
ttgctttgaagaaatgtgatatgaaccttacacacattcattatattcctttatgtgaaaagctctatgtagagtttacaacagctctcaaaacactttgattatcttgagagaatggactaaaagacgagactatatatcctgatgtgcgacactcaaatagttagtcgttgcgcaacaccaacaacaaatcaatcttatctgtatataatcgataacaatttggtacgacaaataatattgggctacatcgaacttg

SEQ ID NO: 31487 - DNA, 302 bp, Glycine max
cgtctaccataatatttgggatgactaaaattcatgattactatataatgtcgaactggtggcggagtgtgagacattgccagaaatcatgaaaagacatgtagttgcatgaaattatgcgtctatcttgatataacaatatacatatgaataggtgtgactctctgaaaagattaaatctttacattaccagacatgacatagtttagaaacataaccaatttacatgcagaataacacatttatatatacttcacccatccctttcattcgaatcgcttcctttctctcttatgcataaa

SEQ ID NO: 31488 - DNA, 388 bp, Glycine max
  unsure at all n locations
agcttttacaaaacactgtggccatctttgtctttagaagctaaagattttgtcaaacgcatattgaataaggatccacagaatcgaatatctgctgctcaggctctaagtgagttatttttcttgcctctatcatcaatttcaataatatctagtaagacattnttcaagttgtcagccataatcttgtgcttgcaggtcatccttggatacaaaattgcaataatgtaaaagttccacttgataaattgtcagccataatcttatgcttcctgttggaatgaagtattcctactttattccaacccttgtgtttgaaaatgatatataatcttctgaccacaagtattttcgatttatttctctcttgtaaacctctgagaattga

SEQ ID NO: 31489 - DNA, 442 bp, Glycine max
  unsure at all n locations
ntagtcaaggaaagtaacccanatatgaccaagatgagagtgttgaaagagcctaacaagactntcctaaattcggttaaagattcaatctttggtgatgataatgcttatganacggtaaggaagttagcaaatgggcctaatagatatgttataacttggcaaggatacgatatcaacaagtattcattctacacgaaatcataagatggcaagagtacaatgcanaacagtggggttagtccaagggctgaatctcaacactttgttactgtacatgatgacaatccttgtctagctcacatgccttactttggagtcattgaagaaatttgggagcttaattatctaaaattcattgtctgtgttnttaagtgtaagtgggttgatagcaatatcaatgtgcanatcgatgatattggatttactttggtagatctga

SEQ ID NO: 31490 - DNA, 374 bp, Glycine max
  unsure at all n locations
agcttggagttatgagctctctctctctaagntatagatccactcctcccccttatttgcttgcagatgccattgggggtaactctgctgctgcggctttagttctttttcatttttatgtgccaaaaaaagagtctctaacttacattacttccattgattcatagttttgtttggcccttttttccttaatttttttaaactttaatgtgacttgttggataatatatggagtagagtttggatttagccttgtgtcatctaaagagtgtgttattgcggcgttcaatatgcacgttccacttcgacgcttccattntcacgacagtaacgtagaagtaacaatctgttaggttaaaaatattttgtaaata

SEQ ID NO: 31491 - DNA, 316 bp, Glycine max
  unsure at all n locations
cggtcatctctagagtcttggtggtcatctccaaagtttgtgtggtcatggtggataggttcatggtgaggtggtatacaacctcttcagggcggtttaagatggctnggtagctatagtgaatgggtatggttgaaggtaggggttttggcaggtagaggcagccatggacagcangtcgaaccaagttgttaggaatagaggactagctaacgacactaacctatatttgatcattcttctctgattcttatttccttcctagggtatatntatagtgatcatacaacggataaggcttgcattcatgacccat

SEQ ID NO: 31492 - DNA, 403 bp, Glycine max
agcttcttctattgtcaatcacccagcaagccttggcacgagagtgtagcaatgaatgtgttgatgaactactagatggatctgtgaggatcttggatatctgtagtacaattaaagattgcctactgcaacacaaggaaagagtgcatgaacttgagtcagctattcgcaggagaagagatgccgaggccggattcacagtttcgagtggaaaatacttggcatctacgaagcaggtgaaaaaagcaattcggaaggccttatgaaatttgaaaggattcaagaatgaactcatatttgcttcctcaaacaaagacaacgagacattgtccatgcttagcttcttaaaagaatcagaactagtcaccgtgagctcattaaaagccttcttggtgttatcact

SEQ ID NO: 31493 - DNA, 429 bp, Glycine max
  unsure at all n locations
tatgcgctatattgcatcccaacagctcaggtccaagagctacatctttggcgatatctttcttattgactccagctntggtcatcaagaatatgacctataatacaaatattcaaatttcagcaaaagagtcaattgatgcctctagatgagccagtttattgacatataattattgtaattaatatgtctatgcagcaattaattctacatgaaggacaacttagtaggcacttgatgcacaaattcccgtttatgactcatgctttctagatgtggttngaagtgtatgaaagtatgaggttggttactgataaatacaattntatcactgcacaagattacattcaaattgatntaatgccccaataatttatctggtgtcctganaaaatatgaagactcattttttttctctcttttcaatat

SEQ ID NO: 31494 - DNA, 399 bp, Glycine max
  unsure at all n locations
agctttatgttttattaaaaacttattaagcttaatagagcaagtatttaagctctataaaagccttttaattttcttcattcaagtatttggcttgtatactatagaagtattcagccataccgaatatccaaaaataccctcaatacctttaagaatttaaagcaaacctcttaaaaagtattcaggtatccggctaggccaaatacttgaatgcttaaaatccttaggcctataaagcctctcaaaagtattcaggtatttgactacgtcgaatacctgagcactcagaatcattaggcttataaagcctctcacaagtattcaagtatatggtaagctgaatacctaaactcttagactccttagctctatanaggccctaaaaatattcatgga

SEQ ID NO: 31495 - DNA, 431 bp, Glycine max
  unsure at all n locations
gtgtatggtttccttgagccacagtctatactccacgcanaggacagacttgaagaatgtcaataatacattgaaacgtgggccaagtaatcacattgacaagtgtacttaggaccttacttgaatcagtaagtgaaattgatgtcattattgtgaaaaagtttgcattataagttctttaattacattcttttacttcaagacacatngacaacttcttgttatgtgtccacgggacaatattgttgtttgattctcttctttacgtaaaaagcctgatgttcacatcaaggttgcaattaacaggttattggtaaaattataacaaatntattgtttaccaagtgtagtatagcaacaaagtatctttcgttatatacgtttttgttattgtggaaactagtgcaatgaagaaattatccagtaagttg

SEQ ID NO: 31496 - DNA, 400 bp, Glycine max
  unsure at all n locations
agcttttcatttcaacaacaaggatattaagaggaaaaaagcaagacaacttagaagtggaactctgtcaaattcattggacgatatactttgcacttaaatagttcatcctttgcctagcaaagttaatttgtttatttgagcttatttgttattcactttattgagtgtgtgttctttgatatttcagtttgcatcagactntggcctctctgattaagtatttaacaatacaaaggaaatgaattagtcaaagaaaaaaatggaaaaaggttactcttccaataaatttcccttgttcacagggattaaatatgaatactagaaagacagaatgattgtgcattttgaatccatgcaaattgacatgtgggatgttgtgcaaaatggacatcatatt

SEQ ID NO: 31497 - DNA, 233 bp, Glycine max
taccttttactgtagtgaagctcactacccgccttagctgaataaccatgatatcaccatatacttacggaacattgccactgtcgaatagcgctggcaataagagcgatgcggccatgctttcgtagtattactgatcacatggctatgctcatcatgtatgcagcgcctgctacatctgaaatgatatctatctgccaacatcgtgaatttatcttacttctttaatgtct

SEQ ID NO: 31498 - DNA, 237 bp, Glycine max
agctttttgtagttatacatgggaccaactcatttaattccaaaaaggaagtcttatctagtcaaggcctgagagaccatacaagtttcctaccaatttctaataatgtgggccattaagtctatcatatgctgacaatacccgagaagcccatgaatctcttcgggggcggagtaggtgtctgccatcgccttggccttggctaacaatcggggaagttcttgactcccgtcaagg

SEQ ID NO: 31499 - DNA, 464 bp, Glycine max
  unsure at all n locations
agagcccgggtagtcaaaaagaagttcaagtccatagccatcaaagtctgaagagagtatgatgaactaagggacgtaaatatggccaccgatgaagccttggaatgagaaaccaagaaggcccgaaaggaagaacacgaccaaaacaagttttgaggggctttatagggcagcaatagtgagctcaaactccgaagaggtgaaaggaatcatcacgggtcaaaggcatgatctggaaggacgagctaaaggcttgccttangtcgaaaagaaatttgtcccaacagttaaggtgagaatgaagggaatatgtgggccatcatcgatgagtgcaaagagaagctaaatctagcggcgactcacgagcaaaggctagaggatgagtacgccaagatatcagcagaaagggaagcaagggaaagggtaattgattcattgcaccaagaggcagcaatgaggatgga

SEQ ID NO: 31500 - DNA, 269 bp, Glycine max
  unsure at all n locations
agctgagcgcgcttcaaagtctgaagcacaactgaaagttataatctggctcatatctattgacttangtgattagctctcccattattcaatgtgaacttttaaatatcttcaggaacgatatcatttacgacttaaagcgctagatgagagtttgagaggaaattctaacagtattaatcgctgtaccccagagggaacaagtatgagcaacagcccttctcagcgtcatccctacgcggagctgataactactcagaactaacctc

SEQ ID NO: 31501 - DNA, 348 bp, Glycine max
  unsure at all n locations
ntntggagtagaaacatgggaccatctcattgtattttcaaaattataagtcgtatctagtcaaggtctgagagaccatacaagtttcctaacgatttctaattatgtgggccattaagtctatcatatgctgacaatagccgagaagcccatgaatctcttcgggggcggagtaggtgtctgccatcgccttggccttggctaacaagcagggaagttcttgactcccgttcaggtaagagcaaaccgatccatccacatggttgcctcttggtgtaaagagtcgatcaccctttctctagcctcttttttcgcgtatacttgagcatactcgtccgcgatcctatg

SEQ ID NO: 31502 - DNA, 332 bp, Glycine max
tgtttttccttagctcgcccagacgagcaaggttgcttctggaggaatcttctggagggcccaattgggcctggatgctatttgcacccctatgtttactaaatacacccccttgccctttgttggtgattcttttttcgtaaagatactgaaactgacggattgcgcaacgatacttgtattctttgcgtaacgtcgcaaaaccttgcggattgcgtaatcatgcactttgttgacttacgaaatgtcacggaacctcactaattgtgcaacgatgcttacgttcgatttgcggtgtgtcacggaaccttactgattgtgcatcaatacct

SEQ ID NO: 31503 - DNA, 440 bp, Glycine max
  unsure at all n locations
gacactatgatactcagctanagtatgcccgagtcattcatccctatgagatgttgtcgatgtattggcaatcagaattgccattccttggattatagggttgaaccaagctcatgcttttacanaaaggttcatcaagtcaagttgaaatatggaaagaaccgtcctgcaaaattggggcaaaagatgaattgagtcacatcactgcttcgtctactgccaaacatatntaggattgtagatgtccttggtacttccagtttcaccttgacaaagatgtcatggaccatgttgaaaatctaaattgattcaaccccatatcctgcgtaaaaattcccaatacttcgactgtacatcattcgcatgcatncattgctttcattggntgcattgctcattgcattctttcttttgaaaataaataaaataaatgaactatc

SEQ ID NO: 31504 - DNA, 289 bp, Glycine max
tgacgaagttatgttccttaaaagccttggtacaaaagaaacctctaactaagctattatgaaggtcaataacctatatcctataaaacataatactatacctgactctcgtaaaacttaattaggctaattccatctttatatcatgttttgagtagcaacaattctgaatttatagactatagtctattttacatagaattatactcaatggcctataatactattatcccatgtcgagagaaagtagatctatattaacatttaatataaaactagcttggaaccc

SEQ ID NO: 31505 - DNA, 433 bp, Glycine max
tacacaacatccatgcataacaacattcacacagcacaagctatttcagccaagctaaacagagcataggcagaaaactctgccaaaacaccaaccaatagtcacagcttttaccactcaaagaccccagtaacaattccttcgttccaattcgttaaccgttggatcgactccaaaattttactggaagtctatagtgtataagcctgcattttgaccgctgggatatactagcaaacatccagaactcattctgcactaaactttccacagccaaccacacacaagcatttttctgcacttgtgcaaaattctgctgcacaatttcacagcaaaaactctgcataagtgcagatttcgaaaatcacccttcctctcatccaatcttgccaaatcaaatctacaagtcccacatatgtataaacatgtctaa

SEQ ID NO: 31506 - DNA, 363 bp, Glycine max
  unsure at all n locations
tatatangtactagcacgcagtatttcattgacatataacacctttattgactatttgctcccacttatcttgcggtatacacaatcatcaactatatttgcctaaagatcatatgaagtaatgacatgatggaacttgttgtagcgttgtctggagacttgattcagaccatagatgtgctaatttagaatgcaaaccatacactttgaatgacctgatacaaaggtttagggttgcatcatataaatgggttcttcaatgtcacaacttataaatgcgagcttaacatccatatgatgtagctctaaatcataatgagctacgagtgccattattgttctaaaagaatactttaaagatat

SEQ ID NO: 31507 - DNA, 375 bp, Glycine max
  unsure at all n locations
ttgcttttatccaaaatcttgactcaccataaaccttgacccagagtgagaatgtcaatccttaccctctgaagcacaaaaagaagagaatgaatatttccaatcaaacgataaaggagaaggaaaatttccaatcaaagaggaagcaaaaaaatgaaagaatgaaaatttccaatctaaggaaatagagaggaaaggaaattcccaatcaaagagtgggagaatgcacatagaagagaaagaanattgccaatcaaagaatgggagaaagaaaaaaagagaacgataagattgacagagagctcatgatcaatgatcgaaagagaacaaaagacatgtgcagagatgtctttggaccacacaatatctgaacaa

SEQ ID NO: 31508 - DNA, 303 bp, Glycine max
  unsure at all n locations
ctcagctgaattggttttacatgatgatacatgatttttacttgatgatttgatcgggcaagattggatgaggggaagtgtggttttcgaaatctgcattntgtgcagatntttgctgtgaaattgtgcagcaggattttgcacaagtgcagaaaaatactangcatttgctggttgtggaaagagcagtgcagaatgagttctggatgtttgctagtagatcccaacggtcaaaatgtatgcttatgtactagagacttccagtagaaatttggagtcgatccaacggctaacgaattggaa

SEQ ID NO: 31509 - DNA, 320 bp, Glycine max
  unsure at all n locations
agcttgtatgattatggggtacccatcacctgtggtactatgtggcggtcgggcgatggtgcacaacaagttttccacatccacaaatcacgtataaacccaccatcccctgttgccctcctccaactgagctcacgtactcccacgtagcccatatcctcgttcctctcaacgccgggtccccatcaatcctcccaagcttccccaacatccaggtaattcaacatccactcatcacanactaacaaaccaagcaaaacagagcanaggcagaaaactctgcccaaaacccaaaccaaaatcacagctctttctcactt

SEQ ID NO: 31510 - DNA, 420 bp, Glycine max
  unsure at all n locations
nttaatggaagtcaagagcatgatattgcgccgataccgttcactggtgagcaggtatatcagcgggttcaacacctgaacactgtatttgggaagacccataagaaggataaaagtcagagttgcatatggaagaagaggtccattttctttgatcttccgtactggtgtgatcttgacgttagacattgtattgatgttatgcatgtggagaaaaatgtttgtgacagtgtgattgggacgctccttaacattcaaggcaagacgaaggatggcttanatacccgtcaagatctagctgatatgggtataagagcacagttgtatccaaggtctgatgggaagaaatattacttgcccctagcctgccatactntgtccaagaaggagaagataagttnttgtcagtgtcttcgtcgg

SEQ ID NO: 31511 - DNA, 328 bp, Glycine max
  unsure at all n locations
agcttgtagatttatcccaattccagggtcctatgctgacttgctcccatatctacttgataattcaatggtagccataaccctagccaaggttcatcaacctccatttctccgagaatacgactcgaacgcaacgtgtgcttgtcacggagaagccccggggcgttccattgagcatggtaaggctctgaagcgtaaagtgcaaggtctaattgatgcaggctggctgaaatttgacgagaattgcgtgtaaatcctgacattgacaagagatgccacacatggggcaattntgaaagctgttgttaggtgtccctaatgactcatc

SEQ ID NO: 31512 - DNA, 179 bp, Glycine max
  unsure at all n locations
atggaatgagcctacacacttatgcttgagtgaaacaatgactgcgatgatngattgatgatacttacttgatctctggcattcttactagcttatttgatacgtgactctgatgcggatgctacaatcgttgaaaatctgcatgcttgtataaagcagtggattgaagcagtccatga

SEQ ID NO: 31513 - DNA, 311 bp, Glycine max
agcttgtgcttgttttatttaaattcctaggatcatgagcaactatgtgtgtcctactatgacttgagaaacaaagggtgatcaaataacaagcagaaatttaaagggtactaggttgcctcctattagcgcttctttaacgtcttgagctggacgcgtgatgacttgttgatcacagacctagtacttttgcatacctttggctttggacttggtcacctactggtcggcgatgggtcgtacgcaacgctccagcctttgtagatgagctgacgggctctggatgtggcggcggtgcatctattacctac

SEQ ID NO: 31514 - DNA, 416 bp, Glycine max
  unsure at all n locations
catcaaagtaatacaacattcaaacagcacanactatcacagccaagaaaacagagtttaggcagaaaactctgccaaaacaccaaccaaaatcacagctnttctcacttaaagaccccagtaacaattccttcgttccaattcgttaaccgttggatcgactccaaatttttactggaagtctctagtacaaaagcctacantttgaccgttgggatctactagcaaacatccagaactcattctgcactgctctttccacaaccagcaaatgcctagtatttttctgcacttgtgcaaaatcctgctgcacaatntcacagcaaaaatctgcacaaaatgcagatttcgaaaccacacttccctcatncaatctgcccaaatcaaatctacaagtccaaatcatgatcaatcat

SEQ ID NO: 31515 - DNA, 393 bp, Glycine max
  unsure at all n locations
agctttgaaatttggcatctgaagtctgagagctttgggcagataagtctgctaaagctggaggtcgagttgaagtagaagatgcaaaaatgccagctattggtgtaaaggaatgaggaatatcagcttctctgagcttagtcttctttgtctctggaaaattaactgtttggtcatttgcattccaacaattccttatgatataagctaagtcaatggctggtcttaggttttcataggaggtaagggcatcagatcccactcccctcgatctacanaaggctgtgattaaagctgggaagcctaatcgagaaaagttagactgagcgatcatggtcatttgtctatacatcaaaccaccgatgttcatgtccatccttgtgaatatgccat

SEQ ID NO: 31516 - DNA, 440 bp, Glycine max
  unsure at all n locations
tgttaagctacaacttgggcctaagcccaagaaatgtactcagctcagcagagacctcactagctcatgagcacaaacatatagctgaagtcctatgaaggaacatagatttgttcgcctggcagccatctaacatgccgagaatccaccccagcattgtatgccaaaaattggttgtctgcccttaggccaaacaaatctcacaaaagaaaaggaagatgggagaagaactacgtaaaacaattaggggagagatcgacaagctactcaattcccaattcatcagagaagtcaaatactcgacttgttaggctaacattgtcatggtgaggaaggctaatggaaaatggcacatgtgcacaaaatacaccaacctgaacaaagcgtatcccanaggcgtgtatcccttacctagcatcgacaagctagtggacgatgcg

SEQ ID NO: 31517 - DNA, 397 bp, Glycine max
agtaacaataaacctgtcatggcaattccattcaagacaaaagatgtcaacgaggaaataacctctaaagacattaagagcctaatggaacaggcaaattataccaacaaatacttacaagctttaggagaaaccataaaaactaaggtagttcctaaacaaaaatcaattgaggaaacttcgccaagaatccccattgaaaaacctttattcaaacctttcaaagttagtgagaaggctaaaagaaaaattagggaacttagaaaaactaaatccttaattgaaggcgtaggtgacaaccatagtgaattactaaacaagattggtagtttacttaaagtcattccagataccccccaagcctcggaaaatacttccaaaatggtaacaagaagta

SEQ ID NO: 31518 - DNA, 444 bp, Glycine max
  unsure at all n locations
gcttcttcttcctgttgtaacatttgtagaacttccttcagatttttagctaagacctcctttgatgtcgatcctgctaaaaatgctgccagatgagacttttggttcaaaaacacagaagtctctggatcagctgctttgaggacttctggatgggattggaaccatagttttacttgttctggatccgctttggatgagtcaaattgtgtccaccattttacaaatgcgtgtctttgtagtgatggatattggtttgtcttttcagtcttgctgtaacgatattgccatgagaatatccatgacagtgcaaagcttgaaaagtatttaagatctgctggaattcgtgattcctgcgaattgtattgtttcttanattgngaaaatccttgttggaccgtttctgggaatatctctgggattggccanagaatcccaccattg

SEQ ID NO: 31519 - DNA, 430 bp, Glycine max
  unsure at all n locations
agctttgatccaatacaaacgacaataactnttttctcggatgtctgattgattcccgtaacatatcgagacgctngaaattgaaagctgaagctctgagccaatacaaacgaccataactttgtactcggatgtctgattgagtcccgtaacatatcgagacactcgaaattgaatgttgaagctgtgagccaattcaaacgataataacttttttcacggatgtctgattgagtcccgtaacatatcgagacgctcaaaattgaatgttgaacctctgagccaattcaaacgacaataactttttactctgatgtctgaatgagtcccgtaacatatcgagacgctcgaaattgaatgttgaacctctgagccaatcaaacgacaataactntttactcggatgtcatgattgatgtccgaacatatc

SEQ ID NO: 31520 - DNA, 426 bp, Glycine max
  unsure at all n locations
cttaacattcaatttcgagcgtctcgatatattacgggacacaatttaacatccgaganaaaagttattgtcgtttgaatatgctcagaggttcaacattcaatttcgagcgtcttgatatattacgggactcaatcagacatccgagtaaatagttattgtcgtttgaaatggctcagagcttcaacaatcaatttcgagcgtctggatatattacgggactcaatcagacatccgagtaaaaagttattgtcgtttgaattggctcagagattcaacattcaatttcgagcgtatccatatattacgggactcaatcagacatccgagtaaaaagttattgtcgtttgaactagttcagagcttcaacattcaatttcgagcgtctcgatatattacgggactcaatcagacatccgagtaaaa

SEQ ID NO: 31521 - DNA, 169 bp, Glycine max
aggtgaaacttcctgcttttattgttgaccacagagtggtacctggagatatgtcgcgggggtcaggagaccttggggacgtcaagtggggtgctattgcccaaaaccaaacttgaccaatcccgacccaacccgggcatagtcggtcagtgagaacatgtgacgtacc

SEQ ID NO: 31522 - DNA, 320 bp, Glycine max
  unsure at all n locations
tatgcgccatatttcctacgaacgttcacttgcacaagacatcctataactaagaaaaatgcacccatatacaatcaaggtagcttcattacctagattatttacatgtacttccaaggtgtatttggtatttacatcacacacngcctcttggctaaatttacatacatgcatacctcaagcatttcggggtaccaaaaattgcacatgcgctcatcttggtatttctaatacctatacatatacaaacttcatgatgaatcttgactacctacgcaataaggtgctacatttcatgcntctttttttttttttttttt

SEQ ID NO: 31523 - DNA, 233 bp, Glycine max
agctttttattcaataacgagcgtcgagatatatcacatgactcaatcctacatccgactgaaatgctacatggcgatcaaatttgcttggctctccaacattatacttcgagcgtctcgatatattactggactatatcatacatccgactcaatagtagctgtcgatgacatagcttagacattcaacatccatcttctagtgactcgttatattactgggctcagataga

SEQ ID NO: 31524 - DNA, 389 bp, Glycine max
atcaacaagagtcttcacaaataaccatcatgaaacagaaaactatcagaactacccgtcatatctcccacaaccccatacccacgaaaatcaaaggagaaagaagcccacccaaacctgaaatttcgaagtcccactcgtagccacgcacttcacgactccaaaaacgctctcctttcgcgatttggggcataaatgatggccagaggttgaagctttgcttggagcttcaatggagaatgagggagaaagaaacgcaacgtgagggagatggagagagaatgcttctgcaatctttctgctgaatgaacagagagagagtcgctttttggttcttaaacggctttctcctcttttcttattattttattcaagctatgccacatgtc

SEQ ID NO: 31525 - DNA, 379 bp, Glycine max
  unsure at all n locations
tatattgactacttagaataatactttctataccatttattctttttttataccgctaatttattaaaccccttctcatgtaggttttgactctctttatttgttattatattgttgattgatatgaaacatttattgattttatcaatgattaatcttggtagaataatttgttagacatctttgatgaaatcctctctctaccatattctttacatttagaaagttcaagattgtatttaagaaaatcgagctaaatactactcaaattaatgatttgtcaagatgattgttataaatctatcantaaataacttaatagctgaaaatagctaggcactggcaagatctccgtgttcttgtattacctttattttgc

SEQ ID NO: 31526 - DNA, 399 bp, Glycine max
  unsure at all n locations
agcttatctgtcacttttagcacttcatgacttagcctctttttcacctgaaattgcacatatttcataattaaatccaatggacatattctagagacaactttaacaataaaacaagatttatttacacaatcactacaaaataaccataaattgggggaactatacaagttttggaaaatggtttctatataaaagttattcgtataagacgactaacaaactcccccaaatttatagttttgcttgtcctccagcaaagaaagaacagttcacttgtcctcaagtgacaaactatagtgatcacttcaaatggtgtttgcttcacaaataaattcaaccatatgaactcgatatcatggactgcttcaatcaattgattntcacaaacatgcagct

SEQ ID NO: 31527 - DNA, 402 bp, Glycine max
  unsure at all n locations
tgcttgtggngcttctatggaggctggatctttgagcttcaatgtggtcctttaatggtgattttccaccatggagatgcagtgtaagacaaatgagaagaagtgagaggaggcgccatccactatggaataagccatggaagaaagagtttcaccaccaagatgagccttggataagatgcttggagatgatgcttcaatggaggaaaagatagatggagagaaagagagaggtggggagcacgaaattgaacgaagaaaaaagggagagaagttgaactttgagttgtgtctcacaagactctcattcatcaaagttacaacaagtggtacacatgcttctatttatagactatgtagcttccttgagaagcttctttgagaaaacttncttgagaagct

SEQ ID NO: 31528 - DNA, 284 bp, Glycine max
agcatattgagacgcttgaaattgaaagctgaaactctgagacaccacgacacaccattacttcttactcagatgtacgattgagtaccggaacatatctagacactcgaaattgaatggtgaaactgtgaacccattcaaacgataataactattttcaccgatggctgattgaggaccggaacatatcgagacgctcaaaaatgaatggtgaacctctgagcacaatcagacgaccataactctttactcggatgtctgattgagtcccgtaacatatcgag

SEQ ID NO: 31529 - DNA, 222 bp, Glycine max
tagctttgtatatcattgacacagaattcttgggctttcttccaaaaagaacgacatgatttaaatgatctcaggatctccaagatatccggctcaactgattgtcataacacggcacacaattgatagtcaagcttctcccattcaggtcttttatcatctgagacagaattagatgatatctccaaccagtcatggtgtccttgaccaatgaaccacaac

SEQ ID NO: 31530 - DNA, 410 bp, Glycine max
  unsure at all n locations
tctaaatatccgaatcatgatattatnggacggccttatgcataatgtgtctagttatgcatatntgccaagtgtgtggtgaattattattattaaccattatattggtataaaattggttctactaanaaatggtgacaattcttcattggaaaccttaaatgcatataagatgagtatttttcttttacatatgacttattctatacatangtgcgatcatcatttagatgcctaaaatatgtattctttgattgcactaacaattcagatactagcggtgttattacatgatcactgattttgctaacacataagcgttacgagtgtccataatataggatcaaacaaacttcacttttgagaagaaagcaaattttttataggactaaatcaaatttgtgatttat

SEQ ID NO: 31531 - DNA, 314 bp, Glycine max
  unsure at all n locations
agcttttgtccttgngacctactcacctcgatggcattaaccgccccccctccatgattggcaagcgggtttgtttttatgttgggcccgtcctcttgaaaagtcaaccactcggcctctatcaagctttggaccttacttttcaaggccaagcactgttcgatcgagtggcccggggttcccccatggtatgcgcaggtcgcgctagggttataccactttgggaacggngactggaagatctttcccgggaccaccatggccaattggttggcaatgagagatggcaagagttccccatatgtcattggggt

SEQ ID NO: 31532 - DNA, 441 bp, Glycine max
  unsure at all n locations
ntggatctaattgatatcttgcacacatgcatacactaaacatattatntggcctacttgtagataaataaagtagagatccaatcatacctctgtattgctgtggatcaacaggttgaccggattcatctttgtctagatagcaacttctattcataggagtagccaagtgttttgagttttccattccaaacctcttaataagttcttttcaatactttgcatgattgacaaagatcccatcatttgtttgtttgatttgtagtccaagacagtaatttaattcacccatcaaggacatctcacactcactttgcatatcaatagacaactccttgcacaaagatgcattagtagatccaaaaattatatcatcaacataaatntgtaccaacaagatatcattatctctcttttatatgaataaggtggcatctactt

SEQ ID NO: 31533 - DNA, 414 bp, Glycine max
  unsure at all n locations
gcttgcaagtatggctctcttttggacctctattcttattgacttcttgaactcaattctggattaagacatgtttcatagttttattttccatggcttaaagtcttaaacgaataatatattgtgattaaaatgtggctccccagcggtgggcctgacaaagtaaatgtaaacctagtttcatatgttattccgtanggtagtgcttcctgcacnttcttttttttcttttggaatgtaaaattacattctggaatacactctctttagcttcctgaataactatttcggaaagttaaaaaacattcttggaaagaatgcagtaagcaacatgggagtngtagaataacctattctaaacacttgaacagaatgtgtatgcacatccctagttcacctacatgatatgttatc

SEQ ID NO: 31534 - DNA, 454 bp, Glycine max
  unsure at all n locations
tgaacctcacagacccaattccaattatcttttacaggacttgttgtttccatggaggactgaaccaccaacttgtttgtcaagatcctcaaaccaagacttgtttggagtcatatgaaatgaacacccagagtccaagatctatttgtctcagtgttcttatgagacaccattaaagcctcagctgaatcataaccatcttcaactagagtagcatttccaggttctttagatcgatcttgcttggttcctttctgtctattangacagaatcttcgagtatggccttctcttttacagtggtaacatctaatgtttagtacattagatccaaatcgagtttgtgacttggatcttttcccttctgtcttatcatccttcttgtattngcttccacgaactangagtccttccccatgtagagaaggcctttgtcatttctttcatttaactc

SEQ ID NO: 31535 - DNA, 191 bp, Glycine max
tcatgctataacagtgaagaaattatccatggattatgtaaacgggggaaacacatactttgaatttactttacgctggcgtgtggaagcactcactcctgtcatattctatgctgacataccatttatcatcttactcttattgaaaaattagtaccgacgattctattgctcatactctgagccagcct

SEQ ID NO: 31536 - DNA, 468 bp, Glycine max
  unsure at all n locations
agcttcacaatatgaanatcgatcatttgatgaagccttcacattgcatttcttcaacaccttttccatatcttaattgttggggtgtccaagctttctatgccaattctccttgactgacatgtaggtacatgggtctatattgacttgagagttgacacttgaaagttggtataatccatctctaagattcccttttagtagtgccttccctgtcagtttgtccttcacatagcagtagtttgcatcaaattcaacaagagcattattgtctgcagttaatttagatacactcaacaagttcttggttatttctgggacatacaagacattacgcaagttgaggttattcaattgagtcgagcctgatgccaatatgctcaatcttttaccattgccaactaacaaagaattcttaccattgctttcactgagatcttggagttctcattntgatgagtcacatga

SEQ ID NO: 31537 - DNA, 404 bp, Glycine max
agcttgtatgattatggggtacccatcacatgtggtactaggtggcggtcgggcgatggtgcacaacaagttttccacatccacaatgcgcgcataaacccaccatcccctgttgcccacctccaactgagctcacgtactctcacgtagcccatatcctcgtttctctcaacaccgggtccccatcaatcctctcaagcttccacaacatccaagcaaaacaacattcacacagcacatgctatcacaaccaagcaaaacagagcataggcagaaaactctgccaaaacaccaaccaataatcacagcttttcccactcaaagaccccagtaacaattccttcgatccaattcgttaaccgttggatcgactccaaaatttactggaagtctctagtacataa

SEQ ID NO: 31538 - DNA, 462 bp, Glycine max
  unsure at all n locations
tggtaagaaaagagcaacacacacagtcatctaataagtatcaagtatttaaaaaaaaaactgtaagtataaaatagaagtgtgtgtgctgctatttaagaaaaagacaagctaagtgcggaaaggcaagtaatagagttggaataaaaataaaaaggttgatctatgtatgaatgctctcttagaacctaagcttttgcatcctagaaaaaccatgaattgattgcagcccagcctcgttacaagcctagtaaagtccttcagattcaatttgtgtgttcttgactatatggcatgagatgaattgcaaagattaagacttgtgttagttgttgattgttgaataagcctaaacacttgtgtttgagtgaaacagtagctgtgtgaccttggttaatgatccttccttgatatctnttgctcttactagcttatttcagttgtgttccttaataatcatgt

SEQ ID NO: 31539 - DNA, 378 bp, Glycine max
  unsure at all n locations
agcttatgaagcatcaatagaccttaagaaaatagtccatttaggacaataaacaagaaaattaatgagagttctcctagggtgatcagtccacccatcagccatcatagtacatctagtttccttccaaacttcttggtaaattttaacaagcttcctcccttcatcaaaccatttatataacaaaggaccacaaattctataaaaaaaaaatggagatttatacaccggactcatgctactaataacatcaatcataggttgataatatgtcgagttaattgcattaaatggcactatagcatctatcatccattntgcaatggctttgtcacacttttctacaattttcttattgtgcaagacactcttcaagct

SEQ ID NO: 31540 - DNA, 445 bp, Glycine max
  unsure at all n locations
ctataaatagggggagaagtgaagtagaaaatggttcagccccttaggcacttctctctctttcgaatttgcttaggaaaattgtttccgtgaagaaaatccaagccgaggcgcttccgtaacgtttccgtgagtgatttcgtgaaggttttcgaccgttcttcgacgttcttcattcgttcttcatcgttcttcagtcttcaacgggtaagtacctcaaaccaagcttttcgattcattctatgtacccgtggtggtccacattttgtttcatgtatttttattctcgtttcatttattttttatacccccttttgacgtgcttaagccattntatttaagtcatttctcgcttaacctanaaataaaataaatttccaccgatcgtttgaattgtattatccattaactttggttgaaatgaatntcgaccgatcggtcatgc

SEQ ID NO: 31541 - DNA, 467 bp, Glycine max
  unsure at all n locations
gatgacntggtcttcaccgacgaaaggatcaaagtgagtctattaagaggcaaatttgatcatcatactttgataaatgccaaaaaaaaactagggcaaatgaagagggtgagaatgagggacaagcccatgctgtgactgccattcctatacagctaagtttcccaccaacccaacaatgtcattactcagccaataacaaaccttctccttacccaccgcccagttatccacaaaggccatccctaaaatcaaccacaaagcctacctactgcacttccaatgacaaacaccacctttagcgtaaaccataacaccaaccaagaaatgaattttgcagcgagaaagccttagaattcaccccaattccagtgtcctatgctgacttgctcccatatctacttgataattcaatggtagccataaccccaaccaaggttcatcaacctccatttctccgagaatac

SEQ ID NO: 31542 - DNA, 350 bp, Glycine max
  unsure at all n locations
gcttgtgaatttatgatcgagtcgttgaggagcatgttagttagagaggccgtgatgataagcattatgtgaatgattttgtggacattgtgcttgccattcaggccacagatntccagaatgatcaaacattctggaagaagtttgatcatggcaagatctatcttcatattgtttctacctatgtatgcatattgatgatctcttagcttattgtttatcaagtgttagaaatatattctctcgtactcattgtttaacactattctttattagttacaattcggatagattctaatactagttaagggtgaggaccatcacatcataagtgggcacacttatcttct

SEQ ID NO: 31543 - DNA, 439 bp, Glycine max
  unsure at all n locations
acgtgacctatgaaactcagcttatacctcctccgatgtcaatgatgtttacaccacctccaattatgctttcagcaccaattcaaatgatcttcctagatgtactatctcataggataaaccaaccaaattacaagagcttcatatccacactatggttgccctgctgccaacattcggagaagtaaaatatgagatatacttgtcttttggttatagtagattctcactaattggtataatttggatagaattgtaatgattgatgcactgttacaatgtttattcttatacattggtagaatgtttactttggaaaatatntattgcgacaacattangtaataaccaaaataagtctcattctttggtaggattaacttaatgattntacattcttgttcgagtctcgtattctgagtaaagtactgtcacatca

SEQ ID NO: 31544 - DNA, 399 bp, Glycine max
  unsure at all n locations
agcttggttacctccttcttcactacatcaagaatcaccgggttgagtcttctctgtggctgtcttactggtttaaccccatcctctaaatttattcaatgcatacatgtggatgggctaatacctggaatgtccgccagggtctagcctatagcctttttatgcttcttgagaatagataacagtttctcctcttgctcatccgcaagggaggcagatataattattggaaaacttttgctatcatccaagtaagcataatttaaatntgatggtagaggcttcaattctggtgtgggtggctggataatggtagaaagagatggtttctcagcctgtaccttataaagaaagtcagaggtatgtgtacttnctganacanntggtagtctatctaac

SEQ ID NO: 31545 - DNA, 405 bp, Glycine max
  unsure at all n locations
tggctcaaaatttcaaaaactccatattgcatataacatttagtgattatagcataaagacaatgattgtgataaaaagaaccataatgagttatatagggtgtttacttttataccattaagctttgaaaggttcccttgcatcattatggaggccaataaaaaattaaataaattatttaaccttccatgtgaagatatcaaaccctcaaactaatccannatttctctcatttttcttttgtaaaatttgacatangaagggaatgccaaaccaagtccctaatttcttcaattatgggaaaaaagaaagcatatctaggtggatagaacaaaanatcaatgtatatgaatcaattaatcacagaacaagaaataaaaataaaaaaatatcanaacaaatat

SEQ ID NO: 31546 - DNA, 381 bp, Glycine max
  unsure at all n locations
tgtagtcaaaccacgattaataataataaatcacagaaaagaataaggatggataaaggaagaaaaggagaaaatgactatagaagaaggagggtttcccctattagagatgttcaggctttgagtgtattcaataaagagctatgagtctcactgcatttttctcctttgcttcctattccttttataggccaaaaatatcttaaaatttatgcgacctcgcgttaagtgcacccttctgagcttagtaagtatgacggtgtgatcatgcactgagcacgacagcgtctgggcttattgagtatggcggcaatagctcgcttagcgcgggattcgtgctaaacacgcctttgggctcctatcgggatcttntatgtaata

SEQ ID NO: 31547 - DNA, 446 bp, Glycine max
  unsure at all n locations
tgnggaagaatgtggatacctctggaatattctagagatgcgtgatatctttcttgtaccttatggacagatatggaagagtgtacaaactcctagaatgtgtggagcattctacagaattaatcttcaccttatgatacaagaaatctccaccatttattggggagatggagtagtataaataagggtaagaaccttcattcctatccatccctgataagagtgaatccacttcttatagtgagaaaaagcctctctgagagagaagatatatagcttgggaagtctttattctcaagcttgagtgagccaccgtagagtgagtccatccatgtagagagcctctctgagagagaagataaataacttgagatgtttctatcctcaagcttgagtaagcctctctgagagagaagatatatagctcgagaagtctctatcctcaa

SEQ ID NO: 31548 - DNA, 291 bp, Glycine max
ttcacttttctgcgtggaaaatataatttagttttaaaatccagaaacgcgcataagatataatctggattatgttatgtgaataccgagttgtgaattatgaataatccggttttttttttttaggaaaagaatttataatatgaattctgtctgatattaattgtgatataaatcattaaatcccttataaccaaggtagccataccatattaaggaattggcaaataaccgagtgccacaaataattctgattacatgtcaattttatgtgatatcattaatcatatt

SEQ ID NO: 31549 - DNA, 418 bp, Glycine max
tccacttgtatattattgcaaacataataaaagctttctgtttttccctcccatggatgtagccttactcaaggtgaaccacgtaaatctgtttgtgtgttctttctctcatctctttctctttcaatttttttacaacatcgtgtgtgtgacataactttcttctgcatctgttgttgttgtttttgcttgttcttcatcacttccacaacaatctggaatcaagagctcaatttgcgatcaagggaattcaagattctcgtctgaatataaagatcaagctgtgggagtcttgtttctggttctttcgctgcttctttgtgatcaagaacattcaagaaatcatgtccaacacaatcaggattgagaaattcaatggaaagaacagcttcaatctgtggcgcatcaagatgcatgc

SEQ ID NO: 31550 - DNA, 345 bp, Glycine max
  unsure at all n locations
tatcttgtttgcaaactggatgcgttggtcaacttggtaacccagctggctttgaataagaaatctgtacctgtcgcaagggtttgtggtttgtgctcctctgctgaccaccatacagacctttgcccttccatgcagcaacctggagcaattgagcagcctgaagcttatgctgcaaatatttacaatagacctcctcaacctcagcagcaaaatcaaccacagcagagcaattatgacctttccagcaacagatacaaccctggatggaggaatcaccctaccctcagatggtccagccctcaacaacaacaacagcagcctgctcctttccttcanaatgct

SEQ ID NO: 31551 - DNA, 390 bp, Glycine max
  unsure at all n locations
tggatcattaagactcattgagaagataaaatctctgattcatttcttgaaagagtgtggtgaaatctttatcttaatgaacaacacctcgtgctcaagagttcatcatttccaagccaaatgcacatttatacttttaaatatagtctttntattccttaaccagtatccttatgatcaatgaggatgaggcaaacgagtgagggttgaaagaaatccatgcatgttatgccagctcctgttcctcattggatgctctctgttccatttcgactgtcggctttgtcactagcaccgaattctatcattctgtgtgactgacagatcttttgttgtgtgttggtctgatggccacaatacaatacttctattaatcagcaattgaaatat

SEQ ID NO: 31552 - DNA, 396 bp, Glycine max
  unsure at all n locations
agctttcttatctgnnttaagtccaagcccataaataaaataaaatctagataagatctacataaaataatatctagatgtgataaaatctagatatgataagataaaatctagatgaaatacaatttagataagataagatttggtagaataaaattgtctgctctcttcaagtccaagcccaattccggattcaagcccaattacttacaattctcctgacattaaattaaacacacacaattaatccagtaggcccaaatgataaaactacataattaatttgacaattaatgctaatcaataattacaatggtgacaaaaagggttaagacatatgagaaaatgatgacacatcagtgaggcacatgaccatccagaatatgcaatttcagc

SEQ ID NO: 31553 - DNA, 440 bp, Glycine max
  unsure at all n locations
tcagaccaaggcaattcataatctaggtacctaaaacccatcaatttagtgggatttcaagggttgagaagtgaaaatgagaatggngtaattttggagtaaactctcatctcaaacaagtctataacattaatntaaacttactcaaactggttttacggcgaaaactccaccgattcaaaatttgacccttcaacacccaatttaccctagaaatggctcttgctttcacatttgtcactcattnttctcatttgctctgcccaagctntcctacaagtcctaattgacattntanactaggatcaactcactttagactccaatttacactaaccccaaatntagcttctctaaccctcaaaatctcacactgttctacctacaacattgtcattctcacatntagccctaaattaactgtccccatcatctctacc

SEQ ID NO: 31554 - DNA, 409 bp, Glycine max
  unsure at all n locations
agcttatttatcattgataaaatatcaacaaaatcttntattataatataatacaacttatcaaaacaagagttcgtttttttacatgtaatagaatttaaatgaaaaaaatgaaagcaattacaaaaagtagtaaagtacaacaaaagtgaaatttcttctttaaaaaaagaacctaaattcatcgtgtcacaactcttaagttaaggtgttaagaaataaatttgtccaatggctttaaacttcttaaatttcctcttgaaagagtagaaataaaatgttcaatcattttaagttaaatcanatttaaaacaatattacatgaattcaaaatagtttgaccaaattgattaagctgaanaaactgattacctttcccaaatanataacaatggttatgaaaatgata

SEQ ID NO: 31555 - DNA, 464 bp, Glycine max
  unsure at all n locations
tgaaattatcatgcaacgctacgaacgccaacaacttttgttccncaccattgcttactttgatggccgctcttaaggttcttaccatgggaagaaattcaccctctctcataaggcctccttcaactgcaataacctatttgctcatgacaacaatcaaggtgccaaatgctccatgcctgtgtgccaatattgtgttacacggtgtcacatgatatgttaggaaaaccactcatggctaagttcaagacatgattggccaagcaatgaagtcctttgccgaatgccaacggtaagagaatgagcaattgtgcctctctttgcaaaatgccataaacacaattctccaaccttggtgtcgtacttgtacagaacatccaacangctcaaataacaatgcttggagttgatgctgcacctgcccctacacttgcacttgtactttaaccactcttcatacctac

SEQ ID NO: 31556 - DNA, 329 bp, Glycine max
tcgactctgcgtgcatgcaagcttttccactattgtgctatcaataggggaagacgtgaggaagagacggttcaccccatgatgcacttctctctctatccaatgtgctacggaccattatgtccatgaggaaactccaagccgacgcgcttacgcaacgttgacgtgagtaattacgtgaagattctcgagcgttcttcaaagattgatcgctcgctcttcgttcaatacgatggtcaattcattatatgcatccgaggtgctccacatggaggggcatgcatgatcatcctctttatcagatactctttataccctctattgacatg

SEQ ID NO: 31557 - DNA, 450 bp, Glycine max
  unsure at all n locations
acacatacacacacaacacacatatttatatgctctaatatgcttttacacataactcataatcatgtatttacttcttctatcttattatgattatgttttaccttagtcaaaatttaaagagggagattgttaggtctaaatggtccacagaccactggatgacccattcccaccttggattttgatgattataaaggtataaattattggtagactaatgatttattgttaagtgaacatgacctactacataaatgagcacacttggtattaaattgtattctacagctctagtgagtatgcatccaacgggctattaaagtacctgcatccacttattgtgaaactagtgttcacacactgagttgtttttattcgtgttcattggacttanatcacttatacactctattttatatctttataagtgatgtccaatgaagtaca

SEQ ID NO: 31558 - DNA, 410 bp, Glycine max
agcttgttgtttgaagtctaatccatcacaaaacacaaaatacacatgaagaacaaattaaatgcatacagtcatcaaatcatagaaatcaattctaagaacataaaaaatggctaaattaccaaacacaaaccatcaattcatgacaacaagaaaaagtattttaaggtaattacaactcgtctaatcaaattaaaaacaattataataaatcaaaatgtaaactacacaattaacttgagatctaagatcaaccctattactcacaaccaaacatccattataaatcattatctaatccctaacgttaccaatataaccaagatggggaaaaggcgaaaataatcaatatcatatagtaaaagagaatggaaaggtagggaacactcatctaacaaacacatagataa

SEQ ID NO: 31559 - DNA, 422 bp, Glycine max
  unsure at all n locations
gtgtctntntcctttattcttcatgtcatgattgaatgattcattatgtctttccttctcccttctttnttggtccataacaatgattatacaactcgtcattttctctctatgctttgattgaatttcatacacaattattttattaatccaaaccatataaattattacgtgtgtgtaatataaaagcatatttagtaaaaaatattgtttatatgaggataaaataataaatgttgatatttaaattacataagtacataaagctaatgaacacatgtcttttaaatctaatgctagatatacattgcatgataatgccatatatagtggttagtcatgtcttaacttatatatatggattggataaacagaataattggatatgaatacgaataagagcataagacgaggaggatgaa

SEQ ID NO: 31560 - DNA, 436 bp, Glycine max
ggagttggtccttaacgtggtattgaaacttagcaatttggtggtggagctgcattgtagcaacaaggattagacttctgaccacttggtgacaaaggctctcaagccaagttaagaaccaactcttctttaaattcaagctattaggtgtagttgaatggttttatatttttaacaaaagttgtactttatttgcagttgaatggcttccatgtaagcttgtacccttgaatattaagagagattatctaataggcatgatttttttaatattattcagttattcaataatgactgtaattttcatatgcttgattcttttcttaattattgtaattatttatgttttaatattttctttagatgtcaaaggagttgtgacaactatatcttccattagagattccattacagagtatttcagggtggaaaatca

SEQ ID NO: 31561 - DNA, 375 bp, Glycine max
atacaacgtagtgactgggaataccctggcgacacccaacttaatcgccttgcatgacataccactctcgcaactggcgaatagctaagatgcccgcaccgatcgcccttacaaacagttgcgcagtctgaatggcgaatggcgcctgatgccgtattttctccttacgcatctgtgcggtatttcacaccgcatatggtgcactctcaagacaatctgatctgatgccgcatatttaagccagccccgatacccgccaacacccgctgacgcgaacccattgaagccgtattaaatataaatcgacaatatgtatgtattaggatgttctatcgataaccccgtatttcgtagccctgcaatgatactagagct

SEQ ID NO: 31562 - DNA, 325 bp, Glycine max
aagataggaacgggtatgaccacacccgtccgtgaagaattaatggccctgccaaaaaactaccaagacatctttgccttgtcataccaagatatgcccggtttgagttctgacatcgtacaacacagattacctctaaatcccgagtgttccccggtaaaacaaaagctgaggaggatgaagcccgagacgttcttcacaataaataaaagagggtaagaaacaatttgacgctggctttctggctgttgctcggtactcggaatgggttgccaacattgtacccagtcccaagaaggatgggaaggtatgaatgtgcgtggat

SEQ ID NO: 31563 - DNA, 445 bp, Glycine max
  unsure at all n locations
nttgttccttttataaaaagagaagttctgaaactcatcacgttgtctaaaaaagccttgaggtggatccaagtgctctgatcattcattagcatattcatgagttgccccaaccaaacatagtccgccacgtcccgtctccatccgcacccgttaaggaactcgttccctttacaaaagacaagggaaagattgatctacttgaagagaggctaagagcggtagaaggcctcggcaactattcgttcttggatttagcggatctgtgtttggtacctgacatcatcattccccccaagtttaaagtaccagaatttgataaatataaagggacgacgtgtccaataagtcatcttcggatgtactgccgaaggatgggggcatattctacggacgaataagctgtaatgcacttttttcaagacagcttagctggaacagcagt

SEQ ID NO: 31564 - DNA, 433 bp, Glycine max
  unsure at all n locations
ngagttgaggaagtgtagaagggtttaacttcttgctnttattctttgaccacagagtggtacctggagatatgtcgcggnggtgaggagaccttgaggacgtcaggtggggtgctattgcccaaaaccaagcttgaccaatcccgacccaacccgggcatagtcggtcagtgagaacctgtgatgtacctaaacaggcgagctcctggcagtcaacagataaaaggaacaaagaccacaaagcaaggaggcttgtggtggctggccagctgtgaaacttgattgatatgtgagatatggtctctggtaatcgactaccaagggtgggtaatcgattacaaggcttaaaaatgaagacaggacgctaagatggtctctggtaatcgattaccaaggggtgtaatcgattaccangcttgaaaacgaagtcaag

SEQ ID NO: 31565 - DNA, 164 bp, Glycine max
ttttttatcctcattggctctcacagtctttagatttgggagccaatccaatccttgtgtctggactctcagccacttatgatagccgccgatgatcccattactgtttcccctaagctctctgtcctttcttcatgccgcatcccatgccttgcgaactcctt

SEQ ID NO: 31566 - DNA, 374 bp, Glycine max
  unsure at all n locations
tggtaatcaattaanacaaagagttttatgtgctaaagaagtttctaactttagaaacaatcttatttcttctacatgatgatgcatggtgtacatatgaaaatatagagactaagattcaacaatcaatacaacaatcaatacaaatgtcactcaaagagttggtcatgtgaaagacaaaacttcttcaagcttcttcatgttgctcctcctatctcttacaccttattcttctatcttatctttgacacttcttttttgtacattataataactgaaagtccaatgaccttgattatatatactttttttaatgaaatagtgaaatacggtgagacactatccttttatttctgaggtaacttctctacact

SEQ ID NO: 31567 - DNA, 411 bp, Glycine max
  unsure at all n locations
nggatattaattgtatgatatatactattgaacgctcgctacaacatataattctactctttcagtgaatggagcagcattcaactaggcttgtctgttatccatttacaaactgtagttagaacttaattcataatgataaggtgctactngtctatattgcaaaactaatcttctgaagcgggtttggttcatgcgtacgaaatatgagaaataagacaggatggaaagatcatcgatctaggagctttcttcatattatgtgtccaatggatgcatactgaattgtattagcctcttgaatgatgatatattgtcatttactatacgcagtgacgatgttnctggagtttcaacagaatctatgcagctctcatttgatgcccgatggaatagtgtacctacaatact

SEQ ID NO: 31568 - DNA, 449 bp, Glycine max
acgagtgacacgttgaaacgtgaacgttgaaacggagcctaaacccactgtgacctggtgccctcttttatggccccggtttttgaaaaccaaatcctctcacggatgaccaacttaagcctggacgagtccttgtgatttcatgtgtgtgcatgctctttattgcttatgagaaggaaaatacagttgaattgggtgaggcatgactgtgacttgatctcacccatagcaattggtggtggagtgacagacatgtccatgtgataccccctaccccttcattttactactacggactaaagacattcatattcatcaaagttctttcaaccactcctcgcaggataaaggctcacacttatttctttacatactctactctgccaatcaatataatcatttcaatcgacacggcgctagctcctaccataacaagaacgatccacggc

SEQ ID NO: 31569 - DNA, 293 bp, Glycine max
agcttttgtttattgtgatgaggtacaagccctaaaggcagagcttgaaagagcccgagtagtcgaagagaagttcaagtccatagccatcaaagtttgaaaagagtatgatgaactaagggacgtcaatatggccaccggtgaagccttggaacgagaaaccaagaaggcccgaaggaagaacacgtgcaagcaaagttttgaggtgctctataaggcagccatagtaagctcaagctccgaagaggtgaaaggaatcatcacgggtcaaaggcatgatcttgaaggacgag

SEQ ID NO: 31570 - DNA, 463 bp, Glycine max
  unsure at all n locations
taatcttttacaaaggaccatgacttacgcctaggaatctattttntggttntgaatgtataaaggcttgaatattacgacatgtttgagaggtttttgattagaatttaaattggctgcctcatgatgaataccttgcacctaggtagcatggaaaatacctttcaatggtatgtatatatgtgaatatatatagcatggaaatgccttgcagagtgtataaatatatggcataaatataccttgcaaagtgtgaatatatagcaaataatgcatttcaaaaatctatatatgtaaaaaatgcgtttcaaaatatgtatgtttgtaagtaggtatgcattatttccaactaatttctaatgccatctactatttgcaggggttgcgcccacaagacacctagtggacccggagaagtccaacatggcccttggtgtttcagctctagttacgggcctctatc

SEQ ID NO: 31571 - DNA, 368 bp, Glycine max
  unsure at all n locations
agcttatactcactgagctcttgattgacacaagccttagggtgatgcaatcctactcccaaagggcattggatagaagactccaagaagattgagccagagatgcatgagaaggccctagggttcttatgagccttagggtagattttgggcccatggactcagtatgagcccacttatctttgtatatattagattaaggtttcattatttttgggccttgtatttagggctccatagtgtaaggagggtaccctagtaatgtaggatttttcagcccttgtattttagggtacatagactagttattggattaggggtaattntgtaatttctcatgcattaagtgcactatntgatgtgtgtgt

SEQ ID NO: 31572 - DNA, 466 bp, Glycine max
  unsure at all n locations
tgataaagtccttagtgatctattntatgtttgtgcaattaaattgattagatgatgcacaaatttgagatttgtaatttcaattagtttgaatgatagacacagcggaaacgcttgtgtgctgagtgaaacactagccttgtgaggagtgaagcatggttaatcttcttgaatacttgttgtcataccctaatttcgtctggtgaccattatttgttggtatgcgaccttcgcttgaccatctcaaaatgtttatcacccatcgttgtgtaatccataaagtctcgcaacattccggaagtcaaaacaagcattgttgcgcaatccgtaaagtttcgcaacattccggaagtcaaagagagcattgttgcataatctgtaaagtcccgaaacattcaagagggcaaaaagagtatcattgcgtaatctgtacagttacgtgatatttcggaaagaaatcgatata

SEQ ID NO: 31573 - DNA, 406 bp, Glycine max
  unsure at all n locations
agcctttcatttaagtattctaagataaattagatataatacaaatttggtaacacacatgaagttctgtgacacaagggacagtggaggataaaacggtgagcacgataaagtataggaagagtatcaccttaaactatctatctctggtgccatggcttcatcaagtgtctttgaggaatggcttggcatcccatatccagcttggatatntcttacatctggatgggtaggaggaggagtaaatattggagctgcatcttgggaacgcttacgaaaaactactccagatccgctgcatttatataatccaacacaagatattatgatacgatctcatggtcattgaatattaactcaccatgtgaatatgggatacagatatcgatgcaatcttctatcctgt

SEQ ID NO: 31574 - DNA, 427 bp, Glycine max
taatgaatttatatcgataataattcaatattatatatagttgcagctattttagaagtttaaataatatataggagaataatataaaagtttagtacaccgtattcaatcataaataattatttatgataaatttattaatttctataataattaacttaaaaattatattaataataattcttatattgatgattatgtaaacttttgcgcaaataatacatgtatattaaactcattctgaaatcttaaggattaattaattgattctagtaatactatcacactgctgacaagttggagtaacaatggtgaaatttcaagacaaaagtttgattaattaaaattaaagggagataatttacgcatagagacctatgcttaagaattatgatcaatagtaattcctacattattcgtattgaat

SEQ ID NO: 31575 - DNA, 232 bp, Glycine max
tgcatgaatctctgaattatggaatgaatgcatgaatttaaggatgatgaatgccattgttgattataaatagccacttagcccaaaatctaaccatgtgcatgaatgatttatcccttgcactcagcttgagctgaatgaatgtttgattgattgaaccttgagcctgcataagttatcttctgctaccttgtcttaagttgacgagagcatgattcatagaaagatttgg

SEQ ID NO: 31576 - DNA, 449 bp, Glycine max
  unsure at all n locations
tgtaatacattgattgctctatatatctcatggctcttggattctaagaaaaaccaaattcctttgaagtcatgtcacaatataagccttgatcgagttcttgtgattctcatgtgtgtgcatgctctttattgcttatgagaaggaaaataaagttgaattgtgtgatgcatgattgtgagttgatatcacctaaagtaattggtggttgagtgacagacatgtacaatgtgataccctctacccctcacatatatactaataaggaataanaaaatttaaatattaattacaagtatgtttaagacaagtctttcanagggaaanaaggctcacattcattntcttttacatcatattcaaatntgtccaaataaataataaagtattctcgaatcaaacaaggtcgtctaagcttcatacaattaatatagaatctggatcctaat

SEQ ID NO: 31577 - DNA, 313 bp, Glycine max
  unsure at all n locations
ttctttttcttctttctctgntcgctcatgttcatcatgaactttaagagatatgatcaaacattngatttttagattctaatgtatgatagataatctgttagaaaagaaatatcactttcttacatagatcttactacttcaagacattaatatctaattgttaactttggattcattcaaaaagatatacactattacaaaagttagatacattaactgaaaaaaattgtgtcagattatccctttacataaaaattaaattgctaatatagatatcgatacatctggtaataatacgagacattatact

SEQ ID NO: 31578 - DNA, 398 bp, Glycine max
  unsure at all n locations
tacgatcattccaagtggatcctatataagattgaacaatatattttaganaaattacggataacaatcttctttttgtttaattgaagagaaatttaaaagagagaaatgatcaattgactnttagaaataacaatttaaaacattatgttctttcattttttttttcaatttaaatttcattctcaacaatggtattcaataatttgaaaccacgtgaatcagtttaccctccaaaaagcacgtaaatcatgtgtacatactcataaattcattctttcaatgtgcgaagattggagagaccattacttttcattggaagtaattttgttggacgaggacatactaacaaatagacgtggatcgtaaaattcacattcggttgcgcctccccaact

SEQ ID NO: 31579 - DNA, 393 bp, Glycine max
  unsure at all n locations
agcttttgatatttataggctttcttcttcaagtgtttgttgtctctaaatgaatagatttcttcacttgagttcacgtatgaagatatggtcattgggacattaaatgcaagtccttttcatgttgaaaaaccactctctttagcttccttgaagaacatttaaggagaacaccacttgcttttcatcaaagcaagtctatcatagcangagaggtctttcgatattgcttagaatttcaaagtgttgaatttcatttatgtttcttaggattaaaaanatcctaaggtaatgtcttataagatagttcttggcaaatgaatctcaaacacataatattaaatgaagtctaaatgatttcttaaatgatgtatcagataccataacatatat

SEQ ID NO: 31580 - DNA, 433 bp, Glycine max
tttactttgatctctttgtgcgtttgtgcacatgtttctttatcacccgtgtgagtgtttgtgattcttttcacaccttaggtccctcttgtatactgaggaatgctaacaacatattgttgtaatcactctgtaatattgacaaaaattattaaaaatcacacaatcttgtgggtcctatgtatttaatgagtttcactcgtgattgtctagtcatcagcaaattctaatcaatagtagagagcgcatcacagattgaatggttagcattcctcttgttctattaacataatgtcttgatagattaggctaacactgcttctgatctcaggtagacctagagttgatggtgatgaagaagaggatgatactgatgatttagaaagtgaatttgatactgcgagtgcgttctctgctatgatattgccaaata

SEQ ID NO: 31581 - DNA, 396 bp, Glycine max
atctatcgattagactacatgaggcgcccacctcctgggtgtagccaacatacgatcgtgcgtatattctattgaggactatactctaacgatccgactatgcttgacattgctcgaggggtgatatgatactcatagaccactctgtgctaccatactcatcattgacgacctgtgcttcggttactacaacattacgtgggaatagagaagcatcatgaggttaaggctccaataggacatagacgaatctcattttgagctgaggcatcaaaccttgcactctatgggaagataatacattcatgatagcagatctatgtctttttacctcactcctatctatttggcaacgtggttgacatactcaatgatgtccataacgggaccaggcaa

SEQ ID NO: 31582 - DNA, 315 bp, Glycine max
  unsure at all n locations
tatgcatgataagaccccanagattgagaagaggagagatctttcattantatggaaaagcatatctacattgtattgaagactgaatgaataactctaggatagatgaggtgaacatgttcttgacactgtgtgattatgattttatctataatgtaaaaggttgtaatgccttcatgattgcaattgaactagcattggttacattcatatgtaatttctctcaatatcaaggtttgtgacccaactgtgactacaatataaagccctactataaaggattaccttaaatgatctatgctgcaatgattcatg

SEQ ID NO: 31583 - DNA, 328 bp, Glycine max
  unsure at all n locations
tagcttttattttcaatttagagagtctcgatatgttacgagactcaatcggacatctaagtataaagttattgtcgtttgaattctatatgagcttccgttttcaatttggagcgtctcgatatattacaggactcaatcgtacatctaagtataaagttattgtcgtttgaattttctcagagcttctgttctcaatttcgagcgtctccatatattacgggactcaatcggacatccgagtaaaaagttattgtcttttgaatttgatatgagctttccttttgaatntggagcctctcgatatattacaggactcaattagaca

SEQ ID NO: 31584 - DNA, 435 bp, Glycine max
  unsure at all n locations
ntctagctnttcattggtgtattttgatctccttttggtactctataatgtgggaatgtgctcaaatatgtggngcaattntggtttggtttcttgcttgattgggttggattgggggtttgtatgggatggccctatgcctataattgcatttgaaacaatgggacatgccacattgtccccgttctcttgctattgatacctaaacgcgcgcccaccaagtgttcggtgaaatgcctcaatggcattagcgcgtgactnttgtaaggaaacaacccatggnngcatttggtttgcacatattntctattttttgggacatgcattcattcccgaaaaggctagagtaattgccccacatatatcctangcctangaaccannagtnttatgcanaagaacacaagaggaagtgcatgttgggtaaagttactc

SEQ ID NO: 31585 - DNA, 406 bp, Glycine max
  unsure at all n locations
ttagcttattctgtaagtccaccaataaaaaaatgtttttattagtatttaaaaagtaaaaaatgcctcatatagacattgataaaaaaaatcatatgttagaaaaaaaatccaacatatttaaaatttaaaaagtaaaaaaattctcttaaaattttctttaaatctcgtttattattgggtgatcgtgcaactatctgattctaaaagataaaataatttacatgttgatgacatacgataaacttatcaccattagagactaatttacatatatagatgtgaactttntaagaattagatcaagttgtggcgaattctatggtgaatcacccaaacaagtgttgtataatgaaccactattatttatcatcagattgatctcaatttatcctctcatnctaca

SEQ ID NO: 31586 - DNA, 425 bp, Glycine max
tctccctcttttccctataaatagggggaggagggaagaacatttatgttcaaccctcctggtatctgagaatcacttaaaattactgagaaaaattgtttccatgatgataatccaagccgaggctgcttcgttacgcgtccgaaacgtttgcgtgggtgatcccgcgaggatgtcccaccgatcttcgtcattcttcgttcgttcttcggctttcttcggtcttcaaccggcaagttcccgaaatcgaacttttcaatgcattctatgtacccttagtggaccccacttgtttggcgtgcttttatatatatttcatttactttccgtacccgttttgacgtgctttagtcatttatttaagtcattttctcgcctaatcagaaaataaaatatatttccactgatcatttgaattgtaacat

SEQ ID NO: 31587 - DNA, 325 bp, Glycine max
  unsure at all n locations
gttcacttgcacaagacattcttataactaagaaaaatgcacccatatacaatcaaggcaccttcgttaccaagattatttacatgtacttccaaggtgtatttgttacctacatcacatgcacttccttggctaaatntacatacatgcatactcaaagcatttggggtaccaaatattgcacatgtgcacattccggtatttctaatatttacgcatatacaaactttgtgatgaatcttggctatctacacaataaggtgatacatttcatgctttattcaaagtgttttgctacctaaagccgcatgcgaattcaagtata

SEQ ID NO: 31588 - DNA, 462 bp, Glycine max
  unsure at all n locations
gcttagcttctaaggaagttttctcaaagaagcttctcaaggaatttttctcaagagagcttctcaaggaagctacctagtctataaatagaagcatgtgtaacacttgttgtaactttgatgaatgagagtcttgtgagacacaactcanagttcaacttctctccctcttttattccttcaatttcgtgctccccccttctctctttcttttcctccattaaagcatcctcttcaagcttcttatccaaggcaattcttagtggtgaagctccttcttcctcggcttattccctagtggatggtgcctcccctctcctcttctccttttccttccgttgcatctacatggtgtaaaatcaccattgaaggacctcattgaagctcaaagatccagcctctatagaagctccacaagaaagcttccatcatttcggcccacactctttaaagatgctcact

SEQ ID NO: 31589 - DNA, 449 bp, Glycine max
tcgatcacctaaggccaagctgcatggtggttcgggctttcgactacaactgcctagacataaggggggagatcgatctcccaattcaaattggaccccacatatgctaaattactttccaagtgatgtacataaaccctacctatagatgcttactaggccggccttggattcatttagtaggagtggtcccttcatgctacaacaaacgctgaaatttgtggtggaggggcaattaattatagtcttgggagaagaggacattcttgtgagttttccttcttctacatcttacaaggaggccgtggaggaatccttggagatgttctttcaagccttggaggtggtaagcatgcttatgtggagtctcccccagtacaaccaccctcatctagggctgcattaatggtagctcaggtgatgctagggcatcaataaaggctggaatg

SEQ ID NO: 31590 - DNA, 381 bp, Glycine max
  unsure at all n locations
agcttgaagatgaagctatcttgcgaagcattggatgagattttgagtgattatgaggtttctagaggtggaggagacttccccactacctgttattctgtaatctttcactttctcttctctttgttgtaaaagaagtctccctgctatggagagctaaatcctcaattggttcttcctatggagtacttgatgtaaatacttttatatctatctgatgatattttatgtgttctctatactatcaatacttcatgttagtatgtttttgccttgatcacgtagatgcatgctgagttagggtcactcaacattgngaaatggtttgatccttagaacttgataggacggngttagtttatcgtattgtcacgagggatc

SEQ ID NO: 31591 - DNA, 461 bp, Glycine max
  unsure at all n locations
gcgcgggtctgggagacaaaggtcaagtggtcgcgatatgcgaagatgatgttccgagtacattggatttggtacgaccatgccctcctgatttccagctgggaaattggcgagtggaggaacgccccagcatttacgcaacgagcataatgtaaacctttacggttttaaaagctctatagttgggcctaggctttagagtttttccttttgttaaggctttgtgtcttttgttttttgaatttataatacaaggatctttcttcatctgttcctacgtctctacccattctcattcatttgcatgtttacttctttttctgaaacgacagatccgatgacgagtcccccgaaggtactaatacctgngacccgcctatcgacttcgagcaagaaatgagtcanacggaagatgaaggaaacaaggatgtgggaacttccccagaattagaaagaatggg

SEQ ID NO: 31592 - DNA, 416 bp, Glycine max
  unsure at all n locations
agctttgttgcattccttgtcactgccattgtctctgaacgacctttgttgctttccttgcaaacattcctttggcacgacctttgtttctagcttcggataccctgagactagggttaggccctttgatttgcactatatcagaggtgagtgagcctattggaaattacccctttgttcttagtcattattctttgtgttggtgttgatgaagctccattgttgtagctttaggacttgtacttgctatttctttcatccacagaaggagcattgtaggtaaaaatttgcttttcttgtataacatttcactanacatatnggtgtattgcatgggtttgttctatacttggtgtgtgtataattgaatacaaattttggatttgctaatcccttaaaaaactgtggttgtaatc

SEQ ID NO: 31593 - DNA, 411 bp, Glycine max
  unsure at all n locations
gagatgaggaagtgtagacgggtgaaacttcctgcttttattcgttgaccacagagtggtacttggagatatgtcgcgggggtcaggagaccttggggacgtcaagtggggtgctatttcccaaaaccaagcttgaccaatcccgacccaacccgggcatagtcggtcagtgagaacctgtgatgtacctaaacaggcgagctcctggcagtcaacagataaaaggaacaaagaccacaaaacaaggaggcttgtggtggctggctagctgtgaatcttgtgtgatatatgggttatggcctctggtaatcgattaccaagggtgggtaatcgattacaaggcttagaaatgaagacaggaggctaagatggtctctggtaatcgattaccacggngtgtaatcgattacc

SEQ ID NO: 31594 - DNA, 304 bp, Glycine max
  unsure at all n locations
tccttaccctcggaagcaaaaaagaagagaaggaaaatttccaatccaaggaaaaaggagaaagaaaatttccaatcaaagaggaagccaaaaaaaggagagaaggaaaatttccaatcaaagaaaaaaagagaggaaaggaaattcccaatcaaagaatgggagagagcaaaaagaanagaaagaaattcccaatcaaagaatgggagaaagaanaaaagacgaagaagaaagggaagaaagttcccgatcaaagaaaacagaagacatgtgccgagagggtcttggacagacaatatctgac

SEQ ID NO: 31595 - DNA, 247 bp, Glycine max
ttattagaggggatgcgtatctaaacattaacttctcaaggaagcttctctaggaagctttcatttaggtactgaccttcaaagttccacttctcttactattttggctccttcaattccatgccccccctctctctctcattcttttcctccattgaagcttcctctctaatgtgaagacttcaaagctccacttctctccctctattgtctactgtaatctcatgccccctctctgtatattctt

SEQ ID NO: 31596 - DNA, 367 bp, Glycine max
  unsure at all n locations
agcttgttaactntagtccctatgctacaaagctgattctgaggacaatttattatcatgcatagcctgccagagttggctcacaacaggccaatcaaacctatggagcattttcttaagcaagtaacctagcctgaagctcaacttccattggtgagacccaatgaggctgctcctcctgagcccatacttgcacaggttgaactagagccaactgatccacaatctccagtggtgaatccaccttcttctcctgagcttgaagtagttctcccatctccacctctgattatcatctccgattccccatctagagaaactgntgctccccctgattcaccagctcgagaagtagctgatccccctg

SEQ ID NO: 31597 - DNA, 437 bp, Glycine max
  unsure at all n locations
tataagaacaaaattgccttaatcatttacaaatatgcatgtgaattangacgcatcaacaagaatcaagccaaggctattgtgcaagcaatcaatggggcaaaacacaccaaatgattataatgatggatggctcaaattctcacaaaggtaaaatcatcactttcaaattgagctttcaaaactatcatgacatgtagagaagaatcaaggatttcaagtcacaaaatgtcaagaacttttattttcaaaacaattacccatttcttgaacatatcctataattcaaagaanaacatgcaaagtcgtacgtgcacacataattgacccataatattaaactgaatatccgacgaaactaacaacattaacaaattaacacaactaacaaatgaacaataccaacaaaactagcataacctaagaacacttccccc

SEQ ID NO: 31598 - DNA, 362 bp, Glycine max
ttctttaaactctgtacaacaatgaagctctgataccacttgttaaacaagtggcctcagatatcttaagaagggggggttgaattaagatattccaaacttttctcctaattaaaaatctatcttactttgtacttaagttatgaattcccttaatgacaatcttcttatatattaattcaaatgaagcagcttgaattatgaatataaagcaataataaataaaggagatctaaggaagagaacatgcaaactcagttttatacttgttcggccacacccttgtgcctacgtacagtccccaagcaacccgcttgagagttccactaacttgtaaattccttttacaagttctaaacaca

SEQ ID NO: 31599 - DNA, 258 bp, Glycine max
agcctcagacaggtgcacgaaagacttcgcagacgatggaacttagtccgctccggagtatgacagtcaccgctttatgagcgctgtacaccaacatcgctatgaggccatcaacggatggtcgtttctccggaagctactcgtccacctcacggacgacgagtctactgatttccacgatgagatatggcgcctgccgtgggcatcagtggttactcccatgctcatgtatgatccaaaactaggacttgagtttat

SEQ ID NO: 31600 - DNA, 426 bp, Glycine max
  unsure at all n locations
tggaagggtgattatgtttagataacgtttatgtcgagtgtatattattnttctttcaagtttcaattgtacgtagcttgtgtcttcttcacacatagggcatgcataatggcctttaacactatttccactcaaattctcatatgttggaaagtcattaatggtatagaatagcattgcacacaacttgaatgtctcattttaatacccatcaaatacaacaaccccctcgtcccacaactttgtcaagtcttcaatcaagggactgagataaaacattaatgtcaatttctggttgtctcatagacaacatcatgtatgttcgcttcatgcacaaccaatgaggataattgaaattactatcaaaacaggtcatgaactgtgctgagagcttaaactaccatagagattcattccatcactggt

SEQ ID NO: 31601 - DNA, 449 bp, Glycine max
  unsure at all n locations
agcagccaccccttcatgtgaaatgcaccgaanatttatttagttacaagtcacgtaccaacgaatcactacttaaatcgcagtaaaaagaagtagtagatatctatttgcaaagttcagaaccaaacaaaaaaaaatggttaataagaacattactggtatctagagagcaaaacagcacggtggtaagcgacggttacattgaatttgggaaaataggcaccccttcaagcaccctgtttcttccacttcttggcgcccttatcagcgacactgagaatgcagagaaaagatgccaagaaattctcgttgatggaatccccaacaaacccaatatttgtattcttcatcatacccagaaaccgaaccgggtcgatccggggcatgtggcagttccgtgggacccatctncactagttgatgacggtcatgttctgccgctcattccg

SEQ ID NO: 31602 - DNA, 324 bp, Glycine max
attatcttttagtaatcaatctctaaattttaggatgaaatgtatgaatgtggacatgatgaacgccatggttgtatatacaaaccaattgaccaaaaagcttaccttgaattataattgtatcctttgcaccctttgtgagccaaattaaagttgcaaaattgaaccctgaacttgaatgactatcttcaaataccttgcttagattctacgatagcatatggctcaaggcaatttacctcaacattgggggagttaacggggatgtaaagtggaatgtaaagctcatcaacacacacaacacataagttgtgttaaaaaaaa

SEQ ID NO: 31603 - DNA, 431 bp, Glycine max
  unsure at all n locations
ntgagccaaaatcctgactcaccatanaccttgacctcaggtgataatgccaatccttaccctcggaagcaaaaaagaatagaggggaaatttccaatcaaagaaaaagagaaggataatttccaatgaaagcaaaaaagaaatgaaggaatattccccaatcaaagagtgggagatagcaaaaaaaggaaaagaaggaaaattccccaatcaaagagtgggagatagcaaaaagaaaagatagataattcccaaccaaagaatgggagaaagtaaaaaaggaagagaagatagcttctggtcaaagataccagaagatatgtgcagagaggtctttagaaccgacaatatctgaacaatacagaattgtcactaaatgaacaaaaagaaggataggaaaccgtgacctanaatggtcttctccctttaat

SEQ ID NO: 31604 - DNA, 401 bp, Glycine max
  unsure at all n locations
ttcttcaagctgcttaggttgtcaccctatatatgtacactgacatgcttttctatggtaccacaaaccaactagacttgtcatctctcaacatcaccttttttttttctcttcagccaataagaatttcccagtttgaccactcaatttccagtaacagtcaactatgacttgattaatgagaggtaataaaagtaattttttttataggggaaacaaaggtacattttcttgccaaagtcaagaactaattcctttaaggatttaacctcttcaaacaaatatttattcatatacgttgggcagaaacagaaaataccaaacaccatataccttgggcaatggacatgtcttanaatgctttcaanggacatgtagtaatttaatctcataacatgtct

SEQ ID NO: 31605 - DNA, 419 bp, Glycine max
  unsure at all n locations
ttatggagaaacagtacacatttgatagttnctggtcctggctntagccacttggtcccaattcttcagttctccaagagacttgttcagctccatccaaactntcatgtcacatgcctaattcccacactcgtgtctcccccaagtgcctcaatatccatccttcaaactcttccaccaaacatcaacactatttttcttcaaccggtgaaacctgaggacctaccacaaggggctaccatagaaactcaaattcagctcatagtggctctctctatgccctccatacatcaggccctgaagaccttaacttcaaggactcgctntgtggccttggtggctgattcttctgcctttgacgcattagatnttgctaatgagttcaacatgttgtcctatatntacctccccatatcagc

SEQ ID NO: 31606 - DNA, 331 bp, Glycine max
tgtctagaggaaaagatcctcatggcagataacaacaacagtcagttcatttgtgagggagcatccctcacgaggtcaccaggcttcacaagagaggactatccttattggaaagacaaaattgagatgtacatcaagttcaacccctacaaactctggctaatcatcacaaatggagatatacccattcccagaccttgtcataatggagctaaacacaaaagttcattatactctaacatgtagtctatcaaggaatgagtacaacaatatatgcagaattaagacaaccaaagagatttggaactcactgggcatcaactatgaatga

SEQ ID NO: 31607 - DNA, 468 bp, Glycine max
actcagcttgtcaaaagggaagcaagttaagaaatcctttcaaagcaaaaacgttgtttctacttcaaaaccccttgaactacttcacattgatttatttggtccctcaagaactatgcgtttaggtggaaattactatggcttagtaatagtagatgattactcaaatttcttggactttgtttttgaaaaccaaaaatgaagcttttgatgattttcacaaacttgccaaggtgattcaaaatgaaaaaggtctcaacattgtttcaattagaagtgatcatggaggtgaatttcaaaatgacttttatgaaaaaaatgaaattcaccataatttttctgccccaagaacatctcaggagactggtgttgtggagaggaaaaatagatccattgaataaggtgcaagaaaccttctaaatgaaacaaggttacctaagtacttttgggaagatgtatacatactat

SEQ ID NO: 31608 - DNA, 393 bp, Glycine max
  unsure at all n locations
agtggcatttcaaatgcaaagaatggatgtaattgaaaaactaatgctgggtatggagctacagttggattgcttcactttcatttgaaagtttcattgtaaggcattcgctctccacaacatcataacagaataaaaatagaaataagaacgagttataaaaaaaactagcttgcaattgaaacttttttcttgtgattttcattgtaagaaagaaagatgaaccacttangaagcaaaagatcaaggcattatctttattgaagataccatgaatattcttgactaaatataaaaccaccataaacattntccagcaaaaatatctcatattatcatataccacaaaanataaataaataaataaaagaaaaatcacagcaacaacaattc

SEQ ID NO: 31609 - DNA, 468 bp, Glycine max
  unsure at all n locations
tatcctgacattgtttcaaagcctccaacagtccaacttgctcaactcactcaaattactagacaatttaaaataaatacagtgactatatgcatgtttaatattaaagtatattttctttatattattagtttacatgtagataagatttaataaatagtcattaataatcacaatcttcaaatcaggattaccactaaactaattaattgttacaaatcaaatcaggatcattaattttcgtgaccttgtttgaacctattgtaacagagaatggcaagtatatgagttgtctcattcctttcacgcgttttgtttttgtcttgccttggcattntctcgggctgttcagtgaccaccatcacttggatgtctgtttattcgtttggcactgcgctnntgggttagttagccacacttctagttgtggcctgcactggaagatacannatagtagacaagttaaag

SEQ ID NO: 31610 - DNA, 309 bp, Glycine max
  unsure at all n locations
agcttgtatgtgatcaagtttaacttaccaacaataacaatttcctccctttgttatattctctcacctagcttcagcaattcagcttttcctgtggctcttcccctcctttttcatatctttttctctgtctaaggaagtgtgcagcaaaaaaaagaaaactttgttactcagtatgttaatatgacgacgaanatggagaactgtccaccttaccgcactcccatccttttctttntgtattggttctggtaaacgtcaagtgagaagccccactaaacatatactatatattaattaactatatat

SEQ ID NO: 31611 - DNA, 432 bp, Glycine max
  unsure at all n locations
gaatgctttctgtcttgtgccaatggaataaattgacttgtcgccaagttttggactggttcctgaaccataatgatactggtcaatctttagttcaaatggacaagctaaatgtgaaatctaattgtcacctatacaggaatttggagggaagagtggaaaggcggcagaaaacagaactcatacctgtagtgtcaagcacagaagaatgacttttctttaaattccccagactttcttcttcaaaacgttcacgaccctcagagagtatgccaagataagcatacacattggtctgaatggtcaactntatattntcacgttcatcttctgannagggggtgcttttgtaaagaatcttggcctgacataagcatttacaattctataaatacattgatttcttggctttcttcaacaacaacatgcatg

SEQ ID NO: 31612 - DNA, 373 bp, Glycine max
  unsure at all n locations
agcttgtttcanagaggtccaggaaggacaaggcggccgaaggaactagttccgccccggagtacgacagtcaccgctttaggagcgttgtacatcagcagcgcttcgaagccatcaagggatggtcgtttctccgggagcgacgcgtccagctcagggacgacgagtatactgatttccaggaggaaatagggcgccggcggtgggcaccactggttactcccatggccaagtttgatccagaaatagtccttgagttttacgccaatgcttggccaacagaggaaggcgtgcgtgacatgaggtcctgngttangggtcagtggatcccgttcgatgccgacgctatcagccagctcctgggatatccgat

SEQ ID NO: 31613 - DNA, 401 bp, Glycine max
tgaatcggacatccgtgtgagaagttatgaccatttgaatttctcaagagcttccgctgttcattttcgatcctctcgacatattatgcacccgaatcggacatctgtgtgagaagtcatgatcatttgaatttctcgagagtttccgatgtataatttcgagcgtatcgatatattataaccctgaatcggacctcagtctgaaaagttatgaccatttgaatttgacgagagcttccgttgttcaatttcgaatatcactgtatgtgatgcgcctaaattggacattcgagttaaatgttatgaccatttgaatatctcaagagcttccgttgttcaattctgagcgtctcgatatgtgatttgcctgaatcggacatccgtgtgaaaacgtatgacca

SEQ ID NO: 31614 - DNA, 385 bp, Glycine max
tgaaacagatatcaatatcatcgctaatatcctccagaagtgatattgttagattcacctacattgtattcatgaatgaataaaaatagcctatcaagaaattaattgaatcaataatgctagagatcctttgttaagacattctacttaattatctttctcaaaagaacctcaattgcgatatatccttaattcctcaccatcatagccatggacccttctggtttataacggcacataatgtatggaatatccttcaactctgtacaacatatatctgccacatgcctcacattatcaatgggtctcttgatgacaacctcttcagcatgctcaatgatctgaggtacagctggctgccaatgccaatcgagataagccatca

SEQ ID NO: 31615 - DNA, 317 bp, Glycine max
aattattgtataaatctttaatcttacaaattctttgttttgtatttggctactccacatgaactaatggtttgcttattaaaacacattaacaccacattaatgatctgaggctcgagacatggatatgatgaaaatctaatcgcaaccaataatagatactttttttaagaaaaaaatatggtgcaaaagctcttaagaagattcctatattattattgcttataataaatcctatcatccattaacagctattaacttttttgataaatcatatgcgcacatttgaaattttaattaatgtataagaatatctt

SEQ ID NO: 31616 - DNA, 384 bp, Glycine max
  unsure at all n locations
tagcataactaattccctgaatgacaaaagtcaatagttgaatatgataaccaagttaatactgtgggtgaacatttgttatgcgagaacaagttcgagcagattgtctccaatgaagaatgtaagtgttgtactttgtaacagacatagaaaagaggcagagtgagaacttgacaaaacctgcgggatggccaagctagcaatagtgatgccggacacaaggtcagatttgaagagtttgagattatacttangaccccattggagaatagggaacacatattgagctccaaggatcagttntctcttaagaggttgtcccttgaattggcgcagaggatcatcanggaagaaagtttccttgagcctacccttgagtttctg

SEQ ID NO: 31617 - DNA, 295 bp, Glycine max
  unsure at all n locations
tatttttggagtgattaaagaactctatcccttatatataaacacaaacagctcgcgttattcaactagcaccatcaccaccttatccgacaacaaggcattcaacaccaatatttaatcatcacaatactacccctaccatangcactggataagattaagataccaaagcaagaatgatgcatcacatcccttgtgttngctttataaccaagaccaacctgtggcacatgtattgatgttacagcatttcacaatcaaaagttttaccctcanagacacacatatattttat

SEQ ID NO: 31618 - DNA, 419 bp, Glycine max
  unsure at all n locations
taatacatgaccgggtcactctctatttagacggctgaagaatttattacaaatttctcacacagagattacgctttagtttctctcactagaatccttcaacttgtattcaagatgctcttcaaacatgtcttacagctctatggaagaccattgaaatgggctctacccaactgaaaaacttctggaacaagtagacaaacatgacaactatcatgaaatgactgctcgcataacattctaagacagacattctgaggaacatnttgtataatattcttgaagcatctgtacaatagtcattctgatgtttgctgagaaagaatttatacttgtagtagattcttttgatgaatttcaactaatatgcctttctaaagtaatgcagcttcatcaatcataacacatcgtcacagcac

SEQ ID NO: 31619 - DNA, 212 bp, Glycine max
gtcgcctgctgcatgcattctttaaattgaatatgcaacgctccgcataatttcgaactgctgtcatccattacaatgatttggtaatctattaccactgcctttgaatgctgaaatttgaattcaaaggtgaatagtcacaacctttcacataacagctttgtgtaatcgattacacttatttgtgaatccattaccaatgattgcttctg

SEQ ID NO: 31620 - DNA, 396 bp, Glycine max
  unsure at all n locations
tgtagatgcttcgaggctctccaatgtcaaaccttgngtttgatgagcctttggagaagcaagactcactaagggtggatcttgggtttgacgagcctctggagaagtgagactcaactaggacagaccttgggtttgacgagcctttggagaagtgagattcaccaaggatagactttgggtttcaaaaacctataagtctcaccaaggacaaaccttgtgtttgatgagcctttggaaacacaagactcaccaaggacggaccttgtgtttgatgagcctttggagaagcgagactcaccaagggcaaaccttgtgtttaacgagcctttggagaggcaagactcactaagagcaggcattgngtgatgagtcttagactanggaatgctcgac

SEQ ID NO: 31621 - DNA, 282 bp, Glycine max
  unsure at all n locations
tttatcttttatgtgaaaggatgtgactcttcacatttgaatttgaatttcaacgttcaaaagcactggtaatcaattaccaaaacattggaatcgattacagctttttgaaattaattggaacattggtaattcaatttgaaaagtggagccttagattacaattgtgtgaaattatgtatctaaacttttatttctttntattntttgaggtcaacaaaagtggagctcttgctcctacgtacccttcatcgaagaggaaatcagacctacgtaattctt

SEQ ID NO: 31622 - DNA, 435 bp, Glycine max
  unsure at all n locations
tgcggactataccttctaccgaacatggccgtgtttctgtctatgcccggattcaaggcgagctgcagcaccagctccgcttccctaactgtactggaggcggttgtggtggctttatcctctatggttttctggagttttaacatgacctccgagatggaagccatttgatcttttaaggccgatagatcggccttcatctattcctacacgccctcttcattatccatttttctggatcgagtgttataggggtgccttggtgttttcttagttatgatcaaattcctaaagaaataaacaatggtgagtatgccaccaaaacatgagtatgcaaatggatgatcggagcgcttggatccaccccaaggttttttagataacatggtgagtccataacttctcattntatataaagaacanagctttcatcta

SEQ ID NO: 31623 - DNA, 354 bp, Glycine max
  unsure at all n locations
tccttgagaagctagagcttagctacacacacccatctaagaactaagctcacctccttgacaaaatacatganaatacaaaaaanaaaaagtccctacaacaaagacaacccanaatgccctcaaatacaaggctaaaaccctatactacaagaatggccaaaatacaaggcccaaaagaaggaaaaacctattctaatatttacaaagataagcgggctcatacttagcccatgggctcgaaatctaccctaaggctcatgagaaccctagggccttcccttggatctctagcccaatcaacttggagtcttctacccaatgcccttgcggtgtangattgcatcaatatgt

SEQ ID NO: 31624 - DNA, 302 bp, Glycine max
tctgctttgcggatttggtcttcgccggcgaaaggatcaaagtgggtctagaaaaaggcaaatttgatcatcctgctctgatgaatgcgaaaaatggggaaaatgaagaggatgagaataagggagaaacccttgctatgactgccattcctacacggtcaaatttcccatcagcctaacaatgtcattactcagccaataacagtccctctcacccaatcatccacaaaagtcatccccaaatcagccacaaggcctgcctgcttaccgcacgcccaatgcccaaacaccacctttagcgc

SEQ ID NO: 31625 - DNA, 432 bp, Glycine max
  unsure at all n locations
ntctcatgagctcccttgagtgctccttgaggaatacanaaatggaagcacatgggaagaaaaaaggttattaccacactaagacataacccaagaataacaagaggagaaatgagctttcttttgcacaaagaggaccaaaactccaactcttaagataagggttctcttggagaaggagaatagagtagagaatgatattgtgatgtgagttgtagattaataaaggttttatgaggagtttatgattatctcacttctttctgtatgcactctacacttcattaaacttaatcaccatttttgtgacccaagatccatccacttatgtcgcaacactctataactcatcaaaacacacatataacatgacatatacataaacataacagatcattatctcataattaattaagtaataattatcgacac

SEQ ID NO: 31626 - DNA, 409 bp, Glycine max
  unsure at all n locations
agctttcttttgtatgtgacaatggtttcttgtgggatgtgatcaatccagaatccagtgaaccgcaaccagaagatggagtgtctagagaaaatgcttctgaggtgagtatcttttatgtttttggtagttgatttgacttgtttgtttaaggaaataggtgatgcttggataaggggtatgtggactanaaattccaaatggaagtggttgtatagagaaatcacgttgtttatggaattgtgtancatcaatgtgaaggctaaatcactgaatggggagtgaactggcttcacgactgctactgctgtcttagacaggcttcttanattcctgcttataaggtaatggcttggtataatcagtcccttgtatctacccattatccaagtactcccttgttattggt

SEQ ID NO: 31627 - DNA, 450 bp, Glycine max
  unsure at all n locations
caattcagctcggacccgggatcctctgagtcacctgcggctgctgcttaatgtaattnngattntttttttaaaaaaaaaattgtaattttgatctcttattctaaaataaagacatttagtccccatatttcttaaaatccataattttaatcccctattttaaaatgtagacatttagtctcttgcttttaaaatctataattttggtcattctctcaaacttaaagcaatgatgttaagaaattaataatgaatatgacataaattaaacaaattatcttttgtcactaaatttggaccacatcaaattaatttcttaccatcaatgtnnttttaaattgatgaaagaatcataattgtgacatttacaaagctaaaggactaaatgtctntattntataatanaagaactaanattatgagatttaaaaaataacaaactaaaat

SEQ ID NO: 31628 - DNA, 430 bp, Glycine max
agcttgtattattatggggtacccatcacatgtggtactaggtggcggtcgggcgatggtgcacaacaagttttccacatccacaatgcgcgcataaacccaccatcccctgttgcccacctccaactgagctcacatactcccacgtagcccatatcctcgtttctctcaacaccgggtccccatcaatcctcccaagcttccacaacatccaagcaaaacaacattcaaacagcacaagctatcacagccaagcaaaacagggcaaaggcagaaaactctgctcaaacaccaaccaaaatcacagcttttctcacttaaagaccccaataacaattccttcgatctaattcgttaaccgttggatcgactccaaaaatgtactggaagtctatagtgcataagcctacattttgaccgctgggatctg

SEQ ID NO: 31629 - DNA, 418 bp, Glycine max
  unsure at all n locations
tatcttcttctacatatggtagcctcgttccaattaagccatagctagcagggctaattgtcgagtgacacctgtgtggggagcaactcaacccttgtgcggtcgttggagaagttagaagaggtgtagaatgcaatctggctcgtcatggggatcatggaggtagaaattgtggcggacgtgtgggactttgacattgtgaagcacacgatgcacgatgtgggccccatagacgtcctgcttttgaattacaacatgttcatgttgcttcttcctaacataaatctaatggcaacattgaatctcctcaagttcgcgtgaggttattagattatgggttgngattcttagtttttgtgagtaatggcttacagaacgtgaaagaatggattggagatttggtcttttggtttataat

SEQ ID NO: 31630 - DNA, 430 bp, Glycine max
  unsure at all n locations
agcttccactcattaccataaaaaaaacaaaggacattctgaagataatatacctatgaattcttacgactttgatatttctactttntatttttaatcttatattatttcatataaatattttgtagtcctctgatctaaagaatattcaagaaaggagttcgaaaagaaaaagtgattttgatgatgaagttcctttcagttcttctctcanatcaaccccataattgaaaccaaagaaaaaaaagtaagtttctcttanagtttcctttntatttaattagaaattacttcgactaaatttctacgcatatagtagttaaatcaaatattcattttccaaaaatgtaaacatactattttcaggaaactntaagaaagatntattctacacattctaagtctaaagacatgatcgagacacaccttt

SEQ ID NO: 31631 - DNA, 418 bp, Glycine max
  unsure at all n locations
agcttgtatgtgttcttaaggctttggtccgatggattaaggtgttgatttatcttaatcactcaattttgattcatgaatgactcttggtagttcatggaaactgtgtaaatcaagcccacaattagtatggattccttttgaattttctactaaaaatggttaaagtagagttttgtcaaaaatggatattcttgctttttactaaaactagtaaattctatcctaaacaccttgattattgtgctaatctccctaggattacttgtaactagagtgaaactcacataaagattactcttacatagagctaaattacattgtcactcangatacaacacaattttgntacataaagaatcttcgttcagatagtttccatatctctgtcaagttagactaaacaaattatttacac

SEQ ID NO: 31632 - DNA, 419 bp, Glycine max
  unsure at all n locations
agcttttatataacattnttactaagtatttggcaaaagaaatgctattaaagatcacatgtgtaatagtgattcaagaatcaggttcaaagatcatgaattgaataataagaaaggttcctgggtagtaataataaggagtgatgttaaaaatccatctatggagaaaaatagaaccaaaagtattaaagaagaataaagagttcaatggaatttttcttggtgaaaaaacaaaatggaaaaaaaatgaagtaaaaaaagaaaaaaaaaagttgaaacaatgacaaaaatattcctaagatgattattatatttgtgatctcatgctatgaatcatggttgggcaaaagaaataattggagaaaaaaattaanaaatagaagtgtattgaaatgagaatgattgattacatcaacaaa

SEQ ID NO: 31633 - DNA, 408 bp, Glycine max
agcctgatttatatttatttattaaactataagtgttcggaacaatcaatggatgaaatactcaaacagtgcagatgactgacaaataatgaaatcatgaattatgtacaaaggatacaaaacaagatgagataaatatcttaacgatcgaaaaaaatattcacaagttagaaatcaaaagctagaatttcaaaaaacatgttaaaagttacttaaaaaacctacttaaaaaactttattatcggatactcaaatgacattcttaactattaaaaaactaaacactaactacaatatcttaccaaaaataatcttagtatttttaatcttgatcatccatgtgtataatcataagaactatattcctctcgcttctttgttttaatcaaccgtgaatctgacttatat

SEQ ID NO: 31634 - DNA, 419 bp, Glycine max
agcttctttttgttctttttagtagcctgcaagttcctcatgtgcaatataggttcacatccaacatctgccactgatctgccattcggtgtttgcaacttaaatcgctctgccttgtatgcagaaaggatattatcttcatcgggtaggtgattgctaactttcatgagtgagccaagagaattcatctgaaaggtttaagatacaatcagatgacagcttccaagaataaaattgaaaactagttttactccagataaaaacaatatggcagtcactattgacccacctagctgagaaaaatgatagaactacagtcttttatgtacttaatgacctaccaattataattattaatccaactacaattcaagatcttaagttgattataaactgagcgaaccatatccaaaccaaat

SEQ ID NO: 31635 - DNA, 416 bp, Glycine max
agcttggatatatactatctaagtattactaacatagaaaataatattgtatgtaatttacagaaagataattttatgtatatattttttaaaatttttaatatatttattactttactaccagtatttttataataaagatgtattcttttttaattgacaaattatttagtttattaattttatttattcaaattaatttattcaatattattgaattccagtcaattacttgctaaaactgaagtctgaaggtttacaaattacaaaatgcattttaaagagaaaaataaaagcataaaatagatatatgaagtagaaaaatcaaataaatcatgtttacagagagttccaatttaatacaacgggctactcaatatgtcttcctctttggtactcttagtcttcgagacaat

SEQ ID NO: 31636 - DNA, 420 bp, Glycine max
  unsure at all n locations
agcttctcttttcttgtttaattattatattttgtttttaatccttgtatttggctgtgtttttatgacatttgagcacttattatttctttttaatatttgtttagtatgactgaatatgatgattatatttactatctcttggttgtttatggttatgaattttaaacttagttattttgataatatatgatcagtggtatgtacttttatttggttattatgagtgacttttctggattatatgacattctatgaagtatatctttctaagattgatgaatggttaagttatcttgtttgattgttttctattctcttgtatgattagtaatttatgtatgttttatatttgttatgcattttggctttntgttgatgccaaagggggagagaaatanggattaaatcaagaactcg

SEQ ID NO: 31637 - DNA, 427 bp, Glycine max
  unsure at all n locations
agcttagattctttctaacgacaataactttttactcggatgtctgattgagtcccgtcatatatcgagacgctcgaaattgaatgttgaatctcttaaccaatccaaacgacaataactttttactcggatgtctgattgagtcccgtaatataacgagacgctcaaaattgaatgttgaagcttagagccaattcaaacgacaataacttattactcggatgtctgattgagtcccgtcatatatcgagacgctcgaaattgaatgttgaagctcttagccaattcaaacgacaataactttatactcgaatgtctgattgagtcctgtaatataacgagacgctcgaaattgaatgttgaagctctgagccaattcaaacgacaataactttntactcggatgtctgattgagtcccgtcatat

SEQ ID NO: 31638 - DNA, 413 bp, Glycine max
  unsure at all n locations
agcttagttctagaagggatggaccttttcaggttttggagaggatcaataacaatgcctataggttggacctcccagaagagtatggagtcagcaccacttttaacatttctgatttaactccttttgcaggtggagctgatattgaggaggaggaactaacagatttgaggtcaaatcctcttcaaggggaaggggatgatgcaatcctccctaggaagggaccaatcactagaaccatgagcaagaggctccaagaagattgngctagagctgctgaagaaggccctanggttctcatgaaccttanggtagatttctgagcccatgggccaaggttgggtccaattatctttgtacatattagactangatgtcattatatntggtccttgtatatanggctccatatt

SEQ ID NO: 31639 - DNA, 419 bp, Glycine max
  unsure at all n locations
agcttgttttattctntagcaccttggcatataatgctgttcccacttgagtttggataatctccttgttattatgtacttgttcatcttctacacttgtaccaacactaacattgtaatcgttatactttttttttgggcatttctacatgtgactaaatggctgcctacattgaaaccatgtcccttcttcctgtcttttgttatactattgataaggaagcttttgtgctcccctgttactcttgggaatgtggtagtggtggacttttttcctgactgatctcatgctcgatgtcgttccacacccctgtctgaattggagacttttagaattctaagagttctttactcccaaataattgtcaagatcttaagttcattggataccaatttctacacttaactggttcctttga

SEQ ID NO: 31640 - DNA, 405 bp, Glycine max
  unsure at all n locations
ttgcttatctcgagcacgtcgtcacagtgaatctggtcttggaggctttgacggagaggtgaccttggttcctctcatgacagcttgggaaccctagaggggagtcgaagagtgaaaatgcagagcgcaagagagtacagagagctagacatcaaatattaaaaaaaaagcataaaaccttctaagacgatttttttacaaaaccgtcttaaaatgacagtcttttaagatggttttcgtaaaatcgtcttcgttgaaaactttcgtatttataaaattgtcactgcctatatacgggaaccgtcttaatttcggtgttgtagaaaatatttttttctagtagtgactntctctcttaataaatttaaaaattagaaaatgttctagaattgaagtgtaactctt

SEQ ID NO: 31641 - DNA, 422 bp, Glycine max
  unsure at all n locations
agcttgcatttgttattgcgaaagccccactccatcattaggattagtacctgacatctcaaacaaacaaatcaaacgtaacaagacaattatagttgctgtttgaatacctcacccactcaagtgtatcacacaattatggcttttctctaatgaaacactcttgccttttaccactctaattccccttgagttcttaggcaattcaagagattatggccacaacaaagaacaattcaccaatatgtgtaaggtaaggctagacaaggaaaaggttaaccaagaaaaaggctaacaatgtttttaggcacaaatgaagganataaaattcagaatttaggaattcaagtaacaatccttcatgcaaccaatatattaccttanagagttttttttttaagttcttcaagcatgaaccattc

SEQ ID NO: 31642 - DNA, 362 bp, Glycine max
  unsure at all n locations
agcttgattttgttcatcggaagctcttgagaaattcaaatggtcataacttttcacacggatgtccgattctggcaaatcacatatcaggacactcgaaattgaacaatggaagctcttgagaatttcaaatggtcataacttttcacacggatgttagattaaggcgcatcacatatagagacgctcgaaaatgaacaacggaagctctggggaacataagatggtcataacttctcacactgaggtcctattctggcttataatatattgatatgctcgagattaaacatctgaagctctcgagaaattcanatggccataactattcacacggatgtccgattcgggcgcataatatg

SEQ ID NO: 31643 - DNA, 261 bp, Glycine max
  unsure at all n locations
cacacacccctctcataactaagctcacctccttgagaagcttccttaagaagattcctaacgaagctagagcttagctacacatacctctctaatagctaagctcacctccttgagatgagaagctagagcttagctacacacccnctataatagctaagcttacccccatgacaaanaacatgagaatacaaaananagtccttactaganagactactcanaataccccgaaatacaaggctaanaccctatactact

SEQ ID NO: 31644 - DNA, 311 bp, Glycine max
agcttgttttgatatcaatcttgccaaagagatactcgtttttggactgaaaccccgagccagaggctttgtcaagggaaagagtgagaagatcgccgttgttgagtatcttggcacgaccatctccccaagttacgtcaaaatcctggtagaagttgccagcagaggctgcgatggaagaggccaatacaaatacataaaggacagtttttgttgaaaatgtaatggaatgaagagaagccatgattgttttgaatgaaatgtagaaagaggaagttaaaaatgtagtagcttggtagaagtaatgaaat

SEQ ID NO: 31645 - DNA, 419 bp, Glycine max
  unsure at all n locations
agcttctattaaagggagaagnnncaatcagttgaaaggcaattcatgagcagtatattataaaaggaaaggattggtacaaagggggttgctctaatgaattgctattttcaagaggaagttaagcagataatgctaatattagcatggcagatttacaagtaattggagaggttgggttggagatatagctttactacagtaaatagactttttccatctaatgaagttgaaatttttgacaggttgggttggagatatagatttacaagtaattggagaggttgggttggagatatagatttacaagtggatctggttactagacgcagataaatgctttngggtggctgcaacatatatccatttcatatgcctttctacacaactgcaagaatatggtctatcagtcactgaat

SEQ ID NO: 31646 - DNA, 394 bp, Glycine max
  unsure at all n locations
agctttattcatgttcgtgccttcagccattatcttactttgatgggtatagctgacacccaccatacgtatttcagtaactagctattatatagtctcttactctcattacttgataattatatatagatccttataagtacttgtaaatgaagaaaatcacaaggataaatgaaataaacttctcccgtacgtaatagcttatgggggaaacttaatttcatttttccttattttcttcttttataagtgcttatggaaaactttatcctaacagaaccttattctctgtcttgcacagatcntattgcaattccagagtactaatagggactaggtagagtaatcttttaacgaaattccatctatgcagggttcgtacaggagggaatat

SEQ ID NO: 31647 - DNA, 406 bp, Glycine max
  unsure at all n locations
agctntgattgatttgacctgaaatgttgtttagtgagagatcaagggattctaacaatttcatttttcccatgtcatttggtatccctccaaacagatgatttctagacaagttcaaaaaccgcaaagcagatagcttggaaatttcagatggaattgctccagacagcttattacttgaaagatcaatcattctcaccaatatcagattgtctctgtactctaactcatctcctttgggaactaagacaagagtttccttgtagtggttataactgaagtcagagccatatgaataacttanagggttggcaaagaagtcatcttcaccagccattgtcttcatgtcatccaaacaatntggaatggatcctgacaggctgttattgccaagatccagcactat

SEQ ID NO: 31648 - DNA, 409 bp, Glycine max
agcttcttatcctttgcactctcttggtggcgaagcttctccttccatggcttattccctagtggatgacgcctcctctcacctcttctcctttatcttccgctgcatctccatggttgaaaatcatcattgaaggacctcattgaagctcaaagattcagcctccatagaagcttctcaagaaagcttccatcattaattagcatgtaatccactcaagagactcaacaaaacaacaacccaagcatcaaattacatgcttataaaataaaactagattttatatctttatgcgtgatcatccaaattagtccatcatctttattcctcaagtagctatatgtagttgaccaacttggtctttaatccttctagatgtgaacatgcttcagtgagagttgtcatcatt

SEQ ID NO: 31649 - DNA, 416 bp, Glycine max
  unsure at all n locations
agctttgcttctatactagtggagggttgtgttttctacctggttctgatatagacaataatgtgagctgctaatatattactatgaaaaagaatatacatcttatcggccttgtttacattttttttgtgtgccataaaaataattttttttaaaaaaagctttactttttcaataaataaaagaatgttttattctctagaatattcctcctcctatatgctcattcctcacttaataattcctccctcatccacacgtcataaatttacatggagtggtaaatagtaatcattttaaaccaccatttntaattctttcaccctctgaaaatgctgcactcattgtattctgtttcaccttcattcaccaagataccaatgcactgcagtacaccaatgcagcacacaattaat

SEQ ID NO: 31650 - DNA, 374 bp, Glycine max
  unsure at all n locations
agcttagattcctccatcatcaaggaattagggcgggtgatggaacctctccaaatgcaagctttccgcaagacttacggaaagatcttagagttgaccttagcagaggtatccatagaagccattgcatcactcacccaatactacgaccagcctttgagatgcttcacattcggagacttccaattagtaccaaccattgaagaatttgaggagattctaggatgtcctctcgggggaagaaaaccatatctttcatccgggtgtctcccctctntgagcagaattgcaactgtggtcaaggattcagcaagaggtttggaccacataaaacagactcggaacggcatagcgggcctaccacggaggtacct

SEQ ID NO: 31651 - DNA, 366 bp, Glycine max
  unsure at all n locations
agcttcaagagattcattttctcgacaatattattggtgatatctcanaaggggtaacaactagacattctcttaaagatttatgcaataatatggcttttgtatctatgattgaacctaaaaatataaaagaagccataatagatgataactggatcattgccatgcaagaagaactgaaccaatttgaaagaaacaatgtatggaaattagtagaaaaacctgaaaattatcctatcataggaacaaaatgggtttttagaaataagttagatgaacatggtataattattagaaataaagccaggttagtagcaaaagggtataatatagaagaaggaatagactatgaagaaacatatgctc

SEQ ID NO: 31652 - DNA, 417 bp, Glycine max
  unsure at all n locations
agcttacttatatttctttgtacaaacaaggtaagacaacacttgagtcttcagctgagtcaactcacaagtttaggccatcacaatttacaagggaaagtagtcactgttgggaggagtctccagatcaaaaaagtggtaccgtaggctctgcatcaaattgatggcacgacaaaacaattttactacatcaggaaacaagcatgatttcaaacaatatgttaataagataaccactgacctgttttcattgcagggtgctgttgatgattcangtccgtgctttcattgaccatcgttttgcttgcatctcttcttttcttcatctttgaggcgctcagagaaccttctactgtagagtatggngtaagaaaacaatatanatcattagtaatgcttaagaggagtaatcagaat

SEQ ID NO: 31653 - DNA, 415 bp, Glycine max
  unsure at all n locations
agctntggtgtcttactttcgaccataactttttactcggatgtctgattgaggctcgtaatatatcgagacgctcgaaattgaatgttgaagctctgagccaatacaaacgatactgactttttactcggatgtctgattgagtcccgtaagatatcgagacgctcgaaattgaatcttgaacttctgagctaattcaaacgacaataacttttttctcggatgtctgactgagtcccgtaacatattgagacgctcgaaattgaatgttgaacctctgagctaattaaaacgacattaactntttactcagatgtctgattgagtcccgtaacttatcgagacgctcgaaattgaacgttgaagctccgagccaatacaaacgaccataactgtntactcggatgtctgattg

SEQ ID NO: 31654 - DNA, 369 bp, Glycine max
  unsure at all n locations
agctttgtttgtgttgttccaatggttgcaataccacaagaggctgaccaaagcactaatgcccagcatattgtagatgttcggaaggcgggaatcaaaccttcagttgatgataaacatgttgtgagacgagaagcgttgaagcgttgtacatgggaagtaatggacagtgacagaggcgaagagatgaagatatacgccatgcacctgaagacattggctgcatacgctgctggtgacggtggaatttctcatagaaacattactgaatttgtgaataacttgttccattngtaattaatgcactcaacctcatattacttcttatttactcagtcacacaccgtgcgagaatttacagttgtttca

SEQ ID NO: 31655 - DNA, 407 bp, Glycine max
  unsure at all n locations
agctttgattgatttgacctgaaatgttgtttagtgagagatcaagggattctaacaatttcatttttcccatgtcatttggtatccctccaaacagatgatttctagacaagttcaaaaaccgcaaagcagatagcttggaaatttcagatggaattgctccagacagcttattacttgaaagatcaatcattctcaccaatatcagattgtctctgtactctaactcatctcctttgggaactaagacaagagtttccttgtagtggttataactgaagtcagagccatatgaataacttanagggttggcaaagaagtcatcttcaccagccattgtcttcatgtcatccaaaccaattggaatggatcctgacaggctgttattgccaagatccagcactata

SEQ ID NO: 31656 - DNA, 422 bp, Glycine max
agcttgtattctcctgactatggaaaacaggtcagtctggtcttctatcgaacatcttcgttgtggtgattagtcggttgctccattgttgttatgttcgttttagttcttattatagtcataaattctcagggtcgagatatatgttacctggcttcgtggtgggcgccaaattgttattgtcacaaatggatcgagtactcgtccttttgccaaagggccttctactatgttgaaggatctctagagttgaagggtcatctgctagttgttccttgtcgaagattcaggtgcatgagcatctgacagagcagagggaagaatacctgcaaaatgctgcaatgctcaagtgagggttcgacttagagttattaatgatatatataatgagtaggtgagaatgaatcactcaccttactcga

SEQ ID NO: 31657 - DNA, 415 bp, Glycine max
  unsure at all n locations
agctntggtttttatgacttgctccaatggctcatcatgtcttctattgaacctttcttcatagacttgaagagaacccatcaattggtctacggtcattgagtctaaatccttagactcttcaatagcacaaaccatataatcaaatttagcgattaaggagcgaaggatcttttccaccacatgaacatcttccatattttctccataatgcttcatttggttcacaatagccaacaccttgttgccaaaatctgagatagattcggattccttcatatgcaatgattcaaactctctacatagaatgtaacttcataccttgttttcccaacatgacaatattgaaagcataaattttgtgaaagcctaatcctccaaaccccttgttcattgacattntactccatctcat

SEQ ID NO: 31658 - DNA, 351 bp, Glycine max
  unsure at all n locations
agcttgcctcatagaggtccaggaaggacaaggcggccgaaggaactagttccaccccggagtacgacagtcaccgctttaggagcgttgtacaccagcagcgcttcgaagccatcaagggatggtcgtttctccgggagcgacgcgtccagctcagggacgacgagtatactgattttcaggaggaaatagggcgccggcggtgggcaccactggttactcctatggccaagtttgatccagaaatagtccttgaattttatgccaatgcttggccaacagaggagggcgtgcgtgacatgagatcctgngttangggtcagtggatcccgttcgatgccgacgctatca

SEQ ID NO: 31659 - DNA, 428 bp, Glycine max
  unsure at all n locations
agcttcaaaccatatcaacacaaaatctaggtgtccaaaacccctcaatttaatggatttcctaggtttgagaagtgaaattgagaatgaggtaaatttgaagcaaactctcacctcacacaagtccataacatcaatttaaacttgtccaaactggatttacacctaaaatttcaccgattcaaaatttgactcctcaacacccaaatttaccctagaaatggttctttattcactttggtcatttgtttttctctctagctcagcctaacctttctcataaatcctaaatgacatttcaaactaggattaactcattttaaccttcatttactacagaatccagatttaaccttctaactctcaaagcctcactctntntccactcacaacaccacattctctctttctaaccctaggttaactct

SEQ ID NO: 31660 - DNA, 407 bp, Glycine max
  unsure at all n locations
agcttcatatatttagtgaagagagatgaaggaacttgtggtctaaaagccaggatcttgggctgctgatgtaatttgattgatatccaatttaaccctcaattagttgttcctaattggcctgtgcgctataatgcctaagtgcctatacaagcttaaacaaaggatgttttatggtcttgatacatggatggtttatatttagtggtaagactttaagatgcactatttgataatgcaatggtctctactcttgagcacgatagcagctacctacctaagtatgatccacatattggtaattgtaaaattcanaatattatactaatcctctcattttatttgtcactcttgaaatatttctttatcataaactatgtgccagttagaatattatacaaatatta

SEQ ID NO: 31661 - DNA, 429 bp, Glycine max
  unsure at all n locations
cactcggacccgggatcttaagcactgagctcagctttttttatgccctgatcgactcgagtaagtatacataaattctagagcttcgttgttaattccgtgcgtctcgatatattatgtgcctgaatcggacctctgagctaaaagttatgaccatttgaatttctcgagagccttccgttgtcaatttcatgcgtctcgatatattatatgcctgaatcggacctccgagttaaaagttatgaccatttgaatntcttgagagcttccgttggtcaatttcgagcgtctcgatatattatgtgcctgaatcgaacctccgagtgactatgtatgaccattngaattgctcaacagcttccattggtcaatctggagcgtctcgatatattatgcgcctgaatcggacctccgagtaaaacgtatgac

SEQ ID NO: 31662 - DNA, 310 bp, Glycine max
agcttctcatatgtgtttgcacctaaatcggtcatccgagttagaagttatgaccatctgattttctcccgccgtttcttttctcaattccgagcgtctcgatatattatgcacctgaatctgacctccgagagacaagttatgactcatgcgaattgctcatgagcttccattgttcaatctcgagcgtgtcgatatattatgcgcctgaatcggacctccgacttaagagatatgaccttctcataactcgatagctcccgccgttcaatttctaacgtctcgacatattttgcgctcgaatcggaca

SEQ ID NO: 31663 - DNA, 309 bp, Glycine max
  unsure at all n locations
ttgcattgaattactgccttctcctttattatatctttttctgggcttcagtaatacttatctgctttataggagtcgatctccaagaagttgacccatttcctttaatatactaccagcttctattacattctctccttgttccaaaaacagtcaaaattactgacacatgttaagaggcagacaaaacttggtttataatgcgtgtcactcaatgctgggatctttcttgattacaatacttcacgttctgaataatatcttatatcatttctgaatatatgcgagattntattctttgaaatcaca

SEQ ID NO: 31664 - DNA, 388 bp, Glycine max
  unsure at all n locations
agctttctgtctcatgaggaatgccttgcgcttagatagcatgaaaaagcccttcgataatatgtatgtatgtaaatatgtagcatgaaatgccttgcaaaatgttgaataaaatgccttgcaaaatatgaatatatatagcaggaaaatgccttccataatatgaatatatatagcatgaagtgccttacaaaatgcttggatgggtagcgtaaaagtgtttttcaaaatatgtgtatttgtgagtacgtagcaaaagaagccttccaaaaaatgtgtatatatataggatgtagcatgaaaaggtttgtcaaanaatatgcacatggatatgtgtcgtacaatgcttctcacaaaattattatgtgtgcaaatgcgtatgtgtcat

SEQ ID NO: 31665 - DNA, 425 bp, Glycine max
  unsure at all n locations
agcttcatatagttagtgaagagagatgaaggaacttctggtctaaaagccaggatcttgggctgctgatgtaatttgattgatatccaatttaaccctcaattagttgttcctaattggcctgtgcgctataatgcctaagtgcctatacaagcttaaacaaaggatgttttatggtcttgatacatggatggtttatatttagtggtaagactttaagatgcactatttgataatgcaatggtctctactcttgagcacgatagcagctacctacctaagtatgatccacatattggtaattgtaaaattcanaatattatactaatcctctcattttatttgtcacttttgaaatatttctttatcataaactatntgccatntagaatattatnaaaatattaatcactttctcttaataa

SEQ ID NO: 31666 - DNA, 399 bp, Glycine max
  unsure at all n locations
atcttctgtataaagtgatgaggtacaagccctaaaggcaaagcttgaaagagcccgggtagtcaaagagaagttcaagtccatagccatcaaagtctgaagagagtatgatgaactaagggacgtcaatatggccaccgatgaagccttggaatgagaaaccaagaaggcccgaaaggaagaacacgaccaaaacaagttttgaagggctttatagggcagcaatagtgagctcaggctccgaagaggtgaaaggaatcatcacgggtcanaggcatgatcttgaagaacgagctanaggcttgccttangtcgaanagaaatttgtcccaacagttaagcaagactgaagggaatatgtgggccatcatcgatgagtgcaaagagaagctaaatcta

SEQ ID NO: 31667 - DNA, 422 bp, Glycine max
  unsure at all n locations
agctntgattgtttcgtggattaataatgatttgagcttctgccaaatggtcttgttgttgatttcgcttgatggttaaactttgatgcttgctttggactcttggaagaagattgagaaagctgaagtaggtcaaagatttctagaagtttctgttttggccgatgtacttccggcatgtttagctatattctaagttttcaaactttattttcatttcctttgatgttgatgtattgtctttttcaagctggaagtgttttgcggtggatattagagatacaaattagtttagttgttagttattagtttaaattgttacaatctagtttagcttattacaatttaatttaattagttacaaattagtttagttaattacaagtttagctatataagactcaatgtattcatgtaaaaat

SEQ ID NO: 31668 - DNA, 412 bp, Glycine max
  unsure at all n locations
tgttttgtttattatggggtacccatcacatgtggtactaggtggcggacgggcgatggtgcacaacaagttttccacatccacaaatcgcgcataaatccaccatcccctgttgcccacctccaactgagctcacgtactcccacgtagcccatatcctcgtttatctcaaccccgtgtccccatcaatccttccaagcttccccaacatccaggtaattcatcatccaaatcatcacaaactaaaaaatcaagcaaaatatggcaaatgcagaaaactctgccccatactcaaaccaaaatcacagctgtttctcacttanagaccgcagtaacatttccttcgttccaattggttaacacgatggattgactcgaacaatttactggaagtctctagtacataagtcta

SEQ ID NO: 31669 - DNA, 366 bp, Glycine max
ttgcttgttctttatgccccacagggaatcaacatcgcatgaagtgtcaaccatagggggtgaaaagaggtggaagccgatgccaacacagtggagttaaagaaaaaggaggcggcatcataggagcactcatggtcaccacaccgacactcagcaaggatgtagcgacggtgaacgaaggagacacaataggactagccaaagcagctggcgcatcaacttcagtagtaggagtggcctcctgaacaagcacaacaagaggaggtggaggagtaggagtaacaacaacaacaacagcgaaagcaaaagcctcaacggatcttgcaaacttgaagggtgacctgaatcaagcgtcaaccctacagc

SEQ ID NO: 31670 - DNA, 398 bp, Glycine max
  unsure at all n locations
agcttggaattgtatttgggcacctattttgaatctcctatgatgtacctacatataagaaacagtcccactctcccaattttacacaatcatattcatacatcattggggcatttcaccgagcacttggtgagcacatgtttggacataaattgcaagaggatggggacaatgtggcatgccccattgcttcagaatacagcataggcctaaggccttctcattcaaatcctcaattcaagaaaacaagcataaaaaaaaaccaaaactgccccacaaatacaagcacattctctcaatttggagcaccaaaagatgaagaanatataccaatgggaagctganaacatcaaggattgaatacttacttgttggagtggacaataacaccaaaaatg

SEQ ID NO: 31671 - DNA, 334 bp, Glycine max
agcttgccttgtccggtgtagcagtgatgatggcccgagttatgttgcggaacggttacgaacccggaatgggtttaggcaaagacaacggcggcataactagcctgataaatgccaaaggaaattgtgggaagtatgggttaggctataagcccactcaggcagatatcaagagaagcatcgcgggaaggaagagcggtagtcaaagctcgcggttgagacaagaaggtgaaggaagcccaccctgccacataagtaggagctttataagcgcaggtctgggggacgaatgtcaagtggtcgcgatatacgaagatgatgttccgagtacatt

SEQ ID NO: 31672 - DNA, 423 bp, Glycine max
  unsure at all n locations
agcttgagatcttactttttaaacttatttataaaaaatattattttttacttattaaatatatgttgaaagtatttgttatataatgttatattaaaggatgaaattaaaataaagagaaaaataaatagatatttgtacttgaaaatgatataatataatctttttaaaaatttattttattgaatatattttttctcttttatattattattattagttaaggttaaatcatttggataatatgtgagttgaattcttgacataaatcattcttaatcagattntatttatttttttctaatgaatcggagaattaacacaaaaataaataaataataataataataataataataataataataataataataataatattattattattattattattattattattattattattat

SEQ ID NO: 31673 - DNA, 427 bp, Glycine max
  unsure at all n locations
agcttgtgtttgttgatataataatttcctctgacctaatattacatagaaggaaaaaaatagagatggatattcaatatatagatagaagaaaagaaaacacaatcattttctactttctagtttttctaccaagctagtaaaatggaattgtttcaatccacatctttcatagaaacaaactaaatttgtcactcagtcaatagtaaagaggatacaaagtataatttaattgatgacattgtcatactgttagtccttcaaatgtattattattgttgatcacgcaaacttgttcatcaagtggttccacaacacctcgactatcatcatggagaatacgccttgagtagtaaacattgtgttaatactttgtttgcaataaaataatattgaattagcattaataaaagagagctngaatacc

SEQ ID NO: 31674 - DNA, 427 bp, Glycine max
  unsure at all n locations
agctnttattctctttnttactaaatgttagcaaaaaaatattgataaagatcacatgtatggtagtgttatatatatatatatatataccttaatcccaactaggttttcaccaaagcagctaaccttggtcaacccgcataccaaatagtattaaaaagtgaaaaatataagaagagtattacaaactaaatcaaatcaatgaaatctataactaggaagacaacatctatcttgaaataagaaaagaaggagtaagatcccaccaactaaaacccanagtaataagcccgtgctttgctaatttgtttgcacaagtgtagccttcacaatacacatgggagacaacaagattcatgctatgagcaagatgaacacaattcctctaatgtgtacttaactaccaaggaataacatcatcatgatc

SEQ ID NO: 31675 - DNA, 427 bp, Glycine max
  unsure at all n locations
agcnatacgttacactgaatcaattcatgcaaaggtgcatgttcaactataggagcacaaattcatccatcaagaacctagagatacaaatgggacaattagccaaacaaatggctaaaagacccactaacaactttagatccaacaccgagaaaaattccaaagagtagtgtaaggtaattttcactaggagggaaagtgctaagaacgaaaagagaattgaggaggatgtgcatgatgatgaacgagaaaagaaagaagagggagaaaaagatcagagcaatgaaagtggtgatgaggtctcaaccactaacaccaagaccaagagccagttagcttatgaggctagaagagaaatactctcaacctcatcataagagacatcgtaccctctcgtgccatcaaagaaggataacgaacactattt

SEQ ID NO: 31676 - DNA, 417 bp, Glycine max
gcttttttattattaaaaacaaaattgcttaatgctgaatgttcatgtatcttctttaattgaacaaagcataataaaggcaaggcagaggtattatgtggctctgataccaaatgtaaaattatacatatattgatctaaacatgcaaatcaatttaaatgacatatttatatcaaacagcggagattaaatatattacgagcgtacctccagccattgcaaattgaacgggaagcggcgaacacacgaacctgaaagacagttctgttcttccagacccttactcattctaaatagatggtgtattttttttctgaatagaggagtgagtttggtgatacaaaactgagagcaccacatcctatcctatttatagtgtctgatcatcacagagctttcaacttcttggtatgata

SEQ ID NO: 31677 - DNA, 413 bp, Glycine max
agcttgaatcatttctgtatgcattggataactgggcgacccatctggccttgaatcacacattcgcacctgtctcaagggtttgtggtttgtgctcctctgctgaccaccatacagacctttgaccttccatgcagcaacctgtagcaatcgaacagcctgaagcttatgctgcaaatatttacaatagacctgctcaacctcagcaacaaaatcaaccacagcacaacaattatgaccttcccagcaacagatacaaccctggatggaggaatcaccctaacctcagatggtacattcctgagcaacaacagcagccagctctttccttacataatgctgttggcccaagcagaccatacattcctacatcaatgcaacaacagcaactactctaataactagcaacaact

SEQ ID NO: 31678 - DNA, 320 bp, Glycine max
  unsure at all n locations
ccaccaattaagtggtgaacaacttaatttgtgtaggaaaaaaatctgtgtccaccactaanattcaagaatgtcaaacttctttntggctgtttccatatctctgttccacatttatgagttttgtctaatattcaagaatctcanacaccttgcttccattgcaaccttanaacatntacttanagacataagctgagccaaatttcttacctacaaatactatgaccaacttcatgatatgccactaaactntngatctacccatctgtcatcagtgttcctttcattccatccataatcctatcagtagaatcatc

SEQ ID NO: 31679 - DNA, 427 bp, Glycine max
  unsure at all n locations
agcttgtgtttgttgatataataatttcctctgacctaatattacatagaaggaaaaaaatagagatggatattcaatatatagatagaagaaaagaaaacacaatcattttctactttctagtttttctaccaagctagtaaaatggaattgtttcaatccacatctttcatagaaacaaactaaatttgtcactcagtcaatagtaaagaggatacaaagtataatttaattgatgacattgtcatactgttagtccttcaaatgtattattattgttgatcacgcaaacttgttcatcaagtggttccccaacacctcgactatcatcatggagaatacgccttgagtagtaaacattgtgttaatactntgtttgcaataaaataatattgaattagcattaataaaagagagcttgaatacc

SEQ ID NO: 31680 - DNA, 373 bp, Glycine max
ttgcttgctctaaatttacattgatgtttgtatttatgggaggaggttgtatgtcatttttgttttaagagtagtgtcccactggtaaaactaactttccaaatgtttgccttcgcaggaaatggccccgaggaagcttgcctcaaagaggtccaggaaggacaaggcagccgaaggagctagttccgctccggagtatgatagtcaccgctttaggagtgctgtacaccagcagcgcttcgaggccatcaagggatggtcgtttctccgggagcgacgcgtccagctcagggacgacgagtatactgatttccaggaggaaatatggcgccggcggtgggcatcactggttactcccatggccaagtttgat

SEQ ID NO: 31681 - DNA, 344 bp, Glycine max
  unsure at all n locations
gatcacatgaacggccgttccatctatatatatatatagtaccttaatccccactaggtgctctccaacgctgcttaccttggtcaacccgcataccaaatagtattatatagtgaataatataagatgagtatttcaaactaaatcaaatcaatgaaatctattactatgaatacaacatctatctttgaatacgaaataaacgagtaagatcccacccactaataccctaagtaataagcccgtgctttgcttatttggttgcacaagtgtagccttcaccattcacatgggagacaaccagattcatgctctgatcaagatgaacactattnctcttatgt

SEQ ID NO: 31682 - DNA, 104 bp, Glycine max
  unsure at all n locations
accctgtataacgggacagcacacgttctcaactgngttccctattcccacatgcaccaaccctccaagcacatccaagcaaagccccaattttagggcatcaa

SEQ ID NO: 31683 - DNA, 357 bp, Glycine max
agcttgagatgaggaagtgttgaagggtgaaacttcctgcttttattgttgaccacagagtggtacctggagatatgtcgcgggggtcaagagaccttggggacgtcaggtggggtgctattgcccaaaaccaagcttgaccaatcccgacccaacccgggcatagtcggtcagtgagaacctgtgatgtacctaagcaagcgagctcctggcagtcaacagataaaaggaaaacaagaccacaaagcaaggaggcttgtggtggctggccagctgtgaattttgtgtaatatgtggattgtggcctctggtaatcgattaccaagggtgggtaatcgattacaaggcttaaaaatg

SEQ ID NO: 31684 - DNA, 360 bp, Glycine max
gcatatagtacatgtcagctcatcttctggacctccggtacctgcctctgttcctccagattcttgtttaacctgatagaacattaaataaagaaactaaaaaccgttcccattccaagaataagaaagtagggaagccatcaagtgggggcaatttctgcccagatttataaaaaaaagagtataaaatagtcactttatttaattacacaaggacaccattatcatcatgcattaaaagaatcatatatatttgttttcttcaaaagcacatcaatgaagaggacatcacgatcacataagggctaattaccagatatttttcaacctatatcccaggggattgcctataatacttat

SEQ ID NO: 31685 - DNA, 383 bp, Glycine max
  unsure at all n locations
agctntggttcagtagttaaccaagtttcacatcccacaacttctccccgtagaataaaacataaacacacacacaatggaagtacctaaagtttaacaaaagccaaccacaaattattaatttgatcaaatgaaagaattcaataaaagcattgcagaatttttaaaatcttttgcattctcattctcctgcgacagaatatgcagaaaaatgatttggttgggcaagcagtgtgtaacaccctgaaatgttattaattataattcgatgcttgattgtgtttagcttgttgtttgaatatatgtttgactntaatggtttgaaatatgactagaattagtcatgtgtgaatttcttaatgtggatgtggacttatgtggag

SEQ ID NO: 31686 - DNA, 264 bp, Glycine max
  unsure at all n locations
agctntgtctctactaaaaaaaaacatatgggtccgtcactgcaacaaatggatggcttaaaacatagaaaccaccaaaacaagttgtttaagaaaccacgcaacggaagcatagcagaacacgagtgatataccaagtgaaaaccaattcaaatgaatttacgaagctaacacttgaatctatcaaaagcctccaataaactaaatcgaaacgcgaactccaaacaacatcaaaaagcaaaaaaccttcagagactagattct

SEQ ID NO: 31687 - DNA, 406 bp, Glycine max
  unsure at all n locations
agctttcanattaagttgcctaatgcctaaaatgttttttctgatggtagtggtcctagatgcagggaagaatttctccaagaacaccttcttaaggtcatcccaactgaaaatggacctgcgagcaaggtagtatagccaatcttttgccactccctccagagaatgaggaaaagcctttagaaagatatgatcttcttggacatcagggggcttcattgtggaacaaacaatatggaaccccttaagatgcttatgaggatcttcacctgcaagaccatgaaacttaggcaacagatgtattagtccagtcttgagaacatatggaacacccttatcangatattgaatgcacaagctctcacaagtganatcaggtgcagccatctccctaagagtcctctca

SEQ ID NO: 31688 - DNA, 421 bp, Glycine max
  unsure at all n locations
agcttctatataagctgaaccattntatcaataaagacaagttgagttttattcagaaaattagagtttatctcttttatcttagcgagagtgattctcctaaattcttgagtgattcaagaacaccttggctgtatcaaaggactttcacaacctttgtgtgttgccctcgctggaaagagtgattctttccttcctttcatcatcacccttgttctttcaaaccacaattccagaaaatccacctctgcccagaattatctcgtggccataactccaattntaagcactcaaattaagtgattcttgagcctaaattgaatttcaaaacgagacctttcacctcgttntggaatcacctcattnggagccctgtagcttcagttattgccatttctatatttctgtccagccaccactt

SEQ ID NO: 31689 - DNA, 393 bp, Glycine max
agcttcattctgccatcatattcattgatgaagtagacagttttttgggtcagcgtcgtggaacagatcacgaggctatgttaaacatgaaaactgaattcatggctctgtgggatggatttacaacagatcgtaagtttaacagttatcatattttattttgttgcataaatattgaaaataagttgcaaataagataatgacaattttgatagagatttagttggtaacataatgttctcaatttatttatatttgagtagatttgttgattggggtgacttattgtgtgtgtagagaatgctcaagttatggttcttgcagcaactaatcgtccttcagaacttgatgaagcaatacttcggcgtcttcctcaagcctttgaaattggaa

SEQ ID NO: 31690 - DNA, 428 bp, Glycine max
  unsure at all n locations
agctntacttcttatgccactctactccaaattcttgaaggatatgttaacaaggaaacataagtatattcaccaggaaaacatcgtagtggaaggaaattgtagtgctgtgattcaatagatccttccacccaagcataaagaccctgngagtgtaactattccttattcaattggagaagtcactgtgggaaaggctcttattgacctgngagccaacattaatttaatgccactctccatgtgtagaaggttgggagagttggagatcatgcccactangatgactntacaacttgttgatcgctccattaccagaccatatggagtaattgaagatgtgctggtcagagtgaaacattntatcttcccggcagactntgtagtaatggatatctgtgaagatactgacattcctgtaatattgg

SEQ ID NO: 31691 - DNA, 392 bp, Glycine max
  unsure at all n locations
accacnacagagaaggagcgcaccttgaagcttcaccacctcatacaataatgtgttccacgaagtcactaccacactctaccttgtgctaagattctcacatgaccgctcatttatctctatatatgacactctctaccgcatcaggtgcgcatacaccatctctcatggaccaactatggctaaaaagctcaaacatctcttcactgccagagagcgcctctgacgtttcacagcctcctggcaatttgtaacttcatcgcgctcgtcttggaatgaagaacatgagatacataggaggaacgccgtggacatctacagatagnaaacacgtcactcgatatacttttcaatgagaggagagcgcgtattattaaaggtaactgttgacg

SEQ ID NO: 31692 - DNA, 421 bp, Glycine max
agcttatatttattgtagggagaataaaacaatccaaaatcaattgtacctttcaagtaacgaagaattctttttgcggcttttagatgaggagaggtaggagcctccataaagcgacacacaactcccaccgcatatagaatatcgggccttgtattggttagataccttaaactccccacaagactcttgaagatcgtgaagtctaccttctctccttcatcaaactttgataacttcaagccaccttccataggtgtgttcacgggattgcaatcaagcatattaaattacttcaacacttcttttgtgtacctttcttgtgagacaaagataccattctccgttttcttcacttccattcacaagtaatatgacatgagtcccatatctgtcatatcacattcacgagacatggact

SEQ ID NO: 31693 - DNA, 425 bp, Glycine max
  unsure at all n locations
agcttgccgtccagctcgcccaggcgagcaaggttgcttcctccagaaggaacggcccaagtgggcctggttgctatttacacccccatttttactaaatgcaccccctttctatttttttgtaattctttttccgtaacgttacgaaactttacgaattccgtaacgatacttattttccttctgcaaggttatgaatccttacggattatgtatttactcttttttagctttcgaagaagttacggaaacccccggattgcgcaaaaacacctcttttcgacttccgccacattacggaatttcacggatcgcgcaagcctgcttccttttaatttctgagacgtctcaggacttcatttactgtgcaacanaggatgccaagtatctcanagcggctaaccaaaggttacatgtcatcaagt

SEQ ID NO: 31694 - DNA, 418 bp, Glycine max
  unsure at all n locations
agcttattctatattactattattggggtatatgtaataacatagcccaaagagtctgcacaagtaaaactaaacggtagttaaccaatttttcgacgaatattaattatcaaaatgaacagtacttcatatctataatataataaaaaaaacaataaataacattaatagtgtgtttcagctttatatcatttcctaactaaaaaagaagcattaggatatctttgagctttaaatttggtggcattagttccgatggttaaatggcaattgtttaatttaaggggcgtgtctagttgaagagtcagtgtgtcaaataatggatgatttgatgaatgaccagatgtactcgagtgcatgacaagatgtgaatgggccatatattgcttgagcagcaacagcaagacannatagtctc

SEQ ID NO: 31695 - DNA, 488 bp, Glycine max
  unsure at all n locations
ggccctgattgtgcttggtcatttgcaactcatctcgtacccggcatcctctagagtcacctgcntgcatgcangcttgtatctattaatttttngttgnnattgtgaatttacgcatgcaatcttaattctcaacacactgtntggatgagtcttccaaggattgtgttgccttctctaactctccttccttttccagtgataaggtaaagctacaaaattgagtctcccaatttttgatataagttgtgtaagaccatctntaattcgaacaatgtggcttaaaggtgtaaatgcacaatccttccaagcgagcaactcagaggtgtaacgccatcttatgaattcgtatgagcatcttcaatganaatggaagacttgaacgacagtggttggcttgctctcattgttctggaatagatanggatctatatatgncacactgatgaaggatgaacaaactcattatgcatccangtaaacttgat

SEQ ID NO: 31696 - DNA, 426 bp, Glycine max
  unsure at all n locations
agctttatattntgttcttcgtattcttaatagagtcccttataaaaaaaaaatttaaaaaaaaatctttataagctatggagaaaaagagaaccaaatctgaaatatcttaaagtgtgggggtgtctagtaaaggtcaatatccctattaataagaaaagaaaaattgaaaaaaaatgttaattgtattttgttggatattttttacataatactacttatagattcttagttgttaattcagaagtgactaaaatttataatgttactattatgtaatctagagatatcactttctttgaaaatctttttccttanaaaagaaattgttaaatctttatatggtttgaaacaagccccanagcaatgacacacaagtttgatcaagttattctttcgtatgattntcanattaatgatagtgat

SEQ ID NO: 31697 - DNA, 413 bp, Glycine max
  unsure at all n locations
agcttacctttgtagttgcttgtagccgtatatctttagttgagacaaaagacaaagaatgtttataaagaaaatgaatattcaataagctttaatctgaaggatatagccaaatgggcagaaattgattattcacagcatactctagctagcatgatttttaaatgggtatgattcataatcattcaaacacaatgtagatagaaccaacaaaagtgtttcacgatctgtgaattttgtatacagccaacaacagctgctagaaatctctgtctgtcctagtattaggcctcgccagattatttgtctgatggctaatatttaccagagccagcttgatggctntaaatcaccccttttcacttgcgaatatttatttggcttctttcatataattaatgtgcacatattat

SEQ ID NO: 31698 - DNA, 411 bp, Glycine max
  unsure at all n locations
agctntntgactcctgattctttggaacttgcttaactcttgattctttggcatcatcaaaataatcttggaagttattacttccacataattataataataaaccataaagaaaaaagtaacatcaagaatcaacaatgtcaaaagtgtttaaacaggggaatcggtgagagcaacaacttctctagatgacgaatcagaaagattaggaattcctccaattggggaaacaagggggtcagctatttctgtagctggtgaatcaggaggagtagctgcttcatctgatgatgcgtcagaaatgacaatcagaggaggagatggnggaactgcttcaagctcaagcgaagaaggtggattcaccactagagattgtgggttagctggctctgaattgacctgcacaagtgt

SEQ ID NO: 31699 - DNA, 414 bp, Glycine max
ttcttaacttgtaatatagcgtgattttcacgtgaatgacaatctatcttcatgaacctccataaagttaataaattccatgatagaacaagaacaaataaataagcacaagtagaggaacattattctatggacattcatttcattaatacaatgtattggactggatccctaacattgtcatatattttccacaaatcggataattttgtcaaatatttcttcatgcgagtgcacgttaaggtcataaagctctgatgaaatattcaattcacttgaacttgttgaaacaccattaatttcaaagaaccaaggttcagttgctttcatgatcagaacttgctacacaccgtatagttattggtcattgctcagcaagtgctgcactcctgcccaatcatgcctcggtattct

SEQ ID NO: 31700 - DNA, 424 bp, Glycine max
  unsure at all n locations
agctntgatggactaattntgaaacaaaaagaatctttcagaaactaatttgattggcaaaacttttgaacggttaatgtggtaacgtgtataactntggaggatcaaattgagggtcttctcttttaaacatgaatgtttggtatatccacatttccatcagtgtgatgtgtaagtctaaccaaaagaaatttcccaacagtctaataaaagtggaaaccaccaccaataattgcaaatagttctctcttatcttttgctttcttttccatccccgtaacacaatatattaatgaaacaaaaacaagaaaatccattgcagccattattaagcacttgaaaaagtcacaaacctgaaccataattgacgcanaatccanatcagtttctccttctaatattgtggaaagttcacggtagactc

SEQ ID NO: 31701 - DNA, 393 bp, Glycine max
  unsure at all n locations
agcttgttttaagcggaagaaaaggaaaccgaaagtgaagagatgaagatgaaagcaagcaaaacaagaaatgaattgaaagcctcgggttcgagcacttacccattgaagaccaaagagcggatgaagaacgacgaanaatcttcatggaatcacccacgaaaatgtcttagaagcgttatggaggcacctcggcttgtattttcttcacagaaacacgttttttcatccaaaacaattcanatgcataacataggggtcaggacccttttactacacctctntgcccttatttatagccaaaacagggaggagcttgccgcccagctcgcccaggcgtgcctaggctttcttaggaagtttcctgatgcaccctcaaaattactaagttca

SEQ ID NO: 31702 - DNA, 424 bp, Glycine max
  unsure at all n locations
agcttgatgtatatactttttacaaccctatctctcaagtgtcatagcaactagcccttaggtcttcatgttcggtgtatgccttaataaacttataaatttttcagctaaccattctgtagtcacctaccattttctagcagtcctaaagcatatgtattcatctatgaaagacaacctaccaatgagtcttctaattcaacttgctaacccttaacttaaaacgacaccctagcatgaacttcaccacatatctcttcaagtcattttgcacaactttcaaatttttcttattgaccattgcaattgttttcacaacttctttgatatcttttttggtgttaaaaatcagcccactctcaatatgaatatccacatcatccgcaggtattctaaacctagaatatttctntgtctcattctc

SEQ ID NO: 31703 - DNA, 385 bp, Glycine max
  unsure at all n locations
agctttggttaattttatttactgganaaagctatggggtgcttgttttgggagagtactgcaccaatgctagatccttangcatttgtttccatggtgaaaggtttagagaaattgagtatgcatagcactggggctgagctaactgcctcttgtaacgcgtgaaaggctagcatggcctacggtgaccacacaaggtgttccttggtcaagagatgaatcacaggggttgctatggtagcatattctctgatgaaacatctatcataacctgtgagacccatatatccccacagggttctaaaggaggtgggtcgcggccattgatgaatggcaagtatcttgtcacgaacgggatgaacaccgcgaacggataccacatgac

SEQ ID NO: 31704 - DNA, 417 bp, Glycine max
  unsure at all n locations
agcttgtgtctatctttctattgtcgaagctgaatacatagctgcaagaagttgttgtgctcaaagtctttggatgaagcaacaatgatgtaagctccattggagcttgtaggcctaggatcttcttcatcaatggattcctttgcttcttggaagatgaatggcagcggaatggagaaaggaagagagagaggagacgccacttcaaggagaagatgagtctagaagaagctcaccaccataggaggccatggataagagcttggaggaagaaggagatgaatgaagggagagggagagaagagcacganattntgtgctctanatgagctttgagatctgaagtttaatattcanatgatcaaagttganaaanatgcacacacatgacctctatntatagcctaagtgtcacac

SEQ ID NO: 31705 - DNA, 403 bp, Glycine max
agcttgctacttctggaagctcctaatatctcccacactttttggggtgggccattcttggatggccttgattttctcagggtccacttggaccccatttctaccaactacaaaacctaagaagactatattatctacacaaaaggtacacttctctatatttgcatagagggtgtttttcctaaggactgaaagaacttgcctaagatgtcctaagtgatcagctaggcttctactgtacactaaaatatcatcaaaataaacaactacaaatctacctatgacatcccttaagacatgatgcataagcctcataaaggtgcttggtgcattagtgagcccaaaaggcatcactagtcattcatacaaaccaaacttggtcttgagagcgatttacactcat

SEQ ID NO: 31706 - DNA, 420 bp, Glycine max
  unsure at all n locations
agcttgtatcttgaaaacaattattttgttgtgcggtggattagcttcatatactactgcggttttcaaattgattgcaattaccattgaactgaccaataggatatacaaattgatatatggtccaaagctttaaattttattattatttaaatgcacatcagacttatttatggcaaatctttaatcctaaagctgttgaggtttatacccatacacagtgtaacatgttcatgtttgaaacaatgaggatctgccttctatgtaatcttaagaatgttttgattgatctttagaaatgtcatctattgtagattgtagatgctgccttttctttnttctatctctctttttttcgtgttttgtacttccactgccttgtacccttgctacttatntcaatgggttttgtacgactct

SEQ ID NO: 31707 - DNA, 342 bp, Glycine max
agcttctctgaactaatggatcaccatgtctaatgatgattgctgaacaatgaacacccggcgattgtatatttttaatcaaattatacaactcttcgcgaataaactctccaggattacgtagataagaaggcgatggaagagctaaacggtactcaatcattgaaccaacttcttggagggtctcagatagcaaagctagcatctcataatctccatcttcataaatgactactactctatgccaaccataagcatgtactacatctgcaacacattttgcatatgcagtaccatatgtggccattcttaccgaaaaatgccagcgagttgtcatcaatg

SEQ ID NO: 31708 - DNA, 381 bp, Glycine max
  unsure at all n locations
aagcttctcaaggaggtgagcttactttttatatgggtgtgtttagctaagctctagcttttcaaggaagttttcgcaaacaagcttctcaacgatgttttctcatgaaagcttctcaaggaaactatctactctataaatacaagcatgtgtaacacatgttgtaactttcttgaatgaaagtcttatgagatacaattcacagttccacttntttttccttttattccttcatctcgtgctcccgccttgtatctttcttttcctccattaaagtatcctcttcaagcttcttatccaaagcaattgttggcggtgaagctccttcttccttggctgattccctatggatggtgcccccctttcctttctcttttcttc

SEQ ID NO: 31709 - DNA, 570 bp, Glycine max
  unsure at all n locations
cccgccgcctctcaaagatgtgtaatgaacatgcaacgcgcgaccaccatctcctcctcncagancccccgcgggcggcttgganctgtgttgatcctcttacanacatagacactctcaatctctcaactacgcagcatacacgaaggcgcgaccatatcacctttccatttctcgccacctgagcaactcacatctatcatgtgcgtgacagcaattgaactgcccatggatttattatggggcagggcacacttcggccatcgctcctgatcagggtcgacagacgcgggacgacttgactttcatgtgacgtcaccgccaacctatccatccacatagcggcatnttgatctgccccccccatccccccctcatgcttatttgtaggatacacttgtgcaaaagcaccactagccttcgcctatcggccatcgactggtcaactccctcatcgaacttccggagatcactaccacgccttgcgccgcggatgtcagagtgaactcaactcactatgaacaccggaaagcaacaagggtgttctgcacaaccaaagcctcaggcccg

SEQ ID NO: 31710 - DNA, 383 bp, Glycine max
agcttgtttgatgggggatggctgacgtttcaagaggacagtctgaatgtgaagactaatccactcgccaatcatggaggctcagtggttaatgcaatggaagagtgggagccagaggctgaagtagatgggagacgtgttaacctctagaaggttcattttggaagcactgtgcgaagctggtatgattcgccatgatggtgacaagggagattcctgtttaatgcatctggaggcatcacatgatgtggagacgtgctcaatggacgaatagttgctacaggggatgatggataacggccaaattgaagtctgcagtgcgaaaaaacggagatggatatgtgtatgcagtcagatgataaaaacccaagtaagcccaagtc

SEQ ID NO: 31711 - DNA, 389 bp, Glycine max
agcttcaaaccacaacaacacaaaatcttggtatccaaaacccctcaatttaatggattttcaaggtttgagaagtgaaattgagaatggggtaaatttggagtaaaacctcacctcacacaagtctataacatcaatttaaacttgctcaactggatttacacctaatatttcaccgaatcaaaatttgactcctcaacacccaattttaccctagaaatggctctttgttcactttggccatttgtttttctctcttgcacagcccaaactttctcataagtcctaaatgacatttcaaactaggattaactccctttaacctccaaataccactaaatccagatctggccttccaactctcatagtctcactctgtttgcactcac

SEQ ID NO: 31712 - DNA, 338 bp, Glycine max
gtgagccaaaatcctgactcaccatagaccttgactccaggtgagaatgtcaatccttaccctcggaagcaaaaaagaatagaagggaaatttccaatctaaaaataaaaaatagagaaggaaaattcccaatgaaagagaaaaaagaaaagacaggaaattcccaatcaaagaatgggagaaagcacaaagacaagaaagaacattcccaaccaaagaatgggaaaagtaactaacacaacacaacagctctcggtcaaagaaactagaagaaatgtgcagaaaggtcttttgaccagacaatatctgaacaatacagaattgtcaccaaatgaaca

SEQ ID NO: 31713 - DNA, 380 bp, Glycine max
agctttggaaagtgttgttttcaccttctcgctaagccaatctgatggcttagcgagcgtctgctaagtgcaacattcctgggctaagcgcaaggaagaatccataagaagatgagttgtacaagttcgctaagtgcaccgcttcatcttactaagcgcaccacttcagttcatctgctaagcgagaaaagcgggctaagccaaaaatcactaacgtgcgctaagcggtccataagtgcgctaagcacacgagcacaaacaaggccacctagttaagcctgaaatcagattttgtgaagggagtttggactaggattcagagctttgcatgtctagggtttctagagagagaaagtccaagttctagagagttttgagag

SEQ ID NO: 31714 - DNA, 454 bp, Glycine max
  unsure at all n locations
ntcatctagccaagattatacaaaggtgctacaaaagaacctaacgattcctaattatatgggccatcaaatctatcatgtgctgacagtaattgattagcccatggatctcctcgggggcagtacacacttccgccatggcttttgctttggctaacagacgcgggaggtcttgactttcatttaaggtcaaggcgaacctatccatccacatagtcgcttcttgatctacgcatccatcccctccctcttgcttctttttcggcatacacttgtgcaaaatccaccactagctattgttcatgggccatggactgcgtcaattcttcattgtattgccccatgatagctaccatgctttgctccagggctctcaagtgttgagccaaactccttcttgacctcgtgcaagcaactaactcttcttttaatatcatgccatgcacccgcgacc

SEQ ID NO: 31715 - DNA, 382 bp, Glycine max
agctttgagcaaattgaaatgacaataactttatacacggatgtccggttgagtcccgtaatatatcgagacgctcaaaatttagatccgaagctctgagaaaattgaattgacaataactttatacacggatgtccggttgagtcccgtaatatatcgagacgctccaaattgaaaacggaaactcttagaaaattcaaacgacaataactttttactcggatgcccgacagagtgtcgtaatatatcgagagacgctccatattgactatgaacgctcgtatcatatgtaaacgacaataactttatactcagatgtctgatagagtcccgtaatatatcgagacgctcaaattttagatccgaagctctgagaaaattg

SEQ ID NO: 31716 - DNA, 405 bp, Glycine max
  unsure at all n locations
tctagtctctattntgagcgtctcgatatattacccgattcaatcggacatccgagtaaaaagttattgtcgtttgaattccctacgagcttcccttttcaatttggagcgtcttgatctattacaggactcaaccggacatccgtgtataaagttattgtcatttcaattttctcagagcttcggatctaaattttgagcgtctcgatatattacgggactcctcacacatccgctaaaaagttaatgtcttttgaatttgatacgagcttncgttttcaatttggagcatctctcgataaattacgacactctgtcgggcatccaagtaaaaagttattggcgttcgaattctctaagagtttccgttctcaatttggagcgtctcgatatattacgggactc

SEQ ID NO: 31717 - DNA, 353 bp, Glycine max
agcttggcatagcgtgtgaagagatggcgcttagtgcaaggtttacgcttaacggataagcaatctgaaaatttttctaagtcattttctgcttatctcttcacacataatttaaaaaccatttttgttcattactaaacaagctgaaattaatcacaatcacaagcaagatgtcctaactacatgcaagaaataaaaatgaagatagagaagggaaagaaaaactgggttgcctcccagtaagcgcttctttaacgtcactagcttgacgcatcatcctgttatccaggatccaataatgttcccacttcaaggaccttcttctcaggacttctatcctctatcacatgaac

SEQ ID NO: 31718 - DNA, 445 bp, Glycine max
  unsure at all n locations
cttgtgacaacttcatgtgctactcaatgttctgaataactttttactacttatcttgattgactcttttcttgagtcttgagtcttgatcttgattattcttgattcttgattcttgaaacttgaaacttgattcttgaattgttcttgactcaatcttgaagtcattctcttgngctttttgtcatcatctgtgttatcatcaaaacaccttgaatcaatcgcgacctatcatctgaatcaatcttgattcatgactcaatcttgattcaatcatgaagcttgcttctgcacttatgcgtcatgtcttagaggatctcataggtagatttgtagttgtctattttgatgatattttagtgtacagtacgagcctagatgatcacttacgacatntcatgccagttctttcagtccttangaaaaacactctctatgcaaatat

SEQ ID NO: 31719 - DNA, 399 bp, Glycine max
agcttcaagcaaggcttcatggtgaatgtgattcaaaggtgtttcgatgataacaatgatgacaacaaaagatgatgactaaggtgatgaacaaaaagctcaaagatcaaagaaaaacttaagtgaatcaaagaacatctcaagtgaatcaagaataaagattcaagattcaaaatctcaagaatcaagatcaagattcaagactcaagatttaagaatgaagaaaagactcaatcaagataagtattaaaaagttttttcaaaactctgaatagcacatgagtttttgacaaaacctttaccaaagagtttttactctctggtaattgattaccatattggtgtaatcgattaccagtatcaaaatgagtttgaaaaagttttcaaactgagtttaca

SEQ ID NO: 31720 - DNA, 428 bp, Glycine max
gctactgatgtggcagggcgggcttacttcactttcttgtctgcaacgctagctctgaccactgatcttccttcccgcgatgcttctattcatgtccgtctgagtgggcttatagcctaaaccatactttccacgatttgcttgggtatttatcacgctagttatgccgccgttgtctttgcctaaacccatcccgggttcataaccgttccccaacataactcgggccatgactccgctgcatcgacagacaatgctgcccaaagagggagtccacggacgaaatgctgaccacctcagaagactggaaagcggcttctaacgattcttgtgcggcttccacataacgcatggaggatgggcagcttaccaagatatctatctcgcctgacacgatgaccaagtgctcctccactacgaatttcaac

SEQ ID NO: 31721 - DNA, 398 bp, Glycine max
  unsure at all n locations
agcttgtacatcagtatagacaactatgctgcattatatatattctgatatcactatcctggattatacacaactatgctggacttcgagtagctagatttggttggacttggacttctctttatttgttacctaattatagacaactatcactatcctactctcttggtacacaatacaagttgttaccaaaagaaaaagaaaaatggttgttagggagtataattgttttccaatggtagtcattatatgccctttgaatgccaatactaaaagcaaagtcatgacattgggcttatactttttacagaggaacctaaacatggttggcatcatggtgttgccatagtttttgccattntactactggttgcagganattcagtagcaaacttttg

SEQ ID NO: 31722 - DNA, 453 bp, Glycine max
ctaccagacagatcagccaaaagtgctcgagctggcccctacaaattaaattgaagaaataaaggggaatttagttttcagctgcacaactgaatcagtatgaagttaatataacagaagcacatgtcaattactttaacaagcttacctgcactgtgttgttagcaaggtccagcatccagaacccaagaataaatacaagagcagcccttgttcgggtccctttaaatgttcttaatttcagacagaatttcattaatgtctaactaaggtcatcatatctgtgaattttaaaaagacagaaataaaatgagtaacgaaataacgaaaggatgagataagaaacctgcaatgctcgtgtgtatcacctaatacatatccaatgtctgcagaacatccgattaatatcacctacattacaagacttgacttaccatatgtgtaatgtagcat

SEQ ID NO: 31723 - DNA, 375 bp, Glycine max
agcttgtgatctattacacaagtcttgtaatcgattaccagaggagattttcagaaaataatttccaagagtcacatctattcaaatggtttatgaatggccatcaaaggtgacttggaaacacgaatttaaagagagttttcattgcccacaaagtttatcctctcaaaagattaagagtttttctgaactgaactgtcttatcctctcaaaaagattccttggtcaaccacttgcatattcaataaggaattttgattggtcttcattgtacaatctatcccttttaagagagatttcttcttctcttcttcttacttctgaaaagggattaagagactgagagtctcttattgtagaggattcttgaacaca

SEQ ID NO: 31724 - DNA, 458 bp, Glycine max
  unsure at all n locations
tgtgcaaatcaagtcactcccgcattntatctctagcatgcattgtatgttggtctcgtcctttgtcacgggaagccggaaggtccatatcaccttcttaattgtacatatggggcactgcgcccccaaatgcgcgagtaagaagagataattttccgggctctcgtgtccgtaaaatgcattcatatcatgcaccgcataaacatctcttcagcatcataatgaacatatcgtcctgcatttgtcgttatcacattcccattttgcatgagtcattgcatcatcatatgcgttcaacatactttttgtttgctcatacataatccttgtattttcctctacaaaacaaaaacaaaaaaaagggaagtacaaaaattcacgcagcattcttagttgcatatattccgtaccatgagccaaccatgttgggatcataaacccatttcacaacacaacaa

SEQ ID NO: 31725 - DNA, 393 bp, Glycine max
agcttatgcccactcagtggaggacaattgctctaatttttttgccatacccctatttttcaatacaggtaaaagaattgttgtaggtacatgaggcaatttgtggtagtaaattgaagtgaatgaagtctcagaaaattcgtattgagtcggatttcttagaaaacaaataattgaataacaagaactcgtatatcatatggctattattggattcctaaaaaaataaaaaaatatatagagataaaagcttctcggaataatttatttaaatttataatcacggtatatttgatttacgtaaaagttgaaatatataaattagaaaatataattacagagagaatgtacgaatttaactcaagatatttaatgtgtattttttcatttata

SEQ ID NO: 31726 - DNA, 456 bp, Glycine max
ctaacaacttccaattgactatcttcattctagaaaaacaacttttgataaactatcgaagtcacaacaccaattccatggatccattccttgcctaaaaaattattgaaactggcttgtgaaggaataaccacaaagatagttggcctcctcaaacttccaacaaaaacttctagtgctatcatcccatcaattgctccttatacttagtaaggaggatcaaaatcgttctagcatatcttctaaaaatcatcaaaaccagatttaaaagtatcaatcaccatttcttctacagtttcatgcattggttttgagtgattctttagaatttgaatccttgcttttgttgattgctctgttgattctccaaagccaacttcctcaccctttggttacgcctccattgagttttgttcatgtttttgaaccttgaagcactatagtaagccatccttg

SEQ ID NO: 31727 - DNA, 399 bp, Glycine max
tcctctatactctagacggcagcttgcagccttcagtcttgattcctgtggacgacctggaggctgtgagagctatattgggtgtcgcattgcctacccatccggatatgcttgagcactgatactctgccatcgaatataaaacatctgcggagtgctaaagacagaatgacttaccaccaaaagtatgacatcaaacgactgtctccttaggatgaaagtgatactccatttttgcttatgatgcggaatataccaaggaagttcacgtatcttgagaagatattcacctcaatacttgattaaggattgattgattctagaggtgggcaaaatcggtgctgaattggttaatgtaagagtcgtgaccaatgtcctaatatactagctcacagatct

SEQ ID NO: 31728 - DNA, 514 bp, Glycine max
  unsure at all n locations
acggtccccccggcgccncccgcttttgaccctttagttagnatccganctccttgcacgatacacctcgacaacttcagtctggagctggataagtgctctggcatacttttgttcagattattgatcaaactagatgggcgtgtattcttggcgattacctggcgcgccatagtnatctaccatttgttcatatgctgtcactgatgtcggcatctaattataccttttggatgtggaaagctgttataagtcgtaaacctatatccacacaccgccattatgttaatcctactttgatcatacgccctcccgctccctgacctcgcatggaatgacatttatacgaacgtgtgtcctcgaccctagtatggtggatagagacatgtcctttcggatgctgcattgatcacattcttgcttaaagcgcatgtcacttgttaccattagtatttagtacctcatagaacccctccgtagtgcctatagtaccacttgaccctagagacttacn

SEQ ID NO: 31729 - DNA, 391 bp, Glycine max
agcttggaaggaaacaccactatcgttgtgaacaatggatccatttggaaaaataaaacctaatgtggagttcacaactgtctgactgcttgtctctcccaagaatgccatagttttttgtaagacttgggttgatactgaaacttgtgctttcttacaaggttaggttgtgccatatatatagatgagttttaatatcagtgttgtattttttaaagattgaaaatacgtatgcacatgctttctgtatgtgttgtcaactacacgaatgacatgacatgctttagcttgcatcagatttgcatatgtagtcatgctgtgtacggtcctttcacgcgttttatgttaatgcagacaacaatttatcatacacgattttccacaatgtgta

SEQ ID NO: 31730 - DNA, 443 bp, Glycine max
  unsure at all n locations
taaagataaactaagaataatgatagaatatcttattttatattctgataatatattctatcaaatataaactgattagttaggctaacaatactgataaaatatcttatcatatataaattctatcacactcccgcagtcgaagcgagaggtcgatgaacacgaacactatgactgtctcgaactggacccgggaccatggccactaattttttatttttttcagaaccttgtaatatcagacnggcttccccgttgttgttggtctgaatgagaganatttgagtcataaatggattatgaggtagccaccattgccgatccggcttcctcaagtatgagcatcaaccgagcctgataaaacgaaggttgatgatcactctgctgaattaacatccttacacctcgatatgcacttgtgagacccgaaacaagttgaatga

SEQ ID NO: 31731 - DNA, 389 bp, Glycine max
agcttagataccaccagcatcaaggaattagggcggttgatggaagctctccaaatgcaagctttcggcaagacttatggaaagatcttagaattgaccttagcagaggtatccatagaagccattgcatcactcacccaatactacgaccagcctttgagatgcttcacattcggagacttccaattagtaccaaccattgaagaatttgaggaaattctaggatgtcctctcgggggaagaaaaccatatctttcatccgggtgtctcccctctttgagcagaattgcaactgtggtcaaggattcagcaagaggtttggacagcataaaacagactcggaacggcatggcgggcctaccacggaggtacctagaagacaaggcgag

SEQ ID NO: 31732 - DNA, 440 bp, Glycine max
  unsure at all n locations
tgagagactgttggcatgttcggcacttccccatgccatatccattntgtataattcggaacgatcccctcacatataagatgagatcttatgtcatttactacttggcgtctcccgtttccacatttgacacatggatagaaaaatttcccccgcaaagatggtgcattacatttagtaaattataggaattcttcaacaccattctcatattctttagttatacattcgctttcatccagtttgatccatgtttcccctttgatgtgacacttgattaagttatctgacatgcatganaacctcactttnttaattaaaggtgtggccctatcccattcaggaagacattgtttagagtagatttataataattatattttgttaattctgactaaatttcgatagcaattcgcattggtctccaagtacactacatg

SEQ ID NO: 31733 - DNA, 392 bp, Glycine max
agctttcacttgagtcatcaagagattataaatatgtgaccgtggcacgaatttcaacaacaaatgatgaatcatctttgaatcatctatctttcaatctttacaacatcatccctcaacatctttcaatcaatctttcaatatctttctacagaattttctgattcatttctcttcatcttctaaaagtttttgatcaacactttctcttccaagaaaagttctttgttcaaaaacttgtgctattcatctttttcattcacttctccctttgccaaaagaacgaaggactaaccgcctgaattcttttgtgtctctcttctcccttacaaaagattcaaaggactaaccgcctaagaattcttttgattcttcccttacccttaagcaaa

SEQ ID NO: 31734 - DNA, 451 bp, Glycine max
  unsure at all n locations
tctagccaaatggacttaccttgaattaattcctttgatagcccttttgagccttgtttccctttccttgttttgaagctcactacaagccttaaatgaaaaaccatgatatcaccatatctttaaggaattttggagctttggaattgttttgggaataagtgtggggggtttttttgtttcattggataacttgttttgttggctatgcttcgtgatgtattttgcgcatacttgatgacattgtatattggttaaatgttggacatgctgaatgaaatgttgtttctcaaaggctataaaaaaaaattcgaacaagaagaagaagaagacaagcaataaagttgagtgaataagatcttanatggcacaagaatgatgaaactcttggttctactctttatgtntacattttatctttacttctttctattttcttattcttctctta

SEQ ID NO: 31735 - DNA, 299 bp, Glycine max
tgcttgctgatcatttgacgccagcgatgacaagaggacagggcgtgtattgaacttagcctaagccttgtctaggaagaaggatttgcgcccactgtgcatgcttacatttcacatcgaaattgccaccaagtccaacagcgtgcgacatactaggattcccattctggataaggagcgctcccgagaatgaatggccccccgtcggatcctgatacctcaactgtgagagatctgcaagttgcttatggagttccccttctagatcattatcacttagatcatgatattgacaatga

SEQ ID NO: 31736 - DNA, 430 bp, Glycine max
  unsure at all n locations
tgcaagtatgtgtggtggcacctgtctgctgccttttatttctcttacttttgctcctatcgattctttcatgtagtctaactttaagtatacatagagatcttacttttggtgatataggatcttttaatatagtccaactttcacttttcacattgcagctttcgaccttacacatctaactattgatactctagctaatattagttgagcctctgcgatcgaccccaacgagaatcatactcattgtacatggtttgagaccatgagtccataaactaatactgaggaaagcattgcatcatagtgcatgttttgagaccatgagctcaaccctacctatacgtctaactacatgaccacatgagcgaactcaganattagtatatcctatattattatcatcatgcgctacatgacaaaagagaat

SEQ ID NO: 31737 - DNA, 389 bp, Glycine max
agcttgatttctggtaaatgaccttgatgttgttagattcatattggatgtggctttaccaaccaaccagtttaaacttgaacactaatactttgtcatcaaatatagtattactgtggactgcaaaatcggaaggagctaaagcagaagaaagatgaaatcaaaagaaaatctccttaagaataaagttaaactccattattgcttatgatacaaaatatacaaaggaagttcacgtaacttgggaagatattcaccttaatacttgattaagtatttatttattttaaagttgggtaaaattggttttgaattgttaaatgtaagagtcttgaccaatgtcctaatatacaagttaagagatcaacaatagaaagcttttattgaaa

SEQ ID NO: 31738 - DNA, 414 bp, Glycine max
  unsure at all n locations
tcgtattntagtatgattgttacaagttatactcacatttacattgctaaaataaattgaggtacttatatctatttgtggttttaatggtgtgagtgagataaattatttgtacatatgctgtcaatgatgttggcatctacttccaccttttggatgtggagatttattataaattgtaaacctatatccacaattcgacattaggttaattttaccttgatcaaactttttgctctctgtgtattggctggagtgcccaaattttcaaaaatgtatctctgaccctattataatggattgagaaatagtttttttgtcatgctgagattggatagctttcttgcatttagaacctctggcactttgttttctattaatttatttagttattttgaaagatcccccttcgta

SEQ ID NO: 31739 - DNA, 323 bp, Glycine max
agcttgaaggcaaactggatgcattggttaacttggtaacccagctggccttgaatcagaaatctgtacctgtcgcaagggtttgtggtttgtgctcctctgctgaccaccatacagacctttgcccttccatgcagcaacctggagcaattgagcagcctgaagcttatgctacaaatatttacaatagacctcctcaacctcagcagcaaaatcaaccacagcagaacaattatgacctctccagcaacagatacaaccctggatggaggaatcaccctaacctcagatggtccatccctcagcaacaacaacaacaacct

SEQ ID NO: 31740 - DNA, 451 bp, Glycine max
  unsure at all n locations
gaaggtagtcatacctcacacaatatatatatatatatatatatatatatatatatatatatatatatatacatatatatatatatatatatatatatatatgtgtatacgtagagagataccttggatgtgcgtgtgtgtagcacaaaaaatatcacacaatatatatatgtgtgtataggtagcgagacaccgcggatatgcgtgtatatagcanatatacgcacaccacataatacgtgtgtgtatgtcgcaagatacgtgagacacacatgtatatagcacaatacctcacacatatatacgtgtgtttaggtagaaagactcctcgtgacaaaagagagagcgcgcgagangagaatcagaagacaaaatatagagagagatagctatacacatatataacatataataggcgttgtctagctaaaacacaacatgcttgagaaag

SEQ ID NO: 31741 - DNA, 360 bp, Glycine max
agcttgccacccagctcgcccaggcgagcagggttgcttcctccagaagcaacagccttctggaggaatcttctggagggcccaagtgggcctgattactatttgcacccccatttttactaagtacacccccctgccttttttttggtgattcttttttcgtaaagttacgaaacttacgaatttcgtaacgatacttgttttctttccgtaatgttacggaaccttgcggattacataatcatcccctttttgacttacggaatgttacggaacctcactaattgtgcaacgatgcttccttttgatttccggtgcgtcacggaaccttccggattgtgcatcaataccttcttttga

SEQ ID NO: 31742 - DNA, 436 bp, Glycine max
  unsure at all n locations
ntataagtgcgggtctgggagacaaaggtcaagtggtcgcgatatgtgaagatgatgttccaagaactctggatttggtccgaccatgccctcctgatttccagctgggaaattggcgagtggaggaacgccccggcatttacgcaacgagcataatgtaaacctttacggttntaaaagctctatagttgggcctaggctntagagttttcattntgttaaggctctgtgctctttgtttctgaatttataatacaaggatctttcttcatctgttcctagtctctacccattctcattcatttgcatgttnttcttanacggcagattcgatgacgagtcccccgaaggtactaatacctgggacccgtctatcaacttcgagcaagaaatgaaccaaacggaagatgaacgagatgaggatgtgggactttct

SEQ ID NO: 31743 - DNA, 390 bp, Glycine max
agctttgccgatttagtttttgccggcaaaagaatcgaagtgagtctgagaagaggcaaatttgattatcctgctttgatgaatgagaaagctggggcaaatgaagagaatgaaaaggagggaggaacccatgctgtgactgtcgttcctacatggccaaatttcccaccagctcaacaatatcaatacctagctgatgtgtcattattttttcctatttcttaaccctttttgtcaccattttaattactaattagccttaattgtcaaattaattatgcagttttatcatttgggcctactggactaattttgtgttttaatttaatttcaagagaattataagcaattgggcttgaatccagaattgggcttggacttgaagagagc

SEQ ID NO: 31744 - DNA, 432 bp, Glycine max
  unsure at all n locations
tctgtccctgaganactggttcccagaagacaacagggagtgaagattgctgaaaaccctagccttgcaacaagtcctagggaagtagacacggagatggacaagaaaatccgcagtattgtgagtagcattctgaaagatgcttctgttcctgaagctgatgaagatgtcccaacatcgtccaacccaaatgtttctgtgcctgatgttgagaaagatgttccaacatcttccgcccaaatgctgagtactctcttcccccagcaaagagagatcaacagaggaagatgatcaagcgacaaaggagacccctgcaccaagggcaccagaacctgctccaggtgacctcattgacctgcaagaagtagaatctgatgaggaacccattgccaacaggttggcacctggcgttgcagaacgattacaaagccg

SEQ ID NO: 31745 - DNA, 396 bp, Glycine max
  unsure at all n locations
agcttgtccaaaaatatccattcctagcgagacagatttagatatgatgaaattgccaaaattaagggattttttgccttatcttttaccattatggtcaattaagacaatcacgattttctttaattattttatgaccatttttctttaaatgttttaattacaatctatttatttttatttcttttcctttaacgtgctccatcacatcactataaatattggcccttggcatcaattntagatacaccaaaacgaagaacatcttcatcttctcttctttctctgagttctcccttttttgatttccttgctagttcttgttccatgttcatacatgaaggatctgttaaatcttagttgatatgcgcactacgcatataagtcataaagcac

SEQ ID NO: 31746 - DNA, 454 bp, Glycine max
  unsure at all n locations
ntanaacatacgattgccagcttccttggtgccaacaatttgacacatttctcatgatttaagctatactttntgttgtcatcaataagcaagttgaagataacacctacaatattttaatgtgatgtgaaaatagaagtacggagcatgcttttcttagaaaatttattttttctcgtcctgtgattattagtaaatattggcttctgttcttttgaaattggaagtaatgaacacatcactgttttaatgatttgtttctacaactttcactttgcattgctttgtagctntgtgttcatccaatcgtggtaagtggatatacttctcatgtataactgtgataaggatttgctttctaatttgcaggtactccagtacaggcacatgatgatatggtttctggaacaattgatgcgaaatttgatggtggatatgtagttacagtgattct

SEQ ID NO: 31747 - DNA, 396 bp, Glycine max
agcttgagatgaggaagtgttgaagggtgaaacttcctgcttttattgttgaccacagagtggtacctggagatatgtcgcgggggtcaggagaccttggggacgtcaggtggggtgctattgcccaaaaccaagcttgaccaatcccgacccaacccgggcatagtcggtcagtgagaacctgtgatgtacctaagcaggcgagctcctggcagtcaacagataaaaggaaaacaagaccacaaagcaaggaggcttgtggtggctggccagctgtgaattttgtgtaatatgtggatggtggcctctggtaatcgattacaaggcttaaaattgaggacaggaggctaagatggtctctggtaatcgattaccaaggggtgtaatcgattacca

SEQ ID NO: 31748 - DNA, 457 bp, Glycine max
  unsure at all n locations
cttcaaccttggccatcatttctgccccacatcgcgaaaggagggcattttcggtgtcgtgaagtgcgtggctacgagtgggacttcgaaaattcaggtttgggtggacttctttctctcttaaatttcgtgggtatggggttttgggagatatgatgggtagtcttgctagttctctgcttcatgatagttatttgtgaagaaacttgttgaaagcttgttgaaattgccatgctggatgagttaacatacccattctgttttagggtttttatgaggatgcttgtgatgttcatgtactgaaattgcttatggaaaactgttagagatgaaaggtagagttaacctagggctagaaagtgagaatgtggtgttatgagtggaaaaagagtgacgctntgagagttgaaaggctaaatctggattctatagtaaatggaggttaatatgagttaat

SEQ ID NO: 31749 - DNA, 393 bp, Glycine max
agctttccctctttgaacaaatacccctcagccaaataaaatccatcttgggccttttgcccataactctcattaatgggagagaaatgttcatctgaagcatacaattccctaatgttatcaaatcctaaaatttgagctccaaaggagtaaaacaatgtgtgcctgctagagagggcatcaactaccacatttgtttttccctttttgtttttgataacatatggaaattactctaggtactctacccattttgcatgcctttttttaacttgctttgcgctctaatgtattttagtgattcatgatcactatgaatgacaaattccttggaaacaagataatgttcccaagtttggagggctattattaaggcaaaaagctctctatcat

SEQ ID NO: 31750 - DNA, 459 bp, Glycine max
  unsure at all n locations
tagcgagagttggaggtatttagatctgtagaactcgctaaatggcccatctgcgtgctaagccaagccctttatgtgttcaaaaaagaattttgaattttgaatttcaaacatgggttaagcgcacgactgctaagcgaagcactttgagaaaccaaattttctctctggctcacttagagctttggctcgctaagagagaggctcgaaaattgcttaagtgagtgtaacatctttacactcactttgcccagatttcgcagacaatttccctgcaatctctctctcccataatttgtgcaccttgcatttgagctttctatttgcattgtctacttatcttcacaaagcatcaatgatacaagtaagttccttactccctttattcttttattntgttgaaccttacggtagagaaccatacatgttagctgtcaatctttacgtgtttcatgatat

SEQ ID NO: 31751 - DNA, 394 bp, Glycine max
agcttaatagccaaatcaagaaagaaagaaggaatctcttgtgaagttgtattcacttaaaataggttttcaaatccttaaaaaataatgatttacttatggatcaaactatgatagccccaatggaatttttcttccacatcaaatcattttttttctagcagtggccatatcagcccatatgctatgaagcacgtgtacctgcatttgcttcacaagtccataattcaaacccctagtatttttggataattcattgatacacttgtacctacaattactttgtcaccaatcaaatattacatcacatcaaattacaatattgtgaaattgaacagccctagttgcaataaaaaatcaaacaacttaaacataatgttgagttccaacgaac

SEQ ID NO: 31752 - DNA, 457 bp, Glycine max
  unsure at all n locations
tggaactcgtctggacttggtgctntaaggcttcctatgtacttgatggtctataactttttagcattagagggaattctactcatctcttccaaccattcttcttccatctggggaaaggcattagtcacaacaaaggattggtaaacaccatcctctacatatagctgcctatagaaatctatcaccatatttctttcaatgagaattaacaaaatttggaaactcaaaatgcactcctatgcacttcaaatttgaatggtagtctattatggctcatttggataggttcttcaagtatcaaaaggagagttatatgataagacttcaaccaattaagatgaaataaatatgcttttttgaatcatagtctgcattctaaattgataatgtatttatcaagcctaacaataagcttccttttcgtcaagtaagcgcatcaccttgatacaccaaa

SEQ ID NO: 31753 - DNA, 387 bp, Glycine max
agcttcttatccaaggctcatcttggtggtgaagctccttcttccatggcttattccctaatggatggcgcctcctctcacctcttctcctttgtcttccgctgcatctccatggtggaaaaccaccattagaggacctcattgaagctcaaagatccagcctccatagaagctccacaagcaagcttccatcaagtggtaatcagagcacaagagcttcaagtaggtgctccttaaacctccattaattttttgctttaccttctcttctattggtgtttcttcatttttctccatgtatctcctcacatgtcttgtgctaaatgttgttaacatgattctttagagtttccaccgattaaacttgttatagaagctagatttgat

SEQ ID NO: 31754 - DNA, 426 bp, Glycine max
  unsure at all n locations
tctgaatgtgggctgagtgaggagagagagagagagttgctttttggtttaaaacgccttttctcttttctattattntattttaagttatgccacatgtctccatttgagtggagcaaaaggcccactttactcttgatgtgactcatgctcagccacatgaagagaataatttgaccttttgaaatgccaaagttctgcctcggattgcgtgttgtttctttggtctagtcccttgcgttctctgtgcccgtcggggccaattatcgaaagtaggcaatatatatatcacaatgctcagaatgaaacctcgagcgtggttcacaggttgagtttgttaaattctaagtcgcacgcaaaacgatgatgtttacactaattaattaagaattaacttataaccttccaattatggatatctcttcc

SEQ ID NO: 31755 - DNA, 393 bp, Glycine max
  unsure at all n locations
agctttgagaatatggttgcaaccattggtcaatatgggccacattttcccatttcaagctatcatgatatcagagttccactcctgaagaaggaagttgaatacgctgaaaatttgatgaaaggccacagggagcaatgggtcaagtatggttgtactattatgtcctatgcatggattgatcggaaaaaaaatctcaaggttgaaaagaaatctcaaggatcacagattgcttggggactggatgtatgcacgggttgttgccgaaccagtataaaaactcttgcgtgtttgtctccttcttccctactctnttaatttccactgtgcattttaatttctgcttttacttttgcgtaagtttctcttctactctntattcacttaacaaca

SEQ ID NO: 31756 - DNA, 454 bp, Glycine max
  unsure at all n locations
tatgctgcacacatttataatagacctcctcagcagcaaaaccaacagcaatagaataatcatgacctttcaagcaatagatacaatccaggttggaggaatcatccaaatctaggatggacaagtcctccacaacaacaacagtctatccctccttttcagaatgctgctggtccaagcaagccatatgttcctcctccaatgcagcaatagcagcaacaacaacaaagcaacaagcaactatgcctctcctcaaccttacttaaaagagttagtgatgcagatgaccatccagaatatgcaatttcagcaagagacaagagcctccattcaaagtctgacaaatcagatagggcagatggctacttacatgaatcaagctcaatcccaaaattctgacagattgccttcacaaactgtgcagaatgcanaacatgtgagtgccatcaccttg

SEQ ID NO: 31757 - DNA, 388 bp, Glycine max
  unsure at all n locations
agctttcaaaacctaggtatttctgcaaaagctgctcctcttgctgcctccagagctcttttcctgaaatatgaactgtggtgtgctgtaaaattcttttccctgcgcccttgttatcctaattctgcataaaacaggctttaaataggctctgaattcctgacgttgcgcttagcgccaccctcgcgcttagcacacgaccttgatattgatgccctgccagattcttctgtcacgctaagcgcgttgaagctgcgcttagtggcggatgcgcgcttagcccactgatgagctaagctcaactattacttttagcacttcatgacttagcctcattntcacttgaaattgctcatatttcatcattaaatccaatggacatattcta

SEQ ID NO: 31758 - DNA, 441 bp, Glycine max
  unsure at all n locations
ntctcttcatctctagagctagagagttggatgttacattgaatagatttggttcttgtccctctcaagagatttttgattgatttctagttggtaagcacccatcctcttctcctatggtcccttgagtttattttcttctcccaccaagtagacatgaaatggggtttcacttcaaattttgattggtaggtgaaaatttaattgaaatgagcctgagtcacaccactcattaaaatgcagggaattgctatttgcactcctcctttataataatacaatccctatttatttatatttttccaaaatatccctaacaatacattcccaatgttcactccttgcaattgtctttcgtcaaatccctactgtgagtgcgagcacagagcaacaatacaccatcaacaaggagganaacttgtttcaagtaacccaatcatt

SEQ ID NO: 31759 - DNA, 386 bp, Glycine max
  unsure at all n locations
agcttatgctaattaatgagaaaaactcactaacacaaccccaaaactcacttaaacatgctcaagcccttattattattattattattaacataattttttttaataataacaataaataatatttatttattcatttaattataaagaaaacattntcacaatgcanaataatcttatataataaataaatatataaaacaaatatctgggtgttatagtccgtgtgtgtttgttatgatgattgtgtatgatgggaatttgtgataggtgatgccaacaatggtttacgtggtgtatgatgtttatgactcctgatgatgaatggtgatggaactatgttgctgttgacggtttgaggaatatgttctaaggttgctatatat

SEQ ID NO: 31760 - DNA, 437 bp, Glycine max
tgatcaaaacaattatctaatcatttcaatccactcaaatcatacaattgctcattcaaatcattctcaaacactcatttcatgcaaaacaatccactgcatatcattttcaatcaattcactattcaaacacgcttttggtacaagtaaacaactcaaagtgctgaaatttaaataactaaaatttaaaataactaaaatataaaaactgaaattaaaatgactgaaccaaatcataaaaaactgaaaataaactaaaattttcaagatgcacaaatttaaatgtcctgctcctgtggttgctcctatgcatgctcattaaggtccaacacctgagcagctggtgaatcctgagagataggctgctctaactcagatgctagtgcagatggtacaacatcatcaggtatgggtgctagggatggctctgggatctg

SEQ ID NO: 31761 - DNA, 394 bp, Glycine max
agcttagaaagcaaccaacatcacaggtaaacaaaagcaagacacaactttaccaagtaccaagcatgagtgaagaagtcaagaagatggagatgaaacccaaacaaaccatcttgatcttcttcaatttttcaataagatccatcaaattccaagtcacaataatgaactaagcaaaatgacaccaaatagaacaccaaaacatgaaaaaacaccctagagaaaaaaaaatatagtttttttttttaaaacatacaaacacagaaggaaaactcaccaaatagagggtatttaagcacttagagcaccctccaagacctggtaagccattgacattagtgctgctactcaagcaattcttctccaaccttctcacaattgcatccccaacaag

SEQ ID NO: 31762 - DNA, 404 bp, Glycine max
gcttatgctgaatcggtgcggtaccgcatcctatgcatttgaagatctgccttccatttctgcttggtgaggaagcgagaatcatacgatctgcttctcagctttctaaaactatttacagatatgctttgccattaatatacaatgcaccttgggatccggctcctgccttatgccaactgcgcattatatgtcttttgaagatgctcatactacgcttacttggatatccctcgtaagcactatccgatgctctatccatttttaaacacttcatagtacatgttgtgctacaatctaaccggaagagtaacgctattcatttagatgatggagagaaatgatgaggcttctttcatatcatctgaactatggatcgttatagactaactcgcctcacacac

SEQ ID NO: 31763 - DNA, 336 bp, Glycine max
agcttgtaggattatggggtacccatcacatgtggtactaggtggcggtgggcgatggtgcacaacaagttttccacatccacaatgcgcgcataaacccaccatcccctgttgcccacctccatctgagctcacgtactcccacgtagcccatatcctcgtttctctcaacaccgggtccccatcaatcctgccaagcttccacaacatccaagcaaaacaacattcaacagcacaagctatcacagccaagcaaaacagggcaaaggcagaaaactctgctcaacacaccaaccaaaatcacagcttttctcacttaaagaccccagtaacaat

SEQ ID NO: 31764 - DNA, 360 bp, Glycine max
  unsure at all n locations
tgtcccnaggggctcacctaagcgagcttataaatcatgaacatattccttataggggtatcttaggctattcctaaatggcgctcgaataagccaatcttcattataatggctaccttaagcttgttcctaaatgatgggctagcttaagctagcctgctaacttccaagttcttcattagaatagctagcttanaagtctgcccctaatgatctagcttaactagcttggtaattccaaattctttacacttttctttcaatgatagctgtaaatatctcttcaaagagatccttaatgtaattcctacanagagactaaacaacaaaaaccacacaaaagcaatanaactaagttct

SEQ ID NO: 31765 - DNA, 398 bp, Glycine max
  unsure at all n locations
agcttgcaacaatggtattgacagagtcacaaaacatacctgggtacagtggcgaggcgtaacggtcatgcactgtcacaagggctgtagatgttgagatagagtcgcgaacacgaaccttagacggagaagaagagagcatgaggaaaatagggctcactttctaattttttaaatgtagattccacattgattttcaatacaaaaccgatgttaaccaagcaatgtaaatgttaacatcggtttgttggaaaaaaacctatgttaactcatcaaatgttaacatcagttttgaagaaactgatgttaaaaaacttatattaacataggttttcattgatttttagaaaaccgattntaacgaacttacattgacatcggttnttaaaaaaccaatg

SEQ ID NO: 31766 - DNA, 452 bp, Glycine max
taacaaacttagacatcaagtgatcatgtattccgaaatatatggggagaaaacggatgcaccttttatctatatacaatatacaattgtttgttgcttgcttgaatcttgatttcaggtattgcattgtcatcatcaaaaagggggagattgtagatgcaattggctctgatgttttgatgatgatggggagattgtagatgcaataggctttgatgttttgatgatgatcatcttatgtgttgcattaatgcaaaggggcttttcaagattaaaattcaagacaatacttcaagattacaaggcacaacatcaagatgatcactagaatattaggaagggaattcctaattgaattagcaaaggtttggccaagtgatttacaataaaaagtgtttttcacaggttctactctctggtaatcgattaccagaggatgtaatcgattacca

SEQ ID NO: 31767 - DNA, 392 bp, Glycine max
agcttctggtgggacatcttgacttgctttccaatctgacattcaccacagattctgccttcttctattttcagattggggatgcctctaacagcacctttgtcaatgattttcttcatgcctcttaagtgcagatgtccaaatctttgatgccatattctgacttcatcttctttggaggatagacatgtggaggagtagctggtttcttggggtgtccataggtaacaattgtcctttgatctgctgcccttcattagaacttcactcttctcatttgtcaccaagcattctgactttgtgaagtttacattgaatccttcatcacacagctgactgatgctaatcaagtttgcagtcagtcccttcaccagcagtactttgttcagact

SEQ ID NO: 31768 - DNA, 452 bp, Glycine max
  unsure at all n locations
tctgttctcaattgcgagcgtctcgatattgtacggcgttctatccgacatccaagttaaaagttattgtcgctggagttttgtaagagcttcccttttcaattacgagcgtctcgatatattacgggacacaatcggacacccgagttaaaagttattgacggttgaatgcgctcagagcttctattttcaattacgagcgtctcgatatattacgggactcaatcggacatctagccaaaagttttgtcgttcgatttttctgagagcttctgttntcaatgacgagcgtctcgatatactaccggactcaatcggacatccgagttataagttattgccgtgagaatctgctcagagcttctgttttcaatttcgagcgtctcgatatactacgggactcaatcngacatgcgagtgaaaagttattgtcgtttggattggctcagagc

SEQ ID NO: 31769 - DNA, 394 bp, Glycine max
agctttttggagtagaaacatgggaccaactcattttatttcaaaaagaaagtcgtatctagtcaaggtctgagagaccatacaagtttcctaacaatttctaattatgttggccattaagtctatcatatgctgacaatagccgagaagcccatgaatctcttcgggggcggagtaggtgtacgccatcgccttggccttggctaacaatcggggaagttcttgactcccgttcaaggtaagagcaaaccgatccatccacatggttgcctcttggtgtaaagagtcgatcacccttcctctagcctcttattccgcgtatacttgggcatactcgtccgcgaccctatgctcgtgggccgtggctatgcctaactcttctcgatacttggcg

SEQ ID NO: 31770 - DNA, 432 bp, Glycine max
  unsure at all n locations
tacatagtcctcatcttacactaattctaacccaacacaaatacccatattatatacagctacagttaatatcttctaccctaaagttaagacaagaaacagagaaaaaggatcaaggaatttacttggacggcgtatgattgatgcttcaaagtccaaaatgcacaaagagagtacaaatgcaaaatgtgcaaatttttggagagagagaatgcacaggcggcgtttctgtaatctgcaaacgcgatgtaactgatgttacactctcttaagcagttttgatacttttgcttaacggaccgttgcgctaagcaagcaagagagatgtctggtttctaaaccatgctcgcttagcgaacatgcgcttagccgacgtttcagattcgaaaacaatctttnttaacagatactcggcttagcgtgcaagtaagt

SEQ ID NO: 31771 - DNA, 395 bp, Glycine max
agcttaatcaattgaaaattgacggtgtgagattttccctagactctactaggggcaattttcattggcacccttaatcatgttcaatttgttggtaagtttaggtcttttaatccaaaaaaggaaacttggttaccatgtgagagtaatttggataaatgaaactagttttggttgttatatgcatgaatatttcgatgcttgtttgcaacaatgtattatacaaaagtacctaccacatagagagtggctatgcaatttggaatgcatcaagaagtttcagattgtgtgattgcattctctggcaccaaagctattgcattgaaaaattactgcatacccaaaattactttaaaaaattgcaaagaatattacttggcaaaaaagcagtctaa

SEQ ID NO: 31772 - DNA, 429 bp, Glycine max
  unsure at all n locations
ttcaattctttcgaatctttctgttgcatatttgaggtctaagtctaactttgcttcttagttgtttaacattntgacaaatgaaagttagaacaataatgatttgattcagctcatgctacattgagtttttaacttgtatttcacacggaatattaatagtcaataatcttgaagtcagaaaaataatgatttgattcaactcatgctatatgtactttgatatattattctttcaaaaattctgaaagaggaaatatccactcaaaagcagattccagacnaaaaaaatcaatcatgtaaacacatagattggaattctaattgttaaaggcggaagcaacaaaactaacagtgagttacagccttgggaagacaacccncagtgcatcttcctgcaactgggggatcatgcaaaacatcaaaaca

SEQ ID NO: 31773 - DNA, 388 bp, Glycine max
agcttttgtgtgaaaggatgtgactcttcacatttgaatttgaatttcaacattcaaaggcactggtaatcgattaccaaaacattgtaatcgattatagctttatgaaaataattggaatgttgtaaattcaaattgaaaactttttcaaaacaattttgctactggtaatcgattacaacaatctggtaatcgattacccgagagtaaaaactctttggtaaagggttttgtcaaaaactcatgtgctattcaaagttttaaaaaactttttaatacttatcttgattgagtcttctcttcattcttgaatcttgagtcttgaatcttgatcttgattcttgagatcttgaaccttgaatcttgattcttgagtcttgaattcttc

SEQ ID NO: 31774 - DNA, 453 bp, Glycine max
ttggaggtccaaaatcaacagaaagttctggaaggataaattgcaaaaattgaagatagaagctagaacaatcaagagcaagatatttttgaaggataaatcagctaaagaagaagataattatttgtttgtagtttcttgtgatgatctccttaattaaaccaagctacaattctataaataagaggctaggtataaataagaggctaggtagaagtcccgaccagttctacaattatatttagacttccacctactagacacctccattgttccattagacactctagatttcattgtatgatttttatgagtgcaattcctttcatctaggagacgaaaggatgaaccttgtttcactttaattctatcaattcaatacttcatcttgagttctttatttatttccgtacataatgctcttatttgattgccatcttatagatgtattca

SEQ ID NO: 31775 - DNA, 388 bp, Glycine max
agctttgatgcaacattgggagaggttaatgaaacaacgagatgatgcgctccatgagaggttggatcaaatggagaatagagatcacaatgaagaagaaaggatgagaagatggaatgatggtgttcctagacaaaaccgaattgatggtattaaactcaacattcctccatttaaaggaaagaatgatccggaggcctacttggagtgggagatgaaaatagagcatgttttctcatgcaacatctatgatgaggaccagaaggtgaagcttgccgccacggagttttccgactatgctcttgtgtggtggaacaagctacagaatgagagagcaagaaatgaagagccaatggttgatacatggacggagatgaaaaagatcatg

SEQ ID NO: 31776 - DNA, 408 bp, Glycine max
  unsure at all n locations
tgcgcgcaacattaaatgagctggaataaaatgccttgcggaaatggatagaggtaagaaaagggctgatgctaggtgcacccagcattattgctagtgcacccagcatattatgttaatggacaaaaatacccccttggtaattttttaaaacaaatgtgcagcgcccctgatttctcttcttcttctctcacacgactgtgcacccagcgcctccctatttccttttctacgcgactcttttcttgacctcttcttaggccactctgcttcttcttgtgtcattgtcttcttcttcatcctcgtttgtctctgcgttgtgctttggagctttgcattgacgacattgaagacgtgaattgngctgtgctccaccgtcgacgtcgaggtaagcctattcttcccatg

SEQ ID NO: 31777 - DNA, 390 bp, Glycine max
agcttgcaaaatggaagcaaagaagtctatctatggggggcagaatcactctcattaattcagttttatcagctttacctatctttttactatctttttttaagatccctaaaaaagtggtgcaaaagattgtatcaattcagagaaatttcctttggggaggtcatcatgaggccaacaagattccttgggtgaagtgggacacaatttgccttcctaaaaataaagggggcctagggattaaagatctctaaatttaatgaggctttacttggcaaatgggggtgggagctgactaataatcagaaccaaccttgggcaagaatcttactctccagatatggtggcgggaaggagttgatctttggtggaaagagcaaatcttcctct

SEQ ID NO: 31778 - DNA, 449 bp, Glycine max
  unsure at all n locations
ntcccacaagactcttattctggacccattgcgattatgttgttgaagcacacagttgcctgtgtccaacacagtggccagtgtgttattgataggttgaggtggtgaataaaggattattggtgatttcttcacttttttcttaccatcttgcgattctattttgagtacccctttgtgatccaatgatagaacagcagaatttgagtcaacaggttggtctctatctcaccccacactcccaatcatctttcttttgggcacatatagtcaagtaaactgcttcctgattatcatgagttattgggtcgaaactcatgcaatatttacccttttttgaacatagctctgcccctggtaccgcggcattcagagtatcacctggcttcaaactatcattggcttcaacgtggatacaagtagtactccaccacaaccacatatagatg

SEQ ID NO: 31779 - DNA, 381 bp, Glycine max
agctttataagcgcaggtctaagacacgaaggccaagtcaccgcgatatgcgaggatgactccccgaggaggtcggatttggtacggctatgtcctcctagtttccaactaggaaattggtgagtggaggagcacccagacgtttacgcggtaagcataatgtaaccctttgtagcattaaaactctacgattgggcctaggctttagagtttcctttttgttaaggcattatgtcttttgttcttgagtttataatataaagatctttcttcatctgttcctgcgcctctacccattctcattcatttgcatgtttatttctttacgcttaaaacgccagatctgacgacgagtccctcgaaggtactaatacccgggac

SEQ ID NO: 31780 - DNA, 449 bp, Glycine max
  unsure at all n locations
tgtccgcanaanaatcacttaaaaccgttttaaggtccaacgccttatacggtcctctttgcttttatcggttaacatggaccgttcaaaagcataaaatcaacacatcactttactgccttttgtgagaactatgtaggtctgatttcctcttcaatggaggatacgtaggagcaaaagccccgcttttgtcgacctcgtgagatggttagaggtccaacgccttagctttctcaccaataaaatggatcattttaaggtacaacaccttanatgaccaccttccaagtaaaaagaatcacttgattcgccccttttgaaagaactacgtacgtatgatttcctcttcgatggaggatacgtacgagcacaagccccgcttttgtcgacctcaaaaataaaaaaggacaaaaagtttacgatacatgatttcacacaactctaaatct

SEQ ID NO: 31781 - DNA, 350 bp, Glycine max
agcttttagatgaatttttctatgacaacttttgataaatatgtataatactaacctcatttcactcatcaatatatgtccaatacacacaagtatgcattttaattagtagattaagttaatgtcattggcataactatccaatgtgaatgactttatgtctaattgattgtagattaagtttgattcattagtgctaggtatttcattgacaaataaatagtcctaaggagtagtatgtatgtatgtttttcttttcttaaaattaaaaaataggaggatgctgacttacttctcatagtattaatcaaataccggggctgttcatcacaacccgttccattgcaaag

SEQ ID NO: 31782 - DNA, 449 bp, Glycine max
tcaggctattcaattgcttcagattgttgcacagaagggcataggtctgtgtggtggtcgacagaggagcataaaccacagagtctggcgacaggtgcagatttttgattcatggccagtttggttaccaggttaaccaaggcatctagtttaccttcaagcttcttagtctcacctgatgaagatgaattcatggctacttcatgcactcctctaatgacaatagcatatttctggcactaattgctgggagttggaagccatcttctcaattaaatttctggcttcagtacgggtcatgtctccaagggctccaccactggcagcatctatcatacttctcttcatgttgctgagtccttcataaaaatattggaggagaagctgctctgaaatctggtggtgagagcaactagcacataatttttacatctctcccaatatcatat

SEQ ID NO: 31783 - DNA, 383 bp, Glycine max
  unsure at all n locations
agcttcatggtgaatcaaaggtgttttgatgataacaaaagatgatgacaaaggtgatgacaaaaagctcaaagatcaatcaaagaacaactcaagtgaatcaaagatcaatcaaagaacaactcaagtgaatcaacaacaattcaagagttcaagataagaatcaagaataattcaagactcaagaagaaagtttagagtcaagaatcaagattcaaggttcaagatctcaagaatcaagatcaagattcaagactcaagattcaagaatcaagagaaggcttaatcaagataagtatgagaagtttttctcacaaattgagtagcacatgattgttctcacaacatgtttaccanagagttgttactctctggtaatcgat

SEQ ID NO: 31784 - DNA, 450 bp, Glycine max
  unsure at all n locations
tggagaggatgcttcaatggaggacaagacagagggagagaaagacagaggggggagcacgaaattgaaggaagaaaaaaaagggagagaggttgaactttgagttgtgtctcataagactctcattcatcaaagttacaacaagtgttacacatgcttctatttatagactaggtagcttccttgagaagctttcttaagacaacttccttgagaagcttctttccaaaacttcctgagaagctagagcttagctacacatacccctctcataactaagctcacctccttgagaagcttccttgagaagatccctacagaagctagagcttagctacacacacctctctaatagctaagctcacctccttgagatgagaagctagagcttagctacacacccgctataatagctaagctcacccncatgacaaaatacatgacaataca

SEQ ID NO: 31785 - DNA, 445 bp, Glycine max
  unsure at all n locations
tgcatagatacaatttgctaatgcatctcttgcatcaattacctgaatataggataaaaaattggatataataatacaatacaattaggagaaatagaaaactagatcaactaaattgttcaagtaatagacaaacccgctccaaggtcaatgtcttggtaatggtatccttgctagcttggattctatgggtagataatacttccattagctcatgggaactcaacccattagcaagcaacatttgctacagtttccaatagaaaagaaaaaccaaagtcattttttagtaactgaaatttcaaatataccctttatgttattcatagacaatatgaaacaaggagggaggattgcccactcttgtatagattactntgaccatattcctagttgatgtggaacttcttaacaattaccttcatcattcaccacctcaatatga

SEQ ID NO: 31786 - DNA, 356 bp, Glycine max
agcttgttattgaactgacgaaaaatcaagaacaagcctgtacgcacatcgatcgcgtgtatgatatccaatccacaaggtttgaagttaaggacagctttacccctatgacgcaacgcggcggacaacagtgggcactaaacgttgatggacgtcattgtcaatgcggaacgtattctgcgcttcactctccatgtacacacattattgcagcttgtggatacatgagcatgacctactaccaatatatacatgttgtctatacaaacgatcacatcttaaaagcttactccagacaatggtggcctcttgggaatgaaacggctattcctacttctgacgacacatggacactt

SEQ ID NO: 31787 - DNA, 525 bp, Glycine max
  unsure at all n locations
tagggannaaacgaggncggccnatagaaactgtggcantacgagacacatagaatactcaagctctgagaccatggctgcagccattggtcaatatgggccacatttgccgattccaacctatcatgacaccacagtgcgcactcttgcagaacgaagttgaatctactgcaaattagatgaaaggtcaactggagcaacgggtcaagtctggctgtagtattatgctcgatgcatggactgatccgatacaaagacgcctcatgcattttttgatcaattatccacgcgcgcccatgtctgccaccctctctcactcgttctgagtttaagaagatagatgaaaagctttttgagtatcttacatgtctatgacgatgcagacttctaactataatcgtctactaagtcgtagtcgtgtatgcgcagcactatgtattccctggctattgtccgaggataactcacagatcctacactactcctttcgacgtcattaataaaccgaacaataagatatcgccg

SEQ ID NO: 31788 - DNA, 129 bp, Glycine max
gaactcgactcgggatcctgtatactctaatgcagcttgcagctttactttagcgcttttacgggtagatgatgtgcatatgatctatctacggcttgcacttttaattcgcacatgcatggacttgta

SEQ ID NO: 31789 - DNA, 222 bp, Glycine max
tcgcacccgtataaaaaacgagaacacttctttattgtctcttagcgagggtgagcactttatcaatcctggattgaccgagcttacatactcaaagcatgccactgttgcatgaatagctatgccccatcaatgtatgacaggacatactctcatgtcttacacacagcgaaggtccccccccctccgcgcccgtttttgaactctagatataatttacct

SEQ ID NO: 31790 - DNA, 359 bp, Glycine max
tgccgtctcatagtgcaacgccttaaaccggcctctgtgcttctactgggtcacgcggactttcagaggcctacagaccacatgtaactttgtaactactttcaaatacacccacatcattcctggcccaaggccttaaggtccctctctcctcaacgaattaactagtccttcaaatggactacacccgtaaaccacttttgactggcctccatagtccttgcaagctagggatcaccacaccataccctctgcccaataacatattactgtctaaggacgacctcccttcacaatagacgaaacctttgaacaatggaacgccagtagctccaccatagtttgaagatctggaggct

SEQ ID NO: 31791 - DNA, 205 bp, Glycine max
gtgaacacagtatcttgaggacataaaatgaactgttaagctatccatgtgcacatgcgacttgcactgagtaccaaatcattgctgtggcttggtcattcatcccacacatgcacttaatatgatacaatttcaacatacaagactaccttgattattttgaaccttcatacaaagggtgttctgcatatctcggtaatgcata

SEQ ID NO: 31792 - DNA, 378 bp, Glycine max
cttatcattaatgcatgaaatgagggcacacattctacaaatgttatgatatgacatccgatgccctgacaggtaaacgcgattgggtctccttacagttaactgcccaaataaaccccattggacccaacctcaattgggaaccacctctctttaatcgactttgacctgtaacctaacaccaagagactcactatggtacctggaaagaggcttgatctacgcacatacttggagacaagtccatacttacctactcttcgtctaatgaacgtggatacgtcacttttggagactacaacactggctagaaccatgggacaaggaaatatcggaaatcaaaaaagacacagatatataacgttctatatgacgacg

SEQ ID NO: 31793 - DNA, 512 bp, Glycine max
  unsure at all n locations
aggccccacgggcggccttgaaatgtggattacggacccatcactacccactgctgcttgcagcagactcctgacgagccacggnacccgattcttgaattcgccctatagcgagccgtattacaattcactggccgtcgctttacaacgtcctgactgggataaccctggcgttacccaacttaatcgccttgaagcacatccgcttttcgccagctggcgtactggacaagacgcctccaacagatcgtcattcccaacactcgcgccggccgaatgccgattccccccgcaagcacccctcctccttaaaattattgcagtttttgaatcggatatgggcgactgtcagtacaatctgctctgatgccgcactattaacgcaggcccgacaaccgccaatacccgctgacgcgaactcctagntgccgcatccaacatacacttcgacatctactcattcacctatctcttctccgctcaacacgcaccttcattacaatctctctccg

SEQ ID NO: 31794 - DNA, 275 bp, Glycine max
taccctgatgaggattgtccatatgttcttaaaactggactgatccttttgattccaaagtttcatggccttgtaagtgaagacccacacaagcatctgaaagaattccatattgtctgctccaccatgaaaccaccagatgtccaggaggatcacatatttctgaaggcctttcctcattctttatagggaagtggaaaggattggctatattaccttgctccaaagtccatcacgagctgggatgacctcaagagagtattcttaaaaaaaaa

SEQ ID NO: 31795 - DNA, 409 bp, Glycine max
taacacatgtttccatgttcaaatcaaatcagtgttaagacatagtttcgaaacactgggttgcctcccaggaacacttctttaatgtcttttaagttggatgtccttgttatgacttacgccttcactgtttcatcatccataattcttttcttctttgtaagaaaatacttcatgaatttagtgtatgttggtatatgctctaatgccttacaaaaaggaatgttacctcctgtcgttcaaaatgtttaagaaacacttgtatttcctttccttatatttctttgacggagcatacacataaggaagatgctcaagtggcggatggcttactacaactctacctttgctagtggcttctttctttgatttcttcttgacgtaccactctctcttcaactttttcagt

SEQ ID NO: 31796 - DNA, 384 bp, Glycine max
  unsure at all n locations
agctttgtccataaaaatcacctaaaagccattttaaggtccaacgccttaaacggtcctctttgcttttattggttaacgtggactttcgaaggcctagagtcaacatgtaactttgtcactactttcaaaaaccaagagatcattaatggtccaatgccttaatgtttctctcccttcaaaagaatcaaaaggtcgttcaaatggtctaacgccttaaacgagttttgtttggtcaaaatatatcttgcaaaaaagggataaaaacaacttaacccatgcccagttctcgaagaactacgtangtttgatttcgttatcacaattgaggaatacgtangagcaagggaaacacccttgtcgaccacaataaggataaaaata

SEQ ID NO: 31797 - DNA, 444 bp, Glycine max
  unsure at all n locations
tgataatcattntctttgcctcataaaatgaacttggaagctttccatgttcaaatgcatcttgcaagagttacaaaatcattgccatggctttgtcattcatcccacacatgcatttaatatgatacaatttcaacaaaaaagacaaccttgaatattttgaaccttcatacaagggttgttctgcatcttttggtaattcataaaactcttcggcttcattcctttctgagtgttttttgaaccatatcttcatccctatcaacctctacattgaagcaatgggcacttcattcgtatgctgcctatcaactctaaaagcatcattaatcatattttggataggatntttaataatgttgtcttgaactacatttgtatgtgagacatttcgagtttcttcacttctagactccccatggtacaaccaaaatgtgtacccta

SEQ ID NO: 31798 - DNA, 380 bp, Glycine max
agcttaagcaattaaaatagtttaatcatgattatttccttttattattttaattaattatgcaatggaaaggataacaagtcggtggtaacacactatagggctaaacttaatggctctgctgttacgttcaaccacagatgagaaaaaaaaactgagtccaggatgatggaaagcatcaaagatatatatatatatatatatatatatatatatatatatatatatatcaccagtatcataacatgaggcagatagaaactctgtctgataaatttggcttaacaaaaaaagtaataaaataaataaaaactgagagagaatacggcagatagagacatctctttttggacaaagaacctaccatctagtctaagtac

SEQ ID NO: 31799 - DNA, 370 bp, Glycine max
  unsure at all n locations
tggagtcatgagtggtaagttgaggtctaagtggattggtccttttgttgttactaatgtttttccttatggtacagttgagatcaaaagtgactccacaaacaagagcttcaaggtcaatggacaccgacttaagtcattcctcacaaacccttctttattggacgtagtggtggaagagacttccttactccaccctactcttcctccaccatgacttaaggagttcgcttttcctataccttctttacttttattacatntgtccgattctatatgatggtttaattgcttttaatcttttaattgtgttacattgaggacaatgtgttcgttaagtatggagggaggggggagtgttctgggctgt

SEQ ID NO: 31800 - DNA, 382 bp, Glycine max
agcttggttacctccttcttcactacatcaagaatcactgggttgagtcttctctatggctgtcttattggtttagcctcatcctctaaatttatccgatgcatacatatggatcggctaataccaggaatgtccgctagggtccagcctatagccttcttatgcttcttgagaactaataacaacttctcctcttgctcatcagcaagggaggcagatataaatactgttaaactttttctatcatccaagtaagcatattttaaatttgatggcagaggtttcaattctggtgtgggtggctagatagtggtagaaagagatggtttctcagcctgtacctcataaagaaagtcagaggtatatgtacttcctaaaacat

SEQ ID NO: 31801 - DNA, 439 bp, Glycine max
  unsure at all n locations
ntntgcaaggttganaagaaatctcaaggaccgcaggtcgcttgtggactacatgtacgcacgggttattgccgaaccaatataaattcttgtgttcgtcttcttcttccctacactctctaattttcgttgtgcacttttaattatcgctcttacttttggttaagtttcaattattgttctttactttcttaactctgtagtaaaagcctaattaaatctacgcacattaagaagatcacttttaattagtcaaggtacattaataattaattcaaccccccttcttagttattccgagaccacttgatccaacaattatgatatatagtgtgcgcttaaactccaaagagcatactactgacctcagaatggccacttcttgagcaaactcatcctctaaggcatcattcaattgctctgatctcagaaccttaac

SEQ ID NO: 31802 - DNA, 381 bp, Glycine max
agcttcttataaatagtagattaatctatttcatttattaagattcaatttgaaaaacatttaatttttaatttaaatgccaacaaagtaaaacttgatatgagaattaattgaaaaatattatattaatcttgaaaagtttataagatttagtaaatattctatgataatcttgaattatttttaaaattgaaagtattgagagaagttttaagagaagaaattaatacttcaatgaaaatactaaatcatataaaatattttcttttttaaatatatgcattccttataaatatcgctgaaagaaaattaataactttctttataaattatttttagaggatgtaacatttatctaagatcaaaattgttatgaaatag

SEQ ID NO: 31803 - DNA, 424 bp, Glycine max
  unsure at all n locations
tattgaagaaggctattatgtgcaggtgaactgtnttttttgtttatgtatgtatatttgcattgcttgtaccaatttgcttatatattggcgaagtacgaagatggtgagtggaaaaaaataatataactaacaaataaattaacgagcattaagctgaacgcgtgataggggattaatgcaccaaatggtcgaagcacgatactttctacagactaaacatcaatgcttctaactgtctttctattggaaagtcaagtgacgaccttatatgaatttgcaagagcacaatattgctaaccatgcgcggagttattatacgctccaactccatgtgttactcatccttacaaacgtgagaagaaaccattttactgctcagctctcacttccccttcatcttttcaccgccatcaccaccacc

SEQ ID NO: 31804 - DNA, 248 bp, Glycine max
agcttctcaaagaggagagctttgatatgagaggggagagggatgctaagctcgacccttccacggaagttatgccaacgaatctgctcaaggaagtaatctggcgaaaacctctcaatgaagctaccgagggtatgctcagaagcttgcgaaagacttgttgtaactttgatgaatgacagtcttgagagacataccttgtagtgccaattctctgcctctatgattccttcagtctcgagctcccc

SEQ ID NO: 31805 - DNA, 377 bp, Glycine max
  unsure at all n locations
cgtctctacgatccctatcaatgaatcttcagatctattatgcataatgtctctatggcacattaaaactacaacatctatacccatattaattaaaggtttgatgactacttgtacacaactgatgtgtaagtatttgtacttaccgctgagttcatacattaaattttttgacagtgaatgaaattcttttcttatatcttattccagagaaatatgattatgtaatcanaacctcccttgattcttccataagagtattctaatactttcccatgtaatgtaatagatatcgtttataagtgtatcctcatactttcacacacacatatatatatatatatatatatatatatctatatatatatatgtgtgcg

SEQ ID NO: 31806 - DNA, 399 bp, Glycine max
  unsure at all n locations
agcttataagaacaaaattgccttaatcatttccaaatatgcatgtgaattaggacgcatcaacaagaatcaagccaaggctattgtgcaagcaatcaatggggcaaaacacaccaaatgattataatgatggatggctcaaattctcacaaaggtaaaatcatcactttcaaattgagctttcaaaactatcatgacatgtagagaagaatcaaggatttcaagtcacaaaatgtcaagaacttttattttcaaaacatttacccatttcttgaacatatcctataattcaaagaanaacatgcaaagtcgtacgtgcacacaaaattgacccaaaatattaaactgaaaatccgacgaaactaacaacattaacaaattaacacaactaacaaatta

SEQ ID NO: 31807 - DNA, 446 bp, Glycine max
  unsure at all n locations
nntgaccccttgattattcccttcttttactctaaactctgctcacagatatgttgattaatatttccataaattttcatatggtatcattaccttgctcaaattcgtatgagtattgacaaaatgagggtttgcaaaaaaaaaaaaactaatgcttgctaaataaataaccagagttgttatgagactttttcttttgtcactttgaaatcaaagtgatttcaatttcaaggtcaaaaaaacaaatttgaaattttgtactaagtgtagaataagaagctntgttctcaaaataacaatgtacagtcaacttaaataaatttctctgatgttnttgcactcgtgggagagtcctaaagcttgatatgaattcaagaaattctgatgagcttctattgtgtgacttgacatgaatgtgttctctagacatcattatatcatctcat

SEQ ID NO: 31808 - DNA, 392 bp, Glycine max
  unsure at all n locations
agctttaggctattcaattgcttcagattgttgcacagaagggcaaaggtctgtgtggtggtcgacagaggagcataaaccacaaagtctggcgacaggtgcaaatttttgattcacggccagttgggttaccaggttaaccaaggcatctagtttaccttcaagcttcttagtctcggctaatggagatgaattcgtggctacttcatgcactcctctaatgacaataacatcacttctagtactaaattgttgggagttggaagccatcttctgatggaagcttgcttgtggggcttctatggaggctggatctttgagcttcaatggggtcctttaatggtgattntccaccatggagatgcagtggaagacaaaggagaagaggtgag

SEQ ID NO: 31809 - DNA, 456 bp, Glycine max
tctctgaagggcatggttatttccagtttccttaaaatacccaaaaatctcgccaaatgatggtccttctccttcttggaaggtaccacaggatatggtacttccttaccttcgttttcatccttttcaatttttttattttttttctttttcttggtcattaaattctttttgcttgaccattatttttttctctttatcttgattgctttcacctctcacctcatttttctcccatcagtaccttcttttcagcagttttctctttgtgcacaatactctcctcctcctcagcctccataaaccttttactccttgtcatcacatctttgaattccgccttgcgattcttttctgtatttgctgcaaaactgttggacaacttgtcagctatctgcttggccagttgtcccacctgaatttcaaggatcttcagtgctgactcagtgcttttat

SEQ ID NO: 31810 - DNA, 395 bp, Glycine max
agcttaagacgacgaggtgcggggaggagcgatctggcaagggaagaaacagagttggaggtgtgagaaagcgaagcttgaacaaattccagactttgcctttagattgttgtgcctgatttttccatgacttccacgcacgggatgcagcaacgtggtcgtcgaccctatctctaaagacaaagcttcagtgtcgggtcccactaactaattctaacaacttaagtccgcggattctagtcttcctattcaaatgccacttcctgctttcacatcccaacttttttttttttgtccttttctaatttttccatttttttataagggtgattatgtttttagtgatgtttttttaaatgttcatttcttttagtgcatgttcccttgtttagttt

SEQ ID NO: 31811 - DNA, 455 bp, Glycine max
  unsure at all n locations
ctccanagttntcgggttttctaaaccttgaaaacttgtgctattcatcttttcattctcttctccctctgccaaaaagaattcgccaagaactaaccgcctgaattctttttgcgtctctcttctcccttttccaaaagaacaaaggactaaccgcctgaattcttttgtgtctcccttcttccttgtcaaagaattcaaaacgacacaatctgagaattcttttgattcttcctttccctaataaaaagtgttcaaagggctaaccacctgagaattcttttgtatccccattcacaaagtatcaaaggtttaacagcctgagatctttgtcttcacacattggagggtacatccttcgtggtacaagtagagggtacatcaacttgggttcggctgagaacaagagagggtacagctcttgtggatcagttctagtggagggtacatccact

SEQ ID NO: 31812 - DNA, 394 bp, Glycine max
agctttttcattaattataatgtttccatcacacaggaagtatgagagcaaactgaagttgtacaaactagtaacttcacagaagggaataagacctgtcagttagcacatagtctactacccctttacagatccaattcctcgtccccttgcacactgtcactccccctagctgcagaaaatacatataggcctctcaacgttttcctcacatggtcatatacaaaaaccagtaacatagctacaactgccactcttgactcgaagatagttctgaatactgcacaaagctcctctacagaaatttatccctttggcattttgatacttgtcctccactctgagattctgttataattacttcacattaacacaaaacagaacaagttataag

SEQ ID NO: 31813 - DNA, 322 bp, Glycine max
tacatgcgctagatcacaaagaagaacttatgatgatctgtagttttattggagtgcgtgagataaactaatgccgcataagatgtcaatgcacatagcactgactctcaccttgtcgatatggagattatgcgagagacgacattcagaataccgctttgaccaattgttcataatacacatggatatcctctgagagtatgagtctagactgagaaagcacaaatttgattattagttgtctagaccgaagagcggcgaatgctatatcctcttccataaatgcaatgagaagcagagctatactgctaatctacacatt

SEQ ID NO: 31814 - DNA, 379 bp, Glycine max
ataccatattagaaaactcacggatcatatgataactctaacgacatcatacctatggagaccagagagaagatgaaatccacagacggaatgagaacgatataatcgaggtgatgcactcttgacttacaacactctatgtatagagttacgacgctggatgcaatataaggacggtactatgaagcaattagttagttatgacaaccatgaacaattgtcaataactaactataccaactgacacaatgcgcttactacctacttgagatagtgtacttgaatattgcacttctaatgcagtactctaacataaggtaactaatgcttagctatttatcctgaaaagttgatttgccgtaatacactccgttgtacg

SEQ ID NO: 31815 - DNA, 465 bp, Glycine max
  unsure at all n locations
tagcatggcctctgtgatggacgccatttgatcttttaatgtcgataggtcgcgacttcatcatgtgatctgcactatccgtctctcagctatcccagtctctacagtcgtgcgatcagagatgtgtatanagcggggcgctctgccgcatcttcaacattatcggcgagtttccctaaagacacaaacagaggtgagtctgccacccaaatatgaatatgctcatgaatgatcagagcacttggatngatcccacgccttttccaccactgatggagttaagaactattattagtataaaaaggaacataagctttcatctagccatgatgatacaacagtgcatcacagagcctaaccgggagaatcatatgggccattatttatgatgggttgaaggaatcgattgcccatcaattactatgcggtgacacactctcggatgcctttgcttagctaaacccg

SEQ ID NO: 31816 - DNA, 363 bp, Glycine max
  unsure at all n locations
agcttttcttccacaacagtgtcgtccacaccgtcctggtcggctgcaagggcccatttcctagtcaagtccgatttaaactgccgccacctctcaccaacagtttgaagaattttcttctttgtcctactatcagaagcttcagggatttcaaattccgcctgaaaaataaaaaattaggttttattgttagtcaattataaattttggctaataaagaaaatcagataagcaaattaaaatacctgaatatactcccaaatcaaatccttctgagcagtagggacttccttccaggtctcgtatgtgatgtcgaccttatcacgagcganaacctccaaatatgttcttaatttcttcttg

SEQ ID NO: 31817 - DNA, 442 bp, Glycine max
  unsure at all n locations
tcatagggagtcatgctaatggtagagtgaaaactattgttataagtgaactttatcaacggcagaaaactctaccaattccccttttgttctaagacacacgccctcaaaaggtcctccagtgactaaatggttcattcagtctgagggtggtaggctgaacttagcctaagcttagttcccaacgctttattcagactctcccaaaatctagagataaacctaggatcctatcacacacatgctatatggcacaccatgtaatctgacaatctcaataatatatagggaggtcaacttctccaaggaaaatcttatattaatgggaatattgtgagcaaacttggtcagtccatcaataataacctagataaaatctaaacctctgggggtcctaagtagtcctaccacanaatccatggaaatactatcccacttccac

SEQ ID NO: 31818 - DNA, 385 bp, Glycine max
agcttgtagggttaaagtctcacgattgtcacgtactcatgcaacaattgttagccgtggctatacgagacatcttgccaaacaaattcaggttaacgataactcgcctgtgctttttcttccattctatatgtagcaaagccattgatccagtcatgtttgatgagttagaaaatgaggccgcaattataatgtgtcagtaggagatgtattttccccctgctttctttgacatcatgattcacttgattgtgcatctggtcagagaaatcaaatgttgtggtcctgttcatctacggtggatgtacccgattgagcgatacatgaagatcttaaaagggtatacaaagaatctatatcgtccagaagcatctattgttgagag

SEQ ID NO: 31819 - DNA, 419 bp, Glycine max
ttgataaccttcgatagtgaccagtgaggcctaacaaacctctcagctgctggatattgaaacgtgtcagccactctacaactgactgcaccttaatagcatccatatccactccttcaccagaaactatatgtcccaactgctctatcttcaatacaccatcagagcattcagacaacttatcacaaaaaacattgtctttcaacactttcaatactcctccagatgcataagggtccatgccatgtggaactatataccaatatatcactcaataaccataacacatattgccttacagcatgctggataatatggctcatcatacactgaacagaattcgtagcattggtcaaaccaaaaggaactaccaaccactcataatggccatgagggagcacaaaggctgatcatgtcta

SEQ ID NO: 31820 - DNA, 391 bp, Glycine max
  unsure at all n locations
agcttatgggttgcctcttgtatgcaggaaggctggagagctctccttattctgagctgttgtccccaattcattgggagatgacaaccgaagagctcgcacgacagttctgcactctcttgggtcagtcctatgagaacccactgagtgtagcagttgcagcaggagttgaggggttgcctatactgttaaagctggcaaatgtaatggcagcaaagaagcaggagtggcaggaaatgaagcagttgcctgtgccagttgaattgggtaaggaatttcagttccattcgatttttgtttgccctgtgagtagggatcaaggaagtgaagaanatcctccaatgctgctaccatgcttgcatgtcctttgcaagcaatcaattatgaagct

SEQ ID NO: 31821 - DNA, 421 bp, Glycine max
tgatgaagcgcgtgcgtagggcattataagcattacatggagatcaagactggtttggtgctctggaataatgcagtcatagactcataggactttctttgacatttagtagaggatatttgaaaaaaaattaaaatgttcaaaactgaactaataactgtaagttaaaccacgggattatatatatcttttaagcaaaaatgttgcacgttatcctaattttgggtgctatagatgtaaaaagaaaaaaaaatgaaatactacttgaaataatgtttaaatatttattaagtttcttattactcttttaaaataaaccaatattgtaatatttattttaaccataagctcttgtaattctatatttatacataaattattctcattacaataaagtaatgtcgctaatataaaattattc

SEQ ID NO: 31822 - DNA, 358 bp, Glycine max
  unsure at all n locations
agcttgcttgatttatgtataaactgttaagtttaatagctatacagtgaccgcaggataaaatagtttatcagttaaacagaaataactatttgtgtcttttaagaaaattattgtaaaattaataaatttatcatatatagtgatttgtaattagataataacgtaaaatgactntatactcctgcataattgtaagtttgtaacctatttttcttataaactatagtacctttttggtaccaagtatcttaagaaattagtcatttttttctatgcttgtgatgtggagaaatggccaccactggggagaaagagtggtatttctactgccccagagacagaaagtacaggaaca

SEQ ID NO: 31823 - DNA, 448 bp, Glycine max
  unsure at all n locations
tccattttttagcatttgcatgaagggtgtctaacacagatccaatcagcagtctcatgaatgagagaagtccttcccccatcttctactatgaatattattgtgatgaaaattatatttctgataaactagtcaaggctccccatggtttagctaaagcagtatcaagttttaacattttcaattagttgattgaaactttgtaatcagccatagcaaccgtgagtcgcgatttgccatatttcacagtgatactgcaaacattntagaaacctaatctctatctaatcttactgtagttaatccatatctgtggttatttgaaactctntaagtatgcactcttgaaatctccttttacactataattagctggatgaatatatncttgcccctcttcaacaaattacaaacactcttcatctgtcaacttcaggccatctactat

SEQ ID NO: 31824 - DNA, 341 bp, Glycine max
  unsure at all n locations
agcttgtctcagcgtttatgcgagacagagaccaacatgttagctatcatcgccaagtaccaagaagagttgggtctagccacggcccacgagcatagaatcgcggatgagtatgcccaagtatatgcggaaaaagaggctagaggaagggtgatcgactctttacaccaagaggcaaccatgtggatggatcggtttgctcttaccttgaacgggagtcaagaacttncccgattgttagccaacgccaaagcgatggcagacacctacttcgccctcgaagagaatcatgggcttctcgctattgtcagcatatgataaacttaatggcccacataatt

SEQ ID NO: 31825 - DNA, 450 bp, Glycine max
tcaagaaaaggcgcaaactccttccacaatctgatttcaggcttaaataggtggctatgttcatgctcgtgcgcttagcgcacttctgaaccgcttagcgcgcattagtgaacttcgacttagcgcgacttttcttggtcagcgaatggactgaagcggtgcgcttagcgggatggcccttcgctcagtgagcatgcacaactcatccttctttcagattcttctcgcacttagccaggaatgttgcgcttagcggatggctcactaagccattagattggcttagcgagagggtgaaaatcaacacttcacaaactcgtctaattaacctgacattgagagaaaatgattattaaacacacaaaatggaagtactaagtatttattacctatctctacccacacataattacaacactacaaaataaccataaattggaggagtttgat

SEQ ID NO: 31826 - DNA, 376 bp, Glycine max
  unsure at all n locations
agtttaaagacaagagctaaagtaaaaaacacttggtttatacttgtgcactcaacttgaggtacgtncagttctcctttacaacctataaaaggttgcatttaatcaagctgattacaagaagtattctgacctgcattcctgactacaacaagtattctttaggccacttttgacacacaatctccccctgagattaaaaacacccaaatattctttgatcattaagctactcctagctttccaaacaattgtttgaatgaatacaatatttaaatctctcaaagagaggatatacactaagtttgaatacaatagataactntgctaaagccaagattgatacttattgagttntatttttgaacatccaaca

SEQ ID NO: 31827 - DNA, 433 bp, Glycine max
  unsure at all n locations
ntngccatcccttggataagtccatttctatggacataattgcaccaaaaagttcagtataaagggaggtttgaacaccaaggtaggtagcaaaactaccaagatcgagcaataccattgcaatctttgaagattccaccagctgcagcttgaccaggatttccgtgagaggccacatcgatgttgcacttcacccaagaaggaagaggtctatgccacgttacctaacaataggcggcttctgggaaggtggcaaatggtgttaaattgttgcatcatattgaattggtcaatggacgaccttcattttccatgagacaggttactgaaagagaaaccgaggcatggatcacagagataatatgtgcggacaattganactgggtattgaatctggcgttgtttctagcacaccacattccccacattgaat

SEQ ID NO: 31828 - DNA, 398 bp, Glycine max
agcttggtggtactatagctgcactaaattgttgctgtggtaatcaaatgcagatgcaatgcagtagaagggggtaaagacaatatattactacaattatatgaaattgagtaggtaatactaagaacagaatattagtagcatgaccgaaaataaaatagccgctgtgtcaaataacataacaattgtctcaaatacaggaaaaaaaaatactccaacgccatcattagccgttttgacttattgctgtctttaaaaaaaatgttgcccatttctttcgaattgtggtgatgatgtcgatgtccaacggtgtgtcattagcaaaccactgcaagtattcataattgtaagttagtactgcaaatataaaaattcagttccaagtgtactgaagttta

SEQ ID NO: 31829 - DNA, 459 bp, Glycine max
tcacctctatccaatcttgacgaattcaaacatgatcaacacagtgatccttgtaagaccaaataaaggaaacatcaactagacttcctccaaatggacaaatcgtatcaataactagccctacttgtggctttagctgttgctattgttgtcacacgttatcacaacacacacattccgacgcagtcacactacggcttctctcatatgcattttcccctagatgcaaggggacgcataggggagcatgtccagtaacatacaatatatatttcgtgtgagccatgatacgaatgaaataaagtgaaaaaaataagtcaataatccttaataataaacaattatacttaactaagacaataaaattaaaaacattacatttgtctaaaaaaataataaacatgaacagatttatgaattgaaaataaaaaatttaactaagacaaaaataatacacat

SEQ ID NO: 31830 - DNA, 392 bp, Glycine max
  unsure at all n locations
agcttctggtgggacatcttgacttgctttccaatctgacattcaccacagattctgccttcttctattcccacattgggaatgcctctaactgcacctttgtcaatgattttcttcatgcctcttaagtgcagatgtccaaatctttgatgccatattctgacttcatcttctttggaggatagacatgtggaggagtaactggtttcttgaggtgtccataggtagcagttgtcctttgatctgctgcccttcattagaacttcactcttctcatttgtcactaagcattctgactntgtgaagtttacattgaatccttcatcacacagctgactgatgctgatcaagttagcagtcagtcccttcaccagcagtactctgtccagact

SEQ ID NO: 31831 - DNA, 471 bp, Glycine max
  unsure at all n locations
tagagcaatctgaactttccaagtgatcaccaaaggcttctgcatcaacattgacactctccaccctctntgctttaagcttttgtgctgcattccctgcttcctccttataaatctcagatttattagaggttgcagcagcacaatcaagtgaatcatgatgtctctgaccagatgcacaatcaagtgaatcatgatgtcaaagaaaacaagggaaaaatacatctctaactagcacagtatcttgcggcctcatttccagctcatcaaacttgacaggatcaatgacttttctacatataccatggaagaaaaagcacaggtgagttatggctaacccaactntgtttggcaagatgtctcgtatagccacggctaacaattgttgcatgagcacgtgacaatcgtgagactntaaccctacaagcttaagctccttgaactacacaaggctcttaatatttgaagagt

SEQ ID NO: 31832 - DNA, 394 bp, Glycine max
  unsure at all n locations
agcttttcgattcaatctatgtacccgtagtggtccacattgtgtttcgtgcatttttattctcgttttgtttactttttataccccctcttgacgtgcttgagccattttacttaagtcatttctcgcttaacttaaaaataaaataaatttccaccgaacttttgaattgtattatccattaacttcggttaaaataaattccgaccgttcggtcgtgccgtaaccacgttggaaatcaaaaagaggtaaaaaataatataataatcaaaaagacatctttagtaaaataaagcgaanaatcaatcgggcgttttctctttgggatttctcattcttaatcgaattgattaataactaaagtgaaactaaaggctaaaatcaattcgcctag

SEQ ID NO: 31833 - DNA, 456 bp, Glycine max
  unsure at all n locations
atntgcagtacaaacatgggaccaactcattntatttcaaaaaaaaggttgtatctagtcaaggtctgagagaccatacaagtttcctagcgatttctaattatgtgggccattaagtctatcatatgttgacaatagccgagaagcccatgaatctcttcgggggcggagtaggtgtccgccatcgccttggccttggctaacaagcggngaagttcttgactcccgttcaaggaacagcaaaccatccatccacatggttgcctcttggtgtaaagagtcgatcacccttcctctagcctctttttccgcgtatacttgggcatactcgtccgcgatcctatgctcgtgagccgtggctagacctaactcttcttggtacttggcgatgatagctagcatgttggtctccgtctcgcataaacgctgagacaagctccttttggaccttgaaca

SEQ ID NO: 31834 - DNA, 394 bp, Glycine max
gagcttctcctctattttcctatgaatagggggagaagtgaagggaatataggttcacccctcctggtaattcgagatcacttgaacttagtgaactaaattggttccgtgaagaaaatccaggccgaggcgcttccgtatcgtatccgtaatgttgtcgtgggagatttcgcgaagatgttcaaccgctcttcgacgttcttcggtcggtcgtcgacgttcttcggtcttcaactggcaagttcccgaaatcgaacttttcaattcattctatgtacccttaggggtgctcatttgttatcacgtgcttttattttcatttcatttacttttcgtacccccttttgacatgctgtagtcatttacttaagtgatcttctcggctaatcaaaaa

SEQ ID NO: 31835 - DNA, 423 bp, Glycine max
  unsure at all n locations
tattgaatntatctctatagagtgtacaacaacgagagagatggactagcaaatcaagacaagcttcattgtgggagaaggctcatgaacgtaatgctaagcgtgttctaaatttgataatagagatggaaggcttatgggttaaacttgggcaatatatgtcaacacgtgcagatgtgcttcctgctgcctatatacgtcttttgaagcagttacaggactctcttcctgctcacccttggaagagtttttcttcaattttttttattttaaaaatattctagtttatgttatggaagaaaaaatgcttttaggaaacaatgtacattatgtggctgtaataaaaagagccccacatattctntgagcattgtagatgattgttgttcattaacctactacaacaattcaaagtcttttctt

SEQ ID NO: 31836 - DNA, 390 bp, Glycine max
agcttgtaattgattaaactgaaacaaaaatatctctacaagttataaacacttgtgtaattgattacgattagccttgtaatcaattagaatagagttttatgcactaaagaaagtttctaactttagaaacaatcttcttactcctacatgatggtgcatgatgtacatgtgaaaagatagagactaagatgcaacacagaatacaacaatcaatacaaatgtcactcaaaagagttggtcatgctaaagacaaaacttctgcaagcttcttcaagctccaagacttagtcttcatgctgctgcctatatctctaacaatcttctctttcttggctttcatgatgccaaacttgaattatcatcttagtgcatttggagagtcttgat

SEQ ID NO: 31837 - DNA, 370 bp, Glycine max
  unsure at all n locations
ntagtgactgtgtgcaatcacaaattgtacattgtgtgtcctcattgatatgtgtctatagttggcttggcatgaattcctaattgtcataacatattattgatggatatgatctacgcattctttctttcttcacattnttaagccacgggccaaatagctatcccaacgtatattatttctatcattttgcgagccttatgagccaaacacttgatattttattggccactaacctagacaaaaattttctaccttaccttcggntaggagagcaatggtgtttttgatggcgatttctatcatttggtggctaatgtgatgggaatacactattcttatgggtattaaaggaaattaaatatttatc

SEQ ID NO: 31838 - DNA, 393 bp, Glycine max
agctttgcaacccatatctcttccgcaggccttctctcttgccaaactccaggaggataagttggaggaccattgccgcccttaccgacctcgtcacacacccatcaccaccactccactaccacacccacctctcttaccttcaccacccaacctggcctccaccccttcccattccaaaccccaagttaaacatctaaccccaaaagaaatggcccgcaaacgcgaacaaggcctatgctataactgtgacgacaaataagggcccaaccatcgttgtcgcgctcatttctttttgttgattgccgacaatcctagcaccactatcccactcgaaacctatgttaccaaaccacctatcccaccttcttttgacccaacccatgccctcat

SEQ ID NO: 31839 - DNA, 410 bp, Glycine max
  unsure at all n locations
ntcccacaagtcctaattgacattntaaactacgattaactcactttagcctccaattaccactaaccccaaatttagcttttcaaaacctcacacttttccactcacatcactaccattctcacatttaaccctaggttaactctccccatcaactctaccagttttctaccaacaatttcagcacacaaacatcacaaagcatcatcataaaaccctaaaacagaatcgtagctctactacatcaaacatgtcaagtttagcatgcttttaacaaattccttcacaaataactaccataaggcataaacctagtagaactacccatcatatctcccanaaacccaatacccacgaaattcatgtgagaagaagtccacccaaaccttanattcgaagtcccacaacgt

SEQ ID NO: 31840 - DNA, 381 bp, Glycine max
agcttatgacaattagaaattctcgagagcttccgatgattaattttgatcgtctcgatatattataagtctgaatcggacctacgtgtgaaaagttatgaccatttgaattttttgagagattccgttgtttgaatttcgagcgtctagatatattatgcgcctgaatttgacttgcctgtgaaaggttataaccatttgaatttctcaagagcttccgttattcaatttcgagcttctctatatgtgatgcgcctaaatcggacatccgggaaaaaagttatgaccatttgaaattctcaaaagcttcggtagttaaatttcgagcatctcgatatattattcgcctgaatctgacatccgtgtaaaaagttatgacca

SEQ ID NO: 31841 - DNA, 417 bp, Glycine max
  unsure at all n locations
ccttgtcgacacgcggagatttacgtnaactnttgtgctcacaagatttgtcatactgacatttgagtcacgttgacgggcggagataccctagtggttatccgtataaacattcttttttgctgtctgtaaaacgaaaagcctgatagcatgcagagactaacgtcgtcttctgcgcccttcgtcaatcgcggccgacaagcccgttgacacgcagagatttacgtcattcccgcgctcacacatctgtcatactgacatttgagtcatgctgacggacggaaatacccaagtggatatccgtataaacattctttgttcctgtctgtaagacgaaatgcctgatagcacgcagagactaacatcgtcttctgggcccttcgtgaatcgcggccgacaagcccgttgacacgcgga

SEQ ID NO: 31842 - DNA, 387 bp, Glycine max
agcttctaacttggcttggagatcttggccatctttgaaaaactgcatcatgtgtaagagataatcaaagacataaattattgctactcttggtagatgagtgaaaagtggaaagttgctggtaaaaaatggaaaaatactcacgtaggatggataccacatcattgtagttgatggagaagccatgcaagggcaagttatgatgttataaatccatgtttatctaccaacttttctatcttgaaataattgctctcgtcaattctctgccaacacatgatacttccatgtttacattatgatctttctattgaattttcattcatatggtatgaaatattcctacttcttgcttaagtgcaactaggaagtacctacaaatatcga

SEQ ID NO: 31843 - DNA, 370 bp, Glycine max
tcatcactaatttacaagagaaataggaatctatcacagatttagagagtggaccggaaatttatgagtgtatagataataaaatctataaatattatactctaataaataagtttattaattacttacgacatattatagctttttttaattgatcatatgttattctcttcttgacaatagattacaaatcattgatgataattgctatcgaccgatgagttaatttcgtatgacctttccacctacaatacgacaaccttattatactagaaacaaaatgttacataaaattttatattggtgtataatttataatagtcataatgcctgaaaatttgaaatgaacttttaggactattatatatat

SEQ ID NO: 31844 - DNA, 380 bp, Glycine max
agcttgttatgttcttgtcatatcatacatgttatcctacttgcatatcctatcccattggataggagtaaagtttaaatcactttccggtaattaaaaataatttttcctgttttcaaattataattataataatagtaattgtaataattataatgattgttaggattggttgatagcaatatagtttttaatagttataattctaatttaccagaattactagacaatattcacctcactatttccctatttaaatcccttgtgatttgatttctgctattaggaagaaacactagatttttttttttaagattgtggtgagtggttgatgtagataattgataccaataaaaatcttttactatgtcaagttttgt

SEQ ID NO: 31845 - DNA, 433 bp, Glycine max
tgtgattgagaagtgcctttgtagatagtcaggaggaaaattgatgatcctaaatgggtcatggttacttgatgattacctgtcagtccatagtaatctcccagttcagtccagccaggcactatagttgggttctgaagatcttggttgtatttaatacagtgtatcttgtcattactatctaggagatgccaagtatgctctaattcatctttccatcttacgccacagctcctctaacttcaccataagactacatttaaagtgaactaatataagcaatattgataggttatatcatgtcatgtgtaattgagaatagccttgaaattcctaacctgatccttaatgtgaattgtgtcaacatatcaagtgcgtctttgtaaccatcatcataaccttacccatttcattccaattcttctgatcttca

SEQ ID NO: 31846 - DNA, 378 bp, Glycine max
agcttctcaacgaggtgagcttagttatgagagggatatgagtagctaagctctagcttctcaaggaagttttctcaaagaagcttctcaaggaatctacctagtctataaatagaagcatgtgtaacacttgttgtaactttgatgaataaaagtcttatgagacacacttcaaagttccacttctctccctcttttattccttcaattccgtgctccccccttctctctttcttttcctccattaaagcatcctcttcaagctttttatctaaggcacattcttggtggtgaagctccttcttccatggtttattcccttgtggatggtgcctaccctcttctcttctcctttgccttccgctgcatctccatggt

SEQ ID NO: 31847 - DNA, 406 bp, Glycine max
  unsure at all n locations
nttcggatntggtcttcgctggcgaaattatcaaagtgggcctggaaagaggtaaatctaaccatcctactttgatgaatgcgaaaactgtggcaaatgaagagggtgagaatgaaggagaaacccatgctgcgactgccattcctatacggccaagtttcccgccaacccaacaatgtcattactcagccaataacaacccttctccttactcaccacccattcgtccacaaaagcatccctaaatcaaccacaaaacccacctaccacacaaccaatgctaaacaccacttttagcacaaaccanaacaccaaccaaggaaggaattctgcagcaaaatcttgcagaattcaccccaattttggtgtcctatgctaacttggtcccttatctacttgataatgc

SEQ ID NO: 31848 - DNA, 382 bp, Glycine max
  unsure at all n locations
agcttgtgcatccaataccctgatgaggatgtcccatatgttcttaaaactggactgattcatttgcttccaaagtttcatggccttgcaggtgaagacccgcacaaacatttgaaagaatttcacattgtctgctccaccatgaaacccccagatgtccaagaggatcacatatttctgaaggcttttcctcattcattagagggagtggcaaaggactggctgtattaccttgctccaaggtccatcacgagctgngatgaccttaagagagtattcttagaaaaaattttccctacttccaggaccacaaccatcaggaaggatatctcaggtattagacaactcagtggagagagcctgtatgagtactgggagagat

SEQ ID NO: 31849 - DNA, 450 bp, Glycine max
  unsure at all n locations
tcttatccaaggcttgtcttggtggtgaagcttcttcttccatggcttattccctagtggatggcgcctcctctcacctcttcttcaacctttgtcattcttgactccatttcattgaagcgcatatccacttgcatttccaaagtgtcaaacctctcaccaacaaaggttttaagaccatcaaacttttccaaaatcttcgaaagaagagatgaatcttctccccatgtccttctcaccatcatttctagcacccttctttatccaagagccatcatgctccttaatataaccaaaggatgctatgactctagtgcctataaggaatgatctcttgattggaacatacggttcacaatcaagaacgatgttgaagtgttgaacgaaaagggtaacaagatgaggataangcaatgncgcattcaatcgcaatgccttatgcatgtgata

SEQ ID NO: 31850 - DNA, 354 bp, Glycine max
agcttgacaatcaaccctcggctcacaatgaagtgcactgtctgcattttattcttgcatactattgaaaaattatactcatttttttattaaggtctcccttattttaggtcactgtatattcataacatttcacttatttgtaagatcacccttcattcttcttaaatctctttctctattgatgcttaactatgatatgcataattctgcctttgataaatgaattctgcaattcaatctataatatcgacggataatctgtatttgaacttgaaggcaagttagtatcaattacttcaacactcttgtctgggacagatgcatgcttggcaccatagcttgcactacact

SEQ ID NO: 31851 - DNA, 443 bp, Glycine max
tgtaccattgatttgcgtggttgaaataaaagagtgaagcattgttttaatagtcgttttttacatcaatttaatgtctgagaacaattaaagtgattaatattttcatcttataagttacaaagacgaagataatgatttctatcttttaagaactaatgcaatcaacttcaaatcattcaaaattaaagatgatgtttcattcttaaattaatttaaacatttacttgttaactgatagctttttgctagagttgttcctttcataaagatctcgcatcacgaggtttttcaattttcatattcttttatcttttaaaatacgtggttgcgagcttcatagcaatttagtcgttgtatagcataatttagtgtgttagtctttgtcaaaatatagaggaattagtctttattaccatgtggctattatgtgtccacgtaaa

SEQ ID NO: 31852 - DNA, 391 bp, Glycine max
  unsure at all n locations
agctttttggagtagaaacatgggaccaactcattttatttcaaaaaaaaggttgtatctagtcaaggtctgagagaccatacaagtttcctagcgatttctaattatgtgggccattaagtctatcatatgttgacaatagccgagaagcccatgaatctcttcgggggcggagtaggtgtccgccatcgccttggccttggctaacaagcggngaagttcttgactcccgttcaaggtaagagcaaaccgatccatccacatggttgcctcttggtgtaaagagtcgatcacccttcctctagcctctttttccgcgtatacttgggcatactcgtccgcgatcctatgctcgtgagccgtggctagacctaactcttcttggtacttg

SEQ ID NO: 31853 - DNA, 457 bp, Glycine max
  unsure at all n locations
ntataagcgcgggttcgggagacaaaggtcaagcgttcgcgatatgcgaagatgatattccgagtactttggatttggtacgaccatgccctcctgatttccagctgggaaattggcgagtggaggaacgccccggcatttacgcaacaagcataatgtaaacctttacggttttaaaagctctatagttgggcctaggctttagagtttttccttttgttaaggctttgtgtctttgtttttgaattataatacaaggatctttcttcatctgttcctggtctctacccattctcattcacttgcatgtttacttctttttctgaaacggcagatccgatgacgagtcccccgaaggtactaatacctgggacccgtctatcgacttcgagcaagaaatgaatcanacggaagatgaaggacatgaggatgtgggacttcccccagaactagaaag

SEQ ID NO: 31854 - DNA, 399 bp, Glycine max
agcttttacaaaaaggttcatcaagtcaagttgaaatatggaagtaaccgtcctgcaagattggggcaaaagatgaatcgagtcacatcactgcttcatctactgccaaacatatttaggattgttgatgtccttgttacttccagtttcaccttgacaaagatgtcatggaccatgttgaaaatctaaattgattcaaccccatatcctgcgtaaaaattcgcaatacttcgactgtacatcattcgcatgcatccatgcttttcattggttgcattgctcattgcattctttccttgaaaaataaaataaaataaaataaaatgaacttatcaaaaagaaaaggacacgctttacggcgcccttaccgaactcgtactagagctagagtaatgggtg

SEQ ID NO: 31855 - DNA, 456 bp, Glycine max
  unsure at all n locations
tcttcagaaggacgtanattntgtgcttgaccagtcttgtagagaggcatttgaggagctaaggaggaggcttaccacctctcccatcatgcagccatcggattgggagcttccatttgagctcatgtgtgatgcctccaattatgcacttggggttgtttttccgcacagagttatagactatcacatgtcattgcttacgcctcacgcctctagatggagcccaagttaactcaccaccatcgatacgagcttttagctgttgtttttacattagataaatttagatcttattagcttttctcccatattactgtctatactaaccatgcagccttgacgtacctattgaagaagcttgatgctaaacgtagattgatcaggtagatgcttcttcacgagtttgatattgagatcagagacagaagtggtgcacaacatgtggtgactgatcat

SEQ ID NO: 31856 - DNA, 396 bp, Glycine max
agcttgtccttgggaaaccttcaaaatgtgttttggtgaagtaggttcccctccaacaccaaccttaagagcacaacgagatctgcaatatttatgataaacatatgcatctacaaccacccttttgaaatttttataaacagaaagagtgagggcttggagatctcgaatgtgggaaggttgaagagaccaattgaattgggagatgtctcatatgaacatggatttaataaggtggttatggaatagattccatgctcattgatgtcatctttgtctccaatctgaatgtttagaatttcacttggattggtgactcttgaattagcctcgtctagggcttcctccatagatggataagtatcatcctcaaagtcaaagggagttaaaaactaa

SEQ ID NO: 31857 - DNA, 463 bp, Glycine max
  unsure at all n locations
tgacaatattcacaagactagtggtgagcttagagttcanaatgaagtgatgtcttccactctcaaggagctcaaaacctctaataaagagcttaaagatcaacatgataaacttgagaagaagcatgatgagctcatcactagacataattctctaaaggacaaatacaccacattaaaaattgactatgatagtctcgtggttgctaatgaactcgctcttgagacacatgatctactaaccatgtgttaagtgtgatatagctacatcatgtgatgacttgatcattgaaagcattgagcaaggttctagtagcaaaggcaagagtgtggttgagtcaagcaaccatgatgattatgccaagattaagagtgagaatgagaagcttgcaaatgagaacaagaagctaacaggtttgatggctcttgagaagcaaccaacanatgagtcactcattgaaga

SEQ ID NO: 31858 - DNA, 378 bp, Glycine max
agcttaaaagaataatttctagaaagttatccgtttctaaaacgcacttgaacacatctgaattgaagtagatgaaaactgaactaattttgtaagaaagtttttcactgcaaaattataaaatcctttatttgtatcttaagaaattggttattctaatcttagaaacgtcatttttaaaaataatttcacaaaataaatataaaattttcatgtttgcccaaaatttgtcatattgattatcatcttcagagttggttctcatgtgtaacattaaacttaatcaaactaaattacacataatttattatgttttatgtaatatttatccaaatttgataatgtgattttcaggtttagtgttaattctcaagtcaa

SEQ ID NO: 31859 - DNA, 158 bp, Glycine max
caacatgatcttaataaacatgttaatgaaccaaaactatgccatggcttatgaaacttcacggattgctcaagaaggggacaactattatatctaaacatgcattctaaatcccggatatttggcaggtggttaccaccgtcgccataagtgacatt

SEQ ID NO: 31860 - DNA, 389 bp, Glycine max
  unsure at all n locations
agctttgcggatttggtcttcgccgacaaaaggatcgaagcggatctgaaaataggcaaatttgatcatcctgctttgatgaatgagaaaactggggcaaatgaagaggatgagaatgatgaaggaatccatgttgaggctgccattcctacatggccaaatttcccatcatcccaacaatgtcattacttagccaatatcagcccttctcattacctaccacccggtcatccacaaaggctatccccaaatcatccacaaagtttgctgaccgcgcatncaatgccaaagcgcaaaccanaacaccaaccaagagatgaagtttgcagcgaacaatcctatagaattcaccccaattcctgtgtactatgctaacttngctccatatc

SEQ ID NO: 31861 - DNA, 382 bp, Glycine max
  unsure at all n locations
tgcagtcattagaagaaaaagaacatgtgattagaagtatgactgacaatgttagtcagtttgtcagattgattgtgaaagaatgcattgactgtattccagtgagagtgtgatccttaaattttaagagaaacaactatcatttagtactgatttttgcatgattctctgaagtatggactaaatgcatgaattgaggatgatgaaggccatgttttgattgtggtactactttagccaaaagctgaccttgtgcttggatgatttatcccttgcacccagtttgagctgaatgaatgattgattgattgaaccttgagcctatacagtcttagacttctgctaccttgtcttaagttntaggagagcatcatccatagaa

SEQ ID NO: 31862 - DNA, 391 bp, Glycine max
agcttctacttatgtggtatggcgggcttccttcactttgttgtctcaaccgcgagctttgaccaccgcccttccttcccgtgatgcttctctttacatctgcctgagtgggcttatagcctaaaccatacttcccacgatttcctttggcatttatcaggctagttatgtcaccgctgtctttgcctaaacccattccgggttcgtaaccgttccccaacataactcgggccatcattactgctgcatcggacaggcaagcttgcccagagaaggagtccacggaggaaatgcttaccacctcacaagactggaaagcggtttctaatgactcctctgcggcttccacataaggcatagaggatgggcagctcaccaagatgtcttcctc

SEQ ID NO: 31863 - DNA, 451 bp, Glycine max
tataaactctatacaagaatgaagctcttataccacttgttataccagtggcctcaataacttaagagggataggctcaaaatgcagaagaagtagcaatcaatttaaaaatgttctttaaatggacaaaattgattgcaacaaaataaatgagataagggaagagagaatgcaaacacaatttttatactggtttggcaaagtccgtgcctacgtccagtactcaagtacccacttgagatttccactccctttgtaaaaatccgtttacaaagtctgaaccacacagggacaacccatcccttgtgttcaggaatcattacaacttaagagacccttagtcccttaatcagtctctttgaatgagaagaaagaaagaagaattctctcttgaagagaaggatattacaattgaagtccatggagaaactcttaatagatttgcaagtat

SEQ ID NO: 31864 - DNA, 386 bp, Glycine max
  unsure at all n locations
agcttgcttccattttcagtcatcaaagtcacctcccctatgccaacaatcttgcttgtgacatggttgcccatcttcaccataccaaaatcctctttttgatatgacaaaaaaaaaatccttcatgaggagtaacaaggaaaaatactccagagtcaattatccatatacaataatcagatgcaatattaaaataattttcattaccgataaaaaaaaacattttcatcatttaatgacagagaagtagtggttccacctttattcttcttctttgggtcaattcaattagcatggatagttccagtcttctgatctttcttcaagaatctaccctcaaacttcttatgggctgactntccgtaatagtagaaactaaagccttt

SEQ ID NO: 31865 - DNA, 423 bp, Glycine max
taagccattgtgtaaaaaaagcacatgaacagttttatacccaacatgcctcctcctcacacaaaagtctttgaacttggagtgtaaagtatgcacaagcccaccttgactagtgttaaaattcaattttttattcaaataatgggagcagtattaatcaaactataaaggtcagagagttggcaacaccatgccattaactaaatatcccaaaagcttacagtgttggcgaaagctcatgatagttttatctggcagtagacatacctcagtcctcaagttcccaaaacacaagggaaaccgtaaaaatgaataaataaagacactcagacacctattccatgcttatgaaaatatttctagcatctctgctattgcaaaagtattgctacaaacggcttgcatgcacatcatccaaaccta

SEQ ID NO: 31866 - DNA, 382 bp, Glycine max
agcttggtttgaggtacttacccgttgaagactgaagaaaacgattaacgaacgatgaatcttgaaaaacggtcgagaatctttgcgtaattactcacggaaatgttacggaaacgttacggaagcgcctcggcttggattttcttcacggaactaattttcctcagctatttcgagagagagagaagtgcctaaggggctgaacccttttctacttcacttctccacctatttatagaaaattaggggagaagcttgccacccagctcacccaggcgagcaaggttgcttcctccagaagcaacagccttctggaggaatcttctggagggcccaagtgggcctgattgttatttgcacccccatttttactaaatacacc

SEQ ID NO: 31867 - DNA, 437 bp, Glycine max
tgacttaactcagtattctttgtcctaccaagtcactcttggctctaaaaaaatcaacaagatttgatggaaggttgcacattcgctaatattacatcttcttacacatggatatctctctcagtattttacttttttctctcacgatttagaaggtgtttcgagagcttactatctatatagagatttacaaaattttttacagaacagaatagttcatatcttgatcttccaaacttctctatatatagccttcatcttcaagtatatgtagcctcacaacgggtggatttttcactctgttcttcgcctgaattcttgaggcgattggagcttgcgtcatatatatgtcccttctcatgcgaagttcatgctgatacgttcgtgagtcattgacttcaacaagtgtgtgacttctttcatcatagcacatctat

SEQ ID NO: 31868 - DNA, 376 bp, Glycine max
agcttctgatgagctctaatcagtattttgatttatgagcgacttacatcaaatctcgttatatggatcatcatcatacgaattacacatgtaacccacacgtcgtcgaaccatatgatgctaccaatttgtaattcagttaattctttttactgtaattgaaaattcataattaccacaatgatattcttaattctatgatgctatattattttctgatctattgtaacagttgtagaggttatttattagcttgacttgctgaataatattcattcgattatctctcataattggtttgaattctccttaatttgatcttttacaggactctttgttcttaattataagctttggatctttacatatatatcat

SEQ ID NO: 31869 - DNA, 358 bp, Glycine max
  unsure at all n locations
ntgagatagcttctggcctgagaatcaattgtgctaagagccaactcggagcaattggtcagtctgaacagtggatcagatgtgctgctgatttcttgaactgtggaccactacagcttcctttctgctacctagggctgcctataggtgttaatccgacaaggaaggtggtgtgggaacctattatcaataaattcgaggctagattgaacaaatggaggcacccaacatatcatggctggtagaatcaccctaactaatgctgtattaacagctctgcccttgctntatatgtcttttttcacggccccttcagcaatgattaacaagctcactaccattcacagaaagtttcttt

SEQ ID NO: 31870 - DNA, 422 bp, Glycine max
tatgcatgcatataataattgtcttatgcattcttaagtgttgtatgtggacgttatctagttctcgtatttaataagaatggtatcaccattactttgtttttactatcatgttcacccgtagtatgtaagattgatatcccaaactatgattatgaaatcaaatttctctatggcaccagatgggattttcacatggacctattacatatcttgactttgaccggccgggtatcgacttcctctttgtatggcattcacaatgcggtttatacatatgcaagttgcttaaaactaagactattgcttaacaaaatttgtacttgaagtatttgacataatatttcttatacaaatatatttgcttgttgcaaaattatctttaaataatacaaaagatagcttcacgtcaccaatcaaca

SEQ ID NO: 31871 - DNA, 379 bp, Glycine max
agcttgagaagaatttgagaattactcaataggttcttgaactaatcgaaatttattaatcgggttcctaattaaataatttttttcaattgaattcttaaacttctatttgttttttagttagggttctgtcatcaactccgttaaggaaattccatatgaaaccttttttttttcacgaactgactccagtttcacttcctgaaactttagagcatgcttaggacaaaaactttggagatttcatatattttttttagtaaaatagttgttctgtgtgtaactatttattgcacatcccaagttgactctctccaattctctcacattgttatctttttctattttccttttcatacacacatttcaaatttgggaa

SEQ ID NO: 31872 - DNA, 514 bp, Glycine max
  unsure at all n locations
cgccacgcgcgcgcgtggacngttganattggatgccanttactatacacgcgacactatacaatactcgcgcttacacattatnagatgtcctatgcagccactctgagttctttctatgcacgctgatttgaaggaatgtttcctatgcgactaattacactgctaaccgtgatattatcacggataacaattctaatattcctaataaaagtgcatgttgagcacttacattcttattctagaccatcaattatgattcatgaaccacgattccttgaatagaatccccacactcgcacaaattaatgtatactatatatgtaacgtgtctattgatgaatatgtatgtcaatctgcaccagctgtgagattgagatgcaattgaacatcgtttgagctacattggcattatcgaggcgagttcatgctcataaggtagtgagacttgtcattacaaactgacgagatttcttcgctcattcctgacctactccaacccatcatgccttcn

SEQ ID NO: 31873 - DNA, 387 bp, Glycine max
agcttgtgttatgccctggccttgaaatgaggtaacctccactcccctaatcatctttaacattcatgtacaataaagaaaagacttgacatcgagagtatttaagcacctgaacgaacaaacaaatttcttgttggcaagaattatggcataacctctggaaagatgaatcccagactaagagtgagctgaattcatactgatttggaagggtagttgaaatgagaatgagatacttgggtacaattcatcagataaaacaaaacaaggcttcatgaattatgccacccacaaacatatcacaatttataaagcaatgctatcatttaaatgatatcaatatgcggcagtgattcatatgatcacaattttcaaatgaatctttca

SEQ ID NO: 31874 - DNA, 357 bp, Glycine max
ctatacttaactatctcttattttactaatgacatcaatctttattcggtttttaactaccaaatttcatctttgatttcttttctttgttgttgctagtaatcaactactgcccttatctttattagtatgcgacgagtgctagacacagagtaccagacttgtgtatatgatgctgctgtcttaatttttggtaaatgactcgcgtatatgttgtttgacatacatcaattcacgaaccaacacgctttgggaaaccattattgatacatgcacgtgctccgcgcactttacctacccataaataatatacatttgatttacatgatcgatataataatacttaactaattatgt

SEQ ID NO: 31875 - DNA, 389 bp, Glycine max
  unsure at all n locations
agctttacagatatttatcttctttgattcttgagctatgcatttagagctaaactgttacttggagttggttaggcccaataactgccagaagtacagtagttaaagtcacagaaaaaagtatgaatttgtagcataaaaagggttaccggtagtacctgtaacaattcagaataattttaagatgtttggtctgcggaagggcagcaatgatgctcatgttttaaaacatccttgtccatgaaaataattctaagtaaatgatgtttggtatgcanaaccttctgaaattgagctgcaaccatatnaaaatgttctattttacactatacatatacggcaaacatgtcgacataaattcatcagttcacaatattacactatagctc

SEQ ID NO: 31876 - DNA, 417 bp, Glycine max
  unsure at all n locations
ntgcaataaaagacaaatgaaataaacacttttttagacgacaattctttataaaaaaaaattgggaacaaaattcatctgttaaatatcttatctgacaaataattcagacgtctacacccatgaataaaatttgggtttataaaataattatagagtatttacatggattcagatagctgaagagagccccanagaagttaaaagtatcatgaattcacagttttagaagaaaacaaatgtgaaattgtacaaatgtacttgcatgatgtaagcctggaattaataagtcgtgaattcccgataaaagcaatgcccatagatcctgttacaaatttagctgtacataaactaatgtttaaaacaatttagaataagcatgcatctgccaggatagcaagtagctaatctgcatct

SEQ ID NO: 31877 - DNA, 393 bp, Glycine max
agcttgaatgcaaactggatgcattggttaacttggtaacccagctggccttgaatcagaaatctgtacctgtcacaagggtttgtggtttgtgctcctctgctgaccaccatacagaactttgcccttccatgcagcaacctggagcaattgagcaacctgaagcttatgctgcaaacatttacaatagacctcctcaacctcagcagcaaaatcaaccacaacagaacaattatgacctctccagcaacagatacaaccctggatggaggaatcacccaatctcagatggctagccctcaacaacaacaacaacagcctgctccttccttccaaaatgctgctggcccaagcagaccatacattcctccaccaatccaacaacaacaacag

SEQ ID NO: 31878 - DNA, 424 bp, Glycine max
  unsure at all n locations
actacgtacaactttntaagtgactggttttgaagaaattcccaaaagtcacaacttttaagagtttttgttcaacacttgctttgtcaagaaaagttcattgggcaaaaacttgtgttattctatttttcttcctctcctccattcttacaaaaagcttttcaaaagacctattcttggtgactgttttcaagagaaggtcttcttggttacaaacactgaacacaagggaccaacgctccttgggttcattgcaagaagcaggacttgcttcttggttcgcactggacacaaaagcaaacgtcttttgggttcattgcaagaagtgggtataacttcttggttgttatcattggacacaagggaccaacgttccttgnggttcattgcaagaagtgggaataacttcttgattgtaatcact

SEQ ID NO: 31879 - DNA, 361 bp, Glycine max
agcttcgttgatggatgcttgcctgtggagcttctatggaagctggatctttgagctccaatgaagtccttcaatggtgattttccaccatggagatgcatcggatggctaaggagaagaggagaggggtggcaccatccactagggaataagccatggaataaggagcttcaccacccataatgtgccatggataagaagcttctagaggatgctttaatggaggagaagatagagagaacgggggagccccaaattgaaggaattaaacagggagaccgctgaacttttcacgtgcctcataagaattttcttcattaaaggtacaacgagtgttacacatgcctctatttatagaata

SEQ ID NO: 31880 - DNA, 420 bp, Glycine max
  unsure at all n locations
ttggtttgactgagataatccagtaagaaaaatcttggtcgtgcaaatgtaagattgagagattttggatgagagagagaaaagtgaatgtttatgcaaaaatgcttgggcacgtctgagtgtactgatgttacacttcactaagctatttttgactctctcgcttagcgaaatgttgtgctaagcaaactcgagagacgttcggtttctcaaggcctgtcgcttagcgaacccttgcgctaagctattttattattattattattttttacaaatttcgcagctacgcttagcaccggatcgaaccgnttagggagatctgcagatcagaaaacctacaactctcgctaagccgggctctgggcccacttagctaaaatcatgcattatgagtgcagaggagtgggcgttgagcggaca

SEQ ID NO: 31881 - DNA, 548 bp, Glycine max
  unsure at all n locations
ctctcccgccatcctcctccttcccacactcttgctaataatatcaatcatatactatcaaattnnncnnaccgcggggntttgattgcatcatgaccatcaaggcgaattccactcggtaccccgagatcctctacagtcgacccgcggcctgcatgcttatcgtccacagcagcaacatctcgagcatcctcatgcataacattcaatgatgccaaaacttctttaaattcagacactaccccaatttcttcaacggtcgaggagtcatcatgagaatcacaccttaaccacacatctgcaattatttctacaatacaatgcgtcaaacgatgatgactcatcttttccccaacctatgcatgccatcttaccgcttctcatacttcttccctttcatattaccataacgcttcttgaagcacataagacaatttgcgtcccccctcagcccaccactttagagaaatttgagtctttgaaacttaatataaatatcccaacatcttgacaaccaaatcaaatcctcaaatcttcctttcactacc

SEQ ID NO: 31882 - DNA, 222 bp, Glycine max
cttcgtaaatctttataatgacctaaacaatttccaacgtcgtggactgacaggctaacaatagttgtcaagcaacatggttctgctcaatgccaaacaaaccctactatgtttgttaagcactctctggatgcaaagacacccctgcttattgttcatgcagatgatactcataattctacgacacgattatgatcaaataaattatctgaagaatcttct

SEQ ID NO: 31883 - DNA, 387 bp, Glycine max
tgcttctaaattaaatgttcccagaaacgtatcctataaacaaagaacgttctcttcctgtgtgatagatgttctcgtttattttcaactgttgtgatctctcctcctttttttttgctctatgtctctccttttctccctcgattttcttgatctttatttatagtaattcctaacaacttatctaatcatttcactgcacatttcttatcttattttatcatatatatacctataagataaatctaataatttatcttctttcatttatcttatattcttctcagatcaaccactatgctcaataatagcacataaactaaatatattattttatcttatctaaatcatatatatatattctatcctaccaaatatattatttta

SEQ ID NO: 31884 - DNA, 331 bp, Glycine max
  unsure at all n locations
tgaactatagntactccgcttgaatggtgattttncttttcttaaaaataattcttgtgttttgaaacgggttggctgtctagaggccagttgacgctgtgtttcattctgattccttcagcgatgtgcatgtacgcgttaatcctgtttatgtccacactcttcctttagctctttcaactggggtccaccatgcatcctttttgccacccttagtggaagttcctatcatatcatctttgatccctttatatcataactgggatccagttcttaaaatattncttttacgccccccttcatttacttgctgacagattttatttgatga

SEQ ID NO: 31885 - DNA, 381 bp, Glycine max
tagcttggagggatttatggggacccggtgttgagaggaacgaggataagggctacgtgggagtacgtgagctcagctgaaggtgggcaactggggatggtggatttttgtgtgatttgtggatgtggagagtcgacttgcaccatcgcccgatcgccacctattaccacatatgacgggtaccccataatcctacaagcttgaagtgagaaagtgtggaagagtcagtcttcctacttttattcgttgaccacagagtggtacatggagatatgtccgcgcgtcacgcaccttgtggacgtcaagtggtgtgctatttcccaaaaccaagcttgaccaatccacacccaacctcgtcatagtcagtcagtgagaacctgt

SEQ ID NO: 31886 - DNA, 308 bp, Glycine max
  unsure at all n locations
ttccacgaagaggtctanaagagacgcctcttcggaagggtccagtgacacctccgagttcgatagccaccgtttctggagcgtacagcaccatcagcgcttccaggtcatcaaacgatggtcgcttcacatagagaggcgcattccgctcacggaggatgagtctacagactttcacgaagagatagctcgcacacattggacgtccctggtgactcccatggctaaccttgacccatagatagtcctggagttctatgctaatgcccccccacccacgaggcgtgcgagacaatgcgttatgggtg

SEQ ID NO: 31887 - DNA, 387 bp, Glycine max
agcttgggatctaaactttgcggtccttgagcggcattgaggtggtgacttgggaaccctagacagggagtcgaagagtgagagcacaagagagttgagggaaaaatgaaatattaaaaatagtgaaaaatattttaagatggttttgtataaaccatcttaaaattgcaaaactgtcgtaaagctattgcatttatttacaaaaatgtcactagacacattttccactcctgaaaatcaattgatctacattttaaattttaaactaactataactcctttctattttaagggagcactatcatcaattaattttatctaccacaaaccatttaaatatcagaaaatcatagagaatattattttatatttattaaattaaatatg

SEQ ID NO: 31888 - DNA, 407 bp, Glycine max
tcatggtaaatcaagattgattcaaggagttttgatgataacaaagatgatgacaaaaagctcataagtcaagatcacttcatgataacaaagatgatgatattcacgaatgagtttaagattgagtcaagaacactttaaagatcaagaggacacttgatttcaagaatcaagaatcaagattcaagattcaagattcaagaataatcaagatcaagattcaagactcatcgattcaataatcaagagaagacttacttaagataagcccacccagtttttcaaccattgagtatcacaagaagttttcacaaaatcattaccaaagagttttactctctggtaatcgattaccagactatagtagtcgattaccagtggttttaaaacgttaagactttcacaat

SEQ ID NO: 31889 - DNA, 383 bp, Glycine max
  unsure at all n locations
agcttgcttatggggcttctatggaggctggatctttgagctttaatgaggtcctttaatggtgattttccacaatggagaatcatcggaagacaaaggagaagaggtgagaggaggcgccatccactanggaataagccatggaagaaggagcttcaccaccaagatgagccttggataagaagcttggaaggatgcttcaatggaggaaaagaaagagggagagaaagagagaggggggtgcacgaaatggaaggaataaaagagggagcacgcggaactttaagtatgtctcacaagactctcattcatcaaagttacaacaagtgttacacatgcttctatttatagactacgtagcttccttgagaagctctcttgag

SEQ ID NO: 31890 - DNA, 418 bp, Glycine max
taagagaaacctactcttagcttcaaatttgaaacacctattctagcatgcagtaaaactcttgcatatgtcgtaacaatgcgtaaaaagcatatgaaatagaatcaaggagagatacaacctttacattctaatgcaagaacaacttgattgaatggacctctcttgatctcaagtgtgtttacaactcactaatcacacaatcttgagagaaactttgctttagaaatctctaagaaacaaaaaccgaagtttgtgagttgtaaaagttccccacagattgttgactcgagaacacaaggagggtacatgtagagaagatagttataaccggttgtcatcaattattacgtgaacgtaatcaattgcattctccatttaatcgattaatgtgtccttcccaaatactagagaacat

SEQ ID NO: 31891 - DNA, 389 bp, Glycine max
agcttataagaacaaaattgccttaatcatttccaaatatgcatgtgaattaggacgcatcaacaagaatcaagccaaggctattgtgcaagcaatcaatggggcaaaacacaccaaatggttataatgatggatggctcaaattctcacaaaggtaaaatcatcactttcaaattgagctttcaaaactatcatgacatgtagagaagaatcaaggatttcaagtcacaaaatgtcaagaacttttattttcaaaacaattacccatttcttgacatatcctataattaaagaaaaacatgcaaagtcgtacgtgcacacgaaattgacccaaaatattaaactgaaaatctgacgaaactaacaacattaacaaattaacacaacta

SEQ ID NO: 31892 - DNA, 235 bp, Glycine max
tatacccattctttaacatatctcgagctgccatcatagaggtatcatgcaaacgtggttgtattgaacgagactccacatatacactatctacaatttgcaacgctggaaacgatttatctaatgactcctgtattgctctaacataatgcattgaagatggacaccttactattatgtaatactaagctgaaactatcacaagctgacccccatcacaaattttaatttctta

SEQ ID NO: 31893 - DNA, 382 bp, Glycine max
agcttttggtatcaattacgagcgtctcgatatactacgggacataatcggacatgcgggtaaaaagttattgttatttgaatttgctcatacgttctgttttcaattacgatcgcctcaatatattatgggattcattcggacatccgagtaaaaatttattgccatttgaatttgctacgagcttccgatttcaattacgagcgtcttgatatacaacgaataacaatccgacatccgagtaaaaagttattgtcgttagaatatgcctccagcttctgtttcaatcacgagcgtattgatatattacgggactcaatccgacatccgagtaaatagttattgccatttgaatttgctcatagcttctgttctcaattac

SEQ ID NO: 31894 - DNA, 383 bp, Glycine max
ttccttgtcccttgatatatttgagggacttatggtcattatgaatgacaaattccttgggataaacgcagcgttgccatgtattcaaagcccgcactaaagtatacaactccttatcataagtcgaatagttaaaggtaggaccacttacattttcacataaaataagtcattagatggccttcttgcattcacacagtcccaatcccaacatttgaagcatcaaactcaatctcaaaagattcctgaacagttggtaaccccaccatcggggcattcctatcttttgcttaagaaaattgaaagcttcttcttgtctatattcccatttgaaaacaacatttctcttgaccaccttattgagaggtgctgcaatgtgccta

SEQ ID NO: 31895 - DNA, 393 bp, Glycine max
agctttgatctaccaccaccgcagccaccgtcatcttaattttctattatttaatattactagtacttctctttctagccgtgtatttggctatattaagacatttggataatttagtatttctttatttgcatggtttgaatgaacaattatgaattatattatatgactatgtgtttcatattttttaattattcatatatgttttatttgaatattatgaatgactttttggattataagacattctatgaagtattatctttctaagattgatgaatgacaagttatctttttgattgttttctattcttttgtataacatttatgtatggtttttatatttcttgcctttctaagtttgatgaatggttaaattatcttgtttaattg

SEQ ID NO: 31896 - DNA, 400 bp, Glycine max
  unsure at all n locations
ntntaaatntatttacgaaaaattgggatgttacaatatctattcttgaagtttttaaactttatacaagaattctgctctgataccacttgttggatgtcgcaacctacccttcggcgggagggcgaagcgtgactcgtgggatgcgtgttccacaaaaggaatacgcgcggagtcgccaccaacgtttatttgaggaaaatgtcggaaaaaccggaaaatatgcgatctacgaacttttaagtgaaaggttcgggagttgtatttacgcacggngaacgattagcaccccaacgtccgtcccaagggacgacagcctttaatcgaatgtgcaaacatgactctgattctcttatgttccctctttatgtctttatatcctntataccctttttatatt

SEQ ID NO: 31897 - DNA, 395 bp, Glycine max
agcttgcctgtccgatgcagtagtaatgatggcccgagttatgttggggaacggttacgaacccggaatgggtttagggaaagacaacggcggcatgactaacctgataaatgccaaaggaaatcgtgggaagtatggtttaggctataaacccactcaggcggatataaagagaagcatcgtgggaagaaagagcggtggtcaaagctcgcggttgaggcaagaaagtgaaggaagcccgccctgccacataagtagaagctttataagcgcgggtctgggaccgaaggtcaagtgtcgcgatatacgaagatgatgttccgagtacattggatttggtacgaccatgccctcctgatttccagctgggaaattggcgagtggaggaacgcccc

SEQ ID NO: 31898 - DNA, 421 bp, Glycine max
  unsure at all n locations
ttctcataagtcctaaatgacatttcaaactaggattaactccctttaacctccaaataccattaaatccagatttggccttccaactctcaaagtctcactctttttccactcataacactacattatcactttctaaccctaggttaactctacccttcatccctagcagttttccatccacaatttcagcacataaacatcacaagcatcatcataaaaaccctaaaactgaatgggtaagcttgactcacaccaaacatggcaagttcaacacgcttcaacaaatctcttccaattaactatcacaaagcataaaccaagtaaaactacccatcatatctnccaaagccccatacccacgaanatttaggtgagaagaagtctacccaaacctgagatnttgaggtcccacacgtag

SEQ ID NO: 31899 - DNA, 387 bp, Glycine max
  unsure at all n locations
agcttctcaaggaggtgagcttagttatgagaggggtgtgtgtagctaagctctagcttctcaaggaagttttctcaaagaagcttctcaaggaagttttctcaagaaagcttctcaaggaagctacctagtctataaatagaagcatgtgtaacacttgttgtaactctgatgaatgagagtcttgtgagacacaactcanagttcaacttctctccctttttcttccttcaatttcgtgctccccctccctctttctctccctctttctttntcttccggaagcatcctcccaagcttcttatgcaaggctcatcttggtggtgaagctccttcttccatggcttattccttaatggatggcgcctcctctcacctcctttcctt

SEQ ID NO: 31900 - DNA, 410 bp, Glycine max
tgagatgaggaagtgtagaagggtgaaacttcctgcttttatttgttgaccacagagtgatacctggagatatgtcgcgggggtcaggagaccttggggacgtcaggtggggtgctattgcccaaaaccaagcttgaccaatcccgacccaacccgggcatagtcggtcagtgagaacctgtgatgtacctaaacaggcgagctcctggcagtcaacagataaaaggaacaaagaccacaaagcaaggaggcttgtggtggctggccagctgtgcacttgattgatatgtgcatatggcctctggtaatcgattaccaagggtgggtaatcgattacaaggcttaaaaatgaagataggaggctaagatggtctctggtaatcgattaccaagggatgtaatcgattacc

SEQ ID NO: 31901 - DNA, 385 bp, Glycine max
  unsure at all n locations
agcttgtatgattatggggtacccgtcatatgtggtactaggtggcgatcgggcgatggtgcaagtcgactctccacatccacaaatcacacataaatccaccatccccagttgcccaccttcaactgagctcacgtactcccacgtagctcttatcctcgttcctctcaacaccgggtccccatcaatccctccaagcttccacaacatccaagcaattccacatccaaacatcatgaactatcaaaaaccaagaaaacagggcagatgcataaaantcccccaaaacacaaccaataccacagctttccttactcaaataccccagtaacattcttttcgttccaattcgttcaccgttggatccactcgaaaattttactgg

SEQ ID NO: 31902 - DNA, 417 bp, Glycine max
  unsure at all n locations
tctatagaaggttcgttcctaatttctctacaattgcatcacctctcaatgagctggtgaagaagaatgtggcatttacctgnggtgaaaaacaagagcaagcctttgctttgctcaaagaaaagcttactaaggcacctgttctagctcttcctgacttttctaaaacttttgagctagaatgtgatgcctctggagtgggagttggagctgtattgttacaaggtgggcaccctattgcttattttagtgaaaaacttcatagtgacaccctccctaccccacctatgacaagagctttatgccttaataagagccctccagacatgggaacattaccttgtttccaaggaatttgtcattcatagtgatcatcaatcacttaagtacattagagggcatagcaagttaaacaag

SEQ ID NO: 31903 - DNA, 370 bp, Glycine max
agctttggagtttccaagtgccaactcgtcttcttctttagtccagccttcttctggcttcaattcttcagtgggctttccttctgtgtccagcatcttgggatgttcccagcctttgatgacagctttccaggttctgctatccactgatttgaggaaggccaccattcttgctttccaatattcatagttgcttccatcgagaattggtggtctgttcactggtccgccttctttctccatgttcatcagaatttatctccctagatctcactatgctatcccgagcgtcgctctgataccaattgaaattctgataccacgggacagatgtcgtaccggatgtcacgacatcacgcttcagaacatg

SEQ ID NO: 31904 - DNA, 421 bp, Glycine max
  unsure at all n locations
tgaaatcgaaaacggaagctctaagaaaagtcaaacgacaataccttttaactcgtatgtccgattgagctcctgtaatatatcgagacgctcgaaattgaaaacggaagctctaagaagagtcaaacgacactaactcttgactcggatgtccgattgagtctcgtaatataccgagaccctcgtaattgaaaacaaacgctctgagtaaattcatacgacaataacttttcactcggatttccgattgagtgccatcggatatcgagacgctcgtaacgcacacggaagctctgcacaagtnaaacgacaataatttttaactcggatctatgatggagccctttaatatatcaagacgctcgaaattgataacggaagctctatgaaaagtcaaacgaccataactactgactctgat

SEQ ID NO: 31905 - DNA, 392 bp, Glycine max
ttgcttcaagaaaaggcccaaactccccttcaaaatctaatttcaggcttaaataggtggctttgttcgtgcttgcgtgcttagcacaattttgaaccgcttagcgctcattagtggattttggcttagcgcgtgcttttctcgctcagcggatggactgaagcggtgcgcttcgctggatgacccttcgcttagggcaaatgcatagctcatccttcttccagattcttcctcgcgctcagccgagcagtgttgcgctcagcggatggctcgcttaagctcatattggctctcgacacggtgaaaatcatcacttcacaaacttgcctaatttacctgacattgagagaaaatgattattaaacacacaaaatggacattctaagtattta

SEQ ID NO: 31906 - DNA, 238 bp, Glycine max
tgtatagatgtgtatgtgctaagtcgagatcttgtctcgctattacgcaattagctctctgacggacaataatgcttagagaaccatgctcgcttagcccgtatgacttgtcagctaagagagggtgtctcgcttagccagagtctggattttcctgtagatgcactaagcgcgccctgcccgctaagcgtatcagcttatattctgaaagcgcgctaaacccgatgtctcgctaagc

SEQ ID NO: 31907 - DNA, 393 bp, Glycine max
agcttcgacccctccgtcggaaacctagtccagaacttctccttcggatcaaaatcaccctgcttaagctcccgcaaaatcgaagcctccttcccaacagtgtacctgcacaaattaaaagttaaaacccaaaaagcatctaaaattctcaataaaatcaaaaacaaaaagctctagtgcttcattcaccttatccccaattgcagattaagcatcaactcataattcttatgccccttggaaactgtttatccaggtcttttcacctcgctcgagaaaaacaacggttcctctcatctctttctctatacaatccgacgtcgttccgtcgcggtaaaacatcgacgccttcacattatcgataatatcgcacgtgatgtcaccggctccacc

SEQ ID NO: 31908 - DNA, 243 bp, Glycine max
ctatcaaaggcttggcaagacaggtagttgtggatgcattgacgtacacaacagtgacatcatgatactgtactatctatgcacttaaaacgactctattaaagggttaagactacgctactgcatatgtgatctgagatgagatctaccatttatacctgccgaaaggacatacacaatttatgcaccttatcaattatgacgtactcattacctacctctgacttgaaggtgatacatgac

SEQ ID NO: 31909 - DNA, 534 bp, Glycine max
  unsure at all n locations
cctctcactctacctgtgaccatatttgataatacacgcatcgaagcacacgacatgaccaannnnnaanacagccgagcggtgattgttgcctcgacnaccanaggcgaaacgagctcggacgccgggatactatagagccgacctgaaggcatgcttgctttgaaatgggatttcgtccaactctttccgatgttcgtataaagcgcaatgagcatagcgaatatacatgctgcatctgcaaagctatgcatgcatgcatacgtgcgccttaatacacacttcaatcaaaacgaggagaaaactacttcttctgtttgagaactcgtaatacattaaaatactacacatttgcagacactaccttccgtattctcaccttgaaataagatcactcataaaaacgaagaaccacgtgtgtgagtaacaatcgcccngcccagccctgatcatcagttgtgataaagaatatgctaaaacagagtacgcccgcgtaccattactgctgatcgatacaaaccatagggatgcccc

SEQ ID NO: 31910 - DNA, 383 bp, Glycine max
  unsure at all n locations
agctttcattcagtgagaatttatccacaaattagactccaaagtttattaaaacagattaaaaagaatctattttaacaagctcaaaaagaagaaattaacattcacacttagagaattgagacattaaaggtattcataagaagaagctcttcagcctatagtaacttctgtataagttgacttgatgtttaaccttaaagtggtggcagcacctccgtatccctcagtcgccgccgccacaggctgctgccggagtcgttggcgaagaagaaccgtgatcggtggttcatggcaccgagcaatggagggtgtgataatggggtatggaagtgtagtagtttgagtggagaagctntcaatctcaaaaagatcagaacttg

SEQ ID NO: 31911 - DNA, 405 bp, Glycine max
gtaggaagtttgtttttccgaggtctccacccaaacatgttatacatgctgcttaatttgttgccgggactaagaatgcttctccaaatatatataatatctcaaggaacaaggctctttcaagtatttgcgtcaacctttgtactaaaagttacattatctaatatatatatatatatatacatatatatatatatatatatatatatatatatatatatatatatatatatatatatatatatatatatatatatatatataatacgcccccccccctataccgcgacatatatgcgattgtgcgatttattcacatgtgtggcatatcaatgctccggagacactgcgagagaaaacacccgatcctcgcattacgtctatgtattgcgactgacacgaggc

SEQ ID NO: 31912 - DNA, 364 bp, Glycine max
agcttcaacatcagaccacttccagggtgctggaactacttcacatggacttgatggggcctatgcaagctgaaagccttggaggaaagatgtatgcctatgttgttgtggatgatttctccagagttacctgcgtcatctttatcagagagaaatcagacacctttgaagtattcaaagagttgagtctaagacttcaaagagaaaaagactgcgtcatcaagagaattaggagtgaccatggcatagagtttgaaaacggcaagtttatcgatcctgcacattgaacgcatcactcatgagttctctgcaaccatcacaccacctcaaaatggcatagttgaaaggaaaaacaggactttgc

SEQ ID NO: 31913 - DNA, 366 bp, Glycine max
tgatataaactgacgaaaagaaagcccttgtgaacgttttggacatgatagctaataaaataatacatgacttgaaagtctcggattctaaaacttatccgttgtagaacgaataggggtgaataacgacggaaaaacttcacggatttgctcacagaaacgtcttggaaacacctcaacttggatattcttcatggaaacacttttatttcacccaaaacagctgatatgcatagactactgtgttagggatattaggaacgacattgctcccctactcatttgatcccggggatgacgttgctgttcatttttgccaggcgatatgggttgactactctagaaacatgcccgtctttatatatc

SEQ ID NO: 31914 - DNA, 386 bp, Glycine max
agcttcctcatggtggcttattgatgtgattaagaataaaaaattctttgtgttctattgcacctgcgaattatagtaatgtacgaagaggtatcaacacacctcttgactcatagcatgttaatagttagagccaaagtatggtgtttgattaggtagtaacgcagggtatacaagtcttaaagctctagacagagtgaaagttttgcatctcccaccatacctattaactattattgttaaatcggtttcaatattaacttgaaatgattgtcccacagtgcgcaccgcttatgtttattgaataattgattcagtagcaaaatgtcatgcatcaagctattcttgtcaaaaggtcccatgacagataatttttaaacttctat

SEQ ID NO: 31915 - DNA, 376 bp, Glycine max
agctttatcttcacagaaatcgtgtgatttttttttctctcggcgagacgattgtgcctaagaaaatctcgagtagttgacatgcgttgcggttcacgccgacgggaacgggtgacaaccagaggattactcccgtcctgatggaggctattagcggcttaatcgaactgtcttgtcatggctgtaccgcggtaaataaaagattcttctctgaagattcgaatcctactgatgaacttattcgttgcagtatgctgtgaatatgaatgcccgctaccttggcatccaccgattgttgtaaagtgaaagctgccggtgcctacactatgaagtaatgcactttttgcttcctatcctactcatacattctgacttt

SEQ ID NO: 31916 - DNA, 476 bp, Glycine max
  unsure at all n locations
tcgcggcacgcggcactcgtgcggtcgannacnctgatnaccctgtgatatccangtgatactatagatatctgaagcttggctatctatacgagcattaaaagagatgtttaaaatgtcagtacaatttgtcgacgagtatcagaatgctttaacccattataattagatcataatgaacgaggtctttcaagatttgcgtcaaacttagcactaactgattattcttggacactatatatggcatatcaatccacatcgatctatatattatgacacatatatactgagaaatatcaataatcctagatatgtggattagaacttataacttccgcaccccccgacacggccgcgcattgtatcgcatctgatgattacaatagaaacgggtgcttgtttatttgacaaaagatggctacagacatcacccccacgaagagcttctattaattgacaaaacaccaccaggaccg

SEQ ID NO: 31917 - DNA, 393 bp, Glycine max
agcttgcacaagccctgctaaggatatatcatatatgggtttcttcgttgattttttccttctctttttcttttcattttaagcatcatgatcaaattcttaaaaaatgatccgtgactacaatttcaaccgttgcttcaaggtttttttgtagtcactagctacaataacaattacagccatatatataggttctctacaatttcttgcaacatcaaggatcgtgatggaactatatctgctgtaatttaaaaccttgattatgagtttttttctgctgctgcttaatgagggtctaattttgtctctctctggatttatggtggttggttgtaggtagttaattgaggtaagttcagatccttgaggtttggtaacttgcttctaacccgg

SEQ ID NO: 31918 - DNA, 416 bp, Glycine max
  unsure at all n locations
tgaaaaaaaccactccgttcaggggattttcttcctgcaccagctatttttcttctagatccaacagtgagagagaaatttcaaaaacaccattccttaagacggatctgtaatggtcttatggaatgtcaatccgtttgtctatacataatttttaaaaatgtattttacaaattaatttaaaattaatagctcatgtagaattcgaacctatgactttaaggttattaacacaacactctaatgccaataagccaattatattataaaataattacattgttttatgtaacactaaaatttctaatgtatatttaatgcacatgtaagtntatataataatttttgtgataattttgatctcataattaattcttttacatatataaatttttattaaacgtataatttttatt

SEQ ID NO: 31919 - DNA, 342 bp, Glycine max
agcttgacctttgtggctattgccatgaatttgcgggtgaacaaaagatatggctagttgtatatggatctagaaattagaaaaaccatataaaataggttacgaaaggactctagtagctatcttacgattatattttgaaataggaaactaatttgactgcacagctcatgttatttcgtgtgacttcagtccgagtagaatgttaatgagctcttttggcctgttatctttctattaatattgtcggttgtttcttggtacaacaatggtcggccttacggcccggcgatttacagaggatagccgtccatgatccatgatccatgatgaagcagttat

SEQ ID NO: 31920 - DNA, 327 bp, Glycine max
tattaggttctggatatattagttcaatgctataacaacccagggagccttgcgtgatcgtttttttaatagcttgatttgaaccatgtctgagtttgtaatccggactatctaatgtacaaattagagcacctaatattaagtgacatttattaattaagcattacctccttttctttgacattaatgaggcgactactattaacctcccattaaatggttaaacaagagtgagtgaccattacacaacattgtagtatccatcaattaccctaacgcctcctccatggaaactcttacaatgtgtttttaagttactctttatgt

SEQ ID NO: 31921 - DNA, 385 bp, Glycine max
agcttgtgcattcaatatcctgatgagggtgttccatatgttctaaagactagactaatacatttgctgcccaagtttcatggtcttgcaggtgaagatcctcataagcatcttaaggagttccatattgtttgttccaccatgaagccccctgatgtccaagaagatcatatctttctaaaggcttttcctcattctctggagggagtgacaaaagattggctatactaccttgctctcaggtccattttcagctgggatgaccttaagagggtgttctggagaaattccccctgcatctaggaccactgccatcagaaaagatatttcaggcatcaggcaacttagtggagagagcttgtatgagtactgggaaagattcaag

SEQ ID NO: 31922 - DNA, 417 bp, Glycine max
tatccttacggcctgcctccggacttcaccccccgtgccaccccggaagatttaagccaagcccctacttttgaggggcaactcccaccttatgaagactatcccgggcaagacgatggggaaggagatacccatcttggccccctgctccacctcaaagatcaatccccgtatgaactaccccagccgaacatagtctgccatatcccggcctcacccacgcccgtaaaagaatctgttcccttcgcggaagataggggaaagattgaggcgccgaagagaggttgagggcgtcgagggcctcggcaattacctattctcggatttggtagatttatgtgttgtgcccaacatcgtcatccctcccaagttcaaagtaccaaactttgataagtacaaagggacgacatgtccaaa

SEQ ID NO: 31923 - DNA, 371 bp, Glycine max
agctttgagccaattcaaacaacaataactttttactcgaatgtctgattgagtcccgtaacatatcgagacgctcgaaattgaatgttgaacttttgagctaattcaaacgacaataaaatttttctcggatgtctggttgagtcccgtagcatatcgagacgctcgaaattgaatgttgaacctcttagctaattcaaacgacaataacttttttcacggatgtctgatagagtcccgtaacatatcgagacgctcgaaattgaatgttgaagcttcagccaattcaaacgacaataacttttttctcagatgtctgattgagtcccgtaacatatcgagacgctcgaaattgaatgttgaagctctga

SEQ ID NO: 31924 - DNA, 426 bp, Glycine max
  unsure at all n locations
taaacattcaatttcgagcgtctcgatatattacaggactcaatcaaacatccgagaaaaaagttactgtcgtttgaatctgctcagaggttaaacattcaatttcgagcgtctcgatatgttacgggactcaatcagagatccaagtaaaaagttattgtcgtttgaattgtcttagagcttcaacattcaatttcgagcgtctcgatatgttacgggactcaatgagacatccgagtaaaaagttattgtcgtttgaattggctcagagcnttaacacccaatttcgagcgtctcgtatatgacgggactnaatcagacatccgagtaaaaagttattgtcgtttgaattggctcagagcttcaacattcaatttcgagcgtctcgatatattactggactcaatcagacatccgagaaaaaag

SEQ ID NO: 31925 - DNA, 391 bp, Glycine max
tagcttgtggcacgctgggcgagcacatctctggctgatcctcttctaggatttcccaacacgctaagcgagctatgtgccttgcttagcggatgtcactcgctaagcgcatatgcctcgcttagcgagacaccagcggcaagaaccttttcttcttttggcctgaaattgaagtggtttcaacattaattcacaaaatgggagtatctactatataaaatcaaactaaacatgaaaatatgtacaattcctacaaaaagaatcataaattgggggaaagcggctaatttcatgaactattcaatacaaaagttagtcgtaaataacgactaacagtatacaaagcacactcatagtgaagtcattgaaggggatctttacataaagattg

SEQ ID NO: 31926 - DNA, 412 bp, Glycine max
  unsure at all n locations
ntagattcctttaaagtttttaaggttgaagttgagaaacaatgtggaaaacaaattaagatcgtgagatcagatagaggtgggagtactatggtagatacacagaagatggacaagcaccaggttcatttgcgaaatttcttcaagaacatgagattgttgcccaatacactatgcctgattctccggatcaaaatggtgtggcagaacgaagaaatcgaaccttattagacatggtgagaagcatgaggagtaatgtaaagctttctcccctttgtggattgatcgcttaagacggatgcgtatatattaaactgagttccaaccaaggctgtctcacagacaccttttgagttattcaacggttggaaaccatgtttgcgacatatacgcgtatacggatgcccgtctg

SEQ ID NO: 31927 - DNA, 391 bp, Glycine max
  unsure at all n locations
agcttgaatcccttctttttggcagcatcctaaaccagtaggcgttgattcactttatcgacaactatttttatatcagtggcccttgagatatgtagacaaagagggtaggcaatgcttgatctttcaagtacatttgtttatgcaatttaccaagggatgagcggtcttcttgagagagattgagatcaactggatgcactggtaagagtttggtgattagcatccacacagatgcaccttcttctaaaactcgctctttgngggttccacattttccaagagtccctttgtgtttttcaaaaaaatccctaaagatgttgctttgtgagatcttttcatccttgaacttttgaagactgtgtcatgcttctgtgggggataccttgat

SEQ ID NO: 31928 - DNA, 392 bp, Glycine max
tgcacaacatccaagaaattcaacatccaaacatcatgaactatccaaaaccaagaaaacagggcagaggcagaaaactctgcccaaaacacattccaataccacaactttccttactcaaacacccagtaacatcctcttcgtttcggttcattaactgcttgatcgattcgagaatttttaagccttgtaatcgattacacacccttggtaatcgattgccagaggtcatattccaaatattactcaagatccatagctggccagtcacccacacgcctccttgcttggggtctttggttttatatcggttgactgccaagagctcgcctatttacgcacgtcacaggttctcactgacggactatgcccggcgttgcgtcgggattgac

SEQ ID NO: 31929 - DNA, 382 bp, Glycine max
tactaactaccaagtatcagaacgtcatcaattgacatttctatatatatatatatatatatatatatatatatatatatatatatatatatatatatatataagcatgccacacctttgagagatactattcatcaaaatcagcgtgtaggtattcacgtttctcagtaagagattactgaggttggaaatttcattaagagtaggtataatttgctagacatacactctagaaagagcatttctaaaaagataaaaaacctctaaaacaacactcgcagctctcattgcatgttttttatccttttgaataattacaatagcgtgtgagcacataaaagaatatcatttatagacttgcgtctcctgccaaacatataag

SEQ ID NO: 31930 - DNA, 395 bp, Glycine max
gtgcgaaaggcttgtcgctggagctgacccatcaattgtactaactctttcagactggcgattgctaggctcttaatcttgacttgatagaacctctttttaagccaaggcgtctaactcgatcccatgttttactaaagtggaataaaaaccaatgtgagtcaagactctgaaacctatcacaggtgaaatggatgaatgcatgaagaaatgcgtatggcacagatgcattttacggatacgaaagcccgggaaattatgtgcttctacatacaacattcgcgcggatagcgcctgatgcatgcatataagaaggtgacatggaccttccatcttctcgtgacaatgtgacgtgatcaagacgcaacccgtgcgtgatgacatgatgcagatgc

SEQ ID NO: 31931 - DNA, 381 bp, Glycine max
agatttgaattacgaatcgttttcagattatgcaattcagaatgatagcagcaaattgtttggtcctattgctgtgtccatcactcattttcaactaaaaattctgtagaagtgtgcagcttatgctgttctttgctgatgtatttggttagacaaaaagcctaagcatccttttgcccgagatttgctttgtaataggaatgtcaaatgtgcgcatttaggctctcttttgtacattacttataactgtgttaagagtgtttccttgtttccacgacatctttatcctttttagtttttccccatatttctccatttttctctttctctatttaatctaatcatgcaaggaggctaataattgacatgtaatcaagtttc

SEQ ID NO: 31932 - DNA, 293 bp, Glycine max
  unsure at all n locations
gaactatagagaactctagcttacacattcaataatgagcgtctcgttgtagcacaggtattcgatcttacatncgagacccaagtatctcggagtggagattgcacaatcgatgcccattcattatcctgcgatttaagtttgtacacgagtacacatagggcaaaaacaggtataaagttattgatatgagcagtgacagagagaccctctcccctcttgagggcgaacagacggggcatcgagcatactctgatggctgctgacgacgtttctgacatatgtgatggtgc

SEQ ID NO: 31933 - DNA, 122 bp, Glycine max
cgtattctagcttggttctggaataatcatcaaaaaaatgcaaaattaaacaacacaggtactcgcggaagaacgttcttccgcaggaatggaaagctctcccgtggaagaacctttcttcc

SEQ ID NO: 31934 - DNA, 395 bp, Glycine max
  unsure at all n locations
ctaaacaccatttttctattacttcggtaacattataaagccaaagaacgcggaaattagcataaagcctctaataaaacaactctcatcatctctaagtttgacttcctacaatactctagtacatatccatattaagttgggttatattaatagttacctccagtcgtaaaaataaagtcttatgaaacatatacaaatactcggtgtataatcgatatggtcatatttcaatctatgtgaagagtgcaagaagattgtaacaccaccccaccacttgctcctctaatgtgattgatgggggaccctcccagctagctatcttagtaggatcaagctatactcgaagatataacggttacaccatacgtgaaagcctcgtacttgataaaccn

SEQ ID NO: 31935 - DNA, 337 bp, Glycine max
tagcttgtcctgtacatcaatgtatatattctcccaaatagtcttgcaacacaaaaagttgagtattttcttacatattatgtgcctatattgttgcgctcaactgggctatggaaaaaataagttgcttgatgagatatactcgtacagatggatgaaaattatatcaactattaattaaaatttaaatatatttcttatctttataatatagcatttttgtgtttctaatccatgtaaagttttttttttgtctttggcaaattatgattcctcctctacacactctccgacaagctgtaaaattattatctaatacatgtgaagaacattaaag

SEQ ID NO: 31936 - DNA, 397 bp, Glycine max
atgttgatttgggaagggagtacgaggaatggcgaataatttaagcccctcaaatgctctaacagtgacgcatcgatatacaaactcagttatcagaaattcattatgctggggccatgaatccattatccaactgactcgaatgtgatagcacccgcttctgcttagactcaggcgataacaaatgaacggtcttcaccccgaattaggttatcagtcaacacctccttgaggctgagttactccacacattttaactcccctcctaacgctgaagccttaactttactggtagcaacagagataaatttcactctcaataccatcttatgaaaaatgcactgagagctactactcacaacacccacccccacaatatcactcacctagcccctaa

SEQ ID NO: 31937 - DNA, 395 bp, Glycine max
  unsure at all n locations
agcttgaagaaaaaaggccagtaagtaatgtataaattaacatagtgtgaaagatgagaaaaattaatcttaaccattaattaatcaacccctatattataaatgactaccattatttggtacgaattgagacgaaaaagaattacaaatcatgtcaaatcatttatttaatctatactatcatttatgtctatttctaaattgaattatcaataaataattntattctattagtacatgtgccatttattctaaaattaaaattaataaataatttgtaacactaaatttatcatagtaaataatatacaccaattatcaaacgtgtaagtgttacctaagaagtccctttctccatccataagaataaagtaaaggcctatcggacatataaa

SEQ ID NO: 31938 - DNA, 416 bp, Glycine max
  unsure at all n locations
tcaagaaaaagatggcctcagcaaattccttatttccataaggaaattctatcaacagacctccaatctttaatggagagggttaccactactggaaaacccgaatgcaaatttttatcgaggcaatagatctaaatatctgggaagccatagaaatagggccttatatacccaccacagtagaaagagtttcaatagatggtagttcatcaagtgaaagcataaccatagaaaaacctagagatagatggtctgaagaggatagaaaacgagtacacacaacctaaaagccaacacataataacatctgncctaggaatggatgaatatttcagagtttcaaattgcaagagtgctaaggaaatgtgggacactcttcgattaacacatgaaggaactacagatgttaaaagatc

SEQ ID NO: 31939 - DNA, 366 bp, Glycine max
  unsure at all n locations
agcttgttctagtccaatgggatggcctggcacaagaggacactacatgggagccgtcggatacactactccggtcttacaaccttggcgacaaagatggtttggctgacggagggtgatgatagcaatacatatatcttggaatgggaagagcataacagctacatagaattggaccatagcaggccctgaagacattccagagtacccacacgcttcaatgactgtgtttgacgttgttaagcaagtactaatatctactttgttatgcccattatctattccactatccctgnctttacctagttattataataaaagagaatacatgcagtcttgactctgttagcactgtgagccataagc

SEQ ID NO: 31940 - DNA, 346 bp, Glycine max
  unsure at all n locations
taagaagatacgagtgcaaaggtaagcaaaactccagccacatattattaagatgaaaaaataatgtattntttaatagtgcacaccagttcaagaaattgtacttgaaaattcagaaattcctgttgaaacatttgcaccaaaatactgcaaataccaatttcctttacggattgcctgcggtcctcctcaagcctttgattcattgaatgactttttttcacttcatttggcaatacgagaaagactgctacttatgcatgttgatttgattanatcctctacatttcaatactggctggtacaatacatttaaccggtccttgaatttatattttataaccaa

SEQ ID NO: 31941 - DNA, 390 bp, Glycine max
  unsure at all n locations
agcttgcattcactaaattgttgcaagcatttggaaaatttggcaagcaattcctaaatgggaatattcaaaatcagaaagcataaggaaaatttcatctgcaatcccacaatctaggaaacaaccatataattatttaagggaaaaccttccatagacaacaattcagaaccttaaatctacacactaaataaaaaggtaaagaaaaaacaaacaaagaaaacactgaggtacatcatgcaagtctcgataatttaaagactcagctctgaattgagacgactgacactgatcgagattccatcctanaaactcattagcacactggagtgtgaccacattagaaggtgacaggtcgatctagacaccgtaacaaattntttccatcat

SEQ ID NO: 31942 - DNA, 417 bp, Glycine max
  unsure at all n locations
tatgtcctccatagattgcatatacagttctttnttccttaaggtttggtgggaaaggtagccgaaggagtgttgaaaaattactcaatgcatttttgtactaaatggatatacatttcttataaaatgtaggtttgttctatatgcctctccaatgaaaaggacttggtctttggttgtggacacatggtgagttcttccaaacgccattccttttttttttttttttcatattgccatacacatgataactatgaagttattcttacgcaaactgcagagactgtggatcaagttatcgaagtgtcctatatgccgtgaacagatcacaaaccatattaagctatttcctgngtgattatgggccagtttgtttaaacttatttgtttaaaaaagttcttattttaataaaataa

SEQ ID NO: 31943 - DNA, 390 bp, Glycine max
agcttgactaataatgagtatcgctcacatcatgagaaatctaatcaattggtgagggttgggtcggggacaaaacgtacgcccagtgcctgaaaaattcgcatgggcatgcgcaagctctcttagcacgacgtttgattttagatgccaaacaaacaacctgccactaaagatgacatgtcttcttcctctcattcccgcaaaacgacgccgttcattcatgggaccatcctactaatgtacatgcctttcagaattttaaattggcttaattataacatcatcagaatttattatttaagttttattttggtaaattttatcactttaaatttataattctataaattttattacttaaatttttttcacaaattttattatttaaat

SEQ ID NO: 31944 - DNA, 416 bp, Glycine max
  unsure at all n locations
tgtgatcaacttgccttaattctatttgttggaccgttggttttggacattaatatttgagcatgaataaaatgtaggtctcttttaagcccaatataagcttagcccacaaaaagtatgtgcaaattgggctttccatgatcttagaggtaataactctcacatatcccaatattccatgatcactgccaaaattcggaaaaaagtgcatagttaatttcagctacctttgctaaatacaaaatcaatgatatccttaggtttttggactaatcatatgaaaaccaatgacaatacttggtagaggcgaagaaggcaaagattcgcgtccagactgtaagtttgtgatgaaacctaaaaggagacaganattgngtttcgtttcaaacctaaggttttggatttaggacaaaaga

SEQ ID NO: 31945 - DNA, 383 bp, Glycine max
  unsure at all n locations
agcttgtcagtgtcttataagtacctaagttcagctttagcctcatttcagttcatcaattgatatcggatcttcattgtcaattaaccttcactcttctttgagtaaaatccaatatttcagcacttcgaagatgattgaactcactgaaggaggattatactacctctagcatcctagggaaatcccttagactgttcttctgtttttactaatactgtaaatacaaacaacaatgactttgcttttaacccgtgtcattataggcttggaaatcttcatctaagatcgttgataaatttgtactactttcccttaatttcatttaaataaaaaccaagtttgtgactttntctgtcttgctaaatagtcaagacaatttc

SEQ ID NO: 31946 - DNA, 427 bp, Glycine max
tttatgtgaaacgacgtgtctatcctcatcggctctcacagtctttagatttgggagccaatccaatccttgtgttcggactctcagccacttatgatagccgtcgatgatcccattactgcttcccctaagctctctgtcctttcttcacgccgcatcccatgccttgcgaactccttggagtaccctcgcgttgtggtcactgaaaccccgtgcgatgaaaggcgtgatgctttcgtctaatggcgctcctctcatggggtagccaagctgtcttatggcagaacgggattataatcatacaaccccttgttcccatcaagggaacatttggacatccttcgcatgaagatagaatcttgattcttcctttcttctagcgagggaaccaattaacagacgcccccccatgctagccaagagttgg

SEQ ID NO: 31947 - DNA, 391 bp, Glycine max
  unsure at all n locations
tagcttgacaaataattttcttacgtagtgtgcagtaccccaattattagcttcctgtaaagcactaataaattcttgatcactacctagaaagccttttgcaaaacatgtttccctaaatgtaagatataccaccccattgactattctaatgtcattgtaagactgtgcacctttggcagtagatagcatcattctaaggtaaaatagtctacctgctgaaggcgggacccatatgagtcttcctattgtattcccttattttcttggatgctagnacttcccgcgggcgaataaacaaatcttgagatatattgatgatatgtaagatcccgtccataagaatatatttcgttagaatgcatccacgctgtgaacatggattatttga

SEQ ID NO: 31948 - DNA, 268 bp, Glycine max
tctaacttaatattcgtattggagtatatgtatgagatgaaatctcacatcgaataaaaataaaagaagtagctatcctataatggagaataaaattgctaaatctagattttaacgctttgggttaaagtatgatgtcacattcatagagtgaatggtttaaccgccacctatagacatgtggatctttggtattgaaagactttccgattagtgagctcattcaaatctgtatgatgaagttctatggaggactattggatattca

SEQ ID NO: 31949 - DNA, 392 bp, Glycine max
agcttaactatttatggattttcccacccatccattctatagtccatttcaccattagcctccaccaacaacctccaacactaggttgaagaccttcttagcacccccaacttacgtgcctactcacatgcaacaccattcattaatgcatgtatgctatgatcattcaaataaaaatcattgtatcacactattaacatattcattcaccatcatcaatataattcatttcatcaacagctcaatccattatatattaattcaattcatcatacatatcgccattcaacatacaatttagcattcatatgttgttcaattccacatcaattcatcattcatatcattctcaccatccatgaactctcaaatagttcatctacacctcatga

SEQ ID NO: 31950 - DNA, 376 bp, Glycine max
  unsure at all n locations
tcttatncaaggctcatcttggtggtgaagctccttcttctatggcttattccttaatggatggcgcctcctctcacctcctttcctttgttttccgctgcatctccatggtggaaaaccaccattaaaggaccccattgaagctcaaagatccagcctccatagaagccccacaagcaagcttccatcaactactacctgcgctaagtgcacttccaatgactttaaaacaaaatgatgttggagtttagcacatcctttnttgttaaccccccttgaaagctccgttacagaatgaatctggggcttagcgtaggatggcacacttagcgcagctatcataaattttcacagagaggaagtggcgcttagcgca

SEQ ID NO: 31951 - DNA, 383 bp, Glycine max
tagctttactcttatttatgtcctcgaaaagccgcttaaatcaccgaacaaagcatgtcctttttcaaagccaacgattttttttattgacatcactacaattaggtaatagtaataaagacttgtattctcactccacaaaattgtcacaaatttgacatatataaggcacattcctagcaaaattcaaaaaatagcgctgttttacagaaatagcactctagctaaagaaaggaattgaaacttgaatatcaggttttgattatctttttgacccccgatcgtcatctatagaaagccaaaatgtatttatgttgttattcattttccaaaatgaaaaaaatctattaatctagatgtagttattaattttccatactatg

SEQ ID NO: 31952 - DNA, 204 bp, Glycine max
ttgcaaatcgaattacacttggacccttatagacttatcaattaatatgagagctatggtgcgccgttgggtttataagattaactatattggcgatggctacgctgaatgatatcacgctggacttgtaatgatggtgtatgctataacggtaagatatgccaatattgcatgattactgccagatgtgagactaacgtgcat

SEQ ID NO: 31953 - DNA, 376 bp, Glycine max
  unsure at all n locations
agctttgatgatatggtcttcaccgacaaaaggatcaaagtgggtctaaaaagaggcaaatctgatcatcatgctttgatcaatgccaaaaaaaaaaaaacaagggcaaatgaagagggtgagaatgagggataagcccatgctgtgactgccattcctatacagccaagtttcccaccaacccaacaatgtcattactcagccaataacaaaccttctccttacccaccacccagatatccacaacggccattcctaaatcaaccacaaagtcgtctaccgcactccaatgacgaacaccanctttagaacaaaccaaaacaccaaccaagaaatgaattatgcagcaaaatagcctgtagaattcaccccaatt

SEQ ID NO: 31954 - DNA, 404 bp, Glycine max
  unsure at all n locations
tcaagaataatggacttagcacacttcttatttctataaggaaattcaatcaatagacctccaatctttaatggagagggttaccactactggaaaacccgaatgcaaatttttattgaggcaatacacttaaatatttggcaagtcataaaaatagggccttatatacccaccacagttgaaagaaccacaatatatggaagcacaacaagtggaagcacaacaatagaaaaacctacagatagatggtctgaagaggataaaagacgagccactataatttaaaagccaaaacataattacatttgacctgngaatggatgaatatttcaaggtttcaaattataagagtgctaaggaaacgtgggacactctacatgtaacacatgaaggcacaacagatg

SEQ ID NO: 31955 - DNA, 269 bp, Glycine max
  unsure at all n locations
agcttgtacgaatgtaanaaacatattcttcgaccttggtaatccttgactccatctcattgaatcgcatgtccacttgtaactccaaggtattaaacctttcagcaacaaaggtttgaagaccatcaaacctgtccaaaatcttttgaacaaaaaaggaatcttctccaccatgttagtgtccttcttcatcgatgggttgagcatcctttttcacccaagagccatcatgctctttacgggtaccaaaggatgcaattactgcagta

SEQ ID NO: 31956 - DNA, 319 bp, Glycine max
  unsure at all n locations
tgcttacgatggatgtatcttcaccgtacacatatatattatatcctgctgagagtgtatgtaattccgatagaataaatggccaatcatcattttagcttctacagtatgcaaattgttgatgatttaattcttaataaaaagaacactctgatttatattctccccgtataaacaccataaccattacatcttatctataagccaatgataagattccttcttaaacctttatcacttagtgttcaattgatttttatgaaacccatctcctaatgaccccnttatgaatattatgatgtaatgaccaatgatccca

SEQ ID NO: 31957 - DNA, 356 bp, Glycine max
tctagcttggaggtaatttcttgaaagaaacattgtaatctcagttgctctttcaatctctaactcaaaaatatcattctcttctcccaaacatgactcatgtgtgcatagattcattggatagatacacgtgtgctacagctccttgtctttgcaatttcgaaatctacttcaaggtaggggggttcttttctttctcatgtttattgcgtgacgatggagctcacacccatgttgggagtcataaataattgatttacggttttagaaaacgccccgctaagtcctcactgtataaatgatgatacaagttgcttgatatttgtgtagcgaatgtctcatgaatctcctattga

SEQ ID NO: 31958 - DNA, 234 bp, Glycine max
gtcttagaactgaggataaatcaataactggcctgtacgctcattgctcgcgagtatgatattcactacctaaggtttgtagtacatgatagctcccaccctattacgcatcgaggcggagtatcacgagcaggaaacttgaatggtcgccattgccaatgctgaccgtattctgcgcttcactatacgtgtgcacacattattgcatattgcggctatgcgatcatgaactac

SEQ ID NO: 31959 - DNA, 318 bp, Glycine max
  unsure at all n locations
aagagaggtatataacttgaaatctgtgaaaattctgatcctatctggccgctcaaaaattgacaagttggaagaagatatagtgcacatggaatccttgacaactctaattgctgacaatactgatgtgaaacaagtgcccttttcaatagtaagctccaaaagccttggatatatatccctttgtggatttgaaggattatctcgtaacgttattccttctatcattcggtcttggatgtcacaacaatgaatccgttatccccattggtcattccctgcacattatnatntttagattccatggatatacataat

SEQ ID NO: 31960 - DNA, 361 bp, Glycine max
agcttttaagtgataggatgtgactcttcacctttgaatttgaatttcaacgttcaagggcactggtaatcgattaccaaaacattgtaatcgattacagccttttgaaaataattggaacgttgtaaattcagtttgaaaactttttcaaactcattttgctactagtaatcgattacaccaatatggcaattgattaccacagagtaaaaactttttggtaaaggttttgtcaaaaactcatgtgctattcaaagatttgaaaaaactttttaatcccatcttgattgatcttttcttcattgttgaatcttgagtcttgaatctagatcttgattcttgagatcttgaatcttgaatc

SEQ ID NO: 31961 - DNA, 418 bp, Glycine max
  unsure at all n locations
tgcttctatagagaagattcatccttggatctaaagctatcttatcatcagaagaaacattaccacaataaggaatttaacattgaaagcatcagaactatgaatatgactcgattttgctagcaataagctagttgtattaatgagtgggtaaatgatctttactcataatagctcagacaaaatcgtcaacaacaaagtccactgattggcgcttctggtaagcttgtaactcgtaatttttagttgaaattgtcaattctacacatgcaatccacatctctcaacacactcttggatgagccttncaaggattgtgttgccttatctaacttttcttncttttccagtgataaggtaaagctaaaaaattgagtctcccaatgtttgatataagttctgtaagaccatctttaat

SEQ ID NO: 31962 - DNA, 385 bp, Glycine max
agcttggtttatggtacttacccgttgaagatcgaagaacgatgaataacgaatgacgaacgtcgaagaacggttgaaacctttgcgaaattcttcacggaaaacgttatggaaacgtttctgaagcgcctcggcttagattttcttcacggaaacaatttttccaagctaattcgaaagagagagaagtgcctaaggggctgaaccattttcttcttcacttcctcccctatttatagcacaataggggagatgcttgccgcccagcttgcccaggccgccacgttgctcctccagatacaacagtcttctggaggaatcttctggagggcccaagtgggcttggttgctatttgcacccccatttctactaagtacacccccc

SEQ ID NO: 31963 - DNA, 415 bp, Glycine max
  unsure at all n locations
tntagccaaatggacttaccttgaattaattcctttgatagcccttttgagccttgtttccctttccttgttttgaagctcactacaagcctcaagtgaaaaaccatgatatcaccatatccttaaggaattttggagctttggaattgttttgggaataagtgtgggggggtttttgtttcattggataacttgttctgttggctatacttcatgatgtattttgggccatacttgatgtacattgtatattggttaaatgttggacatgctactgcaacgttgtttctccaggatatagagtaaaaaaaatgaaaaaaaaagcaataaagttgagtgaataagatcttaaatggcacaagaatgatgagactcttggctctactctctatgcttaaattttatcttcttttta

SEQ ID NO: 31964 - DNA, 389 bp, Glycine max
  unsure at all n locations
agcttacaacatatcaatttcttccttttcactaatgaattattcaatataaatggttctataggctagctaactcaaatacacacattcttgggacactaacttgtctatagttgagggtgcatgtttcctatggccatagtggcatattctaccttaggaaaatgtaaagtgcacttgttgatcattagcctaaatctcttgatgaaatctaatacaagctcatcaaccaactacttgagattcattatatctactattgcaacctttgactgttgctatacaaaagatcatggaacacttttncatatttgcttaattttaaataaaatttggtggaagggaagaataccaagtgaaattgtgttcctgttaaggataataagaac

SEQ ID NO: 31965 - DNA, 415 bp, Glycine max
tcttcttctccatcgcgctcaagaccgtgacaactctctttttcttctccatcgccaccttacctaggtacgtttcgtctaagctctattgttctattgaatacctaggtctgtttggggaactcgtggttaacccaaggacctttgtttgtttctgctacaaggattggggaactcttggtgacctgaggtacgtttcgtgtcgtggtcactggtgcttacagggtctcattttgattgaggaaagtcgtgctcactttgcagttctttgaatgctccctgtctgttgtaaaactgggtagcgtagtgtagtgtagtgtagcattgttcatttggattgaacaattctggtcttttttttatgtttttccctcctatgcattgatgtcatgtatccattgaaagaggcaatact

SEQ ID NO: 31966 - DNA, 253 bp, Glycine max
tagcttgtcgctggagctgtcccattaactgtcctaacttttttagactggtgatccctatgctcttgaccttgactagatagaacctcttttaaacgaaggcatttgacttgatctcatggtttactaaagtgaaacaaaatctcgcgcgaatcaaaactctgacatctattatgggtgcaatggatgaatgcatgaacaaatgcatataacacagatgcaatttatgaatactggagcccgggaaattgtc

SEQ ID NO: 31967 - DNA, 184 bp, Glycine max
gtttgttcgtagcggacgtacggatgactttcggatcaagttgatctgtaaaaagcttacggatcaacttgatccggaaggatgttacagatcaagttgatccgtaagatacggatttgatccgtaacatttttccggatcaagttgatccgcaagctccggatccacttgatccgttagtgta

SEQ ID NO: 31968 - DNA, 378 bp, Glycine max
tagcttatgctgcaaatattcacaatagacctgctcaacctcagcagcaaaatcaatcacagcagaacaattatgacctctccagcaacagatacaatcccggatggaggaatcaccctaatatcagatggtctagccctcaacaacaacaacagcagcctacaccttccttccaaaatgttactggctcaagcagaccatacattcctccaccaatccaacaacagcaacagccccagaaacaacaaacagttgaggctcctccgcaacctttccccaccaactttcacgcacatgattatgcaaaacatgcaggttctacaagagagcacaggctccattcagagcttaactaatcagacgggacaattggctaca

SEQ ID NO: 31969 - DNA, 409 bp, Glycine max
  unsure at all n locations
tccttgagaagattcctaaagaagttatagcttatcttcatacaccccctataatagctaagctcacccccatgccaaaatacatgaaaatataaaaaaagtccctatttcatagactactcaaaacgccctgaaatacaaggctaataccctatactactataatggccaaaatacaaggcccacaagaaggaaaaaccaattataacatttacaaagaagaatggatccaaccttgacccatgggctcaaaaatctaccttaaggttcccacacccctagggcctctttaatagctntagagcaagcctcttggagtcttctatccaatacccttggggggtatgatctcatcatcccctccaccctcgaaggatttgaccttaaatctgaggttcctatactctac

SEQ ID NO: 31970 - DNA, 384 bp, Glycine max
agctttgatgatatggtcttcaccaatgaaaggatcaaagtgggactaataagaggaaaatctgatcatcatgctttgataaatgccaaaacaactagggcaaacgaagagggtgagaatgagggagaagcccatgctgtgactgccattcctatatgaccaagtttcccaccaacccaacaatgtcattactcagccaataacaacccatctccttacccaccacccaattatgcacaaaggccatccctaaatcaaaccacaaaacgcatccccacacaaccaagctaaaccccacttttagcacgaaccgaagcaccaaccaaaagggaattttgcagcacaaaaccttagggtctgctcacatatctactcgataattca

SEQ ID NO: 31971 - DNA, 420 bp, Glycine max
tcaatggagctacatcggtattgtagggcacctagactagtttttgtactagaggtagttttgtaatttcacatgcattaagtgaatatttgatgtgtgtgttcgaaaataaatttaattgaattgggagaagcccaatccaattaaattttagagggggaggtgagcatttgcttgctacaccctattgccacatcatattgtcacactttgtgcatgtccttcatgctttacatgcctcatgacccctaagtacacttactggagaatctcgcacttgatcttggacagtgggctgaaccatagctaaaattctctaatcataattaatgaaaatgtggctccacatattcacacccaaattcaagtgaaatctgaatagaaattcaaatctacctcccattttgtgagacacttacg

SEQ ID NO: 31972 - DNA, 374 bp, Glycine max
agcttgttgtccgtgtacacggttccggtaatggtggcattgacggcaccggtggtcatgctcacttggctgccaccataagtggtgacattaagttgcagccttttagagtcatcaccggcttgggtctgaacggggttggtgagagtgtcgaagttggagattgagaggaaggaagaaagagtgtgaaattgtaaaagttcaaccttttgcctgtcgttgagtgagttgaggaatcctgcttttagctttgagaaggcagaatcaggtggcacaaaatggtcatcccccagaacctgacgtgaggagttgagagttgagttggttgatcaactgggtcgtcttcagaagccgaatcagaacagaaaatctct

SEQ ID NO: 31973 - DNA, 256 bp, Glycine max
tatgtttttaaaaaaaaaacctatttacttaaataggtcaaaccacacgccttaagaaaaacatattaagcttaacggtcgcctcacttagcaataatattttataataaaaatattattattaatataatatctaataaaattatttttttaaacttacaaaattattttagtagttcaacaatttgaatcattttaattaatggttaacatatgttaattcatataagcatagatgagtatcaggaatatgaac

SEQ ID NO: 31974 - DNA, 376 bp, Glycine max
agcttgtcaaagagttgatcgtgttgagataatccaattttgaccagacagaaccttttaaggataggtgtcctgaaattgcatcttttattcggtataagagttgagcaactactatgccacgtgactaaggttgtcaatacgggccggtccggctcgcttttggcccgctataaacgggccagtttagcccgtcctgctaagcaaaacagcctacctttcttagtctggcccatttcaagttggcccacgggccacccatcaattctctatttattttttcagattatgtattggattttatcgctgttggtaatatcaactttgaatctaactcttgtctttttataattttttataactaaaaataataata

SEQ ID NO: 31975 - DNA, 391 bp, Glycine max
tgagaatgatgaatcaaattatcattattttgtaattttttttgtatggcgatgaatcaaactataaattcttaaaggcacatacttcactccttttaatcaattcaggtaaaacaaggatagtttgattaattatacaaaaaaaaatacaatatgatacacagttacatatcatgatttccacgccgttggccaactattctgcttgtttattcataaaaagtataatatcgaaatgattaaggggtttcttagactacctcatacaaaaccaatacgatcttgaaacctatgattctcacaaacaatagataaacagataataatgtatatctttctccatacgaagatttctctccaatgcatcttgattctcttgaaagaggagaga

SEQ ID NO: 31976 - DNA, 388 bp, Glycine max
agcttgttacagaacttaggaaaaatcaagaacaagcttgttcgcacatcgttcgcgtgtatgatattcactcgacaaggtttgaagtagaggagaccttcaatcctataacgcaacgtggcggacaaaaatgggcagttaacttgaatggccattactgtcaatgcggaaggtattctgcgcttcactatccatgttcacacattattgcagcttgtggttacgtgagcatgaactactaccaatatatagatgttgtttacaccaatgagcacatcttaccgcatactccgccagtggtggcctcttgggaatgaagcggcaattcctccttctgatgaggcatggacactaatccctgacccaactacaattcgtgcgaaaggtc

SEQ ID NO: 31977 - DNA, 417 bp, Glycine max
  unsure at all n locations
tagctntattccttacaaccactaccatccaaatgggtggaaataagaaatgttgggcttacgtcctttccacaattcataagaattccttttaagattggcctaatataaattttattttgtaaataatagacaatgtttattggttcagcccataagtgtttaagggttgagtgatcactaagcatggtcctagccatttcctgaagaaatatacttttcatttacctctaaacatattctaatttggtgttcttggagtggaaaattgtggtcataccattctcttcacgaatatttcaaaatatcattttcaaattctcccccatgattacttctaattgaagagatacatgataatgactattgaattactccaaaacaaataaaactaggaaattntgcaatacaggatta

SEQ ID NO: 31978 - DNA, 381 bp, Glycine max
agcttgttacagaacttaggaaaaatcaagaacaagcttgttcgcacatcgttcgcgtgtatgatattcactcgacaaggtttgaagtagaggagaccttcaatcctataacgcaacgtggcggacaaaaatgggcagttaacttgaatggccattactgtcaatgcggaaggtattctgcgcttcactatccatgttcacacattattgcagcttgtggttacgtgagcatgaactactaccaatatatagatgttgtttacaccaatgagcacatattaacgcatactccgccagtggtggcctcttgggaatgaagcggcaattcctccttctgatgaggcatggacactaatccctgacccaactacaattcgtgcg

SEQ ID NO: 31979 - DNA, 411 bp, Glycine max
  unsure at all n locations
tagctttattccttacaaccactaccatccaaatgggtggaaataagaaatgttgggcttacgtcctttccacaattcataagaattccttttaagattggcctaatataaattttattttgtaaataatagacaatgtttattggttcagcccataagtgtttaagggttgagtgatcactaagcatggtcctagccatttcctgaagaaatatacttttcatttacctctaaacatattctaatttggtgttcttggagtggaaaattgtggcaataccattctcttcacaaatatttcanaatatcattttcaaattctcccccatgattacttctaattgaagagatacatgataatgactattgaattactccaaaacaaataaaactaggaaattttgcaataca

SEQ ID NO: 31980 - DNA, 204 bp, Glycine max
agcttttatataacgctcagcagcagtcaactattgatgctcttcgtgacttgggtgatgaacttccatgacttccccactgactgctggtttcttgacatacgtactccgtgcaatatcttcatactctctatgcactgattgccacgagaactgcctttacactatggaattttccgggtgaagtctggcaattcactatgc

SEQ ID NO: 31981 - DNA, 394 bp, Glycine max
tagcttgagtaaatattcagatcctgtccgaccttctttaacatctctatctttctcttccttttctatggttgtgttttttatctttcaacttatctatctcttttctattctatgccctctcctctctctggtcttcttgctggagaggcacgatggcaggagataatccacacacctcaagaaataggtggaaccatggaaatgttgtaactgttgctacaacttaacgagagagatataatctaattacatgcaagtcttttttatcttgcgccgcccaccaacgtcccatcgtggagaggaaatgatgtatgtcaatctactacttgagtgcatcatcagtccatcactacgcattttccagactaaactatgtttttttaacatataa

SEQ ID NO: 31982 - DNA, 383 bp, Glycine max
agcttctatccaaatggacttaccttgaattaattcctttgatagcccctttgagcctatgttcccttttctttgttttgaagctcattacaagccttaagtgaaaaaccatgatatcaccttacccttaaggaattttggagctttggaattgttttgggaataagttgggaataagtgtgggggggtatgtttcattggaagatataatttttggccatgcttaatgttttattttggccatgcttgatgtatctgtatattgcctagttcttctttattctgccattcatactgttcaaaaaaaaaaaaaaaagaagaagaaaagaagtgaagttgaataaatgaggtcttgttatgaggacttgatttgggagcctcga

SEQ ID NO: 31983 - DNA, 420 bp, Glycine max
tttcaacaagtgttgtccatactatttgaatacaagctcaagtttcaaggagaaaagtccaaggttgtgagttgtatcatggcccaaatggaggaggactaaatgacaccactttgtctcaattttagagtgtttaatttgtttaaataatggcccaatccttgtaaagttggatgaccaaaaatatgttttgggttaatcaactaaaagggctttagtttggtttagttcaagttgtaataaggtcccaattggcaacctaggcatcaacctttccgagaccaaatggtgctggcttgatggttgttgggggtgacttttggttgccacaatttcagttacactcagccattaagttcttttaattccctaggttagtggcattaagttcttttaattccaggttagtggatcattact

SEQ ID NO: 31984 - DNA, 388 bp, Glycine max
agctttaggatcaaacttttttttctctctttttctctcaattgttcttcattcttcttccttttttcacatttgttcttcctttttcttgcacaaattttgtggcttttccactggtgatgatcatggaaggctaaatactcaatcaatccaagtaaggctaaatcggagttatggcttagtattcataatatgtgtgaatattcatcttttcttcaatcctattttcggttttcatgattatgaatatgcttgggattgaaacaaaattaggttagcgattcctttcctatttcaaacttaataacagattgtttggatgatattccaacctaacttgtgatctcaatgaatctacggattaattcgattgaactaactcaaatga

SEQ ID NO: 31985 - DNA, 426 bp, Glycine max
taggaaaagataagttgcatattgtaagatactggacatgtcatggcgtgagatcatatccttcgtccatggaaaaagagagaataaaaaaagagtttgagttggtagccatatttcacagctggtgtaaaccttttagtaaaagacaacacaaaaatagaaagaagaaaaaaaatattaccttattactttgacacttttttactttattctcaaaacttagcaaaagctttcactcacatcacaatcctattaccatagaggtcaccctggcaatggctcactcttcaataattcatttccttgtcattgatgtttctcattaaaacgagttaacaacacaagactcgagcaacatgctactttttcttcggtaaatgtgtgacatgggcatagcataagattaatttaaagataatacccaaa

SEQ ID NO: 31986 - DNA, 374 bp, Glycine max
tagcttcaacattcaattttgagcgtctcgatatataacgagactcaatcagacatccgagtaaaaagttattgtcgttttaattggctcagaggttcaacattaaatttcgagcgtctcgctatattacgggactcaatcagacatccgagtaaaaagttattgtcaggtgaattggctcagagcttcaacattcaattttgagcgtctcgatatatgacgagactcaatcagacatccgagtaaaaagttattgtccgtcgcattggctcagaggtctaccttcaatttcagcgtctcgatatgttacgagactcaatcagacatcctagtaagaagctattgctcgttgaatttgctcagagattcaacat

SEQ ID NO: 31987 - DNA, 127 bp, Glycine max
  unsure at all n locations
ntgagccaacactaacgaccataactgtttactcggatatatgatggagttccgtactatatcgacacgctagaaattgaatgtagaacctgtgcgccaattccaacgaccatcacgttatacacgg

SEQ ID NO: 31988 - DNA, 381 bp, Glycine max
tagcttgtgttttctcgtgctatgcctaatatgtatatgtatgctgttttggttggttgcaggtgcggatcttgcttcggtgccagacgagcaagttttgaacgggcatcaatctgaagcggatgagtgtgagaatcaagatgaagaggctgatgcaatggttgaagaaccccattctggtatttgaattgagtgccttgaaaatcttgtgcttagagcgtgttttgtttttattttcaaaaactatttttagttttcaaaatgtaattaaataacgactctacactgttgtggagggtggtgcaaggcagagagtatagtgtggaattgatggagagcttgaagaagatgagacaacatctcctaacagttttcgttttt

SEQ ID NO: 31989 - DNA, 406 bp, Glycine max
tattaaaaatcacgtatttttataagttgcatttcatattaatgaactttttcaataatatttgtaattttaattaattttaaagattgcattagaaaaaaagtgttttagaaaaactattataccattttaattaatcatgactttggtgtaagatatttaatgattttattgactactaatttttgacgaatgatttgattgagtttttcaaccagatcttttttttttttcgattttgagatcttgattcaggattaaatttaaccctacttaaactaattcgtaataaaaataaaaaatgagtagttttttttttttgttttaattctcttgtagagaaaataaaacatgactattgaattgctttaatacagtgataagaagtgcctcaactataaatgga

SEQ ID NO: 31990 - DNA, 378 bp, Glycine max
agcttgagctcactgttgctgccccataaagctccacgaaatttgtcacggccatgctcttccttgcaagccctcttggtttcttgttcaagggctcttgcggtagctgcattttcttctcgtaacccgacacactttttccggacgtctgtagcgaccaacttgaatttttctttggcaagtcttgcttttcctagttttgtttttagagctcggacttcttcatcctcttccggagcttcgaagctttcttcgtcgataatctttagcttgagagacaatctaccctcgtgtacaaactttcagccattcatgataaccaccgatgatgccattacgaatgcccctaagttctttatctttccttaacgggctttc

SEQ ID NO: 31991 - DNA, 406 bp, Glycine max
ttctaccttgtgcttgagggctacacattgctcgatagagtgccccgtaacaccaccatgatagaggcaagttgcattgggattgttccatcggggaaaagaaggttggtagaccttcctcgggatcaccacaaccatttggttgttgagaaaagatggtagaaggtcagcataaggcatcggtatcggggtgaacttcgtaggttttctttccgagaagttcctccttgggtttgtatttgtgttggggttgggatttctagttggcgacgctgtgcaggaacggattttttggggaggcctttgtggttgagtgggcattctttgttggatgggtgccggactggaaggagatccgacattggctgagtagttgtactgggccgcgggatattggtaaatgggg

SEQ ID NO: 31992 - DNA, 257 bp, Glycine max
tcgacctgttgcttgttcatttggagaacatgcttcttggaggacaacaacgagggatagactgagagaggcgggatcacgaaattgaacgaatataagaggtatataagtggaactttgaagtatgtctcacactactgtcattcatcagagttacaacaagtgctacgaatgcttctattatagagtacgcaggcttgctgagaagctatcttgagataacttccttgagaagcgtttttgagaaaacttccttg

SEQ ID NO: 31993 - DNA, 311 bp, Glycine max
gtgttgttcatactatttgaatacccgttcttgtcttttcgacaaatgtccaacgttgtgacctgcatcatggcccaaatggaggaggactaaatgacaccactttgtctcaattttagagcgtttaatttgcttaaataatggcccaacccttgcaaagttggatgaccaaaaatatgttatgggctaatcaactcaaagggctttagtccggtttacttcaagttgtcataacgtcccaattggcaacctatgcatcaaccttttccccaccaaatggtggctgcttgatggatgttgggggtgacttt

SEQ ID NO: 31994 - DNA, 270 bp, Glycine max
agcttaatgatgtatgtcatacccctaatatttttctttttacagccagtatcatgaattgaaaatgtattttgtggaatgcaccagattgataaaagctccaccaaaatgcatagagcgtatttagaatattttttatttctatttatcacatttaggaaagaaaatacaatatgctcctcatcaaggagttacttacaacctacattattttaagatcaatctgacttgacttaacctattcagtgaagaattcatattctattaata

SEQ ID NO: 31995 - DNA, 373 bp, Glycine max
tgactttaaagaaaggagtggaagcactattagaaatataagtttctacgacacctattctacgatggttctgagtgaaccgccttagaaaatgagcctgtggcatagttcgtattattgtaatgaaaaaatgccttttacaacacacattctaagacgattattgaaaaccgcattataacgttatggctaacaacatttaaaacatgtcctaatcaaaatccatcgtaattccgctgaaaaaaaatataaccctagctagcctgttggcgctcctccgctcacctcccgctctagcactataacatgagattgatatagagtgcaatacacttggccaattgcgttttaaaaatttattatcctgattaca

SEQ ID NO: 31996 - DNA, 382 bp, Glycine max
agctttcatctagccaagattatacaaaagtgttacaagagaacttaacggtttctaattatatgggccatcaaatctatcatgtgttgacagtaattgattagcccatgaatctccttgggggctgtacacactttggcaatggctttcgctttggctaatagtcgcgggagatcttgacttccattcaaggtcaaggcgaacctatccatccacatagtcgcttcttgatgcaatgcgtcaatcaccctccctcttgcttctttttcggctacactcgtgcaaatcctccactagcttttgttcacgggtcacagactggttcaactcttccttgtatggacctatgatagttagcatgctctgctccgtgggttccaag

SEQ ID NO: 31997 - DNA, 297 bp, Glycine max
tggaaggtagtcatacctcacaaaatatatgtatgtgtgtttacgccagaaaaataccttggatatgcatgtatgtaatcgacgtagcaaaaaaatacctcacaaaatatacatatgtatgtttaagtagcaagacaccttggatatgcatgtatatagcaacaatatatatgtgtatgcttaggtagcacgacaccttggatatgcacgtatatagcaaaaatagctcacacaaatatacacatgtcgaggtagtaaaaccctcatgacctaaccccccataacacccaaaaatta

SEQ ID NO: 31998 - DNA, 380 bp, Glycine max
agcttggagaagatgcttcaatggaggaaaagaaagagggagagaaagagagaggggggagcacgaaattgaaggaataaaagaggtatagaagtggaactttgaagtatgtctcacaagactctcattcatcaaagttacaacaagtgttacacatgcttctatttatagactaggtagcttccttgagaagctttcttgagaaaacttccttgagaagcttctttgagaaaacttccttgagaagctagagcttagctacacacacccctctcataactaactcacctccttgagaagcttccttaagaagattcctaaagaagctagagcttagctacacatacctctctaatagctaagctcacctccttgagatg

SEQ ID NO: 31999 - DNA, 404 bp, Glycine max
tgagatgaggaagtgttgaagggtgaaacttcctgcttttattgttgaccacagagtggtacctggagatatgtcgcgggggtcaggagaccttggggacgtcaggtggggtgctattgcccaaaaccaagcttgaccaatcccgacccaacccgggcatagtcggtcagtgagaacctgtgatgtacctaagcaggcgagctcctggcagtcaacagataaaaggaaaacaagaccacaaagcaaggaggcttgtggtgcgtggccacctgtgaatccgtgtaatatgtggattgtggcctctggtaatcgattaccaagggtgggtaatcgattacaaggcttacaaatgaagacaggaggctaagatggtctctggtaatcgattaccacggcgtgtaatc

SEQ ID NO: 32000 - DNA, 380 bp, Glycine max
agcttggattgcatcaaggaaaggatacaagcttgaaaacttgaagaaagttagagaaaatgacaaccagatgtgtcacaccctgaggtgtgacaattcacatgggtgtaacaagcaccaaaaaacctaaattgacaaacaaaatgcaccatggctaaggtgtgtgaatttccaccaccgggaaacgcattagacgacaacatgcgtatgtataatgtttttaggatatcttaaattgtagaaatcgaaacgacacgagacaaatgtctaatttcaagaatacccgtccacaacttcgtgaagatgagttaagaatttcatgtcctaacagtgattctggtcacacaagttacgcacattgtaataccctgtttcatgtt

SEQ ID NO: 32001 - DNA, 272 bp, Glycine max
ctcaagcttggcagctgatattgcttttctgcaatcagccgtcgacatgtctttttaacccgagaccagcaactcaggcttgatggtggctgacccgcccatggaacgactatgctggagtctaactctgggccttataataagtggaaaaacgacattctctgaagaataaatgggtgcccctgaccccggcgttgaagccgatgcttccacagcattaaactgctcgtccatttcaaaggcggatgtcgtcgacgatgaattgaacttat

SEQ ID NO: 32002 - DNA, 389 bp, Glycine max
agcttgaacacttctatttacgtaaatgtagcattccttacttctcacgttatatttcagaagacctgtgccgtaagttatgcgattccacagataaaacatcaatagtcatatttttaattacagccaccctatcaatattcatgagtcatcacatgaattattgagctagctagaacaaattcctcaaaaaagaaatctgctatcatttgctttagaatcacatttgatcaccacttgataatcattccttaaaataagaatattcaacatctggttccctcgcccatcaaatatgccacactcaatctaaacacttcacgcctaaaatacataccccctcataatcccatccatatataaatgttaaccatgctatgcctatgggg

SEQ ID NO: 32003 - DNA, 419 bp, Glycine max
  unsure at all n locations
tggaagcctttgaacaaatgagagaatggtggagtttgatgttcgagatcccttccaaagctgtcagcctacgaattgagtagaggatcagagatcgaggttggttggatgtgctataaaatgtgccctaacataaggactgggtaaatgagtttaagagttaatttaatatgcaagtttgacaaccatgcatatgtatatcattaagaattacatattaagtaattttctagaaatttaggtaaagaagatggtgccttaatacaagacaagaacgccttttacgctcaaaacatgaatcagagcttaaaccttgacttgtgaagtgcaaaatctagttttgctctcctcgatcaacttttgagagttatattaagtatttgctagcattattaattntttaactctatatttatgag

SEQ ID NO: 32004 - DNA, 385 bp, Glycine max
agcttattatataaggtaagatttgatacccacatagttactacactacactatctttttgccagatgtaccttctagctgcttttatttttaagggagtctaataaagcctaaaacatgggactatgatatcaattatccttatcaaatgtccatttgtgtcagccacattagtaagagtttgggtgcaaacaacactgtatcctttccgccatattatcctttattcttcttcagtgctgactattgtttgggggcttaaattgtggagagcttccccgctaaaacttttaatgattttttttttccttctaaattggccacccaagataatgaggtatctgttctggccactgctttctacggataaatgatttggaacgtg

SEQ ID NO: 32005 - DNA, 424 bp, Glycine max
  unsure at all n locations
tgagcatacatgaaaataaataaataaatatgatagatgaaagttaagacaggttgatgaggcaggagacaacaatgtttagaaagagatatgagaaagacattgtgataggtattaattatcaatgggatctgcaaataagagaaggaaacagagagaagggtgagagcacaaatgaaatgagagcaaatgctctaccaagctagagagaggttctttgagctccaagttctattgcaaatccatcatatcaccacaacccaaaccccaattccaactaatagaatcactcctcatttctctctcctctaactaacttccactacccctccacaaaacagacacaaagcatcaggccttatgtggtttgggccttcaagaatacatcttgaagggcctatcccactntgtgactaatttccta

SEQ ID NO: 32006 - DNA, 380 bp, Glycine max
agcttgctattaaaaccaatcttgtgtatctatcaaaactcgtttgaactggagttggtttctccttttactgaggttaactagaataccatggtcgcgggtgtgaaaggaaaagtggtgctaaaaaatattcattgggattattattctataaattaataagactgtgtttggcaatgacatgacttgatttattcaatttatgatttataaatcagacaggaaaatggagcaatgaattacttatccagaatgttgaagcacctcaagtacaatgtcatgcccagatttacactaatgtttaatcttgatatttaagtgtaatgggaaaatcacccattttcactgaattatgtttagttctcatattacaatgatta

SEQ ID NO: 32007 - DNA, 424 bp, Glycine max
tacatccgtgggtgggaactgccaaatttgctgtagaacacaatcaatcatatacgcttccttacaaaacaatctctcttgcactctttctcataagtaaccacccttaaataatgttcctagttttctattacaatcaaatctctgacatatcttttcaaccttttatagaaattctaaacatcttccacatatccacgagtacaataagaaactatccataacaatatttaatgaaatttcgctcagttaccatctcttcactcttgccttctaaacgctaacggatgaatcattgaagaggaactatcagctaagttagaattagaattctctgtattctgcccattgcttttggtttcattttttacaggcttctaaaccataggtttgggcttgggaattctattaatactaccaacct

SEQ ID NO: 32008 - DNA, 389 bp, Glycine max
  unsure at all n locations
agcttcggaagaaagtgatgaggtacaagccctaaaggcagagcttgaaagagcctgtgtagtcgaagagaagttcaagtccatagccatcaaagtctgaaaagagtatgatgaactaagggatgtcaatatggccaccgatgaagccttggaatgagaaaccaagaaggcccgaaaggaagaacacgaccaaagcaaagttttgaggggctttatagggaagcaatagtaagctcaagctccgaaaaggtaaaaggaatcatcacgggtcaaaggccgatcttgaaggacagctaaaggcttaccttangtcgaaaagaaatttgtcccaacagttaagcgagactgaagggaatatgtgggccgtcatcgatgagtgcaaaaagaag

SEQ ID NO: 32009 - DNA, 413 bp, Glycine max
  unsure at all n locations
tatgctgcacacatctacaacagacctcctcaacctcttcagcaaaaacaaccacaacagaacaattatgacctctccagcaacaggtacaatcccgggtggaggaatcatcccaaccttagatggtcgaatccttcacgacagtagcaacaacaaccttattttcaaaatgttgctggcccaagcagaccatacgtncctccaccaatccagctgcaacaacagcaacagccccagaaacagcaaacagttgaggccccttcgcaaccctcactcgaagaacttccaggcaaatgactatgcaaaacatgcagtttcaacaagagaccagagcctccattcagagcttaaccaatcagatgggacaattggctacacagttacatcaacaacagtcctacaattctgacaga

SEQ ID NO: 32010 - DNA, 381 bp, Glycine max
agcttagtgttgcaataatttaatataatttactttattttacttagtatttcttaactaaactaattaatgtatcgaatcatctaatttattaatgttttatttttgtaatatgtgaagtataaataaaacataacagacaaggaagaacatttttcacgaaagaatgaaaagaaacacttatgtcatgggatgatcaacttaattaccttaaattatgttaatatttgaataacttacgaaaaatttatgaattattataattttactacctcaaatttattttgtaataaatttaatatgaatttaatttgtctttcttatcataaggttctgacatgtttgtttgacttacagggtccttcaactaaaggtgagttt

SEQ ID NO: 32011 - DNA, 287 bp, Glycine max
ttagagctcgaatatgccctataatgagtctgattacaattcgatgtgcgacagacttcgacgtagggattgataataccctggagctgcccatcttagtaggcttgaaagagatcgctgttagcacagctgacgtgatagcgaatacgctagcacggatcagacttgctatttgatgtgcaagctgtattgcgaatggctcctgaagcggaatttaatccttacgtatatgtcccgccaatcacaccgccatggtgcattctctatataacttgcactgatgctgc

SEQ ID NO: 32012 - DNA, 350 bp, Glycine max
agctttggagatccaaataagttgaagaaacgcttccatcttgtatgtatttttttcaacttcagttatgcatttctctatatagctagccatcatcagtatgtcatcaccaaacttcgtgcctcaaccccacacaccgctctttctcttgcaccccgatgccgccacctgcctccccatcctggtgctcctcctcgatcatcgtagccactcctccgtggtccagtagactgcgacgcatgacttggaggagcgccatgctgattggcttactcaaagccgcggtatgcgtttaaatgacatggaacaccgcatttgtggtggtctcagcagtgatgctcgcttgcacc

SEQ ID NO: 32013 - DNA, 391 bp, Glycine max
tgcttgtggagcttctatggaggctggatctttgagctttaatgaggtcctttaatggtgattttccaccatggagatgcagcggaagacaaagaagaagaggtaagaggtggcgccatccactacggaataagccatggaagaaggagcttcaccaccaagatgagccttggataagaagcttggagaggatgcttcaatggaggaaaagaaagagggagagaaagagagaggggggagcacgaaattgaaggaagaaaaaggccacacgctgaactttcgttgtgcctacaagactgttattgatagagtacaacaagtgtgcacatgcttctatttatagactacgagcttcttgaaagcttcttgaaaacttcttgaaagctttttg

SEQ ID NO: 32014 - DNA, 381 bp, Glycine max
  unsure at all n locations
agcttataagttagttgatttaatgaaagtttttggtaacatgaagcataaaaatagtactcacacaaggggtagcttaccctacgtagtagtaacagtggactaaaagtccaaatatcgaacccaaaggaccagttgtgttcccaaacaattatttcttgtaaactaagcatgtatggttaacttaaatgaaagatagatgtggtcaattgctcaatcatgtaaataagaattaacgattgagaacttgatgggaaaacagttataanaagccctctacgattggactccacactctctctaatttttaccaatactaactctaactaatccccaaataatgccaatgactaatatgcccaaattcaattattaatcttt

SEQ ID NO: 32015 - DNA, 482 bp, Glycine max
  unsure at all n locations
cgcgccgcgaacttggngcgcgtgggagncncttgagnaccatcggatattcacgcgatgctatagaatactgaagcttgtgcggccatggaatattctgtatgggacggagcctattatcacacatgttgcatgagttcgcgtgctatgacatggtacagatcacccttcaggagtcttgtgcttatttgcagtatttttgagctagcgtaaaacctgaagcgtatgtagcaggcttggatgatagatttcttaaccagtttaagcggcaacaatacagtatctatgaccgttgaagcaatatataccctgtaaggtggctgaattgtgtggattcacatggactaacacttcttgctactatagtcagtagatttttttataatgctggtggtacaagcaaggatatgattctacttcaatggagcaacagcagcatgaatcacatctcagccgagttgccactaatgatgctactgacn

SEQ ID NO: 32016 - DNA, 364 bp, Glycine max
agcttcccagttatggaaagctaaatcctctgttggatcttccttctaggtacttgatgtaaatatctttttatctatttaatgatgttttgtgtgttcactatgctatcagaacttcattctaccatgactttaccttgatcatgtagatgcatgtgtccttaggatcattcaacagtggaaactagtttgattcttataacttgatacgacggggctagtttgttgtattttcacgaggaatcggggtacggcaacctagttgttcctatccgtcttatgccgccatggctgagtttagtccaacaagaggaatcggcggacgatgcttgattatgattaggctacactatcatgaggaatc

SEQ ID NO: 32017 - DNA, 370 bp, Glycine max
  unsure at all n locations
tggcatcatgcgctgtatggaagtatggaaaaatggcatcatcgtacctttgatatacctaacaatgaggatatctcaatccgctatgagtttgatgtaaatgtcagtacacaaggctatcgtccattgatatacaggtcaatattctctctctgttcatatatcgaaaaaggcaacagagaagaatcgatttgaatttgtcattcaaataactatcgtatattgataacaatggcgatcatcacatgagagtacctttnttcccacttcaccatggacccatctttaaactacttcattgtggacgattggagacaatgctatacaaactggcaagttgtacggcattctcctaactgtagttagactt

SEQ ID NO: 32018 - DNA, 391 bp, Glycine max
  unsure at all n locations
agctttaagctttagtcttcattttgttcatgttgttccccctatctataacgcaatgcatactgcaacactacacacccactgcataaagggatggctaaaaccaaggcagctattatacaaccatgaccaagactaaaatataatgtcatctattaagtagtttggatcagttataacattactcatacttgcatcattcataatataagataatagcatcaatgtaatcaacaagacataacaacgtcgtatccagccaaaaggttcatcagtgcattcgcaaacttgccttgattcttggccttactttctcataaagaaacaccacgagattgttcttatacttacactntggcttatctgagattaactgtgataaagtggagtt

SEQ ID NO: 32019 - DNA, 408 bp, Glycine max
  unsure at all n locations
tgaagganaacttgatgccttggtcaacctagtaactcagcttgccatgaatcagaaatctacacatgttgcaagagtttgtgttttatgttcttctacagatcaccatacagatctttgtccttctttgcagcaatttggagtcaatgagcaacctgaagcttatgttgcaaacatttataatagactccctcagcagcaaaaccagcaacaacagaataattatgacctttcaagcaatacatacaatccaggttggaggaatcatccaaatcaagatggacaagtcctcacgacaacaacagtctgtcccttctttntagaatgctgctggtccaagcaagccatatgttcctcctccaatgcagcaacagcagcagcagtcacaacaaagccaacaagcaacta

SEQ ID NO: 32020 - DNA, 382 bp, Glycine max
agctttgagggtgcgcagcccaccatcttttcatagtagagtaccgataatgtgtctaccatcacgattatcgtctccctttccattattgggggtaccacctgcgccgccagatccctccaccttttgggcgtgttctttgaatgatccgtccccctttttgcacatgttctgtagttgcatcctatccggaaccatatcaaaattgtactgatactgcctaacaaaggcaaccattaggtccttccaagaatggactcgggaaggttccaagttcggcaccacgtaaacctaccccagtaagactttcttggaaggaatgtatcagcaattcctcatcttttgcgtattcccccatcttctgacaatacatctttagatg

SEQ ID NO: 32021 - DNA, 424 bp, Glycine max
  unsure at all n locations
tggagaggatgcttcaatgtaagaaaagaaagagagagagaaagagagaggggggagcacgaaattgaaggaggaaaatggggagagaagttgaactttgagttgtgtctcataagactctcatccatcaaagttacaacaaatgttacacatgcttctatttgtagcctaggtagcttccttgagaaacttccttgagaagctttcttgagaaactttcttgagaagcttccttcagaagctagagcttaactacacacacccctctaataactaactcacctgcttgagaagctccttgagaaactttcttaaaaagcnttcttaagaagattcctagagaagctagagcttagctacacacacctctctaataactaagctcaccttcttgagatgagaagctagagcttagctacacacc

SEQ ID NO: 32022 - DNA, 357 bp, Glycine max
agcttttcatcgtgcttgttgggtattatgactctgtgtcgctgaacagctgaaaaagcatatgaaataccaatcatcaaatttcgtcagtgaaaaaaaaaaaatcaattctgaatgagcgtgttggtgttgtggatgcgatgagtggtgaatgtaaatctcgcaaaactcactcacgtgggttttgtggaggcagagccatcttcaagggtgggttcctatcttctctgcgtttctgagtggctgtaaggtaaatgcaaaactgcaaagaagacgtctgcttcacaaaatggcaatttttcgaaatggccaccaattgcagatcacagtgtgcaaaagacaacattcccttttctt

SEQ ID NO: 32023 - DNA, 418 bp, Glycine max
tgttacagaacttaggaaaaatcaagaacaagcttgttcgcacatcgttcgcgtgtatgatatccactcgacaaggtttgaagtagaggagaccttcaatcctataacgcaacgtggcggacaaaaacgggcagttaacttgaatggccattattgtcaatgcggaaggtattctgcgcttcactatccatgttcacacattattgcagcttgtggttacgtgagcatgaactactaccaatatatagatgttgtttacaccaatgagcacatcttacagcatactccgcacagcgtggcctcttgggaatgaagcggcaattcctccttctgatgaggcatggacactaatccctgacccaactacaattcgtgcgaaaggtcggccaaaatcaacaaggataaagaatgagatgga

SEQ ID NO: 32024 - DNA, 235 bp, Glycine max
agcttccattgttcaatttcgagtgtctcgctatattatgcgcctgaatcggacctccgaatgacaatgtatgaccatctgaacttctcgagagctaccatcgatcaatttcgcgcgtctagaaatattatgcgcctgaatcggacctccgagtgaaaagatatgaccatgggaatctctcgagagcttccgatgttcaatctcgaacggctagatctatcatgcgagagtatgc

SEQ ID NO: 32025 - DNA, 407 bp, Glycine max
ttaacctcatcgtctctcacagtctttagatttgggagccaatccaatccttgtgttcggactctcagccacttatgatagccgtcgatgatcccattactgcttcccctaagctctctgtcctttcttcacgccgcatcccatgccttgcgaactccttggagtaccctcgcgttgtggtcactgaaaccccgtgcgatgaaaggcgtgatgctttcgtctaatggcgctcctctcatggggtagccaagctgtcttatggcagaacgggattataatcatacaaccccttgttcccatcaagggaacatttggacatccttcgcatgaagatagaatcttgattcttcctttcttctagcgagggaaccaattaacagacgcccccccatgctagccaagagttg

SEQ ID NO: 32026 - DNA, 388 bp, Glycine max
agcttgagaaacattggttaattgagttacttcaacattttcataagtcaacataatgaaacaaaaacctctagcatatgttcccttaataatgtaaacattaaacatcagacagagtacttgcctctagcacagtgtaatgatggatttgtatttatatagtttataataatcatatatttaagaataaccgccatttatgaatacaggacaaccaaacaaacttaaaataacaacgcatgcacgcaaacacatacatggggcatgtcctgcaaccttgattaacttgaatattggccatccatagcttattcaatggttggttagtgttacgcttcatattcacatcacaactaacaacaggaataaagtcatatccatatcacaa

SEQ ID NO: 32027 - DNA, 413 bp, Glycine max
  unsure at all n locations
tcatgatgaatcaagattgatttaaagagttttgatgataacaaagatgatgacaaaaagctcaaaagtcaagaacacttcatgataacaaagatgatgatctaaagaatcaaagaatgagttcaagattgaatcaagaacacttcaaggttcaaaaggaaaattgatttcaagaatcaagaatcaagtttcaagattcaagttccaagaatcaagatcaagattcaagactaaagattcaagaatcaagagaagactaaatcaagatcgtcttacaaagtttttcgaaaactgagtagcacatgaatttttctcanaaaccttntaccaaagattttttactctctggtaatcgattaccagattgttgtaatcgattaccagtagcacaatggttctatataaaagccttc

SEQ ID NO: 32028 - DNA, 385 bp, Glycine max
  unsure at all n locations
agctttaaaggatactacgttgtcacccagtagggcctccttaacgtgtggagccggtcgtgggatgatgatctgctgatcacaggcctagtgcctgctcgtacccgtccctgagaattggttaagtgggaaatgacattatgctgtgaaacatggctacgctaccacttacctcggttcatccctgtcttggatctggcgccgtattgaccatcgcttgaaatgatcttgtncttgtctttcgattcataaaataaaaatgcatgtgcatgtgtcccatgagcagctcccacgcaataattttttagcaaaagcctgttgggttcagttctaattaagcgctggtcgcatccccatggatcgagcaaaaaggctcggatcatta

SEQ ID NO: 32029 - DNA, 375 bp, Glycine max
  unsure at all n locations
agctttcatctagccaagattatacacaggtgttacaagagaacctaacggtttctaattatatgggccatcaaatctatcatgtgttgacagtaattgattagcccataaatctcctcgggggttgtacacacttcggccatggcttttgctttggctaatagtcgcgggaggtcttgacttccattcaaggtcaaggtgaacctatgcatccatatagtcgcttcttgatgcaatgcatcaatcacactacctctngcttgttttttggcctcactcgcgcaaatcctccactagcttttgttcatgggtcatagactgggtcaactcttccttgtactaccctatgatagctagcatgctttgctccgtggc

SEQ ID NO: 32030 - DNA, 244 bp, Glycine max
  unsure at all n locations
ntcataggtgatataaagcgcagccatttttcttatattactctcacgaggtggaggttgcgccatgttcttagaacgtgcaaaatcacaacgctcagaatcacaatgctcaaaatcatcatgctcaagatcaggatgttcaaaatcaccaataacagaatgcacatactcaccagttatggaatgctcacaatgatcatcacggatacaacgatgcctacctaatctatgaaatgtcctatct

SEQ ID NO: 32031 - DNA, 383 bp, Glycine max
agcttctacatgtctagagagttatagagagagaaaggtccaagttccagagagtttgggagattttgttgtgtgaagatctgcagagaccagagcttgaagaggaagtcgtcctgagagcttgggatgagtttgtgagtgattgtgaggtcttagaggtggaggagacatccccactacttgtatttctgcaatctttcatcattctcttctctttgttgtaaaggaagcttcccagttatggaaagctaaatcctctgttgaatcttccttcacgtacttgatgaaatatctttttatctatctaatgatgttttgtgtgttctctgtgctatcagtatttcattctagtatgcttttaccttgatcacatagatgcacgc

SEQ ID NO: 32032 - DNA, 418 bp, Glycine max
tgtgcattcaatatcctaatcaggctttttcatatgttctcaagactggactaatacatttgctgcccaagtttcatggtcttgcaggtgaagatcctcataagcatattaacgagttccatattatttgttccaccatgaagcccttgatgtgcaagaagatcatatctttctaaaggctattcctcattctttggagggagtggcaaaagactggctatactaccatgctcccaggtccattttcagctacggtgaccttaagagggtcgccttgcagaaattctcgagacaaatgaccatacagaatatgcaatttcagcaagagacaagagtctccattcagagtctgacaaatcagatggggcagatggctactcagttgaaccaagctcagtcccataattctgacaaattg

SEQ ID NO: 32033 - DNA, 548 bp, Glycine max
  unsure at all n locations
cacacctgtcctccatatnctctctntactatntcagctatgtgacatatgttatccgtctccatatctacanntnatcaccgcgngacattgagtctggttgacgtcctacgctcactcataggagaattcgagcgccgcagccgaggatcctctacagtctagcagcatgtctgcatgtttagaacataacgacatgcaagcatcggtaacaaatggacttcaagacagtgcatctgattatcacgcgcttcgctaaggccacactaacgtgccaatcatcagaggctaaacataggaaaaaggctatcgtgctaagggtaactctataggacctatactccttgctatgcatcggtgtggttatcatgccttaacagaccacactcctgagcacacccgattggaccaacaggacctcctggatggacgtactgacgaaagccccaatcgactccatgaccggagttataaagtatataatacctacactgaaggtatttaactcctaaatcctatggctggcctgcaaatactccgaattcacg

SEQ ID NO: 32034 - DNA, 411 bp, Glycine max
  unsure at all n locations
cggagagaatgactcactgttggaaaattagagatttagagagacggcggaccacaaaattgaatgagctaaagaaggagatcaggtgaactttcgaatatgcctcataagactatcattcaacaacgccaccacaagtgtttcacatgcttatatttatatcctccgtggatcccctctgataactatcttgataaactaccttgagaatgttactttagcagttaccgcgagaagacagagcttaactcaaaacgcatataacgccaccctcacttgttcacaagctgacttgataatntaacttgagaagcttacttgacaagattgctggagaagctagagcttatcactcccaccgatttaatacttaagatcacctccctgatacgataagctagaggctctccg

SEQ ID NO: 32035 - DNA, 379 bp, Glycine max
agcttgccacccagctcgcctaggcgagctaggttgcttcctcctgaagcaaccgccttatggaggaatattttggaaggcccaagtgggcctaattgctatttgcacccccatttttactaaatacacctcttgctcttttttggtgattctttttccgtaacgttatgaaactttacgaatttcgtaacgatgcttgttttctttccgtaatgttacgaaaccttacggattacgtaatcatacctttttttccttccggaacgttaccaactttacggatgcgcactaacacttccttttaatttccggcatatcacggaacttcacgaattgtgctacaatgctttcttttgacttccggcatgtcacgaaactt

SEQ ID NO: 32036 - DNA, 374 bp, Glycine max
tgttgaaattgccatgtttggatgagttaaacatacccattctgttttagggtttttgtgatgatgtttgtgatgtttatatgctgaaattgctgatggaagtctgttagagacgagggtagaactaacctaaggttagaaagtgagaatgtgatgttatgagtggaaaaagagtgagactttgagagttggaaggctaagtctgaattatgtggtaaatggaggttaaagtgagttaatactagcttgaaatgtcattccgacatgtgagaaagcgacgctgagctagagagaaaaaaaaatgaccaaagtgaacaaagagccctttctagggcaagattgggtgttgaagagtcaaattttgattcggtgag

SEQ ID NO: 32037 - DNA, 373 bp, Glycine max
agcttgcacaaaaactttctagcagtaatattaaggttatagaaatttctgtagaaagtaaaacttaaaatgggacaattacttaggcaagtcaagtaactaatatttcttaaacagtattggacactcataacgtataaaattataatgtttacctgagaagtgtcttgaacagaggaagtgcgaccccatctctcagagtcccaaaggatggagctattaaaagcaaaacttgaaatatgaattgggggagtgatagtatcagtttgctgctcatatgtccagatgccaaccaatgacttgtgatgaatcacatacaggtccttcgattctactttctctctgagtgcagctaacaaagctgtcggccatg

SEQ ID NO: 32038 - DNA, 425 bp, Glycine max
tattaggaactataaaactcagcttcacaaatagctgatagaatcaattcacagctgaacaactcaaaccaaggcctaaccgtgtttgcacccactgataatgcattctcaagcctcaaagcaggaacattaaactccataaactcacaagaccaaatgcagctgatacaattccacattctccccactctctacaccatctcacagttccaaaccgcaagtaaccccttgcacacgcaagctggaaacagtgatgatggagagtatcctttaaatgtgaccacctgacgcgaaccaagtgaatgtcgaactgaggtggttgatacaacagtgtccaatactatctacagtgatactcatctctcagtgtatcaagtggataaggtgcttctttctatgaagcttttcggcgcgacggcaccggc

SEQ ID NO: 32039 - DNA, 384 bp, Glycine max
  unsure at all n locations
agcttgattaccaatatcccatttttccctgtagctcatcgcgcttaagcataagcaactcttcgcttaagcactagtacctcatagagcttcaaaaaaagagttttttactttcaatggcttccaaatcaacccaaatggaatctcaaacctatcaaacatgtntatacatgtttaaagaagcctactatacaatgggtttgttagatgatgataaatagtactttgatgccattgtagagacaagtaattggggttcaaaatattatttgctaaagttgtttgcaactctagtattctccaatcagttatctaaactagaatatgtgtggaacaatatgtagcaatacttgacagacaagacaacttttgcagtttccaaat

SEQ ID NO: 32040 - DNA, 369 bp, Glycine max
cgcttgatttatgaagaaaattattgctgttccgaagaaatgaaagatttttttcatttaatataatattattgaaaaagaggatacagagtataaggggtatacacccttacaatctggtgattagttcttctctgcggccttttgcaagagccaaaataaatttattcataatatgactaaaaacacaagatgtgttaattaatcatcttaccgtccaagtaaattacagccatattcgtgcagcataacacaagtcaccccccaccctttcaaaagaccagaacggaaaattctatccgtacattgatttagattattctctttcaggttgtggtaatattaaaaaagtattgtgctgttatgtga

SEQ ID NO: 32041 - DNA, 452 bp, Glycine max
  unsure at all n locations
agagctgatgagaactgtntgaagtggtttatgactttccttacagcccttttaagcgtgaaaggagaagggaagggagggagaggtcatgggttcgaattccccacctacatctaacaaactaacattctcggataattatgttttccagaaagagttataagacaaggtaaaattaagctttttccgtaagttaaaattaacttatgcataatttaaaaccagcttttggagaacctaaagtgagcgattttctatagaagtatataagttgatttaagacttagttcattctactttcatattttcttcttctataagtgcttactgaaaaatttatcctaacactgcctacattacattgtttaccccaacgtttccccgtcctatgccactntcacgagtcacaataaactcagtataagctctnttaaatggtttcttagtgatat

SEQ ID NO: 32042 - DNA, 401 bp, Glycine max
  unsure at all n locations
agcttctctgaagttaaaccacacacatatatatatcaagacatgggacaaaatagttcttacaaaaatgttttccccagaacaagtacacgtaaattataacaaatgaacaaacaaaaaagcatactttcattttctcctatcaaatttatcctgagaaaacaaacaaaagtgagtcacttacagggaacaaattcttccagaactgaagatcagtcttaggaggctcaactatcttggtggcccaacagaacaacattatgagagagccacatgcaagggagagagttgaggtaagccaagggtatgggaatgcattcagcaccttcttgttataaatgttgaacaccacattcagtgcccaccatgttgcanagtatatcccaatcttcaccttctta

SEQ ID NO: 32043 - DNA, 530 bp, Glycine max
  unsure at all n locations
accctaactaaagctttctcttcatctgctacatacttcatattgtttcaccttaacgtctataatttctatcgcttacacagatctgcacccttctaaacaaatcactgggaagacgcgtgatagagaaacaattaagtacaagagttagaaagaatgatatatacacggngaacctagagtattcatcggtcagaagttaaaaaaaaactaatttttcaaagtattaatgcttgtttaaataattaacctcttttaatagacattttttcatacatataaattaaaaaattaaactcttaatctcatatgattatctgctaactatgcctttcagttatatatgataccacataacanacaaaaataatcataataagaaaaaaggtcttaataaccccatatataaaacccttgttgtttctagatatggttggtgttanttaaatggttcataagatatganatgagatcgaaggatagacnaagtacggtgttgaatagtagtanaagaatattgaacctgttgt

SEQ ID NO: 32044 - DNA, 401 bp, Glycine max
agctttctttcttttattggtgtattttgatctcctttcggtgctctcaattgcgggggtgtgctcaaatatatggggcaatcttgatttgctttcttgcttgattacgttgaattaggggccggcatgagatggccctacgcctataatgcattttgaaacaatacgacatgccacattgtccccgttctcttgctattgatgcctaaacgcgcgcccaccaagtgttctgtgaaatgcctcaatggcattagcctgtgacttttgtaaggagacaacccatgctgtattatgctttgcgcatattttctagtatggcttcattcccgacaaaggctagagcaattgccccacatatatcctactcctagaaactgacaatctatgcacatagagcacac

SEQ ID NO: 32045 - DNA, 465 bp, Glycine max
  unsure at all n locations
aattgtgattctgcattttttttcctaagtatctagattaccagtgtttctccatcgattaagattaatcttattagtaatatataactattattaattcaaaaaaaaattacacataaagaaaatcaaacttaaattgtttgttaaataaataattctcctacatataaatacaatttacaccactatatcaatcctataaactaattttgaatttgaatttgaatttacacaataaagtttgttcaattgttgtaagataatatcttattatatttttttagattagtataaaattgattaaataatatcctattatattagtcataataggacaattcttaaattgattaattagttaatctgatttagaatagctcaattgcattcggtgaaacatacttgtgatgcagaaagaacaggttcaagtttcaagtatctaagacatggntgtatataacctat

SEQ ID NO: 32046 - DNA, 410 bp, Glycine max
agctttgttttgatttcatgaagttgaacaattgactccaagcaatatataggaacttacttatggacaaacagaaatgcagcacaaagtaacaaggtgcctgtaacaagaatccatccaataaccaccaagctgcagccacgataaaaaaaaaaaaaaaaaacagaacatcttttactgatagaaacttaacgggagacaaatctatcagagtgaaggaaatgaaatgaattcaacttacgagtatacaggacccggcaaagcaagtaaagaaaatactgcaaaaattaaatcaagttcatatgatttggttaacatttagtatagagtaagaaaaagaaaaaagacaaaaccaaaatcaaacatacacaatccgagaaatgcaacaaagatcataacagcagcaacag

SEQ ID NO: 32047 - DNA, 533 bp, Glycine max
  unsure at all n locations
cgctccaaaacgtcttcgttcggctccgctctgttttccttcaccgagtcggacgaaggagacggagttggcggcggcggcggcggtgatggatgggacaacggtgacggcggagggtcggggttttgggattcgaataatgggaatgatagcacggacttgtattaccggacgatgattgaagcgaatccagggaaccctctgtttcttggcaactacgcgaggtacttgaaagaggtacgtgaattgaagctatttagttattacttttagattaaagcgtgtagatggatgaggtgatagagttgtttatttgatggcaggttcgaggggactatgtgaaagcggaggagtattgtgggagagcgattttggcgaatccgaatgatgggaaggtgctatcgatgtatgcagatttgatatgggagagccagaaagatgcttcgcgtgctgagacttattttgatcaagcggntannagcagctccgatgactggtaactaacatcaaactcttgggtggttctctttatg

SEQ ID NO: 32048 - DNA, 403 bp, Glycine max
  unsure at all n locations
ttgcttctcaaggaagttttctcaagaaagcttctcaaggaagctacctagtctataaatagaagcatgtgtaacacttgttgtaactttgatgaatgagagtcttgtgagacccaacacaaagttcaacttctctccctttttcttccttcaatttcgtgctcccccctctctctttctctccctctttcttttcctccattgaagcatccttccaagcttcttatccaaggctcatcttggtggtgaagctccttcttccatggcttattccctagtggatggcgcctcctctcacctcttctcctttgtcttccgctgcatctccatggtggaaaatcaccattaaaggaactcattgaagctcacagatccagcctccatagaagccncacaagcaagc

SEQ ID NO: 32049 - DNA, 427 bp, Glycine max
  unsure at all n locations
gctttcgtgtagcttaagaaaaacgtcatttcttcttctttctttcttccaaagtcatttctaaagttccaagcactttctccatcacccacagccaccattagccaccacaaaccatcattgttctccattgaaaacccacaccgagaggaacccttcaaccaaagcggaatcttccaacttggcttgcggtttcggtagagaacgaaaaccctaatctgacctttcgttttctttcaaggtaatcatggttctatgcttgtttcttgttagttccatcttgtctttgcatcttttctaactntggaaccgccattgcatgtcttatgcttcctttgaaaaaccttagagaaagagactntgtaaacgttatcctttcatgaaatgcatgttattttcgtaacctacactgaaccccggtcacatt

SEQ ID NO: 32050 - DNA, 404 bp, Glycine max
  unsure at all n locations
tgctttcattaagtggtaatcagagcacaagagcttcaagtaggtgctccttaaacctccattaattttttttctttgccttctcttccattgttgtttcttaatttttctccatgtatctcctcacatgtcttgttctaaatgttgttaacatgattctttagagtttccaccgattaaacttgctatagaagttagatttgattttctatggttcaaatttcttgttcttgttcttgaaccatgaattgtgttgagtttacgttcctttgagttttgtcttgttattttttgtggctgaaacctaaaccataaaattcttacaaaaatattaaagtagaagacaacctcataaatctagagtgacttgttcacctattgtagttntgtcatagaagtcatgt

SEQ ID NO: 32051 - DNA, 421 bp, Glycine max
  unsure at all n locations
ttccgccccggagtacgacagtcaccgctttaggagcgttgtacaccagcagcgtttcgaagccatcaagggatggtcgtttctccgggagcgacgcgtccagctcagggacgacgagtatactgatttccaggaggaaatagggcgccggcggtgggcaccactggttactcccatggccaagtttgatccaaaaatagtccttgagttttacgccaatgcttggccaacagaggaaggcgtgcgtgacatgagatcctgngttaggggtcagtggatcccgttcgatgccgacgctatcagccagctcctgggatatccgatggtattggaagagggccaggaatgcgagtatggccagaggaggaaccggtctgatgggttcgatgaggaggccatcgcccagctgttatgtataccg

SEQ ID NO: 32052 - DNA, 390 bp, Glycine max
  unsure at all n locations
tgcttgtagaatggctagacatgatacatgtcagggttttggtttggttcaaggataaaagggatgccccacattatttccatgacacaaatgcaaaaatgatgatttggaaactttatgcaaaactggtcatgcatgcacctatgcggacactcaactggtcatgcatgcacctatgcggacactcaagtgtcaaatttttatggtcatgtgacgctagggctcaggattcatttcctctatttttagtcaacccaacgtttccaaaatatgttcttttatcaatttgtgcattcatccgagtccattttgggtactcgggaaaattttcacagcattcacccttcaggtgtatacacattntttcaaaaactagttatgatcagtgaa

SEQ ID NO: 32053 - DNA, 470 bp, Glycine max
tctgagaagaggcaaatttgattatgttgctttggtgaataggaagccttgggcaaatggagagaataagaaggagggagaaacccatgttgtgagtgtcgttcctacatggccaaattttccactagctcaaaaatatcaatactcagctaatatcagtccttctcattacccaccgccctaccagccaagaacacccaatcatccacaaaggccacccctaaatcagccacaaaacccacctgctacacatccgaggccaaacaccacccttaatatgaaccaaaacaccaaccagggacggaattttctagaaaagaagcctacaaaattcaccccaattctggtgtcgtatgctaacttactcccatatctactcaataatgcaatggtagccataatcccaacaaagatttctcaacctccatttttctgaggatacaactcgaatgcaacatgtgcttatcatg

SEQ ID NO: 32054 - DNA, 401 bp, Glycine max
ttgctttggattaaagtgatgacgtacaagccgtaaaggcaaagcttgagagagcccgggtagtcgaagagaagttcaagtccatagccatcaaagtttgaaaagagtatgatgaactaagggatgtcaatatggccaccgatgaagccttggaatgagaaaccaagaaggcccgaaaggaagaacacgaccaaagccaagttttgaggggctttatagggcagcaatagtgagctcaagctccgaagaggtgaaaggaatcatcacgggtcaaaggcatgatcttgaaggacgagctaaaggcttgccttatgtcgaaaagaaatttgtcccaacagttaagcgagactgaagggaatatgtgggccgtcatcgatgagtgcacagagaagctaaatcta

SEQ ID NO: 32055 - DNA, 463 bp, Glycine max
  unsure at all n locations
caatgagctggtgaagaagaatgtggcatttacctgcgtgaaaaacaagagcaagcgttagttttgctcaaagaaaagcttactaaggcacctgttctagctcttcctgacttttctaaaacttttgagctagaatgtgatgcctctagagtgggagttggagctgtattgttacaaggtgggcaccctattgcttattttagtgaaaaacttcatagtgccaccctcaactaccccacctatgataaagatctttatgccttaataagagccctccaaacttgggaacattaccttgtttccaaggaatttgtcattcatagtgatcatcaatcacttaagtacattagagggcanagcaagttaaacaagaggcatgcaaaatgggtagagtacctacaccaatctccataggttatcacatacaaaaagggacaacaaatgtggtagctgatgcgtctct

SEQ ID NO: 32056 - DNA, 395 bp, Glycine max
  unsure at all n locations
ttgctgcacgcccaccagtcatcacttctcttgctaagtttttttttttaacatatatctggcgagaattcagaatttagctgaaattatttgagcacaagtttttgtggcagatcaaaaaaatattctggtcaaactttgggcttattgggttcacatacacattattattgggcaaaaatttaagagatacctattggactaaatatccgttattgttcaaggtaaattgagcgacctaagaataaagtaggaaaagtagagcgccacaatttgctgttgctttcatttagccaacacaaattgttttgattnttttaatatttaattataacattntaaataattccctcagaacatatcaataatttggaattttcaacagaatatagatt

SEQ ID NO: 32057 - DNA, 500 bp, Glycine max
gacattcatggtgctccgaacaaaggtggagtatggaggattgccttgagggtccgcacttaggcaatcatgaaactcagctccaaactcaaaagtggaggacacatgaacaaccctaagcaataacattcatgtgtctccggaaaaggacgagaatggaggattgccttgagggtcctctcttaagcaatcatggaatacagctccaaactcgaaaatggaggacacgtgaatgacaatgcaattcactcacgtggctccagaaaaggatgagaatggaggattgccttgagggtcctctcttaagcaatcatggaacacaactccagactcaaaagtggagaacacatgaacagccctaagcaataacattcatgtggctccagaaaaggatgagaatggaggattgccttgagggtcctctcttaagcaatcatggaacacagctccagactcaaaagtggagaacacatgaacagccctaagcaataacattcatg

SEQ ID NO: 32058 - DNA, 400 bp, Glycine max
tttgcttgcttatttagtagacccttgaagataaaaccattacattttggttcagaacagcatgtgcaaaaatgtaactgatgaataaaacagagaatgtatgccaatgatataagcaatagtttaaatggtatttaatctgatgtgaaagccatacaaacaaaccttaacagcaccatcatagtctgtggaggcaagatagttctggatgtagttattccaacaaacacaactgagccttgatctgtttgacatctcaactacaggataatggatgtcaatggaatcattgaaaagtgcattgaactcaaatattttaattttctttgatatcccagcagcagcaaagtaatcttcatccctatcaaaactcagagagcatattacatttgcaggatta

SEQ ID NO: 32059 - DNA, 526 bp, Glycine max
  unsure at all n locations
ggcactatcacgacctgaaagaaagacccttcttcgatgggctgtgtgattntctaagctctggccctgttattgcaatggttagaaaatataaatgactcaaccactgacttaagaatccaacaagccagtgtccctaatctgtctttttttcttgtttccaaaaattgatatcatacgtgtgggaaggacaaggagttatttcctatggccgaaagctaattggagccacagatccacagaaatcagaacctgcaaccattangggtgatcttgctgttgctgttggaaggtaactaatagcatgtttggttacaagatgtggtttttacgtgtactgagatgtttatagttataattntcacatccaaaatgtaatttcttacttcttaacnntgttcaaacatcngtataattgttaaccanagaaaagtgctagtttcgtttctctttacataatgaattgtccatttattggtgatcacaatttgataattgttgtcatgcatgcagaaacatcatccat

SEQ ID NO: 32060 - DNA, 383 bp, Glycine max
  unsure at all n locations
tagcttttggctgctcaattgctccaggttgctgcatggaagggcaaaggtctgtatggtggtcagcagaggagcacaaaccacagacccttgcgacaggtacagatttctagttcaaggccagctgggttaccaagttaactaatgcatctagtttgccttcaagcttcttagtttcagatgatgcagctgagtttgtagctacctcatgcactcctctaatgattataacatcatttctggcgctaaactgctgggagttggaagccatcttctcaattaaatgtctagcttcaatacgagtcatgtctccaagggcttcaccactggcagcatctatcatacttctcttcatattactgagtccttcataanaatattgg

SEQ ID NO: 32061 - DNA, 553 bp, Glycine max
  unsure at all n locations
gatttctttaggttatttcatataaacctcctcctctaaatcaccattaagaaagcatgttttcacatccatttgttgcaactcaaggtcaaaataagcaactaatgccaagataatacgaagagaatctttcttagatacaggagaaaaagtcattgtgtaatcgattccttctttttgagtaaatcctttagcaacgagtcttgccttgtatctctcaatgttgcctaatgaattgtttttggtcttaaagacccatttacaaccaatggcctttgccctattaggcaactctacaaggttccaaactccattgctctgcatggaattcatctcatccttcatggaatcataccataaatttgactctttacaactcatggcttaatcaaaatttttgagatcattntcaactccagtattatagtcaaattcttacaaatatacaatantataactaggaacnaactaatntcttactctagtagatctgcttaatggtgtcatcacattntcttgtggatcatgttgttagcnagggtgtgatcatttc

SEQ ID NO: 32062 - DNA, 408 bp, Glycine max
  unsure at all n locations
agctttcatcaagtggtaatcagagcacaagagcttcaagtaggtgctccttaaacctccattaattnttttgctttaccttctcttccattgttgtttcttcatttttctccatgtatctcctcacatgtctagtgctaaatgttgttaacatgattctttagaatttccaccaattaaaatagctatagaagctagatttaattttctatggttcaaatttcttgttcatgttcttgaaccatgagttgtgttgagtttaagttcctttgagttttgtcttgctatttttttgtggctgaaacctanaacataaaattcttacaaaaatattaaagtagaagaaaacctcacaaatctagagtgacttgttcacctgttgtagttctgtcatagaagtcatgtcta

SEQ ID NO: 32063 - DNA, 375 bp, Glycine max
atttttctgagacgtgatgcaatccctcaagttattgttactgatagagattcaacattgatgaatgcaatgaaaactattttccccaagtcaaccaacttgttgtgttggtttcacattgataagaatgtgaaggcaaaatataaaacctttgtgggtaaaaaaaatgcatgggattatgtcatggaagcatggaggagtctcgtggattgccttctgagcaagggttcgatgagttaagaagtttgaaattgcttgctcaccatggtcaatatttgttgactatgtcaaacaaacaaagttgattccctataaacaaagatttgtaaagcttggacgaataaggtgatgcatctatgaaacacaacaactaac

SEQ ID NO: 32064 - DNA, 409 bp, Glycine max
agctttctgtgttttctagtttccaaaccttgttctttcacagaaaacaaaagtgtgctatatcttttcattctcttctcccttttccaaaagaacgaaggactaatcgcctgaattcttttgtgtctctcttctccctttgccaaaaataattcgacaaggactaaccgcctgaattctttttgtgtctctcttctcccttttccaaaagaacaaaggactaaccgcctgaattcttttgtgtctctcttctcccttttcaaagaattcgaaacaacacagtctgagaattcttttgattcttccctttcccttacacaaaatatttcaatggactaactgcctgagatatcttttatttccccttcacaaagtttcaaaggactaaccgcctgagaactttgtctta

SEQ ID NO: 32065 - DNA, 465 bp, Glycine max
  unsure at all n locations
ctctaagggctaccgtgtctacaacttgcaaactaagaaactcgtcattagtcgagatgttgaagttgatgagtacgcttcttggaattgggatgaagaaaaagtggagaagaacgttcttatacccgctcaactacctcaagaaaaagctgaggaagaagacccaggtgaaccaccttcacctccaccacaacaacaagatcaagaactatcatcaccagagtctactccaagacgagtaagatctttggtggacatatatgaaacctgtaacttggccatacttaaacctggaagctntgaagaagcgttaaagcaggaagtatgggtcaaggcaatggaagaagagatacagatgatcgagaaaaacaacacatgggagttagtaaatcgtccccatcaaaaagatatcattgggggtaagtgggtctataagacanagctcaaccctgatggcaccataca

SEQ ID NO: 32066 - DNA, 397 bp, Glycine max
agctttctttagatgctagagggggctaagctcacacccctccaatagctaagctcacacccatgccaaaatacatgaaaataatgggaagcttccttgagaatcaaggaacgtagccttcttgggaagcaaggaataatgcttccttgaaaagctagaggggagctactcacaccccttcaatatgaaaatacaaaaaaagtccctactacaaagactactcaaaatgccttgaaatacaaggctaaaaccctactactagagtactcttaacttgtacccttaatttgtagggtaccctataaacctaaaattgccaaaatataaggcccacaagaaggaaaacctattctaatattcacaaagaacagtggacccaaccttcgtccatgggctc

SEQ ID NO: 32067 - DNA, 479 bp, Glycine max
  unsure at all n locations
cctgagagcatgagatgagtctgtgagtgattgtgaggttctagaggtggaggagacatccccactacttgtatttcttcaatccttcatttttctcttctctttgttgtaaaggaagcttcccaaatatagagagctaaatcctctgttggttcttccttgtaggtacttgatgtaaatacttgtatatctatttaatgatgttttatgtgttctttgtgctatcagtacgccatttcattgtgcttttgccttgatcatgtagatgcatgctttgttaggatcattcaacagtggaaaatggtctaattcttagaacttgataagacagagctagtttatcgtattatcacgagggatcgaggtacggcaaccttggtgttgtatgtttgcttaatggggtctgtcgtgttagtcaaatgagaattgagatatgcttgatctgatangtagatatacgagaatggattacattcaga

SEQ ID NO: 32068 - DNA, 402 bp, Glycine max
agctttatttactatattctctttctttacataagaatctagcaaagtaaaatgaaatatgaatttatcgaagacctcaacacagatcgtgatgattggtttctaaaagtgtgtattgtttgattgtggaatgtttatacaaaacaagtgagcaacataatatgatttcaaaattcaataatattttacaaggagagaacatatacactatacataatttaaaaattgtctcagcaaatgatgcatacaaacttgtcaaaggaccattcaaaggattatttttacttactattgttgtcaagacaatcaataacatatccattagcattcctctacactattctgagtttggttcaatggaaactctagctcacagggtggatgatagagttgtcttaacat

SEQ ID NO: 32069 - DNA, 493 bp, Glycine max
  unsure at all n locations
gtccggcgatggttcaaaacgattctccacatccacaaatcacgtataacccaccatcccctgtttcccacctccaactgagctcacgtactcccacgtagcccttatcattgttcctctcaacgccgggtccccatcaatcctcccaagcttccacaacatccaagtaatttaacattcaatcatcacaaactaacacagccaagaaaacagggcaaaggcagaaaactctgccgaaaacacaaaccaacatcacagctttgcacattcaattaccccagtaacattctcttcgttccagtttgttaaccgttggatcgactcanaaattntactggaagtctctagtacataagtctacattntgaccgttgggatctgctagaaaatgtccagaaccctatatgtactaccatnttcacaaccagccatacacanaacattttctgcacttataataaattctggtgcacattccaacagcaaaaacaac

SEQ ID NO: 32070 - DNA, 410 bp, Glycine max
  unsure at all n locations
agcttatatatttctaanatgatctagtattctatatagtaccatatatgtatcaaacttattgcttttgaagcatgcctaactgtccacaatgcccaacacgagcacaagtgcagctcacacacatacacacacaaacatattctttgataagtatagnttatattgcttttaatttatgatacttatttgaattatatcttattatttttgtaaggctactggggtacgctcaatagcttttcatcctgatggaagggccctatttactggacatgaagatggtttgaaggtaaaaaaagttacaatgttagattatataaattattaatgcagcatctagaactgatttaagatgtcatttctatgttctgatatgctgtaggtgtattcatgggaacctgttatat

SEQ ID NO: 32071 - DNA, 540 bp, Glycine max
  unsure at all n locations
acacaaataactcttttgaggaaatttgtactgaaatgtggatcttcatgatatgattctacctactagttatatatcagagcataaatgaggaaattctgacatgctaggatgtaatcgatggatgaactgcttttgtataggatggttcaatggaaacatgcttacaatgaccttggaacactaatgcaaaatgatggcatcaacctactttaggtataatttgtttgttccctttcttggtctcattttaaaaccatggatcacattcgaatgacccagcaaaacaatattgtccgacacttatcagttgaattttcctaccataattataagttctcatatatatacacccacgcatgatgtcaacattcatgttaattattgcaatattttaaatcctttaccaaggaatcanttttctctacttaatatacccattntaaaaagaatgcgccataaggaagtccattaacttcatcttttttacccttacacttttctttcgctcttatcaatggtcgttctacccgaaatatg

SEQ ID NO: 32072 - DNA, 407 bp, Glycine max
  unsure at all n locations
ttgctttaacgaaaatgcaacacacagccgaaaacattgacatggatcaaagttaacatatgaagatgacgattcagatgtaagtcagatgtagctcagcaggcagcacccttcaaataattttctgaaaagatactcaatattgtcactatatatgtcaggtatgctttgccaaaatttattgtcattttactaaaatcctttctgacctaacatgaaagtgttaaaaggtgtaaattttttttctgacctaacacaatacaaactgcgtgaaaacgatgtaatagatagtctctaatcctctcagtctctcattaggcagatggtgtgtttagtactgagtaggaggggcagaaccattntttttaagacaaacaagtatgtaataaaaatgttatacatataat

SEQ ID NO: 32073 - DNA, 501 bp, Glycine max
cagacccttattccatttttttaaccaagccacaactaagtctctcgttacccattatctttggctttggttgttacttcttcctcacttcctctctgcacattttttgtttctaatccttctatttaggtatgtttttatggcatttaaatacttagtatttcttttattatttgattagtatgactgaacatgatgattatatttatttgctattggttgtttacggttatgagttttaaactcaattattttgatgatatatgactagtggtatgtacttttatttggttattatgaatgactttctggattatatgacattctatgaagtattatatttttagtgtgatgaatggctatgatatcttgtttgattggtttctattctcatgtattctggctatattattatgcgatttgaacaatctaactatttcttatttgcatggtatggttgaacaagtatgctatttcgctatgtggatttatagctaatct

SEQ ID NO: 32074 - DNA, 396 bp, Glycine max
tgcttgggattttccttctgattctgtttatacatttatgactttatggcataagatgaaattcaaagattggatctcttgttagttgttattaatgaatagcttaaacacttgtgcttgagtgaaacagtagtcgtgagactgtggtttaagctgctttccttaatatctgtcttatgattaacttcatctaatggtacaacttacattttattcttctctatgcatagctgcatattttgtgaaaaacaagtgatgagtagatattgcttcatttttcttatcatgcaatcaataatttttgctgcatacacctttgtacatgatcactgcatgttattgtcacttgaggacaagtgagttgttctctttttgcttgaggacaagcaaaactgt

SEQ ID NO: 32075 - DNA, 449 bp, Glycine max
  unsure at all n locations
tggcccatcccaaaaagtgtgggagatattaggagcttccatgggttagcaagcttctatagaaggtttgttcctaatttctctacaattgcctcacctctcaatgagctggtaaagaagcatgtggcatttacctgnggtgaaaaacaagagcaatcctttgctttgctcaaagaaaagctaactaaggcacctgttctagctcttcctgacttttctaaaactttttagctagaatgtgatgcctccagagtgggagttggagctgttttgttacaaggtgggcactctattgcttattttagtgaaaaacttcatggtgccacccttaactacccctcctatgataaagagttntatgccttaataagagcactctgaacttgggaacattaccttgtatcctangagattttcattcatagtgatcatcaatcacttaagttcat

SEQ ID NO: 32076 - DNA, 400 bp, Glycine max
ttgcttctcccccattttcttataaatagggggagaagtgaagaggaatttcgttcagccctcctggtaattcagaatcacttaaaattagtgaaaaaaattggttccgtgaagaaaatccaagccgaggcgcttccgtaacgtttccgtgggtgatttcgcgaaggttttcggccgttcttcgacgttcttcattcgttcttcgtcgttcttcggtcttcaaccggtaagttccctaaatcgaacttttcaattcattctatgtacccttagtggtcctcatttgcttttacgtgctttcatttacatttcctttacttttcgtacccccttttgacgtgctctagtcatttgcttaagttattctctcgcctaatcaaaaaatacaataaatttccac

SEQ ID NO: 32077 - DNA, 472 bp, Glycine max
  unsure at all n locations
tgctctattttcatctcccactccaagtaggcctccggatcattctttcctttaaatggaggaatgttgagtttaataccatcaattcggttttgtctaggaacaccatcattccctcttctcctcctttcttcttcattatgatctctattctccatttgatccaacctctcatggagcgcatcatctcgttgtttcattaacctctccaaatgttgcatcaaagcttgcatttggaattgcgaaagccccactccatcattaggattagtacctgacatctcaaacaaacaaatcaaacgtaacaagacaattatagttgctgtttgaatacctcacccactcaagtgtatcacacaattatggctnttctctaatgaaacactcttgccttttaccactctaattccccttgagttcttaagcaattcaagagattatggccacaacanagaacaattcaccaatatgt

SEQ ID NO: 32078 - DNA, 401 bp, Glycine max
agctttgatggtgttgagaagaaatcacatgtttttcatcatcaaaaagggggagaatgtgaatgtatgtatacatgattttgatgatgtcaaaagaagaatcaaacaaggctcattttgcttcaagattaatacaagattgtttcaacaaacaaagccttgattcaagatttcttcaagatcaagccttgcctcacaatgaaaggtttcaagtcattaaaggcacatgtaatcgattaccaatacatgtaatcgattaccaatggtttgaaagtgtgtaatcgattacacatcgtatgtaatcgattaccagagactctgaacgttgggaattcaaattttaaatgaagggtcacaactgtttaagacaaacaactgtgtaatcgattacactaattctg

SEQ ID NO: 32079 - DNA, 512 bp, Glycine max
  unsure at all n locations
cgggcccataatctttagcaattcttgctcttttacctctttgaggctctatatctggttctgattgtgcaagattttcactactaatagcaggaagataactgtggcgtccctaaattaatgactggtttgatagtaatgatttaaataacaaaaaccatggtaaatttttttttctttttctttttcatttctttctctttccaccataactaggtttagaaggaaaatcctcactatagagtcctgaatggccggttcacaactctattcggagtcatttctttcttaccgttcataatctctaaactattttgctgtttcaaaaggaagaatgtaccagccattactttaggtcgtcacgtgaaaataaaagaataaaatacggtcgataaactcttttacaaataaatttgctaatgctttcttttcacataacaagattgatcataaatgcattcgtcatttacagctgtccaaaatatgggagtttacanaatacatagtgtcat

SEQ ID NO: 32080 - DNA, 404 bp, Glycine max
ttgttttaaaatagacaatgccacaaaacacaaattagaggcagagtaccttccgcaaccacttcttaatccgagtgtgatgtgcagagtcctcatttggcttccttttgttattcttgatgtcacatatgattccaagcatgaactccatctacaagttaccaaggaatcagtgctgacctgtgcgtagaaaaaatagtttttttcccccttttattataaaacaaagcattctcactcttttactatttttcttttcattgtcatcttcacaggaagccttcaacttatttgatgtattctgaacactaagaatgaaatctttcatggcagctggatcatcagcccttaatttcatcccacaacctattcagacacataagataaaaataagtcagagatgg

SEQ ID NO: 32081 - DNA, 436 bp, Glycine max
gaaaacactgacatttattgtgaaagcatggaaagaagaattggtggcagtggcagaggtatagaaatcggatcattactattagcgtattgataaagaaatctttgaacaaatactccatatgggaatctaacaaataaaaaaaaaaaacagaaaaagaggagggtgaatgttaccttgaagcaaccactttatcaaaggcactaatgtcagcaaacacttctattataataatcacacaaatacacaataggccagccaacagaaaacatatttatagggaagtgttaatgttgttgcgtgttttattggtaaactatatatatacgaaagataacaaaattattcggatccagacccagtttttaggacctccaacgggaacttaaataggcacatatggttatgcaaaaatactaaataattaataattatc

SEQ ID NO: 32082 - DNA, 400 bp, Glycine max
  unsure at all n locations
tagcttgaagtgaggaagtgtggaagggtgagacttcctacttttattcgttgaccacagagtggtacctagagatatgtcgcaggggtcaggagaccttgnggacgtcaggtggggtgctattgcccaaaaccaagcttgaccaatcccgacccaacccaggcatagtcagtcagtgagaacctgtgatgtacctaaacaggcgagctcctggcagtcaaccgataaaagaacaaagaccacaaagcaaggaggcttatgtggtggctggccagctgtgaatcttgagtgatatatgggatatggcctctggtaatcgattaccaagggtgggtaatcaattacaaggcttacaagtgaaggcaggaagctaagatggcctctggtaatcgattaccaa

SEQ ID NO: 32083 - DNA, 466 bp, Glycine max
  unsure at all n locations
agactggaaagcggtttctaatgactcctctgcggcttccacataaggcatagaggatgggcagctcaccaagatgtcttcctcgcttgatacgatgaccagatgcccttccactacgaatttcaacttttggtggagtgttgagggaacaacccccactgagtggatccacgggcgccccaatagacagctgtagggggggttaatatccattatttggaaggtgacttgacaggtgtgagggcctatctgtactgggagatcgatctctcccctaacctctcggcgggtgccgtcgaaggcacgaaccaccattgaacttggctttaagtgggaggcattgaatggtaatttctccaaagtgatcttaggcatcacgtttaaactggaaccattatcgatgagcactttggctacgatatggtccatacacttgactgatacgtgcanagccttattatgccct

SEQ ID NO: 32084 - DNA, 391 bp, Glycine max
  unsure at all n locations
tagcttatcagacatcattgtttgtgacgcctatcttatttttctttctgcattttttgtgtccttgttaatttccgcaatgttaattctataattctatccgaatttcttatttgcatatctctagttttacttaacctttttcggtgtttttgtacctaaattgtattttagaatgtcctctttgatctcaatttggaatcgtcctaattcaagttatgtaggctgagaaacaaataaaagttaagatacgtttccagttcaattggtgtgcgaatctcatcttaaaanttatccaaattgaanaaggcaaggcggttcacatcaatttgatatatatcttcttatagctntttattcccttattatatcgaacattatattctctttc

SEQ ID NO: 32085 - DNA, 448 bp, Glycine max
  unsure at all n locations
ataagttatagtagtgattcttacttgatgaaatgtgagaaacacttctaggtgtgaatcccgtacattgtgccaaacattgttaatgaattgtgtacttggtcatatgcttcgcggttacatgggagttggtgtgggatcaattctttcaacgtgttgggtcttatagatctacctacagtcggacatagaagtattgaagtcctctggatgaggttaagaacaattgtcccaaactactaactcaatatcgtcacttatctgagccatataatggcttagaagaatgacaagtgcctttntgttatatttggtctttagctaattcaatgttcttgaattgtgcactttcattaatatagaatatccatttttgtggacntaatcatgacacccactacgcattaaatntgcaacatatttgatgattccttcacttgtatatact

SEQ ID NO: 32086 - DNA, 379 bp, Glycine max
  unsure at all n locations
agcttggttccttttattgtggatgtgtaagtgcaaataataacaattgtcccacttgagtagcatgccactgagtacaggttgattcttaagtctatctttatcatttgctattcactaaccacctttcactgtaactataattattcttatgatgagttgattgatacataaactgaatgcatacttcttgngttgagatatgagtactatatctcttttcctaaaacactaggagtggtatgatgagtgattagatggtctttatggaactgaacatgtcggacgacattgcacgcctaatggaaatctatgagatgcatcttgagaatgtggttgcttcttcctatcaactctacatctatgtgtctataataat

SEQ ID NO: 32087 - DNA, 291 bp, Glycine max
taccatcaatgagggcttgtctacgaacaccagcagtccctctggtcctccatttttcatcattatgatctatgttctccatgtgatacaacctgtcatggagcgcatcatcttgtggctgcattagcctctccatatgatgcatcacagcttgaattaggaattgcgacagctccactccatcattaagagtgttcctgccatctcaaacatacaagctgagcgtcgcactgaagatcatagctagtggggagaagacctcacccactcaaatgtatcacaccattatgg

SEQ ID NO: 32088 - DNA, 406 bp, Glycine max
  unsure at all n locations
agcttagtttaacaaaacaacatgtgcttgctaagcgaacacatgcacattgagcgcatagcataatcagacaacaaacaacaacaaacatttgcacttaaatcaactaacacaaatattcatagagtcatgagcataaccaaaatcaacctaacatcaacacacaaaccaactaacacaattattaaacaagttacagaaaagaggagaaagacacaaaccaactaacacaattattaaacaagttacaaaaaagaggagaaaaagggtagaaatcctgggttgtctcccactaagcgtttctttaatgtcattagcttaacgggtcaaatgacttcaagacggcatgaaggtcacatagaacacatattccttacattntcacttcttagctagagactccatg

SEQ ID NO: 32089 - DNA, 406 bp, Glycine max
  unsure at all n locations
gtagcattccttggtaaaactaactttccaaatgtttgccttcgcaggaaatggccccgaggaagcttgcctcaaagaggtccaggaaggataaggcggccgaagggactagttccgctcctgagtatgacagtcaccgctttaggagcgctgtacactagcagcgcttcgaggccatcaagggatggtcgtttctccgggagcgacgcgtccagctcagggacgacgagtatactgatttctaggaggagatagggcgccggcggtggacatcactggttacccncatggccaagttcgatccagaaatagtccttgagttttatgccaatgcttggccaacagaggaatgtgtgcgtgacatgaggtcctgggtaaggggtcagtggatctcgtttgatgccga

SEQ ID NO: 32090 - DNA, 395 bp, Glycine max
agcttgtttctgtgtataatgacttcatttacatttatcctatagaattttttaaactttagtagcacaggaattcaaattaaattgactgaaacaattcaagaaacctccttaaaatatatgcattatgattcttgaacaagtaaacattctttcctcctaggatagtactattggagcaagaccaaggtgtaagtaaaaatgcttagcaaggtacattacaattagcaacgtttaaaatcaagtaaaataactcattcaatcaatattttcagcaaccaatgctaaagtttaaatatggcaccacgttattagttagtttattttgttaaaatattcctacaaatatcatggatatgggtttttttgtctatatttcctcttggctgattcat

SEQ ID NO: 32091 - DNA, 420 bp, Glycine max
  unsure at all n locations
gtattaatcttgaagcaatgcttaacctttgaatgtttgttgaagtaatcttgaacgcaaccttgtttgattattctttggcatcattaaaatcatgtattaatacattcacatttggtatccgacaggtacttcactcgggatgcaacaacacaaactatcactctaaagccaaaccctgagtttgatcagaatgatgtcatgcttttttttttttgctttaaagacatgtatgaaaactcacgtctctcatccaaatcagagtatgacaaggaagacacattcaatcatacgtgcatggtaaaatcttgcgtctagtaaagatctaaaattcaatgattaacatattttcttcctgaggcaagaaggagatgacgagttntataagagccttattgatagcatccctcttattcccac

SEQ ID NO: 32092 - DNA, 403 bp, Glycine max
agctttagtgcacacaagtacatatcacaggtgaagcataaaattgctcatgaaagtgggtgtttaaaagagcttctaccaggtttatcttatcatataagcacttaagtagaaaattgaaggtattcagttaagattatgaaagttatttatgaccctcctataagcttactgaatcacacacttatgacataagctttcatctcattttcatgcgataggctttgctgaaataaacaattaaattgtttatccaaacttgccccatcaaatgcacaaaactgatcttgaaatgcacagtagagactcagagcaaacagaaagataagtaaccttctaatacaatgttgacagtctgacagcatgaacatttgacatgtttggcacctcgtggatatgaaag

SEQ ID NO: 32093 - DNA, 534 bp, Glycine max
  unsure at all n locations
tcgaggtaggtggcattcttcttagctttgcttttgttatgcactgtatgtgtagcatttaaggtaggttagttgaaccttatgatagatgaaccttagggtagaggacgccggaaaaaatggcggaagcttggtgacggtgagccttctggaagacccgttaggggttcttccgaaacttctggaagaagatcttccaaacgatttccggaagaagagttcttccggaagtaatgaaacgacttccggaatgacaggtcttccagaaagttctcagaacacctcttccggaatgttcccggaagatgtatttcttccggaaacattccggaagaggattctttcggatgacctttcagtggttccggaagcactntccgganaacccttcttccggaatgtttccggaagaagtacttcttctgggaagttttttttctttttaaatattgtctttgttcatcgctttagcttattttttatatcattntagttgactatcntactacattattaattctaaatacttatgta

SEQ ID NO: 32094 - DNA, 391 bp, Glycine max
  unsure at all n locations
agcttgtctgccattattgacngaaggcacagaagacgacgttagtctctgcgtgttatcaagcttttcgtcttacagatagcaaaaagtttatacggataaccactcgggtatttcccgccgtcagcgtgactcaaaagtcagtatgacagatcttgtgagtgcggaagatgatgtaaatctccgcatgtcaacgggcttgtcggacgcgattgacgaaggtcgcaaaagacgacgttagtctctgcgtcttatcaggcttttcgtcttacagacatcaaaaagtttatacggataaccactcgggtatttccgcccgtcagcgtaactcanaagtcagtatgacagatcttgtgagcgcggaagatgacgtaaatctccgcgtgtcaac

SEQ ID NO: 32095 - DNA, 501 bp, Glycine max
  unsure at all n locations
ttgatggggcctatgcaggttgaaagccttggaggaaagaggtatgcctatgttgttgtggatgatttctccagatttacctgngtcaactttatcagagagaaatcacaaacctttgaagtattcaaggagttgagtctaagacttcaaagagaaaaggactgtgtcatcaagagaatcaggagtgaccatggcagagagtttgaaaacagcaggttcactgaattctgcacatctgaaggcatcactcatgagttctctgcagccattacaccacaacagaatggcatagttgaaaggaaaaacaggactttgcaagaggctgctagggtcatgcttcatgccaaagaacttccctataatctctgggctgaagccatgaacacagcatgctacatccacaacagagtcacacttagaagaggcacttcaaccacactgtatgaaatctggaagggangaagccactgtcagcacttcacatctttgaagtcatgtaca

SEQ ID NO: 32096 - DNA, 488 bp, Glycine max
  unsure at all n locations
cgcgcccncnnggccgtactgttatcacgcgancanctcggacccgggagcctctctatagatcctgcatgcacgcacgcttgttttttgttacgacccgcagaccgggcgggtacgatgggatgtcgagccacatgcacaagcctatcacgccacatattccaccattccacttttgccacctaacatcaaatgtcggacagtcgagttcttgaacgagacctacgtcttatcttcaccaaaccctcccaactcatctacttaatacagtatatatgatgacactcctattgaaatcgtcttacacatctatgtcccatgaccattctgctacgactgtcttgatgtcatgcattgttcgaccggattctgagcatatgacggtcatctttgaaatcagtgtgatgatcgcgcaacctcctgcatgatctcatctagatgatgctcattcttctgacctatgtgcacatactatctcttcacacacg

SEQ ID NO: 32097 - DNA, 380 bp, Glycine max
catggctgaaatggcaacatagggcatgatcacatcaatagctaaacactataacagtagttaaagattaacacagctggaaattgctggagttcacttaaaagatggcagaaaagttagcagcaataacatgtcactgaacagtcggcaatagttgtagattgccagaagttgctggcaagtcaccaaaaaggcatcagaagttgctggaaagttgctgaaaggttgcctgaaaattcaaagccaaagtgatacgttgttggaaaagttgcagatggtgataacttgctagaaaagttttacggtgtggtggatcatggcaacggtaacccacagggtgacagaatgcactggaagaataaaacaacggaggagaatgg

SEQ ID NO: 32098 - DNA, 395 bp, Glycine max
agctttcaatctggctcctgcttcaagctctggtctctgcaaatcttcacacagcaaaatctctcaaaactctctggaacttggacctttctctctctagaaaccctagacatgcaaagctctaaatcccagtccaaactctcttcacaaaatctgatttcaagcttaaataggtggccttgtttgtgcttatgcgctaagcgcacttatggaccgcttagcgcacattagtgaatttcggcttagcacgtgcctttctcgcttagcggatgaactgaagcggtgcacttagtgagatgaagcggtgtgatgtaagctccattggagcttgtaggcctacgatcttcatcaatggattcctttgcttcttggaagatgagtggcagcggaatgga

SEQ ID NO: 32099 - DNA, 296 bp, Glycine max
gtttttgtgatgatgtttgtgatgtttatatgctgaaattgctgatggaaatctgttagagatgaagggtagaattaacctagggttagaaagtgagaatgtgatgttgtgagtggaaaaagagtgaggcttgagagttggaaggctaagtctgaattctgtggtaaatggaggttaaagtgagttaatactagcttgaaatgtcatttagaacatgtgagaaaggttaggctgagctagagagaaaagcaaatgaccaaagtgaaccaagagccatttctagggcaaaattgggt

SEQ ID NO: 32100 - DNA, 394 bp, Glycine max
  unsure at all n locations
ttttgttaaatcttaattaaaaaggataaaatataatttctgtacccctattttttcaaataagtaatttttattttttattttttaattgagacatttcttctcttacttttaaaaattcattattttaattctcatttttatttgataaattttgtcccccaattttaaaaaaaaaatccacgattttagtttcatgactatcaaaggttggctatgtattttttataattttttttataaattaagcttattaataattaattaattttaaaaaaacttctttcacatgactaataatttagatataagactaaaatcatttttaattgagacatttcgtctctcacttttaaaaattcactattntaattctctcttttatttgaaaaat

SEQ ID NO: 32101 - DNA, 525 bp, Glycine max
  unsure at all n locations
aatctcctttgacatcagacaacttctttcgccaacaagctgactcagaaattggggggcttatgtactgtccaatgtccacaaaagggacatgacaagtaacatgatgcttcaacacacacgtcaaccctccatgtcagccttggaacaggagcacaaacgcatcgcccttagaaattaggctactggactgacaagttatctctaaacactttaatatctgaatattaataataatgttacaaccttcttattattaagtggcgggtactcaattatctataagatatgaattatctataagtaacaacttatctactagctattatctacaagttagaaattatctgttaaggttgttataccactgtaacagctcatacaaataaggacccanaactctcatctcactctataaatatcaggttctatctcaccattttcattcaattctaaactaactcacgtacttacttgaacgtcagagtccctttgtttgcaagtctcccttcgtnngtctctaat

SEQ ID NO: 32102 - DNA, 397 bp, Glycine max
ttgcttatcctatgcttctttggccgtcgttgcattagatatcttctcaaatgtatcttcatccaccgattgataaatgagaaagagagctttcttgtctctctttcttgactccttcaacgtctcctttacaccttgacttagcgaggcttcatcttgctcctcgaagccattctctacgatatcccacacatcttgagctcctagtagcgccttcatcttgttactccaattatcatagttgttctttgtgagcatcggcatttggaaaggaaaacctccattcgccatcttttgaggatcttgaagctctgataccaatttgttggaaataaggctttttatgtttaggaaaagtgtttaagaatattggagactctgaatagaaacttgatag

SEQ ID NO: 32103 - DNA, 532 bp, Glycine max
  unsure at all n locations
caattacaatgttttggtaatcgattaccagtgtgcttgaacgttgaaattcaaattcaaatgtgaagagtcacattttttcaaaaaaaagctttgtgtaatcgattacactgatttggtaatcgattaccaatgattgtttctgaataaatcaaaagatgtaactcttcaaatggtttttgactttttcaaattggttttaagtttttctaaaagtcataactcttctaaatggttctcttgaccagacatgaagagtctataaaagcaagactntgttttgcattttcacaaaaaaaaaaaaaaatccaatcattaatctacacatctatcttttccaattcattctttacacaagcaattnttccacattgatttctaagtctctttgaacttcttcttcttccttttgccaaaagttttccaaagttttctagttttctaaaccttgaaaacttgngttattcatctttntcatctcttctcctttntcaaaaagaattcgtcaaggacttaaccgactgaatatttt

SEQ ID NO: 32104 - DNA, 405 bp, Glycine max
  unsure at all n locations
ttgctttatgatgatgaatcaagttgattcaagtagttttgataatgacaaagatgatgacaaaaagcccaaagaatgatttcaagattaagtcaacaagttcaagatcaagtttaatttcaagagaagaaatcaagaagattcaagaatcaagagaagtttgatttcaagattcaagagaagatgaattcaaggttcaagataagaaatcaagaagacttcacaagggaagtattgaaaatattttttcaaaaaaaaacaaacatagcacagttttgtttttcaaaagagtttttctcanattttctaggttgccaaagtttttactctctggtaatcgattaccagtttcctgtaatcgattaccagtggcaaagttcaatttcaaaagttntcaactgaatt

SEQ ID NO: 32105 - DNA, 494 bp, Glycine max
  unsure at all n locations
cacattaggtctttggtttatggttttaattattagcttgacagttcattgtgatgacaagctgtattctgtgtgttttgtcttgttagtctcgtacagtctttcattcgccaagttggtaaacataaaatgagtttgaagagttgtgtcttattttgtgttcgtactgtgacatcctggaaatttctacccggaatttttggaaacaatgtattttgaatgattatatatatatatatatatatatatatatatatatatatataagtattattcagtgtatatgcatatatgttcttgatagaagtaggaatagtgcgggcaagatatgcgggttatgctaattaacgaagagatatccataactgtgaggctatgggttaattcttaattaattagtttagaaatcattggtgtgcgtgtgacttacaatataacgagaccaacctctgaaccacgctgcgggttgtattctgaacgctntgatatatata

SEQ ID NO: 32106 - DNA, 373 bp, Glycine max
  unsure at all n locations
tagcttgtttcaaagaaaatttgtcccaaattttggggagtaattatcaaggtaaatttgttccaaatttggggcagacattgngtaagaattgaaatggtcaaagtaaatggaatacccacactaattntgtatatatgcataatgtttctatttattgtgtcaaaaaaaactgtaagtacaaatgaaattaataagtgtgtatgttgtaattccatgaatgaaagctgagtgcctaaataaaaggcaagtatggggtgggaatgaatgaaaaagtgaaggtttatctatggatgaatgctctcctagaacctaagcttttgaatcctagaacaaccatgatttgttggcagcctaaccccattacaagcct

SEQ ID NO: 32107 - DNA, 443 bp, Glycine max
  unsure at all n locations
tttaatggattttcaaggtttgagaagtgaaattgagaatggggtaaatttggagtaaaaccttacctcacacaagtctataacatcaatttaaacttgctcaactggatttacacctaaaatttcaccgaattaaaatttgactcctcaacacccaattttatcctagaaatcgctctttgttcactttggtcatttgtttttctctcttgcacaacccanactttctcataagtcctaaatgacatttcaaactaggattaactccctttaacctccaaataccactaaatccagaattggccttccaaatctcaaagtctcactctttcttcactcacaacaccatattctcaccttctaaccctagggtaactctacccttcatctctaaacagtttccattagcaatntcagcacataaacatcacaagcatcatcat

SEQ ID NO: 32108 - DNA, 394 bp, Glycine max
tagttgcatgcaaaagcagcactggattaagtgactgcaggcttagcccaacatgtcgcattgagcccatatcctcattgtgaaaacaatgagcttagcgagtattgactcgctgagcgctttcaagaacttccaattggcctcttttcttctagatgctcgccacgtgtccttccttgttgtgtttctcgtgcttagcgcgtacaggcacgctgagcgagctactccaacttcaaaatcttcaattcttcttttcctacaataaaacattaaaagctaataaaatttcttagaagttaaagacactaaacttactcctaattaatagttatattagcataaaagtgattaaaacaaagttctaagtaatgaaaaatgtaagataaatgctaag

SEQ ID NO: 32109 - DNA, 512 bp, Glycine max
  unsure at all n locations
caatttttcatgtacaattgtacatgaattgttatgttatgctattcttcttccgttgttagtgcatactattagtatgctctttatctttcattgtttgaggttctgatagagaattagttataaggatagtttggtggttgaaggaaaaagaaaagaagaagaggtcgtgggttcaaaatttaaattcctctactaacaaaaactaacaaattattaacttaaatttgtctttctggtttaggaaattggctagttatatgagttcaatcaagacattgagcatgctaaatcatctttagctgaactgtttgttcaattaagatgatgagacatttagagtatcggtttccatttcaagcctctcanaattttattctttaaaaatacaagtaatggtgtacgttttttgtcgccaagctaactaaacttattatagataattcaccttcaggtagtaagcttatagtggaaaattatgaatgcanacttcataaacaccatcattcaca

SEQ ID NO: 32110 - DNA, 158 bp, Glycine max
agcttttatctgtttttgcaacgctccacatgttctttaaatggtgtaatcaattacactatatctgtaatcgattaccagtgtatctacacgctgaaattcaaattcaattgcgaagagtcacattctttcataaaatgcattgtgtaatcgattac

SEQ ID NO: 32111 - DNA, 347 bp, Glycine max
  unsure at all n locations
agccccgtagngtgtgcttaaatgtctaaaataaaagaaaaattatgtaataatgcctctttgccgaaaattttatcagtgaaaataaaatattttgcatccgaatctttgccgatccttcccccaccccacctcctnttccccccccccaccctcccctcccccccccccctccccccccctcccccccccccccccccccccctctcccccccctccccccccccccccccccccccccccccccccctctcccccccctaccccccccccccccccccccctcccccctccccccccccctccccccccccctctccccccccccccccctccccccccccccc

SEQ ID NO: 32112 - DNA, 547 bp, Glycine max
  unsure at all n locations
agccgaacacatcganggattgattgggttccgaagtaacaatttggcaatttnggntaaccggaacaattggccccttccttgcattttcaaggcttggggaaaattgggcgaggtggagggaacgcccccgccatttacgcaacgagcataatgtaaacctttacggttttaaaagctctatagttgggcctaggctttagagnttttcctattgttaaggctttgcgtcctttgcttcctgccctatcccctctgcactcttctttctcctttcgtgtgtctctcccctcttccttcacttgccggttactctctttcctgacctcctgactctgcgcttccctcccgtgctgcttctcacttctcttcttgcttcctccgcctgcgtctcatctctatcttactccccactcctcctcctgtggtggtggttggagtcgtctctccccctcctctcttctctctacctctctctttcctctgacctccctccccccctcctctttcttgtccccgcattcttccatctcaatcctttgtcccg

SEQ ID NO: 32113 - DNA, 265 bp, Glycine max
agctttgattcctatgcctagggtatatgtggggtaatcattctagcccttatgaaactacatacatgctaaaaaatggcaaacatacacataccaaattgtttcataggttattccccacaaaatcatgcgcaaatgccatcgaggcatttcaccgaacacttggtgggcatatgtttaggcatgaattgtaggggaatggcggcaatgtggcatgcccaaccttttcaaaacacaacttacgcctaaggccattgcctacaac

SEQ ID NO: 32114 - DNA, 223 bp, Glycine max
  unsure at all n locations
atgacaaaaggtgcagaacacgacgttagtctctgcgcgtcaacaagctcgttttccnctggttgacgaaagatgcggaaatcaattgccaaaccggtacccccggcctaccaacttgactttcccgggtcagggttaacagcaattgtttgtacgaataatcgcttgcgtatattcgcatgtcactggactccacgggtctggatggcaaacagtgtagacg

SEQ ID NO: 32115 - DNA, 330 bp, Glycine max
  unsure at all n locations
gcnnatagcggtcatttaagcagaatgcaggggaaacacttaaaaccggcccgcgcaataccctaaatggataacaattggccctggncgacccctaacccgccccccccggccccccccacatcaccctcctactcccccaccccccctccctcccccccccaccacctccccccgcccccaccccccccccccactcacccccaccccctccccccccccccccccccccccccccccccccccccctccccccccccccccgccccccccccccccccccccccccccccccccccccccccccccccccgaccccccccccccccc

SEQ ID NO: 32116 - DNA, 233 bp, Glycine max
tgcattagatttttgctccctcattgaaaattaagctaactttggatgactaccaaaattttttagacattaatgatttcttaattattatatataagaacaatttgccatccaaaaactaatatattgtttaaaaataatccaacgaggcaacgataagaggctttgaccaaaataaattaacatgaggctatggaggaagcagcagagcatattacgttaagactaactta

SEQ ID NO: 32117 - DNA, 497 bp, Glycine max
  unsure at all n locations
ccgccccgcggcgcggnnggtgtacatgctactctaggcgagtcgagctcgtacccgggatctctagaggcgaactgcggcatgccagcnttgctcaaagttggccaggaaggaccagggaggccgaggaacataagttcggtccggaggatgagcaggaacggtttaagaaggctgggccccaccaacgcctttagggcacccaggcgccggctgccccccccgcacccacccctccaactcacccccccccccctaccccccccctccctcccccacttccccccccccctcctccctccctccccctatccctccctgcccccctatccccctcccctctcctcctcccctccccccctcccccctcccctcctccccctccctccccccacacctcctcaaccccgcccgccccccccctacccccccctcccctccgtccccactcctccgaccccctctcccctcccccctccctctcctcgcccgcgccg

SEQ ID NO: 32118 - DNA, 148 bp, Glycine max
  unsure at all n locations
agcatagcaactagtggaagggaatgagaggtgtcgcaacctacctttcggcgggaggccgacgcgtgactcgcgncatgcgtgttccacgaaaggaatacgcacggagtcgccaccaacgttctattgaggaaaaccgcgcacaacc

SEQ ID NO: 32119 - DNA, 169 bp, Glycine max
  unsure at all n locations
agtttcaaaccaaatttcgagaagatccaacggttaacgaaggttgggcagcgcttttaccgaaacagctcatgtaacttccttaagaagcttcattaagtggccttctcaagaagcttcctcgcgacttctttgncacactttctcacgacgcttctttgacaaccta

SEQ ID NO: 32120 - DNA, 370 bp, Glycine max
ggcatctaacaaatcttgaagttgaacagcacttttaagttttgtctgcacacaaaagatcattaaatcaagcaaaagaggtaaaaaaaaaaaaaatccagaagatcaaataaaagtagacaaatattacacaaacactagaaaataatatcacctcagctctaggtcggcctccattgtatttcaacattaggtttagcagcttttcctcagcaacttttagcttcaccttctgtttgggagctctatcaccactgccgtaacacgagagtcaatggccagaacaagatgcttaactaacttaagcgtaaacggcgacagaacatactgaccaacatcacgcactacccccgtacctctcagattgtcc

SEQ ID NO: 32121 - DNA, 247 bp, Glycine max
tgctttctatatcatgtggcgaagaccgccacaaatgtagttgtattaaccgaaatagcattgtgacaacaacaaaggggattttccaaggccccaattttttctctcctccgtgtacgcccctacacccttttccatgattcatcatcccttcaaactcaatattgaacgggccatagtgccagcatttgcaccatacatttacaaaacatcttcatcaatattaccacctgttgcccccgcaccg

SEQ ID NO: 32122 - DNA, 196 bp, Glycine max
tgacatccactccacaaggtttgaagcagaggacaccttcaatcctattaacgcaacgtggcggacaaaagtgggcaaattaactttgaatgcgcattattgtcaatgcggaaggtattatgcgcttcactatccatgttcacatattattgcagcttgtggctacgtgagcctgaactactaccaatatatagat

SEQ ID NO: 32123 - DNA, 216 bp, Glycine max
cactcctcctaccccccgggcctcttcacccccactgccccatcccctcccctccctccacccgccttcttcccccccctccccgtcccccctcgcgcccctcccctcctccccctccgccctcccccccccccgccctccccccccctcgccgtgcccgggacccccccccccctcccccccccccccgcaccccctcctccgcccttccccccc

SEQ ID NO: 32124 - DNA, 77 bp, Glycine max
tttctttggactttatgagtggcaagttgaggtctaagtggattggtcctttcgctgctactaatgcttttccttat

SEQ ID NO: 32125 - DNA, 209 bp, Glycine max
ttctgataaatcaaaagatgtaactcttcaaaaaggttctgactctcttaaatggtttttaagtttttctacaagttataactcttctgaaggggcttcttgaccagacatggagagtctataaaagcaaggctttatttacattcaaaaaaaaatcttgaatacttttgcttttcaatcaatccttacaagcttgaaactcttgaact

SEQ ID NO: 32126 - DNA, 199 bp, Glycine max
  unsure at all n locations
tgnttanattatcgaaattgcctaaatcattggcaaatatgcatgtgaattaggaagcatcgacaagaatcaagccaaggctattatgcaagcaagcaatggggccaaacacaccaaaagattatgatgatggatggctcgaatcctcacaaagggaaacttatcactttcaaaactatcatgacatgcaaaggaaaaa

SEQ ID NO: 32127 - DNA, 453 bp, Glycine max
  unsure at all n locations
aaactgtttacacataagctgcaactattgaaatttgaaatcttaacattntaaaacactagtaatcgattactaccttctggcgatcgattactagagagcaacaccctttggcaacgatcttgccacacccccccgtgctaccccctgctatcgaacactttttcacgccttacactgcgcccaccctccccctcgaccctccctcccctccaccccactccaacgcccccccccgcgcccctcccccgaacacctaccctccgtcccccccactcccgctactcttcgcccgccctccacccaccctcgtctaccccaccctctcccccccctccccctgcacaccgcgccactccccccctcgccctccccccccctcctcactcccgccacccccctcccctccttccaccccgcccaccccctcccctccccccctcgcaccccccc

SEQ ID NO: 32128 - DNA, 402 bp, Glycine max
agcttatataagtttacatattcaaatttatgtgaaaatagaatttaatcttatatattatattctacagataatatataagagtataaaaatataataaattaaaaaagaataaactttgaattttgaactatttttgcatacaatttatattaatactatattttgtactaaatattcaaatggtcacatggttgaaatgataaaagagtatgtcattcactccaaggactgtggttccaatccttccaagcatttttttaaacttcttatttcttaagacaatattggtcaattctttagtgtaatcaatatttaaaatttaacacgaaatgattaatcaacagaattctacaattatgtcttaatttaacatattcattaaccaagatacaataatga

SEQ ID NO: 32129 - DNA, 517 bp, Glycine max
  unsure at all n locations
aataagtaacatatgtatgggaaaacacatacaggaaatggatatttctcaccatacaaacgaaaaaaaaacataagttattgtccaaacccataaatcacaccaaaccaacacaatcaaagaaaaacacaaccaaataaaattaaaacaaataatgaaaaaaaaattaaggaaaatgaagaagtgggtatggtgagaaatgatagaagactgacacatatgtgtcctcgccaattagctccaacttctcgaaacaaatgatgcttctttaaccccacaaaggagactcgttcacgttgagttgcccaggggttgccatagccattactcctcctcgcaaatcctagaggctcttcttctgcccttaanaaacaccgaagccgaagagtatcgaaagaggatcttttgcatcaagtgatcgaaggagaaaggcgttgagttaaaaaccatgcatgtacacgttacaatgtttcgaagatacataacacttgatacgaangagactacattaattgga

SEQ ID NO: 32130 - DNA, 398 bp, Glycine max
agctttattctgctcgattgctccaggttgctgcatggaagggcaaaggtctgtatggtggtcaccagaggagcacaaaccacaaacccttgcaacaggtacagatttctgattcaaggccagctgggttacgaagttaaccaatgcatccagtttgccttcaagcttcttagtctcacatgatgcacctgagtttgtatctacctcatgcactcctctaatgactatggcatcatttctggccctaaactgctgacagttgcaagccatcttctcaatcaaatttctggcttcagcaggagtcatgtctccaatggctccaccactggcagcatctatcatacttctctgcatattactgagtccttcataaaaatattggagaagaagttgctctg

SEQ ID NO: 32131 - DNA, 422 bp, Glycine max
  unsure at all n locations
aaatctgcacctgtcgcaagactctatggtttatgctcctctgacgaccactatatagacctttgcccttctgtgcagcaatcttgagcaattgaacagccttaagcttatgttgcaaacatctacaatagacctcctcaaccttagcagcaaaatcaaccacagcagaacaattatgacctctccagcaacagatacaatcccggatggaggaatcaccctaatctcaaatggtctagccctcaacaacaacaacagcagcctgctccttccttccaaaatgctgctggtccaagtagaccatacatttctcctccagtgcaacaacaacaacaacatcaacagagacaacaatccactactganggccctcctcaaccttcatgggaagaattagtgaggcacatgacaatatagaacat

SEQ ID NO: 32132 - DNA, 399 bp, Glycine max
agcttgactattctcgacccaccccgggcatagtcggtcagtgagaacctgtgatgtacctaaacaggcaagctcctggcagtcaacagataaaaggaacaaagaccacaaagcaaggaggcttgtggtggctggccagctgtgaattttgtgtgatatgtggattatggcctctggtaatcgattaccaacggtgggtaatcgattacaaggcttaaaaatgaagacaggaggctaagatggtctctggtaatcgattaccaaggggtgtaatcgattaccaggcttgaaaacgaagtcaggaaactaaggaagcctctggtaatcgattaccagcctgtgtaatcgattacacagaggaatgggtcactggtaatcgattaccaggtatgtgtaatc

SEQ ID NO: 32133 - DNA, 541 bp, Glycine max
  unsure at all n locations
cctctcataactaagctcacctccttgagaagcttccttaagaagattcctaaagaagctagagcttagctacacgtacctctctaatagctaagctcacctccttgagatgagaagctagaacttagctacacaccccctataatagctaagctcacccccatgacaaaaaaacatgaaaatacaaaaaaaagtccttactacaaagactactcaaaatgccccgaaatacaaggctaaaaccctatactactagatggccaaaatacaaggcccaaacgaaggaaaaacctattctaatatttacaaagataagcgggcttatacttggcccatgggctcgaaatctaccctaaggctcatgagaaccctagggccttcccttggatctctagcccaatctacttggagtcttctacccaatgcccttgcgggataggattgcatcataacgtatctaccatanatgcgatcatcntccttttcatcatgggcggtacgacttgggctgcgagaatctctcatcttnttgcatattcct

SEQ ID NO: 32134 - DNA, 401 bp, Glycine max
  unsure at all n locations
agcttattttatcatgacaatttgtgtttgcatgatagtgtaaaaaccctatatacaatcaatgcatgcagtatttgctctctaatataaatctatacaaacattgatagaattcagtaagacaaaaagcatgactcacaaatgaaagtgttggcataactgtgtgcacatcctacagccacagccacctcacctacatgaacaattcacagccgtacaatctatcaaatacaacaaccagttcaccaaacataaacaacaactgattggaattaaagtatcaaaatcaggttatcaattgttcgacacatccaaaccctatgaacaacaacaacaacacgaagccacctccattcatacatcatataatagctaanaattccaaggttaagcagaaacac

SEQ ID NO: 32135 - DNA, 521 bp, Glycine max
  unsure at all n locations
atcctaagcccaaatactaagatacaccataactaacaactgttctttgatgaaaaatatcataatgttcacacacatctcttagatggtccatgcctcataatgatgtagtcaaattaaatgtagatgacagctgcattaatgggggaaagcttggaagagatgtaattagatcaagtaatggtgattggtttgatgacttcacagctttctatgaccaaggtgacattcttttagcagaatttcttgctacaagagacaggctcaatatttgcttggataatgggttgcaaggtgttgatatgcgagttggattctttggatgccgtcaaactcacatttatgactntggcagtacaatagacctacatcaataggacccacatcattacgctgaagttctttacgacatcagcagtatcattcctaatcgatggaaagtggtcatcatgcanatgttcatcatgcataccccttangagaataataattgtgctcgactacatggctanacttggagt

SEQ ID NO: 32136 - DNA, 404 bp, Glycine max
  unsure at all n locations
agctttgattttcatacattactttacatgcacatgcatgagtcattaatgaatgctcaaagctgtctggattgaattggcctaattnttttgctaaacttgctgcactangatgggtacattgcacatgaattgctatacaatatcaaattctttctttcaaagtaatacacactgagttgtgatttttattanttgtatggtaacacatacaattaataaaaaccacacacaattgattgaattcttggtcgtcatacttgggataactaaaataatatggttgtttttcatgcaaaataatttttatgctaaattttagttggatgtgcctttgtaggcgatggctctaaagctctttgctataagggctaagaacgccaccacaggggagggatctaatg

SEQ ID NO: 32137 - DNA, 409 bp, Glycine max
  unsure at all n locations
ctgagagaatttgctgtgtgaagatctgcagagaccacagcttgaagaggaagccgtcctgagagcttgagatgagtttgtgagtgattatgaggtcctagaggtggaggagacatccccactacttgtatttctgcaatctttcatctttctcttctctttgttgtaaaggaagctaagctttccagttatggaaagctaaatcctctgttggatcttccttgtaggtacttgatgtaaatatcttttttatctatttaatgatgttttgtgtgttcactgtgctatcagaacttcattctaccatgcattgccttgatcatgtagatgcatgtgtttttaggatcattcaacagtggaaactggtctgattcttacaacttgataggatagggctagtntgtcatat

SEQ ID NO: 32138 - DNA, 197 bp, Glycine max
aaatgaggtactgaaacagcaatttccatatcatcaagttctttcattatacatgcactgcgaacttaaaaaacaacgttgaattaactatcatatctgcgccaaacttctgtcttgattctccgatctaaaaaatctatattagcaatttctctaatattctaacatttattgctggattattgaggcgtaaaact

SEQ ID NO: 32139 - DNA, 113 bp, Glycine max
cctttacatgacttctgaagtgaagttacatccactctattccaattataaatgggtgtatttaaataacaaatttactcaacgtctattaagatcttacaatatgatttctg

SEQ ID NO: 32140 - DNA, 400 bp, Glycine max
  unsure at all n locations
tgcttattttcttcgtaaaatattatagtgtcaatggcaatcattttcaaaattatttccaggttggttggcgggtatagataagcatcagcggcaatgcatatcacgagccaattgtttttttttttgctggaaattaagagataataaaccaattatatatatagcaggcttattgtataactttaaaatgtttgtctgataatcacgatcaggataagatcaatataataaaaatcaaaatcaaatatagaatgtaatataacaaaatggcttggtctttgtaaaaggaaaacataatctttaaaaaaagttagatgaaaaaaaaaagcaaaaaaactctactcttggaccttggtcctcattctcatttctnnccctctatttgtagagacatatg

SEQ ID NO: 32141 - DNA, 446 bp, Glycine max
  unsure at all n locations
gaataggatgtcaattatgtgtctaccagcactaaagttgcacgaaatttctacttgcctttatgaatagttgatggccacgcgtgttacctctaattgcactaaaattctcaaccagatttggtgcatatgccgccatgcgtttatctacacccaaaaaaatacgtgtcaatacaccctataagtatgtatagtgggctgtcatttatctggatgaaatttgaagtgattattctatgatgatacccttaattagcaccgttgattctccattataagcttcagcaaattattcgtgataaaacgttcccctgatactctcgtttcatttaaaaaaaaaaaaattaaggattntgtttactctccgatcgttaatagcaagttcatcaacccttagtgcgagggccccaccatgtccattgaagctttncagcagtaccatgtct

SEQ ID NO: 32142 - DNA, 390 bp, Glycine max
ttcttatacatatttttactacggaagaagtgcaataaaagggaaaacaagtatccccttgccgagtgaagtatattggcatcgactcctttcacggatgcactcggaagaaatgaccattaaaatccttataagaggtactataagggccaataacgactctcctgaaaataccagtaagagaaatccaaccacccttgttattttctttaacattttagtggtggaggaataaatgagcaagagttatgaaatactcatcacacgaaaccctaaaggcacagatgcccactcaggcattcaaatgcaactcggtgagggtgacattcagctctcgaccaacgtccacccgaaacttttcaaaagggacaataaggtgaaaagtacaaa

SEQ ID NO: 32143 - DNA, 472 bp, Glycine max
gggaatcttggaacccaaaccattcttgggaagggttcaagattgcaatctcccaaaggtttcaagcgtctaacctagggaatcctttcaggcattgctggcactggaacaagaagaaacagtgcaagaattcataggccaattcgagaagcacatcggaatggtgaagggattggaggaaccatttttggtggagttgtttctcaaggggctaaaagaagagatcaacactgacgtaaggctccatgaaccaaaaaacttgatggaatctatggtcaaggtttgtagggtggaagataagaatcgaatcttacgaaagttacccagagtaattgtaaggcgtataattttcagaaacctagttattcgggtgagagattggaagggattgcaaccagccatagtaaggagctgacctataattcggtaaacaagatccaggatggaaggagaagaccttcataattgcacc

SEQ ID NO: 32144 - DNA, 391 bp, Glycine max
tagctttactttagattctagcaatgacccactaacctagaattaaaataacttaatgccattaacctaaggaattaaaacaaactaaatggctgagtgtaactgaaattgttggcaaccaaaagtcacccccaacagccaacaagtcagccaccatttggtctcccaaaaggctgatgcctaggttgccaattgggcccttattacaacttgaactaaagcccttttagttgattaacccaaaacatatttttagtcagccaactttacaaggattgggccattatttacacaaactaaacactctaaaattgaaataaagtggtgtcatttagtcctccatttgggccatgatacaactcacaaccttggacttttcttcttgaaactt

SEQ ID NO: 32145 - DNA, 326 bp, Glycine max
cgagagctaccattgttcattttcaagggtctctatttataatgcccctgagtctgacctccgcgggaaaaggtgtgaccattggactttctagagagctacgttggttaattttcaagcgtcgctatatataatgcccctgagtctgacctccgaggtaaaaggtatgaccattggaattgctcaagagctaccgtggttcattttcaagcatcgctatatataatgcgcttgagtctgacttccgagtgaaaggttataaccatgcgaattgctcaagagctcgctttgtacagttccgagcgtgttgttatattatgcgcctg

SEQ ID NO: 32146 - DNA, 407 bp, Glycine max
  unsure at all n locations
ttgtttatcttttccttcaacatacattgttgtaactttattggttgtataaggaagtgtcaacatgagaaaatggtcatatttgcttagccaatcaaccaccaccatgatagcatttttcccttgtgatgttggcaacccctcactaaagtcaatggtaacatcctcccacccttgatctggaattgcaagaggttgtatcaaaccaactggcttctgggtttcatatttatttacttangaaggcaattgaatgtttatcttgngagagcaccgcacctatcacaatatcacttgcatctgtttttacagtgaatggtcaagaaaatttgacatgacaaatgttggtgtagacatcatagttgtctttaactcttcaaaagccttggaagatgactctatccaag

SEQ ID NO: 32147 - DNA, 399 bp, Glycine max
ctttccattcaccacatacacactcccaatttgacttttaaagagaataacaagactatatttatactgtcagcttcatacagaataaatatgaacataaatctgttagatagaaataaatgtgaaatatatatctttttttaaaaaaagaactaaccatcgcaatagtgtcttctacatcatccttgtttctgcctgccagacgcctttttaaggattcaagtgcatctctaagcttcttcaaaagaacatgtttttccaatgatgctgcctctctaagtctagcctaaacttcaccagcatacaaaaagctagttaaaacaggaacatcaatctattagtaaactatgaatataatcattggttatttcagttgcaaaccatttacaataagaatct

SEQ ID NO: 32148 - DNA, 398 bp, Glycine max
agcttgaaatatgtgttccattaaaaaagaaaaaagtttgtaatatgtgattcttttgttatggtaattaataataagtatagaataattttacattttgtttactttataattgatatgcatattattaatatgttaaaaaaatagtattaaatatcaagtgatccataaattattatgatgttacaaaaggattagtaatatcattttataataatattaaataaaagtaaaataatattttaattaaaatatcttacaaattagtaaaaataaaattattttaaaaataatatagcattattatgtaaatttaattgataaattttaaattatcataatagattagactaacagaaaaaactgtcaaacaaaacaaaacgaaacagtacaaatta

SEQ ID NO: 32149 - DNA, 501 bp, Glycine max
  unsure at all n locations
aaacatggtaccagcttgagagttaatcaaaaaattaatgatgcatctttgtttccgatcagtccatgcatcggacataatagtacaaccatacttgacccattgctccctatggcctttcatcaaattttcagtatattcaacttccttcttcaagagtggaactctgatgtcatgatagctaggaatgggcaaatgtggcccatattgaccaatggctgcaaccatgttctcaaagcttttcaatttaatgaggttgaatgacaaacctgcttggtaccaaaagcgagcaatatgttgatgcaccttcaatacttcattcttatccattgactctcttatgttcatttgcctcagcatctccatttttctccgatngattgcattntctggattcttacagaatntgtccattggtccttttttagtcccacactttgtctttgcacttgcagcagcattacaagagtccgcanactcatcttcttcacttccatcaca

SEQ ID NO: 32150 - DNA, 397 bp, Glycine max
agcttggaaggtagtcatacctcacaaaatgtatatatatgtgtatgtttaggtagaaagataccttggatatgcatgtatgtagcaaaaaaatacttcacaaaatatatatatatgtatgtttaggtagaaagataccttgaatatgcatgtatgtagcaaaaatacttcacaaaatatatatatgtatgattaggtagcaagataccttggatatgcatgtatatagcaaaaatatctcacaaaacatatatatgtatgtttagatatgcatatatatataataaaggttgtctagctaaaaaaacaacatgcttttgaaaagagatgacttccaactcttctttgaaaaaatttgctgatcataactagttcttgaaagaatgtgtatacacct

SEQ ID NO: 32151 - DNA, 526 bp, Glycine max
  unsure at all n locations
ttccgctccggagtatgatagtcaccgctttaggagtgctgtacaccagcagcgcttcgaggccatcaagggatggtcgtttctccgggagcgacgcgtccagctcagggacgacgagtatactgatttccaggaggaaatagggcgccggcggtgggcatcactggttactcccatggccaagtttgatccagaaatagtccttgagttttatgccaatgcttggccaacagaggagggcgtgcgtgacatgagatcctgngtaaggggtcagtggatcccgtttgatgccgacgctatcggccaactcctaggatatccgttggtgttggaagagggccaggaatgtgagtatggccagaggaggaaccggtctgacgggttcgatgaggaggccatcgcccagctgctatgtataccgggacaggattntgcccggactgctgcanggaggcgagtgcgaatcatgcgcaccaacatgaccacnctgacccagatatggatgaagggtgctctcagcaacatc

SEQ ID NO: 32152 - DNA, 407 bp, Glycine max
  unsure at all n locations
agcttcttatccaatgctcatcttggtggtgaagctccttcttccatggtttattccctagtggatggcgcctcctctcaaagagcttaagggaagtagtaatgggatcatcggcggctatcgtaaagtggctaagagtccgcacacaaggcttggactggctcccaaagccaagggctatgagagaggaagaggccgaagctccagaaaagagtgaggaggtacaagccttanaggcagagcttgagaaggcttaagcagtcaaggagaagttcaagtcaacaaccatcaaagtccaaaaggagtatgatgaactgaaggacattaacatggccaccaccgaagccttggaacaggaaaccaagagggcccggaaggaagaacatggccaaaacaagttccgagga

SEQ ID NO: 32153 - DNA, 496 bp, Glycine max
  unsure at all n locations
tgtgttttgtatatttctattctcgtttcatttactttttataccccctcttgacgtgcttaagccattttacttaagtcatttctcgcttaacctaaaaataaaataaatttctaccgatcgtttgaattgtattatccgttaacttcggttaaaatgaattccaaccgttcggtcgtgccataaccacgttggaaatcaaaaaagaggtaaataataatataataatcaaaataacatcttttaggtaaaataaagcggaaaatcaatcggacattttctctttgggatttctcattcttaaccgaattgactaataactaaagtgaaactaaggctaaaatcaactcgcctagtcaagctcgtccataaaaataggttttttgaagtttgtcatttcaatttcttactaagtaaatggatcgttnttcaaggtccaacgccttanaatgatcaccttanataanaagaatcacttgataagaaagaactacgt

SEQ ID NO: 32154 - DNA, 402 bp, Glycine max
agctttctattttcagtagatgaagatgaatctgtggccacctcatggactcctctaaggacaatagcataatttcttgcactgaattgtgagttggaaaccatcttctcaatcaaattcctagcctcagcaagggtcatatcaccaagagctccaccattggcaacatcaatcatactcctctccatgttgctaagtcccttatagaaatattgaagaaggagttgctcaaaaatctagtggtgaggaaagcttgcacataatttcttgaatctttcccagtactcatacaagttttctccactaagttgcctgatgcctgaaatgtcttttctgatggcagtggtcctagatgtagggaagaatttctccaagaacaccctcttaaggtcatcccagcta

SEQ ID NO: 32155 - DNA, 416 bp, Glycine max
  unsure at all n locations
atcgattacaagatattggtaatcgattaccagtgtatctgaacgttgaaattcaaaatcaattgtgaagagtcatatcctttcataaaaagctttgtgtaatcgattacatggttttggtaattgattaccagtgacaagttttgaataaaaatcaaaagatataattcttccaatggttttcaggtttttctaggtggcaaccacctcctccgttttgtttaaaaatgggcttccgggacacccgtaatgctttcgtaaaattcccataatcctaaataagcatatttcatttaaaacgggtgagaaggaagagaaaaaagaataaaatcaagttctataggcttccgtaacttttccgtanattacgaaagaaggagggtgaacttatcanaatagggggtgcaaatagcaat

SEQ ID NO: 32156 - DNA, 405 bp, Glycine max
agctttgtttattggtcttcaccgcgaaaggatcgaattgggtctgaaaagaggaaaatttaaatcatcctgcttggacgaatgagaaaactggggcaaatgaaaagggtgagaatgaaagagaaacccatgttgcgaatgtcattcctacatggccaaacttcccaccagcccaacaatgtcattactcaaccaatatcagctcttctcattacccaccacccagtcatccacaaaggccattcctaaatcaattacaacgcctgtctaccgcacgcccaatgcccaaacaccacctttagcgaaaaccaaaaaggaattttgcagcacaaagcctgtaggattcaccccacattccggtgtcatatgctaaccttgctccatatctactcgataatgcaatgg

SEQ ID NO: 32157 - DNA, 456 bp, Glycine max
  unsure at all n locations
caccaaccaagaaatgaattttgcagcgaaaagcctgtaggattcaccccaaattccggcgtcatatgctaacttgctcccatatctacttgataatgcaatggtagccataacccctgctaggttccctcaaacccccatttttctgaggatatgactcgaacgcaacatgtgcatatcgtggagggccctgcggcattccattgagcactgtatgaccctcaagcgtaaggtgtaaggtctaattgatgcgggctggctgaaatttgaggagaatcgcgtgtaaatcctgacattgacaagagatgccacacatggggcaattntgaaagctgttgttagatgtctctaatgactcatcaggattttcaggtgcgagccattggtttgtttgctcgagcgacatgcgctcctgagtgctgacttccaagaccgttcaatcagagattactcgtc

SEQ ID NO: 32158 - DNA, 400 bp, Glycine max
  unsure at all n locations
agcttgtatttaaatggaccaaaaccttatgatcagttcttganagtctgattagtctgtgttagtctgttactagcagtcaagttaattagaaaataactgacaggcaactgtgttagtctgttacaagcagtcaaactcaacaactaagacatcttcacccattttgtgatcagtttttgacataccttaatgttaagtctgattacatattattaataatattcatttttgcatttaaagaaaacaaatcaacacccgtttttgaccaaaacctttcaccaccatagcaatgaaaaaagtatactaaaatttagtgccactagcaaagtaaaggagggtacgttgaanaggtacaacaaaattacaaatttacaatgaagtaagtaatttatcctct

SEQ ID NO: 32159 - DNA, 443 bp, Glycine max
acaacagatcttaattaggaccatttcgatgaaattgactcattacaactatgactttaacaatgatgattataaaaggtgcatgcatgttatgttgcatgtgaatctagtttaagaccatgcaataatgcaaacaagtatacatttcaactaaaatgctaccatgaaatgtttataagccaattaagaaaatgcaagctcaccaattgcatcaacagtggtttttccattggaaaaccttccagaaggtccaccagggaagtcaatcccataaggcaagtaatcagccctagccaaagattggagctggttgttgttcccattatcaaccaaagaatcaccaaaaatgaagtagcatggaacttgtggcgcaccttgaacaccaccccacaagccaagagaaacaacaacaactatgagtgccaacatgcttattgtgagat

SEQ ID NO: 32160 - DNA, 398 bp, Glycine max
  unsure at all n locations
agctttgttgctgaaaaattatataacagcaccaaggttctagtttagccctctcctctcttctctctcccctattttcgttttctagttttaggctttttctttgagacattttttcgttttgcaattccagcaacaataaaatttcgttcttcaatttataagttcgttatctattgattaatggaaggctaagtccccagcgttgctttctcttgaggatcaagcgcggntctctttgagttctattattactgttaaattctgttcagtttttcctcttcactaattactctaaatttggtgctattaattcatgcatgcttagtgcttgattaattgtctctgcgcttaatttacgttcatgcttaatgatcgtttatgagtaattggtgtat

SEQ ID NO: 32161 - DNA, 443 bp, Glycine max
gagaagctagagcttagctacacacacccctctcataactaagctcacctccttgagaagcttccttaagaagattcgtaaagaagctagagcttagctacacatacctctctaatagctaagctcacctccttgagatgagaagctagagcttagctacacaccccctataatagctaagctcacccccatgacaaaaaacatgaaaataaaaaaaagtccttattacaaagacaactcaaaatgccccgaaatacaaggctaaaaccctatactactagaatggccaaaatacaaggcctagatgaaggaaaaacctattctaatatttacaaagataagcgggctcatacttagcccatgggctcgaaatctaccctaaggctcatgagaaccctagggcctttccttggatctctagcccaatctacttggagtcttct

SEQ ID NO: 32162 - DNA, 387 bp, Glycine max
  unsure at all n locations
ttgcttcttgcgtagccgctcttggtgctcagaaaatcccaaaaacaaatccctcttattactagctattttgaattctttagttcctgaatgtacaaccttcaaattgttgcttgttcccctctttctgttctgcaaaaaagaaaatcaaatgttgtcaaaacattgatgaagtcctaagaaaatcaatatcaaagaaaacatggatgaaatcacaattaaaaagcacaactacctatctttcaaagtcctttggttaatttgttttgtcttcttatgtggcggggctttgtttaataatcttatacttttgccttccaaaacaaactaatcactaatcctctnttcattaatccaattctgtatgtcattgtataaaagatcatg

SEQ ID NO: 32163 - DNA, 540 bp, Glycine max
  unsure at all n locations
tccctcttattactagctattttgaattctttagttcctaaatgtacaaccttcaaattgttgcttgttcccctctttggtttgtgcagagtagaaaatcaatatcaaagaaaacatggagagaattgtcatggttattattactcgaacctgaaggaataacatctaaacaagtcattttatncttagaaggggaaaactctgcatatttatggaaaacatggggtatggaggcaagtaagcatgtgaataccacaagtcattttctccaattcaagggcttgattaattgctctaggaaaaaagcatacatctggtatattgtttggtttgcagctgtttggagcatttggcagaacagaaatttcggtttacgttgggttgaccatgttcactggttaacctattgtcacttatactcttatntatgcttgaagataacacctatcagtagatgctcatattagtccttgagatagtaagtattaataattgctntagcttctgactttgtacatgctttttagttgatactaatat

SEQ ID NO: 32164 - DNA, 265 bp, Glycine max
  unsure at all n locations
agcttcaatgttaatgncacatcacataacggcaaaaaccatatcacattatggacatcttgcgatggtattgtaagcgacatccttggccagagtgggtctgattgggatggcactaaccacatgatcaccagcgagaatgaaaatgcttggaatgaatattgcattgcaattcttctttaatatattgctatctgctattcaaagcacactgcatcagactgtctctttttctttctactcgcatccctcacctaaactgttt

SEQ ID NO: 32165 - DNA, 527 bp, Glycine max
  unsure at all n locations
aataaagcaagttattgacacagcttctccccaaaaatacttaggcaatttcctgccttttaacatgcttctcaccatgttcatgatagttctgttccttctttcagccaccccattgtgttggggtgtataaggagtaggtacttcatgaagcatcccttcatcacaattatttttgaaagtcatgtgaagtatattcagctccacatctgtccttatcaccttaattacctttccactttgtttttcacacatcaatttagacttcttaaaaacaaacaacacttcactctttctttntaatagataaatctacatcatccttgtatgttcatcaatgaaggatacgaagtacctgttacctccaagagactggatctcanagggtccacacacatcttatttgatagtgagagtgagagagacattntagagagaanaactgatatcatttcattctaaaaagttagttacaaagaggtatatatagacctctaaacctctgaactaagcanacagaaacaacc

SEQ ID NO: 32166 - DNA, 394 bp, Glycine max
agctttccaaactggtctgtttaaagttacaacattgcaagcagttgaaatatttccctgagctccctttgcggattggcttcgtaactgattcatcgtattgttcactaagagaagcaggattatacatttttaacagtataaatatattcattaattacatatttaaatgtttttattttaaattttatttttataaaattaaaatttagtatgtgcaatgcatggactaaaatgatagtttctatgcaatctctattaaattaaatcataaaacaatttggaccagtaattattattacattaaattaattagtaagtatttgccaatttttaattaaaggtatattcatttttttttctacacggcttattcaattcgaattctaaaaat

SEQ ID NO: 32167 - DNA, 497 bp, Glycine max
ttaagaatgatttgttagataattatgtttataatattgtcttttaggacttgtgtttgaattactttgggttatatttaaatgttttgatgatttaagagtgaatttttaatttagctgcagtattttttttaaaacaatacttccttcactactacaaaagaggttcaaagacggttataacaccctttccatgacggttttgaaccgtctttgaaatcactgtcgtggcaaataaacacttttcacgatgatttttaaatcgtcttagaatcttgaattttatattagttttcatagaaaccatttttgaatgtctttttttaatttcctttacaaatgtaaaaaaaataaaggatttgaagacagttgtctaaaaaattgtcttagaaagtcactttctaggataattctctagagaaccgtcttagaaagtacagtttttaagatggttatttggacaaccgtatagaaactctactttataagaagagttt

SEQ ID NO: 32168 - DNA, 379 bp, Glycine max
  unsure at all n locations
ttgcttcgatttcgtgatgaggactccaagaacatacttcatattgcatggaaatagcatagccacttgacgaaaaaaggggtcgcacttctaattctttatgtttaggtgagttgagagagtgagtgaccagtgcggcgtggaccaaagatcatggagttttattgtccaacggattataagattttgcacatctaatgggtattaagggattttatgacaataagctaattaacatacgtaatcatgtacgttacctacatcaccatgtaatctanatcaatcatgcacaatgttaatttacacagcgtgaatttatattgcctaatccttcatagcgcacaaattaaattctaatgaaacttacactctactaact

SEQ ID NO: 32169 - DNA, 531 bp, Glycine max
  unsure at all n locations
agaggggggagcacgacattgaaggaagaaaaaaagggagagaagttgaactttgagttgtgtctcccaagactctcattcatcaaagttaccacaagtgttacacatgcttctatttatagactaggtagcttccttgagaagttttcttgagaaaacttccttgagaagcttctttgagaaaacttccttgagaagctagagcttagctacacacacccctctcataactaagctcacctccttgagaagcttccttaagaagattcctaaagaagctagagcttagctacacatacctctctaatagctaagctcacctccttgagatgagaagctagaacttagctacacaccccctataatagctaagctcacccctatgacaaagaacatgaaaatacanacaaagtccttactacaaagactactcanaatgccccgaatacaaggctaagaccctatactactagatggccacatacaaggcccaatccaattcgctttctttttcgancacgagcagtgacc

SEQ ID NO: 32170 - DNA, 404 bp, Glycine max
ttgctttatttatgaattattggtagaaagagggcattcacttgtcagaaatgagagtgaaaaagggaaggagaaagtctggaataaggtagaattgagtggatattggattacgtgagagaaaacgggtccttgaagaacatgtttcatttggatttacctcgtgtttttttcccagatcagagaatgaggcttgcataatttagtgtgcatcagatacattttaccaaattatggagtgtcttaaaaatagtatattagaatgtatcgttagcatttctcttactgttttaaccaggaacagcaatacacctttagctatttctcttactgttttaaccaggaacagcaatacacctttagcgataatattattcttctgctctaaggacaaaaataattat

SEQ ID NO: 32171 - DNA, 555 bp, Glycine max
  unsure at all n locations
catcttcctttgatcaaggtgtcaaaatgagaaagatagctaagaacgtggttgatatcgaggcttccaaggaaccttagaacttcatcatcaagccatcactccaagcacaaccctattcggcgtcgaggaaagaatcatccacttaaggaaggatttccccttattaccttggaagggaaacacttggggtaaaaggcgaggtagggcctatttgttggggaataaatgtgtatgcccaagatctaatccatcatgttatcaattttagtaaaatattgttctttattttattatcatatttattgatttattaaattgtcaatttgacaagactttgattaaaattagagacttgctatcatgataaagattatgataatgaacaacaagtcctttataattntaatctaaattggttttactcatacgaatattgtgaatacgacatcaataattcggcataatcaatatatatatatatatatatatatatatatatatatatatatatatatatggcaggggctttattggatacaacatagtagatcc

SEQ ID NO: 32172 - DNA, 389 bp, Glycine max
  unsure at all n locations
tagcttctagccaaatggacttaccttgaattaattcctttgatagcccttttgagccttggtttcctttccttgttntgaagctcactacaagccttaagtgaaaaaccatgatattaccatatccttaaggaattttggagctttggaattgttttgggaataagtgtggggggtttttgtttcattggacaacttgttttgttggctatgcttcatgatgtattttgggccatacttgatgtacattgtatattggttaaatgttggacatgctgaatgaaatgttgtttctcacaggcaaaaaaaaaaaaaaaaaaaaaaaaaaaattcgaacaaaaaaaaaacaaaaaaaaaagcaataaagttgagtgaataagatctttaat

SEQ ID NO: 32173 - DNA, 486 bp, Glycine max
  unsure at all n locations
gagacatttttttttaatcctcccccaaattaggagcatatcataactaagatctttatgctctcttaaaccctagaaaaaggtaggagataattaaagtaggcttaagggttttacaaaaaaacacgattaccatttttggctcaaataaggagcaagggataaactattatcaaaggttggctntttggctaagtggctaaaataaaaagaaacatggccttgatcatatccaccttatgcaaataatctaacagtctaagaatgatacaaaattaggaatntaaaaacaaacgttctctcataattaagttcacacagctcaccgggacaagataaagttattggcttaccggaccatgatctctttccatcaagctaaccttttctctctttgtgattcatgttccactggttgactgactcttgcttccaagaaaccagtattttcacaattgggtatgcagcattcaagtgttgaatcct

SEQ ID NO: 32174 - DNA, 375 bp, Glycine max
  unsure at all n locations
tagctttctcggggccattcctgcgaaggcaaacatttggaaagttagttcttaccaacaaatgctacccttanaacaaaaatggcatacacaccccttcaataaatacaaacatcaatgtaaatttagagcaagcttatgcgcatacttcttcacgaacgttcacttgcacaagacattcttataactaagacaaatgcacccatatacaatcaaggcaccttcgttacctagattatntacatgtacnttccaggtgtatctggtacctacatcacacacatttnctttgcctaattcacatacatgcatactctaagcacttttgctataaaaaatgcatacgtgcacatctttgtatttctaataactata

SEQ ID NO: 32175 - DNA, 497 bp, Glycine max
  unsure at all n locations
acggcccaataagcacggtgctcaatctccactggaaggtggcatgccttaccaaaaaccatcctataaggagaaatcctcaaaggtgtttggtaagcggtcctgtgagcccatagagcatcttcaagtagctttctctaatcctttatgttgggttgcactaccttttgcaacacttgcttgatctctctttgtgctgctggggcatctcatgcctatatgcaatagtccctttcgctctctaaaattgctcacaagtggtagaaaaatgatgagcatctctaaaaatggtgggccaatagaacccacaatccaataccttcttagtggtctactgaggaccaaaatgactgcgggtaggtgtgccatgacaaaactganaaatagattgaatctcatgatttggcacacatctgcggatcacttggtcactaccaaaccttgaaaaataaggatcatcccacacataatctttagcatcactcttaagnttatct

SEQ ID NO: 32176 - DNA, 272 bp, Glycine max
agcttggctcccttgttgcctacgcgagctaggatgctatctctaaaagctaccgccttctggatgaacatcctgtaaggcccaagtagcccacgctgctattggcaccccctatgtactaaatacacgcctaccttaattgatgattgtttttatgacctgatgtattcacatggtacgtgcaagatgcgttaagagcataccacttatcgaaaaggggatggtagatcttatcgggagttattacagccatcctgtcggcgatgatggac

SEQ ID NO: 32177 - DNA, 334 bp, Glycine max
aatcatccaaatatcgagaaggacaagtcctccataacaataacagcatgtccctcccttgcacaatgctgctggtcctagcaagccatatgttcctgctccaatgcatcaccgactgagacaacacgctgctgaagcccctccttaaccttacttagaagagtcagtgaggcaaatgttcatccagaatatgagatctcaacagcagacaagagcctgcattcagagtctgacaaatcagatggcgcagatggctactcactcaaaccaagctgagtcccaaaattctgacaaactgccttcacaaactatgcagaatctgaagaatgtgagt

SEQ ID NO: 32178 - DNA, 402 bp, Glycine max
  unsure at all n locations
agcttgttgtttatgcagacacgttaccatcatgttgcggngttggtttcattgcaacaccgttttgtttctgagcccgaggttcaagggcccaaggttgcgtttctcttcattgcacggaacaggctccctttggaaatggtttgngatgctttctttagggtactttcttttctcttttagttgttattgatctctatatctttgggattagtagtgtatgcaaatgacaatataaagagtttttacgctgttatccaatcataatccatatgataagtttgttgacttttacaatggttagtttaccaacaatggtttctaattgattgatattgtaaatattttctacatttatagtgcgtaaaattaaactcaaatatgcttgcttgtgtgtgtgtg

SEQ ID NO: 32179 - DNA, 526 bp, Glycine max
  unsure at all n locations
actagatttttaccaataaccatttgtattttggtgttattaaaagagtataatggtccatcagattcgaattttgaactcttttccaccaatatgattattttatcaagactatcgtatctttaaaaaatccttatttttttttttgttcaaaacttactagacatgcaatgaaaagttggatcgggccgatgcagccacggttgaatacacgatccaacacagaacaacttgccacttgctccccctcacgacgcttaaccatggtcaacaattcatgttcaagtccctaaccatggtcacacgcccaacctaacccaaccctttcatttcccttcaaaattaatacacaccttctgaatcctataaataacccactttcattcattgtagtttccctcttcttccttctctttcgttcctcctttttttcacttttcgccccctttacgaagcgcgccgttagtctctgcgacccgaaatccngaacccgaattggttcaatctccgagagagagagagagag

SEQ ID NO: 32180 - DNA, 406 bp, Glycine max
agctttggttttgttgactcgctccaatggctcatcatgtcttctattgaacctttcttcatacgctcgaagagaacccatcaattggtctacggtcattgagtctaaatccttagactcttcaatagcacaaaccacataatcaaatttagcgattaaggagcgaaggatcttttccaccacacgaacatcttccatattttctccataacgcttcatttggttcacaatagccaacaccttgttgccaaaatctgagatagattcagattccttcatatgcaatgattcaaactctctacgtagagtttgtacgcgcaccttttttaccttatcaacaccttcaagggaggttttcacaatctcccatgcttctttggatgtggttgcatttgacaccaactcc

SEQ ID NO: 32181 - DNA, 500 bp, Glycine max
  unsure at all n locations
tttttgtttgtaaggattgtttgaatgaattggaaaagtgttcaagattggaatgattgatttcaaaatgcaaaacaaagccttgcttttatagactcttcatgtctggtcaagaaagccattcagaagagttatatcttttagaaaagcttaaaaaccatttgaaagagtcaaaacctttttgaagagttacatctttagatttttcaaaaacaaacactggtaatcgattaccaaatatgtgtaatcgattacacaaagcttttgaatgaaacaatgtgactcttcacatttaaatttgaatttgaacgttcaagggcaatggtaatcgattaccataacattgtaatcgattacagcctttagaaaatatttggaacgttgtaaattcagttggaaaacantttcaaactcattntgctactggtanatcgatacaacaatatggtaatcgattactagagagtaaaactctntggtaagggtttgtcaaaactcat

SEQ ID NO: 32182 - DNA, 405 bp, Glycine max
  unsure at all n locations
agcttgttatttagttnttgatgcagcaagtgagggaaaacaattcttaattgttggtacaaaaaaaaaagcagcggattcagtagcacgggcttgaataagagctcggtgtcattatgttaataaaaagtggctcggcggtatgttaacgaattggtatactacagaaacacgacttcaaaagttcagggacttgagaatgcaacaaaagacggngagactcaatagttttccaaaaagagatgccgctatattgaagagacatttagctcatttggaaacatatcttggcggcattaaatatatgacggngttacctgatattgtaataatcgtcgatcaacaagaagaatatacggctcttcgagaatgtataactntggaaattccaacaatttgtttaat

SEQ ID NO: 32183 - DNA, 475 bp, Glycine max
  unsure at all n locations
gatggatcttatatatctatatatctatagatagatatatagatatagatatatagatatagatcatacaatgaagtaccgcacgagtgggtatataggaatccaaatctgccgaatcactcatgttatgatcttctacatcctaggtcttcccgttccttcatctggcttatgttcttcatgtagcattcagactgaatgactctatgaaattacgtcgctacttccacatggtacgggtaacgtaggagacatctctatttttcccggggggaatccttagaattaccacagcttagctntcaattcgcctctgaccatcaaatgaaatgtgaataacccgtcctcccctctntgaaactntgaaacaaagggtgcttccggttctgtcggtgcttgaaacaattntagtcttctcatattactatatctcgagagtcacataatttatatgaggaactactgaactcaatca

SEQ ID NO: 32184 - DNA, 406 bp, Glycine max
  unsure at all n locations
agctttctcgtacctcaatcagcaatactgcaactgaagacgtattattattattatcatcaataaaacatgaacacccacgaaaacatagcatacacgaagttgacctacgtacctcgcggagaaagctntgagctntgagcacccacgagtgtttcagcaccctagtaccaagagtgtatgtaaagtttcttcgagccacactttcaagagcagtgtagggggttctgtaggttcgagcgaggggtttccggcagtattgaaaacaatgtgggacaatgtgggtgtcgagggagcggtttctggcagatttcaggcgggaggagaaagagaacagcgactgcaaggttttcgagcgcacgggttgtgaaatgccaatgttntaacttataaacataacaacatc

SEQ ID NO: 32185 - DNA, 522 bp, Glycine max
  unsure at all n locations
acgtcatggaagcgttacgaaagcgtctcggcttggattttttccttctttcgtcttttcctcactaattntaagtgaattatgagtgccaaagatgcttaaccttttttcctcagccccttacaccattttatagcaaaaatgagggaggtggttgccgcctagctcgcccaggcgagctaggtagcttccgcctgaagtaacccttctccaaaatattccagatgggcccagggctaggtacaccccccaaattgattagttcaccccttattttttgtttttggctgatttcctttcgaaacatcgcgaaactttatggattacgcgacgatgagtgttaagcatctcaacttggtcagcaaaggtccgcatgttgacaaaaaattgtcccctgatgaaattagggtatgacagttgcccctctnntacttatgtttattggagataaaagggaagtaaaggtaagacactaatttcgttcgagcttgaaactcacccgaccgaccaatagctcaatca

SEQ ID NO: 32186 - DNA, 402 bp, Glycine max
  unsure at all n locations
ttgcttgaagacttgtacatgaccaaatctctggtaaattgattcttgatcttgaaaacattgttgttattattgaggatgaagatcaagccttactgttattgtgtgatctacttaagacctttgctcatttcaaagaaacacttctctatggaagagattctctcactcttgttgaagtccaatcagccttgaactctaagggattaaatgaaagaaatgaacaaagaccttctgtacacggngagagactcagctcgtggaagacaatataagaaggatgataaggcagaagggaaaagatccaagtcacaagctcgatctggatctaatgtaccaaacattagatgttaccactataaaagagaaggccatactcggagattntgtcctgatagacac

SEQ ID NO: 32187 - DNA, 525 bp, Glycine max
  unsure at all n locations
gatgatcgtgcaaaatggatagaattaaatgatttaataaaagttggtgcagtgggaagcaaaattttagtgacaacacggagtgactcaattgcttcaatggtgggcactgtaccctcttatgttttagaaggtctgtctgtggagaattgtttgtctctgtttgttaaatgggcattcaaggaaggtgaagaaaaaaaatacccaaatctagtggatataggaaaagaaatggtgaaaaaatgccaaggggttccactagctgttcgaactttaggaagttctctgttcttgaattttgatttagaaagatgggaatttgtaagagaccatgagatctggaacttaaaccaaaagaaagatgacattntacctgcccttaagttgagctatgatcaaatgccatcttatttgangcagtgttctgcttatttttccctctttttccaaggatttggccacattggttctcantttgtgagtctttgcngatcatttggattacttcgatcntcctctggaagt

SEQ ID NO: 32188 - DNA, 400 bp, Glycine max
  unsure at all n locations
ttgcttttgtttcagagttgcttttgaagatggcaagcaagaagacactctgcccaaagtgggtcaaggtcacttgatgattttcagtgagcccataaaaatatctaagttctgtccaaccaactagtagagttgagctcaccagatcttggttgtatgtaatagagtgcatgttgctactattgtctagtagatgacaagtatgctctanttcagccttccatcttatagcaaatgacctactgacttcaccataacgatacatttaacaaacaaagtaatataagcaaatgtgttatatcatgtcatgtttatttgagaataatcttgaaatttctaaattgatacattacatgaacaacattgaacatttcctctgttttttttttgctaatcttca

SEQ ID NO: 32189 - DNA, 510 bp, Glycine max
  unsure at all n locations
gaaacttctcagctgcttgatattgagtggtgtaggccactctagaactgtctgcaccttagtagcatccatagcaactccttcacctgaaactatatgtcctaagtactctatctccaatacaccaaaagagcatttagacaacttagtaaacaaaacattttctttcaacactttcaatacagcctcaagatggcataagtgttcatgccatgtggaactatataccaatatatcatcaaaaaacactaacacatatttccttaaagcatgttggaaaatatggttcatcaaacactgaaaagaagtcggagcattggttaaaccaaatggcattaccaaccactcataatggccatggtgagttcaaaaggctggtttatgtctatcctcacgttggactagtatctggtgatagcccgaccttatatccagtntagaacaatactttgcaccaaatagttcatctaacagcttggtcatagtaggcacagggaaactatcttttac

SEQ ID NO: 32190 - DNA, 404 bp, Glycine max
ttgctcaacattcaatgtcaagcgtctcgatatattatgggactcaatcagacatccgagtaaaaagttattgtcgtttgaattggctcggagcttcaacattcaatttcgagggtctcgatatattaccggactcaatccgacatccgagaaaaaaattattgtcgtttgaattggctcacaggttcaacattcaattttgagcgtctcgatatgttacgggactcaatcagacatcccagtaaaaagctattgtcatttgaatttgctcacagattcaacattcaatttcgagggtctcgatatattacgggactcaatcagacattcgagtaaatagttattgtcgtttgaattggctcacaggttcaacattcaatttcgagcgtctcgttatattaccg

SEQ ID NO: 32191 - DNA, 464 bp, Glycine max
  unsure at all n locations
gattgagtcccgtaacatatcgagacgctcgaaattgaatgttgaagctctcagccaattcaaacgacaataactttttactcggatgtctgattgagcctcgtaatataacgagacgctcgaaattgaatgttgaagctctgagccaattcaaacgacaacaactttttactgggatgtctgattgagtctcgtaatatatcgagaggctcaaaattgaatgttgaagctctgagacaattcaaacgacaatagctttttactcggatgtctgattgagtctcgtaacatatcgagacgctcgaaattgaatgttgaagctctgagccaattcaaacgacaataactntttactcggatgtctgattgagtcccgtaacatatcgagacgctcgaaattgaatgttgaagctctcagccaattcanacgacaataactntntactcggatgtctgattgagtc

SEQ ID NO: 32192 - DNA, 347 bp, Glycine max
ggtttgtttcttatgttggatatttttttcttctcattgttgttttaagtgcaattcatatatagttgacgcattaaataaaaatctaagtttgattaaaaatcattattttctatcaatatatgtcattttttttagtattgctcgcgtgcatagaaggctcaattttatgcttatccagtcgtctgctttcaaccatcaagtacaaacattttgaatccatttgtatgtttacgtccaaaacatcattttactctagttaaacaatggatgctttttccattttccctttctctttcgttatcattattagctaggtttggttgccagctgattattgcttctat

SEQ ID NO: 32193 - DNA, 451 bp, Glycine max
  unsure at all n locations
aacacgcacacacacgtctgtgttttcttgatcttaaagattgtagtaacaagtgttttaggccaattgtaggttttaactaaattattcttcgcaattgatgatgtaaatatgaactggaatcagcaagttggtcattttacactatttcacacgaatggaatggaagcatacaaatgtgttaaatttaaatattgatcagctgacaatttttatataacccatattcatagcaaatactaaaagtcagactaaagaagttagtactcagtagacattctattaagcaaaaaataatcactggccaaaattaataacattaactaccatgcactnttttgttcagggaatgatgaacagcagatagattggaaacagtgttgtggacaaagaannatntagcttttcaagatcatcagaaaaaagtacattcagactggatgtccttatc

SEQ ID NO: 32194 - DNA, 398 bp, Glycine max
  unsure at all n locations
ttgttagcttatattattctatgaaaagaatggtatcttccacaacttctcatcactgagaacacctacacanaatggngtagttgaaaggaaaaatagaactttgcaagaaatggtaggaccatgctttgcacaatctcactaactaaaaacttttgggcagcaacaataaacacaacttgctatgttcaaaatagaatatggtaagacattgattaaaaagactccttatgaactgtggatggaagatgacctaacatttcatactttcatccatttggatgtaagtgttttatccttaatccaagaaatgaactcgcaaagtttggtttagaggtggataaaggtatcttcctaggatattctgacatatctaaagctttcagagtggttaactc

SEQ ID NO: 32195 - DNA, 422 bp, Glycine max
  unsure at all n locations
gggcagcaatactactaacttgactgtagtgtgcttgtatgtagatgacttgcttgtgacacgaaataatgagactgagattgccaactntaaaggagagatgataagagagttcgaaatgactgatttggaccttatttcttattttcttggaattgaattcaagagaactaatgggggagtgatcatgaatcaagggaggtatgaaagagatgtactgaagaagttcagaatggttgactgcaattntgcagacacacccactgccactggtgtgaacttggtgaaagatcctaatgaagaagaagtagatgtaacattgtatagacaaatggtgggctcactgaggtatctntgttgtactagacctaacttattgtatgttgntggcttaattagtagatatatggagaatcttgaac

SEQ ID NO: 32196 - DNA, 70 bp, Glycine max
agcttctttctgcgtcggcgaagagtagtaggagcgattctgagaggaggatcgacacacccacgcgaga

SEQ ID NO: 32197 - DNA, 148 bp, Glycine max
acggcctattcgttggcgaataaatgtgtatgcccaagatctaattcatcatgctttcaattttactaacatatttgtctttattttattatcatatttattgacttatttaatccgtcatatcgacacgactttgattaatattaca

SEQ ID NO: 32198 - DNA, 197 bp, Glycine max
tgctttggtgcggcgaaaagattgtgaaggtgaaaagacaactataatgaccagacatacggaaatgaagagactcgtagtgcaagtgctttgatgcgttccaaactgaaaagtcaaataagtagtggtgttggccattcgagtttcaatattgttgttcgttggttctaaccatgcctaatacagatattcaacta

SEQ ID NO: 32199 - DNA, 403 bp, Glycine max
  unsure at all n locations
taaacttgctttctatttatttgcacatgttttgaaaatggttctttatttgatttaactaatccttgaatttgcctattgaagatagcagtactttctacaggtaatctttctacttatgaatggcaaattaattaaccctctcttaacatcaattacccattgtatatacataatttttattactcattattagctcttacttaatttaatattatataagtatatttattcattattagtaatatagataatttttattactcattgctaggctctaattaattaattaatattttattatatttattgattattaaaaatataaataattnttaccactcattctcagtttttatatataaacaattattacatcaagcatattgattaattactatgc

SEQ ID NO: 32200 - DNA, 63 bp, Glycine max
  unsure at all n locations
tgcttgngcttcaagtttccatacataggcggagaggtgaagtgatcaaggtatcagacactg

SEQ ID NO: 32201 - DNA, 231 bp, Glycine max
tcaccaataacaatgcacagattcaccagtaatggaacgcttcagaagataaaaaggtatatgtcgatgccctaagtactggatgaaatggactatgtatctcacgatctcagggatgcctgtcagatggatagcctctaaccataccctacattgagcatgcacacaactagatgcgttatcatgtacatacacgcgcacgtatgaatacatgtaccctcacatgatatc

SEQ ID NO: 32202 - DNA, 153 bp, Glycine max
aactgacttcgcactgcctctctcaagtttcaagctccttaccctgttttgctcaataagccacctgattacacctttttgaggaactctggatgctctcgctatccttttcttagaccctataacaaacacaaccttgagtttagcccccat

SEQ ID NO: 32203 - DNA, 233 bp, Glycine max
cagattagcatgaacctaatttccatattgcctagaaatttgaacaactattggccatcaacaccacagaccataacgataaaagcctttgacaattaaaaaaaatacaaaaataaaatacaaagcagcagcaacttagcatgtagtataacataagcttgacaaataaaaatacactatggaatacaactatttccaaatactgaacaattatcaagattaacctgaatcta

SEQ ID NO: 32204 - DNA, 469 bp, Glycine max
  unsure at all n locations
aggaatcanactcatgactaggaacccacgtttgctttatgagctagaaaaacatgcactctgcgatcgctatgcagacgacttgatcagagtaaacatgaacatacatttctcatatcctttgaaggtccaaccatctctttttttcacttcatatctaaactgactactcgcgcctacacatctatccttgccctgcctccatacgcctacataggatcatgtattctgtaatttatgactaatcatgattctctgtgatcttgctctctaagtaatcctaacttactggatacaaaactattaagcagacatatttattatccctataattcttattgtttgccgtcaacactcacattaatgttagagaaccctcctaggagccttatcctgcgaaactattcgacaacgacgcacccttccaaattgtagcttgcaccttctaattactacggtacacgccccg

SEQ ID NO: 32205 - DNA, 65 bp, Glycine max
agctgcaccgggatccttagagcgacctgaggatgtagtttatatgaaagaatgattcacgcaaa

SEQ ID NO: 32206 - DNA, 116 bp, Glycine max
aagacatattggattggagatcatgtttggaacaatctgctatcacattggaatgcacctaagtatcgtttcaagtgtgcatgagcaaaaaaacacaacatcaagcatctgaacag

SEQ ID NO: 32207 - DNA, 375 bp, Glycine max
atcatcggcatgagattggagagaatcagaggtaaagaattggaaacagataaatgttgggagcttcaacttctaaactgtgaatttctgttacaaccttacacagattcagttgtttaccttacagttggacaggtgggattaacgacaatgttaacacgtgcaattatggtgtttcagttcttcatgtaaaaataataacactgcagtggacatcaatgtcgttctcaattaaaatgccctttttcataggaacatgttggtccattttctacctattagaaatcatcttgtatataacttttaaagtcatcattataaaatatgaataatattctcttaacaaaataatattctcctacaagataatatata

SEQ ID NO: 32208 - DNA, 143 bp, Glycine max
agcttatactttattataatctatagtgtcgaactgtgttttaatcactacgaggcccaattccatatttatcgttttatttaatcaaaaaactaaaattctcattttacaaacacacattacaaatttaatcgataaacata

SEQ ID NO: 32209 - DNA, 431 bp, Glycine max
gctcctatgaggttatcttgacttctaagcctttctcttatttgatcgttttcctcttagtgcctcttgtatgttgggaactgtcgcaacctacccttttgcgggcgagtgacgcgaggctcacgggtgtgtcttccatgggaggaaaatgtgcggagtcgccaccaacgtttattgaaaggaaaacattggaaaaaccaaaggaaactggtcataaagaatattccagattcaggagttatgcttacgcttgaggaaggtattagcacctctcacgtttgtcccaaaggacaacagccttagatttagagctgcgtgaaatcatgtatcctacattctccgtctctatatattcttgaggtccacaaaagcgggatttttgctcctacgtatcctccatcagagaggaaatcacacctacgtagttcttt

SEQ ID NO: 32210 - DNA, 276 bp, Glycine max
agcttcttgttgtcggtaagatatgccccatagtcaatagtgcatgggttactcccttgcgagtggtatcacagaaatggggtacacagattatcactaatgaccagaatgagttgattcccacaataactatgaccggatgaagaatgcgcattgattatcgtaagctaattaaagctacacaaacatatcattcttctcttactttcatggataaaatgttggaacgccttatgggataagcctattatactttccttgatggttattcccgat

SEQ ID NO: 32211 - DNA, 485 bp, Glycine max
  unsure at all n locations
ccgcggtttgagcgttgataacgtgcctacgagaactgacgctaatngcgcaggataattgatagttatgctcttcattatgagtgcgctctatgactaaccaaacacagtatatgaactagtcatggcttactatngtactctctatcggataccggacgataatactataattatcatgaagactttctttcgacatggactatagcgtttttatgatctagtcattatgcacagtcgtgcctatcattgtgactaagactagagtagagattgcgcactatacatcgcacaaattctgcacatacgattgctaaacattcaataattatcacatgaatgaaaattgcacaattgaaatactatatgatccgactttacataatgataatagtatgcaagatgcaagattgaagaacgtgtatgacaactcgtgtgcaagaatgctattactctataatcatacaggcgaaattatacgatgg

SEQ ID NO: 32212 - DNA, 268 bp, Glycine max
  unsure at all n locations
agtttgtattttggttcaagcctacatgaggntcaatactttggttttgggaaaagctacttattgctgaaaatcaatacaacttggtcaacactcntcccactcaatctcatacatgaaccacagacaactttttccgatcttattttgctactatattctctgatttgaaatatgtttatcatgttgtccactattctggcgttataaattcatctgtctctactaaacaccatatcatgtctcaccctcttcgcatcattaaatg

SEQ ID NO: 32213 - DNA, 307 bp, Glycine max
catctctggtttatgtggcttacatcaagacttttatcgggtgcttgtgtaagcacaggattactatttcacaccctctctaatgcgaattaccaatgagcatcaattctaacataccgtgtgccaatttttaagaacccccattgcacttgctcttacactcactcttatactctgtttataataaagttttactgataaaaaataccaacgtgacttagctcatttagactatacacccgaggatacactgagctctaagcccaattgtaaaaactaccaactggactaaatgcgatgctacgaa

SEQ ID NO: 32214 - DNA, 453 bp, Glycine max
  unsure at all n locations
cgccgagtgagtctgacatcaagtcattggatctcgcaccngcggattctctanagtctacatgcaggcatgcacatttgtacttttaaacnatctctttcataggttgaggttgctcttagattgcctgtgcctgtacattattacatgctaacgctggatcacgaacttgccatcgacacactgattacaaatcaaatctcggtccttaaaatctagttaacaaccaaccattacatcttgcatacagtgcttaaacgccatcacttcgactacttatgcttttcaccagatcgtaccattctcgctatcatgactaaaaaattatggaaaatgaaccaattacgtaaacatatgcatggccatggctacagcgcgcactccacccatcctaagaccccttcgtacttacatccgttgactgcccgtacaactggtccaaaaacgaaaaac

SEQ ID NO: 32215 - DNA, 390 bp, Glycine max
gttcgggagacaaatgttaagcgttctcgatatgcgaagatgatattccgagtactttggatttggtacgaccatgctctcctgatttccagctgggaaattggcgagtggaggaacgccccggcatttacgcaacaagcataatgtaaacctttacggtttttaaaagctctatagttgggcctaggctttagagttttcattttgttaaggctttgtgtcttttgtttttgaatttataatacaaggatctttcttcatctgttcctggtctctacccattctcattcatttgcatgtttacttctttttctgaaacggcagatccgatgacgagtcccccgaggtactaatacctgggacccgtctatcgactttgagcacgaaatg

SEQ ID NO: 32216 - DNA, 424 bp, Glycine max
tagagaggaagctctcaatggaggaagataatgagagttagagagagagagaggcgtggaaattaaaggaggatagggagagaagttgaactttgaagtgtgtctcatagtttctcattcatcaaagttatgacaagtcgtacacatgtttctacttatagcctatgtcactaactaaatgaaattcactttgtgttttatttttatttcatgtaaatctaaaaggaatattccaagaatatgccaaaggcatcttaacatattccctttagatgacacaagcatggaaggtgtgactctagcacatgggaagcttccttgagaagcaaggaagatagcttccttgggaagcaaggaagacagcttccttaagaagctagagttagctacacatacccctccaatagctaagctaacccccatt

SEQ ID NO: 32217 - DNA, 209 bp, Glycine max
  unsure at all n locations
agcttgtagtcgattacttacatactgtaatcgattaccagaggagtttttcagaaaacattctcaacagtcacatctttctgtgtggttcttgaatggctatcataggcctatatatacgtgacttgagacacgaatntgacaagagttttgaacgaaaaaagtctcatcctcctaaaaagcaaaattgctttatcctcttacaaatt

SEQ ID NO: 32218 - DNA, 411 bp, Glycine max
  unsure at all n locations
atactccagcttgatctctttntcatttgtagtttacttatgaaacatgttgaagtttgtctctgttaaatctatagactgcttggagcaccaatagagattactagtgataaatctttagggaaatttgtaacatagattcaattatatgtaggactagggtcagatatagtcataaacaaattgtcttttggttctttggtagtagatcactgcttttggaatgtttttttttttgtcagcaaaaataatatatattgatatatgagggagtaccagaggtaccataaatacaagagtatgtaagtaaggctggtaaatcctcatatcaggctgaatacaaactgataggagcttactagcctactaacaagtggcanaaattacaaaaaccacagctggtgttaccct

SEQ ID NO: 32219 - DNA, 208 bp, Glycine max
tcaagcttcttatccaaggctcatcttgcgggcgaagctccttcttccatggcttactccctagtggatggcgcctcctctcacctcttctcctttgtcttctgctgcatctccatgatggcaaatcactattaaaggacctcattgaagctcaaagatccagcctccatacaagccccacaagcaagcttccatcatatacatatta

SEQ ID NO: 32220 - DNA, 463 bp, Glycine max
  unsure at all n locations
caccgcctgccatgaacctganttcgaattttcgaacnccntttgaaantcgcggtttaggagcttttataccttttatagcgcggttttggggagctcttgcgcgatcttcgagggttctttaactgacgtcctctgcagcactattctctagaaacttctcaggaagctacctcctctataactagaagcatgtgtaacacattgtgtacctcttgtgaatgacagcgttggacacacaactcaaagtctaacttcatctcccttttttttccttcctgctcccccactctattttctctacctctctcttttgctccattgaagcatnctctccatccttttattcacgactctcttggtggtgaatctccctctctcatggcctatttcttactggattgctccatctctcacctattttcctttgtttccgctgatatcaacgtggaaatcatcttgc

SEQ ID NO: 32221 - DNA, 431 bp, Glycine max
tatctaacattaaggtttatttaatttgtttgacaatttatgtaataactctatagactatagagtgtttgattaccgaaccttaactactactgaaaattatattacaacaacctaaatttgtaaacattatcttggttattttttatgaggacacatgtattttatacggaagaaaatattgtgagttacataaaaaattattattataagagataaaagtttctctttgaatatttagcatataaatgtacactcaaagctcaaatttggaatcacatatgaatttagactagtcatgagtaaattaatttatacattccatgttaaaacaaattatcatcataatatgaattatttaatttcatattataaatatattaaatactattgcacgacttacccttgaactaatttttacagattaaccg

SEQ ID NO: 32222 - DNA, 318 bp, Glycine max
  unsure at all n locations
agcttatgactggtcaagttcacatattcagaatgttttgaatatatttagttgtagtcttgcggatgaaagaagtatggttcaagaaatgacacaagaaacaatttttgcagtcctcctaagcaaccttagtcaattctttagttagagccgtgaattcaggaaaatatctagcaaaccagagttgaaggaaccaaaaagggttgccccccgaccaatgttttggcatgtattcattntggtaatcatgccaaaaagagaatcgtaaaaaggtgcaagacaatagggacctatggcaactctcttgccaaacatgtt

SEQ ID NO: 32223 - DNA, 415 bp, Glycine max
tatgctgcagacatttattatagttctactcaacagctatgcgcgcaacttcagagtaattatgacctttcaagcaatagatacaatccatgttggaggaatcatccaaatctgagatggacaagtcctgcacaacaacatcagcatgtccctcctttccagaatgttggaggtccaatcaagccatatgttcctcctccaatacagcaacagtgacaacaaagacaacatgcaactgaagctcctacttaacctttcttagaagagttagtgaggaaaatgaccattcaaaatatgcaatttcagcaatagacaacagcctccattcatagcttgacaaatcagatggagcagatggctacttagatgaaccaagctcagtcccaaaattctgacaaattgccttcataaactg

SEQ ID NO: 32224 - DNA, 142 bp, Glycine max
acaagcactgccgcagtggtacaagacagttaatgagtttatgagcgactcacgattcacaagatgtgacatggaccattgctgctatgttaaaaaatatactaatagttatgttatcccttgtgcgtatgctgatgacatg

SEQ ID NO: 32225 - DNA, 418 bp, Glycine max
  unsure at all n locations
tgggtgattttctttttctctgttatacaaatttatgttgtgtattgagaaacaaagttttagtctccattggaggtagatgtgggtttttagttgttgattttcaaacttaaatttgaaaacaaaaaatgtttgaataaaatgaggttgaaatggtttttaaataaattttaaaaccaacttagctcacttttgaaaacaagaaataaaagagttttgtagtttaagtttttggaagttgtgtggttttgatactttccttcacttttctccaccttccatcatatctttgtttcttgtttagtgtttgttagaggtgacaaaatagatgaggttaactaactcgacttgaacccatttgataaaatgtagggtttaaactatagactatgatcatgaatntaatttaagtttttta

SEQ ID NO: 32226 - DNA, 262 bp, Glycine max
agcttacgggagccaccctttggcagcagccccaagccttcattgtgcatttttgctttcatttttcgcattttctttcatctcctacaagtaagtaccatctcccttcaaattttggctttccattgtggtattctggtgctttagctctcatattctttctaaatttcatgacacaatttgcgtatgaatccatgctttgattatttgattgcgggctgcaacggatgaccctacgcctacctttgattctactatggat

SEQ ID NO: 32227 - DNA, 333 bp, Glycine max
actatacctggtatctgacatatgtgtttcttgatctatacaggcgaccgtgactacaccctgcgtactactagactccatcttagacgagatgttgatctatatgattcctcttcttgtaatgggtatgatgaaagagtggaaagaaacattcttataccctctctactacctctatacctctcttgtgacgaggacccttgctaaccaccttctgctacgcctcacagactagatcatgaactatcgttaccatatgctactccataactagtattatatttggtgtgcatatatgacatctgtctctggaccgtacttaaacctgggatc

SEQ ID NO: 32228 - DNA, 421 bp, Glycine max
  unsure at all n locations
agttttcatcggcaaaaggatcgaagtgtttctgattataggcaaatttgatcatcgctactttgataaataaaaagcctgnggcaaatggagagagtaagaatgatggaggaacccatgctgtgactgtcgttcctacatggccaaatttcccaccagctcaacaatgtcaatactcagccaatatcagccctcctcattacccaccaccctatcaaccaagaacacccaatcatccacaaaggccatccctaaatcagccacaaagcctgccttccgcacatccaataccaaacaccacccttaacatgcaccaaaataccaaccagggaaggaattttccagcaaagaagcctgtagaattcacctcaattctggtgtcgtatgctaacttactcccatagttactcgataatgcaat

SEQ ID NO: 32229 - DNA, 131 bp, Glycine max
cgctttttattatggcactctcttggtggcgaaaggacttcttccatggcttattccctactggatgacctctcttctcacctcttctcctttgtcttccgctacatctccatgatggaaaatcaccatcg

SEQ ID NO: 32230 - DNA, 415 bp, Glycine max
atctaattattagtttctatgttattaacaagccgttcatgagttaactagagatttctctttgaattatccgtattctttctagactataacttaaaaacttcagaatttaaccacacctaggtatattatgataacatctgatttttggatttcagtagtctaaaaacactattcagtcgcatatcagaacactaacattgtctaccacatatgataaatggggatgttacaactgagagcataaaccttgataactatcatgaagtacaatcagcattagatagttatttgtctattgttaagtattagtgacgtatttttagtctgaactttatattaaatccattttaactaaacaattattcatgttttttataaaaagtgtcattatatgtattttacctaacaactg

SEQ ID NO: 32231 - DNA, 215 bp, Glycine max
agcttctagtctaatggacttaccttgaatgaatcgctttgatagcccctttgagcctatgttcccctttctttgttttgaagctcattacaagccttaactgaacaaccatgatcacaccctacccttaatgagatttggagctttggaattgttttgggaatacgtgtggcggggtatatctcaattgaagatatgatttttggacatgctca

SEQ ID NO: 32232 - DNA, 440 bp, Glycine max
  unsure at all n locations
cttccgttgttcaatttctagcgtctcgatatattattttttcgaatcttacatccgagtgaaatgttatgaccattcgaatttgtcgagagcttctgttgttgaatttcgagcgtctagatgagttatgtcaccgaatcggacatctgtgtgaagagttatgaccattcgaatttctcgacatcttccgttgttcaatttcaagcgtctcgatatattatgtccccgaatctgtcttctttgtgaaaagtttggaccattcgaatttctggacagcttccgttgttcaatttcnagggtctcgatatattatgtccccgaatcggacatttgtgtgaaaagttatgaccattgaaatttcttgagagcttccgttgttcaatttcaagcgtctcgatatattatgtcccctaatcagacatccgagtgaaatgttatga

SEQ ID NO: 32233 - DNA, 205 bp, Glycine max
agcttgctctatatttacattgatgtttgtatttatgggaggaggttatatgccatttttgctttaaagagtaatgtcccactaaaactaactctccaaatgtttgccttcgcaggaatggccccgacgaagcttgcctcacagacgtccaggaaggacaacgcggccgaacgaactagttccgccccggagtacgatagtcacc

SEQ ID NO: 32234 - DNA, 316 bp, Glycine max
cttccatccagtgttcccttgatggggacgaggggaggctttaattgctttaattacaatcctatcctcaccataagacaatttgggtaccctatgagaggagcaccattagaggaaggcctcacaccttttattgcgcgaggtttcaatagcaccaacgtgagggtgcttcatagggtccgcaaggcatgacacagggtgcaaaagatggacgaggaacttatgggaagtaacaatgggcccatcgacggttaccgtaggtggttgaaagcctacacacaaagtctggattggctttcaaatttgagaactacta

SEQ ID NO: 32235 - DNA, 318 bp, Glycine max
  unsure at all n locations
agcttgagttatatcgcaacaaaatgcaggagctggttagtaattcatatcttgctttgttttaatcttagattgatgtttattgcttaaggctttgcatggttgaaatcaattatttgtaggcttgctangccacctgctggtggttcactttaaagtaaaattgtgtttgcattaatgaagttattgcatgccaaagaggttaaaaataaatttattaatgatctttgacctgtaattattcacatgtttggcttgccttggttttaccacataccttctaagcgaaatagctctcgagtatactattatatacat

SEQ ID NO: 32236 - DNA, 415 bp, Glycine max
aatactcacgcttgtgcttgttttattaaaattcctaggattatgagcttctaggtgtgtcctacaatgacttgcgaaacaaaaggtgatcaaataacaagcagagatttaaaaggtactaggttgcctcctagtagcgcttctttaacgtcttgagttggacgcctgatgacttgtcggtcacggacctagtactttgcttacctttggctttggacttggtcgcctattggttggccatgtgtcgtaggcaatactctaacctttttgtggatgagctgatgggctctggaggtggcgacggtgcatttgttgcctgttgctggcgatccccaggctggtgtggtgttttgccttgcgcctgcctggggcgcaatacttcttgatgaaagctcgattagtatggaacctgatg

SEQ ID NO: 32237 - DNA, 245 bp, Glycine max
  unsure at all n locations
tcaagcttctatcaagtggtaatcagagcacaagagcttcaagtaggtgctccttanacttccattaattntntgctttaccttctcttccattggtgnttcttcattctttctccatgtatctcctcacatctcttgtgctacatgttcttaacatgattctctagagtttccaccgattaaacttgctatagaagctagatttgattctctatggttcacatttcttgtccttgttcttgaac

SEQ ID NO: 32238 - DNA, 407 bp, Glycine max
  unsure at all n locations
ntgaaaagtgttgtttttcaccttcttgttaagccaatttgctggctcagcgagcagccactaagcgcaacactcatgggctaagcgcgaggaagactctggaagaagatgagctatacaggttcgctaagcgcatcgctttatctcactaagcgcattgttttagttcatccactaagcgagaaaggcatgtgctaagccgaaattcactaatgtacgctaagcagtccataagtgtgctaagcgcacgagcacgaacaaggttgatcgaggctgtacccgaatcaaataaacattaaaatgttgtcactaggaagtgatcctacgtcgtttcccaacaagcaatgataaaccaaatgttcataacggatagtacgaaatagtaacaaattggggggggggggggg

SEQ ID NO: 32239 - DNA, 113 bp, Glycine max
tcaagcttatgagaacgtggtttcacgactggagactgtggatcatcgtgatactggttcaacttgagcacgtgtgggctcacgaggagcagcctcattgggtctcaccattg

SEQ ID NO: 32240 - DNA, 264 bp, Glycine max
gaataacgtcctatcgatttttttgatcatatttttttttcaagatatcttgattattccatcattattttgttttatttttgcttaaccgatgttatagcgtgaatgatcagtcgaaattcattttatcatttattaagtgacaaaactacttacatataccgtaaaaagcttgttaaagcggaagaaaagaaaactgaaaataagcgaaattaaagtgacaatacacacaacacgtagggaccactaacggtgtgatcgacg

SEQ ID NO: 32241 - DNA, 252 bp, Glycine max
  unsure at all n locations
taagcttaaagatccagtctncatagaagcctgacaagcaagcttccatcaagtggtaatcagagcacaagagcttcaagtaggtgctccttacacctccattaatattttgctttaccttctcttccattgttgtttcttcattttttctccatgtatctcctcacatgtcttgtgctaaatgctgctaacatgattctctagagttttcaccgataaaactcgctatagaagctacatntgattttctat

SEQ ID NO: 32242 - DNA, 439 bp, Glycine max
gaaactcacgcttatatctttgaaattcttgttctatatgttcaacctatttcagcttgtttgacaaattatatcaactttttatatcctaaaatgctgaataaataaatgaagctttggatggcttaaatttccatatccacttgctagctatttccttcttttgaataatgattcacgttaggttctacaaagtgacatttttaattaggcatattaagaacttggccttgcatattttgattgcacagaagagtatcattttactagaattcaagctaatgttcattcttaataattttttgtgaacattatctttaaggtctttattggataacacaatgagtattgatgttgactacatattgaacaactgaattgacacacatactagcatatatttaacagcatcaaaacatattgagtagaggccaacata

SEQ ID NO: 32243 - DNA, 236 bp, Glycine max
  unsure at all n locations
ttaagctttcatcaagtggttttcacagcataagagcttcaagtacgtgctccttaaacctccattgatttttagttntaccttctactccattgatgtttcttcattcttatccatgtatcttctcgcatgtcttgggctaaatgctgttaacatgatcctttacaattctcaccgattgatcctgctatacaagctagacttcattctctatggttcacatctcttgttcatgt

SEQ ID NO: 32244 - DNA, 441 bp, Glycine max
aatactcccgctttgaaatatccaccacgatatcagggattataatccttagacaatataaattgcatattacagcgtgaacatcattgttttttgtagaagacgtgcacgcgcagataccttctattaaaaaagagattggtcaagccagaaagtgttctagataactgcatcgaaacatgcttggttcctgtcgcaaaaatacaaaaaacgaaaagcgtgagctggagaatgaaaaaaaaaaattggaagaagaacaatgttggggaaaaggaagaaccagggttgtaacggaataattgaggaagaggttggtgccttgaagttgaacaggcgtagagacgatctccgatgaaagaggacttctacctcatttgcagttgcggtgaggcgccgctcgccattatcgatctttctttctttttgctcctgctactctta

SEQ ID NO: 32245 - DNA, 240 bp, Glycine max
  unsure at all n locations
tctgcttaaggtacttgtggctggtgcgaggcattggtggctcggtgcttgctctggctgcaaagaggaaagggtttgaggcggtagctttgagaacgatatgagtgctataagaggggaggggcactatacgggtcccattcacatacaaagcactgcttcggctgatttggaagctatagatttggacgctgctgcaaacctatgacagctggctgtatcacggatgatangatcaat

SEQ ID NO: 32246 - DNA, 341 bp, Glycine max
agagtttggactgttatccacatgctctctctctagcaagtgctgaagaaaatgtattacggaagaaggatcccagccgaggcgctgacgtaacgactgcctgctgctatgcgacttattacacgaagattattctgcgttacttcccaatgatcctacggtcttacatatgttgaatcctccacggctaactaccatataccctgcttttcaattaattctatgtaccccgtgtgcgccacactccgtccatcgcatgttatgctcgaagcgtttgacgcgcataccagctaatgatgggcgaatgacgtctatttaagcaatttatcgcttaatctact

SEQ ID NO: 32247 - DNA, 304 bp, Glycine max
agcttatattgatttggtcgaacgagggattgaggtttagtaatttaggctacaacatagaacacaagagcatgattgattagagaaatacatttatatgcatgagcttgtttgtgagacagaaccaacatttctacctactgctgtcactcctacttactttgcattctatagctcttagcataaaagtttagtttaaattctatttgaaattatcaatcatacatgttctctcaacaatgcttcatttctgaacttaattcacgctagcattaattccttgcgttcatactcggattcatcc

SEQ ID NO: 32248 - DNA, 378 bp, Glycine max
ctaagctctagcttctcaaggaagtgttctcaaagattcttctcaaggaagttttctcaagaaagcttctcaaggaagctacctagtctataaatagaagcatgtgtaacacttgttgtaactttgatgaatgagagtcttgtgagacacaactcaaagttcaacttctctccctttttcttccttcgtgctcccccctctctctttctctccctctttcttttcctccattgaagcatcctctccaagcttcttatccaagactcatcttggtggtgaagctccttcttccatggcttattccttagtggatggctcctcctctcacctattctcctttgtcttgcgctgcatctccaaggtggaaaatcaccattg

SEQ ID NO: 32249 - DNA, 293 bp, Glycine max
agcttaaatactagtgtgtgtgtgtacaatgccccttcattttatattttggacataagctatgtcctggggtgtccgattagagttgttgctttatacgcagaaattttagacactatgttcaattctaggcttagactagcctcatcatctacatactggaaacatgccaatcccgttacttttgggttgaaatcttaaaaatatctaagggtatagtaaatacccaagtgttatttttagttgttctttagtttgaaatctgattacacgtttctgtacacgctcttcac

SEQ ID NO: 32250 - DNA, 411 bp, Glycine max
tcatttaactggtcatacatgtgcaccagcgcggcagttccccaggcatagcccccactctgacccagttcttggaaagcctctagatgcaccacatgaacatgtgttgcactcttgttagaaaaaagagtgcaaccaaccaagtggaggaggtaagcacgggctgctacaatccaccatcgggcacgacatctactctgatagacatcccgaagccacgaaagtcgtacatatgccgcatccgcccgtacagtctcagatctagcctcctcatcgaagacctcaaacaactccatcaacaagaagaccgcatcgtccacaagtagaggctcaaagctgtggaacgcgcttatgatcgaaagatggaggagtgatgccacatcgtccagcgtgatcgtcaactctcctact

SEQ ID NO: 32251 - DNA, 246 bp, Glycine max
  unsure at all n locations
agcttatgatattgtcttggaaactataaaaataaattatttgaatcaaagatacattattttcatgcctatcaaatgtgttaaattttaaaattaataaatcattattgatataactttcatgataattattataaaaatcacgaaacttattataaatacataattactataattaaatacaaatataaaatacttcacactatcaatatataatctatttaatcaaatcanaatcaatatata

SEQ ID NO: 32252 - DNA, 482 bp, Glycine max
  unsure at all n locations
accgctgcctgacacattgattacatcgacatttcgaganctacgcaacacaacacctcccggacgtcttatcaatcgcaacaacttcgccgcttctcaccttctccttggcgagcgcctcgaggatcttagcgccgatgtacgaaaccgataccatctccgatcgtatgagcgtcggcttcccggacatcctagaggtgccggacaccgcatggcggtctatcaggacctgcaccactctatgttcaatgacttccgcttcttccttgatgcggacgccgaaggccgtgcggaacgcatgtgagagggctttggttctggacttatcctatgataacatttctctggcaacgattactggaaaaggggtaattaggcacgaggacttggacatgaccatagagaatgtagacttgtcggagtcgtgctctgcatggaggatgacagcgctgaccaaatcttgccatcttaatcactcgagn

SEQ ID NO: 32253 - DNA, 433 bp, Glycine max
  unsure at all n locations
tcccccaattntctataaatagggggagaagtaatgtgaaaaatgtgttcagccccttatgcacttctctctctttcgaatttgcttggaaaaattgtttccgtgaagaaaatccaagccgaggcgcttccgaaacatttccgtaacgtttccgtgaggaatttcgcgaaggtttcgaccgttcttcgacgttcttcattcgttcttcatcgttcttcgatcttcaactggtaagtacctcgaaccaagcttttcgattcattctatgtacccgtggtggtccacattgtgtttcgtgtatttttattctcgtttcatttactttntatacccccttttgacgtgcttaagccattttatttaagtcatttctcgcttaacctataaataaaataaatttccaccgatcgtttgaattgtattatcccgtaac

SEQ ID NO: 32254 - DNA, 344 bp, Glycine max
agcttgccaatggaggaaatgatgtctcaatcagggaattgtcttttaaatacaatagcaaatcctttgaaatttactaccattttatatgaagaggagactgagaaaccttttctacactactaaaaaaaaggccttctacattagttttaatgaccattttacatcggttatggcgtgtggtggtagacccctgtcgttgaataacaacatcggttgaagaactagtcttagaattgtggacattctacatcggttctgaaggtagaaccgatgtaaaatgtggacattctacatcgcttgaacctttagaaccgatgtacactgttcacattctacatcgt

SEQ ID NO: 32255 - DNA, 419 bp, Glycine max
acaagtctaccaaagtgatggaacaaattatgtcaatttcataacaaaacattcagctattattatttaacatttcaggacaaaagattgtgtggtggttgtgcatccattctcaagtctatctaccaagttatttgatgaaattcaagatagagttgttagagatcgacttggcttttttttcaatcaattgtttcttcactatttagaccacaacacaattctcttttggttataatgtttcctagtgttttttattgattgtatatgatttctatagtgtattttatacaggccttaatagtattttgattcccaatagtataatttttgtacacagtgtgtacttgagttgcactacgttggttcttcttaatgcactgcaatggttctataaaatgataggtttatagaggaag

SEQ ID NO: 32256 - DNA, 188 bp, Glycine max
agcttggattttcgagctttggtgtgtggataatcggttcattgttgtctgaactttcaaggcccttcttatctcttcgaggccataaaccacgagccactcaatgaagattcaaactcttgctatacgagcattgcagaagagcaatggtgcacgagcaacccttttctcatgaagacccttctctt

SEQ ID NO: 32257 - DNA, 392 bp, Glycine max
ttcataagtgaaatcaggtgtagccattttcctaagtgtcctctcacgagatggaggttgagccgtgttctcagtatgaaaattagtagttgaatgctcaaaatcagaatattcagaatcaccagcaacaaaatactcatagtgctcaaaatgctcagaatgcacaaaatgaacaggatgcacactatgcctaagtaatctatgaaaggttctatctatttcaagatcaaagggttgtaaatcacctggattgcccctagtcatgcactatatgcagcaaatcatgtatctctcaacaagcacctaacaagggggtaaaactacagctatactcaaacaatatccaaatgagctgaaattgtgtgagccacaccctaccatcatgaaaagat

SEQ ID NO: 32258 - DNA, 222 bp, Glycine max
  unsure at all n locations
tttgtctatcaattggaagtcaaatgcaccatgcatgagattttcgatgctgggcaggcgatacgcatctttacgatgtgctttattgaggttggtgtagtctgtgcacatgcgccattnttcattggccttccttaccaagacaacattggccaaccaagtcgagtattagacttctctgatgaattgggcttacggcagattgtctatctctcccccgac

SEQ ID NO: 32259 - DNA, 429 bp, Glycine max
actccgcttagatttaatttacataaaaataattttctttttgtcagttcactttggttatgattaattataattggcttgtcatcaaggtttttaaaaatggttcccattgtaattgcgattgtaaaattaaagattttagagttattgtgacttcattacaactataattatgattgcatcgaccatatttctctgtaatttctcaccacatcaaaagattgtaaccaaagtgtgaattactttaatttagaactcttgttttcatacataatattcacatataaaaataataattaatcttcgtcagagataattaattacttattaaaaaatacatatcattattaattatgttaatcaatattattcatgcactatatttaaatatattatacttagccaaaaatagttcatcacatacagata

SEQ ID NO: 32260 - DNA, 269 bp, Glycine max
  unsure at all n locations
cccctgggatactctgagtgacctgacgcattttatttgtcagggggctgtttgatatgtaaaatgctaaaactaaagtctttacttggatctatacaattcacccaacggttgtaaagagtccagngggctgaaagacgatgattatataatgcacaattttgagaatattgctgtatgactgtgctaatcctaattgtattgagaatattgctacatgattctgctgatcttaattgattctatctcgcgcaattctgattgcatgc

SEQ ID NO: 32261 - DNA, 462 bp, Glycine max
  unsure at all n locations
nccgcggcctgacactttgaaccttgcanttcgncgaactttcgaanacnnccccttnnngagtgtaggagggaattacgactttgntaaagttatcagcccanacgcagtgctcgtctggtgaaatggacctccaaaaaggtgttcccggcatagaagcgcttgttatatgcgtgcaatatcaggtctatggatgatccatgaagactatctagaagtgttcagagcgtggcatcaacgactcccaatcgtactacaatgtacataatcctccggtgagaatgtcactggaaaaagagtctaacaacacttgctgcaccgaacattggcaaaaattgtgtatgatgaattgtagccggatgcactacaattatgccccctcgccagcttaaccggcattgaggccgccacttgctcacacttgttatacaacgcgaaaatcgattgatacttgtactgggc

SEQ ID NO: 32262 - DNA, 479 bp, Glycine max
  unsure at all n locations
ncgccgcaccggatttgatgcantgcancacatttggcttttgccacaccgccacncgcggatcctttatagtctacctgaggcactctctttatttgatcgcgtgatcaatgggtcggggtaaataccgtatcctacctcctgacataatacctaaaatcatatcctttctagaaacactaactgctaatctttgtacttattctgtttttatccgtacacatttattaacttttccttttaatcttctccattcttctattacatatgatatcgatctcatatactacaatcttacgcggccccattcctattctatatcctttatacatcccaaggctcaagcgcttaaacttgatttacaactgaactgatccatattccacaacatattttctatcccaacatcaaacccaactctgatgacacgcctactcaactctccattcatggcactccatatttcgcactttctcacc

SEQ ID NO: 32263 - DNA, 398 bp, Glycine max
tctacttatgtggcagggcgggcttccttcaccttcttgtctccaacgtgttctttgaccattgttcttccttcccgcgatgcttcttttcatgtccgcctgagtgggcttatagcctaaaccatacttcccacgatttccttgggtatttatcaggctagttatgccgccgttgttttttcctaaacccatcccgggttcataaccgttccccaacataactcgggccatcattaccgctgcatcggacagacaaggctgcccaaagagggagtacacggaggaaatgctgaccacctcaaaagactggaaagcagcttgtgacgattcttctgcggcttccacataacgcatggaggatgggcagcttaccaagatatctttcttcgctgacacga

SEQ ID NO: 32264 - DNA, 343 bp, Glycine max
tttagcttgagatgacgaagtgttgaagggcgaaacttcctgcttttattgttgaccacagagtggtacctggagatatgtcgcgggggtcacgagaccttggggacgtcacgtggggtgctattgcccaaaaccaagcttgaccaatcccgacccaacccgggcatagtcggtcagtgagaacatgtgacgtacctaagcaggcgagctcctgccagtcaacagataaaaggaaaacaagaccacacagcaccgaggcttgtggtggctggccagctgtgaatcttgtgtaatatgtggattgtggccctggtaatcgattaccaacggtgggtaatcgata

SEQ ID NO: 32265 - DNA, 433 bp, Glycine max
  unsure at all n locations
tctattctgaatttcaagcgtctcgatatactatggttcacaatcgaacatccgagtaaaaagttattatcgttagaatatgctcagagcttctgttttcagtttcgagcgtctcgatatattacaggactcaatcggacatccgaattaaaaattattgtcgtttgattttgctcatagcgtctgcttttaatttcaggcatgtcgatatactgcaagacacaatcggagatccgagaaaaaatttaatgttgtttgaattttctcaaagcttccattttcaatttcgagtgtctcgatatattacaggacttcatcggacgtccgtgttaaaagttattgtcatttgaatntgctacgagcttctgttttcaatttcgagcgtcttgatatattacgggactcaatcagacatccgagtaaaatgttattg

SEQ ID NO: 32266 - DNA, 249 bp, Glycine max
agctttgagcaaattcaaacgacaataacttattactcggatgtctgattcagtcccgtaatatatcgagacgctcgaaatggaattttgaagctctgagcaaattcaaacgacaatcactttttactcagatgtctgattgagtaccgtaatatgtcgagacgctcaaaattgaatactgaagctctgagcaaattcaaacgacaataacttgtcactcagatgtctgactgagtcccgtaatatatc

SEQ ID NO: 32267 - DNA, 414 bp, Glycine max
tgaagtgaggaagtgtggaagggttagacttcctacttttattcgttgaccatagagtggtacctagagatatgtcgcgggagtcaggagaccttggggacgtcaggtggggtgctattgcccaaaaccaagcttgaccaatcccgacccaacccgggcatagtcagtcagtgagaacctgtgatgtacctaaacaggcgagctcctggcagtcaaccgataaaagaacaaagaccacaaaccaaggaggcttgtgtggtggctggccagctatggatcttgagtaatatttggaatatggcctctggtaatcgattaccaagggtggttaatcgattacgaggcttaaaaatgaagacacgaagttaagatggcctctggtaatcgactaccaaggatgtgtaatcgattacc

SEQ ID NO: 32268 - DNA, 218 bp, Glycine max
  unsure at all n locations
agcttgtaatcgattacacatatactgtagtcgattaccacaggagtttttcagaacacattctcaacagtcacatctttttatctgtttcttacatggccatcaaggggttatatatatgtgacttgagacacgaatttaacaagagtttctcagaacanaaaggtcttatcctcttataaagcacaatcgttttattctcttacaaattccttgcc

SEQ ID NO: 32269 - DNA, 417 bp, Glycine max
  unsure at all n locations
tcgggtgatctactacgcttctataactttggatgctgcccaagcaaattacactaccacagagaaggagctattagcgatagcttttgctcttgagaaatttcgttcatatttgcttggtactcgtgttattgtttatactgaccatgcagctctgaagtacctgttgaagaaggctgaatcaaagcctagattgatcaggtggatgctttggatccaagagtttgatttggagatccgtgatcagagcggtacacaaaacctcatggctgaccacctgagtaggattgagcgtgcgcctgaggactcacccattcgggatgatttttcagatgaccatttgtacattctgtataagatctctgattccttccccactccttggtttgctaatattgtgaattatttggttgcttn

SEQ ID NO: 32270 - DNA, 268 bp, Glycine max
agctttccacatccgatcatggaaggacctggcaactgcctctattatgcagtaccagtacaataccgacatggcttccgatcggaaccagcttcagggtatgactaagcgagagcatgagtccattaaggaatatgcccaaagatggagagatcttgtagcccaagtcgtaccgccaatgacggagagggagatgatcacaattatggtagatacgttacacacgttctactatgaaaagctataggctacatcccactaactttgc

SEQ ID NO: 32271 - DNA, 424 bp, Glycine max
  unsure at all n locations
attctccccttttgtcaagcaaattctttttgacatcatcaaaaccttcatgatttacattctcccccctttttgatgatgaaaatcattatccaaggcttgatcttttttacatcatcacaatcttcatgatttacattctccccctttttgacgatgacaaccacttgtaggttacgagcaacaacaaaacgaaacgagaaaaaaatataaatcgcatagtcaattttcttagggagaaatgtggcctttgtttgttgtcttcataaatcacatatccatttatcttggtgagaaatatgaataaactttgatgcatgccatgtgtttgaagaaattgctatcaatgtatcaactntgctcttctctgttttcatagtctttcatcatgatacccagacttatgatgttattctctgaatca

SEQ ID NO: 32272 - DNA, 172 bp, Glycine max
agtttccatttgtggggcacgcttttcacaccttccttgcttggtcgacagatctggtcaagtctttatcacaacatatacttattgtccttactatatgttccctctttttaaattaattcattcagtgtgcctaaacttacgctatttacctttgtcctatgaataggta

SEQ ID NO: 32273 - DNA, 428 bp, Glycine max
  unsure at all n locations
aagtgaaatgtgtaaccattatgtataattgcaagtttttataaagngatctaattggaatcctacgtgtaagcaactaatctaatcatatcaacacattatattttcaacttacaaccatgtgaacaactaatcttatgatcaatactatcatcaatcctgtgagtctttcaatcttatcggcaatgtaacaattacgaatcaaattatcaatactcttcctttaattattttattaagagacttcttttccttttctaaaagcttagacataattaagtgaaagactcaccatggaacacgttgctagctatagacaaaggaactctgaaactttaattaacaagacaaggttacactacaccaaatattattattttaattaaatgtcagttatcaataataataaattaattatcactcttatc

SEQ ID NO: 32274 - DNA, 143 bp, Glycine max
cgacattgtagataaatagctatgactttcacgctaaaataactacaatgcatggttggcactcgaatatagaatagactgtacatgcatacgagaagatcgtgcagaataatgctatagtactacactggaagtactagagg

SEQ ID NO: 32275 - DNA, 200 bp, Glycine max
agcttgtaatttaagaaaagagcaacacagagtcatgtaataagcctaaaacaaactataagtataaaatacagcagatgcaccctagtggatgtaccctccactacaactgacccaaaagagatgtaccctctcttgttctcactcaaacccaagcacatgtaccctctacttgtaccacaaaggatgtaccctccaat

SEQ ID NO: 32276 - DNA, 426 bp, Glycine max
acactacagaatacttacgcttctaccatggatgattaaacattggtgtgttgcttctttctttatattggttaagcattcaaaaattgtgtttgtcttctgtcttgagtggttaagcaccatgtttagcttctgctcttgatggttaagctttggtttgcttctaccttttaggtggttaagtgtgtttgcttctgctaagtggttaagcattgtgttgtggcttctacttaatggttcaacatattccaattgtctttgaatgtttttcagtcattttcaatctgctgccaatgtgtttccggcatgtttcattgtctatttttctacttgtattgttcatcccaagctggaagtgttgactccaccttccatctcgtgagggggagtgtgttgtctcctaatcagtactaatcactttgaagt

SEQ ID NO: 32277 - DNA, 393 bp, Glycine max
  unsure at all n locations
agcttaccattataggaggccatggataagagcttggaggaagaacgagatgaatgaagggagagggagagaatagcacaaaattttgtgctctaaatgagctttgaaatctgaagtttaatattcaaatggtcaaagttaaaaaaaatgcacacacatgacctctatttatagcctaagtgtcacacaaaattggagagaaattcgaatttcaattcaaatttcacttgaatttgaaattgaatttgtggagacaaacttcggagccaaaatttcactaattatgattagtgaattntagttatggttcagcccactaatccaagatcaatctcaagattctccattaagcgtgcttangtgtcatgacgcatgtaaagcatgaacgacatg

SEQ ID NO: 32278 - DNA, 405 bp, Glycine max
cttatttccttgtagccaaaactcaggttcattgagctatgcacccatcctggtagctaagctcaagtctttgtagccagaactgaggttcattgagctaagcgccactcatggcagctaagctcatatccttgtggcaatgtaagcactaagcgattccttttccgctaagcgcatgcttctctgtactcaagattgcatcattttagctaagccgacttggtgcccggcttagcgagagttgtaggttttttgatctgtagaactcgctaagcgatcttatcggcatgctaagccaagcctttgtgcaaaaaaaaatttgattttgaatttcaaacatcggctaagcgcgcaaatccgctaagcgagcctctttgagaaaccaaacgtctctctggctcgctt

SEQ ID NO: 32279 - DNA, 163 bp, Glycine max
  unsure at all n locations
agcttatcaattgaactagaaaattaaccaagttctctgtttagataaacatctctgtaagtatctatagaagacaatgagaacgtacaatgaatcgagcttctaacataagttaaaattaacttacgcacttaactctntctagaagctctttttatttaat

SEQ ID NO: 32280 - DNA, 422 bp, Glycine max
ttgtcaataataatttaaaagctagtttattatgtgttctgcacgagaactaggtccctaacataaagggcatgtgtgtgttgagtttatgaattcttcctaaagaggcttgcctggattgaatctcctttctataggaagatagcttcattatgagttttggcccataatctgatagttcccaataagagaaatttggactagcttcaggatcatccaacaaaatatctttagtctgaaaggtcacgttgttaggtttggacgaccatgtgtctcatccaccttagattttgatgaataacaataagaataaattattgatattctaatgagtctttgagaagtggacatgattactatgttaaaggaatttaacacattaaatatcgtccacaacaatagagtatgctttattttaacct

SEQ ID NO: 32281 - DNA, 222 bp, Glycine max
tcaagctttgcatgactactatgttcaactggcttgcgcacattaaggacagaatcctaagtcgtacaagacaataagtattaagactaatcaacaagttaacaaatattacaagtgtgtattcaaatgacaatatggtagggggattattatattacttacataagataaaggtttcactagatgtatgggccatccaatgaatgacttcacggcgttcct

SEQ ID NO: 32282 - DNA, 414 bp, Glycine max
ctcccgcttatggaattatatcaatttatgagggctttaattcgttttactgagagtatcatcttagagtggccttcggttccaatacaacaattgctttctctggatggcattaataaaatcatttccagtgctcatttttctgttatttcctgcattacatattgctctcaatcttttttctccttggagtttatcactatcccaattcccaattaactttatttcattgtacaactcaggttcattgtatgttaagaaactgagataattacccttatttgtgagtgtactctattaacactctatgtctacatatcatttagctaagcgcgtgtaagtgtgtattgaccattcaaggatattctcacgaaatccacttacttctatcttcactcatatttcacgcctcac

SEQ ID NO: 32283 - DNA, 166 bp, Glycine max
atcctctacagtggagatgcacgcattttatcttgctgctaccatactatgtccgttagagattatggcacatgtttgcaataggtatgtacaataggaatcgtttgtctagctatgacccctacacagctgaggaagatgcctttatatgagcctgatcctctcc

SEQ ID NO: 32284 - DNA, 429 bp, Glycine max
tcgtcctcagatccctcttgttggactatgctcaatttatgacagccctcctaggtttagactaacttaaactaagcttcctcctcagatccctcttgttggactagacttaacttaaatagcttacaaaagtttagactaatttaacctaagctttgtcctcagatccctcttgttggactagacttagaccaaacaacattattgtaacaacaaatttaaaaccaaaacttaatctgcagatccctcttgtaagactaagtttcaattctgcttcattcaagttctaaggcaacaatacatttcccaatgctaaagtcacctaaccaggcacacaaatgggtgatcagaccaaaagcatatggaatttaagcactgaaagaagcattgaacacaagacacacaatcaattagatatcacaataatta

SEQ ID NO: 32285 - DNA, 250 bp, Glycine max
agctttctcatttatgtcttatgtcatgattggtatgagttaatttaattagaaaagatatctaattttatttttgcatcaagatatttattatttttatgcagttatacttatttttgacaattagtggagtgtttattgttttattatcatccggataaaaaagtaacttgagagcttttggacatcaattctatggactctttactacacgggttttgttttttcacaatcaccaccatggaataca

SEQ ID NO: 32286 - DNA, 433 bp, Glycine max
tgcttgtggggcttctatggaggctggatctttaagtcttaatgaggtccttggatggtgattttccaccatggagatgcagcggaagacaaaggagaagaggagagaggaggcggcatccactagggaataagccttggaagatggagcttcaccaccaagatgagccttggagaggatgcttcaatggaagaaaagaaagagggagagaaagagagaggggggagcacgaaattgaaggaagaaaaagggagagaagttgaactttgtgttgtgtctcacaagactctcattactcaaagttacaacaagtgttacacatgcttctatttatagactaggtagcttccttgagatgctttcttgagaaaacttccttgagaagcttctttgagaaagcttccttgagaagctagagcttagctacacacac

SEQ ID NO: 32287 - DNA, 331 bp, Glycine max
agcttcaacctttggccatcatttttgcccgaaatcgtgaaaggagagcattttcggggtcgcgaagtgcgtggctacgagtgggacttcgaaaatccacgcttgggtggacttctttccctcttgattttcgtgggtatggggttttgggagatatgacgggtagtttcgttagttctctgctgtgtgatgattaattgtgaagacatttgctgaacacttgttgaaattgccatgtttggatgagctaaacatacccattctgttttacggcttttgtgatgacgcttgtgatgcttatatgctgacattgctgatggaaatctgctac

SEQ ID NO: 32288 - DNA, 427 bp, Glycine max
tgtcacaagtatatttaacctgaacctcttagaagcttggcaaacataccagccagctgattgctggagttaacaatgttggttgtaatttcgctggaaagcaccttttctctaacaaagtgacagttgatctttctatgcctttgatcttttcatgtgtttgtctcccaattttagttgttggagtagttgcctaagttccataagctcacatgtgactattgccatagaacaaaatccaacttttgcactggatctagtaattatgttttccttattgctcttccatgatattaggtttcctccagcaagaacacagtatccttaagtggatcttgtgtctaagggtgacctttcccagtcaacatcagagtaatgaatgatcttttcattgcctttgtcctcatgtaataatcctttacctagt

SEQ ID NO: 32289 - DNA, 338 bp, Glycine max
  unsure at all n locations
agtcttctaaaagtgctcatgggtgaaaacaaaaatggaggatgaaaggggaaagaggaaggtctcttaccactaaaatcaacccaaaactcaaaggaagcacaaatacaaggtcccttgaacaagaaggatcaaaacctcaagctctccaatagagggtttttcttgaaagggaagaagagagtgaaataagattgttgtatgtttggttcagttntgattccactananactgagtatatgactcttctcctcctctctattcacattccatcactctctaaactcactcaccccattcctatcattcaaggtgcattcctctcaatccgaacact

SEQ ID NO: 32290 - DNA, 415 bp, Glycine max
taatgaaaacaccttattgttattatcctagaattctatgactatgaggcctccagaaaaggggagattaaggagaggaacttttctgattatattgcttccttccatttgagtacattgtttgctatatataagtttttctgctaacactttgcaaatggtgcttttgggatgtttccttggaggaaaagcaaaaattacaaaaagtgaaatgcaaatcctaacggcattgtactcctcagccgatagaggaatcattgcatgcgcactacctcctgcaaggtccgccatgctcactccactacttgttgacaaagtcctttaggtaataaggcttgttaatttccctttttggccttcagcattcttccttgtttggttctgcctcattctctgattatgctgcatcatttga

SEQ ID NO: 32291 - DNA, 248 bp, Glycine max
agctttcataagtgaaatcagatgcaaccatctccctaagagtcctctcacaaggtggaggttgagccatgttctcactatgaaaactaatagccgaatgctcaaaattagcatattcagaatcaccagcaacagaatactcagaatgctcaaaatgcacagaatgatcaggatgcacactatgcctaactaaatcacctgaattacccctagttatgcactatatgcaccaaatactgtgtttttca

SEQ ID NO: 32292 - DNA, 424 bp, Glycine max
  unsure at all n locations
ctccgcttgatatccgntataagatgattaagaactagttttctagccaaccaaacaaaaaatattttgattntttttagagccattaatagcttggtagaataaaaaatacccggttcttcaagcttgttctgtaagagccagaagtggcagtggaaaataatacttgtaacatgttgaagttagtgaaacttggtggtttgctcgaggtgcagactttaatgaatttgttaccacaaccgatctaaaaggacgtcctcatgcttcttaagctttacccaaactgaaccttttacattggttgtcaagcaactgatttaaaaagtaaatgttntatatcaattgtgtttacaaccgatgcaaaaagtattgatttctatcacataattaatggatctaacaaaaaaggcacaactgtttcttt

SEQ ID NO: 32293 - DNA, 286 bp, Glycine max
  unsure at all n locations
agcttatatcatttcattaataagaaaaacatcaatagttcaatacaatgatgagaaacatcaaaacattatggattagcatacaacctagacgacgtctttgcaaggacatgaaccatttggttcgccaaaattcacatttgagttactagttaaacgaacgttattattacaaaagtgaaaccaatttcgaatccatatatattggagcacgactgaagcaagtcacanacatgtttgcaatcagtctcgaacgtgacgttgttgtcgccaactcaatcgtcct

SEQ ID NO: 32294 - DNA, 360 bp, Glycine max
ctcacatcaaggatttcttctattaaggatttaaactttcttcttttaaaaattgcaagatcactcctgccctttcaagcttaaaaacttcaaggtctggtgccaagtgtaatacttacttcttctgtttttctctttaatttcatgcagagactgtttaaatgaattttatgttatctcacgagctttggagctaacagggttctaacaactgctgtacaccaaaaagaaacaaactccctagcaagctctggcacaaagcatggacaaatggggtattacaacatcaaagaatgaccattctattgacagcagcgacaatcagaagtcctcaaccccatgtttgaagacgaaaactat

SEQ ID NO: 32295 - DNA, 222 bp, Glycine max
agtttttgttatcggatctgccacaggccacggtgtcttgaaaccaaattaggctggcatccaaccaggcctaaatagttcgattgaacacctgcacgacaggacaggatctgtggattcaagtaaaatgaccatatctcatctcacttttcttcattgtccggatcgacagcacgaaaatcgtcagtgaaccaggccgggccgacctttcgactaatgaat

SEQ ID NO: 32296 - DNA, 447 bp, Glycine max
aactccgcttcctgcggccattcctgcgaaggcaaacatttggattgttagtttttaccaagaaatgctacccttaaaacaaagatggcatacaactccctccaataaatacaaacatcaatgtaaatttagagcaagcttatgcgcatacttcttcacgaacgttcacttgcacaagacattcttataactaagaaaaatgcacccatatacaatcaaggcaccttcgttacctagattatttacatgtacttccaaggtgtatttgttaccgacatcacacacatttcctttgctaaattcacatacatgcatactctaagcactttggctatcaaaaattgcatacgtgcacatcttggtatttctaatacctatacatacacaaacttcatgatgaatcttgactatctacacaataaggtgctacatttcatggcccttttt

SEQ ID NO: 32297 - DNA, 210 bp, Glycine max
agtttgacctatcccgacccaaccagggcatagtcggtcagtgagaacctgcgatgtacctaaacaggcgagctcctggcagtcaacagataaaaggaacaaagaccacaaagcaaggaggcttgtggtggctggccagctgtgaactcttattgatatgtgggttatggcctctggtaatcgattaccaagggtgggtaatcgattaca

SEQ ID NO: 32298 - DNA, 289 bp, Glycine max
ttcgctcacgacattatataacacgccctgagtccatcgaatttgaaccaatttttaacaacactttaagcgctttctatagagaataacgtataacacacgtactctatagaggaagggagagattgtagagactaactatactagactcgatataaaatacacgttatttgagcgatctacaaattgatacccttcactgcatgtgaactgaagtaattgcaatataatataactgtcacagaaattgaacatgaaagactaatcaattgcaacgtcacttgaagcc

SEQ ID NO: 32299 - DNA, 274 bp, Glycine max
agctttgaactattgtaagacacattttctgcgaccttcgcgattctcgactccatttcattgaagcgcatatccacttgtaattccaaagtgtcaaccctctcacccacaaaggtctcaagaccatcaaacctgtccacaatcttcgaaagaagagatgaatattccacatgatgcccttctttaccaacattctgaccacccttcttcacccaagacccatcatgccctttctgataaccaaaagacgctatgactcgaacgcctataacga

SEQ ID NO: 32300 - DNA, 429 bp, Glycine max
actcgcccacttacatcaaccagtatattagcacacttgatatctctttaaaattgaataattgaattgaaacgctcagaatgtagcaaatcaatgcaaattcaagatatttaagaagttaatttccaagcactgcatccaactttcatcttttgcaatgattgaaagtcaagcatttttcacaatccgaataaaatctgtcaaagcaaaactcatcttcccgagcggagaatcatactcagtatctggtttctcaaaaattttctcaatataaatatatgtgcaaatagagctataacatatcctctaatataagaacagaaatactataactattggtaacacatggctagaatgctaacttgttaaagaaacttccaggacttcagtagcaaaatattcttttatttttcaattcataatgcatat

SEQ ID NO: 32301 - DNA, 326 bp, Glycine max
  unsure at all n locations
agcttatgatataagaagttgggtttcttgattatgagggaacaatatattgcatgccctttacaagttagatggtggctttgaattaatattaatggacatcactagtgggtttttcatggttagttttgatttggatactgatcgagtattcgaatgcgcatgtgttcttcgatcattacctaactgattgtccttgaacactagatttctcaccaacagaggcggcatggatagaaccctagcctaactanctangtttggtttcaggccttacgatgatatattacgatgagtgcactcttatatatccaatattgctttat

SEQ ID NO: 32302 - DNA, 266 bp, Glycine max
tgagatccctacagtgcttctcatgagtgctcacatcagacagcaccgagaactgcctctggttgcacctctcgcacacgtacattttcgggcagtggcttatcttgtaatgggtcttggcactcatcattgacttcagtggctcgcccttggcatgcctctggctccacctacacacctcttgaagacacgaatacatcgttggcttcacactcatctaacactctatacctctgctgatcttacatgcgtgactcatatcagca

SEQ ID NO: 32303 - DNA, 407 bp, Glycine max
  unsure at all n locations
cggaaacaaggcaagaaagttagacacttgaagcttctataagccaatatgcacaatcatattgtgcctacatgtatcgaattaattctcctagcgtaatgaataactgtttagtaaatataattgatactaaataaaaataaaaatgatacttggattaacatgtcgtccacttggaagtatatcacatttgattgcacgcttgcggtaaaagggaatacaaggaaaaaacaaggatttcacaacctaaaacttctgaaattaacacagaaaaatgcattttgcatcattttctagtagctatccacgtttggcacttaaaggaacatgctttcatcatggggagtcatcctaaacactaccttgaacattttnccaaggattgacctctgtctattctattctct

SEQ ID NO: 32304 - DNA, 107 bp, Glycine max
ccttcgagcctattttccaccttctttgtttcaaagctcattacgagccttaaccgaaaaaccatgatgccagcttacccttaacgaatgttggagctttggaattg

SEQ ID NO: 32305 - DNA, 430 bp, Glycine max
  unsure at all n locations
atccaccatcctagcgttacaatatttattaatcatataatngnaagcataagcattaggcacaattccacttggcttcatattctcatacatttaaaacccttccctttgaaggccttgcttgaaaaagccgctcattaacacaccacaactatggtggttggcaaccaaacccaacctatccatcgtgcaaaacaacttctttgccagcctaacatctgcactcttgcaacacccataaatcaacgtagtgtatataacaacattcagagagaaaccaaactcttncaacatggccaaaagccgaaaccctttcatcaagtcaccagcttcacaacgacccttgatcataatcccaaaactgtaggcatccataacaactttacgcttgaattcattatatacccaccaagctatatcgaaacaattt

SEQ ID NO: 32306 - DNA, 322 bp, Glycine max
tctgttttgactgaaatcacgcaccacaattttttttttttaataaaaagttcacttttttagcgtaaaggttgaagattctttgtaaacaattttcattaaaactcatgtgatatgtgtgtgattcggctctatacataaattaaatgtcattaatgagtacggggaagataatgtaacgtttagtaaataattaggagaatatttgtaggttctaaaaatagaaaaaaatatgtgtcattttctcaaatttttgagagaaatccatatcattcactcatataaacattgcatacaaatatatattgaatataacaatatc

SEQ ID NO: 32307 - DNA, 425 bp, Glycine max
  unsure at all n locations
atactcacgcttgccttgccccttgatatatttgagggtttcatggtttctatgaatgacatattccttgggataaaggtagtgttgccatgtattcaaagcccgtactaaggcatacaactgcttatcataagttgaatagttaagggtgggaccacttaacttttcactaaaataagcaattggatggccttcttgcatcaacacagccccaatcccaacatttgaagcatcacactcaatttcaaaagatttttgaaagattggcaacgcaagtatgggggcattacttagcttttgcttaagaacattgaaagcttcttattgtttgtctcgccatatgagaccaacattcttgttgagcacttcattgagaggtgcgtgcaatgtgctgaaatccttcaaggatcggctataanaacttg

SEQ ID NO: 32308 - DNA, 246 bp, Glycine max
agtttcggtattcaatttctagcgtctcgaggtattacgggactgaatcagacatccgagtaaaacgctattgtcgtttgaaaatcctcagagctttggaacttaatctcgagcgtctcgatatattaccggtctcaatcagacatcccagtaaaaagctattgccgtctgaattagctctgaggttcagaattccaatttcagcgtctcactcattacgggactcaataagacattcgaccaaaa

SEQ ID NO: 32309 - DNA, 294 bp, Glycine max
agctttatccgcagatccctcttgtaagactaggcctagactaaacaacattattgtaacaacataattaaaaccaaaacttaatccgcagatccctcttgtaagattaagtttcgatcctgcttcaatcaagttctaaggcaacaatacatttcccaatgctaaagtcacctaactatgcacacaaatggattattagaccaaaagcatacaaacattaagcattgaatagggaaaacatcatcaattacatattaggtatttacatcagctgttcattagaaatccccaact

SEQ ID NO: 32310 - DNA, 420 bp, Glycine max
tccgctttataagtgcgggtctgggagactaaggccaagtggtctcgatgtgtgaagatgatgttccaagacctctggatttggtccgaccatgccctcctgatttccagctgggaaattggcgggtggaggaacgccccggcatttacacaacaagcataatatccgatgacgagtcccccgaaggtactaatacctgtgacccgtctatcaatttcgagcacgaaatgagccaaacggaagatgaacgagatgagggggtgggacttccttcggaactagaaaggatcgttgcccatgacgatcaagaactggggcgtcatcaagaagaaacagagcatagagacttgagaattggcagtggaaagagggaagtaaagatatgtgcaggcattaccgcacctatccgtgacgaattaa

SEQ ID NO: 32311 - DNA, 240 bp, Glycine max
agctttgttgagacaacttccttgagaagcttgtttgagaaaacttccttgagaagctagagcttagctacacacacccctctaataactaagctcacctgcttgagaagcttacttgagaagatctctacagaagctagaacttagctacacacacctctctaatagctaagctcacctacttgagataagaagctagagcttagctaccacacccctataaaaactacgctcaccccc

SEQ ID NO: 32312 - DNA, 365 bp, Glycine max
tgaatattatgtgcttatatctattcccaccactattggtggtctctagtagtatcttggcaccaaatcatcattggtgatgatatttcaacttataagttagactctgatatcaatgattcatatttgtcactattgcattgaacattgatattgttcttaccactaattgagtagatatgttacttgactatattcatacttagatttctttacagcaagaaatcatgatcttagataattgttggttgtacactgcgacttccgctatcttttgtattcactactacatgatacatgagtaaatgacttcctgctgtgagtgaaaataaacattgtagttaaattcacattactttatctca

SEQ ID NO: 32313 - DNA, 312 bp, Glycine max
ctctttatcacgatttgcttacatgcaagctaggaaatcaacaccttcatctactctcttcatcattcctcttcattttatttctgagatacaagctttaggtaagggggctctttcatgtggtcatggcaatagacaatggaatcctcaaatgtcaccttatatatctgcacagtgtaagggcattcatattacaaatcttattacaactgctccggaaaacatggtctgtctggggagctcacccatgtattctgcatatctttctcaatttactgctgaaaatacaatttcatgttgaattggatgaac

SEQ ID NO: 32314 - DNA, 267 bp, Glycine max
tactggtctaactatttcgtgttctgctacaaggtgcacaacaagtgcataatcccacgtactggcctcatgagaatatgctatctgttgcacgtctctgactgtttactcgatgaatcagattgtgtttgatgacctgatagcagctgtagaagaaccacgagcagtatgttctgctgacttattaacttttgatattgtatcttctgttgtccccaccagggctaagtctctggcttactattgtgctccttctgcataccctac

SEQ ID NO: 32315 - DNA, 127 bp, Glycine max
agcttgtaacacctaacagacgatggcagacgatcatatctagaagttgaagacaatatgcatcccctatactagcacacgaatggattgcagaagagttcacagattataacacaggaatactgcc

SEQ ID NO: 32316 - DNA, 424 bp, Glycine max
  unsure at all n locations
tatctgacaaagatgcgtatcaacagtttttgcattctcttgattatgtcaagattcanaataatgtaagtttcatttctttactctaatttctagtgatttattaccttggaactggtattttttttttggaaggcgaagataatatattatatatgaaaccaagtaccagaggtactacataatacagaaaaggtcctgataatcaggagatacagcaccctccacagatgaaaaccctactaacagaagctttaactaaaagctatagacatatttgaagaccaactataataaggaatctggaaattcctttcccaacccctcagccaggtccataagagaaacagagtgctatctgtcagtctagtgatatcaaacgttngattctggaaaattatatcatttctgagcctccaaattg

SEQ ID NO: 32317 - DNA, 268 bp, Glycine max
agcttgaattttttcctaaatatatttattgtcacatttaaaatatcatttaaaatctgttttggattatatatcaaaatgttatgatccaaccttaaccataatcatgactaacataagctatgtttaataagacattttagttaattctttatttttattagttgaaaaactcaattgttcaataaacaagtttttttaataccttctaatctttgatatcttttctaattctacattttctaagtactctaacatctaactttac

SEQ ID NO: 32318 - DNA, 421 bp, Glycine max
  unsure at all n locations
acccaacccgggcatagtcagtcagtgagaacctgtgatgtacctaatcaggcaagctcctggcagtcaaccgataaaagaacaaagaccacaaagcagggaggcttgtgtggtggctggccagcaatgagtcttgagtgagatttgggatatggcttctggtaatcgattaccaagggtaggtaattgattacaaggcttaaaagtgaagacaggaagctaagatgggctctggtaatcgattaccaagggagtgtaatcggttaccaggcttgaaaatgagatcacgaagctaggagggcttctggtaatcgattaccaaggggtgtaatcgattaccaggcttanaaatgggactggaatgttgaacgggcctctggtgatcgattaccaggctgtgtgatcgattacacagaggaat

SEQ ID NO: 32319 - DNA, 397 bp, Glycine max
  unsure at all n locations
agcttgtatgattatggggtacctatcacatgtggtactaggtggcggtcgggtgatggtgcacaacaagtttttccacatccacaaagcgtgcataaacctaccatcccctgttgcccacctccaactgagctcacgtactcccacgtagcccatatccttgtttctctcaacaccgggtccccatcaatcctcccaagcttccacaacatccaagtaatacaacatttaaacagcacaagctatcacagcaaaattcttctgcacttgtgcaaaattctgctgcacaatttcacagcaaaaatctgcacaaagtgcagatttcgaaaaccacacttccnctcatcaaatcctgcccaaatcaaatcctacaagtcccaaatcatgtatcaatcat

SEQ ID NO: 32320 - DNA, 410 bp, Glycine max
  unsure at all n locations
cttctgtgcgaggcattttctgtaccagcagcagagaaatatgagtgcttataaaaaacgtgcttctgggggtgttggtgtgccccagacaagaggaatgaaacaaagaaaaaaacctgaaggtgatttggaaaatggggttgtgggtgctggagttgttggcgccgatggtgatggcgccgatggtgatcacactggtggtccccatgttgttgaggaatttgctgggctttttggtgaagggcatgatggtggggtgaatcttggcttgggttgtgaaagttttgacctttggggtgaagtagagggtcagcatgttcatatgggtggctttgggggaggatgtgggaaactgggtcangttgaagggcaggttctaggtcagccatggagcaatgcaaatgctggtg

SEQ ID NO: 32321 - DNA, 381 bp, Glycine max
agctttgttctttttataaaatgagaagctctggactcattacgttatctaaaaatcttggggtggatccaagtgctccgatcatccatttgcatactcatgtttggcggcatactcaccgttgttcatttctttacgaattccatcataactaagaaaacaccaaggcacccctataacactcgatccagaaaaatggataatgaagagggcgtgcacgaacagatgaaggccgatctatcggccttaaaagatcaaatggcttccatctcggaggtcatgttcaaactccacaaaaccatatatgataaagccaccgcaaccgcctcagtacagctagggaagcggagccgtgctgaacccgccttaatccgggcctaa

SEQ ID NO: 32322 - DNA, 439 bp, Glycine max
  unsure at all n locations
cttgaacatacgaccttgtaaaaattaatgggaattggtttctacgatgtttgagcttaaatttttacttcattttctataaatctggaaaacaattataaaaaagaaccaagtgatttagataaaagaaaaaaatatgaaaaatcacacaagttggcaggaaaatcagtgtctaggaaaaaaaagtgaaagggaagtgtgaaaacaagtgccaaaactagaggtttcttgagtcttatttttcttttagtttttttactctactctagagccattttaggtttccctttgagtcctagcttgcttttatgtgcttttcattgctttaattgttgaataatccttgaaaatgtcttgttaaaactttattggtttagctctcatttcattctttntggnctttggntattgcttgtctctttgttttcttggttgtgag

SEQ ID NO: 32323 - DNA, 271 bp, Glycine max
  unsure at all n locations
agcttcttcttatagtccacctttgcttgaccttctttatgcttaaaaatagaaacattacgcaaaagatcaagaggagttagtgggttaaaaccataaacaacttcaaaaggagaacaattagtggtgctatgaacaactctattgtaagcaaattcaacatggggtaaacaagctctccaagtttttaagttattcctcanaactgtcctaagcacagttcccaaagtcctattaacaaccttccgttgcccatcggtttgtgggtgac

SEQ ID NO: 32324 - DNA, 406 bp, Glycine max
  unsure at all n locations
gtggtcttcggcatcacattttaacttgatccatcggcgataagtaccgtggcgacgacatggtccatacatctcaccgacacatgtagagccttgttgtgtcctctcccctcaacgggaatctcttctttcgcaaacacgatataattgttggcggttatatgattaacgatgccttcgaaaccctccactgagatatcatgtgctacatgggcatcgataaggacctttatcaacagcgcacgatgaggctcggagtttatgagcagatcaagcatagagatccttgttggagttttattcaattgctcgactaccttaaactcgctatgctggatgaggcagaggaactcatgggcctcttncaaagtcacggtctttccttgaagacctctttcttttcaag

SEQ ID NO: 32325 - DNA, 200 bp, Glycine max
ttaagtttgtttgaaggacaggttctcattatacaaagcttgcaggaactacttcactccagaccaattatgggtgtagagcagttcgttgagaacgtggcctgcccaggagcccgaccttgtttcgtggcggataatgaaagttctacagcccaggcaactcagaaacatgagccagaaccagaaaatgatcactcatc

SEQ ID NO: 32326 - DNA, 427 bp, Glycine max
tgcttctacattctctcttgaagagaaggatattacttttgaagtccatagagaaactcttaatggatttgcaagtgtttgcccaagagtttcttttgagagagcatttggcaatgaatttctctggaatatctctctcatttccttttgagaggataatacattttgaacaagcaaaactctctctttaaaattcgtgcccaagttacctatttgtaggcctttgatggccattcacaaattcaatcaaaagatatgactgttggcagattttctgaaaactctccattggtaatcgattacacagttataatttgaagggttatgaattttgaatttgaatttccaaagttcctttgctggtaatcgattacaaacatatggtaatcaattacatgttcaaaattcaaaattgaaaacccttttc

SEQ ID NO: 32327 - DNA, 251 bp, Glycine max
agcttgtttacaaaaacctatttggtttcgattagcttatgagaagaaagtttagggactaaatcccatacttcattccttttaaactgatttaattcttcatgcaaagccaacaaccaatgctcatcatgtagtgcttcacatcttcatcttccacagcattttcttgaacaagagagttagttccatcacaaacaacatgtacatattcttccacacataatgttcttctattaaacactctatatgcc

SEQ ID NO: 32328 - DNA, 426 bp, Glycine max
ggaaagaggaaagcataatcatttcttataagacatttaaaaaagagacaagaggtagagtttcaacggatgagacgaaaaccagcttaatttacaatacgattttcagtattttataatttgtagcagtaccacctattagggttggggtgtgggcatattctcatagacagaaaatgggtgacatacgcatgatatgataagcttacattacgcaagtaatttttttttatatatattaattatagtatttcgtaaaatgcgctgtgcttttctttttataacttttagggtacgaaaatacctttgtttaagtgcacactagctataccaaaaaattacgatagtaaaatgtgtgttttattaaaaagtacgatagtaaaatttattaacggatatatgagcatagtcttttatttaataaaa

SEQ ID NO: 32329 - DNA, 273 bp, Glycine max
ttctgtttatactaaatatatatgattgttttatatatagattaagtttaaaatacattagacttataagatgggtttcaaaagtattaatagaatgaaattttaattagcatgttacgtcaagttaattacggtattgaaaacaaaaaaaatgtaaacattcccatagtgcgcaagttaattacggcggccactttatttttaactttgcatgttgtttccatatataatgaaacacattaatttgaaaatgtgcatggaggagagttgttt

SEQ ID NO: 32330 - DNA, 427 bp, Glycine max
  unsure at all n locations
tccttattntgtaaaaacacttcctttgaaaaatttgttcttgcccaactcttttcttccattgttcctccacttccttgcttttggatgctattcatggagatgggtagccaaaccctccgttgttggggttagatgtatccgaaccatatgctctcatgtatttttttgaaatagtgttatatattcctcttattcttcaatgttagctttttacttctatgcttcatgcttgttatgattcggccactcatagcttgattcttggatgagtttgctattggaaaatactttctttatcttgaattgtggtaaaaggctcattaaaccttggagctaggaataaggtgagaggtaatggttatctttgggtcattgagcttaaaccaagttcctttgttaaatgttcaagggattgacatttaat

SEQ ID NO: 32331 - DNA, 347 bp, Glycine max
agcttaatacccaaaatgacatctataggaccaaggtcctttatatcaaaattactagacaagaaagacttcacatcatttatgaaatgtatattactatcaaatatcattatgtcatctgcatacaaacataaaatgacacatccaatatcatcaaattgtttcacatacacacatttacaactattattgatttgaaaaccatatgaaagaacaacttgatcaaacttttcatgtcattgctttggagcttgtttcacaccacataaaaatttacaaagtttgtaaactctcttttctttacccgattctacaaaaccttacgttagctcatactaaattcttct

SEQ ID NO: 32332 - DNA, 159 bp, Glycine max
tcaagcttttggtacaaagattaagaacaagttcaaagagatttatggcttgtaaaagattgattgaataagtgttcaagatacttggaatgcaaaacaaagccttgcttttatagactcttcatgtctggccaagacaaccattagaagagttatgac

SEQ ID NO: 32333 - DNA, 411 bp, Glycine max
  unsure at all n locations
tcagaccaaagcattctanaatctatgtatctaaaattcctcaatttagtggatttcaaggtttgagaagtgaaaatgagaatggggtaaatttggagcaaactctcacctcacacaagtctataaccttaatctaaacttgctcaaactggttttacgcctaaaattccaccgaatcaaaatttgactcctcaacacccagtttaccctagaaatggctcttgccttcactttggtcattcatttttctcctttgcacagcccaagctttcccatagtcctaaatgacatttcaaactatgattaactccctttaacctccaattactaacaaatccagatttaacctttcaaactctcaaagcatcacttttttccactcatagcactacattctcactttctaaccct

SEQ ID NO: 32334 - DNA, 164 bp, Glycine max
agctctgatgtttgtgttgaatgcattaaaggtaagctgaccaaaagcaagaaattaagtgcatatagagctacaaacgtcttggaattgatacatacggacatttgtgggacattccatacaccgttatggaatggtcaacaatatgttatatcatgcataga

SEQ ID NO: 32335 - DNA, 418 bp, Glycine max
  unsure at all n locations
tgcctcanagaggtccaggaaggacaaggcggccgaatgaactagttccgccccggagtacgacagtcaccgctttaggagcgttgtacaccagcagcgcttcgaagccatcaagggatggtcgtttctccgggagcgacgcgtccagctcagggacgacgagtatactgatttccaggaggaaataaggcgccggcggtgggcaccattggttactcccatggccaagtttgatccagaaatagtccttgagttttatgccaatgcttggccaatagaggagggcgtgcgtgacatgagatcctgtgttaggggtcagtggatcccgttcgatgccgacgctatcagccagctcctgggatatccgatggtattggaagagggccaggaatgcgagtatggccagaggaggaaccgg

SEQ ID NO: 32336 - DNA, 303 bp, Glycine max
  unsure at all n locations
agcttcgcacatgataatggagacacatgaacagcgctaggcaatgacattcatggtgctccgaacaaaggcggagtatggaggattggcttgagggtccacacttaggcaattatgaaactcagctccaaactcgaaagtggaggacacacgaacaaccctaagcaagaacattcatgtggctccgaacaaggacgagaatggaggattgccttgagggtcctctcttatgcaatcatgaaacacagctncatactcaaaagtggaggacacacgaacagccctaagcaagaacattcatgt

SEQ ID NO: 32337 - DNA, 437 bp, Glycine max
tatgctgcaaacatttataatagaccctctcagtagcttaaccaacatcagtagaataattatgatctttcaagcaacagatacaatccaggttggaggaatcatccaaatctgagatggacaagtcctccataacaataacagcatgtccctcccttccagaatgctgctggtcctagcaagccatatgttcctcctccaatgcagcaacaacaaagacaacaagcaactgaggcccctccttaaccttccttagaagagttagtgaggcaaatgtccatccagaatatgaaatttcagcaacagacaagagcctccattcagagtctgacaaatcagatggggcagatggctactcagttaaaccaagcttagtcccaaaattctgacaaactgccttcacaaactatgcagaatctgaaaaatgtgagtgtcat

SEQ ID NO: 32338 - DNA, 435 bp, Glycine max
  unsure at all n locations
cttgaaggcgtgtagctgatgtgccatcatcttcttctattttctaaattctttttgcaccattntaattattgattggtcttaattgtcaattaattacgcagttttattatttgggcccattcagctaatttgatgtttttaatctaatttcacgaattaatgaagcattgggcttgaatctagaattgggcttggacttgaagagggcagtctaatttaaaattagatcttatcttatctagatattatttagatttgatctcatctagatattatttcatctagatcttatcttatcttatcttatctagatttgatttgattttacttatgggcttggatttaaaacatatttgtaagctttggggctgaaaaaaactatataacagcaccaaggttctagtttaggggactccctctctccctcgcggg

SEQ ID NO: 32339 - DNA, 272 bp, Glycine max
agcttccatttagtggtaattagagcacaagagcttgaagtaggtgctccttaaacctccattaattttttgctttaccttctcttccattgttgcttcttcattttttctccatgtatctcctcacatgtcttgtgctaaatgttgttaacatgagtctttatagtttccaccgattaaacttgctatagaagctagatttgattttctatggctcacatttcttgttctttgtcttgaaccatgacttgtgctgagtctaggttcctttg

SEQ ID NO: 32340 - DNA, 440 bp, Glycine max
  unsure at all n locations
ttaacatanaacttcatttcattcatacctcaccttattcatgtgcttgagtgcattattcatgagagaaattacaggtgccaaaagggagagacataaaaacaaaaaaggtattgtgaaagggagagatggagataattcaatgtgagaaagaagtggagagacatggattagtttattttctttttaaggtcttttctaaaagttaatttccttttaatggatgcgatgacatgtcaatatagataaatttcattggatgtttatgtaaatagattttataatgtcaatgcatatatattatgagttaatggtcatgcacaagcataaagtaaatttatcttatcatctaattacaaattattgtttagatgattcttaagataattattgtaaaagtcaataaacttatcgtacatgatcatttgtaattaaataac

SEQ ID NO: 32341 - DNA, 334 bp, Glycine max
agcttgaatatttacaatatcttgctcgctgtctcaacgaatgctcctgttctctccacggaagcaactataacgtggcaatggtataaattgcttaagggagaaaatcttattggaaaacatttcaaccatcctccggatgatccatatggttcttggtatggaaactttacggtgccccttgaaaacccattcccagccaaaactaaaccagattccttaaaaatgagttctaaaggctcatctgatgatgacattgctgggtctgaggatgcgagtccgacaagtcacgacagatacacaacttcaatgaatcgctctgctggaaatgatc

SEQ ID NO: 32342 - DNA, 420 bp, Glycine max
gctactatggtcaaaggaaaaaaatcaacgaaatcaaaacatttgttgtggcattgtgcctgctgcaatttaagggagatgagaaatgaggcttatgatgggcaaaaatgacttcaacattctaagattatctgccttgggcttgatgtacgataagccatagatagtgatctgccttgttttcttgggcttgatgttagcctatttaaaaaatgaataagctgcaaaaccaattggagaaagtcaagtctcttactcaagatcttgaagaagggcttgagtttctatttaagcgtgtgataatgattggacttgcctttcttattcccttaaaacactaacaagtacccttaaataactacactgcccctcaaataccaacattatactaactactgttcagcttcccaaaatttatat

SEQ ID NO: 32343 - DNA, 313 bp, Glycine max
agcttttattattgacatcagggttgaagctaattaaattctatttgtttgtagaggggtatatggctacacctttgagcatgatgtatttatttttttaacttggtgttatttttttagttttactatgttagcagtttttgttgttcttgattgatgcccctttgtcaccttatgaattcttgtattataattgtcacaacctacctcacgacaggatggcgaagaccaaatagataagccaaagcgttcgtcttcaagggagaaaatgagcggagtcgccaccaacgtttattcgacaacaaaatgttac

SEQ ID NO: 32344 - DNA, 427 bp, Glycine max
tctgatcacctggagcacctccaaatcgcattacatactcttgcttacaatagtttcgttttaaaactgtctaaatgctcattcgcgacccagcaggtggattacttgggtcatctggtctctgtgaagggagtagaacgagtaccggaaaaggtcatagctgtgcaacaatggccgactcccaattccactcgtgccttaaggggattcttaggcttatccggattctatcggcgtttcattaggggatacgccaccctcgcggctcccctcacagctctcttggccaaggacaaattcaattggaaccctgaggctgatcgtgcctttcatcttctcaaagatgctctgtgtcaagctcccgtgctgcgattacctgactttaattccgaatttgtgattgagactgatgcctcgggaattggta

SEQ ID NO: 32345 - DNA, 202 bp, Glycine max
  unsure at all n locations
agcttacattattaccaaattaaagctagatagatctagtttactgatttactacttgcaaaccaattgcttaatgttgtgaactgttaaaagcgttatcaatggcggcacataaaagctccatgacacaaccacttggagcattttctttatcctatctttactctatcgcgtagntgattaagtattaagttccatgaca

SEQ ID NO: 32346 - DNA, 438 bp, Glycine max
  unsure at all n locations
actcacgcttttatncacacagttcataccacctgttatcaaaccaatatagcatctagtttccccaccccccctaagtctcactttttaatctatataaacaccaaaactcacacttacttgtagtcatagtagcaagttcaactactgatatcatatcacaaaacaatgaaggattattagggaagtttgattagttcgaaactgcagcaatttattggaaaaaaaacaagcttgcaaatacctagtcacataaaaacatttattgaaaaaaaaaacaagcttgcaaaagctcataaaaatgagaaaagaagcaaacatgtaccttgcgttgatgtcagactccaacggaggatgctcaacctcgcaatagtgacaaaccccaacggcggtcataaaccctaacggcaatgatggtgaggaggagacgaccatgat

SEQ ID NO: 32347 - DNA, 223 bp, Glycine max
  unsure at all n locations
agcttttatcattagtttacttctgagttgtgtaaacttggctttcttcaatggttttgtcggtaaatcagcaagattatcttctgatttgcagtagatgagcttgatttttnctttgtcaactttgtccgtgataaaatgatacctagtatcaatgtgcttgttgctcccatgatctacagggttcttagcacgactgattgctgacttattatcaatcagt

SEQ ID NO: 32348 - DNA, 437 bp, Glycine max
ccgcttgaagttgaagaaactaaagtttgtggctgcaatgaataagtcgtagaacatggatccaacaatgatggtgaagaacctggttataagcaacattaccattgttacctaaaaccgaagagggccattggggccaaagacccattggaagcactttcagagaaggaggcattgctattccaggccaatgaagaaaaggaaaatgcaaagaagaggccaccctcatgaatgagaaaattgcttggcttcagagagaaaagaacttcaactccaaactccatcagctgaaaaacatgctggaagaagtggtacagggactgagtaccatgttaagtgaattaagtgcaatcgccccctaattcatactaggtttaattccatattttgtcccttgcttttgtaaccattttgccaattctattacaacgtttttt

SEQ ID NO: 32349 - DNA, 239 bp, Glycine max
tcaagccttgcagatgttaagggaactgatgggagaaccacgttgctccatttcgctgctcacgagattgttcgttctgaaggaatccgagtctcagacagcattatggcgaaaatccgccacagaagtacgaccagaacggacgaagagaccgaacaacattaccaaacgatgggactacaacttgtttctggtctcagcactgagctatacaacgtgaataaaacagctaccattga

SEQ ID NO: 32350 - DNA, 421 bp, Glycine max
  unsure at all n locations
atcgtttgattgcgggatatcctactatgcccttttctactaacgtaacaactgtgtacaaacgatgcggacagatcttcatagcggttgctcttgctggactcacatcagaccttgacgcaattcgcaatcagatattatcgagtgctacggctcccacctatgacttagttcatgagcggctgctgtgtctctccattccacataccttcggacccttttccacttctactggggattcctctgcctttgtctctcactcctatcatcatggacgacgtggtgatggtcgaggtatacactgccactactgcatgaactgtgttcatgctgaagaagactgtcacactcaagcaagacacttgtctcgatgagttaatgtggcccacgngaccaccttcgctcagagatcactatctct

SEQ ID NO: 32351 - DNA, 365 bp, Glycine max
tgacattcccataatgtatcgcctaacattccacttgtgatctgagtgatcccacttctcctaaaggttgctatattcataggtactacaatctgtacgagaacagggcttctcaatccttgatgccaggcctacatccatgcactcaagacccatttgcatgttctctctccagtaccttgaacttcgaccattaacaactggaaccgaatctacattatcatatgcagaagccacccgcgaccaacaccacccccaaacatacacaaacctccataccattcatcaatgcatctacataatgatatatctcatgccacggatgtcactgcaccacttatatgacgtcttcggacagggacccc

SEQ ID NO: 32352 - DNA, 440 bp, Glycine max
aacactcccgcttgtgagtgacactaattagaagttgagataagcgcatttgagtttgattattggcaatcggaatctggcattagttgctatctaagttagagaatctcatacgaaatccataaataggacccattatctgcttttaaacttgggtaggtggtcttagatggagacgcacttctttagataccttattctcaatccctatgaagcaatgggtttgaataagaagtatatggaggcgaattcctttcaaacatagatcagggctaagtatatataatttaaagaacactactaggctattgaatgtcaaacccacgtcatgattaactcctacatgattgatgttttcggccgcctgaatagttgaattataacaaatatcctgtaactttgacatattgttatatatacatgcaactcctttctcccaa

SEQ ID NO: 32353 - DNA, 251 bp, Glycine max
tctatcttgttacaactagtattctttgccctaccaagccactgttgactctaacatacatcacaagacctgttgatctgattgcaaaatgactaacactctatcatattacagacacataaacaatttcaacacttactcttttctctcaaaatgagcacagtgtttcgagagactatatgaactttacaagaatccacatagagagctttttacgaacagaatttgaataatgagcgctccaattcata

SEQ ID NO: 32354 - DNA, 417 bp, Glycine max
tcttatccaaggcttatcttggttgtgaactccttcttccatggcttattccctagtggatggtgcctcctctcacctcttctcatttgtcttccgctgcatctccatggtggaaaatcaccattataggacctcattgaagctgaaagatccagcctccatagaagccccacaagcaagcttccatcacaacctttccatcctatgtagagatcaatgatattgaataacccaacaaaaatattagatggcttacagagatgcaaaacataacatatatttgacatatgatcttataacatgctatgattttggatttttactacctaacacatcttgaatcttgtcacctaagtacatcaactaaagtgcttgatatcttttataaagtaaaccatcgatacataaatataatat

SEQ ID NO: 32355 - DNA, 207 bp, Glycine max
agcttaagagatagttagatcaaagagcacttagagaaacaatttgtgagacctagtgtagcgtgtcaccctgcggagtgtcggtgttgttagtcaagaagaaggatgcgaccataaagctatgtgtagactatcgtcagctaaacaaggtggcgattaacaataggcaccctctgcctagtatagatgacctgatggactacttag

SEQ ID NO: 32356 - DNA, 419 bp, Glycine max
ttatatgattatgatcatgtaacttatcaaagaaacctaccttgatgcatgcatttttgttctgaaacgaaactaaagaaacaaaggaaagggagaaaatagaaagctaagttctaagatacaaaatgcccaaggcatttgtcggggaattcgaggggagtaaacaccagacaaatttacaccaatgagccatgagcaaccacataagggaatttaacaccacactttaacccaaaaccttaaggctcaagtttatgggtcttctccttacttatatggtgctcaacttttcaacttccatcctatgtgtgctcaacttttatgggagcaaaagaagaagctccatgctttgtcatccagtcagcacagtcaatggggattcatcttcataacttttgagaagataaaaagaaactctg

SEQ ID NO: 32357 - DNA, 183 bp, Glycine max
ctgcttcgtaaccttcgtgtccatatttacatctctgctattctctagttgcgtgactcatattatatgggtactacccgtagcatctcttttactttgatgcctatgatctattgcacatatcgctgggacgtctatgtccgatatgattaaccgttgcccttcatgggatgggagcttgac

SEQ ID NO: 32358 - DNA, 420 bp, Glycine max
  unsure at all n locations
tcagctntgtccccaaggcttcatgtagactcgtccttaatcgcgaagtgaacctcggatccctgtcagatacaatactagaaggaatttcatgcaaccttactacttccttgatgtacaactccacgagtctctccattctatacttcatattcactgggataaaatgagcagatttggtgagtcgatctactatgacccacacagcatcatgtccacgactagtcttgggtaaactagatacaaaatccatagatatgctctcccatttccattccggaatctccaatggcttcaattctcccgatggtcgttggtgctcaaccttagccttttgacaggtcaaacatcttgctacatattcggctacatctttcttcatgccatgccaccaaaaacttctcttcaaatcttggtaca

SEQ ID NO: 32359 - DNA, 351 bp, Glycine max
  unsure at all n locations
agcttgcttcagtataataggaagcaccaatataaatatgttgatgcctactattgatatatagcattgaccatacatgatactagctagagagaatagaaactattgataatagtacactccataggtagtaaaccacaaaaaactttagtggcttgcataactttagttaaatttagcggctnttaatgcttatcctatatatattataatgacataagtatttctaacttgttacctcctaagagattccctttggagtccttactggtnntgtaatcttttaactgaaacattgcattttggccatgacgttgatacaccgttgactattttttataagctaacatt

SEQ ID NO: 32360 - DNA, 426 bp, Glycine max
  unsure at all n locations
tctccccaattntctataaatagggggagaagtgatgttataatgattcagccctcctggtaattcagaatcacttaaaattagtgagaaaaattagttccgtgaagaaaatccaagccgaggcgcttccgtaacgtttccgttggtgatttcgcgaaggttttcgatcgttcttcgacgttcttcattcgttcttcggtcttcaaccggtaagttccctagatcgaacttttcaattcattctatgcacccttagtggtcctcatttgtttttacgtgctttcatttacattttatttactttccgtacccctttttgacgtgctttagtcatttgcttaagttattttctcgcctaatcaaaaaataaaataaatttccaccgatcatttgaatcgtaatatcccgtgatttctgttaaaatga

SEQ ID NO: 32361 - DNA, 234 bp, Glycine max
agcttccctctttcaccaaaagaccaaattagatctcaagcttccaccaatactgctctgaaacaattgacaccatatatagtccctactattctctacttgcatgactcatattatttgggttctacccataagatccaatttactttgaatcttctgatcaatctgttatagtggtgtgaggtatatatccgttatgatcaattgcttcaaagcattgaaggggagcttgag

SEQ ID NO: 32362 - DNA, 420 bp, Glycine max
  unsure at all n locations
tggtgtagtatctgttcaaatgtttaaganttatggagaccgaagccccgaggatataggtcaccggatagtgacatcagcagcatcaacagggaaacatatgtcaaggtatatttgtagtatctctttctctatctataaccacagaaacactaacgcagtgttgactacttctagggttattttgagaattttgccaattgaagtctcatgttatgcttcaaaggaggaaatttcaagaacaatcaagcctcttgtggaacagtactttcctgtggaaactcaaaatccactcaaggtaatactatctattagtgtttcagtttgtattacattttatttttagcatgcattccacactacacaaatgttttcaatgttaatattatgaaattaatatagctgggtacgtatatttat

SEQ ID NO: 32363 - DNA, 280 bp, Glycine max
agcttttatgttgtaattatttcttattttggattgttgaaccgtacaagcgatatcctttccaataaaaatctatgtgtatatatgtgtgatgtgccaacgcgtcggagtggccacgactcgagagctctatggtatgtaattcattcatgaaagaaaatgagttaacagtgcagtgattattttatgactgtatgatatacgagaaaatgatcatgaaagaaaatacattataccacttacctaattttatgtatatatttatacatttaatttcatg

SEQ ID NO: 32364 - DNA, 432 bp, Glycine max
cgttgttggtggtgatattattgacgagtccttcaaagccttctacagaaatatcttgggccacatgagcttcgttcaagacctttaccagcaaagcccgatgaggctcagagctcatgagtaattccaaaagagagaccctggctggggttttgttgagttgttcaatgaccttgaactcactctgctgaataatgcggagaaactcgcttgcttcctctagcgacacttccttcttgccacaaccatcccttttctctggaagacctttcactggaatatcctcgttcggagtgagggtcgtcttgtcattgtgctcttccaccatattttcctttcccttaacatttgcgggtcgtgttggcaggtcggggggtgcaaacacgcgaccgctgcgggtcacaccgctcagccccgtgatattggttacct

SEQ ID NO: 32365 - DNA, 386 bp, Glycine max
  unsure at all n locations
agcttctttgagaaaacttccttgagaagctagagcttagctacacacacccctctcataactaagctcacctccttgagaagcttccttaagaagattccttaagaagctagagcttagctacacatacctctataatagctaagctcacctccttgagatgagaagctagagcttagctacacaccccctataatagctaagctcacccccatgacaaacaacatgaaaataacacacaaaagtccttattacaaagacaactcanaatgccccgaaatacaaggctaanaccctatactactagaatggccaaaatacaacgcctagacgaaggaatannctattctaactattacaaagataagcgggctcatacttagccc

SEQ ID NO: 32366 - DNA, 409 bp, Glycine max
  unsure at all n locations
aaaaactaaggtagttcctaaacttaaaccaattgaggaaacttcgccaaagatccccattgagaaacctttattcaaacctttcaaagttagtgagaaggctaaaagaaaaattagggaacttagaaaaactaaatccttaattgaaggcgtaggtgacaaccatagtgaattactaaacaagattggtagtttacttaaagtcattcccgataccccccaagcctcggaaaatacttccaaaatggtaacaagaagtatctccaaattaatcaatgttattaatgaagatagtgaccaaaactcagataacacaactgagataggatcagtgtcagagaagaatataaacccaattaattccaaacactggaagacaccctncaaattatattatcaacgtccaact

SEQ ID NO: 32367 - DNA, 326 bp, Glycine max
  unsure at all n locations
agctttaatttattatgttatggtaaccccactcagaacccatcaaacattaattgtattggattatagtttgcaaaccatggtttggccccaccaaaagcaacgctttttcacttctacttactcaaaatatgatttgagacccanaaatgatgttcatatttgcttatcatgttatttgtggatgaaacttatattgcactctccatactacggtttgcggtatacaattacaaacagacaataatacaagttcatgtaaaatcattacaaggcgttgcatgcaattcactagtgaaagcacgaatgaacaccctcttgaaaat

SEQ ID NO: 32368 - DNA, 413 bp, Glycine max
tgtaatgttgttgaatgacaaacctgcttgttccaaaagcgagcaatatgttgatgcaccttcaatacttcattcttatccattgactctcttatgttcatttgcctcagcatctccatttttctccgattgattgcattttctggattcttacagaatttgtccattggtccttttttagtcccacactttgtctttgcacttgcagcagcattacaagagtccgcaaactcatcttcttcacttccatcacatccaatcggttcaccaaattcaaaatctcttatatttgccatattaccactgccagaagtactgtaagtggtcccacttttttttgtagccatatattccttcaactcttcgattacatttgggggagttttcttgcaagctgcaacgttgcccaactt

SEQ ID NO: 32369 - DNA, 209 bp, Glycine max
  unsure at all n locations
agctttgaccaaaccccagcagtagttgttgccttagagacttacctcaacaccttgtctccgagactgaggataattgcactgtgtgccttctacagtagtgttttcttatccgcatcagccatcatcttttttgagtttggcttctccatcaagtgcttctaccaggcccctgtgaacaagaaaggctntcatcttcaattgccata

SEQ ID NO: 32370 - DNA, 429 bp, Glycine max
tgccggcgataagctcgtcgattccgattactccctttcgatccgctccaactgggtctcctccatggtggacttcgtgtggcggaagcgccgcgccctcatggcgcgctccttgatcctccccgtcgagaatttccgcgccaccgtgttccccgtcgtatactccgtcaaggccgtggcctccggtggcgtcgaggtcattagaaaactctccaaggcttcctctacctctgcatccaatgcggatgctgaggttgattcccacgcggagaagctggtgggggtttctgatgtgctcactcacctggctccgttccttgtttcgtcgttggagccggcgttgatctacgaggttgggatcaatatgttgtatctggctgatgtgcctggagggaagcctgaatgggcctcacaatcgatcattgctat

SEQ ID NO: 32371 - DNA, 322 bp, Glycine max
  unsure at all n locations
taagctttccaacgggcatcgcttcatgttagtgaccgttgattacttcaccaagtgggaggaagcagcttcatatgctagcgtgactaggaatgtggtgatcagattcattaagaaggagataatctgcagatatgggttgcccaagaagatcatcactgataatgccaccaatttaaacaacattatgatgaaggaaatgtgtgaggatttcaaaatccaacaccataatttcacgccttattagccaaagatgaatggngcagttgaggctaccaataaaaacatcaagagaatcatccagacgatgactatgtcatac

SEQ ID NO: 32372 - DNA, 415 bp, Glycine max
  unsure at all n locations
tggttcgaggtacttacccgttgaagatcgaagaacgttgaagaacgaatgaagaacggttgaaacctttgcgagattcctcacggaaaacgttacggaaacgtttcggaagtgcctcggcttagattttcttcacggaaacaatttttccaagcaaattcgaaggagagagaagtgcctaaggggctggacccctttcttcttcatttcctcccctatttatagcaaaataggggaggtggttgccgcccagctcgcccaggcgagctcagctcgcccaggcgagcagggttgcttcctccagaagcaaccgccttctggaggaatattccagagggcccaagtgggcctgggtgctatttgcacccncatctttactaagtacacccncctctgctgtttttgggtgattctt

SEQ ID NO: 32373 - DNA, 392 bp, Glycine max
taagcttatgcacggaaaatgtaattatgaaattgagatgcccgaagaaacaccatttcctagttaaccatgcattaggtaccatgttcaattattttgtttttaagtgaaacgggtttatgatcccaacatggttggctcgtggtgcctaacacatgaaactaagaatgtagtgtgaagtttcacgcttcccccttttttgtttttgttttgtagaggaaaacgcaaggatgagcaaacatatgcaattctgcagaccacacagtttgttgaacgcatatgcatgatgatgccatgaccatgcaaaatgtgaggctggaatatgataacgggacaatgcacgatatgtccattatgattgtatgaagagatgcttatgcgatgcttgatat

SEQ ID NO: 32374 - DNA, 380 bp, Glycine max
tgcttcaagtctaaaatgccctaagaatatattgttgtaaatggggcctttatctgtacaacaactttttgaaaaagttgaaagtatgccaattgtacttgacaagtctgagttcattctaaagatctccattctaaagaataattcttattagcttctgaaggtatattagaattgcattctgatgttgccattctgatgattagtttctgattagctttctgatggtctctcaaatacattttgatgttactgaggaaggatttcttctaatatacgttcctttcgatgaagataacatgatatgacaatgcagatagctcatctccatcaaaccaaacacttcatttaacatagatgattctgaagtagcatacttt

SEQ ID NO: 32375 - DNA, 232 bp, Glycine max
  unsure at all n locations
tctagcttggttttgggcaataacaccgggcctgacgtacccaaggtctcctgacccccgcgacatatctccaggcaccactttgcggtcaacaaacaaaagtaggaagactgactcttacacgctatttgacatcaagcctcatctgatgatcgcgggcacccggcatatgtggtactacgtggcgatagcgcgatggcgcaactcaactctcccgnttcacgagtcaaac

SEQ ID NO: 32376 - DNA, 427 bp, Glycine max; identical to SEQ ID NO: 32288

SEQ ID NO: 32377 - DNA, 315 bp, Glycine max
agcttatgttgatctcatatggtttgagcgtgcttgcaaattagagtgaccctgactggtctccctacgattttacctagtgagagtgacttgacttaccagtgtgtggtatgtcttgtcctacgcgtccgacaggatttttcactgacatggtaccacattgcatataggatcgagtcttagtatatttgttgcataacacttgtgtattgatcaatattgattgggtgagtgatatcgtgtcttgatccttaagtacgtgaatgatgcgaaaatatgtgacacgcgtaccgtcgagatatgatgttatgtgat

SEQ ID NO: 32378 - DNA, 493 bp, Glycine max
  unsure at all n locations
cgcgctgccgtgagacttcgtacaccgtgaaattcgtcacatctccngccagncacngacaanannattcaagtgagggacncgagttatgtctcttttatcacacaacatttcggggattattgtggaacatttcccgacacaagaatgtgcggtggttgggcatccatcctcaagcccatctccccagctatttgatgtaattcaagacagaggtgttagaaatcgacctggcctcttttctcatccatcggtccttcactatttagaacccaacacaatctctctttggctatcatgccacctagcgtcttttatcgatcgtatacgatccgtatagtggcttccatacaggccctaatactattctgattcccaatagcactattttctgtcacagtgcggactctgagcgcactaccttggctatccctaactgcctgcaacggtcctatacactgaacagctcaactcaggaacctgacccttctct

SEQ ID NO: 32379 - DNA, 248 bp, Glycine max
agcttgatggtacactaagcctcacatcttaggctaagcgcatatttcagaaaaaaatttggtgttgcagaaagctctaagcgcagcttgccgcgctaagccccaaatgcttacgggattttacaactttgagttgggcttagcgcgacgctaggctaagcgctagtgttttaaactcaaacttcacgttggcatgataagcccagctgagcgctttagcgcacatacgaatttcagtttttaaaatc

SEQ ID NO: 32380 - DNA, 407 bp, Glycine max
tgtcaatatagctcttctttgctttaaacttacttgtctttgattaaatttagacttagcctatagaacttgagagtgtaaatttaagcatagacttagtctatgcttaaattttcattgtggctgaacaactgaaaatatgtcacaatgaaaatttaagcatagcgttgtgaatttaagcatagacttagtcgatgcatgatcctttttttctctgaataaccttagcataatgtttaatagcacattaatctgtgttaagctgcatttttcttataacatttgaagggtctggctacattgagcacatagatatactgatgtagtagacttcacctcactgggaagaccccataatctacgcaaaaataagtttgattctgcatttactatcccaggaggtaatc

SEQ ID NO: 32381 - DNA, 217 bp, Glycine max
agcttggagaaaaacttgaagatatcctgtctattacatacccaactcctttgagtgatatttgcattgattgttataatgaatgttgcatcttagcccatatcatatctctcgatcatcatgcctcatcaggagtaagcgacaaaaccatttctatagttagaacatgtctctctacaagacacacctctctgttttaattgactaccaccttatt

SEQ ID NO: 32382 - DNA, 418 bp, Glycine max
  unsure at all n locations
nttcgattcattctatgcacccatagaggtccacattgtgtttagtgcattntttctcgttttgtttactttttataccccctgttgacgtgcttaagccattttacttaagtcgtttctcgcttaacttaaaaataaaataaatttccaccgaacgtttgaattgtattatccattaactttggttaaaatcaattccgactgttcggtcgtgccgtaaccacgttggaaatcaaaaagaggtaaaaaataatataataatcaaaaagacatcttttagtgaaataaagcggaaaatcaattggacattttctctttgggatttctcattcttaatcgaattgattaataactaaagtgaaactaaaggctaaaatcaatccacctagtcaagctcgtccacaaaaataggcttttg

SEQ ID NO: 32383 - DNA, 272 bp, Glycine max
agctttccacccagctcacccaggcgagcagggctgcttcctccagaagcaacaaccttctggaggaatcttctggagggcccaagcgggcctggctgctatttgcacccccatttttactaaggacaccccccttttctattttttcgtaactctttttctgtaacgttacaaaactctacgaacttcgtaacgatacttatcttttcttctgcaggctacgaacccttacgacttatgtatttactcttttttactctcaaagaagttac

SEQ ID NO: 32384 - DNA, 511 bp, Glycine max
  unsure at all n locations
cctcctcaccacactatctccacaaatactaaacctctcttctcactatgttcaatntgtttcataattacgcccgcnctangatcctgtgactcactatacnccanatagaatagtannggggaccttagagtaacctgtagcagccacatatttctttaaattaacaaaaaatcctatgagcatatgaaaaaggcacccacacaaacagccctgtagcgactaatctaaattcacataacccaacaataaccaattatctgactcccctcccccctcaccgcaatacacggacacaacattgcctccaaaaaatatcactcaatcaataagcatctgaatcgcaaatttcctctagatactatcatctaacaccaataagttactcaaacaaaacttctaactcgatactagtactcacactaaatgaaaaactattaattcaacaattagatttaaaacatctaatctcacgaatcttaacaaaataatcttgatacccgagtccacc

SEQ ID NO: 32385 - DNA, 399 bp, Glycine max
  unsure at all n locations
agcttgcatgatttacatctccccctttctcaagcaaattcttctttatatcatcaaaatcttcatgatttacattctccccctttttgatgatgacaaccacctgtacgttaggagcaacaacaaagaaaatatctatttgcatatacccactccnccttggttttacaatgattgcttatatgagacaattgacagattcatatttttcatatataaaaagttgtctcataaaaaatagataatcttttcttattattttatcttttatctttctctccccctatgtcaacatcaaacacacatcatgaatagagaggagaacaatgttactacttgctgtaatgtatgagactcaagtgataccacaggcattacacaaatcattcaatattgatc

SEQ ID NO: 32386 - DNA, 410 bp, Glycine max
  unsure at all n locations
tgtaggccttggatcttcttcatcaaaggagtcctttgcttcttgaatatcaatggccgcggaatggacaagaagaggagttgagaggagatgccactccaaggacaagatgagtcaagaataatctcaccaccatggactctatttatcgcccaagtgtcacacaaaatcggagggaaatctgaatctctattcaaatttcacttgaatttcaaattgaatttntggagccaaaatttcactaattatgattagtgaatgttagctatggttcagcccactaatccaagatcaagcctacactcctccactaatatgcttacgtgtcatgaggcatgtaaagcatgattgatgtgcacaaagtgtgactatatgatgtggcaatggcgtgtagcatgcacatgctcacc

SEQ ID NO: 32387 - DNA, 375 bp, Glycine max
  unsure at all n locations
agcttcttgtagaggtggagggcgcanatggagtgttggaggagctcgatggtgcggtggaggttgaagagctgggtgtttttggtggcaatagagtagtgaatgttggagaactcggagcggaggtgacgaacggaggactatagtgccccagcacaaatctaaggtgtacaaactctatttaattattttcctttgtcctttgccttgaccgtcatcaagaccaataaaaaaatggtcctctccattctcgttgtcattcttaccatcgaaaacattgcaagcgaagaaccaccatcacaacaagcacgactcagatatgagaaccacacatatccagatatgagaaatagtgagaaccacatcaagatctta

SEQ ID NO: 32388 - DNA, 465 bp, Glycine max
  unsure at all n locations
tgccacccagctcgcctaagtgagctaagttgcttcctccatatagcacctggaggaacttcctggaaggcccaagtgggcccggcctttntttgctgattctttttccgtaatgttacggaactttacgaattccgtaacgatacttgttttccttccgtaatgttacggaaccttatggattacgtaatcatcccttttttggctttcggaatgttacggaacctcacacattgtgtaacaatgcttccttctgatttccggcatgttacgaaacttcacggatcgtgcaacactccctcttttgacttcggcacgttatggaactttacgtattgtgcaacaatgggtgccaagtacctcgaagcggtcaagatgcaatccaacctcncaagggcattggatagaagactccaagaagaatgagccccagatgcaagagaacgccctanggttctcatgacc

SEQ ID NO: 32389 - DNA, 356 bp, Glycine max
cgcttgtattactttgttcgcatattcacttatctctgtaggacatgctataaaggctcatcgcaaagttctatgactctatcttaaataaattataactttctagtatataacaatggcagaaagacagattgttcttgcctttgtttcctccccacactggccaaatcacgtgatgatggatattgacccgagtatatacattttggggcctaacgtcaaaaatatttatgggatctctcttttacaagaattttagagaaacttactatatcatataaaatatcaatctttctatccctctcttaatgttttcagctgcatattgcgacattggctaaataacataccttacg

SEQ ID NO: 32390 - DNA, 128 bp, Glycine max
tatagtattcacactggtaaatcatgaccactgtgtaaactgaatatcttacgaagtgctcgcgtgcagtagccctcatatctataaataatatgtggctgagaacaggggactctactcatcatgat

SEQ ID NO: 32391 - DNA, 388 bp, Glycine max
aaacaactatcttaatgagctattgatcaaaagacatcccacacaatacatgtccctcgctgtctgatgataacaacacacttgtacaacacgcacaaccactaaaaacatttttatcccgcctacctgccccaccgccgccgttacaattagacactatattactaccaaaaactaatacccacttacccagctattagaggcgaaacttctcctcaaaaaccattacttaaatataactaacttaatacaaattacaccccttagaccgaacatacagaccctaccacaaattgaagagaactatctccttatcacacaatagattaaaaatcattcgagccctacgaaccctaactcaaatgattcttcacactgcaatccaccc

SEQ ID NO: 32392 - DNA, 160 bp, Glycine max
  unsure at all n locations
aacttgaagcctgcatggcagaacaatctaacgctacacgcgcatccgaggaaatgatcttgacacttacccagctgacatctgaaactgacaattcaancccctaaccacaccatatgaataacaggacagcagaattaacgaaggaacttcaagataa

SEQ ID NO: 32393 - DNA, 412 bp, Glycine max
  unsure at all n locations
agcttcctatcaaataggttatatttaacctaactattattcagatatatttgaatatcttgcctattactaaatactaaattatctataacgtcatattatctacaaggtacgaatatcatcgtctacctttatttgtcattcaacgcacctctctaacattatatctaagccattggttattatctataacccatgaatcatctccccctacaaacaaggactagtacccttgctcattcactatctataaatataggttccatcaaatccatttacacgacctgctctcacacactcaacacacgacaacaaagtntgttcccctctctttcgcgcctgcgcgcacgcacgccacaccattatcaaatgtggttttgtcgtgcacaacaaaaaaaaataacacattatg

SEQ ID NO: 32394 - DNA, 223 bp, Glycine max
actaggaacattctatggagaggtcacgctggatccgaagaggtatgtggctgagatggcgggactagtacgcccgatggagaccagcctgcgggcactccttctacagccatacaccatacatgccgcgcaggatcgtatcatattacttgctgctagatacggtgcactcctgacgacatgcttgctcccgactaaggatatagagcctactctaaagtcc

SEQ ID NO: 32395 - DNA, 612 bp, Glycine max
  unsure at all n locations
ccgcactcaccatcctcgttactaccattgattgntaacgntntagtgagtccgaccaatacntaactacactatactatatctcacntannnntaaaaaccgccgcgcggagnngnttggtagtacatcntcgactactacagangaattctaacncgtacgcgaggatcctatagagtctacctgcacgcatgcatacttgtataaagatatatgtccgatctactatgcaacgatgaagggctttacaggatgaatcgacaacaccaataaagaatcgactgacgcaagctaactgatcaaataatacctgccacgtagagcaatagtagttaaattcccgccccccccgcacatcgcattgctgcaaatatggaggataaagctcagatattcggcccaataacataggaaacttaccatagcaatgtccaaccactggcttactaactccatctgtaccgcatacatgacacctccgctaaatctcgtttctatccacaaccgagtcataaccaagcgccaataatgcgccaccgtccgtacataacctcagtcttcgttatacaaagagacccaccctaacagcagacatccacagtctacaaccg

SEQ ID NO: 32396 - DNA, 494 bp, Glycine max
  unsure at all n locations
agccgcgcgcngggtgattcgtgcatgcaaacgtacattaaacatgccctgtgacataacgaggaagaggatctcttttggcatcttaacggaccctctgttgagggctgagagccaggcctctctatgcagatcattctcacggacagctacgctcagacaaactctgactgagatccgtcatgccataagagacgatactgccacttacagttttaatgcctcatgacatattgtaactccccaacatgcctaatctcaatgaccaccttacctaacttacttcggactatccgcatagaacgaacactttataggctgtcccaaccccaccccgacacactacatgctataatagttaanatcctaacataacataataatggacgatcaatacctctatatgaaaatcacccatgacaccccccggacaagcgatatatctatcgaacactggactcttactcacgaaacgccatggtgtcttccgaccg

SEQ ID NO: 32397 - DNA, 369 bp, Glycine max
agctctgatccaaaatcctgactcaccataaaccttgacccagggtgagaatgtcaattcttaccctcggaagcaaaataaaaaagggggagagggacaatttccaatcaaagaggaagcaaaaaaggagagaaggaaaattttcaccccacgaaaagaagagaggaaagggaatttccaatcaaagagtgcgagatagcaaaagaaaagaacgaaattcccaatcaaagatgggaaaagaataatgagaggaggagaaggaaagaaactcctgacaatgatcgacagaaacagagaaatggcagagagtctctgaccagacatatctgaacaatacagaattgtaccaatgaacaaaaaaagaaagga

SEQ ID NO: 32398 - DNA, 409 bp, Glycine max
tgcttgtggagcttctatggaggctggatctttgagcttcaatggggtcctttaatggtgattttccaccatggagatgcagcggaagataaaggaaaagaggtgagaggaggcgccatccattaaggaataagccatggaagaaggagcttcaccaccaagatgagccttggataagaagcttggagatgatgcttcaatggaggaaaagaaagagagaggggggagcacgacattgaaggaataaaagagggagagaagtggaactttgaagtgcgtctcataagaattctctcatcatagctgcacaagtgttacacatgcttctatttatagactacgtagcttccttgagaagcttctttgagaaaacttccttgacaagttacagcttagctacacacaccca

SEQ ID NO: 32399 - DNA, 206 bp, Glycine max
  unsure at all n locations
agcttactataacgagaggtgtgcatgaacatatcatgcgcttaatggacataatggctccactgaaaaccctgnaagttatcatgtctgaatccttcctggcacatttcattctgtgcaccctatctcaataatatacactcctttccctctcccacaacacacataatgataaatggtctattaatgaattgatgaccatgtgt

SEQ ID NO: 32400 - DNA, 368 bp, Glycine max
tgctccaaataccaacaattgtctcttactttgagaacttttacaatattcgatttccaagattcaagatgatggcactatgtgccttgtccaccattgtcttcctttatgcttcaaacattttgttctgaatagctttttctccacccaatatctgatcaagatcttgtgtaacaagcaacacctacatcttcaatctctatattccacaatcattttttcctgcgaatttctccacatcagactttgtagttgccataatcaccttgttgaaccaaccttttagatacaatcggccgccaacacttgtcacaatcacaactatttgattaacttcacccaaataaatcttactctatgataaaaaa

SEQ ID NO: 32401 - DNA, 373 bp, Glycine max
agctttgatccaaaatcctaactcaccataaaccttgacccagggtgagaatgtcaatccttaccctcggaagcaaaaaaagaaggaaaattttcaatcaaagagaaagcaaaaaaagagaaggaaaatttccaatcaaagaggcccacaccacagagagaaggaatatttccaatcaaaggaaaaaaaaaagacgaaatgaaattcccaatcaaagagtgggagaaagcgaatagataagaaagaacattcccaaccaaagagtgggagaaagtaataggaaggaaagaaagctcctgatcaaggatcgaaagaaatcagaagatatgtgcagaaaggtctttggaccggacaatatctgtacaatacagaa

SEQ ID NO: 32402 - DNA, 342 bp, Glycine max
  unsure at all n locations
tctggtgtgacatcttgacttgctttccaatctgacattcaccacagattatgccttcttctattttcagattgggaatgcctctaacagcacctttgtcaatgattttcttcatgcctcttaagagcagatgtccaaatctttgatgccatattttgacttcatcttctttggaggatagacatgtggaggagtaactggtttcttgaggtgtccatacgtaacacttgtcctttgatctgctgcccttcattagaacttcactcttctcattcgtcancaagcccctgactttgtgaagttacattgaatccttcatcacacaactgactgatgctgatc

SEQ ID NO: 32403 - DNA, 241 bp, Glycine max
agctttatggtgaatcaaacgtgattcaaaggtgttttgatgataacaatgatgataacaaatcgtgatgacaaaggtgatgacaaaaagctcaaagatcaatcaaagaacaactaaagtgaaccaagaacaattcaagagtccccatcagaatcaagatgagttcacgtctcaagaagaaagtctagagacaagaattaagattcaagggtcacagatctcaagaatcaagatcaagatt

SEQ ID NO: 32404 - DNA, 349 bp, Glycine max
tcaccactatctcttgatgttacaatagttgaccatgacggacttggtagcgtactcgacacgagagaatgacgttggtgagcacggggagcgaggatcgaacagtgctaactgatgcactactacaatttatgatataacgattgacggttaacatgagttattcacaaaagcgatgttaacaaaagcgcggaggcatcattgtagtaagaatacttactgaacatcagttacgtgcaagaacctttatgtcttctagacaaggtaagagttttacaaaaaatcctttctctcttatgacagaaccacaacactgagttgatgccagtgtcaataagtcatcttgatt

SEQ ID NO: 32405 - DNA, 411 bp, Glycine max
  unsure at all n locations
agcttgcgttctanatgatcgtatgctcgtttagctgcaaggaattttagtctttattctttgcgatcatttttttctattttttctaatttgctttttgcttgatcatttatgaggaaattagttgtgaaagataatgaatcaaaaactacatatataaaaaatgattttaaaaaattatctcaaaaaattaaagtcaaaacttttgacgacaataataaatatatatatatatatatatatatatatatatatatatatatatatatatatatatatatattatctatcatgatttatagtatattataataagactagaatatatattcttattacttcattcttctttaccaagagatataaaaatactctctattatttcattctttattactaaatgtacatact

SEQ ID NO: 32406 - DNA, 453 bp, Glycine max
tcagatactcttgcacatcagtggcagccatggttataagtccaatcagaaccttctttgaatctgcctgaatgagacactttgagagacagacatttccatatagactagccatagcctcaaggacacgctcttgaattagtttgttgtcctgaggctttaaaagagttactagaatatcctctatctgagttgcatcaaaatgtttctcatcaacatcaactttttcctcaaagaccatgagtgtataagcaagagcgccaattatatcaccaactggtgcctacggcgaggagaacggaaagttctccaagatatagtattaaagcagacatgccaccacagatattggctaaagctcgagttgcatgctcctgcagagcctggccaccatcaccttgcatacactcattagaaggagcaactatagcttccataacgattggaatacca

SEQ ID NO: 32407 - DNA, 414 bp, Glycine max
  unsure at all n locations
agcttgtaatgttcccccaatttatggttatttggagtaaattntgtaaataaatcttgttttatggttaacactgtctctagaacatttccattggatttaatgatggaatctatgcattttcaggtgaaaaagaggctaagttttgcacgcaaaaagtagcagttgggctaagcgcatatccaccgctaagcgtaaaggagaatctggcagagcatcaacatcaaagttgcgcgctaggcgcgagatcagtgtgctaagcgcagcaggtgccttcagccaggcttagcacaagactagcgctaagcctaattccacttactcgcgctaagcgcgagggtggcgctaagcgcaaggtcatgaattntgagcctatttaaagcctgttttgtgcaaaattagggtacagacaca

SEQ ID NO: 32408 - DNA, 448 bp, Glycine max
  unsure at all n locations
gcctcagcaaattccttatttccagaagggaattctatcaatagacctccaatctttaatggagagggttaccactactggaaaacccgaatgcaaatttttattgaggcaatagatctaaatatttgggaagccatagaaatagggccttatatacccaccacagtagaaagagttacaatagatggtagttcatcaagtgaaagcataactatagaaaaacctacagatagatggtctgaagaggatagaaaacgagtacaatacaacttanaagccaaaacctaataacatctgccctggaatggatgaatatttcanggtttcaaattgtaagagtgctaacgaaatgtgggacactcttcgattaacacatgaaggaactacaaatgttacatgatctcngataaatacactaactcatgagtatgaattatttagaatgaat

SEQ ID NO: 32409 - DNA, 149 bp, Glycine max
  unsure at all n locations
agcttattagtggaanaataattcaccccttcttaagttattgaggtcgctggtccaacattcgcaatatctaattctactcttaagttaagtaaaatgtagttttcaatacgtgagattatctgttttggttgatgcaagctgatgat

SEQ ID NO: 32410 - DNA, 103 bp, Glycine max
tattgtacaaattagtttgtaggacatagttgtgattcggacttgtcgcaacctacccttcggcgggagggcgacgcgagattcgcggttgcctcttccaaca

SEQ ID NO: 32411 - DNA, 466 bp, Glycine max
tggaggaagaaagagatgaatgaagggagaggaagagaagatatcgattttctgtgctctaaatgagctatgaaatctgaagtttaatattcaaatgatcaaagttgataaaaatgcacacacaatgcctctatttatagcctaagtgtcacacaaaattggagagaaattagaatttctattgaaaactcacttgaatttgtggagccaaactctggagccaaaatttctctaattatgattagtgaattatagctatggctcagcccactaaattcaagatcaagtccaagattcccactaactatgcttagtggcatgaagcatgtaaagcatgaagcacatgcacatagtgtgactatatgatgtggcaatgcggtgtagcaagcaaatgcttaccttccaattcaattaaatctatttttcaacacacacatcatatattcacttaatgcatgtgaaatta

SEQ ID NO: 32412 - DNA, 411 bp, Glycine max
agcttagtaaagctaagcactaacacatttctcttgaaaaatgattgaaaatcatgtgaacatgttataacacattgttaactaggaaagggtggttctttgggcatctcatctcaatctcataattacatttgccatgcatagcatagcgtgccctaatcattcatctctatgatatgttgtcgaagtattgacaatcaaaatttcaattcttggaattatggggtcgaaccaagcacatgcttttaagaaaaggttttcatcaagtcaaaatcaagtatggaagtaagtatgttgcaaaagttggggcagaagatggatcgagtttacatagcttctttggctactaccaacacatgattgagctaaataatttacaaaaattaaggacttttgatgtccatgttttat

SEQ ID NO: 32413 - DNA, 467 bp, Glycine max
  unsure at all n locations
ngaagaggatgctntaatggaggacaagacagagagaaggggggagcacgacattgaacgaataaaagagggagagaagtggaactttgaagtgtatcttataagactttcattcatcaaagttacaacaagtgttacacatgcttctatttatagactacgtagctctcttgaaaagctttcttaagaaaacttacttacgaagcttctttgagaaaacttccttgagaagctagagcttaactacacacacgcatctaaaaactaagctcacctccttgagaagcttccttgagaagcagagcttaactacataacccctctaataactaagctcacctacttaagaagagaagctagagcttagctacacacccctataatagctaagctcacccccatgacaaaatacatganaatacaaaacaaattctactacaaagactactcacaatgccctgaaatac

SEQ ID NO: 32414 - DNA, 407 bp, Glycine max
  unsure at all n locations
agcttctaagccatcatgacccctcatataagcaagatcagcagtagtgcattcatcaggattttgtggaccaaatttggcttcgccccagcagacaatagagttgcaaccactttctccctgaagatacaaatattaaatcaaatcataagaaaattttaattcaaagttcaaacagtctacttttcccaaaatcatgctaaatccacattgattatgttaatgtgcacctttatgtagggaaaagagaaacagaaaagaacatgaatggtgaaaccatgtcaaaaaatgattgttaggtcaatgtagttatagaagggctaatggtttaaacaagtgggatgtttgtgtattataccttccacaatatgttgcccaatgaagagctgtncatccacacctatcac

SEQ ID NO: 32415 - DNA, 376 bp, Glycine max
  unsure at all n locations
actganagtgngtntgagaagaggcannattgattatcctgctntgatgaattggaagcctgaggcaaatggagagaatgagaaggagggaggaacccatgctgtgactgtcgttcctagatggccaaatttcccaccagctcaacaatatcaatactcatccaatattagcccttctcattacccgcaaccctatcaaccaagaacactcaatcatccacaaaggcaacccctaaatcatccaatacaaaacaccacccttaacataaaccaaaacaccaaccaaggaagcagttttcaccacagaacatgtagaattcccctcaattttggtgtcgtatgctaacttactcccatatctacttaataatgcaat

SEQ ID NO: 32416 - DNA, 389 bp, Glycine max
  unsure at all n locations
agcttctcaaggaagttttctcaagaaagcttctcaaggaagctacctagtctataaatagaagcatgtgtaacacttgttgtaactttgatgaatgaaagtcttatgagacacacttcaaagttccacttctctccttcttttctacttcaatttcgtgctccccccttctttctttcttttcctctattaaagcatcttcttcaagcttattatccaaggcaattcttggcggtgaagctccttcttccttggcttattccctagtggatggngcctaccctctcctcttctcctttgccttccgctgcatctncatggtttaaaatcaccattgaaggacctcattgaagctcaaagatccagcctccataaaagctccacaatca

SEQ ID NO: 32417 - DNA, 425 bp, Glycine max
  unsure at all n locations
taacaacacttaaggttcaatgcaccttcgaaactatgtgttcaactaagcaatgcattaaagacatgttaatttaattgaataataaatgcgagtctttattaggaggtgtgattaattcatttaatataataaatgggcggattattcacggagtagttgaagatttgatttattctagactattactttttgttgaacaactgacctcaataacttaagagggggtgaattaattaaattttaaaattttcccgctaacaaattntaacccccttttaaatgatacatctgtccactcagaatgcagaagaagaagaagaaacaatcaatttaataatgttcttttaaatgcgcaagacaaagtaaactgcaataaaataactgagataagggaagagagaatcgcacaatcattttatact

SEQ ID NO: 32418 - DNA, 287 bp, Glycine max
agcttttcgattcattctatgtacccgtagtggtccacattgtgtttcgtgcatatttattctcgttttgtttactttttataccctccttttgacgtggcttagccattttaactaagtcatttcttgcttaacctaaaaataaaccccttcccaccgaatggttgaattggattatccattaacctcgggtaaaatcaactccgaccgcgttcggccatgccgtacccacgttggaaaccaaaggaggtaaaaaataatataatattcaaaaatatctctttatt

SEQ ID NO: 32419 - DNA, 410 bp, Glycine max
  unsure at all n locations
tganagtgtgtaaccaaccattntctcattgtagaacaccggtaacgtgtatactatcattgtgatcatctttttctctgtcattgaaggtgccacttgagctgtcaagtccctccacctctgggcgtattccttgaatgactcatgctcttttttacacatgttttgtagttgcgttctatccggagccgtatcataattgtactgatattgcctaacgaaggcaaccattaagtccttccaagaatagactcgggaaggctccaagttagtgtcataccctaattttgctcgcgattattacttgcgacatgcaacctttgattgcgcgtttcaagatacttgcgcacctttgttgcacaatatgtaagtcttgagacgcaccggaagtcacaaggagcagggttatg

SEQ ID NO: 32420 - DNA, 404 bp, Glycine max
agctttataatgagtaattgtgccaatgcaccctgaatatacatcttaccatccctctcacacctctaattatttccaccgcacaaaatctgcactataaagtccatcacctcctcttgtattcaccaaatagactattagaccacaggtccaagactgaccctaatcacactttataattatttttttttcgtgttggcatatttcctttttctaaactttttgctctctttttgtttgtggcagatccatgagccagaatacaaaatcacattcatgggccttcgttgcagatctacttggttggaattcattgatcgtgtcttatattacttttaccctctgttttatgctttgtcttaccctttgcggaaccatggccaataaacatcttcaacgaccat

SEQ ID NO: 32421 - DNA, 432 bp, Glycine max
  unsure at all n locations
ntagaaacctacacggcgatccaacgggactagcacaaagaaatataaatcgttcgatttgatgttatcaacaactcagaataattcttttttggccatcctcgtcttttcgaactagccaatggaatgtcattataggtacatgacccactttctattcgatgtatgttctttcaatttgaaattgggttgagatctagagaaaaccaacaactaaactcacccatgtaatgtactccatttatttaatgtgcttaaattatcagttcttaatttgagatatagtctctattcaatgattnttaaaagtatattgtatttttcaattaaataaaaagctataaatttatttctgaatcctaatcaatatctaattctcgtgttgctctttaataacttttctttttcgttgagccttacttaacacaaatt

SEQ ID NO: 32422 - DNA, 358 bp, Glycine max
  unsure at all n locations
agcttctttaacactactgcaaaaaagacatttaaagacggatattaaagacttttaatgacagttaacaaccgtctttatatctaatgtcattgaaagttaagacttttcacgacagttctcacaaaaccatcgtagaaaaccaactctcctaagacgattcttttgtaagaaccatctaagatagtatatattctaaaaagaaccgtcttacganaaaatcatcttagaatgtataccttctaagacgtttcttaaaaagaaccgccttataatgttcgatcctgtagagaatgaattctgtggctacacttactagtgacaccagttcgtaattatgtggttacaccaacatttc

SEQ ID NO: 32423 - DNA, 284 bp, Glycine max
tgcccagagaatgaatccacggaggaaatgcttaccacctctatagactggatagcgagttctaatgactcttctgttgactgcacatattgcatagaggatgggctgctcacctagacgtcttcctcggctgatacgatgaccagatgcacttccactacgaatatgaactcttggtggagcgtagagggaacaaatctcactgagtggatccacgggcgccccaacagacatctgtaagggggggctaatatcgattatatggaaagtaacttgacaggtgt

SEQ ID NO: 32424 - DNA, 405 bp, Glycine max
  unsure at all n locations
agcttggcactgattntgtaggtataacatcattattcatgttcttaatttgcatgttaaatatggagaaaaatgtgtttttagtctttatatttttggtaaaatataattaagggttctgtacctttatattgataaatttaattttcccaactctaaacggcgtgtatttaatctcttttatttctaagatttcattatattttttaaagctattatatccataaattgttaatcccatcgatactaatttcgatctacttatacaaaatctcgatttaagctgcgaaagaaaaaaataacatgtaatcgagagacaagattctctagaagcgattagtcacttatacaaagatcaatatcagcaaaattagtgaatatttcatataaatactatgctaaaat

SEQ ID NO: 32425 - DNA, 462 bp, Glycine max
  unsure at all n locations
tgatgttctcactatattatattaagtttctacccacaggctgtcctaactcctaatttacagaaacataatataataagagttcttatttaataaatattttaattaattatatactaatacatcctaaataagtaacagggactgctagctgcaataacgtgtgtcgatgaagaatggatattgttggatgcctgctacattagaatcgcctatggcgttgaacgcttatttaatatgaattttataataagcgtgggaaaaatattaatttataataatataaagcttttnttcgcagattacatgtaccattacaataatttaatacacatgttgtaattatagagaaatacatattcgtattcatacataggggtgagaataggccaggccaggctttgaaaggcctgagcttagcctacgatgaatctttgaggcatgagcctgacctatagacta

SEQ ID NO: 32426 - DNA, 345 bp, Glycine max
  unsure at all n locations
agcttgcttttggctgacccattcactctataccaagtgaacttccttcccatccatggtgcatcctctacctccaaatcttcaatccactcgttaaactcctttatgctattatctgcctctcctctttgacatctgccgatccttctggaaggtttctgacanttgtgaaatcccccagaatgcaccacaatcctccattatgagaactttntagttgctttatgttctcccatagacttctcttgctctgaacatcacaaggtgaataaatgtttacaatatgcacctggtgagccctcttaagccattgacctaccaataagataaagcactgcctatgac

SEQ ID NO: 32427 - DNA, 430 bp, Glycine max
  unsure at all n locations
tgcattnggaatagcgaaagccccactccatcattaggattagtacctgacatctcanacaaacaaatcaaacgtaacaagacaattatagttgttgtttgaatacctcacccactcaagtgtatcacacaattatggcttttctctaatgaaaacactcttgccttttaccactctaattccccttgagttcttaagcaattcaagagattatggccacagcaaagaacaattcaccaatatgtgtaaggtaaggctagagagacaaggaaaaggttaaccaagaaaaaggctaacctgcctctaggcacaatgaaggaaataaaatttagaatttaagaattcaagtaacaatccttcatacaaccaatatattaccttanagagattnttttttttaaaacanaagttcttcaagcatgaaccattc

SEQ ID NO: 32428 - DNA, 411 bp, Glycine max
agcttgtcaagtcctccagcctggacaagtgttgttcgggctgcttctgtcaagttgtccaaggtggacatgcttttggttttgcatgtgaggtctaacatgtcaggtgagggaagcctgtatatttggcaactctgtccttttctaactctggagaatgcattgaagacaaactttatgttttgtctgttaatgcagttgcgtgtagtgcacacgtagtactcttgcacacgtgtcactcgtggagtgggcacgtactaaatacgtgttgcgtgggatatgaagttgttttgtggtctcctcttgccagtgaccaccgtcacttcaaatttctatcttctttctctcgaagtataagttttccctcacctacacagcaagtgtcgctgcagacgccaggtgaagctagca

SEQ ID NO: 32429 - DNA, 469 bp, Glycine max
  unsure at all n locations
tctagccaaatggacttaccttgaattaattcctttgatagctccttttgagccttgtttccctttccttgttttgaagctcactacaagccttaagtgaaaaaccatgatattaccatatccttaaggaattttggagctttggaattgttttgggaataagtgtggggggttttttgtttcattggacaacttgttttgttggctatgcttcatgatgtattttgggccatacttgatgtacattgtatattggttaaatgttggacatgctgaatgaaatgttgtttctcanagctccacagtaaaaaataaaaaaaaatcgaaaaaaaaaaatcgaataaaaaaagaacaagaacagcaataaagttgagtgaataagatcttaaatggcacaagaatgatgaaactctcggctctactcttcatggttacattttatctttacttctctttatttttttcttaa

SEQ ID NO: 32430 - DNA, 399 bp, Glycine max
  unsure at all n locations
agcttcttggactaagtaaactccgactctagattgagactgattagcccaagcttttggggtaatatgtactactcaatcttgacaaacctcctcaagaaggcacttgatcgattaatgaccgggacttaccaaatgtcacttgctcaagggacccagaatcgaatcccacccaaccttgcgataggtgaaagagggaaatgtgaccatcgagtaaacacttgaaagaaaaagtgttattatttcattaatcaaaataaggatacattattccctgggtcggatggatgtgaccctcgagtatcctaaaaacatcttaacaagaaaagacctaatcattatgctttgtatgacaacattntaatgtgtcttaacaaagtaacatagagtgttaaagct

SEQ ID NO: 32431 - DNA, 438 bp, Glycine max
  unsure at all n locations
tcttatccaaggcactctcttggtggtgaagcttctcctttcatggcttattctctagtggatggagcctcctctcacctcttctcctttatcttctgctgtaactccatgactgaaaatcaccattgaaggactttattgaagctcanagatccagcctccatagaagcttctcaagcaaggttccatcaagtggtattagagcacaagatcttcaagtaggtgctcttttaacctcaattaattttcagctttaccttctcttccattgttgtttcttcattnttctccatcgctctcctcacatgtctgtgctgaatgtttttaacatgattntttagaatctccaccgattaaacatgctatagaagctagaattgattttctatggttcacattcctttgtctagttcttgaaccatgaattgtgttgagttt

SEQ ID NO: 32432 - DNA, 363 bp, Glycine max
agcttgatttgatgaagtgtggaagggtgacacttcctacttttattcgttggtcacagagcggtacctgcagatatgtggggggggtcaagagaccttggggacgtcaggtggggtgctattgcccaaaaccaagcttgaccaacccgacccaacccgggcatagtcagtcagtgagaacctgtgatgtacctaaacaggcgagctcctggaagtcaatcgataaaagaacaatgaccacatagcaaggaggcttgtgtggtggctggccagctgtgaatcttgagtgatatatgggatagggcctcttggtatcgattaccgagggtgggtagtcgattacaaggcttataagtgaagaca

SEQ ID NO: 32433 - DNA, 391 bp, Glycine max
  unsure at all n locations
ngagcatatggatggcctttggctaaatcagcagcatgagccgtaatcttgtaagctataacgccagccttcacgtgatcccggtttggcaacccaagatgttcttttggagtcacataacacagaagagctgtacctagtgccccaatattcgcagcaccaattgcagacgcgatgtgatcatagccaggggcaatatcagtattctaatgaccaagagtgtaaaaaggcgcttcactacaccattctaactgtttctgcatgttttcacgaatcttgtgcattgggacatgcccccgccttcatctcatacctgtaaagtaacttaaagtaaaaaatataccccatcatcttcaagatatattgatggtaatatcgcctcacatgatga

SEQ ID NO: 32434 - DNA, 248 bp, Glycine max
agcttgcttgatttacatctcactctatctcaagcgaattcttctttatatcatgaaaatcctcatgatttacattctccccctttttgatgatgacaaccacctgtatgataggagcaacaacaaagacaatatctatatgcatccccccgactccgcttgggttacaatgatcgcttatatgaaacaattgacgattccatatttttcatatataaaaagtcgtctcataaaaaatagataatctt

SEQ ID NO: 32435 - DNA, 433 bp, Glycine max
  unsure at all n locations
tgtacgccttggatcttcttcatcaaaggagtcctttgcttcttgaatatcaatggcagcggaatggagaagaagaggagttgagaggagacgccacttcaacgagaagatgagtcaagaagaagctcaccaccatggcctctatatatagcctaagtgtcacacaaaattggagggaaatttgaatttctattcaaatttcacttgaatttgaaattgaatttgtggagccaaaatttcactaattatgactagtgaattctagctatggttcagcccactaatnnaagatcccctcccagattctccataagtgtgcttaagtgtcatgaggcatgtaaagcatgaacgatgtgcacacagtgtgactatatgatgcggcaatggtgtgtatcatgcacatgcttcacctcccctctacaatttaattgga

SEQ ID NO: 32436 - DNA, 96 bp, Glycine max
agctttgtttcatattttctggaggagttcggcatgttttcttgagaagcctctacatgcacgagagtctggccttggcttgaagcttttgcatgt

SEQ ID NO: 32437 - DNA, 288 bp, Glycine max
tgcgactctaggccatttctatataactagcgcacttaaaatgttgtgacttctgaaacaatcttcacaaacaagtcacttgaagaattgtgacttctggaaatgtactttttgaaatcacccactggtaatcgattagcatcaaggagtcatcgattacacatcaacatatgtgactcttcgttttaaattgcgaaaatcaaaacgttcacaagctctggtaatagattacaaatattgtgtaatccatgacacagatataaagtaattggaaaatgtttatacaga

SEQ ID NO: 32438 - DNA, 398 bp, Glycine max
agctttatatttagactttaaacactttgttttgtttggtaaacaacaatttggaagaaagaaagatacataaaatgtatttttttttaaatgtcttctgttgtacaatggtttggaaaagtataagagaaagcaaaaataaaacacctcggaccctaatcccttaatttctctcgatagactgagaccaagaaagaagggggaaaacaaaattatctattagaaaatgatcatatttattaaatcttaacgacataattatctatatttaagaagaaattattttggtactcttcatgttaaatgttttttgtgaataatacaggttttgatgatactaagattctgaatgtgtaatcaactatcattgatgtgtaatcgattaccagtaacggaac

SEQ ID NO: 32439 - DNA, 357 bp, Glycine max
  unsure at all n locations
tccgaatccagagatgacagttactctgaacaccctgcattnttgctgngacacccaacaacacaatgaaagggctaaaatacctttcaccttttctagggatcggcggtccgtatccgtatgactcatacaaattggcgatctgtataaatttttcttaactcatacaaattgttgattcgtagtcatacggattgttaatccatatatccatacagatcatcaatctgtataatcatacacattgtcaatccgcatgttttaactgtntaacaattatttttctaaanatctccattcattgactattacaaaatctgataattaaacaaatttgatatttaattgaatgacgta

SEQ ID NO: 32440 - DNA, 323 bp, Glycine max
agctttatggtgaatcaaaggtgattcaaaggtgttttgatgataacaatgatgataacaaaaggtgatgacaaatgtgatgacaaaaagctcaaagatcaatcatagaacaactaaagtgaaccaagaacaattcaagagttccgatcagaatcaagaagagttcaagtctcaagaagaaagtctagagacaagaatcaagattcaaggttcaaagatctcaagaatcaagatcaagattcaagactcacgattcaagaatgaatagaagactcaatcctgatcaatattagaaagtttgtcccaactttgaatatcacatg

SEQ ID NO: 32441 - DNA, 257 bp, Glycine max
tcaccactatctcttgatgtcacaaacgttgaccatgtcggacttggtagcgtcatcgaccgagagaatgacgttggtagcacggggagcgaggattgaacagtactaactgatgcactactacaatatttagatataacatcggacggttaacatgagttattcacaaaagcgatgttaacaaaagcgcggaggcattcttgctagataaaatacttacttaacatcagttacgcgcaagaacctttatgtcttct

SEQ ID NO: 32442 - DNA, 319 bp, Glycine max
  unsure at all n locations
agcttattccttagctcatgaagttattaatgcaccacccatagctccatatatatccattatgtatgccatgggaaagggaaagttataatgatgaggatgggctactcattagcgagcgtacgggaccttcatactnttcgctcgccccgatccttctatctctcttcacctacgacttatttagctatgatctccctaatcctccttacaagggcgatacaataatatgacgccgatacaataatatgactccctgataaaataaaaggagtcttcaaccctctaatcaatagaggctagatcggactaacgagag

SEQ ID NO: 32443 - DNA, 354 bp, Glycine max
  unsure at all n locations
tgcacaaacatcaagtccagtagaggacagacatgaagcatctcatgatgaacctatgatttcatcaattcttgaacctgttgatacttcatataacctggtcagagacagacaaagaaggcagattaaagctcctataagattgggttatgctgatctcatagcttatgctctgagtatagaatctgatgatcaaagctcagaaccaatttcttacaaagatgcaattttcagaaccgacagtgatcagtggagatcagcaatgcaagaagagttngactntttcccaacaatgatacttgaaacttgttganaagccagtaaagcagaaagttgttgggtgtaatggatttc

SEQ ID NO: 32444 - DNA, 406 bp, Glycine max
  unsure at all n locations
agcttacataatgagcatctgtccctcaaacaaactctgcaacttagaatctaaagtagaagatgaagggatgtcagctgctggtgcaaaagaaaaaggaacaccagctgctgtggacctggttttccttgcccctagaaaattaactactggtcattcacattccaacatttccttttaatataggccaagttgatgaccggcctcaggctcctataagaagtaagagcatcagatccaactctccttgtcctgcacaaggctatgattaaagctgggaagcctaggcgagaagagttggaatgagccataatggttatctatccaaagatcaagccgccaatgttcatgtccatccttgtgactaagccatanaccaacctagctctgtccatattcaagtctg

SEQ ID NO: 32445 - DNA, 439 bp, Glycine max
  unsure at all n locations
tggtcaaccctntatgcaatggaaaacaagttgatgaatccaagcaatcacaagcaagatggtcttgactaaatgcanaagtaaacagaanaacaattaaattaaaaaaaactaaaggaaaagttgggttgcctcccagtaagtgcttctttaatgtcattagcttgacaagtcaaatgcctttaaggtggcatgaaggtcacatagaacacatcttccttgcagtttcgccttttagctagaaattccatgaactttatgtattttggaagcacattccaattcattgcaatagaggtgcggtgatcaaggaaggatgacacttaaggttntcttatgttctccctacctttcttccttgacaatcagttgacgaggaaaggtattgatttggagaatactttcttggtgattntctactgttgagtactccccccat

SEQ ID NO: 32446 - DNA, 362 bp, Glycine max
  unsure at all n locations
agctntaaatgagttaaaaattgaactgtgccaganagcttatctagacagagcgaaccatttggcagttttttacatgaatgggattcaggtttggcttaatcgtaagtgggacctaaggcaaattttaagaaaactattttagttcgagagaaattatatagtaggtcttttttgttaacatccgagtatttgtagattatatagtaggtctttttccagagtttgaatgtgctcatgaagttcatcaatatctgttgtcaatcattataccactctgggacgatactntagtttccaagctgattactttgttcagtagctcatcaatctgctctgccatttttgcacgctgagtgatg

SEQ ID NO: 32447 - DNA, 445 bp, Glycine max
  unsure at all n locations
taacgcattntacctctaagggtcttgtaattgcataatggtggtcagtctctcgatgttcccaccatggtatagcttcaatctctgaccatttactatccatgttctgtgcggagtttctgactgagggtcaagtaattccacaactccatatggcttgacttccttcatggtgaatggtccagactatttagactttaatttgcttggaaacaactttaatcttgagttgaacagcagcacttgttgtcctggcctanagtccttctttagcagcttcttgtcatgataagccttcgtttttctttgtacagctgaaagactcataagcattcaatctcatctcttccagctccaagagttgcaacttcctcttttcccctaatagagcctcatcaaaattcaggaatttcanagcccagtatgccttatgttccatttctac

SEQ ID NO: 32448 - DNA, 407 bp, Glycine max
  unsure at all n locations
agctnttagtgtgtttttttgaaatgtatgcatgagatagatatttattcatttgatgcacacaaacaccaacactatttgtacacacgatgagttgaaaaggggccctatacccgggtccatgggaacataaggagtggaggtgaactgcggtcatgctgggtcactgacttgcttgataacagtgaaccctcatctagagtttttctctttgatagcatgtggttgctggtagtccctactgccgcaatatgttttttcgaagggcatgatacctctagaaaccatcaagagagatatgaccaccttgggaattatcactaanagccttttagttccttccgtttaggtcactaanataggggcacgaagtgaccacgctgcgtgccttttaaacactgccatgc

SEQ ID NO: 32449 - DNA, 441 bp, Glycine max
  unsure at all n locations
ataagtgcgggtctgggagacgaaggtcaagtgttcgcgatatgtgaagatgatgttccaagtactttggatttggtccgaccatgccctcctgatttccagctgggaaattggcgagtggaggaacgccccggcatttacgcaacaagcataatgtaaacctttacggttttaaaagctctatagttgggcctaggctttagagttttcattctgttaaagctttgtgtcttttgcttttgaattcataatacaaggatctttcttcatctgttcctggtctctacccattctcttcatttgcatgtttattctttntctaaaacggcagattcgatgacgagtcccccgaaggtactaatacctgngacccgtctatcaacttcgagcaagaaatgaatcanacggaagatgaaggagatgacgatgtgggacttcctt

SEQ ID NO: 32450 - DNA, 369 bp, Glycine max
agcttaaacattcactttcgagcctcacttcaacattcaatttcgagcgtctcgatatatgacgggactcaatcagacatccgagtaaaaagttattgtcgcttgaaatggctcagagcttcaacattcaatttcgagcgtcccgatcgctcacggcactcaatcagacatccgagttaaaagttattgtcatttgaattggctcagagcttcaacattcaatttcgagggtctcgatatattacgggactcaatcagacatccgagaaaaacgttattgccgtttgaattggctcagaggttcaacattcaatctcgagcgtctcgatatattacgggactcaatcagacatccgagaaataaattat

SEQ ID NO: 32451 - DNA, 410 bp, Glycine max
  unsure at all n locations
tccatcaggatgtcttattgagtcccgtaatatatcgagacgctcgatattgaatgttgaacctctgagcattttcaaacgacaataacgttttactcggatgtctgattgagtcccgtaatatagcgagacgctcaaaattgaatgttgaacctctaagccaattaaaacgacaataactttttaatcggatgtctgattgagtcccgtaatatatccagaccctcnaaattgaatgttgaagctctaagccaattcaaacgacaataactttttactcggatgtctgattgagtcgcgcactataacgagacctcgaaatgaatgttaacctctgaccaattaaacgacataactatttactcggatgctgattgagtcccgaatatatcaaccctcgaattaatgtg

SEQ ID NO: 32452 - DNA, 409 bp, Glycine max
  unsure at all n locations
agctntagtgggatggtaataattactttcaattcacatatttctaaggctgaaagcaaaacatttgagctttcatgcatgtgtcaatgataggcttgtcgtcatacttttgtaattgtagctttaagttgtatttttgtgtgatcatctttgtaaatagcaattcttattagcttgtaatcttatttttgttggttctaatacctttgagggggagatgaaaggaatccaaagttggttagaggtgcattaagagataatagttatacctattcctagttatgattctttttaattcaaaactcagcctttctggattatacaatatctttttctatcttgctttctgcttgngttaataacaaattttcatctcaacaacttaacttaagttttttgtctaatatta

SEQ ID NO: 32453 - DNA, 388 bp, Glycine max
  unsure at all n locations
tattgtntatggattgccaaattccacatcatttgacattattcttaaacaaactagtttattagaacaaacaataaagaaaaaatgtatgggctggttttatctatttatagaagattttgagtgaaattataagattttaaagtttatgaaatcaatagtattctggttgatgccaatagaaaccaggtaaaaatcaaatcctttttatctcaacaattataaagtccttgcttcaaatgaaggaaagcattgctctgcctataggtaattcttgttctactgtattgtaatgttctttctgtttgcatgtgaatacattcaagttttatggttttgggttcttctctttacatctcaagtttatatatctgtacgaaaataacat

SEQ ID NO: 32454 - DNA, 374 bp, Glycine max
agcttcttatccaaggcatttcttggtggtgaagctccttcttccttggcttattccctagtggatggtgtctccactctcctcttctccttttccttccgctacatctccatggtgtaaaatcaccattgaatgacctcattgcgctcacagatccatcctctatagaagctgcacaagcaagcttccatcaatagtactcgcttagcgcacagccgcgcttagtgagttcaacaaataactcaacagagaagatgaacgcgcttaatcttcaacagaagcgatgaactcgcttagcacagcaaggcacatagcgagttcatcgtgatttccagaacactaggggtttctcaccccttctcataggcccctat

SEQ ID NO: 32455 - DNA, 403 bp, Glycine max
tgaaccataacccggtgagagtgtgaacttaattgttgagagaacgactagcatacagctatgatttttgtatcaatctctgaattttacaatgaaatgcataaatgtggatatgatgaaggccattattgttgtatatacaagccacttgaccaaaagcttacctatttattaatgatgatatcatttgcgcccatctttgagctgaatcgtaattgtcaagctgaaccctgagctctgaaattattatctccatttaccttgcttacgttttaggagagcacattgcgttacaccatcttgcccctgattgagggagtattttggatggataaatttaaagaagtctaaactttgaagcttaattctcaaatgatcgaagttgacaaaatacatacacatg

SEQ ID NO: 32456 - DNA, 397 bp, Glycine max
  unsure at all n locations
agcttgcacacaagattctccttgcctggcacctcaaaaccttcaggttgggtcatattgatgtcttcctctaaatccccatgcaagaatgcagttttaacatctaactactccaagtgaagattctctgcagctacaatactcacataactctgatggtagtcatctttacaactggagagaagatttctgtgaaatcaattccttgtttctgctgaaaccttttcaccacaagtctctccttgtatcttcttctatcgtcggattnttcctttagcctatagactcacctattctgtaacgctttctttccttctangaaattagttaaagaccacgtcttattcttttgaaggggtgtcatctcatctttcatcgctagctcccactcaatagt

SEQ ID NO: 32457 - DNA, 452 bp, Glycine max
  unsure at all n locations
tctcccncaattntctataaatagggggagaagtgaagtgaataagggttcggtcccttaggcacttctctctctttcgaatttgcttggaaaaattgtttccgtgaagaaaatccaagccgaggcgcttctgaaacatttctgtaacgtttctatgaggaatttcgcgaaggtttcgaccgttcttcgatgttcttcattcgttcttcattgttcttcagtcttcaacgggtaactaccttgaaccaagcttttcgattctttctatgtacccgtagtggtccacatttggtctctcgctttttattctgtttcatttactttttatacccncttttgacgtgcttaagccattntatttaagtcatttctcgcttaacctaacaataaaataaatttccaccgatcgtttgaattgtattatccattaacttcggctaanatgaattccg

SEQ ID NO: 32458 - DNA, 230 bp, Glycine max
atgttagcgatatgtaaagatgatggtactcgtacttacgatctggtccgaccatgccgtcctgatatccagctgagaaattggcgagtggatgaacagcgcggcattctccaacgagcataatgtaaacctttacggatataaaagctctatatgtgggcctatgctttatagtcatcattttgctaaggcttcgagacttttgtgtacgaattcataataccaagatc

SEQ ID NO: 32459 - DNA, 306 bp, Glycine max
attacgtgaactatagaacctcaagcttgagtattgctgcattctactaatatatggaattgttcactgctttgcctgagaataacaattgcttgaccacaacagcgctggatgcggcaagggacaatggtctttcaaataaacctgctgtacatgaacaaacattatatcatgcgctgaccgtgcctaacgaaccagcgaagtcattgcataattgctatactaactatattcaatgtacctgaacaaaatgatttccaaacacgtgaccgacacatatgatgaggtggccagaagaatgaggtg

SEQ ID NO: 32460 - DNA, 399 bp, Glycine max
  unsure at all n locations
acttgagtnnagccttatttntacattcaattggcgagcgcctccatctatgacgtgactccatcagacatgctagtcaatagcttctgactgatcgtaatggctgataccttcagcactaaagctcaattgtcgtggatccctgcccccctccgccagactttctggtagtgagtgttcgagactcgtagtgcctcagagatctagcattctacttcaagtggctaggattattggggcacttgtgccgaaatgaccgatgataagtgcttccgnggaattccttcctacgcttaacgtcggcttcacggcgtcgccggattttgcgggattctttgaacctgccactttataaccactctccctcgctttgctccatggtcaccctgactttccccg

SEQ ID NO: 32461 - DNA, 375 bp, Glycine max
  unsure at all n locations
tactgattgagaagattgaaaccacaataatgacatgtccatgctacgcatgccatcaaaaggaggcttatggtggtaagagaacaataatgatttatcggccattcatgctctccatcgtgaccataacagacgtatgtatctatgtagcattgctctttacagactcacctacagtttactatgtctttcaacccataaattgcgaatcattacagcatggcgcaatgtcattttgtatattaattagtttctactagaagctaccaccttttgttaatatattattntaaacctcatacagtcttaatttctcattatggactaaagtacatgcatacagaattaacatagcatcgacttaagcatttcatt

SEQ ID NO: 32462 - DNA, 396 bp, Glycine max
agcttcaagtgaactaaggagcagataagaagttctcacccggtaggtcgaaagctagaaagaggagcctaggcaaaagttagggaaataaaaaaggaaaaaaaaaataggggcgtgttatcaaaggttttgtccaaaatctaaattcgaaagtctctagtcaatatttgaaatgacacatggtcatgcttcattatcccaaacactaatttatcccttgttaccccttctgagccaaagcatatttgttttcttttaaaacaacaacaacaacaacaaaaacccgtagtagcaaccaccgctgagccggcgggaagagcaaggcaaacatcatatgcatgaggtaagctctaggttgggcaacaatgatgttaatgaaaaaaagcagaaagcaaa

SEQ ID NO: 32463 - DNA, 450 bp, Glycine max
  unsure at all n locations
ggattacatgttgcatttgtcttagtttcacttatttactttcaatctcattaaaagacaacttgtgaggtaaatgatcggttgaaattttattttacaatgataaaatgagattacggcacaaacgatcggttgaaatttgctttacatgaagaaatgagatcactgatggtagaagaatgagatgaagatgtgcaaagcaacaaggaggacccctaatggtgcatatagagaattcaaaaccttataataaatactaaccgattgacaaacgaacgaagaacgatgtangactgatcacggctgtgatcggaagtgcctcggcctcattntttttcttctttctccttctccttaatttcactaaatgctgtcaatatatgaaggttgtatccctttcttcagccccatcatgactatttatagganatgaggngacttgtttgatct

SEQ ID NO: 32464 - DNA, 320 bp, Glycine max
agcttgacttgagatataatctatctcagctatattcccatttgtgcaagacttgcactgcacaccgagtcgcagtgtaatttatctttgtgtgaggtttatgttgagtacatgtatcctgagggagattagaacaataattccacgcgctcgcgcgtcatctagacatttaagataagatgtataagtgtcggcaaatagcactttttaccatttttgcatatgtccactatatccattaatggctaacaattcaaaagcaaaactacgcacttatgggaagctgatgcatgaacgctatgacctattcaatggtcatt

SEQ ID NO: 32465 - DNA, 347 bp, Glycine max
ttgcataccccaaggatccatcagtatattacttgtgaaatatagccacgagggcgggctcataggccactttgggatacataagacccttgtcatactcagagacaagttttattggccccgtgtgaagaatgatatccataagctttgcactatgtgcgtggcttgtctacaagccaagtctacggtgatgcctcatgggctatacacacccttacccatcccatctgcaccttgagtaaacattagcatggacttctgccttgggctatctagaacccaaagagcccgcactctctctttggcgggtggataggtttatcaagatggctcactttataccatgc

SEQ ID NO: 32466 - DNA, 399 bp, Glycine max
agcagatcccaacggtcataaggtagttttatgtgctagagacttccagtaaaattttcgagtcgatccaacggttaacaaattggaacgaagagaatattactggggtatttgagtgtgaaaagctgtgatgttgggcagactttctacctctgcccggttttcttggctgtgttagttcatgatgcttggatgttgaattacttggatgttgtggaagcttgggaggattgatggggacccggcgttgagaggaacgaggataagggctacgtgggagtacgtgagctcagttgaggtgggcaacaggggatggtgggtttatgcgtgatttgtggatgtggagaaattgtttgcaccatcgcccgaccgccatctagtagcacatgtgatgggtac

SEQ ID NO: 32467 - DNA, 415 bp, Glycine max
  unsure at all n locations
ntggatgcaaatcagtttggaaaactgaggggcaagctgggcatttgtctgctagaggaattatagcagctactgcaatctgaacgtgcccaaacgaatcacttaacattaatagcacgttcaccacaaagaaaattcgaccgttgcctcacacgcccctctacattcttcattcaaatttatatctgcttggcattcgtgtttttaccagcatttcccaatagccttctgagatttacgaaatcattccaaacgctctgcttttccatggctacctcaccaaaagaacttccgctcctggtcacccgctgtaccatcatctccgcaccaggaacaaccagaattcaacatccaacccatacaaataattcctgggcaagcttctgtccctgagaaactggttccagaagacaac

SEQ ID NO: 32468 - DNA, 309 bp, Glycine max
  unsure at all n locations
agctttattacattctctcttggtccttaccatttcttgaatacttcccttccaccaccaagattccttatctcagtccaaaacttcttgattcactgaagactactttaccaaccattctatccttcttagaaacctnatctcaaacgcgccacccgctaccttgtgatgctcaattaccttcctccaataatttcttctttaaagacaagtgtttctcacccttgagctgccatcacttgattctcgaatctgtaacttgccgaatattttgtgtactactcttaacaccaatatcaaggatcaaga

SEQ ID NO: 32469 - DNA, 458 bp, Glycine max
  unsure at all n locations
ctcaagcttgaagggctntncanttatagagaattgagactcctatctctgtatgtataatcgttaccggatgagaagatgaaaggtctaccaccaacgggaaggcataggtccacttctatttcacaagtggaaaaggtcacattgcttcattatgagtgacattttaaatttaatctaagctgttaatataaaataaaatcaatggttcagattacaaataactctttatacttactcnctacagtaagtagatcccctcccatatatatatgaagtaaaaatagcaacttttgcaaaaaaataatactgcccacctcattattactatattatctacatctatgactatatctatatacattacaattgaggattcatctcacaacccatcttgtcacctatcttcctatgcgcttgaatttttctgcattcaaaatattaaaactagtccatta

SEQ ID NO: 32470 - DNA, 403 bp, Glycine max
  unsure at all n locations
agcttcttcatgttgctcctcctatctcttacaccttattcttctatcttatctttgacacttcttttttgtacattataataactgaaagtccaatgaccttgattatatatactttttttaatgaaatagtgaaataggttgagcgcctatccttttatttctgagtaaacttctctacactaagaagagtaagttgctaaagtatccattttccttagagagccaaaagtaagtcttttctctattgggcttccaaatatgttgagacatttctaaggtgaacaactgaacatacaagacacccaatgttttcttgtttctggtctttntaattctccttgtgttgtgtgattgcttcccaatgattagtttagtttgctataccgatatttttgataca

SEQ ID NO: 32471 - DNA, 476 bp, Glycine max
tactcaagcttgttgaactcatatgcatgatgatgccatgactcacaaatgtgaggctggaatatgataacggacaaatgcaggaacgatatgttcattatgatgttatgaagagatgcttatgcgatgcatgatatgaatgcattttacggacacgagagcccggaaaattatctcttcttacttgcgcatttgggggcgcagtgccccatgtgtatagttaagaaggtgatatggaccttccggcttaccatgacaaaggacgagaccaacatacaatgcatgctagagataaaatgcgggagtgaccgactcgcactgattttggagaaaaacgtgggataaactcatcttattcaaaaagttataactagtcaagatctgagcgataatacaaacttcctagtgcgttctaatcatatggtccattaagtctatcatatgctgacaatagctgagaagtccgcggatcttct

SEQ ID NO: 32472 - DNA, 300 bp, Glycine max
agctttgttatctactgaaggctctcgaagagtcagatgagggagatagcgttacggttacagaggagtggacaaagggtcttgtgggttatgaggaacccatatgagagaagcgaattgattttggaggaattgttgccataagggcccctgcaccgacctacagagaggggaatggtgatgaagaattgcgcgccacaagttaagattctgagtcatgactcggtgggtgggttcgtgactcactgcgggtggaactcggtgttggaagcggtctcttggggtgtgcctatggcgtcg

SEQ ID NO: 32473 - DNA, 374 bp, Glycine max
  unsure at all n locations
tgctcgtgcggcttctatggaggctggattcttgagcttcattggggtcctttaatggtgattttccatcatggagatgcagcggaagacaaatgaacagaggcgagaggaggcgttatccattaaggaataagccatggaagaaagagcttcaccctcaagatgagccttggataagaagcttggagatgatgcttcaatggaggaaaagaatgatagagagaaatacagacgagggagcatgaaattgaacgatcaacaccagagagatgttgaactttgagttgtgtntnanaacttcctccctcctctcagtccacaagtgtacacatgcttgtagtatagactacgtagcttccttgagaagctctctt

SEQ ID NO: 32474 - DNA, 265 bp, Glycine max
ggcgagctggttgcttcctgatgaagctttctgatgggcccagtgctgaaggacaccccccagtttgattagttcacccccatttttcgtattctgctcatttccttttgaaacgttgcgaaactttacggattacacggcgaaaagtcccagcatctcaacttcgctgacaagaattaaatggttgtaaacaacgtcccagatgatattatgtgtgaacataatattaatgatgaatcatcatctcacataacaccattgtttc

SEQ ID NO: 32475 - DNA, 457 bp, Glycine max
tgagttgcatttgatatattttgtgttgatacaacaagatctataaaatagaaagaaaaaaaaaaggtgaaaacagggttgacacatttcccctcagcttgcaacttttgcagataacaaacaacaaatgaataaaaggaaatgaaataacattggagataaaataaaccctaaagcctcttcatataccgaagcatcatgggcagcatttgaatatgcaagagcagtgtttccacaatagacatcctagttgtgaagagagtgaggatgaaagagaagagaacaaatgagaaagtgacactacagtatagaaaaaaaaaggagaaagcaagtacaagaagagaaggagaatgaccaaggataagagagaagagaacacggattagaacgagagagatagagaagacaactatcatggaaggtgatgacaacaaaagtaacgctaacaactgttcat

SEQ ID NO: 32476 - DNA, 249 bp, Glycine max
gataaactagtcccgcgagcttaatcaactgctgctgcagctgttatttagtaaacactaatttaaccgatgcactcaaaggagttatgataaatatcatctatgcaactcttattaagtgttggagaagtaaacaatgggggaattcactctgctaagacttaaaatgattctgacccaactctgttacataaatattgaaaagaacttaattattggatttctatgaatcatttgatcgactaaatc

SEQ ID NO: 32477 - DNA, 399 bp, Glycine max
  unsure at all n locations
tgaagaatgtctacatgtttacatcgcgccactctctgtgagtgtactatttgtattcatccgtcatctgagaatcgtggcatcgtgaatcgtctatgcttatcactatatcgcactcagcgcatctattagtgtgtgtagtgaacaagaacatcttctacgatttattaacatttcttcagaaggcaacaactctcgtgttttacattgattacatgccttacagttaatcgatcgcacaaagatgctttaaggcttatanaacntatacctccgtatcgattcgaatgaattacaaccttatcgtaatcaattacacagttgctttttcgcccctgactgattcatccacagtctntattttaatcgattacnatgtgatataatcgactacttctc

SEQ ID NO: 32478 - DNA, 226 bp, Glycine max
agctttccaaagttttctggttttccaaaccttgaaaacttgtgctattcatccttttcattctcttctccctttgccaaaacgaattctccaaggactaaccgcctgaattctttttgcgtctctcttctccctctttcaaaagcccccccgacccccacctgaatcctttggtgtctcccttctccattgtccaagaattcaaaatgaaacagtttgagaattc

SEQ ID NO: 32479 - DNA, 290 bp, Glycine max
tcttatacaacgctcactctggtggagacactccttcttccatggcttattccttaaaggatggcgcctcctttcacctcttttcctttgtcttccgctacatctgcatggcggaaaatcaccattaactgaccccattgaagctcatcagatacacgctccatataatccccacaagcatgtttccatcagaatgtccacgtttttatagggctacactcccatgcctctctaggactacacgccctcgccttaggaggactacacatgctacctttagaggactatag

SEQ ID NO: 32480 - DNA, 90 bp, Glycine max
  unsure at all n locations
ggcgattcagctcggacccgggatcctctnagtcacctgcggctgcaagctgtttctagtacttacccgtgatgatcgaagaacgatgaa

SEQ ID NO: 32481 - DNA, 577 bp, Glycine max
  unsure at all n locations
agctcgcggcgacggggtttganttcgtatactttgctatctacgngacactatagcaatactcacagctatatgcgcggtggaatgatctgcgacggatcacactctgcttatatctatcttcgcagctacagacaatgtgcgaacgaagagtccactgatcgcatcactagagcagcaacatgcgttttagtctagcgatatctgcatacttgcatcgaagagatgtttctctcattttggcattagagatacgactcacatgatcgatcctcccgatgagcctctctcaaccattacggaggtcacctctgttcacacgaggtgagacttcctcactacactactcagctcttattgcatacttacttcgactacaggaagcgaaacataagagtttntntcccgccctctacaccgtctcactcctgataaataagggtctgtattgaggngcattcagaggccatgtgacctctgacaagacacttgaaacatcttatgatgatagcccttttttgcgagctaggctaaaggtggatttctctatcgcctcaccctgatctgtcgtgagttt

SEQ ID NO: 32482 - DNA, 392 bp, Glycine max
agcttcttttgtttgattacgacatacaatataaagctggctccttcaatattgtcgcagactatctcttgcgcattgatcacaccggacaagcccagtgccttctgctctctgatccccaccacgaggtactcaatcaactaaaacgcgccctcctcgctaacactgagtttcagacacagaagaaagctattcaagctcacccagaggatcacgctcacttcaccatggccaatgagctcattttcttaaagaatgccatctggattgactctagcaatccattcattcctgcattagtacatgagtaccacgcaaccactctcggaggtcactttggtgtcaagaagaccctccaccatgttcgctctaatttccagtggaccaccatg

SEQ ID NO: 32483 - DNA, 282 bp, Glycine max
  unsure at all n locations
atanaagtctaaggcgctattaaggagacaagttgatgatgctctgagaatcgatattatgcgtagcctgcgtgtacaagaacgggttgtgaatggaaagtaccttgggctgctatacgtgataagctaaaataacaaattcaccttagcatatataagagatagattgtggagaagccttcaatgtaggaagagcattcctttggccaatgctgcccgtgaggccttaataaacgcaatagctcaagcaatcgccaagtattgcatgagaatctatctctt

SEQ ID NO: 32484 - DNA, 387 bp, Glycine max
agcttcatgttgctcattgactccaaattactgcaaggaaggacatagatcagtatggtgatctgcagaagaacatagaccacaaactcttgcaacaagggaaaatgcaaatatctaattcatggcaagctgagttactaggtggccaacgcatcaagttttccttcaagctttttatttacagtggatgaagatgaatatgtggccacctcatggactcctttaaggacaatagcatcatttcttgcactgaattgttgggagttggaagccatcttctcaatcaacattctagcctcagtaggggtcatatcaccaagggctccaccactagcagcatcaatcatactcctctccatgttgctaagttactcatataaatattgc

SEQ ID NO: 32485 - DNA, 284 bp, Glycine max
tctagccaaatggacttaccttgaattatttcctttgatattcctttcgagccttggttctctttccttgttctgaagctcactacaagccttaagtgaaaaaccatgatattaccatatccttaaagaattttggagctttggaattgttttgggaataagtgcggggggtttttgcttcattggacaacttgctttgttgactatgcttcatgatgtattttgcgccatacttgatgtacattgcatattgagtaaatgttggacatgctgaatgaaatgtt

SEQ ID NO: 32486 - DNA, 402 bp, Glycine max
  unsure at all n locations
agcttattgtgtgttgatgattataacacatatatatgtatatgaattgttaaaataaattatgaattaatagttcaaataataaaattaaattgaaggaaattaatatattaagattcaacgataaatactttcaatgcattctagcctacttatttattaactttttttaattgataataatatagtttggtttaatatatacatgtttagtatgtaaatactaatatggtgtgacgtgcatatgattcatgaggcgggataacatgctgctttgggattataacattgtcgatnacactgagtgtatgtgataaattgagtatgtgtcgaattataagatacaagcgtattgagattttgtatgcatcgagctgtgagctatgaactatactattacac

SEQ ID NO: 32487 - DNA, 414 bp, Glycine max
  unsure at all n locations
tattcttnctattgttcatattctctatttgcattgaacagttattttattggtttaattgctaatttggttcttatagttccatgatttgtaccgcttagttcctatagtttgaaagtggtctttttagtccatataatttgtatttcaattgcctgttagccattgctacaacacacacacacacacacacatgattaactacaaatttgttatcacattattaactatttcttattgcacactattttgcgataaattatgtatagctataccttattntnccccgcgcgccttcattttctacatgtatntcctcacatgttttgtgctacatgttgttaacatgattctttacagcttccacccgttaaacttgctatagaagctagatttgattctctatgggtcata

SEQ ID NO: 32488 - DNA, 410 bp, Glycine max
  unsure at all n locations
agcttcactaagatgcatgccatccaggctgagacaccacagggtaaacaaatgacagaacatgacctctgctttgaaggttcatctatagaggataaaattggataattttatagaatacaaatacctgtattcattgaggatacacgaatgattggctgaagtctttcacaccttccctcatccaacaccatgcaaagaaaagaacctgttgaatcaaaccctctacatcaaacttggatcccttgaaaatgcacgagtttctcatcctctgagtacaccaaaccatggcacaccacanaagcctccactttttcattactaaccttagaaagtaaaggagttgcttaacagttgagcaacaagccaaagaatataatatatttttgataaattanaatacagtatat

SEQ ID NO: 32489 - DNA, 454 bp, Glycine max
  unsure at all n locations
tgaaggcatgtaacccaccatcttctcatagtagaacaccggtgacgtgttcattatcattgttatcatctacctttccatcattgagggcgctacttgagctgccagatccctccacctttgggcatattctttgaaagatttatgctctctcttacacatgttctatagttgcattctatctggagccatatcagaattatactgatactgcctaatgaaagaaaccattaggtccttccangagcggatccaggaaggttccagattaggataccaagtgataggccgcccagtccactctcttgaaaaaagcattaagagcttttcatccttcgcgtatgcccccattatcttgcagtacatcttcaggtgattcttggagcaagtagtccctccgtactagtcaaaactcggcaccttgaactttggaggtatgacgacgttgggcact

SEQ ID NO: 32490 - DNA, 395 bp, Glycine max
  unsure at all n locations
agcatctactaagtcctcttcactatctctatcgagccacaaccagcttctgcaggtgtttcagcactgttacagtgttgcatattgaatctatgcagaatatcagtagcatatttttgctgtgtgagaacaattccttcactacacccttgaatttaattccagggaaatatgacaactcacccaggtcagtcatgtcaaactcatccatcagatttttcttaaattcattcacttttgcttcattgtttcctgtcaataacagatcatcaacataaaggcatagcatcataatgtcttcacccccagacttcacatacactccatgcttagacctacatttcacanaacccaaattggtcaagctcttatctattttcatgttccaagcacgt

SEQ ID NO: 32491 - DNA, 462 bp, Glycine max
tagctgaattcagatcaaattgaagttagcttagctcaaccttggccattttagcggaccaaatcagcctcagatgcaagggttggacgctaagtgcgtgagacttgcagcttagcgcatgaacagagatgcgcttagcgcgaggcttgcgcttagtgaaaggactatttttcagaaaatgttttctaagttatttttcagttctttttccacgaaattaaaacccttatgttaaatattcaaagataggctgatatactcctatgtacagattatatagcaggttccaaatgattgcggcatgacagacaaagtaacagaaattaaaaactgggttgcctcccagcaagcgcttctttaatgtgattagcttgacgcatagcttactaccttcaaggtggcatgaaagtcacaaagaacacatcttccttgaagtttcaccttttagctagaaatttcatg

SEQ ID NO: 32492 - DNA, 77 bp, Glycine max
  unsure at all n locations
agcttagaagatgnttganggtttcttggttggaaggaagaaggtagaagtcagtatactacaatacgctgacaata

SEQ ID NO: 32493 - DNA, 470 bp, Glycine max
  unsure at all n locations
ctgtggcggagatgttgatgttaagtgtgaattgcaaccagaaattaataatgcaggggattattgtgtatttggagtgatgcaactttcaaaatggaaaagaaggtcaagggaaatggtttcatatatttggaaggtacttgggttggtgatggtggaaaagtgactataatcaatatttactctccttgtgacataacttctaaaagaattctttgggatgaagtcaaacaacttacaactgccaacaatgggggtttatggtgtattttacgagacttcaatagcattagaaggcctctgaacgagtangatgtgtcagaggattcagaatggaggcagcctgaaggaattcaataattggattgttgacttggatgttgacgatgttcctagtgtgggcagaaaattcacttagtacagaccagatgtgacaacaaaaagcacaatacatacggtccttgtcttgg

SEQ ID NO: 32494 - DNA, 353 bp, Glycine max
agcttaatctttggcgtcatttagctcggttaaagtccaaggcttcagagatatttgacattatccttaagatgaacaaagatgaagcttaagctttggcttcactccaattatataatatgcttcaaatactcaccattgactggattccccccgcgtaatccacaacaatcaaatttggatactgatcaagcacagatgcaagagcactgtccctgtctgaaggaccatgcacatgaaactccttttcaccaatctgaaaagtcttgtctgacttctcttcacacccaaacgacacaggaacaacattcagttcagcagctttcgccgcattaatcacggtctctcccatt

SEQ ID NO: 32495 - DNA, 597 bp, Glycine max
  unsure at all n locations
cctcccccgcgcgtacccncatatctgcacgggcagaaaataattatgctcccgccacccacacctccnnccccgcacgcggcgcgcgcgtttgatttcgtgcaatacgcacctatanaaactcaacttcgcctgaacccacatcattgactcaatatgcacattcgtcttgtgaggaaatcgaacagatactgctccctgcaagcaaagaactcttcgatcgcaccaaccaaaccaaatcatgctccttatcacttccatcatatccatctgtacctgagctatctttctcacgctactttctgtgctcattgttaccatgcgtccatccttcacacactctactacctcatcttaacaaaatggttcactggatatttgggtatccaagatgccaattgcgcctcttgggtatatgcccccgcacagcttgccacatctttgtatgtttatgtntanatatgaaaaatttaaacacaacagggcaatccngcaccccactctgtactgctccttcaaaaancatcctcctaacagtagagctctaagtcttacaacttgcacatcatactcaccaatctccacttaacgctgacg

SEQ ID NO: 32496 - DNA, 404 bp, Glycine max
  unsure at all n locations
agcttgacttttcacttcattttcttccttctaaattttgtggagcctacaagaggtaaaggggtctctccaacgcttgaaccatatgcttgttgttgaacttccttgaacatgttgctttgaaattttcaagcttgttgtcatccctaaatctatgtgctgagttgttttccttgagttttttatgccaaaaatgagttctttgcatgttaaaatataaagttagcctaaaatttcatccaaatcaaagtttcttaacaaaagttacaaataaaacaagtttaaggacctttagtaaaatggaaattttgtcattaaattggactgagagttacaatagtatgtactatttttattacagttttgaactcaaaaatgaattttttaaggtttgaanatgtaaa

SEQ ID NO: 32497 - DNA, 455 bp, Glycine max
gttgcatacattcattcccttagtgttattgtctttttctctctataaagaatagctatttacatttcattcatgcaactcattatattcgtcatagaaatatatttgcatgtctaagtatataacatgaacatgccatgcacattgctctcattgtttttttaatacaagaataaactgtgcatggaaaagttttcctaggatttacgcacatcaatttagaaagattaatattattaattataatacacaacaaaaaaactccgcttatgtaaccttgcttatctcccgcccgacttgcgacttttataaaatatggtcacgtctttataaaccatataatagcaagacttggagatttttatggaaaaaaacacacataacaacaaggtaatttgcaatttcaaattcctcatcaataattatttctttcatcttatttttttggaatatat

SEQ ID NO: 32498 - DNA, 404 bp, Glycine max
agctttgagcaacttcaaacaacaacaactttttactcggatgtctgattgagacccgtaatatatccagacgctcgaaattgaataccgaagctctgagcaaattcaaacgacaataagtttttactcgtatgtttgattgagcctgtaatatatcgaaacgctcgaaattgaagaccgaagctctgagcaaattcaaacgacaataactttttactcggatgtctgattgagtcccgtagtatatcgagacgctcggacttgaatgccgaagctctgagcaaattcaaacgacaataacttttttcctcggatgtctgattgagtcccgtaatatatcgagacgctcggacttgaatgccttagctctgagcaaattcaaatgacaataactttttactcgg

SEQ ID NO: 32499 - DNA, 438 bp, Glycine max
  unsure at all n locations
tcaacattaaatntcgagcgttccgatatatttgtggactcaatcgaacattcgagtaaaaagttattgtcgtttgaatttacttagagcttcggtcttcaatttcgtgtgtttcgatatattacgggactcaatcgaacatacaattaaaaacttattgtcgtatgaatttgctctgagtttcggtattcaatttcgagcgtctggatatattacgggtctcaatcaaacatccgagcaaaaagttattgctgtttgaagttgctcaaagcttcaacattcaatatnaagcctcgcgatatattacggactgaatcagacatccgagtaaaaagttattgtagtctgaagttgctcagagcttcaacattgaatatcgagcattctgatatattacgggactgaattagacatccgagtaacaagttattgtcgttt

SEQ ID NO: 32500 - DNA, 408 bp, Glycine max
  unsure at all n locations
agcttgtgcgaatcanatcactcctgcattntatctctagcatgcattctttntttctttacccactcctcacgtttggttntttagggaaaaacaccataactaaacgcgccacaaggcatccctatcgcaccagatccaaatctcaacgatgggtgatcaagaggagacacaggaacagatgaaagccgacatgtcggctctgaaagaacagatggcttccatgatggaggccatgttaggaatgaggcagctcatggagaaaaacgtggccaccgctgccgctgtcagttcggctgccgaagcagacccaactctctgggcaaccgcgcgccatcctccctcaaacatagtaggacggggaaggaacacgctggggcacgacggcaacccttatctgggatacaa

SEQ ID NO: 32501 - DNA, 461 bp, Glycine max
  unsure at all n locations
agaattatacaataacactttgtgcccaaccatgaagtccttcttaattatcatgctatcatggaacttcttggtcttttctttgtagaacttggcattctcatacgcttctaggcggatctcatctaactcactcagttgcaactttctttcctcgccagcttgatccatagagaagttgcaggtcttcactgcccagtatgctttgtgctcaatctcaactggaagatgacatgcctttccaaagacaacccgataaggagacattcctatgggtgctttgtaggtagcctatgtgcccaaagagatcatctagcctggtactccaatctttcctgcttggctgcacaatcttctctaaaattctcttgatctccctgttagaaatttctgcctatccattggtctcgaggtggtatggtgtggataccctgtgtacaaccccgactttttagcaacgn

SEQ ID NO: 32502 - DNA, 279 bp, Glycine max
agcttgtattgtagtcatacctcacacaatatatgtatgtgtgtataggtagtaaaaataccttggatatgcatgtatgtaatttacgtagcacaacaatacctcacataatatacatatgtatgtttaggtagcaagataccttgccctgcatgtatatagcaacaatatatatgagtatgtttaggtagcaagataccttggatatgcatgtatatagcaaaaatagctcacaaaaatatacacatgtttaggtagcaaaataccttatgagaaaaa

SEQ ID NO: 32503 - DNA, 465 bp, Glycine max
  unsure at all n locations
agtaattcgatgatatgtatatatatatatatatatatatttaattatagcagtactcataaatgtgtcatgtagataaatattatacatatatatatagaggtgcataaaagtaactaaacacattaaatatatatgtaagtaatcaaatgtattatgaacattaatatatatatataaaagtgcgtagcgtattaaaaacattaatatttatatattgacaccttaacggaagcatatatatttatatattaaacacgttgccgtaaacaatttaaacattataatantctcctccacatacacatttgaaataataacgtaaacgggtatatatatatatatagatatatatatgtatatatatatatatatatgtatatggacatatatacagtaggagagcatattatacatgttgctatatatatagtacctgcctcaatacacacctccatatttccn

SEQ ID NO: 32504 - DNA, 395 bp, Glycine max
  unsure at all n locations
agctttctcctaagtcctaaaagacatttcaagctaggattaactcactttaatctccatttaccacagaatccagatttaaccttccaactctcaaagtctcactctttttccactcacaacaccacattctcactttctaacctaggttaactctacccttcatctctaacagtttccataggcaatttcagcacataaacatcacaagcatcatcatgaaaaccctaaaactgaatgggtatgtttaactcatccaaacatggcaagttcaacatgctttcaacaagtttcttcacaaataatcatcataaagcagaaacctagcaagactacccatcatatctcccanaaccccatacccacgannatcaaaggagaaagaagtccaccca

SEQ ID NO: 32505 - DNA, 393 bp, Glycine max
  unsure at all n locations
tgagatgaggaagtgttgaagggtgaaacttcctgcttttattgttgaccacagagtggtacctggagatatgtcgcggcggtcaggagaccttgnggacgtcaggtggggtgctattgcccaaaaccaagcttgaccaatcccgtcccaacccgggcatagtcggtcagtgagaacctgtgatgtacctaagcacgtgagctcctagcagtcaacagataaaaggaacaaagaccacaaagcaaggaggcttgtggtggctggccagctgtgaactttgattgaccgcccgccatggcctcggtaatcgattaccaagggtgggtaatcgattacaaggctaacaacatgaagacaggaggctaagatggtctctggtaatcgattaccacg

SEQ ID NO: 32506 - DNA, 456 bp, Glycine max
  unsure at all n locations
cgaacggggngnncgtagactccctgtaactcacgggaattnagaaagtactcgggatcctatagagtcacctgatgcatgcaagcttgtttgataaagaaatgacgaccacgaagataatgctggagtagtcttcacatgccaatatattaatggaatacaaaatgtaccatgaggcgagctggcactattacattattatcgcggatgcatgacttatttctgccccccaccaccaccctacttttttttaatctttttcattaatttcattctcatttccttagtgttccgcttctacctctttcttcattttttctattctcaaactacgtgtcttcaaaatttgtttactttcctttgtaatactactattaagatctgtttcttgaatattgtcacgtctgcttttttagtacactcatactttcatttctgatcctccacccactgtcc

SEQ ID NO: 32507 - DNA, 404 bp, Glycine max
agcttggtagttggaacccgaaggcatccctttgttgaagacatcgtggaagttcaccccttccttcttggaagggtctaacgatggacaaatatgatggtgtcgcgggtccggataagtagttggatgtctaccttacccaaatcaactatacataagcgatgactatgttttatgtcgaatcttccaaacttcattgaagggcccaccattgagttggtttacaaaaattcctctgtacttcatcaatttgttcgacaccttgataacccaattcgacacttagtttgttgcaagtcaaccctatcacttgacttctatggcactggtcaatattaggcaagacaagaagaaacctattagaatgctcaacgaaaggttcaacaaggtcacccttaatatta

SEQ ID NO: 32508 - DNA, 458 bp, Glycine max
  unsure at all n locations
tcatgattgaatcaagaatgagtcatgaatcaagattgattcatgatgatgaatcaagattgattcaaggtgttttgatgataataaagatgatgacaaaaagcccaagagaatgacttcaagattcagtcaagaacttcaagattgagtcaagaacaattcaagaatcaagtttcaaatttcaagaatcaagaatcaagaataatcaaaatcaagattcaagaatcaagaaaagactcaatcaagataagtactataaagttnttcaaaacattgagtagcacatgaagttttgacaacttctcacttaccaaagagtntactctctggtaatcgattaccagaatgcagtaattggataccagtgttgtcaaaatgttaagattttcanaattcacaatgaagagtcacatctgttgatgtgtaatcgattacaccttaatggtaatcgattacca

SEQ ID NO: 32509 - DNA, 410 bp, Glycine max
  unsure at all n locations
agcttctatatattaatgaataaaattatcgatgcatgtgccatgttatttttgccctctcacacgcagttctgaacctccttagggttttgactaatgtccactttgttcttctttttaaattcctatacaaaatgggtcaccattccctttcaaagtcatgtccaccttaagtgagtgtttccagcaatagccttatcttggaatagcttatccttgatcgttagaagtacaactgccaaggtgaaacatgaaaatgttttgctctccaacgcaattagtcttgttgtcaaggccatgtggtcagcaactactgaatataaagcagcctcaatagcagcggcttctcttaactctccttcaaccatctttatcttgttntccaagtagtcaatcttgttgtctaaaat

SEQ ID NO: 32510 - DNA, 393 bp, Glycine max
ctgagatcaatccatctatgtatcatgtttgattcacactaatcatggataaagaagaactaagacttaatctatcacttatgcctaaactaacagcattcaatacaaatgtcatatcttttaaaacgtttttgacattgtaaaatcatagaaccaaaaacctagactaatcttcaagacttcaaaatctttgattcaacaatctccccctttttggctttgatcatgccaaaccaaatgatgtgtattgatattctccttgtccttttacctgttctacatcatgctcaacaaacatcgcagcactatctagctcatcatagcatctaggtacatacacaatcaatcatatctttctcccctctttggcatcacacaagcaaaaagtgagta

SEQ ID NO: 32511 - DNA, 251 bp, Glycine max
  unsure at all n locations
agctttgaatgaaagaagataatgacgaccacgaagactaatgctggtagtagtcttcaagtgcgaatcatatcaatggaagacaaaaggtaacaagaaggcgggcgggcacttatcanattatcatggggatatattatttatatccctcacctttatgatatacttttttttcattttttttatcacaatcattttttcttttctttccggtccaagttttttcttctaatagaccattttttttaata

SEQ ID NO: 32512 - DNA, 449 bp, Glycine max
  unsure at all n locations
tgcatgatttacattctccgcctttctcaagcaaattcttaattcttcttgacatcatcaaaatcttcatgatttacattctccccctttttgatgatgacaaccacctgtaggttangagcaacaacaaagaaaaaatatctatttgcatatagtttactcccccttggttttgcaatgattgcttatatgagacagttgaagatttcatatttttcatatgtaaacaatttctcataaacaatagatcatttttcttactattttatcttttatctttctcttccccttcgccaacatcaaaaacaatcatgaatagagaggagaaagatgttaccacttgttgcaatgtatgagaatcaagtgataccaaaaggcattaaaacaatcattcaataataatgaagcacaaacaagtacaataacacatcaatcaaacacaatcaaat

SEQ ID NO: 32513 - DNA, 388 bp, Glycine max
  unsure at all n locations
agctttcaatcttatatatcttatgcgtgtgcttcgttttcttcatgcataaccaacaaaagtattgacttatgtcagacaaaaatctattaccacattattagttgtataattaagtacaaaagtgagaggaatttggttgctatcgcaaataatcttaataccaacaagtgtccaaaagttaagaagtaaggaccactctaaaataatcgcgccatacctatatcaaacatgcatgatgtacctgtctctataagctggcattgccatgtcacttcaaacactttntgttacanttttagtttctttcaaaatttataattaaatataaataaaaatactacaataactaaatatataaatgatagtattccattaactaatatta

SEQ ID NO: 32514 - DNA, 412 bp, Glycine max
tgagctgaccgttaagcgaggtgatgtgctggacttatcttgtacgctaagcgagttgtcccaatcttcaactttttcttcacagctttttctttacgttttttcatcaatcttcctataaacacttgtaatttttcttcttttaaatactgttggtaaaaaattaacatgatattaaattcctcattatttcattaaaaacaatagtaaattaaaagaattctaatcattattagtcaagatggactatcaattatacttaacattcacagttatcacatgacctgcaccctccaacaccatgattataacttgctgtgtagttgtcaataatatgactgttgtcgatatccattgtgccacaaccgacattgtgaccatcgtcatgaacatcagtgctgtaccaacatga

SEQ ID NO: 32515 - DNA, 344 bp, Glycine max
  unsure at all n locations
agcttgatcttttagttntttatctctaatctttaatccctgaacgaactattcaagtttgtaattcgaactttaattatcttttaattcgttcctaaagatagatcgccaaatctgttgctaactgcacattaatctgttaaagactcacagattcatgtgtccagtattttcgggcaagatgtcctggacatcgtatgcgacattcgtggatcctgcagcttcaattcttcatttgacattttatcttgccttgtgcattgtgcaagccaatctgactccttgacataacgtggacatcatgtgcagcaacttcagctttccttcaatgtctaagtgcttat

SEQ ID NO: 32516 - DNA, 399 bp, Glycine max
  unsure at all n locations
tcagatntcagagctcttcagagcacaaaattcatgctcttctcttcctctcccttcattcatctccttcttactccaagctcttatccatggcctcctatggcggcgagcttnttctagactcatcttctccttgaagtggtgtctcctctctcttttccttctccattccgccggcattcatcttccaagaagaaaaggaatccattgatgaagaagatcctacgcctacaagctccaatggagcttacaccatgtggtatcaagagcatctccatctaggggatgttccttcgctccctctatcttctgtccggagaaatctctntaattacttggtcttcatcttattctccatgtatatcctccattatcttgtgagatggcgctgtctagagt

SEQ ID NO: 32517 - DNA, 295 bp, Glycine max
agcttgaacttccggctgtgcgatactggtgaaaaattgtggcacagtagaacttgaataatcctccacggttactcttcttggctcttcagccatgattgggtcttcaacaagttctatatgagaatgccctgcaataggcaactagaagatgcctcggaagatcgaggttattcttctagagttgtcgatgcttctaaatcctgcaaaaaagttctgattctctctgaactacgccttctacaagtggtgttaatctccaaatcaatgggaatcaaatcacctacagtggatc

SEQ ID NO: 32518 - DNA, 326 bp, Glycine max
  unsure at all n locations
tgcanaatgggtcggtcaaactccgagtatcgaccagattgtagaacagttggtcatgagctgacctaaggtacataacccctcaatctcgaaggcaaagcttggagagactaacaggtgtaaatgactcagtatttatataatcgaaggatacacaatccctcagtctcaaaggcaaagcctataaagacgaacaggtgcacatgacttggtatttatacaaccggagggtatatagcccctcagtcatgaaagcaaagtctgaagagattaaagtgtaaagaatcccatntacacaactggatgtacatcagccatcagtcttg

SEQ ID NO: 32519 - DNA, 369 bp, Glycine max
  unsure at all n locations
agctttgagacgcatgtgaaccttnggcatcatcaaaacattcagcttgatcctttgtctacaaatctctttcatggcctaccgaatgaagacccatatgctcgccttgccacatacatagagatctgcaacactgtgaagatacccgacttccagaagatgccatcggcctcaacctattttctttttccttggccgatgaatcanaaagatggcttcattcattcaagggggaaggtggagatctcatcattccaccaattccctgatgaatcattaagtgaagctctagaccatttatatggcttactccagaagactccaacccatgggttcaacgagcccggttagctaaatatattcattgat

SEQ ID NO: 32520 - DNA, 126 bp, Glycine max
tgcaactttcagaaccatgggagaagatgagtgaaggatctatagattaaattcttgagacaaaagggttagggttgagagggggtgggctgctgcacacaaaagaaagataatggaagttttgag

SEQ ID NO: 32521 - DNA, 409 bp, Glycine max
  unsure at all n locations
agctnttatgtgaaaagatgtgactcttcgcatttgaatttgaatttcaatgttcaaaggtactggtaatcgattaccaaaacattgtaatcgattatagctttttgaaaataattggaacgttgtaaattcaatttgaaaacttttcgaaacaattttgctactggtaatcgattacaacaatctggtaatcgattaccagagagtaaaaactctttggtaaaaggttttgtcaaaaactcatgtgctattcaaatttttgaaaaactttttaatacttatcttgattgagtattctcttcattcttgaatcttgagtcttgaatcttgatcttgattcttgagatcttgaaccttgaatcttgattcttgactctagactntcttcttgagtcttgaattcttcttg

SEQ ID NO: 32522 - DNA, 435 bp, Glycine max
tgttacaaccagtattgtttatcctaccaaatcaggctcatacacaaagaagaagatatatttgtttgattgcacagtgactaacactcaatcgtattacagacagataaacaatcttagcacgtactcttttctctcaaaaaaatcaaggtattttgagagctattttaaacttcaaaagaatttacataaagtgatttttacaaaaaagaatttgaatgagtgctttagttggttcttcatgtcttcaacaagtgttcaatgtctctaaatggatagatttctcctcttaaagctcgtttgaaaaatgtggcattgggcatttaatgcttgattgctagcatgtacttcttcaaaaaccactattctttgctaacatgttgaacacttcaacaagaaatcacttccttttgtgtcagagcatgtttgtatagt

SEQ ID NO: 32523 - DNA, 285 bp, Glycine max
  unsure at all n locations
agcttatcggattatggngcacccgtcatttgtggtactaggtggcgatcgggcgatggcacaaatcaactatcccatttccacaagtcaagcataagcacaccatccccaattgcccacctttaaatntagctcacgtgcacgttgtcccttctcctcattcctctcagccccgggtccccatcaacccctccaagctttcacaatatctagacaattcaaattcatttgtcatgaaactaccttaaacaaagaaaaataaagtggaggcagaatctttgcaca

SEQ ID NO: 32524 - DNA, 463 bp, Glycine max
  unsure at all n locations
tgcatgattntacattctcccctttctcaagaaaattcttaattcttcttgacatcatcaaaatcttcatgatttacattctccccctttttgatgatgacaaccacctgtaggttaggagcaacaataaagaaaaaatatctattcgcatatagtttactcccccttggttttgcaatgattgcttatatgagacagttgaagatttcatatttttcatatgtaaacaaattgtctcataaacaatagataatttttcttactattttatcctttatctttctctctccctttgtcacatcaaaaacaaatctgaatagagaggagaaagatgttaccacttgttgcaatgtattagaatcaagtgataccaaaagacattaaaacaatcattcaaatttaatcaagaaaaaataagtacaataacacatcaatcaaacacaatcaaagacaatcaatcatc

SEQ ID NO: 32525 - DNA, 294 bp, Glycine max
  unsure at all n locations
agcttcattgaatgtagtattgatgtagctattgtcaaggaattctacgcaaacctctatgacctagaagacaagtcacctaagcaggtgagggtcagtggtcatctgatcaaatctgatgaagatactttgaacacttttctgaagactcagcgattctggaagagggggaaaatctttgtgcttattcccggtttgcactcctgaggcttgatcctcangagttggctgctaagctttgcatcccagggaggggattttagctaaatgttgatggtcagcctttgaagattt

SEQ ID NO: 32526 - DNA, 446 bp, Glycine max
  unsure at all n locations
tctacttagtaaatataaaaactaaacaacaaatatttacaatcctaccaaacagaaccatacattgggagaaatatatacatttttgaaaacttttatatacaaaagttagtcgtaaaagacgattaacagttttcttttcagatctttctattcttttcttgaaactcgggcaatcaactctcagatgtcctggttgattacattcataacattttggaagagaggatgaatcttctcctctcttctttggttntaaatttgatcttctttgatttgctttgtttcttaaaaatttccgcacctctttacgaaaaactgaaatcatcatctctctctatttcattcaaatcttctttatcacttccttattgaattgaagatgaagctntaagtgtgattgctntctttctcttatcattctcctcatgtcgattcagtctcat

SEQ ID NO: 32527 - DNA, 410 bp, Glycine max
  unsure at all n locations
agcttgtatgattatggggtacccatcacatgtggtactaggtggcggtcgggcgatggtgcacaacaagttttccacatccacaatgcgcgcataaacccaccatcccctgttgcccacctccatctaagctcacgtactcccatgtacccatatcctcatttctctcaacaccgggtccccatcaatcctctcaagcttccacaacatccaagcaaaacaacattcaaactgcacaagctatcacagccaagcaaaacagagcataggcagaaaactttgccaaaacaccaaccaaatcacagcttttctcacttaaagaccccagtaacaattccttcgttctggttcattaaccgttggatcgactcgaanattntactggaagtctctaatacttaagcctacat

SEQ ID NO: 32528 - DNA, 465 bp, Glycine max
  unsure at all n locations
tctcccttatttgctataaatagggggagaagtgaagaagataagggttcagcctcttangcacttctctctctctcgaaattgctgaggaaaattatttccgtgaagaanatccaagccgaggcgcttccgtaacgtttccgtgagaaattacgcgaagattctcgaccgttcttcaagattcatcgttcgttcttcgttttcttcaatcttcaacgggtaagtacctcaaaccgagcttttcaattcattctatgtacccgtggtggtccacattntgtttcatgtattnttattccgctttcattctcttttatacccccttttgacgtgcttaagtcatttatttaagtcatttctcgcttaatctaanaataaaataaatttccaccgatcgtttgaatagtatcatccgttaattntggctaaaatgaattccgaccgttcggtcgtgccgtaaccacg

SEQ ID NO: 32529 - DNA, 372 bp, Glycine max
agcttgcccgctagaaagccatcgttcatgcacagagaaaggagggacaaattgggaccgactcttagcaaacaaagaaagagcgtctgtcaactggttccctcgatggaaagaaggaagaaccggggttcttatttcatgcacggatttccgaatgttcccttgatggggacaaggggttgcatcagttacaatcctgttcttgctataaggcaacttggctaccctatgagaggggcaccgctagaggaagagctcgcgcctatcatttcacgaggtttcaataagaccaacgtggagacacttcagaaggtccgcaaggcatgggaggtggtgcaaaagaaggacaaagaactcagtggcagtaacaat

SEQ ID NO: 32530 - DNA, 377 bp, Glycine max
  unsure at all n locations
cttctttggaccttgaacaggcaactaactcctctttcanaaccatgctatgtgctcgcgactggtccctttcttccttgagttcactattgctaccccatagagctccgcgaaatttgttccgaccatactcttccttgcgagccctcttggtctcttgttcaaaggctcttgcggcaattgcattctcttcccgtaacccggcacactccttcccaacgtgtgtancggccaacttgaacttctccttggcaagttntgcctttcctaactcgctnntgagagccggacttcttcgtcctcttcagtggcttaaagctctctttgctgacgacttttaacttggcgagccaatctaaacctcgtacatgaacttt

SEQ ID NO: 32531 - DNA, 406 bp, Glycine max
  unsure at all n locations
agcttgtgaaatcaatggaatccaagattctgcttgacacaagtcgttcaattttgttcttagaaatgtgacctaagcgcttatgccataatgctcctgagtttgtattatcaattctacgcttagtaccatgcaatgagaattacacacgaagctacagtatcaagtaaatatagattatcattaaccaagagtgaaccagttccaacaatatctgaattaaaagacaacctanacacattgtttccaaatgaccacaaataaccgaattatgtccaaataagaaactgataccaaattccgtctaaatgacggcacaacaaaagtgtctttcagatccaaataaaaactagtacataataataatctaaagtgccctatagcgtccacttccaccgatttacca

SEQ ID NO: 32532 - DNA, 409 bp, Glycine max
  unsure at all n locations
tgaatgttaatagtgcattggagaagagagcgcgatagggtacacggagaagaagagagcggagcacaataggtcgcatcaaatataatttaaaatgtacgctcaacatcggttttcaataaaaaactgatgttaacaaattgatgagaacgttaacatcggttttattcaacaaaccgatgttaagggtgcttccttaacatcgattttttgaaaactgatattaacgtcgcttcgttcacatcagttctcttcaaaaccgatgttaaggaatacacattatttanaattacccaccccatttacgtaacatgcggtntgtgaaaaaccgatgttaatccgccgatgttaaatctggttcttctagtagtgaaccataccatcaatatttcagttgattgataaaata

SEQ ID NO: 32533 - DNA, 381 bp, Glycine max
  unsure at all n locations
agcttcaacattcaacttcgagcgtctcgttatattatacgactcaattagacatccgagtataaagttattgtnngttgaatgatctcagagcttcaacattcaatttcgagcgtctcaatatatgacgggactcaatcagacccccagtaaaaagatattgtngtctgaattggctcagagcttctacattcaatttcgagcgtttcgatatatgacgggactcaatcatgcatccgtgtaaaaagttattgtcgtttgagttggctcagagcttcaacattcaatttcaagcgtctcgatatatgacgggactcaatcacgcatccgagtacaaagtattggtcgttgaattggctgagagcttaacaatcaatttga

SEQ ID NO: 32534 - DNA, 457 bp, Glycine max
  unsure at all n locations
tcggctcttgatacaggttctatcctatcctattatttttctttgtaatttgtctaggttcgtgttttgtccttgttttgttatttgcgttcttgtttacatcttgtttcgttattgtttgcgtcttgcgttctattatttgcgttcttgctcttgtttcttgtgtctttcacactctgtgtccaaaaaaaatcgcaaaaaaatttgaaaaataaagtgggtgtttgatctttgaacacgaaattgaggcatttacaggtatttttttgganagaatatcgtggatcaaactccctattctacattctctctgaattctgagcattttgatatatagtgtgcctcagacggacaaccgtagcaaaagttatgagcattcgaagtttacttgccatatctggtatcttatctggtatcttatctcgtatcctatctcgtatcttatttgctatcatat

SEQ ID NO: 32535 - DNA, 400 bp, Glycine max
  unsure at all n locations
agcttggtttgaggtacttacccgttgaagactgaagaacgtcgaagaacggtcaaaaaccttcgcgaaatcattcacggaaacgttactgaagcgcctcggcttggattttcttcacggaaacaattttcctaagcaaattcgaacagagagaagtgcctaaggggctcaacccttttctacttcacttcttcccctatttatagaaaattgggggagaagcttgccaccaagctcgcccaggcgagcagggttgcttcctccagaagcaacagccttctggaggaatcttcgggagggcccaagtgggcctggttgctatttgcacccccacttttactaaatacaccaccttgcccttttttggagatntctttttttgaaagttacggaaacttac

SEQ ID NO: 32536 - DNA, 430 bp, Glycine max
  unsure at all n locations
tcttatccaaggctcatcttggtggtgaagctccttcttccatggcttattccttaatggatggcgcctcctctcacctcctttcctttgtcttccgctgcatctccatggtggaaaatcaccattaaaggaccccattgaagctcaaagatccagcctccatagaagccccacaagcaagcttccatcacacggacctagtacttttgcttacctttggctctggactgggtcgcttaattggtcgaccatgtgtcgtaggcagtgctctaacctttntgtggataagctgcgcggctctgcaggtggcgcggcgcgtctgttgcccgctgtcgtccaactccaagctgttgtggtgtcttgccttgcgcctgcttggcggccaatacttcttgatgaaagctcggctagtatggcgcctgatgacctt

SEQ ID NO: 32537 - DNA, 442 bp, Glycine max
  unsure at all n locations
ttgcgtagccgctcttggtgaagatataatcacgcgccacatatccactcttatgactagcatatttggagacactctagagacttgacatgaacataccttccaacacgatgatacgttcctactgtactgtttgagtgacgactgacaaggacccacacaccggacctggatgatacttcatacactactttatgataagtgagtatatatgataatagtcctgagcccgacgcaaaagataacactgcagtattattgcgcacttactaacttcacggaccagatatcacgcngataacaccatcagacaataattccaaccaagaggaaatcatgactacacatagcagacgcaataacagaccagaacgcaacacacacaggcccaagtacctaagtgacttcttataatgaccactggagatgcaaccccgatccc

SEQ ID NO: 32538 - DNA, 282 bp, Glycine max
tgcttctacagttttgtacgatatatcagccaattgactctgtgtgtcattaaactctaatatgcactcgcccttttgaacatggccttgatggatccgacgccttattcaatatgctttgctctagagcgccgaatataatttttggatagattgatccccttcatattgccacaacggatacgcatatgtacaagctctcagccattatcagagagttgctgtctcatccaaatgatctgtgcacataaacttccagcataaatatattccgcttctgca

SEQ ID NO: 32539 - DNA, 400 bp, Glycine max
agcttttgggctatcaatttgaggtcaaatacaagccggggttagagaataaggcggcagatgctctgtcaaggtgtcatggtgacctggaattttctgcgttgttgtcttatcctacttggctggatggagagaagctgttgccgaagtcaggcaggacacaatgcttcagaagacagtcaaagaacttcaaatgaatcctgatttgaaggctggttctactgtgcagcaaggtattttgttttatcagggtcgtttggtgttgtctcctaattcaccttctattcctctattgctgaaagagtttcatgagacacctatggaaggtcattcggggttcttgagaacttatagaaggttagcagctaatttgtattggccaagaatacagagatgggtc

SEQ ID NO: 32540 - DNA, 376 bp, Glycine max
  unsure at all n locations
ntaggctgctcaattgctccaaatagctgcatagaagggcaaagttcagtattgtggtcagcagaggagcataaaccacagactcttgcgacaggtacaaatttctgatacaagggcagctgggttaccaggttaaccaaggcatctagtttaccctcaagcttcttagtttcagatgatgaagatgaattcgtggctacctcatgcactcctctaatgacaatggcatcatttctggcactaaattgctgggagttggaagccatcttctcaattaaattcctggcccagtaggggtcatgtctccagggctccaccactggcagcatcaatcatacttctctccatgttactgagtccttcataaaaatattgg

SEQ ID NO: 32541 - DNA, 407 bp, Glycine max
agcttgtaaattaattaaatttgttatctttgtcctcatttcttggtagaggtccaatatggcagcttagttgtttatggatttattcatatagtaactgtgatcaggtgtcgagtagaattgcaccgggccaacaacaaccgtggaaaaacttgttacattccatattaaacaagtggagtatcatttaaagatttaattcttggtaaaatcagactgtttgccaattcaggaaacaaggaatgccctaagatgatgatttgtttggaaactggtattatttaacatcctttcttctcaatgtgactatgcaagtcattatgtcagcaaatattcacacttttttaaaatcttcctcttttgcaaagtgaaattcacttttggcttgaagcacatgaaaaatatgg

SEQ ID NO: 32542 - DNA, 396 bp, Glycine max
  unsure at all n locations
tgtagaatggctagacatgatacatgtcagggtttggtttggttcaaggataaaagggatgccccacattatttccatgacacaaatgcaaaaatgatgatttggaaactttatgcaaaactggtcatgcatgcacctatgtggacactcaagtgtcaaattttttatggtcatgtgatgctaaggctcacgactcatttcctctattttaaatcaacccaatgtttccaaaatatgttcttttatccatttgtgcattcatccgagtccatttcgggcgtncggcaaatttcacagcattacccttcaggtgtagacacattttccaaaaattggttatgatcaatgaatttttttcaaagaacagttggaagtcatctcttttcaaaagcatgt

SEQ ID NO: 32543 - DNA, 405 bp, Glycine max
  unsure at all n locations
agcttgatagcacgcagagattaacgtcgtctcatgcgcccttcgtcattcgcggccgacaagcccgttgacacgcggagatttacataatcttccgcgctcacaagatatgtcatactgacttttgagtcacgctgacgggccgaatacccgagtggttatccgtataaacctttttgctatctgtaaaacgaaaagcctgatagcacgcagagattaacgtcgtctcctgcgcccttagtcattcacggccgacaagcccgttgacacgcggagatttacataatcttccgcgctcagaggatctgtcatactgacttttgagtcacgctgacgggcagagatacccgagtggttatccgtataaacattctttcttgctatctgtaagacgaanagcctgat

SEQ ID NO: 32544 - DNA, 451 bp, Glycine max
  unsure at all n locations
tgtaatcaaggaaatcatggttattgcctcccatatacaattccagagaggccatggnggagggaggaatgaagatgatgggtaattctagcccacttcggagactcgagttagttgggtagggtcaagaaagaaattctgagagagaaagaatgaagatgataacgaggaatgaagacgaagatgattggtttcggaacatgcatatttatactgaaacagaaacaaatttcttgtgattcagcatccaatccattcttttcttttctgggagttggaagatgcagcccacatgccgganatgaattactatcactattcttanaccagtagtgtaccatttcattacaatttctggcatctatatacacacgcctaacccacctttgcccatacccttttcatgtttgaagaggtaacataccaagctatgcttgagtgggttactttc

SEQ ID NO: 32545 - DNA, 506 bp, Glycine max
  unsure at all n locations
cggncggcgggntttgagaccttgccantacccacacttttgataatnnaccatctgagctgtgnanaggantgaagctatgataccacctgttgtacttgtgggcttacatatgaataagaaaggggggggggttgaattaagatttctcaagctattcccctccgtattgagtttgcttggatctcgacccgagacctcggaggccttgtaacgtgaattcctaaatgtgatangatctgcccctaccggtagaagcttttatgttatttatatgtatgaagtgctgggactatgatatgcacacgcgattcttatattgggtcggcatagtatcttgcgtaagtccaaaccccaagagatctcgctcggatgtgaacattataacatgtaatttaaacctattgaaacagacgacgaaaacttttctttgtctcggagggcttcgaaaatagagggaggtgttgaccacgtttcgaacgatgagattacaagagcgtccgtcg

SEQ ID NO: 32546 - DNA, 135 bp, Glycine max
gagcctatgttcccctttctttgatttgaagctgattaccagccttacgcgacaaaccatgatatcaccttacccttaaagaatttcggagctctggaattgctttgggaataagcttcggaataagcgtgtgtg

SEQ ID NO: 32547 - DNA, 425 bp, Glycine max
tgcctgtccgatgcagcagaaatgatggcctaagtgatgttgtggagtggttacgagcccgaatgggtgtaggcaaggacaacggcagaataactagcctgataaatgcctaagagaaatcatgggaagtatgggttaagctataaacccactcacgcagatataaacagaaggattgcgggaccgcaaccaccgagtcaagtcttcgcggttgaaacaagaaggcgaaggaaacccaccctgccacataagtaggagctttataagcgtgggtctaggggacgaacgtcaagttgttgcaatatacgaagataatgttccgagtgcattgaatctggtacgaccgtgctctcctaattctcgactaagaaaattgcgagtggaggagcgcccggacattcacgcaacaagcataatgtacacct

SEQ ID NO: 32548 - DNA, 306 bp, Glycine max
tgatattattattatatcgagtgaaagggacaagctggctgtggatgtgctgaatatggatttggtagccactttctaagttcagcatctttttagaatttacgagagcattcgttgaaaacataagtgctggacaaatctgtctattaaattataccaaatcatgtttctggccataaattctccgctcccttaaacattctgtactgttcttatctttaaatattttcttcaattctttttataaggtttatcgacacttaaattaacataatccaaaataatcatgatccgaagaattggata

SEQ ID NO: 32549 - DNA, 293 bp, Glycine max
atggtgacactatatgatgggatcaaccatatcatagcatactacagaatctaatattgctctataatctttatattctttcaacgaccgatcgctagtgtactacacaagcattcaccatgtaaactgcttgcttctattacactatgtgggcgactctctcctatgcagatgatcacatattcctgtaatacaccgaaaggctaactttgtttacacacgaaaatgatcttcatgatgactatctacggagatataatgatgagatgtatagaatgtaatcttaaaaacat

SEQ ID NO: 32550 - DNA, 449 bp, Glycine max
tatggacttatggtttctatcttattgtgaaaattttctaggctttggagaaatataggcccttgaacatactagctatttcattgaaaggttggagaaagagcttgaagagtatcatcaacaccttgcaaagtttaaaaaagggaaagaggataccggtaaagatgttagttttgttccatattaatttaaaaaaattgtctatacaatgcttgatttagaaagaaaaatgtcataaacaaactcgttttcttgcctttctgtcctctgcaagttggaatatatcataacatttataataaattgtgatccagttgatgttttgaaagtgtggcaaagcacatccactagggattatgaaacagtttgattacactagacaagtataatttaaaatcaaaatgatgagaagagaataagtggaaaatgactaagctatataagtgttt

SEQ ID NO: 32551 - DNA, 457 bp, Glycine max
  unsure at all n locations
tagcaaccagccccaaacccaatttttgtcgaaaccaagtgtcatgatttctatattaccaattttgctagctgttgatgttgcatcatagttttgctatgtcatctacctttggtctcatctctttaccttacaattcaggcaattctatcattaccctttttcaatatatagaattggcaacaccccacatattaatccaggaaattccaccactaatagtcagcctataatccataaccaatgaagtcccccatctccaatttattccatcttctaattttattgtagtttctgcagatttaaaataagcgtctggttcttcgttttaacataaatctattgcttagcttataattcacccaattctgcctttagtcattntcaacatgcagaactatcaacatgcaaagagatctgattatacaaaagccaggatcaacagaaaacgtattat

SEQ ID NO: 32552 - DNA, 422 bp, Glycine max
  unsure at all n locations
gtacgtagtacgtagtgaagccaaaggtctgtcgacaagcataatttcatcatctctgaaggacaactgtttaatggtacatacgtgttcggtgcaaaactagtagcactctaaaaaaataggccgctgtcagaggccttctcattgactatagtttaaaaaatgcaataatgaagataagcatctctcgactggcgtaagaatatcaagtagaaaagaaaccattacatgtaagcttcggcggttatccataatcaggtcattcttgatttccctcaaacggttcccctcttttacaggattctgaatgtgtttgtgtgttcctcctgaagatgaatattttggaagtccctagtacacgtaaatttcttcaaaactttatactntgtttgggaagattagactgcaactggttcacttac

SEQ ID NO: 32553 - DNA, 380 bp, Glycine max
tcttatccaaggctcatcttgcgggtgaagctccttcttccatggcttattccttaatggatggcgcctcctctcacctcctttcctttgtcttccgctgcatctccatggtggaaaatcaccattaaaggaccccattgaagctcaaagatcaagcctccatagaagccccacaagcaagcttctctcccgtggaatcagagcacaagagcttcaagtaggtgcaccttaaacctccattaattatttttctttaccttctcttccattgttgattcttcatttttctccatgtatctgctcacatgtcttgttctaaatgttattaacatgattcgttagagtttccaccgattaaacttgctatagaagttagattc

SEQ ID NO: 32554 - DNA, 439 bp, Glycine max
  unsure at all n locations
tgtgatggatagcaaaaggagtatgagtttagtatatacttatgtgtggaaggaaaaaacctttcggccttatgtctccctaaaaccctcttttgtgctgaaatactttaccccaaaacacttctccttttctccaagaaacccaccattggagaaaccttaagctttggtgttgtgcaaaaagcacctctcccctctccctttagtttttgttgactgtcccttggtgaagtaatctacccctcttcctccctttgttccattttccgtttctcataaaacatccatgggagctcatgaccaagattgggttttggggttttgatttcgctcgtggctatttttgggtttggggcaatattgctgagatgaacttgncgctggagtcaagaaaagcttctcncttggacccaaagtcatcatttctcctctctctcac

SEQ ID NO: 32555 - DNA, 456 bp, Glycine max
  unsure at all n locations
ctctccccaattttctataaatagggggagaagtgaagtagataggggttcagccccttaggcacttctctctctttcgaatttgcttgaaaaaattgtttccgtgaagaaaatccaagccgaggcgcttccgaaacgtttccgtaacgtttctgtgaggaatttcgcaaaggtttcgaccgttcccgacgttctcattcgttcttcatcgttcttcgatcttcaacgggtaagtaccttgaaccaagcttttcgattcattctatgtacccgtggtggtccacattgcgtttcgtgtatttttattctcgtttcgtttactttttatacccccttttgacgtgcttaagccattntatttaagtcatttctcgcttaacctaacaataaaataaatttccaccgatcgtttgaattgtattatccgctaacttcggttaacatgaattccgaccg

SEQ ID NO: 32556 - DNA, 409 bp, Glycine max
  unsure at all n locations
gttcgattcattctatgcacccatcatggtccacattgtgtttcgtgcanttttattctcgttttgtttactttttataccccctgttgacgtgcttaagccattttacttaagtcatttctcgcttaacttaaaaataaaataaatttccaccgaatgtttgaattgtattatccgttaacctgccccccaacaattccgaccgctcggtcgtgccgcaaccacgttggaaatcaaaaagagataaaaaaataatataaataaaaaacaacatcttttagtaaaataaagcggaaaatcaattggacgttttctctctgggatctctcattcttaatcgaattgattaataactaaagcgaaactaacgctaatatcaactcgcctagtcaagctcgtccataaaaat

SEQ ID NO: 32557 - DNA, 415 bp, Glycine max
  unsure at all n locations
tgccacccagctcgcccaacatcacaacaacttttgaatcaaaggatcttgcttctatgacacatgctaagctatttgggaaattaagggaatacgaaatggactagataataatggttgaggaagaagaaatagacaaacagattaagggcttggccttgaagaccaccattctgttaagcgcgatagtaaaatgacaatgcaaaagggttagatgctaagaatctaaattttcttgtaaaatggttagacaaatttctcaagaagaagaagaagaattttgatgatagaacctttcagtaaaaaaagaacttcaagaagagtgaaccctcttcctcctctggctntacatgctntgagtgctacaaaacaggccatatcanagtagattgccccacctaccacaagaagcaat

SEQ ID NO: 32558 - DNA, 441 bp, Glycine max
tgagtgagccaccactactattattttgtatagtggaagaatctccatattggagaattagaatcgtatgctcccattactaccttcctttaattactaagtgtctatcttaaacttcacgaagtggaaaagtttgagttttcccaacacttctaacaaacattagaataaatatttacatctgccattccaacaatccagattttgtaaaataaatggttcctaacatttttctactattaattaaatttatttgaaataataaattttggtgggtgttactttaaaatttggagagtgatcgacaaattactaaatgaaaaagtgaaacttaataaatatgttgttttcaataaattctattcgataatataccctgttaagaagagtgttagagagtgcccgtcaatattcgtcttattttgtctcatctaccatttg

SEQ ID NO: 32559 - DNA, 318 bp, Glycine max
cgacacactgaccgctactatagcttgaacatgacacttatttcacaaccatcggtctttctcatcatctcccaaatgctccatataatatatttcttttcagcctcaaacttatcttatcttgctcaataaatgcgcgcatgatagggcactaccctgaatctgacataatactcccccccacactccatctattggttcgaatggatctctttgcattatacagcatcaccttatctttgaccttgttggcagcaaaccgaagacataccacctgtccaatccaattcttatgctagtcacttagctaccacctac

SEQ ID NO: 32560 - DNA, 314 bp, Glycine max
  unsure at all n locations
ccaactatttaatcgattgtcttacccgcacaaaacatgtgctaaatctcaatcaaacaaaatcctaattaactcttatagtgtgtccgcacggagaaactcacaactctaaaaaaatttaaattctaagaatttccaatattccaattgaaattctctcattctccaaactttgtgtttctccccccccctccaattatgagatgaaaaaaatgaatgaacaaaaagacaaaacatgattgctatgctagttatacgtattgctcctctatactcacactccatcgatattttangagctcacacggtgtttc

SEQ ID NO: 32561 - DNA, 438 bp, Glycine max
  unsure at all n locations
cgctactnacacgctatatctcttttgtaagactattaaacattatacatctcttacaatggaagacagaagatacacaatactactattcctaagaacacttccttctccttaataatgatcattcctactctctattctttcacagacatcactttcaaacacctaacgcattttcccccctcctccgcgcactgaatttaataggatggatataaaattgacacgagtgaccttcttactcccttgaagtgttctgtttcgcactcgtgatatcaccgtcaaaccgagtgtagctcccccacgttgagacctatgcgccttgcctcttgccacacacaacttctttgataagtctatcttaaagacttcccattcctcacaacgattatcccgattatactaccttacttggaacactcaccaaaacaaggtccc

SEQ ID NO: 32562 - DNA, 348 bp, Glycine max
  unsure at all n locations
tatcanaatctactcttctangaacttatagaaagcttcacattctatcttatgaataaggtctcaattaatctgaacatattgaatgacggtgtgtttgcgagaacttgtgtaggcctatcttatgacataaatgccggtgtaagtgtttggatgagctcatgacagtaacttacgatatgtncctccctcgccccaactaatttcaatatnctctataacatagcttatgaaaacaacttaaccgctgtattaaaacagtttaatatttcatcttcaattctcaaaatactttttacataagtgcctacatgtgtgtaattggataaacaacttaagaacttattc

SEQ ID NO: 32563 - DNA, 458 bp, Glycine max
  unsure at all n locations
tcaagagaccgcttcaacttcaagaagatcttggaatgtggcatattcaaagagtcattgttactccaaaagtctaggtcaaggtgaattaaggagagagattgcaacacaaaactttttcattcaatcaatgagttccataggcatggagtccttccaagaggtactaacttatcttttttagatcaactgccaatgtgataatacacaaagtttagatcattttagacctatttctttggttggatgtttgtataaagttttggcaaagattttagctaatagaatgaaaaatgtacttgataaggtgattgatcctagctaaagtgctttcctagaggggagagaagttctacataattcggtggtggccaatgaggttgaggatgaagtaaaaaggggaaaaaagtcatgtttgttgctcaatgtngcatttgagaaggccttcaacttgatgt

SEQ ID NO: 32564 - DNA, 457 bp, Glycine max
  unsure at all n locations
tctatggaggctggatctttgagcttcaatgagtttcttcaattgtgattntcaattctagagatgcaacgaaagatgaaggagaagaagtgagaagaggtatcatccactagggaaaagccatggaaggaggagcttcaccaccaagagacagccttggataagaagcttagagaggaagattcttggaggaaagaatgagagagagagaggggggaggcacgaaattgaaggagaaaaagagggagagaagttgaactttgaagtgtgtctcacaagttttacattcatcaaagttatgacaagtgttacacatgtttctatttatagcctaggtcactaactaaatgaaagcttccttgagaagctagagcttagctacacatacccctctaatatctaaggtcaccaccttgagaagcttccttgagaagttaaagcttagctacacacaccc

SEQ ID NO: 32565 - DNA, 456 bp, Glycine max
  unsure at all n locations
ntatactntntatatgttaaaatcttagggaatccttataatatatcaataaccaccacgaacacattctgtcagattatcaagagaggttatgaagaatacctagatccataatacgtagcggaattaacaattataaggagcaattgattggtgatcttcttcaaccaaatcattgttttccttgttgagacttcattttctcctcaaatggggagaagggaagttgtttcttgatttggtgtattggggaccacaaccatgctttgggtttttaacctattagagttttcattattccctaacgggccaaacctatttccacttttaagcccatattaattttctgatgatagcctaataggctcaccaaattagatcacttatattgagcccatagaanaatataaataactaatataaatgttataatataatatgtagcccacattaatt

SEQ ID NO: 32566 - DNA, 441 bp, Glycine max
  unsure at all n locations
ntgtataatctgagatactagtctacaatactaccagatcgaatttataaaaccatctttcttaaataattgaggttcataatcattagtttttttttaaatgatatatgaacagtgcagcttttttgtcttggttataattgcattgatccataccacttggttacgagcttgcttagaaactcaataattagagctacttgatattattgtgtaatttttttgaaactgattgcgaggacactgtcagcaactcagcatatattcttcttcttttttcattaactatcagcatatattctatatttccaaattttagtggacgatatataatagtttgatattttgattcatagtcttctatgtgtcagtgtatttattatacatgccccggccttttcttagctccgggaccaagttctacgtaaaatacaattatat

SEQ ID NO: 32567 - DNA, 403 bp, Glycine max
  unsure at all n locations
tatagatntaaccaatgcttctatctagtttatggttctattatcacttcagaatgtttgtctgaatttttcttcagaatgtttgtactgaattttatatatatttctttcttactgaattgtgcgtgtgcgtgtatttatttattatgtcttcagttgctcttatcgctgttcttttgtttcccccacctaccctttgtaacgaatctttttaatatgtaagctcattcttgctcgctattgtatttgctctttaatcattcgactgaccttttttggctggatgtacggactgcgttagtgagttccacttcaatccagtcttgaacatcgaactcgatcaaactatccatgtgcttattgactgagctgatcgaattacaacatcaaatatttttaccgt

SEQ ID NO: 32568 - DNA, 391 bp, Glycine max
tgccgccacggagttttccgactatgctcttgtgtggtggaacaagctacaaaaggagagagcaagacatgaagagccaatggttgatacatggacagagatgaaaaagatcatgaggaagcggtatgtgccggctagttactcaagggacttgaaattcaagctccaaaaactaacccaaggcgcacgggggcgaggagtatttcaaggaaatggatgtgctcatgattcaagcaaatattgaagaagatgaggaggtaactatggctcgatttcttaatggtttgactaatgatatccgtgatattgttgagctgcaggagtttgttgaaatggatgatttgcttcccatagcaatccaagtggagcaacaattaacaaggaagggagt

SEQ ID NO: 32569 - DNA, 226 bp, Glycine max
tcatgatgaatcacgattaattcaaagaagtcttgatgattattaatagctcaaagatcaagactgagttcaagattgaatcacgaacacctcacggttcccgaggaactttgatcttccgaatcaagaatcaagtttcaagattcaagcttccatgaattaagatctcgattccggaatatcccccccaccccagacacttaatagggaaagtatgaatttttct

SEQ ID NO: 32570 - DNA, 450 bp, Glycine max
  unsure at all n locations
tgggatactcctcgactnttatatcaaaatttgtttgacataacaagttcctccaagccaagctattaggcacgttaacgttcatgtccaccaatccattgatccactctatatatacttggtagtttttcattccctgcccgacacgttcacgcaaatgctcaaaagccacgaggatccgctccctcttctccgtaatgataacgtttcggcctctcattggtttttcaggcacgcgggaaagagattcttggatttgggaaaatgacagaaagatacatacccatgtgctgatggttgagttgagtgtgtttgaatgttcaacagtagtatgcctgagagagaattgtttctctgggaacaccatctggcatgtcatggctatatatgaatgatttatataagtactgcatgtatgcagccatattggatctttgtgggacatgggat

SEQ ID NO: 32571 - DNA, 408 bp, Glycine max
  unsure at all n locations
tgctgccaaaacaacagaagtacagatataatagatggaactgttggttaatatctactccatatcccccctgcaaagaatccaaactcgttcgacaattttatctgaatccgaaatagttactgtagactgtgtgtctatatatatatatatatatatatatatcaaaagacgttgggatcccacatgacaaatcagacaacaatttttgggagtgtgaaacatggctgttgtagtgcatggtggaagggaattaaggctgagtgtgattgacagacacaaataaagcgactcttcattttatgactntctccatgaaattaggtactattatgtccgactctctaaaattattagggctcctttaaaaaggtggcaagttttttttctttctttctcttttcaaat

SEQ ID NO: 32572 - DNA, 432 bp, Glycine max
  unsure at all n locations
tgatcaanacanaatctatacattcgaatccactcaattcatacaactctcattcatttcaaacacaaccattcatttcaaacaaaacaaaccactgaatatcaaattcaactagttcattgttcaaacatgcttttgtacaagctacacacactcaaacaacagaaatttaaaagactactccagcataactaaataactgacatgaactaaatagctgataaaataaactattcaaaatttgcaaaaatttaaaaactatgcaggattcaccatctctcccttgataatggggaaagtatctcaccagctcctcaaacttggctggatatttagccacaatcatgtttccctgcttgagctccaagaactccatctctttcttgttcctaacttcctcgggaaagtatntctncaaaaataccctcttga

SEQ ID NO: 32573 - DNA, 426 bp, Glycine max
  unsure at all n locations
taggctaaattaggctaaaactnttgtaagctacttgagttgagtctagtcttacatgagggatttgcggacgaaactcagtttaagttagtctaaacgtaagaggactgtctaaattgggcctggtcttacatgagggatctacggacgaagcttggattaatatggcctgatgagcatcgaggctaagtaatttaggctacaacatagaacataagagcatgattgattagagaaatatatttctatacatcagcttgtttgttagaaagacctaacatttctacctactgctatcatttttatttaccttgcattntatagttctagcataaaagtttagtttaaattctgtctaaaattatcacttatacatgttatctcaacaatgcttcaattctaaacttaagtcacgctaacattagt

SEQ ID NO: 32574 - DNA, 403 bp, Glycine max
  unsure at all n locations
nttaaagaatcatgctnctggaaaatcatataaattgtggtcactcttaaataaatgattggttaaaagtcacacaagataaataattatagaaaaataaaatatattaaaatttcacatcaattataaataataacaaaataaatttacaaactgcttttataagattaatatatatatatatatcatatatataatatatatatatatatatatatatatatcacatgattaataaaacattctctcctcttttccgctctggcctttgtgttattggagagagagatatcaaggcctcgccctctatatattatgtctgtctcctaattttaatgctaactcacacaaattacatgtctaaaaattcttatctgaataccgatagtgttctttcgtcaag

SEQ ID NO: 32575 - DNA, 461 bp, Glycine max
  unsure at all n locations
ntcacaacatccaagcaaaacanaattcatacagcacaagctattacagccaagcaaaacagagcaaaggcagaaaactctgccaaaacaccaaccaaatcacagcttttctcacttaaagaccccagtaacaattccttcgttccggttcattaaccgttggatcgactcgaaaattttactggactctctaatattaagcctacattgtgaccgttgggatctactagcaaacatccagaactcattctgtactactctttccacagccaaccacacacaagcatttttctgcacaaagccaaaattctgctgcacctattttgacagcaaaattctgcataagtgcagattttcgaaaatcacactttccctcatccaatattgccctaatcaattcctacaagtcccacatcatgtatcaatcatgtctaaaccaaagtcaagctttanagcacaac

SEQ ID NO: 32576 - DNA, 453 bp, Glycine max
  unsure at all n locations
ntntatccaagacactctcttggtggtgaagcttctacttccatggcttattccctagtggatggcgcctcctctcaccttttctcctttatcttctactacaacttcatggctaaaaatcaccattgaaggaccccattgaagctcaaagatccagcatccatagaagcttcttaagcaagccccatcaagtgtatcagagcacaagagcttcatgtaggtgctctttaaacctccgttaattttcagctataccttctcctccattgttgattctgcattctttttctccatctatttcctcacatgtcttgtgttgaatgttgttaacatgattctctagaattttcaccgattaaacttgctatagaagctagatttgattctctatggttcacatttcttgttcttggtctggaaccatgaattgtgttgagtttgggttcctttgag

SEQ ID NO: 32577 - DNA, 453 bp, Glycine max
tgaggaatttcagggaaccactagagatgctgctatcgctaccgaactaaacaagtgagcgcgcttagagataagggatgagtttataacaattggggttagagtgaacatgtgtagggatccttagaggatcaaactggggttaattttggggtattttatgcattttaatttttctagtacctgataactacaattgctcatgtttgatgggtcaattgatgccctgatgcaaaatggatggtttaattgagtgtttgactttgaatgttagaatgaggggtcaattcttgcatgttttcttgaaattgattaaggggttttgttccccatgatgtgatcacatgttctatgctattaaccgaatgaataagtgaatgattatatgccttatatgatggaagattgctattgtatgagaagtaataatatgttagtgagaaggtgttatga

SEQ ID NO: 32578 - DNA, 419 bp, Glycine max
  unsure at all n locations
tgcttgtggagcttctatggaggctggatctttgagcttcaatgaggtcctttaatggtggttttccaccatggagatgcagtggaagacaaaggagaagaggtgaggcaccatccactagggaataagccatggaagaaggagcttcaccaccaagataagccttggataagaagcttggacgatgcttcatggaggaaaagaaaggaggagagaaagagagaggggggagcacaaaattgaaggaagaaaaagggagagaagttgaactttgagttgtgtctcacaagactctcattcatcanaattacaacaagtgttacacatgtttctatttatagactaggtagcttccttgagaagttntcttgagaaaacttccttgagaagcttctttgagaaaacttccttgagaagct

SEQ ID NO: 32579 - DNA, 460 bp, Glycine max
  unsure at all n locations
taacananagaaaacaatagacagaagaaagctntacaagatggttgacctaagaagattatgacaacaaagaacactattatacaaggttggcatgttctaaccaaaatagaactgaaagactgaggttttttttttaaagttgttgattattctttgagttaatattctattaatttctaacccgccgtcgccttattcattggcaggtgtttattttaatgaaacaagttatgccctatacatgcattttgcatccaatgattgaagagatggatgaaattatagttgcgcaagccacggcacatgccggttaattgagaaattaatcccaaataagtataaaaattaaaatacatatataatgctntacaaaaatggcatataatgcctataaaagggagggagatccttgtagctaagcattccaattntcacgactatacttactatatatata

SEQ ID NO: 32580 - DNA, 420 bp, Glycine max
taatagaccctcgtggaggtacagcagtaagaagaacgtataaaaccattctagaagctaggggtggtgatgtaaacagactataggccgctaggattgttagttagctgttacgtaactaactacatgtataaaagccatgcacgaacccgtgaagggattatggaaataatattctcatttccagctagatctttctctctcctctcttctctcgtagaatatacagtctcgaggaatgctacctctagcattggtgctttcattgcatcctctccgccatggctgatgcaacacgatcaaagacaagcatggagcgttgggaagacgcgtttgcaaagctctttgcatccatgacgttaaagttcgacgaacttctcagccatataaatcacctagaaagcctccacgccaacaatc

SEQ ID NO: 32581 - DNA, 451 bp, Glycine max
  unsure at all n locations
gttcgattcattctatgtacccgtagtggtccacattgtgtttcgtgcatttttattctcgttgtgtttactttttataccccctgttgacgtgcttaagccattttacttaagtcatttctcgcttaacttaaaaacaaaataaatttccaccgaacgtttgaactgtattatccattacttcggctaaataaatttcgaccgttcggtcgtgccgtaaccacgttaaaaatcaaaaagaggtaaaaaataatataataatcaaaaagacatcttttagtaaaataaagcggaaaatcaatcggacgttttctctttgggatttctcattcttaatcgaattgattaataactaaagtgaaactaaaggctaanatcaattcgcctagtcaagctcgtccataaaaataggctcttgaagtttgtcatttcattntctcactaagtaaaa

SEQ ID NO: 32582 - DNA, 429 bp, Glycine max
  unsure at all n locations
tgattcgtgagttgattctaaccttggtttcactttgattattagtcaattaattcaaggaaacttccaaagaaaaatgcccgattgattttttttttattattttattcaaagatattttgattattttattattattttttcaagatattttgattatcctattattattttgctttttccgcccactcacgttacaacgtaaacgatcggttagattttactttaatagtgattaaacaacattacaataccaatgatcggntgaaattcattttatcatttattaggcgagataacggcttatataaactgttaaagcacgttaaaaatggaagagaagacaactaacagtaagcgaaattaaagtgaaagtacacaacaagtcgggaccactaagggtgcatagaatgaattgaaagattcgat

SEQ ID NO: 32583 - DNA, 332 bp, Glycine max
cggtgacaataattgggtgaaaataatacatcagatgaaagataaataggcaactgctcatatgcacaaaaagttcatttgtgggatcaaaacaacgtcaatttgtgaaggtattaaatcattcatcaagcgatatgtggagaaaaagaatagcctggttgatttcaacactactagaaaattccttttaacgcggttctaatatacatttaacgacggtagttgaaccatctttgaagccaacgacattaaaagtcattgatgtaccatgacgattatggaataaaccatcttaaaaaatatgtctcttctaagatggttcttatgtaaga

SEQ ID NO: 32584 - DNA, 454 bp, Glycine max
  unsure at all n locations
ggcctaattaacctgaaattgagaganaatgattattaaacacacaaaatggaagtactaagtatttattatctatacttaacaaaaaaatacttataacactacaaaataaccataaattggaagagtttgatacaatttacataagttttatacacaaaagttattcatatttaccgacgatcttcttacattcttattagcagcctcaactgccccattcatcttgggccgataagacgtggaattatggtgttggattttgaaatcctcacacactttcttcatcatattgttgtttaaattggtggcattatcagtgatgatctttntgggcaaaccatatctgcaaattatttccttcttaatgaacctaatcaccacattccaagtcacactagcatatgaagctgcttccacccatttgctgaagtaatcaatggtgactaaaatg

SEQ ID NO: 32585 - DNA, 448 bp, Glycine max
taatccatcgccactttaactaataaatgaaaaattattcatttaattgatactatgctaatcatataacaatgaatttgagattcatattacctcgtaaccaacggatacgatggtgttcaattaactcttgctgcaatgaagagcatgcgataccataccccagattgcaacaatgcccacagctaccatggttttggcatcagggtcagtggcactacacatttctctgtacatcgttgccagacaagtagagccccaactataccacctgactcggtcgagatcaaccaacacagtgaggtacatcaaatgaacctgatttcccatcttgtatggcattaaaaccccaccaattagctgcaaaatgtaagctctacaatgtgcttctaactacttgtgtgtcggttccaagtgaagcagtggcatattatcttgcaaccactta

SEQ ID NO: 32586 - DNA, 188 bp, Glycine max
tgatgtcgagcgtactgatgggtaccatgaggtgtcttctgtggtttgacccacgcgggtgtcgaagagactgcatgggcatctccttccttcctttatgcccccgttgtcccgactcttttggcattagccctcgcggatcaaacgtaatcgaaccttcctcttttcaacacctaatagctcccccc

SEQ ID NO: 32587 - DNA, 302 bp, Glycine max
acatttatctgtatggtgatctgcacaagaacatagaccacagactctcgcaacaggtgcagatctttgattcatggcaagctgagttactaggttgaccaacgcatacaattttccctcaagctttttatttttaataaatgaagacccccccccccacctcatgaacttctataaagacaatagcatcactttttgcactgaactgttcggagccggaacccactttctcaatcaaattcctgacctcaacaggcgtcatatcaccacaggctccaccattggcagcattaatcatactc

SEQ ID NO: 32588 - DNA, 434 bp, Glycine max
  unsure at all n locations
taatccatcgccactttaactaataaatgaaaaattattcatttaattgatactatgctaatcatataacaatgaatttgagattcatattacctcgtaaccaacggatacgatggtgttcaattaactcttgctgcaatgaagagcatgcgataccataccccagattgcaacaatgcccacagctaccatggttttggcatcagggtcagtggcactacacatttctctgtacatcgttgccagacaagtagagccccaactataccacctgactcggtcgagatcaaccaacacagtgaggtacatcaaatgaacctgatttccatcttgtatggcattaaaaccncaccaattagctgcacaatgtaagctctacaatgtgcttctaactactggtgtgtcngctccaagtgaagcagtggcatattatc

SEQ ID NO: 32589 - DNA, 592 bp, Glycine max
  unsure at all n locations
cccctcgtcacttctntcacagtcgacgaggcagtntgagagaaagttcaacacgtcacgctcacacatacccctctcccacaaccgcggcgcggcgcnnctgctgatacactcgtattacgtncactatatatactacagctacgcacgatcttgcacatcacgacaactacaacagtgtctgcttctcattaaagagtgcatcatttacattcagaacagggatgactatctgaccgaacttgtcgatgttgttctggatacctcctaccagcataagtctcaatgtatgataccctatcttcacaccataaccattggttgactgccctcgccccagcaacggccaactggacgtgtatacaagtagtttgcatccttatgaatgcgatctcacatataaaactcgcccttctatcttctaatgactcattcagaccttgcgaaactcacctcgaatgctctctcacccatctgactcgaagatgtattcttcctcacatcacctatccagactattccgagccacactatagccatgaacccatgctcgacatccacctgttcttccatatcgcccctccccccgccg

SEQ ID NO: 32590 - DNA, 514 bp, Glycine max
  unsure at all n locations
cgacggcgcngnnnncttgagacgctggtatgtacgcgcactatgaataatcatgtgcctcgagatatcactaaataagcaacgcgttagctacgaacgctctctatcgcagctaagctgacgcggacgctgtgctgcatgagattgtccacaactggtacctatttcgaggaatacgggccacgacctgtaatacggggttcaaacgcgatactggctataatggcgaaaggacttggtgtgcccacccgtcaacgctttgtgatattcataaagaggagatgaccacgtgttggtccatggtctgataaaatatagcctgaagttgatgacatccctccgtgcttctttattagcgtgagcctacgtccgtccgatgaacctatttgacactcatggggggtaagaggatcacatcatgcaaacctgntacgcgggctcacacggacgatggatctatggcttcatggagcgccttcaacggaacgttgccacatgatattcactagacacg

SEQ ID NO: 32591 - DNA, 318 bp, Glycine max
ccttcaagtcgcaagaacaatcataagttgaaatttggattcaaataccttgaaagtctggcttgagaaaaacagaagctgactctaaagggacttgaataagctcggtcaacagcttgtggctagaaaagaacataccaaaccaattagaacagatataaacaaccaaacaatatattcaggactcccctcctccggaataacttaatataagccagtgccataattcgataatcatagctcaatagggtaacaaacaatcacagtcacccacattggaatagctttcattgcagccgcaggactacagattcacca

SEQ ID NO: 32592 - DNA, 397 bp, Glycine max
gactactgatataattaaggtggaataacaaaaatggaccatatccgaatttcacaatatataaatatgagcaagtgtttccccaagtaaagtcatgagtacaacctcgggatacagatatatatgatgacaaagcaaatgaatgaatatacacaaacaaaagtattcaagcatatgcctaccgcatcaccatctataaaagaaaaggtcctaggctcaaagcaatcatctctaacaccaaatcagtgtggaaactacacataacataagtgagcaggcgtccacacataacatatatacctaacgaagtgatccacacctctagtcacagtgggtatccatcagctccaagtgtactcatcctcgagatggagcgtcgactccccgacctacatct

SEQ ID NO: 32593 - DNA, 406 bp, Glycine max
  unsure at all n locations
tctggtgggacatcttgacttgctctccaatctgacattcaccacaaattctgccttcttctattttcagattgggaatgcctctaacagcacctttgtcaatgattttcttcatgcctcttaagtgcagatgtccaaatctttgatgccatattctgacttcatcttctttggaggacgcacatgtggcgagtaactggtttcttgaggtgtccataggtagcagttgtcctttgatctgctcgccttcattagaacttcactcttctcatttgtcaccaagcattctgactttgtgaagnttacattgaatccttcatcacacagctgactgatgctgatcaagttcgcagtcagtcccttcaccagcagtactttgtccagactaggaagtccatcatggact

SEQ ID NO: 32594 - DNA, 488 bp, Glycine max
  unsure at all n locations
cgcgctganggngnttttgatgcantcgctagacccacgngaantatagaaactcacgctctgattgtatgtgatcctaaatggatcacaatctacatatttgctttgaacctgtcacttgaggcaatggaacataatgaaatctcacggacaaatctcacgcatagtcttgagtcttgaagggcacatgtcatacatatcagactaacgaatgtcctgccgccacgatccttggatctgcccccccctccgcattactagaataaaaataagacttaattttcaatctatactgcaaatctctaaaactgcgttatgcaacctccatctcattacgtatatgccccacccaggtctgcgatttcaccagactctatattttcacgaacatctcagcagatttaatctcgttaaaactcatatcgcaatcaaattataacaatattacgtccacctctgacctctgacgagacaaatgagggtctccg

SEQ ID NO: 32595 - DNA, 458 bp, Glycine max
  unsure at all n locations
tctagccanatggacttaccttgaattaattcctttgatagcccctttgagcctatgttccccttttctttgttttgaagctcattacaagccttaagggaaaaaccatgatctcaccttaaccttaaggaattttggagctttggaattgttttgggaataagtgtggggggttttgttggacacatatttcgtggctatgcttcatgatgtattttgggccatacttgatgtacattgtatactggttaaatgttggacatgctgaatgatatgctatttctcaaatgctatagttaaaaaaaacaaaaaagaatttagttgaatcaattcgaaaaaaagacaaagaaaagcaataaagttgagtgaataagatcttacatggaaaaagaatgatgagactcttggctctactctctgcatctaaatcttatctttaggttctcttatcttttctt

SEQ ID NO: 32596 - DNA, 312 bp, Glycine max
  unsure at all n locations
tctagccaaatggacttaccttgaattaattcctttgatagctcttctgagccttgtttgcctttccttgttttgaagctcactacaagccttaagtgaaaaaccatgatattaccatatccttaaggaattttggagcttcggaattgctttgggaataagtgtggggggtttttgtttnatcccaccactcgtttgtcggctatgcttcatgatgtattttgggccatacttgatgtacattgtatattggttaaatgttggacatgctgaatgaaatgttgtttcataaaggttaaagagttctaataa

SEQ ID NO: 32597 - DNA, 456 bp, Glycine max
  unsure at all n locations
tgttcctatcanatattgtaggacaataaagaggtataaggtgaggatggaatagttgaggcatagatacgatgcaagctcgataaaggagatgaaggctctacaagagagtctaggcacacttctcgtgtaggaggagaagttctggcagcaaagggaaaaaaatcattggcttaaggggaaccaactactagactttcaggccacgacatcacggcggaaaggaagaaacacattaaagaagctccaaggagacaatgaggttgaggttcatgatcaagatggtatttatgaggtagcaaaaaatattctactgatttcgttactgtctcgaataaggtttatgagccaatgttggaggtgataaattgttgcatcttagatgaagataatgagaaacttactgcaatgtttagtttagaggagtttatagaggtagtgtttcatatggataac

SEQ ID NO: 32598 - DNA, 415 bp, Glycine max
tctagcgtacccgctattggtgctcagaaaatcctaagaacttattcctcttattactagctattttgaattctttagttcctgaatgtacaaccttcaaattgttgctcgttcccgtattagttttttgcaaaaaagaaaattaatctgaaacaattcaagctgaatcgttatcgttattattcccagcaccatacgaataacagctaaacaagtaatttaaaatgtaacttttaaattatgtggtatttttttaattacaattctacttcaatatctaatcttgttaatctacttaggccgattgttaaatatcaatatgaatttaaaggtgatctactgataatataaagtacttgctaatcacaaattatgatacgtatcacttctaaatttaacttacttctataaatat

SEQ ID NO: 32599 - DNA, 456 bp, Glycine max
  unsure at all n locations
ctaatttcatgcacaaatgaagggataagactccaaaagattntttgttcacaaaggccaataagctttggtgtaggctctctttgacaaggctttgtgacactttcagtgacccccttggcagccaatttgaacgtgccaagccataccacaaatgggcatttttactttttgcaaaacaacaaacatggacggataagatttgccaaaaatgggtattttctccttttaccaaaaccagtaaatattatcttaattgcgtaggttattgtgttaatctccctaggaatacatgtacctagagtaatcctcatacagagaacactctcacacatagttaaattacactgtgctcagtgcataatgcaatttcactactgatgaaattntntatctaggcagtttccaatttatgtcaactaactaaataaattatttccacagaaaataaataaa

SEQ ID NO: 32600 - DNA, 448 bp, Glycine max
tgtagatctttaatctccaatacttcttcacaagtttatcaattcatgatgataaaatgagtgattctttgatcaatctttagactaattgcagtgttattcttttcgaagactctcttgaaatgtttttctctaaatttgaacaaatcaagagtatttttaaaagaaaacacataggggttctataaatttgacagttaaaacagatcgaatcgattatcaaacaaggtaatcaattaattcaacaaaatccattttgttttgcatttctagaaactggttaatcaattattagatagggtaatcaattaattcattttagtatgagaatatttgtaacgatttagaaacatttaatgttgttacattcttttagggtagaaaaatcattatgcccattctatatattactcagactcaacacacagcctagagaggtggtcgacta

SEQ ID NO: 32601 - DNA, 456 bp, Glycine max
tgtaggattatggggtacccatcacatgtggtactaggtggcggtcgggcgatggtgcaaaacgattctccacatccacaaatcacgtataacccaccatcccctgttgcccacctccaactgagctcacgtactcccacgtagcccttatcctcgttcctctcaacgtcgggtccccatactcctcccaagttccacaacatccaggtaattccacatccaatcatcatggactaacaaaaccaagcaaaacagggcaaaggcagaaaactctgcccaaaactcacaccaaaaatcacagctttttctcacttaaggaccccagtaacatttccttcgttccaattcgttaaccgttagatcgactcgaaaattctactggaagtctctagtccataagtctacattttgaccgttgggatctgctactaaatgtccagaaccccatatgtacta

SEQ ID NO: 32602 - DNA, 458 bp, Glycine max
  unsure at all n locations
tatgctgcanatatttacaatagacctcctcaacctcagcagcaaaatcaaccacaacagaacaattatgacctctccagcaacagatacaaccctggatggaggaatcaccctaatcttagatggtccagccctcagcaacaacaacaacagtctgctccttccttacaaaatgttgctagcgcaagcagacatacattcctccaccaatccaacaacagcaacaaccccagaaacagccaacagttgaggcccctccacaaccttcccttgaagaacttgtgaggcaaatgactatgcagaacatgcagtttcagcaaaagaccagagcctccattcagagcttaaccaatcagatgggacaattggctacccaattgaatcaacaacagtcccagaattctgacaagctgccttctcaagctgttcaaaatcccaaaaatgtcagtgccatttca

SEQ ID NO: 32603 - DNA, 374 bp, Glycine max
  unsure at all n locations
tcctcgggccattcctgcgagagacaacattcggaaagtttagtttaccagagggacattactcttaaaacaaagatggcatacaacctcttcccatacacatgaatgtctatgtacagccagcttatgcgtatatttccttacaaacgccccattgcgcaagacattcttttaaataagcccctcgcccatatacaatcaaggcagcttngttacctagattatttacatgtacttcccaggtgtatttgtcacttacatcacacacatctccttgggtaaacttacatgcatgcatactcagagcattttgcggtaccacaaattgcacatgtgcacatccttggttttctaatacctatacctacccaaac

SEQ ID NO: 32604 - DNA, 448 bp, Glycine max
  unsure at all n locations
tataagcttgaccaacacatcaaacctcanagaacaaataactacaaaattttaaacagtaataaacataccctaaaatgatagaggcttgcaccgaattttgttctgcatgttttccattggatgtcaaatgtagtttgtcttcgaagacatatccagaacttgaggtattggctgagcctactgcacgcataagggcaaggatccttatagcctttgcaaacggaatggacatcacacaacttatgaccacaaggtagatgtctgctggtgttggataatgatggtctatactgattcagatccctgtcctgcattacagatgcccncatataaaagagagcatctgccaatcaatcattgaaattaacagctaaatttcttacccctcttgcaagaactgttgttgaagtccacatatgaacattcaaagtatattattatttac

SEQ ID NO: 32605 - DNA, 427 bp, Glycine max
  unsure at all n locations
cttcgattcattctatgcacccatcatggtccacattgtgtttcgtgcatttttattctcgttttgtttactttttataccccctgttgacgtgcttaagccattttacttaagtcatttctcgcttaacttaaaaataaaataaatttccaccgaatgtttgaattgtattatccgtcccttccgctaaacgaattccgaccgctcggtcgtgccgtaaccacgttggaaatcaaaaagagataaaaaaataatataaataacaaaaaacatcttttactaaaataaagcggaaaatcaattggacgttntctctttgggatttctcattcttaatcgaattgattaataactaaagtgaaactaaggctaaaatcaactcgcctagtcaagctcgtccataaaaatangctttcgaagttcatca

SEQ ID NO: 32606 - DNA, 462 bp, Glycine max
  unsure at all n locations
tggagaggatgcttcaatggagganaagacagagggagagaaagagagagaggggagcacgaaattgaaggaagataaagggagagaagttgaacattgagttgtgtctcacaagactctcattcatcaaagttacaacaagtgttacacatgcttctatttatagactaggtagcttccttgagacgctttcttgaaaaacttccttgagaagcttctttgagaaaacttccttgggaagctagagcttagctacacgcacccctctcataactaagctcacctccttgagaagcttccttgagaagattcctaaagaagctagagcttagctacacacacatttctaatagctaagctcacctccttgagatgagaagttagagcttagctacacatccgctataatagctaagctcacccccacgacaagatacatganaaaacaaaaaagtccctact

SEQ ID NO: 32607 - DNA, 466 bp, Glycine max
  unsure at all n locations
ctatagatactaagcttctncacgctntcctccatacctagaacttcaaaccttcgattctcactcgattcttcaccaaatcgcgtcccgtaaagcccaatcttcctctttttcattcctctttcacttccaccgatcaaaatccagaaaaacttcatcaaatggcagagccatcaaagaagagaaagggatcatcctccccgctaccgtgctgcccatcgccgtcacggcccatccggagcacccacagcacctattcctccttctttgtcatctccaagatcatcaacattgttttcatccgatgatcaacgtctacggtatctttctcagttttcttctagaataatcttagaccctaagtacctagacgtagagttctttaatgatgaaacgtttgattgctattgtcgcaacctacccttcggtgggagggcgacgcgagactcgcgggatgcgtgttcca

SEQ ID NO: 32608 - DNA, 445 bp, Glycine max
taattccacttttgattccttaattattctttttagtgcattccttaattagtataattttacactttcggtcttctaatcaactatatatatagacaatttgattctctttgtgacaatcccaaattattctcgtaaaaatattttattttaatatttaatcaattctattagggctattcactgcccattatacctgtaattaataattgattattataattgattgtcataattaaatgaaactgaattattaacaaaaaaaaataaaatataaaaatattatataattgattcttttaatatataaaaatattatataattgattgtttatatcttaatattattttaagttaactatgttaaaacactaatatatatttgtaattatagcatgttgaagagtatgtatagctatatatctttaatagagtttaacaaata

SEQ ID NO: 32609 - DNA, 453 bp, Glycine max
  unsure at all n locations
ntgatttacacagagggtttcagggacaaagctntgatttacatattgaatttcatccaaatttttgacaagtcattgttacttccatcaatattgatattgtatcatgcttaattatatgcatttgcttattctgatcattgtgtgttgcgtgattatttcttccatgcaggtacatgattccccccccncgcggagtgaaatgatgggcagcagcaccaactaaggtgattgtatatttccttttttttgtctttatctttgttagcttgctatatattttttattttatatgtctgagctttaaatgtgtaaaaaatagaaatagaaaggtttgctatcattctttgaatgccatcatctacctttaatgactcatatctaaattggtccctgtttaactaaattaattacttattgccttagcttgactggatagaagtatgatatgtc

SEQ ID NO: 32610 - DNA, 449 bp, Glycine max
  unsure at all n locations
tctaagccatgtccaaagtaagaaagatgcatcatccatgactntattgccgctgaaagcttcattagagaatattattttgttcttgtggtgccatatggaccatgtcaaagctagccaccaacacctccacctcttgacccgtattccatcagccaaaccattcatatgttgtangaagtgcgctccgggtttgcggaaaagcacccacaagtttcgcccaagacaaaacttgccaccacatataatttttctacagtggaaaaataaatgccctgcgtcttcctcctcaaggttgcagaaagggcatcgcccatcatttatcacaatttggcgtgattgtaggtttcttcttgttggcaatctatccctgagtagtagtctccatgcaaaaactgtanatttgcttggcacctttaatttccacagttcaacagaagctacatcca

SEQ ID NO: 32611 - DNA, 435 bp, Glycine max
tgatttgtgagttgactttagccttagtttcactttggttattagtcaattgatccaaggaaacttccaaagaaaaacgtccgattgattttttttattattttattcaaagatattttaattattttattattatttttcaagatattttgattattttattattattttgctttttttttccctcaccgcagtacagcgtgaacgattggttagattttgttttaacagtgattaaacgagaatacaacacacatgatcggttgaaattcattttatcatttattatgcgagacaacggcttatacgatcggttaaagcttgttaataacggaagataagacaaccgaacatgaacgaaatgaagatgacagctaacacaataagaaatgaattgaaagtctcggattcaaaaacttacccgttgaagaacga

SEQ ID NO: 32612 - DNA, 451 bp, Glycine max
tctctgcatgatgaattgccaaaatggatggatccatgcttattgatttcttttctgtgtatgtgacagggggggaaaaggagtgatgggcgaacacctgacggaatacgtccaattaactcgagatgtggcctattacctatagcacatggaagtactctttttacaagaggcgagacacacgctctgacccactttatttgttttccagtttatgcttttgatgatatctgttggtgtctatatatgcttatgcaagtcacattatctcttttctgtgtttgttagttctattagaagggagatagaatgatcaaacacaaaggaggaacaaaactaataatgctgactccttggacctttaacacacttctcatttaaagtctccaattgtaatcaacttggatataatctagaaactagtgattggaagtcagtattctgattactc

SEQ ID NO: 32613 - DNA, 205 bp, Glycine max
tgagatgaccgagctgcgatggagcgcagctggacatagcctgtatcttaatctagcttgatccaatcttcatcttattccaagctgctatccatggacttctatggatgcgagcttcttctagacccagcaattcctcgaagtggagactccgctgtctaaaacttatccataccttcgactctgcctctccctaatgaaaacg

SEQ ID NO: 32614 - DNA, 430 bp, Glycine max
tttgtttgtggagtcgcctttgatctcaactgtaccatatggaataacattagtaacaacaaaaggaccaatccacttagacctcaacttaccactcatgagtccaagcctagaattatacaataacattttttgcccaaccacgaagtcttttttaactatcatgctatcatggaacttctcgtctctccctgcagaacttggcattctcgtaggcttctatgcggatttcatctaactcactcagttgcaactttctttcctcaccagcttgatccatagagaagttgcaagtcttcactgcccagtaagctttgcgctcaatttccactggaagatgacatgcctttccaaagacaacccgataaggagacattcctatgggtgctctataggcagtccgatgtgcccaaagagcatcatcaagcct

SEQ ID NO: 32615 - DNA, 448 bp, Glycine max
  unsure at all n locations
tattacataagagatccacgaaggagcccaaaggcgtgtttagcacgaatcccgcgctaagcgagctattgccgccatactcaataagcccagacgctgtcgtgctcagtgcatgatcacaccgtcatacctactaagctcagaagggtgcacttaacgcgaggtcgcataaattttaactctcctcggctataaaaggaataggaagcanaggagaaaaatgcaatgagactcatagctctctattgaatacactcaaagcctgaacatctctaataggggaaaccctccttcttctatagtcattttctacttttcttactttatccatccttattcttttctgggattcattattattaatcgcggcttgactacccatgctaatgtattacttaggaaggaatgcatttaaaaatgggtattttctagagaactagaaaatgac

SEQ ID NO: 32616 - DNA, 450 bp, Glycine max
tcatatggagccatgccaatggtagaatgaacactattgttatatgtgaactctatcaacaggagagaacactcccaactccctttttgttctaatacatatgctcttaaaaggtcctccgacgactgaatggtccgttcagttcggccatcagtctaagggtggtaggctgaacttactctaagcttggtcccaacgctttgttcaaactcttccaaaacctagaggtgaatatagaatctctatcagacactatgctagatggcacaccatgtaatctgacagtctcactaatgtacagggagcgtaacttctctaaggaaaacctaatattgatggggataaagtgtgtagatttggtcaatctgtcaacaacaacccaaatagaatcaaaacctctgggggtcctaggtagtcctacaacaaaatccatggagatactatcccacc

SEQ ID NO: 32617 - DNA, 440 bp, Glycine max
  unsure at all n locations
cgtagcaacaaaatgcanaacatttctaaatcaagctggtttaaaaggtgaattntgcagccatgggaaggaagattaaagataagcattctgaatcatattggctcaatcatcaaacagagtgcaagaggactctttttagtattattaagtatcatcccctattgtgtcatttctttccagacttgctacaacaggggtggtgatgaaagaaatgttacaggttagtgcattttcctcatctctgtacaagttctcctctttgccattctactaatcattaattgatgtagtagcacctagaatgaattttgtgctctaggttaattgttaagagaagaattttttatatctaactaatttatatatggaaattgtttgagcaaaatgaaattctctgaagctttgatcaaaacattagcaaataacaacggaattct

SEQ ID NO: 32618 - DNA, 454 bp, Glycine max
  unsure at all n locations
nntgattttaaatcttggggctacgagaagggagattggatgaaagactntgttctctagacaagtctttatgatttgagcctatgataaatctacttgttggattttcatgaaatttatattattttactctatacaaaatttgaaacaatttcatgttgaagcccttgagagatgaggtcatctgacgcccattgtgacatgcaaggcgactaccttgttttgcaagttgtgtctagtaatgtgttgttttctttaattcttggcttatgtagttgtcaacttgaaaaattggttacattttattaaactagaaagaaaattattttcaaccatatatattagaaaaattatggatttcagcttcatgttctaaaggcaaaagcaaaacanagtggctgcaagaaagacattctgtgaagtatagaaaaagtgttggaaagaaaatcttact

SEQ ID NO: 32619 - DNA, 448 bp, Glycine max
tgcagaagctcttagaagctgtcctgtgatctgtcaccatagcctatgctgtagcctccattatgaactatattttgtactatctgtcaattctcgtatgtatatacacacacacacacacatctcagcaaacaaaggctgaggatcctttttgtgtgcatattttcatactcaaacatttcaacattatgaacatatttttaaattatatagtttggtcttaatactatcaataaatattattataaggtcaacataataattattataggacaaataataatgacgtcgcgaaatccatgtagcagacctcatctagtggaataaagcgtttgttgctaattacttgagtgtttggcactagactatgactttggtcattgattctgaatatacttataattttgataccttgtaattattagcatgtatatatgcgtagtataaa

SEQ ID NO: 32620 - DNA, 461 bp, Glycine max
tcataaatccatcacttttaatattctttgtacacaaacttatttgatgttaatttaaaaattatttgctcaaaaaggaaaaattaaaagagaaaaattacaaattcctatataatttaaccccaaaatattctcataattagtagttatcactcacatatcaacacatgttcaaatttacacttacctcaatctcataacaatgctataatctcatgattcatcgtatattcaatttatcacttacacacaattttaattacaatttcatgatctcaatataacaatttattacgctaatatagtaattttgtccaaaatacaaacaaattatacgaaaatgtttctcacaacatcaggaataaaccccctcaaacaatttcacataatcatatatgaagaacacaatacaatatatatgccacaataaaccccaatttgatcccctaaggatctctaca

SEQ ID NO: 32621 - DNA, 353 bp, Glycine max
tctaatgagtgcctagcgtcagtcatgaaatcaagtcgcggcaccgaaagaatcaacaattgtcctacaggtggtggggctcgcgaaagtgtgtccgtgaccacgttggttacaccggccttgtactggatgtgatactcataccccaataatttggagaggtagtaatgttgcttcgggtctggatacctgcatcatcaactcccagaggctcttgtggtcggttagaatggtgaatgacctacccaagagatattgcctccactttcttacagtcgcaacgatagcatgtagttctcgaatatacgtagaggcatagaggagctgatggccaagcctttactgaagtaagc

SEQ ID NO: 32622 - DNA, 454 bp, Glycine max
  unsure at all n locations
tctagccaaatggacttaccttgacttaattcctttgatagtccttttgagccttgtttccctttccttgttttgaagctcactacaagccttaagtgaaaaaccatgatatcaccatatccttaaggaattttggagctttggaattgttttgggaataagtgtgtgggtttttgtttcacgcataacatgtttgttggccatgcttcatgatatattttgagccatacttgatatacattgcatattggttaaatgttggacatgctgaatatgatgttgtttctcataaggctacagagcaaaaaaaatatatatattataaaaaaaatcgaataagacaaacagtaaagttgagtgaataagacaagaatgatgagactcttggttctactctntatgtttaaattttatctctacttctttgtatcttcttatgttttcttaatatgca

SEQ ID NO: 32623 - DNA, 429 bp, Glycine max
  unsure at all n locations
tgagatgaggaagtgttgaagggtgaaacttcctgcttttattgttgaccacagagtggtacctggagatatgtcgcggnggtcaggagaccttgnggacgtcaggtggggtgctattgcccaaaaccaagcttgaccaatcccgacccaagccgggcatagtcggtcagtgagaacctgtctgtacctaacaggcgagctcctggcagtcaacagataaaaggaaaacaagaccacaaagcaaggaggcttgtggtggctggccagctgtgaattttgtgtaatatgtggattgtggcctctggtaatcgattaccaagggtgggtaatcgattacaaggcttaaaattgaggacaggaggctaagatggtctctggtaatcgattaccaaggggtgtaatcgattaccaggcttgaaaatgaagtca

SEQ ID NO: 32624 - DNA, 447 bp, Glycine max
  unsure at all n locations
taggtgtncatttgaaaatattntcgtcacgctctaatgtacgtgttcatactggcagtggcatgcacacctccacatagtaattgaagccgaaacataaggcataggcaacaaattgagatccacagattagactatcaccataagagagtaagagatgaaagttcaattaatgtgatttgcttttggtggacagtgaaatgtgactgtagatttggtttgtgcacgctacggatgttcacctttttaagctctggtgcagccgcagtaaactgttctaaatgtggctactgcctcttggcctactcaaaaaataaaattaagtcttaatctaaccatagtaactaactgtcaccttttataggtatagatgaatccacaagtcttaaccttaattcaaacacanccgtagtaaatgattcacatttgtaaggattaaattataaa

SEQ ID NO: 32625 - DNA, 439 bp, Glycine max
  unsure at all n locations
ctannaattgaattaaaacgttcagaaagtgctggtaatctattaccatatatgtgtaattgattacacagtgcaaattttgaattcaaattttaatagctgttgtaaatcatctttggccactggtaatcgattacatcctctggtaatcgattaccagaaagtaaatctcttgaataaagccttctcacttaatttcttggccaaaccttttgctacttcaaataggaattcccttcctatttaatatacccttcctaagactctagaaactgtcttgatcatccatcttgaatatctttaatttctttgtcttgaataaatctttgagaaacaagtgatcatccatcggcataatcaaaacattcagcttgatcctttgtctacacaaaccacaagacaatggaggatatacatggagaataagatgaagaacaag

SEQ ID NO: 32626 - DNA, 239 bp, Glycine max
  unsure at all n locations
tatagccattntattccacgctnttagagccttgcacatcattttattacacccctatccattttagtttgatcactaacaaacttagtgactctgcggaatgcaaagatacacatgttctcctttgattccacgatgctgggacatcaacgggtagaacttattaatcctgagggtctccccagacctcaagaggatactctttaggaagatggaaaccacaggtgtttattatgctt

SEQ ID NO: 32627 - DNA, 440 bp, Glycine max
  unsure at all n locations
tggganagtcctcttgatactatttatacatttttgactctatggcatgagatgaagtgcaaagattggacctcttgctagttgttactaatgaatagcttaaacccttgtgcttgagtgaaacagtagccgtgagactgtggtttaagctactttccttaatatttgtcttatgattccttcatctatgatacagcttacattttattcttctctttgaaagctgcatattttgtgaaagacaagtgatgagtacataatgcttcatttttttatcatgcaatcagtaatttttgctgcatacacctttgttgatgatcactgcatgttattgtcacttgaggacaactaagttgttctctttttgcttgaggacaagcacaattgtaaatttggcggagttgttagtcgatgaatacgactaacctttatgtataaaa

SEQ ID NO: 32628 - DNA, 442 bp, Glycine max
  unsure at all n locations
ntgagctcagacattagagttacgttacctcgaagattccggtgagacagatccaagccctccaccattgagttgttaccacagctgacaccttgccaattgcagtaatctgagttgttgccatcaccccatccagggactctcagctcttggttgatggcatgtaatatatcttggtcccacgctcagaccaacaagttcagaacttgaaagacaccaagctaccagtatatacaacaacaagcatagaaattccatcactgtacagtgtacactgttgttctcttctcttctctgctgaagcgaagtgttagtgtttacactccactcaacagtgttcttctccaagagccaaaaaattggtatcaacactctaccacagcattaacaacttttgctgcttgttcttttcaccaaaaaaaagtgcaaactttctttcaca

SEQ ID NO: 32629 - DNA, 474 bp, Glycine max
  unsure at all n locations
gcggcgcgcgcgcgntttganngcctcgactcactctgggcgaattcagctcgtacccgcgatccctagagtcacctgcggcatgcagctttatatttttatgctcatggttggtattcatactattncacaaaaactttttgatataaataaaaatatcttcacaaaaaactttattaaaacaaaaaaattagaacttccataacataatcacatgtaaaatggttataggtaaatattaaatagccttaaaaatattcttgtatcttattttggggttgagaaaataaatatgattatttaaagctcgatcaagggtaacttttaatcaaaattattttattaaaattaactcgatagtatcgacacatataatacaaaatctttagagtcaatgactccataatactaaataacaaagagcttttttaatcatctatatattattatgttctaagtctatttttttcactt

SEQ ID NO: 32630 - DNA, 415 bp, Glycine max
  unsure at all n locations
cacggcgccgcggtgncttgatcctcgaggcatcgagctggcccgggatcccttgagctactagagctgcagcttgaccgtttgactgaagtgcgacctaactggagtgacgactgcttgaccatactattgatgaatattgaatttaaatgaatgataattaggactgagaagcatgatgtcataccaactttgaccataactactgatgaactggtttttgctccatgataaactatgattgcataactgaccctgactttacatgactatctctaatactttgttaaatctatgagagcatatggctcacgaccatttactctaacttggggagaaagtgaaggatgaaagaaacggtaagatcagaccacacaatagtgttgtaaaaacgagcgagatgacagatattgcn

SEQ ID NO: 32631 - DNA, 414 bp, Glycine max
  unsure at all n locations
agcttgagaaattacctttntgggttcaaaaacaagctaatgtgagaacactcctatatgaaacaagacaaggttgagttgatgggaccttgtacgcatgttgtgacatgtgtggattggatactttgcggaagggcataatggaagattggaggtttttttattattatttgggaaattggaggttatgtcaatgattcttttaatttactaacatagcaagcttttttattattattttcatgcattgacaatataaattgtgttaatctgcaattaaagataatcttaattattttcatggatggaaaaacttggaatttgctctcattgttttttataaatgatatggttcttttaagtaaattatttgaattataaaatanaaaattgtattctcaatttataaacaag

SEQ ID NO: 32632 - DNA, 369 bp, Glycine max
agcttggagctttttaactttgcaggcggtcaccagacatttgaacttgccatcgaagatcgctatggaatgaatcctgagattacttcactcgatgccgcgccgctctgatgtacaccaccacacctagaaatgacataagattaccgggagcacaacctcagctccggaatagatgtttatccgcctgacattgtcttctaaagtcttcacatctgaccgtaactgctatccacctgtgacatgttgctccagatacaggggatgatattgaaatagcaaacggatgcgtggaatccattgcaatgaatgcttgtctagagcaactatgttttgccttacctaaattagactgtgatggccaatctg

SEQ ID NO: 32633 - DNA, 415 bp, Glycine max
  unsure at all n locations
agcttgagatgttgtagtgttgaagggtgaaacttcctgcttttattgttgaccacagagtggtacctggagatatgtcgcggtggtcaggagaccttggggacgtcaggtggggtgctattgcccaaaaccaagcttgaccaatcccgacccaacccgggcatagtcggtcagtgagaacctgtgatgtacctaagcaggcgagctcctggcagtcaacagataaaaggaaaacaagaccacaaagcaaggaggcttgtggtggctggccagctgtgaaaattgattgatatgtgagatatggtctctggtaatcgattaccaagggtgggtaatcgattacaaggcttanaaatgaagacagggagctaagatggtctctggtaatcgattaccaggggatgtaatcgattac

SEQ ID NO: 32634 - DNA, 248 bp, Glycine max
cttggcttggttcaacgatcaaatggatgccccacattatttccatgacacaaatgcaaaaaatgatgatttggaaattttatgccaaactggtcatgcatgcgcctatgcggacgcctaagtgtcaaataattatggccatgtttctggctttgattaatgccgggccaaaaagttgtagcgcacgggattttggttggtaatcaaaaggagaacacattttatgtcgcggtttcctttccttcttt

SEQ ID NO: 32635 - DNA, 405 bp, Glycine max
  unsure at all n locations
agtttaagactntggagttcatttgcggcatctgaaccatgccacctgcacacgcgtgccatagctgcggatccaataccttttcaccttccttcatggaaacaacaaaaaaaacagagtgtgttcaaaagagaaaataatgtgctttttgaagtttctgttttcttcaaaggagattcatcgcgcanagtacaagcacgagctggtttttgctttttgttcttttagatctctgtgagtgaaagaaagggaactaaaactacttctgtgttgttgttacccttcggagactattatgagcgaaacaaacgaccaaaccgacctcttggccagcaaaagttatgtttattaaattgctctgttgaaataaataagaatagaatgcgaaatgaaatttatttttgg

SEQ ID NO: 32636 - DNA, 375 bp, Glycine max
agctttgtttattgctaacgctactaaaagtagcttttggatccaaaagaacgtgagtcatgatatatcattatttttcttccgtctatacccttctctctgggtagagccacacaagtggtggtgtttcgtggtgtgccgctgcatacagaagaggaactgatattcatgatacagcaccgcccaatgtcaacaatgtacaaaaatttggaaaatgacatgttgccgcccatacattgcatgcaccgtcaatgtgctttcttaaccattaggaagttatacttataccatatgaccaaaacaatctacctctgataaaaatctgccttctcaaccatttgacaatctttagtatccgtatcggatgttattata

SEQ ID NO: 32637 - DNA, 406 bp, Glycine max
  unsure at all n locations
agcttgcgatcacgcaagattgaattgtagagaagctttaagtgttcgagatcgtgaagagaatctggtaaacagcgaattgtttcgaagagtgaagctcttgtttcgagtgcttggatgcaagtggggtccaatgcgagggtgcggctgcaatcggcaattgactcggcgattcgccctgcggaacggtgcgcggaggcgcggtgcatgtancattcggcgaggaagctctgcggcgcgctgcgccggccgtcgacgattttcgagaagtggcggatggcctcggagtaaagcccggcgtcgagggcggcgagtgcggcggcgcggcggcggaggaggaacttaatgtggccgangagttgggccacgctctcggagtccgcgagaagggttcgcggcggagttg

SEQ ID NO: 32638 - DNA, 404 bp, Glycine max
  unsure at all n locations
tgtcttcaataccaatcaccttataattatgatccacagctttaccagattggcatcccccatggtaatgataaattgttagcacaatgtctatgcaatactgttctaaagagaaggaaatattagcatgtttaggcctcaagttaactggtaaattcaacatcaagtctattagatcttggaccgacatgttgtggtancaaaactttgagaatgcttttgagtttatcatatctatgacgattatcatgccttcaacacatttctttaagtcttctggatccttacaatagttgaaggtaactgatggctatcattcggatccacttgaggatatacttatttgtgtataaactttcctaattatattaagaggtctcacaaatatgaaacaaagaacaatc

SEQ ID NO: 32639 - DNA, 272 bp, Glycine max
agcttcttccattcttatatatattgaaacgggggacccgaccagccagatgtgatacatacaatgataatagtgggaggcaaaatgatggtgaacctagggtggaagttcaaatcgatataacaattatgtccaatgcttatgaaattggccgatgaaggatctgactatttggaaacctggtctttaatttattcaaggggtgtaaagcttagcagaaagtggctgaaatttgattgaaccaaccacatgggtcttatgatttcacgtgt

SEQ ID NO: 32640 - DNA, 409 bp, Glycine max
  unsure at all n locations
aggcggggnccctgtaatgatcnctganaactccactggccngggatctgtaagtcactgacgcatgcagctttgcagtttgatctttatcctatctcgacggccatggtgaatccgttcagtaatccgaagaaaaacgggctacaatgataaaaatgaaaaggagattgattggtctgggtgcaaacattggaaagttgcatgacttacgggctaaccaggtaccaaaagacattttccctgccattattgacgatgcttgacgctgcaggaaatctcactattgttcgtgatggtttttggtatatgaaatatatgctctgagataggaaatacaatcattgcctcggcctttgcttagagatctttcgctgtaatgcctgccttcaccgcatgatattttagggtt

SEQ ID NO: 32641 - DNA, 377 bp, Glycine max
agctttttggattcgtaaagtcatacaattatacgatctatggccgtaggttaacaacctctggatgatccaagtaaaatactcctactacagaccttatgagccactgcaacgaagcacacacaggaagacatcttacagatctacccatatcagtagatcacatgatgctacatctgatagagaccatatacatcattgatgggatacaatcttactcaatgccattatggacgttaatgttcctaccatgagtagtcaacacatatgcaaaccataaattcaataataatgatcatcatcttaaactctatacactattctaagcagtaataatagatatattaaaatgatatattagtcccgatgatccttgc

SEQ ID NO: 32642 - DNA, 409 bp, Glycine max
  unsure at all n locations
agcttgcagagtttatcgagtctttatgagaacaaagcaattataaacaaagaagattgttgcgtaagtactacggtcaccaaaggcaaccacgagaaatagtttctagaagatcagtcctcaaaagcagcacttacagctagaactaaaagatatcatgaagaaacaactaacaacaacaagcacaccaactgtcacaattttaaaatatattgtttaaagaaatgattttttattttattgattctttaagataattttaaaataaacaaatttttaaaaaataagtcatagaatttatatatatatatatatataaagaagagaaactattctagaactttatgataaattaagaactatacatacaaaaaatatgttgaactgattntgatccatataatatcaa

SEQ ID NO: 32643 - DNA, 415 bp, Glycine max
agcttcttatctcttgctcatcttggtggcgaagctccttcttccttggcttattcccttgtggatggtgcctcctctctcctcttctcctttgccttctgctacatctccatggtcgaaaatcaccattgaaggacctcattgaagctcaaagatccagcctccatagaagccccacaagcaagcttccatcaaagtctatgatctttattcttcaatacttgtgttgattattttgatataattgaatatatacatgactattttttttaaaaaaaaggattatgcatgattttgaatgtgatatgtgaattacttgcttaaggttctttcataaagtgttttcaaaaatttaacgttatatatattcttttgaacagtattttgattctcattcaaatccaattctccctta

SEQ ID NO: 32644 - DNA, 396 bp, Glycine max
caggtacgagagttgccctggattcacctaacgactactttccttagcacacttatgttcaatatgttcgatttggcattgagatctggcctgaatcttttcctttgaaaactattctatttggcaaatcttcccaaaacaccattgaaccactgatggaggctttggaggaagattatatagatggcaataagatgaacgaatcacgggcagctattgaacgagtatcggatcttgcacagagaatcaatagactagatacattgacttagagattacatataacacactcttggattgctgaacacagtattagcctataaaccagatctttaccactctgtagatatgcttaccttatttctgatacgagcataatacaatgactcgactgcg

SEQ ID NO: 32645 - DNA, 267 bp, Glycine max
tccacttaacccattcactagcctttcacttgactttgttttaacagcatacacttatttgaactcttcttcccccaccccccccttttttacttaaaacattgtattaatttgatgcgcgcggtgatgattcatacccttaaaattattcatcaaacaaactcccccaaagttggggtaaaattgccttaaaccaatgtgctctcctaaaaccaaagcgtggtcaatggagatgacaattgaaagcctaaggctcaatttgacaac

SEQ ID NO: 32646 - DNA, 407 bp, Glycine max
  unsure at all n locations
agcttctcaaggaggtgagcttagttcttagatgggtgtgtgtagctaagctctagcttctcaaggaaattttctcaaagaagcttctcaaggaagttttctcaagaaagcttctcaaggaagctacctagtctataaatagaagcatgtgtaacacttgttgtaactctgatgaatgagagtcttgtgagacataactcanagttcaacttctctccctttttttcttctttcaatttcgtgctcccccctctctctttctctccctctttcttttcctccattgaagcatcctctccaagcttcttatccatggctcatcttggtggttaagctccttcttccatggcttattccctagtggatggcgcctcctctcacctcttctcctttgtcttccgcttcat

SEQ ID NO: 32647 - DNA, 366 bp, Glycine max
  unsure at all n locations
cangggcgtgaagggccttcatacatggtgctgggtgcaccagaagacatgctatgtgaacctatcagcattataatgcggcgtaaatgcgaggccgtagatcgcgaaagtacgaccatagccatgcgcataaactcatacgtcatgggataaacgaaacactgatggctcaatggagagtgactcacaatgaatgagagcaaaatcacaggttgattttgacaggcggataccgcaacattccatatgataacatgagcagcaaaattgatatactatagaaaccattatgatatgaggacatgtaagaagatacatgccttgcgcttctgcatgaaacaatgagttagactaagctattttccg

SEQ ID NO: 32648 - DNA, 409 bp, Glycine max
  unsure at all n locations
agcttatagaggaagcttcaatggaggaagagaatgagagagagaagcgtgggaattgaaggagattagggagagaagttgaactttgaagtaagtctcaaaagtttttcattcaccaaagttatgacaagtgttacacatgtttttatttatagcctagcatatgggaaacttccttgagaagcaaggaaggtagcttccttgggaagctagaggaagaaagcttccttgagaagctagagaggggctatccacacccctccaatagctaagctcaccccatgccaaaatacataaaaatacaatgggaagcttctttgagaagcaaggaaggtaacttccttgggaaacaaggaagacnagcttcttgagaagctagagggggctactcacacncctccaatagcta

SEQ ID NO: 32649 - DNA, 400 bp, Glycine max
ttctttggaacaacatatcgcagccgcaaatgaagatactggcacgatcctgccacataactgcatgctatgatcgatcaaatgacttggacttatcagcatcctgtcgttttgacatccatgcctaccaacgacatgaacttatacctgacattcttttactgcagagaacgtttgtgccatggaagacgggtaatatatccatcgccaaaactatcgctaacaccagagactatcctacagatccttgagcaagcctcttaaaaagcctttaacaggatggtctgatataggcgcatgtggaactgtacagtggacatggcgtagaaaccggtctgatgatacctgctcgagcacatataagcttttcgagaagctgatgctaataagaacaggcttc

SEQ ID NO: 32650 - DNA, 401 bp, Glycine max
  unsure at all n locations
gccgccttatgccttcttcttatccaagacactccttggggtgaaggttatccttccatggcttattctgtacaggatggctcctcctcctacctcttctnctttatcttgcgctgcaactgcatggctgaaaatcaccattgaaagaccttatcaaagctcaaagatccagtctccatagaagtttcgcaagccagcttccatcaagcgataattacttctttgtttgaacaagaaaacaagcgtaatgactttgtttggctaaataattatgctatatcatctgacaacttccccgtgaaagaactgttaatgtggaacatacactctaatgaatagcatgacttatatgactaaagatatcacacccttgacatttaatgcatgattagactacgaat

SEQ ID NO: 32651 - DNA, 386 bp, Glycine max
  unsure at all n locations
agcctgtggagttatatgaaatgcttttcatttgaatcacttatgaatacagatatcttagtctctaaaaaggtgtcaaaggattggtaagaagctatggagaatcttagcctctaaaaagttaatttcttccctcaaagaattggtaagcttttcatttgaatcacttatgaatgccgatgaggaaaaccttacttttcaattttatttaattgcgctcaattctatttaattacacttaattaacttctgtttatagcctttaccattttgtaaaggtttaatcctctaatgagcttgtttatattactggaatgaatctattctgtacttntcaagtactctctcctatgtaaaanacaaaaacttaagtctttgtgttcaat

SEQ ID NO: 32652 - DNA, 337 bp, Glycine max
gcagctttatactctacttatgcatgaaaagtatcacgtaattcttcatatagacgactaacataattcccaacttttgcactttatctcattccatacacttatgaacacaaaaaggggatctggaggactttatttggcttgtaatgagggtgggctgagaacaattcatttgttttctacgatgcaaaacttaagttctacgagagcattcatccattaatcaccttctctttaactttccagcttttattgacatgccacaattaacaacacacagagttttcttcattcttgatgttctttcactctcctttctttttatattttttcttat

SEQ ID NO: 32653 - DNA, 357 bp, Glycine max
agcttctattctgtgtgtgacatctatgctattgatggtgtagttcagccacgcgacatctttggtaatatataatgccctcgttatatcataatatcctcacaatcctgaattataagatggtttgagagaatgaatgtattactttatataagcttaatgatcaagtcttagatgtagtaattattgatatctctccatatccttgcttaattattctctcttcaaatatttatgacatatagttatgttattgatgaaataagagaaataaaatacagaattttaaaatgagagtataaagacgtgatagattgaatataattaaggaaaccaattatttttcgtaagagatat

SEQ ID NO: 32654 - DNA, 415 bp, Glycine max
  unsure at all n locations
agcttgtattattacaccatagctctgcacaaaatgactctaggatgtatatacttgtactgatttatttgctataatatataatacatacatattttgcctatcaaaaaaaaatccttgactttctcaggcaagtcttaaaagaaagtatcacacgggctaccttgttttaagaaatacctcaataagaaaaaccacactaagtcttaccttggcaacagcataaacaccaaaaagacccgtgtccttgtaattggtgttgaaagccataatgctctcagcaacttcattaatgccaattcgctgtgctaactccgaactgtttatagtcaaaatgcattcagttagtatcagggagagaacttttcctttntcaggaaggggcgttcaagtcacataccccatgtgttttcca

SEQ ID NO: 32655 - DNA, 411 bp, Glycine max
  unsure at all n locations
agcttgtgaaatgtctctcaatcaagttcttatgaaaataaagaaatcggaatggcgtgataaaaatattgagattctgttgaaagtatggatagaagaggtgaatgctggaaataaacctcacaaccactttactaagcttggttgggcaaatattacagaaaagttcaataagataacaaatttgacatatgagtataaacaattcanaaataggtgagattctttaaaaaaaaggaatgacaattatgggctaattaagcttattgngaaggacactagtcttggctgagacggagacaagaaaaccattgctcctagtgatgaatggtgggaagccaaaattcaagtgtgtactattcaactaaaataaagttagttctagttgcatgtcattgaactctcttcagt

SEQ ID NO: 32656 - DNA, 381 bp, Glycine max
  unsure at all n locations
agctttctagcctaaacaatggttcgtgagttgaggctaagaagttccaatttctggaattttcaatgaactcgctaagcgagcccggcccactaagcgagttcatccattnttgttgatcttttgggttttttgatgaacacactaagcatgccctatcctactaagcgagtgtatcatatttttttttaatttttttgcaattttgtatgaacttgctaagccactgcactacggcttagcaagcctttgaatgtctgtatttaatttctacgttcgcatgaactcgctaagccgaccatctgcgcttagcgagtatacttagctgagtctgatactcagaggctttttgcattcttggtgcggctaagcgagccatgc

SEQ ID NO: 32657 - DNA, 405 bp, Glycine max
  unsure at all n locations
agctttttaanggataaaaataaaaacaaaatattttggtatggactaaatgaaaaaagaattataggaacaaaatgaataaaacgctaaatcgcatgaaacatatatttaaatctaaaaataataatttttagcaacatttaataaaaaaattaattgtatacattaattacatgtaataaatttattattttatttataaattgcattaattaatattcaaatgctttaaattcaaatataatcgtatattcaattatacaatctatttatttttaattatcttttatgggatataattgatcattaaattaattagttcaattatacaatttcaaaaaatctaattatttctggttaaaatatttattggtaacataattaacatatatatcgggtataatt

SEQ ID NO: 32658 - DNA, 411 bp, Glycine max
  unsure at all n locations
agctttatatctanggtaaagcagaagaggatatacccttacgggaatcaataataggaaaaatcaaatcttagttctgaataataatgagaatgaagagaggaatttgatgatagagatgaaagaatgaatacaaacttgcaactgcgcataggaccaatgactagtggttgtgactccttgaagctgtgcgatgctcttttctgtccactccaacgtaacactttcaaaccctagattctattatatttatttgcttataaaagaaaaagacacttcttttaagatggttttcaaaaccgtcttataatggtagtttctaaggcagtttttgcaaaaccgtcttagaataattgtatttatttacaaaaatgtcaccgtgtttctttctagaatgattctctatcaacc

SEQ ID NO: 32659 - DNA, 411 bp, Glycine max
  unsure at all n locations
agcttttcggatntggtcttcgccagtgaaaggatcgatgtgggttcgaaaagaggcaatttgatcatcctactangacgactgagaaaactggggcaaatgaaaaggttgagaaagagggagaaacccatgctgtgactgccattcctatacgaccaagtttcccaccaaacccaacaatgtcattactcagtcaataacaaacctcctccttacccaccacccagttatccacaaaggtcatccctaaatcaaccacaaagcctgtctaccgcacttncaatgacgaagaccacctttagcacaaaccaaaaaaacaccaacaaaaaggaattntgcagcanaaagcctggtagggttcacccanattccgctgtcatatgctaaacttgatcccatatncactcaata

SEQ ID NO: 32660 - DNA, 393 bp, Glycine max
tatgcgaggtgctggaatccaagatcgggccatgctcattgttgtctaatacaaagcatgatgatgggaggcacaacaacaaatgttgtatatgagataagaagctacaattcgtcctttgtaatcacagctttcctaagcccaatgaacaaacaaacaacgaaatttaacaaatggagaaaaggtttaagaataacaatgtccaagcagatgaatggacttattggaaaataacatggtatggaagaatgaacatatactaggggaatgaggtccataccatcaacttcatatcacatgaacagaagagagggaccgtggaaatttcagcctcaaacgacaaagacaggaaatggatctaccatatttacatttcttaatggattggagata

SEQ ID NO: 32661 - DNA, 419 bp, Glycine max
  unsure at all n locations
gcttcatgcattcttgaccggatgcaagagacatcctcaagcttagttattcttgactccattgcatcgaagcgcatactcacttgacgattgagagtattgaagccttttacgacgtaggctttgaagactataccaccgctgcataatccttgactaaagagacgagtcttctacttcatgtacttcttcaccaacatttctagcacacttcttcacccaagagccatcatgcacatttatataagccatggatgctatgactgaagcgcctgtatagaatgatctcttgattggagactancgttcacactcacgacggatgctcgagcgctgaaggataatggtcacaagatgatgatggagcaacggagcattcgatgcgatatgcttatgcatgtgacatataccatggatgg

SEQ ID NO: 32662 - DNA, 370 bp, Glycine max
agctttgaatcgattacacacatactataatcgattaccagaagagattttcagaaaatattctcaattggcacatcttttcatttggttcttgaatggctatcaaaggcctatatatatgtgacttgagacacgaatttgctaagagtttttaagaacaaaaaggtcctatcctcttaaaaagcaaaatccgtttatcctcttacaaattccttggccaaaacacttgtgattcaataaggaattatttgagtgctcaaattgctcaatctatctctttcaagagagatttcttcttcttttcttctttattctgaacagggattaagagaccgagggtctcttgttgtgaaagaattctaaacacaaa

SEQ ID NO: 32663 - DNA, 420 bp, Glycine max
  unsure at all n locations
agcttgtgtcattatgctcctgcaagtttcaatctttctgttctggcctgccacccttttgaggttttattatgagttgatgtgttttttgcaagtgcggttagaataagaataagaattgggcttttgtgcaacagttagattttgattgatggaagctgagtttggggggaagaatcagtacttgtatggacctgtggtgtctggaatgaagaaagctgttgttgggaatgggaagaggagtttggaatgggatctgaatgattggagatgggatggtgatcttttcactgctcaaccactcaattcagtgccatcagattgtacgggttgccagttttttccacctcatcctgaaattcctgcaaaanatgctaatccatctacccaccaattgtcttcttctgtattcatcttacg

SEQ ID NO: 32664 - DNA, 408 bp, Glycine max
  unsure at all n locations
agctttntagctattcattggtgtattatgatctacttttggtgctctaaattgtgggaatgtgctcaaatatgtggggcaattctggtttgctttcttgcttggatgggttgaattgggggtttgtatgagatggccctaggcctataatgtattttgaagcaatggggcatgccacattgtccccgttctcttgctattgatgcctaaacgcgcgcccaccaagtgttcggtgaaatgcctcaatggcattagcgcgtgattcttgtaaggaaacaacctatgggacaatttggtttgcacatgttttatattttttgggacatgtattcagtttcgtaagggctagagtaattgtcccacacatatcctatgcctatgaaccaaagtttctatgcaagagaacac

SEQ ID NO: 32665 - DNA, 418 bp, Glycine max
  unsure at all n locations
agcttgtaggattatggggtacccatcacatgtggtactaggtggcggtcgggcgatggtgcacaacagttttccacatccacaaatcgcgcataaacccaccatcccctgctgcccacctccaactgagctcacgtacgcccacgtagcccatatcctcgtttctctcaacaccgggtccccatcaatcctcccaagctttccccaacatccaagtaattcaacattcaaacaacacaaactatcacagccaagaaaacagggcaaaggcagaaaactctgcccaaaacaccgaccaaaatcacagcttttctcacttaaagaccccagtaacaattccttcgttccggttcattaaccgttggatcgactcgaacattntactggaagtctctagtacataagcctacattctgac

SEQ ID NO: 32666 - DNA, 410 bp, Glycine max
  unsure at all n locations
agcttgttcttattgtttaagtatctgataagactaatgcagagatncagacaatcaaagatatggaaaaaggattctacaccaacaaccacccttgttcagaggcataaaatatgattattggaagcaacaaatgatatctcactttgaatccattcatattgacctatgggtgatggtggaaaatggaaagtgcattccatacgatgatcagttaaatgaaattcctacaagttggtggatggagaagcaaaaacttagattcttgctcgactccaaggctcacaatgtgatgctatgtgctctatcagaagaggagtacaccaacgtacatggcttataaagtgcacacaaatatatgacactctagttgttacgtatgaacgaacctcacaggtaaagaggagtaa

SEQ ID NO: 32667 - DNA, 339 bp, Glycine max
  unsure at all n locations
agcttgttaaaagcggaagcaaagaataccgaaagtaagcaaaataaaaatgaaagcatacaaaacaagaatggaccgctgaatgtgcatagaatgaattgaaagattcaaatttgaaaacttaccagctgaagaacaaagaacaacgaagaacaaaagaagaatggtgaagaacatccatggaatcgatcacgaaaatgtctcgaaagcgttacggaagcacctcggcttgaattgtctccttctttcttcttctcctcactaatttcaagtgaaagcttattgcacaacaatgttggactcttaaactcagccccctctccctatntatagtggaaa

SEQ ID NO: 32668 - DNA, 115 bp, Glycine max
agcttgtataatattctttattactttaatccaagaaagttagtgaaatactcctctggaagtagatttagatcacgcaacaagaatgaaggttcctggccacaaatctcttgct

SEQ ID NO: 32669 - DNA, 409 bp, Glycine max
agcttctagcatttgctctatcctagacgaaggcgcatctacagaagcagcaacaacaacaagaacagttgactaatgagaatgaaaggtgagattgagaagaagaagaagggagtaccaattccaatgtagtggccaatttgagcgtcgacccatttatcagcgtcgtcatctccacagtacaagttgcacaccttgaatgaatgggagtgagaataagaacggcgaaaggaataagcgaattaaatgggaaaaagctacaacgaactgcagcgtacgggtgagcgaagatgttgatgagagccattctggcgaaatcatagagggcgttgtgtgtagattgacttcctcaccgccaataatcctttctcttcttcacacttcaacctcaactatggattccacacac

SEQ ID NO: 32670 - DNA, 280 bp, Glycine max
gcacactacatgattgcacagacagaaaatgcgcctattctaatgatacggagatctacaattgcaacagtgctctagaacgtactggtaacgcctttcctacgatgtcatagcgacgcccaccattactatcacgcatgctgcacagaacgagaatgcgacctcgcattggatcacacggcgatatcatcagacgagaacatgcgccctagagccaaccatcggaccaatgcatcgatctttagcgaactttttctgacttatagaacccatataacca

SEQ ID NO: 32671 - DNA, 407 bp, Glycine max
  unsure at all n locations
agcctctctagaagctggcaagaccaaggatgtagcagtgtttcttctgaacgcagaaagagaagattctccctttntcaatgacaactcagccttggttcatgttattaatgcatgcatttcacttggatggctggatcaagcacacgatctccttgaagagatgcgtctagctggagttagaactggttcatctgtatactcctctcttttgaaagcatattgccgagcaaatagagctgcagatgtcacatcacttctgagagatgctaagatagctggcatccagcttgactcaagctcttatgaggcaatgattcaatccagggtgctccagcaagacacacagggagcactccaactatttaaagagaggaaagaggctacaattccaaaagtcactcaac

SEQ ID NO: 32672 - DNA, 467 bp, Glycine max
  unsure at all n locations
ccgacacaccccaccccaccaaacccacccaaacacatacacccaacanncccggcggcgcccgtganctttgaccctcagacacccggcacaccaccgccgcgagcccaagagaccgcagctgaacctgtaaaaaccccacacccaaccgggaaaaccgcgacacatgcccggaacagaccaaagcacccccagaagacagaccaggacccggcaccggcccgcccacgccccaccgcacacccctcccaccgcggcccccgccgacacccaccaccaacccactgcggccacaccaccgccaacgccaacccgcggaaataccccacaccccccgacctcccccccacgacaacccgggaggacccacaacgcccccagcaccacacccaccatcccacccaccacacacccccaacaccccgcaccgcaccccccaccccaccaccacccccgccccacacacg

SEQ ID NO: 32673 - DNA, 405 bp, Glycine max
agcttttaaaggagagcttgaaaagacaagagtggtgaaagagaagctgaagacggcagtcactatggtcaggaaagagtgtgatgagttaaaagatatcaacatgaccatggttgaagcgttagagtgggaaacaaaaagggcctgaaaggaagaatggagcaggaacaagttttgaagggctatgtggggcagcagtaatgagctcaagcttagaaaggtcgagagggacaaatcaaggatggaaaacatggtgttagaggataagttaaagtcttgtaagaggtcgaagataattttgatggagtagttgagaaaaatagaagagaatatgttgataatcattgatcaatataaggagaaggtaacctggctactagtcatgggcatatgctggaagatgaa

SEQ ID NO: 32674 - DNA, 409 bp, Glycine max
  unsure at all n locations
agtgatgaacatccaacagatgacgactactgctgctatatgtctaccacatcaattgcttgtgtgatctggcttcagaaccagagtgaccttgcagtaatgctgacccgtgctacagaccatatgctcacatgcacaatttgggaggatccatggatcatgatacgtagagaaactgttatgtatacttctggttagcatccagactcaaaagatttgtggatgctcctattaacctcaagctgcataagcactctctgcccaactgaaacttggtgttctcaatgaagcatgcgtctgaggatgacggtgactatgctgtcttgctcgtgacaaagcactcttaatatgagctgcctctgatacggacccgtggaacgcacttctctngtgtgacccagattacccg

SEQ ID NO: 32675 - DNA, 419 bp, Glycine max
  unsure at all n locations
agcttttatatttgtctaatttctctctatgtgggttaatgtgctcataggccaatacaaaacaaaaaaaaaacccatttaaaacaaactatgatccataaaatttacaattgtttcttgatgcataaaaatagtactcgcacagggtaaatgtaccatacactctagtaacaatgaactaaaaggttcatagctcttacaaaccataaaggttctctcacaattcataagagataaaagtgatcaaaagattattttcttacaaagttcacagccctatttatagcttcctaatatatatcagtatgaaaaggtacactacgattacagtaaaatctacctcgatcatggtaaanaaatagtgacgttgaagctcttgcgcattgtggatcgactgtggccctcatggtttaccacaa

SEQ ID NO: 32676 - DNA, 413 bp, Glycine max
agcttgtggtgcattatattacatctatacaaaggaattttttatggggcagcctccaagactccaccaagattccctgggtgaggtgggacatagtctgcctacctaagagtaaaggtgggttaaggatcaaagatttgattaaattcaatgaggctttgcttgctaaatgggggtgggagttggaaaataatcagaatcagttgtgggccagaattctattgtctagatatggtggttggagggatttgatttctgataggaactgcagtttagactctccttggtggaaagacctcaaggttatcttcaagcagcagcagagcaacacaatttgcaatcacctgaagtggaagctgcgatcgggagataaaattagttcttggaaggataagtggctacatcataatctg

SEQ ID NO: 32677 - DNA, 412 bp, Glycine max
  unsure at all n locations
agctttgagggtgcgtagcccaccattttttcatagtagagtatcgataatgtgtctaccatcacgatcatcgtctccctttccatcattgggggtaccacctgngccgccagatccctccaccttttgggcgtgttctttgaaagatccgtccccctttttgcaaatgttctgtagttgcatcctatccggaaccatatcaaaattgtactaatactgcctaacaaaggcaaccattangtccttccaagaatggactcgggaagattccaagttagtgtaccaggtaacagctaccccagtaagactttcttggaaggaatgtatcagcaattcctcatcttttgcgtattcccccatcttctgacaatacatctttagatggttcttgggacaagtagtccccttgtac

SEQ ID NO: 32678 - DNA, 414 bp, Glycine max
agctttgaggttgtaggggcagtaaatagaattttgaagcagtgatattggcttgaagggaatgagattggactgttggttatcattttaatgaacagatttcctattctgagtattctctttgccaagacaccagctggattttgtcttttcatctaacatgtagcaattccccaccctcttttcttcttccaggaaaaaaatgatcaattttttgtactaagaaaaatgtgcaaatcattaatgagtttcatgttgctaggtttcttttgtgattatttataggaggatttggctccttacaagtgcagagtgtaattgaagatgctctcgaaattgtgataaaacagatgcacatgtaaaatacattataaaattattaataattgtaactctcgattttcaaatcattga

SEQ ID NO: 32679 - DNA, 538 bp, Glycine max
  unsure at all n locations
aaccaccantacatcatctcgcgcatccccaccagaancacctaaccacaaanaaccgacgcgcccggtgancctagacatcgaanacaaacganaancnnacccggaaccggagcaaccctacagcagacacgcacgcttgcaagctttaagaaacacggccctaagggcccaaccgcccactgagggaaaccccatacctagagcccccaccctcaacggagcgggcgaccactaccggaaaacaccgccgccaaccgccacacacgccatccacccaaagaccccggaagcactcaaacaacgacccaatagaccccccatacagcccggaactgcaacaacacacaaccccacaaccacatgccacgaggaacacacacaacaacaccacctaacttacagcgccaccacaccatacacccgcccaagaaagacgaaacacgacggctcaaaccgaaaaccgcaccgacacgggacacaaacaagaccacacaacgccccagacgcacaacaccacgaccagcacccccccccc

SEQ ID NO: 32680 - DNA, 399 bp, Glycine max
agcttgtgaccatttgaataactcaagagcttgcattgttcaattttgagcgtctcgatatattatgcgccttaatcggacctccgagtgaaaagttatgaccatttgaataactcaagagcttccattgttcaatttcgagcgtctcgatatcttatgtgcctgaatctgacctccgtgtgaaaagttatgaccatttgaatttctcgagagcttccgttgttcaatttcgagcgtctcgatatcttatgcgcctgaatcggacctctgagtgaaaagttatgaccatttgaataactcaagagcttccattgttcaattacgagcgtctcaatatattatgtgcctgaatcggacctccgagtgtaaagctatgaccatttgaattgctcaagagct

SEQ ID NO: 32681 - DNA, 231 bp, Glycine max
tgagaaaacacgctctatattcatctcacactccaagtatgcctccggatgattatttcctttaaatgcaggaacgctgagcttaataccatcgatctgtgattgactaggaacaccatcatctccctcttgtgctcctgtcttctatactatgatatctattctccattcgacacatcgcttcatggagcgcatcatatggctgtcccattaacctctccatatgatgcc

SEQ ID NO: 32682 - DNA, 388 bp, Glycine max
  unsure at all n locations
agcttttggaagaatcaagaagtgccttatgaatcctcccgtgcttatgccaccagtacctggaaggcctctcatcttgtacatgacaatcttagacgagtcaatggggtgtatgctagggcaacatgacgaatctggaaagaaagagcgcgctgtttactacataagtaagaagttcacgacctgtgaaatgaactactccttgctcgaaagaacgtgttgtgctttagtatgggcatcccatcgcctaaggcagtacatgctgagccatactacctagttgatatccaagatggacccggttaagtacatctttgaaaagctagctctcacggtggcaagtcctgctatccgagtttgacatagtctangtcacccaaaaggcgat

SEQ ID NO: 32683 - DNA, 402 bp, Glycine max
agcttgtttctacactcggatgtcttggaaacactctgttttgaggcaaggcttgatcttgagttaatcttgaagcaaggctttgtttgttgaagcaaccttgtattaatcttgaagcaatgcttatcctttgaagcaaccttgtttgattcttctttggcatcatcaaaatcatgtattcatacattcagactttaaaatattttaaaaatcaacaaactgattagaagttttgatttacacaaactacactcatttcattaaaatggcggtgctgctaacctaataaaagaaaaaaaataaaggtgagattctaaactgtttttcttcttcgggaacactacttctagttgcaaccttgagatctttgattctgctacttgtttttaatattatttgaca

SEQ ID NO: 32684 - DNA, 417 bp, Glycine max
  unsure at all n locations
agctttgttaagaacttacaaaaaaatcaagaacaagcttgttcgcacatcgttcgcgtgtatgacatccactccacaaggtttgaagtagaggagaccttcaatcctattacgcaacgtggcggacaaaagtgggcagctaacttaaacggtcattattgtcaatgcagaaggtattctgcacttcactatccatgttcacatattattgcagtttgtggttacgtgagcctgaactactaccaatatatagatgttgtttatacaaatgagcacatcttanatgcttactccgcacaatggtggcctcttgggaatgaagcgactatctctccttctaatgacgcatggacacttatccctgacccaactacaattcgtacgaaaggtcggccaaaatcaacaaggataaggaat

SEQ ID NO: 32685 - DNA, 410 bp, Glycine max
agcttcggggttattttggttgaaggacaaggttggatggtgaagttgatgtgtgggtgacaatcatgaattgacaaagtccttagttggacatccatacgttggatgattgactaaggatgaaaaaataattattgttgatatgacaaagtcaatgatgaaaccaagaaacattctgctaatgttaaaggaacacaatgccaataattatacaacaatcaaacaaatatataatgtaagaagtgcataccgttctttcattagaggaagtgatattgaaatgcaacatctaatgaagcttcttgaatgagatcaatatatttattggcatagattaaaggatgaagatgttgtacgtgatatcttttggtgtcaccttgatgcagtgaagttatgcaatgcatgtaatt

SEQ ID NO: 32686 - DNA, 400 bp, Glycine max
  unsure at all n locations
agcttgtagaatggttagacatgatacatgtcagggtttggtttggttcaaggataaaagggatgccccacattatttccatgacacanatgcaaaaatgatgatttggaaactntatgcaaaactggtcatgcatgcacctatgcggacactcaagtgtcaaatctttatggtcatgtgatgctagggctcaagattcgtttcctctattttaatcaacccaatgttntcaaaatatgttcttttatcaatttgtgcattcatccgagtccatttcgggcgtccggngaaatttcacagcattcacccttcaggtgtagacacattctccaaaaattggttatgatcaatgaactctttcacagaacagttggaaatcgtttcttttcacaagcatgct

SEQ ID NO: 32687 - DNA, 413 bp, Glycine max
agcttctacttatgtggcagggcgggcttccttcactttcttgcctcaaccgcgagctttgaccaccgctctttcttcccacaatgcttctctttatatctgcctgagtgggtttatagcctaaaccatacttcccacgatttcctttggcatttatcaagctagttatgccgccgttgtctttgcctaaacccattccgggttcgtaaccgttccccaacataactcgggccatcattattgctgcatcggacaggcaaggctgcccagagaaggagtccacggaggaaatgctgaccacctcaaaagactggaaagcggattctaacgattcttctgcggcttctacataaggcatagaggatgggcagctcaccaagatgtcttcctcgcctgacacgatgaccaaatgc

SEQ ID NO: 32688 - DNA, 371 bp, Glycine max
tgaaggatgactcacgagcctagaattgtaatgacttaccgccgtaagcctacggaattaagacatagctcaatggctgattgtaaacgatatcgtggcgaccatgagctaccaccaacaggcaacaagtcatgcaccgttggggcttacaaaaggctgaagcctaggttgccaatgtgggctctgactacatcttgaactaaacctaactaaggcccttctagctgagtaacccatatcatatctttggacagccaaccttactcggattgggccattatttaaacgaactagacactctaaagttgaagcagagtggtgtcagtaagtactcctgcattcgggccatgatacaactcacaaccatggac

SEQ ID NO: 32689 - DNA, 234 bp, Glycine max
tagctttgagcaaatacaaacgacaatgacttttgacttggatgactgattgagtcccgtaatatatcgagacgctcgtaatggaaatcctaatccgtgagatgattgaccgacgatcactttttactcagatgtgtgatcgagcaccgtattatgtccagacgctccattctgcatacggaagctgtgagcaaagtcaaacaacaatcacttgtcactcagatgtctgattga

SEQ ID NO: 32690 - DNA, 408 bp, Glycine max
  unsure at all n locations
agcttgtatccatagnttccatgccctatttccttaccttgacaggggagattatcaccgtcaaggcagaccaaaagaaagcacaacagtgttatgcagaaagcctgaaggtaggaccatatcctcccaccagggagcttgccaagccttaccccacagtggctgaaggcactcaagtcatgagcatggacgaagggtctcaaatctgagccctgatcgtctaccaagcaagcctgggagatgaattcgacatagatccacgagacgatacctctaatagaggcctgaaacccatcgaagagcttgcaacttggacctaaacccgggcaataaatgcggctcaagaaggacctcactagtcatgagaaccgacacatcactaatgtgctacacagaaatgcggattta

SEQ ID NO: 32691 - DNA, 410 bp, Glycine max
  unsure at all n locations
agctttaacagtataatctgagctagctgaataaaaatctgacatgaagcagttattaaggtaatcattgcttcccatgcctgaaaagaatagacatttgtttaggtagctattaagtgattcattgtctcctctgaagaaccttctcaactgctgcactgtgttgtcaaagttagccacttgctcattcaatgatgtatgagccccctgcaaacaattacataagaaaatcagaggaggtgtggctcacgaattattgtgcctcacagaacgatatgtacatttaatatgtgcttaatttctcanaatactcatgaatatgaatttgcatacaaggttacttcctgtttcttctctaatgcctgctgctccagatgcatagctagctcctcttaatagtctcaaacccc

SEQ ID NO: 32692 - DNA, 402 bp, Glycine max
  unsure at all n locations
agcttttaattcgttgnggctgcaagcttctatagtccaacttgtgcctccaaaggctatcagtgtcaacagtgcaactacatgtagcagctgataatcataatccatgtctgctatacgctagcaaatggaggtggttcttatggagtgatctcttgcatctgaaaaagtacttaagattgttggcttggatttcatcattagaaatactccctctggtcctttctataagaaacaagttttagtatatttacactaaaacttgtttcttataaaaaagacaggagataatagctcataaggcacagataagaaaagcttgtattgctcagagatctaacttttttttttatcaccttttctcttaaaaaaattatgtgctgacagcatgtttgctctggg

SEQ ID NO: 32693 - DNA, 386 bp, Glycine max
  unsure at all n locations
aggcgagttgattntagccttagtttcaccttagttattagtcaattcggttaagaatgagaaatcccaaagagaaaatgtccggttgattttcctctctattttactaaaaggtatatttttgttattatattattattttatctctttttgatttccaacgtggttacggcacgaccgaacggtcgaaatttattttaaccaaagtttacggatcatacaattcaaacgttcggcggaaatttattttatttttaagttaagcgagaaatgacttgagtaaaatggcttaagcacgtcaacagggggtataaaaagtacatgaaatgagaataaaaatacacgaaacacaatgtggaccaccacgggtacatataatgaatcga

SEQ ID NO: 32694 - DNA, 265 bp, Glycine max
tgtttgcatgcgtgatcctcatagcctgtcacagccttgagatatgggagcgaatacagtccccgcgctcggactctcagaccattatgatagctcgcgatgataccattactgttgtccctaagatctctgtacttgattgacgccgcatcccatgccttgaaaactgcatggagtacccttccgtcgcggtcactagaaacttgtgctatgaaacgcgagatgtaccaactgacggcctacatctatgggatatccttccatg

SEQ ID NO: 32695 - DNA, 340 bp, Glycine max
tttcttggagaagatacatttgcatcaaaggagatgcaaatagagtctgaacaacatatctaaacatgtcgaacatacatcggtcagaactgcagcttttagaaaatttctaccaactttgactttgttaatgctattccaagagatcaaagcacgcatcaaagcttaaccattaagcaaaatgaacaaggtcatttggcagaagctcaaatcattgatccatgaaactatgacagcttatccacgaactagaaactatacctcgaagcttaaccaattaccagaagtaacaagacttaaccgtcaagagtagaagccaagcaacagttcaatgcttaac

SEQ ID NO: 32696 - DNA, 412 bp, Glycine max
agcttgttcattattttttaagcatatttattgtatacttatattattcttatttttaatttttctttactttgcttgaggacaagcaaagttctacgttgggggagttgataagtgccaaaattcaatattttttgggattaaactgttagcacttatctttcgattgcaatagttttcttataaactacctttaaatctagttgttttatatatattgtacatttactaatgttgctgtttaaatatgaaagattcatccatgattctgtaggttttgagggttgtttgttagatccaaaaacaaagccaaaatggtcttttcacaaagatttctaaccccaaattcccccaggctagcaacctgctcgcctgggctaaagatcttactttagccctaagcaagcaactc

SEQ ID NO: 32697 - DNA, 415 bp, Glycine max
agctttaacgtttatggcaactcacagtgggttctgagatgctggacattgagaacaaatatttcatgatacaatttgatatataggaggatcacacaaaagtcatggaggagggaccttgatgcaatcctaccccgcatgggcattggatagagaagactccaagtagattgcgctagagctactaaagaaggccctaggatctcatgaaccttagggtagattctttagcccatgggtcaaggttggatccactattctttgtaaatcttagaataggtttttccttcttttgggccttgtattttggtcattctagtagtatagggttctagccttgtatttcagggcattctgagtagtctttgtagtacggactctcttttttgcgtattttcatgtattcttggaatga

SEQ ID NO: 32698 - DNA, 370 bp, Glycine max
agcttttctctcttctcactcagccaaaagagagaagttcagaagccttttctctccctctctcacgtagctatctacttcttcattcaccattgaagctccacacaaagcttcaacctttggccatcatttctgccccaaatcgcgaaaggagagcattttcggggtcgtgaagcgcgtgtctacgagtgggacttcgaaatttcatgtttgggtgaacttctttctcctttgattttcgtgggtatggggttttgggagacatgatgggtagttttgttagttctctgcttcatgatagttatttgtgaagactcttgttgaaagcttgttgaaattgccatgtttggatgagttaaacatacccatt

SEQ ID NO: 32699 - DNA, 413 bp, Glycine max
agcttgcaccatgtgcctcagcagcacaagatgagaatgctagtgtttctcagagttgctgtgctcacgtgaacaaaactgcgcagaaccctagttgactctgtgcagttcttctctctatcacagccaagatggctggcgtcaaccctcaagttgctgtcaccatccccaagcgttgtaacctgcctaatcgccctgttggttacaagtgtggacgtaagtgcgattaattaataattaccccttctttatatatacaaaggagagttactcacgtgacactactttgataaagatgctataaaaaaaagactattcaattatcaaaattgaaagaaatatacacatatgtatatatataaatatatatatatatatatgactctttctatgataactcttaagcttaacta

SEQ ID NO: 32700 - DNA, 382 bp, Glycine max
  unsure at all n locations
agcttgtcggttttgcaatcgcaaggtgatgtcacggctgactcgttccatgagtcttgctatccagcaatcgataatgtggatggattcagcttctgaacctggaaatatctcaaagatcgatcttcgcattgctgatcttcaagatcatattcacaaatgtaagcaatgtaactcaagcatttctgagtactatacccgtctaaagattatgtggaaagaactagaattgcatacatgcatgttgctgagtatatgtgctagctcctgatcttgngggctgactgtcacactcgacagagaacgtgaagatgactgtgtgattcattctttgtgtggcctcaatgatgtctatgcacctgacacgcttatggaacctatg

SEQ ID NO: 32701 - DNA, 389 bp, Glycine max
agcttttgtcactccacccgaatcgagcctttaggttaaccaaagctagcacagctgataacctagtaaagcttttgcatccaacatacaatggcgtatgcgcatctgtttgaagagcatcgtatatatctgcatgacattcccgacagccctcttgcccaagatcacgtatcatgtcttccatgagatcttcgctttgtagatcaaccggatgaggtggacatgttgctgtatgaccaaccaactcaccatgccatatccactttgtgtacgtcgggctaaagccatcacatatcagatgcgatctaatgtcatccaacgaatgacgcctcccgtgacacatttaacacaagggcagaagaagttgccatctgtggttgctgaatgta

SEQ ID NO: 32702 - DNA, 404 bp, Glycine max
agcttgtttctcacagttccaagatataagagagcttcataagagatggcatgtcccacttttgcttttcctatctagcttgcatgcacaaagtcagaatctgaaaagccaattagatttaaggaggcacctttgggataacacatgtggcatccctaacttaatgactgttttaatagtaataaattaaatagcagaaaccatggaaatttttttttgcactgttatttatttcacgataattaatttcagaaggaaaattatcactatagagtcctgagtggccagttcacaactctattcggattcatttctttctgatcactcataacctccaaactatttttctttttctaaaaaaaataccagccatcattttatgtcatcacgtgagaaataataag

SEQ ID NO: 32703 - DNA, 412 bp, Glycine max
tttgcaagtcttgcagcacactagcaaacgtagaattatttggaacaacagacgactgcctcattcgacaaaacaactccaaagcctccctacttttatcactctgagcataccgcgctatcatgagactccaaggaataagatcatctttcggcatttcttcaaaaaactgctgcgtctcagcaatctctccagacttggttaacaattcaagcagcacagtgccaacataaagatccctatcataacacgctttcaaagcacatccatgaacacttttcccaacctcaaaattgttcggtctaaaccccataaccctcatctggcagacaagtagcaacgaatcttcatggcagtaattctcagcatagcaagccatcatcccagtccaagataccatgcccttacaaca

SEQ ID NO: 32704 - DNA, 404 bp, Glycine max
agcttatttgaagtgaatggattagcatgggcagaaatgtctccgcattgattggtaaatctgttcctcaaattcctgaaaaatgcaaagatccaggtacattcagcataccttgtattatagggaatagtaagtttgacaatgccatgctaaatttaagagcttctgttagtgttatgcctctgtctatttttaattctctatctctaggtcccttccagtcaactgatgtggtaattcatttagctaatagaagtgttgcctaccctgttggtttcatagaagatgtcttacttagagttggtgaactgattctccctgttgattcttatattttgaatatggaagatggattctctcaaggatcagttcccatcattctaggcagaccctctatgaaaact

SEQ ID NO: 32705 - DNA, 392 bp, Glycine max
tgtcttttgagaaaactgccttgagaagacttccttgagaagctagagcttagctacacacacccctctaataactaagctcacctccttaagaagcttcctttacaagattcctacagaagtgagagcttagttacactcacctctctaatagctaagctcacctccttgagatgagaagctagagcttatctacacaccccctataatagctgagatgacgccgcatgccaaaatacatgaaaatacaaaaaaagtccctactacaaagactactcaaaatgccctaaaatacaaggctaaaaccctatattactagaatgaccaaaatacaagcccaaaacgaaggaagaacctattctaatatttacaaagaagagtggatccaacct

SEQ ID NO: 32706 - DNA, 326 bp, Glycine max
ttcttgacgacaaaaatagtatagtcttgtgatctattaagcgctccatgtcttttttgaactattcgattctcactcattaatattgagttacatttctcgctagcaacttaacgtaatgttggtaacctgtttaacaacttgttggacctttctattcgcaaaagattctttccagctatgttctttgtctatctattgaattgtaatggacagactagtataattatcaaatcatttaaataacgatgtttttttagatcattatagtcagagacaagtaaagaagcgaatcaaatctatctgggaactcaagatgtgatgac

SEQ ID NO: 32707 - DNA, 379 bp, Glycine max
  unsure at all n locations
ttctttgatcaaaanagcatttgtcattcttaatgatcttcaagcaaacatctatttctgtctgaagatcatgtgcctgaacaaccctactgaaggcagctgaacaaagatattctgttacataatgccttccagccaagactgtatctagcacaatgggcagctccttgttttcttcaaatccagtcctgtatgtgcaataatggatgagagcaaattatactcaaatacaatgcacgtctatttaaaatacctaaagagccagagtgaagagccaaaattcanattccacaataaataaatactgagtcaaaatcacgatgcaattagttaaaggcaacacatccaatagttgacggctcaacaagtaaaagccaac

SEQ ID NO: 32708 - DNA, 389 bp, Glycine max
agcttagaattagttaaggtttcagtgtgttgcattcactcttaagctcaaaacttgaaatgattttgcttagctctaagatgcatcagaaagttatgtgaaccatccttgatttcgaactaaatagtttaaaaggtcatgaacagtcctcatattacgtattgaataaacacttgagcttattttaccagtggatgccagaagctcaatgaagtaaagaagagagaaagattaacgtattactgtattacagttagaatatcaaagtaaactttaaacaggtagagaaacaaggcgaaagcctattaatcatttgacgaacatgatacattgttattatataaacaattgttcttatataaacaattacttcacactatataacatat

SEQ ID NO: 32709 - DNA, 397 bp, Glycine max
  unsure at all n locations
agcttgtctcatataatgacgatctcgaactgattcaccgttggattgttgtgaaatttaagcattaggatcgcaacgcaattccaagaattctaaccgttggaaattgtgatatgatgtctgggctgagataaatatccatcgcatcgtaaccttttcctttctccgagaaacgcagagttgtcttggtaaaactacaatcccggtttcgttaaccgttagattatcgtgaaattcttatattttgttcgtgatccaatcacgcacacctncaccattgggatttgcacaacagtgtctatggagggagaaatatgcatcacacgaagcagtatagaatggaggcttcaatcgtttctctatctctctaatgtttgggaactctatcagagcaatc

SEQ ID NO: 32710 - DNA, 415 bp, Glycine max
agcttatctgctttaataaactctgggccagtattagctaatattgctcttggtacgtgtgattaattcaagtttcacattggctagagataagacaaagatagaatatataagtgggagacaaccctcactctatgggctaactgttaaaattgagttaggtccaaactcgcattctagatggtatcagagcctatcttagatctattaacaggctacccgccatgttatcagcgcaccatacccaaaagtgctgctgggcatgaggagatgtattgagaaaaacctcggtcccacattgattaaagataacgtcaagatagattatataattgaggtgcaaccctcaagttgaagtatgtatgtcatgtactaagcttcttataaataaagtcaacctgaggccaagtgattc

SEQ ID NO: 32711 - DNA, 404 bp, Glycine max
  unsure at all n locations
agctttataattgtttatatggcttgaaacaagcaccgaggcagtggtacaagaagtttaatgagtttatgagcaactcaagattcaacagatgtgacatggaccatttttgctacgttaagaaatatactaataactatgttatccttgtcgtgtatgttgatgacatgttgatcgcaggatctagtatggcagaaattaacaagttgaagcagcagttggcaaaaaaatttgaaatgaaggatcttggtccaactaaacaaatccttggtatgagaattcttataaacaaatcanaaggaattttanagctgtctcaggagaaatatatacacaagttgcttgacaggttttaccttgaagattctaagaccaggaatacccttttgggatctcatttgaag

SEQ ID NO: 32712 - DNA, 414 bp, Glycine max
tttttgcattcttttggagtagaaacatgggaccaactcattttatttcaaaaaggaagtcatatctagtcaaggtctgagagaccatacaagtttcctaacgatttctaattatgtgggccattaagtctatcatatgctgacaatagccgagaagcccatgaatctcttcgggggcggagtaggtgtctgccatcgccttggccttggctaacaatcggggaagttcttgactcccgttcaacgtaagagcaaaccgatccatccacatggttgcctcttggtgtaaagagtcgatcacccttcctctagcctctttttccgcatatacttgcgcatactcatccgcgattctatgctcgtgggccgtggctagacctaactcttcttggtacttggcgatgatagctaaca

SEQ ID NO: 32713 - DNA, 398 bp, Glycine max
  unsure at all n locations
agcttggagaggatgcttcaatggaggaaaagaaagagggagagaaagagagatgagggagaacgaaattgaaggaagaaaaagggagagaagttgaactttgagttgtgtctcacaagactctcattcatcaaagttacaaaaagtgttacacatgcttctatttatagactaggtatcttccttgagaagctttcttaagaaaacttccttgagaagcttctttgagaaaacttccttgagaagctagagcttagctacacacacccatctaaaaactaagctcacctccttgacaaaatacatgaaaatacacaaaaaagtccctactacaaagactactcanaatgccttgaaatacaaggctaanaccctatactaatagaatggccaaatac

SEQ ID NO: 32714 - DNA, 408 bp, Glycine max
  unsure at all n locations
agcttgagtgaactcatgtgggatcagctgaagcttgcaagttggagaccaattgtgcgagtccatcaaggctcccatttcagaccaaatcgacaacctttgttagctgttttgaggcataactaaaactgtgagtcatgttagggcttgctttctctctgtttgaaggcaactctattctctcccttggaaggcacggttctctgttcaacggtaacaaaaaaaatccctgttttgccatcattttgtttgaccatatttcagatttctctggcaattttttaaatttcatatattttccctacatcagaatgaanaatgggttcaaaaccctgtagtcattcaaagaatgacacagttggttgctgctctgctcctttgcaccacttctctctgaatgatgactta

SEQ ID NO: 32715 - DNA, 400 bp, Glycine max
agctttatgacagacaatgaacctttcaaggcttcaatttttttactttccaagaatgtttttttgattattagactattgggtccttagattttttttgagtcatgaagcgtgtttctgagggcgatgcaagggtttgcttataagattgtggtaatgatgaagagtgagcagctatttgagtctcaggatggccccatcatactctctcaggtaaacttttgaggtctttcatttcatagcatttaattttaatcttcattgctttctcttcataccactaatggctatgacttatgagctcttcactctagatctagtttaaattttaatgatgcattcatgattcgccatgtgtttgctgctctagattgagaatgaatatacggcacaaagtaag

SEQ ID NO: 32716 - DNA, 406 bp, Glycine max
  unsure at all n locations
agcttctatggaagctacctagtctataaatagaagcatgtgtaacacttgctgcaactttgatgaatgagagtcttgtgagacacaactcaaagttcaacttctctccctttttcttccttcaatttcgtgctcccccctctctccttctctctttctttcttttcctccattgaagcatcctctccaagcttcttatccaaggctcatcttggtggtgaagctccttcttccattgcttattccctagtggatggcgcctcctctcacctcttgtcctttgtcttcggctgcatcttcatggtggaaaatcaccattaaaggacctcattgaagctcanagatccagcctctatagaatncccacaagcaagctctcatcactaatgacactgtcaactctgat

SEQ ID NO: 32717 - DNA, 408 bp, Glycine max
tgcttttgtaccatgatcgtcatcaagtgatagagtctacaaatctttagaaaacatgcaaaatccaactctttcactcaattaaaaggctatactgctacaagacaaaactagcatccaaacgtgagttcggccaagaaaatgcatgaaactgacacaaaaactcacacaaaatattacataaaagtggtttatcaacaggcacgaaccacacgagcaataacacaagggtgagcttataaaaacaaacatactaaaacaacaatacaacttaacaattcaagcctaaccacatactaaaacaacaatacaacttaacaattaaagcctaaccacataccatcgtatatagaacataacatgcagaagtcatgtataaaacataaatcttagaactacataatagag

SEQ ID NO: 32718 - DNA, 402 bp, Glycine max
agcttgattgaactcatgtgggatcagctgaagcttgccagcaggacaccaattgtgcgaattcagtcaagctcccattacataccacatagacaacctcacttaggtgccttgacgcataactaaaactgtgagtcatgtaaaggcttgctttctctctgttcgaaggcaactctattctctcccttggaaggcaccgttctctgttcaacggtcacacataaaatacctgttctgccatcattttgctagaccatatttcacatttctctggccattatctaaattctatatattctcccgtacatcacaatgaacaatggcctcataaccctttactgattcagagaatgacacagctgcgtgctgctctgcctctttgcaccacttctctctgaatga

SEQ ID NO: 32719 - DNA, 69 bp, Glycine max
gccgcctgtctgccttctttgtgactgtctggaacgcccgcgaggcgcgatggagatgatgactactac

SEQ ID NO: 32720 - DNA, 109 bp, Glycine max
ccaaaaaaagttgctaacatacaatcttgacacttaagctacaaattaagccacatgatctgtttgtcatcgcataaaactcagcaactcaccacggtttaaattctac

SEQ ID NO: 32721 - DNA, 101 bp, Glycine max
taagctttatccctcgggtttttcaccatgcggctcatgtcgcgtgccttatctctaacatattaccgaaaaaaggccgctaacatacaatctctggccct

SEQ ID NO: 32722 - DNA, 458 bp, Glycine max
  unsure at all n locations
ggagaagcgcgtgcttattgaattcgtgagtcgaacangcccncngagttgatgtgttagcaattttcttctttttaaaacacaagcggagttgtgtgtggtttgatctatagtctcctatccaacgttcagtcggtataataccgatgacgcatatttcagaattctacctttcgcattgagtcgaactgtatactatatcttagacgaatgcttattactctgacgtttagctgtcattggaagctttactttttaatcttaatttacaattcacacatttattagctaacatagaaaatatgagatctcaatacatgcatgttattacttggaaactctcaaattcaaataattccaaacttccaataaaggataacggtctgacaacatctttaaataaatattttaaaagtgcctagccttagacatggttacgtcgacctacgttaagttcc

SEQ ID NO: 32723 - DNA, 310 bp, Glycine max
agtttctatcgagataattaaaaagcagaggctattgctcgagaagaaaagaggaaaagcttatgaacaagaaaacaaagaaattgagcaagatgatcaaaacaagcttctgtcttattcattgagcaaaaggaacttatatacagattgagaatagatccaaaaactaatacaaaagcagttacaaagtttgctacaaatctgttagagttcaaaatgaatttggcgggaaatgatagcttgattaagatgagattctgcttcactcggcgccggcaccgtcattgccgcctgtcggtgtgcctgcact

SEQ ID NO: 32724 - DNA, 296 bp, Glycine max
ctttaattagtgtcctaaatgtccttaaggaactacctatcattctccttaataataaagcacttttaaagatagaaaatatgctccaaaatcgttcccatttcaactcttgtagtgctattcacaactcactaaatctctttttccatctttaggactggacttagaatggaattatggaaatgaatccttaacagaggcttcaacaattttgagagatgctggcaagagcaagaaaagtcttgcatgtcagttgtttttcttttttgcacttccgatgtttactctattcttgc

SEQ ID NO: 32725 - DNA, 290 bp, Glycine max
  unsure at all n locations
taagttttagccttcgggtttttcaccatgtggctcatgttgctggccttatgtctaacatattatccaaaaaaggttgctaacatacaatcttgacacttaagctagaaattaagcaacatgatttgtttgtcatcgcataaaactcagtaactcaccacggtttaaattctactgagaagcgatctacaacgagataaaatcaaatgaagcttattatgaccgcgagtatttatgtnccaagaaaccattaaccactgaatttcatctaactaatacttaattattga

SEQ ID NO: 32726 - DNA, 455 bp, Glycine max
  unsure at all n locations
gggcgggcccgcccgactcgtctcgactgcatatagtactatngcgcgtttgtcagcttgcacccggcgcatctctagagtctacctgtttgcatgcaagcttatcctctcgtagagctaaatccagaggagaaatgcctaaagagaactccagatcttgcttcccattatggtcatttgatacattcaagatctcaacggaagccaaacaattgttacacaaaattctactgttaagtcaaaacaagaatgccttagaacatattacaggacaagatatagcccacaaacataaccagctatcaatgcgaggccaatataatagcacattcncctttgggcaaaatgcataaaccaacgctacaaccctagccaatacctacgatggcctaatccatgagaatacccctagctcacaacatcgtccctttgggcagacacactcctcaacttgc

SEQ ID NO: 32727 - DNA, 245 bp, Glycine max
agtcttttcactcggagatgtgattcaggcgcataatatatcgagacgctcgaaaacgaacaacggaagctctcgagaaattccaatggtcattacctttaactcggaggtctgatttacgcgcataatatatcaagacgctcgcaactgaacaacggaagctctctagaaatccaaatggtcataacctttcactccgaggttccgattccgtgcatgatatatccacacgctccaaattgaac

SEQ ID NO: 32728 - DNA, 479 bp, Glycine max
  unsure at all n locations
gcgatcntnntatggtacctcgcattcnngttcgtttagnntacatacanctcgaattnggnnnatatattattgatacataattttgtgttcttgnacgaancgatttgggcgagattgtgttgatatgaattgtgaatttccaaatctgcacttatgcanaatttttgctgggaaattgtgcagcagaatcttgcacaagtgcagaaaaatgcttgtgtgtggttggctgtggaaagagcagtgcgaatgagttctggatgttcgctagtagatcccaacggtcaaaatgtatgcttatgtactacagacttccagtaaaaatttggagtcgatccaacggttaacgaattggaccaaagaattgttactgtggtctttatgtgagaaaagctgcgattctggttgatgtgttgaccagaagtttctgccttcgctctgttttgcttggctgcgatagcttgtgctgatcgaatgcg

SEQ ID NO: 32729 - DNA, 117 bp, Glycine max
caaattgaaggaagaaaaagggaaaaaaattgaactttgaattgtgtctcacaagactcttattcatcaaagttacaacaagtgttacacatgtttttatttatagactacgtacct

SEQ ID NO: 32730 - DNA, 277 bp, Glycine max
agcttatagtatgcccgagtcatttatccctgtgagatgttgttgaagtattggcgatcagaattgccattccttggattatagggttgaaccaagctcatgcttttacaaaaaaggttcatcaagtcaagttgaaatatggaagtaaccgtcttgcaaaattggggcaaaagatgaatcgagtcacatcactgcttcgtctactgccaaacatatttaggattattgatgtccttgttacttccagtttcacctttgacaagatgtcatggaccat

SEQ ID NO: 32731 - DNA, 256 bp, Glycine max
tgatgtttgtatttatgggatgttgttgtatgtcattcttgttttaagagtagtgtcccactggtaaaactaactttccaaatgtttgccttcgcaggaaatggccccgaggaagcttgcctcaaagaggtccaggaaggacaaagcagccgaaggaactagttccgctccggagtatgatagtcaccgctttaagagtgctgtacaccagcagcgcttcgaggccatcaagggatggtcgtttcttcgggagcga

SEQ ID NO: 32732 - DNA, 369 bp, Glycine max
agcttgttgaagaagtttccaaacaaaaaagggagaataagtagaagttaaagcacacgacatcatttgaatgggagcctaaagtatgaaggaagcatcaatttagggggagttttttattcaagtttaaatttctgccctgaaacattttattatgtactcaaaacacattttctttatatgaataaaatgagatgttttttgttatttgctcacgctctatctcaaagtcttatgatgcattattatttggttatcatatatactctctgcatctaataagcctaactaatctcttattgtgaagtcttacaagcatactttcaacttttaaatctgtatgtgtctgacatcatcaaaaatgaagag

SEQ ID NO: 32733 - DNA, 144 bp, Glycine max
cattgattttaattacacacccttttttcttttattgaacgtgatggtattatgtggaaatcctacaagtttcctgcatttttactcacacaaagtggctcaaagactcttcaagacgtatttaaaacaaaaaacttgtgtgta

SEQ ID NO: 32734 - DNA, 257 bp, Glycine max
ctgcacgcatgcaagcttattctagacggctttcctttttttagcaagttcctaagtcagtcggttttaaaggcctccgactgagtacaaaatgacttgtagcaatttggtaagtaattaaaaactcctctgcatgtccaattttaaaatcctatagatatctaatatgaattccatgctcatttcaagatgtgccgagtaccatgtactcacatatgaaagctataagattcactatctgaacttgcaatggacta

SEQ ID NO: 32735 - DNA, 284 bp, Glycine max
tggagccaagcgagagctcaaaaactagacaaaataggtaaggatgtgaggaacaaggctagacttgtgaccaaaggttactcacaataggaaggcatacattatattgaaacttttgatcctgttgctcatctataggcaatatgcaatatactatcctttgttgctcatcatggaatgatgcggtatcaaatagacgtaaaaagcactttccttaatggacttatcaagaagtttatgtggaacacacccctgggtgtgagaggactatctaccctcatcat

SEQ ID NO: 32736 - DNA, 188 bp, Glycine max
tacacacttggtcaaactcatgaaagaaacacaaactccatctcaaatattgcctcaattcaaaataaaagcatacaaccatttttcacaaaaaagatataagcggttcattgccatgtcattcaaaaacaagttaaactatttcaaataccttagaataaacaaacccactatttattaattaaact

SEQ ID NO: 32737 - DNA, 216 bp, Glycine max
gcatgcaagtttctacattcaatgcgcgactcttcgggtattacgggactcaatccgacatcccactaaaaagttattgcagcttgaatctgctcaagagcttcgtatttcatttccagcgtctcgatatattaccggactcaatccgacatcacagtaaaaagtcattgttgttcgaattcgctcagagctccggcattccatttccaccatctc

SEQ ID NO: 32738 - DNA, 310 bp, Glycine max
tggcatgagggctatctctttgccgacactttacctttattactccctacattattcatggtgccactgtacacgaccaatcttgcttaggacatggcaatatggcccgaagacgatcccaactcccaacccccgtggacgaaacactctccatatgtgaccacaacctctacactattcccaagcctcttcccctggattactacaaacatccacaactatttctgactactctctcccacccaacacacacaccattttctgccacagcaaaatcctactgactatttgacaccaactttttcttccc

SEQ ID NO: 32739 - DNA, 465 bp, Glycine max
ggcgagccctgccgcgtgcccagccaggtgtttgcatacacactttgggagtatgcaaactccccccgcgggaacctatacattatatccgcgagcttgcgagcttgcaggcgacggctcggggtgaagatggctgacaacgctacctctgcaacacatggctacggaatggagaccgggaaatggtcaatagagacgccactattgtgagaagaatagtgaagcacgacttcagtgccagatgaagacatggatgctcacccagtatgcaagacacaatgattgcgcgccagatgccgataaagatgttcgccatactgaggtccgaacgctgaagtcctttcttcacacaatgcagaggactcaaccgatgaataggatcacgccttagaggagactactgcactactgtcaccagaaactgatcaggtgatcttactgacctgtaagaagttccatttgacc

SEQ ID NO: 32740 - DNA, 470 bp, Glycine max
  unsure at all n locations
ggatggacnccgagcacccgcanttgtgtgttggaacaccgctcnganttaccctggttgtggctgtgtttctcattttgttccccttaactctaacacatggaacttatggcgacctctagcctctacttcatattcaaactgaaactgacgagaacctttccatgaatttggggagtgactcatctgtcgtctgctgaatgattgtgagtgcaactatacgcaagtggggtgctttactcatcatgaactgggctccaaaatgcacaataagtgtcctgaaagaatctattgagttccttggcacatcaatgtaccattggagtgttgaagcccttatgttcatcacgaatacttggcacattatgacatcattattcgcgaatagatttatttgcgttagcgatgcatctatatgcttcttctggatccgacagttcattgtatccatctattggccattgcttgcn

SEQ ID NO: 32741 - DNA, 321 bp, Glycine max
  unsure at all n locations
agcttttccaacatcaaagtaatacaacattgaaatagcacaagctatcacagccaagcaaaacagggcaaaggcagaaaactctacccaaaacaccaaccaaatcacagcttttcacacacaaataccgcagaaacatttccttcgctccggctcattaacccgtggatcgacttcaaaattttactggaagtctatagtgcataagcctacattttgaccgttgggatctactagcacacattcagaactcattctgcactactctcttcacagccaaacacacacaangcattttctgcacaaaagcaaaatcctact

SEQ ID NO: 32742 - DNA, 381 bp, Glycine max
agcttcagtccctgagattttggttcccagaagacaacagggagtgaagattgctgaaaaccctagctctgcaacaagtcctagggaagtagacccggagatggacaagaaaatccgcagtattgtgagtagcattctgaaagatgcttctgtgcctgatgctgagaaagatgttccaacatcttccaccccaagtgtttccgtgcctgatgctgagaaagatgttccaacatcctccgctccaaatgctgaagcccttccttcacccagtgaagaggaatcaacagaagaagaggatcaagcctcagaggagactcctgcaccacgggcaccagaaactgctccaggtgacctcattgacctgcaagaagtcgaatctga

SEQ ID NO: 32743 - DNA, 344 bp, Glycine max
agcttctcaaggaagttttcttaagaaagctgctcaaggaagggacctagtctatgaatagaagcatgtgtaacacttgttgtaactttgatgaatgagagtcttgtgagacacaactcaaagttcaacttctctccctttttcttctttcaatttcgtgctccccctctttctttctctccctctttcttttcctccattgaagcatcctctccaagctttttatccaaggctcatcttagtggcgaagctccttcttccatggcttattccctagtagatggcgccctctctcacctcttctcctttgtcttccgctgcatctccatggagtaaaatcacca

SEQ ID NO: 32744 - DNA, 218 bp, Glycine max
tatttaatggtggtttgatgggttcattggttctatttgcatttaatttttgcatgcttggggactgatcacccatgtgtgtgtaaagtgaagatttttaacattggaaaatggtttgaatccttaaaactggatagaagagggctagaatactgtatgtctggacacagagtgtaaggatttaagttttaatatgttgtaatcggaatgcaattcat

SEQ ID NO: 32745 - DNA, 155 bp, Glycine max
  unsure at all n locations
agcttttnccttattttcctataattatggggagaagtgaagggaaaaaatgttcaaccctcctagcaattccagatcacttcaaatcagcgacgaaaatcgcctccgtgaagaaaatccaagccaaaccgcttccgtaacgttcctgtgggtga

SEQ ID NO: 32746 - DNA, 358 bp, Glycine max
taatattcgattattattcttgtggaaccttcacccgacgaagacactgacaaaaacttatcttctccttcttggacaaagtatggcaggctgggggcaaataaattttcttcccatcaaaccttggatgcaactgtgatcttatacccatattaactagatcttgaccggtattcaagccatccttcgtcttgccttgaatgttaaggagcgttccaatcacactgtcacaaacatttttctccacatgcataacattaataccatgtctaaccgtcagatcaacacagtacggaagatcaaagaaaatggaccttttctttcatatgcaactctgacttttattctttttttgggt

SEQ ID NO: 32747 - DNA, 283 bp, Glycine max
agctttacgaatcccgatccaacccgggcatagtcagtgagtgagaacctgtgatgtgcctaaacaggcgagctcctggcagtcaacagaatatatgaacaaagaccacaaagcaaggaggcttgtgtggtggctggccagctgtgaactttgagtgttatatgggatatgggctttggtaattgattaccaacggtgggtaatcgattaccacgcttaaaagtgaagacatgaagctaagatggcctctggtaattgataaccaaaggtgtaatcgattacc

SEQ ID NO: 32748 - DNA, 372 bp, Glycine max
ataaaagggatgccccacattattttcatgacacaaatgcaaaaatgatgatttggaaattttatgccaaactggtcatgcatgcacctatgccgacgctcaagtgtcaaatttttatggtcatgtgatgctagggctcacgattcatttcctctattttaaatcaacccaatgtttccaaaacatggtcttttatcaatttgtgcattcctccaagtccctttcgggcgtctggggaaattttcacagcattcacccttcaggtgtagacacgttcttctcttcaaaatcgggtatgatcaatgaactttttttcaaaaaaagttgaaatcatttttttcaaagcatgtcggttttagctagaaacttatt

SEQ ID NO: 32749 - DNA, 462 bp, Glycine max
  unsure at all n locations
cggcgcgcccgtgacgcattgaatantcatacggtgttagcaattcgcantccgggantttgctnancttcgcgcaggnatgccacgttgtgagacnctctttaaccttttgtgtggtgaactacagagcctggcgtttctacatttactcaccatcatagggggataatgtggaatatgcaatactcccatcctcgaatattaccccattgcattgaacgttcgcagttcctctccttcgttccatccctaactgccccctcataatggagaataattatttcctacacaaacacgtaagggggattgatcaaaattatcagcgcacatgaccatagagaaaacggaagcacagactaagaccaatctacccattctgagggcttgaacacggtccaactatctattgaccacaacccacaaccttatacaatatgccatgcccttacgcgtgctacggcc

SEQ ID NO: 32750 - DNA, 475 bp, Glycine max
  unsure at all n locations
cggcccgcccttgacgagtcgactctgcacgcgtgttagcancatcngcagttaggcgagctctcctacacgctgaatccgtctagcatctaccttgttgcacgcaagtttatgaggtccacggcgacaacaatgagaggtttatactacatgggcccttatcatgtgaatgccctatgaaatatgcggcggaaatggtgatcctcaatcaggtcaattgtgactaacatgccgcttaatacgttcgcacccgcagcatgcatcaaaggtgatcccactttcagaaaatgcgtatacaagcatgatgctcacaaatgacatgcaaggactccgctacaagtgctgtaaccctaacttcacccaatggccaggattacgccgacggaaaggaacaattctcttaagttttatcgtgcacaccgacgcctaaaagagctctagagacccctatgaccgggaacaagatcaggcgacg

SEQ ID NO: 32751 - DNA, 309 bp, Glycine max
agcttctccctttattgtctataaatagggggagaagtgaactataaaggggttcacccccttacgcacttctctctttccaatccgctctgaaaaattgcctccgtgaaaaaactccaagccgatgcgcttccctaacgtttcccggagtgactccgccaacgtcttccacccttcttccaccgccctcattcattcctcaacggctcaccacctcaaaccaacctttcccactattctatgtacccgtggtggtccacatctggtccctgcatcctatcccccctccatttaccttttatcccccct

SEQ ID NO: 32752 - DNA, 213 bp, Glycine max
agcttgttatcaatgctaatcccaaactccggtgcatagggattatactcataatcagcttcccgaattgtctgctagtatactgggaaagctatacattaattaaactaaaccaaaccacccacacacattatatatttgtttgtaacgagaataaatactgacaaggacaaagtaaaacaattcgaatttatcatacagccatggctattc

SEQ ID NO: 32753 - DNA, 342 bp, Glycine max
  unsure at all n locations
agcttgtcgcccagctggcccaagcgagcaaggttgcttcctncagaagcaacaaccttctggaggaatcttctggagggcccaagtgggcctcgctgctatttacaccccctgtttactaaatgcagcgcccttttctattcttttgtaattctttttccgtaacgctacgaaactttacgaatttcgtaacgatacctattttgcttccgcaaagctacgaatccctaccgattatgcattctactctcttttacctctcgaagaagatacggaaacttcacgattgcccannaacacctcttttcgatttcccgcacattacggaatttcatgaatcac

SEQ ID NO: 32754 - DNA, 288 bp, Glycine max
agtttgtactctttcatctgatggagtgcttaccatttaacttgccacacactatctacctcaacattatgtgcatcacaaactctatggatagccttgaagacatctattatgctgctctactcaacagaatcttctagagtaaaggagtttatcaagtcttctgttgatttttggacgatggatgatagagatatggtggacaataacattggtcatttggtctactattcttatcttctatattgatccgccaatcttctattatctagtggtgcatccagtcat

SEQ ID NO: 32755 - DNA, 238 bp, Glycine max
ttggcgataagtacctttgcaacgacatggtccatacatctcaccgacacatgtaaagccttgttgtgtcctcttccctcaacgggaatttcttcttctggaaacgcgatataagtgttggtgggtatatgattaacgatgcctttcaaacccttcactgagatatcatgtgctacatgggcatcgttaaggacctttatcacagcgcacgatgaggctcggaagttatgagcagttc

SEQ ID NO: 32756 - DNA, 329 bp, Glycine max
  unsure at all n locations
agctcacaaagagaaccatcttgatatgagggactctggaagtcctcttacaacgctatgcttttgaagctttgagattaacctcaagctaacatgaccaagcttcttatgtcaaacccaataatgctctttgactgagagtacgcatgaaacttttggactagacagatcaccaagtctaatcttatacagatttccttgtctcttagcctagaaaagtgaagaagtctccttgttctcaatgatacacatatcctngctaaagggacattgtatccactatcacataatttacttatgctaaccaaattatgcttcaaccctttaac

SEQ ID NO: 32757 - DNA, 181 bp, Glycine max
gcgggaattcttcaataccctatttatacattctgagaggttcgttgtcatgtggccatatcgacatccttctttattcatagcaatgggccactttttccttgaaatgcgaagcatcctggtgcttatggttgacttacttgacggatttttctaaattttgataaaataatatggctgc

SEQ ID NO: 32758 - DNA, 339 bp, Glycine max
agctttaagaaaaagatggcctcatttaatggcttatttccagaagggaattctatcaatagacctccaatctttaatggagagggttaccacaactggaaaacccgaatgcaaatttttattgaggcaatagatctaaatatctgggaagccatagaaatagggccttatatacccaccacagtagaaagagtttcaatagatggtagttcatcaagtgaaagcataaccatagaaaaatctagagatagatggtctgaagaggatagaaaatgagtacaacacaacctaaaagccaaaaacataataacatctgccctatgaatggatgagtatttc

SEQ ID NO: 32759 - DNA, 368 bp, Glycine max
tgtttgaatacaaagagtttactctgctaagcaaacaacaaagggtctatgttctcgttttttaccgcccaatacttttgacaaaatttcaccacttgcgtcctttagcgtccaatacttttggtctggatgcactgacgtatagaagggatcatatcattcctttgtattgggtgccatcctctttctttgattcctcgtccagttcaagatgtgtactcgaatgcatgcgtgtcttcattccttttacatcaaccattttgaacttttttagaagttcattcacatacttggtttgatgaactgaaatgcctttatctatctgcttcattctcgcctaacgcacaatttacgtccctatcatactg

SEQ ID NO: 32760 - DNA, 333 bp, Glycine max
agcttgtacatcagagtttaagacattcaaagcctgatgcgacacgtcttcaatccaacaattatcttgaaatctaatgccaactttgtaagtctaaacatgtttacgaaatattataatatctcattttgcctattctcatgataaaaaaagatgtttacaaaataacttacatgtttggaaacagtctacatctagaaaaacaaaatttcttaaaaaataagctgctttttttaatctaaaaattcgtaacttatgtctatttgtcaataatctttctttctttatttaaaccgctttcatactcttctgccgcgtcaaagttgattatct

SEQ ID NO: 32761 - DNA, 478 bp, Glycine max
  unsure at all n locations
cgcgtgcacanccacgccagctattagtgacatttagaatactttcgnntgcccctgtggaagttacttcatgaggatatagaagtttattttgtataatattagagggatccagcttgcacacgaatcctgtacaaataaccccattggatatttgctttttttaagaagatttctacattaaaaaaaaacctatgaacaatattattttaacagaaagatacatggtgttattaacaaaaccaaaaatccctaacaccatgggcaattcttaacttttttataaaatccctttttaaaagagtaaattatgaaaaaatgggttacaaaaaaatatttttttaccttagaatttttttggttgaccaaaggtttgaataaattaccattaaacccaggaattcatggaacccttacaaccttatttttttttcctttcgctagaatttccaatgaaaaaaaacaacctttggttcct

SEQ ID NO: 32762 - DNA, 289 bp, Glycine max
agcttacaatccttttgtttaagctgtaagcgctcttttacttgaaattttgtagcactacagtctgttgtgacaaaattactgcgattttattctcaaaatgtatttctttcgagtacataaaatctggcatgaacatctacattcttagtataacaaatggtcatgcgagtaacacgaaaaacattctttctcaaccagaacgtcacgctgctaatttgaggttggccttaatcctacatatgtccctagccaactaaatgatctatacccaacgatggctcaatat

SEQ ID NO: 32763 - DNA, 346 bp, Glycine max
tacgtagcagttttcttataaaatagaaaattttgaaccataacatcatagttgcataaatgcgcatcgaccaaatcatgggataattgattaaaataaaaagttttcaaaactaataacacatagcaacacattataattgattaacacaagagagtaatccgataaaatagtgaaaacacgaaatggcaaggtaaaacatgtattttcaaaaagagatagaataatcaactacagatcaacatatcaacatactatgacattaaataaaattaattgacataaagagcatacataataggctacatgtactaagcctaacatcattcaatgctagatccatcta

SEQ ID NO: 32764 - DNA, 273 bp, Glycine max
  unsure at all n locations
catgcaagcttgctatctagctcttccaggttttagaggtgcttcctccagaagcgggagccttctggaggaatcttctggagggcccaagtgggcctggttgccatttgcacccccatttttactaagtaccaccccctgcctttntttggggattctttcttcgtacagttacgaaaacttacgaatctcgtaacgataccttgtttcctttcataatgttaccgaaccctgcggattacataaccatcctcttttttgacttacgaatgt

SEQ ID NO: 32765 - DNA, 330 bp, Glycine max
  unsure at all n locations
actggatgctttggtcaacttgagaacctanctggccttgaatcacaaatctggagctgtcttaagggtttgtggggtgcgcccctcccctgaccancatatanacctttggccttccatgcagcaacctaaagcaattgagcagcctgaagcttatgcttgaaatatttacaatagaccttctcaacctcagcagcaaaatcaaccacagaagagcaattatgacctttccagcaacagatacaacccctggatggaggaatcaccctaaccacagatggtccagccctcagcaacaacaacaggagcctgcttcttcctttcaaaatg

SEQ ID NO: 32766 - DNA, 88 bp, Glycine max
acacaagagtgggtgcctattacgctgaacctacccttttacgccaacaatcagctatcggctacgccatgataattcccttacacct

SEQ ID NO: 32767 - DNA, 178 bp, Glycine max
agcttgcttgcggggcttgtatggaggctggatctttgagcttcaatgaggtccttcaatggtgattttacaccatggagatgcagcggaagacaaacgaaaagaggtgagaggaggcgccatccactacggaataagccatggaagaaggagcttcacgaccaaaatgagccttgga

SEQ ID NO: 32768 - DNA, 470 bp, Glycine max
  unsure at all n locations
acgcggctgccntnnnncccttgcnctccacccttgtgggcattcgaccactttgaggaattatgcgaactcgccacccggngatcctctatagttaactgaagcttgtcaatttttaagtgcccaacaactgggacaacgtctctataatggaccacgatcattgctcctacttattggcatcgtcatgatcattttatctaagattgctactgttgttcccatcatgaagagctagtcctccctagtccgaacattattagattacttttcaattgaactcgcccagatcctagttgctcacttctttttttcctattcatacttgatggtgtgaaaacttcaccactctttctgataaccaacacattttgacctccataatacctcacaactatgctttccgacatggaactgctcatatttacatataccacacattttgcacttactatggcgggtctgccccg

SEQ ID NO: 32769 - DNA, 346 bp, Glycine max
  unsure at all n locations
agtttcaagctgcttggacatcaacttattgtgagccaaaaaagcatcttgtgatgacaactccaataaactacttttggtttggatatgtgttctgtcacgcaagattgcgtggtcactagtagccatattctcaattaactccattgcttcttcatgagtctttagtttaatttttcttcctacagaagcatctactaattgcttcaattgtggccttaacccatcaatgaagatgttcaactgtatacgctcacaagaatcatgtgtggnggtcttccgtagcaagctatggaaccgttctaaaacttcactcacagattcattagaaaattgatggaatgaa

SEQ ID NO: 32770 - DNA, 242 bp, Glycine max
gtataagggtatcgcgtaaaaacatgggctatattgtttattcttgtatgctaaacaatggataactacaactcgtttttgagcttccaccgctttggtctgtgaatcacgaaagcacttgacccatgactttcttatttagaaaaatgggaacaacttgacacatattaatatccattatggctatcaaattccacttagcacttaacataataacctaccattatcaccgtattatatta

SEQ ID NO: 32771 - DNA, 288 bp, Glycine max
agcttatacactatacatctaaaatgttcagggcccagaaaaggtgatgaggagatatatatgtgacgtgatgatcaccgaagcgctagcaacatatttataaaatatttttttaatatattttttattatcagctaacatttataaaacagattataaatctattaatagaattcattaaacacaaaataacatcaatcaaatctgtatttttcaatacaattcaaccacagttcacggtgtatttaatacagggggctggcgtttatctaaccatgataccgtacc

SEQ ID NO: 32772 - DNA, 472 bp, Glycine max
  unsure at all n locations
tgatcctatcacctagcattcgngacatttagtaaggtaacatctccacccangcnnaattttgtgtgagaagcgcccttttccttggcttatnccccaacggaaggggtcgtctctcatctctttaaccttggcctcccccgcatcccccatgggggaaaaataccatttaaggaccctattggagcttaaaaatccaacccccattgaaaccccatcagcaaggttccattccatatcttctatcatcctaagattgacccatgacaatgaatctattaaaagttactaccagctctgagaaactaactaacagtggccaatacgattgatggggaaaagaatgattggacttgcaatgtggggaatagaaatttgtgggtggctgtacaattgtcctcttattatataaaagggcgtcgttccaatcacaccaaaccttttgtttatttttttttcacgaatttacctc

SEQ ID NO: 32773 - DNA, 352 bp, Glycine max
agtttgtatcatctactttctacaaattgagggtttcatcaaagatttgtattctacaggataccaataccaaggtgaggattggtacaattgaagtgaatcgcggcctctatcaattcacccccgaagcaccaaaaacacataccatatgttctatcattacacacccaaagtgtctaatcctccctgtaaatctatggcattctcgtatgggtcaccccttctccgaaagattacaagccatgcaaacatacctatcctttcttaataataacaagagtttcatttgtaatacttgccattatgccaaacataagaaattaccttttcatctaacacatctcatgcatta

SEQ ID NO: 32774 - DNA, 181 bp, Glycine max
cactccccattcatgtgcttgtttttacggcaacagacaaacagcatcaatacccctcccaaaatgaaactagatggtccttgcttctatggctcagaccctacaaggcggattgttaaaaatccccaattttttgcttaccactcaagcccaaaatccgagagactcaccatagccttct

SEQ ID NO: 32775 - DNA, 253 bp, Glycine max
cgacgaatgatattgattatttctaacgtccgaatctcctctctactaattcattgtctgaaaaagtaggataatatttttctaaaaattttctattatcaaaaatggtaaatattcggcgattttattcctaatggttaaaattaaaattttcattctttatacaacaaattataattaaataaatcaaatttattgcaattatatagtttaaaatcatttttaacatctaaatactttattaataatatta

SEQ ID NO: 32776 - DNA, 464 bp, Glycine max
  unsure at all n locations
cgacgcgccccgtgacncattgacntgatcgaatttagcatatagccgtatgcgaactcgccacccggcgatcgtctagagtctacctgtatgcatgcaactttgctgctctctggggccaaaactaggcagctgaactgcaggtctcacccatatcaaacacctgttatttaacgaaataattttaaatgcaacaattgtcaggtacacaatttgaacactaacatactaacattatcgtctcagaaccaacattcagatgcttctgacacatctccctaactctattacttcaccaatggttgatctcaattaaaccaataacttccatctttatgatccacgaagatacgctttgtacctcattaagaccgctgatgatgcccgaccgctccctatcccttatgacgccccacatcttctacaccatcgcgtacctaaatccatcacaggtggcttgtccc

SEQ ID NO: 32777 - DNA, 455 bp, Glycine max
  unsure at all n locations
acgcgcggcnctccctcgttgacntgctcgcatgtacgactatcgccgtaggcaatttgctcacgcccccctctagagncnacctgtttgcatgccaattttatggttattaagctcacgaacactgagcacaactgaactcaattccctctcgaattcatgccaaatgaacggatccaggctccaccagatctttctctcactaccaccaatacgctatggcatacgtctcaattggcaaggcatctgcacactttgaatgaccccctttcatcttttcacaaacgcagtaaaccttatcctactcgcctacgttattgtgtcaatctccctatgcaaatccgcacccagagcgatccccgcctacaattaacctatactatcctccatgcacaatcgaattccgtccacacgaaatcctaccatacacttcccaattcggctcactacattcg

SEQ ID NO: 32778 - DNA, 250 bp, Glycine max
agttttgatggttttgagaagaaatcacatgtgtgtcatcatcaaaaaggcggagaatgtgaatgcctgtatacatgactttgatgatgtccaaagaacaatcaaacaacgctcattttgcttcaagattaatacaaaattgtttgcacaaacaaagccttgattcaagacttcctcaagatcaagccttgcctcaccatgaaaggcttcaagcccttcaccgcacacgtaatcgactaccaacggtttg

SEQ ID NO: 32779 - DNA, 171 bp, Glycine max
ccccatgcaatttattaagctataattaaacatttaagaagccattgaaatgtgccttatgttccaccatggcggttggaaatgcaacaatagaaaagcctttagaaaagtggatcgaggaacaaagaacaatatcgtagtttatatttaacgcttaaaacattattacat

SEQ ID NO: 32780 - DNA, 210 bp, Glycine max
agcttgaagtacaagaaatgagtacaaagagagggagagggggggggcaccaaatctatacctcaaataaggtctgaactttgaagtttaatttctcacatgatcaaagttgaaaaatgcacacacacggcctttatttatagcctaagtgtcacacaaaattggaggggaatctgaattttattcaaatttacttgaattgaattttga

SEQ ID NO: 32781 - DNA, 416 bp, Glycine max
  unsure at all n locations
aaacatattaattatgtataggagatttattatccattttattagnatatattttataccaatgtcataataacaaaaataatccacttaattagttaatttattatcatgaaatgtatgtaattaataaatatttaatgcttaaggtttaaaacaattaatatttcaaaacacctcttaatcacaaaataaataaataaaaaagaacagaacaaaaaacgcacacttatttaatcacattntataatcaacattgcacaaactcatacacgcgttatctcttatttcataggcacggtttttcattctctttctcaacacctttattccatctgtttcaagctttaactattatnattcgatggagttcacatattgtgattgtcaaacccaaaacatcatcacaacaccacccc

SEQ ID NO: 32782 - DNA, 373 bp, Glycine max
  unsure at all n locations
agcttgcttctacaatctcccctttttgatgatgacaaacctgaaatcaagaaacacatacacattctttttcctagtcgatcactcactntattctccatattctccccctttgtttttgagtttatgcttacttgaaattaagttaattacttatgtgagttcttgatttgattcctatttctctcccgctttggcatcaacaaaaagccaaagtgcgcaacaaatataaaacatacatacattactaatcattcacaagacattcattgaaaaaatctaaaccaatcatgaagcaagaaacatgaatagatcacatatataaaaaccacatagtcatataacataattcataattgctcaatcatactat

SEQ ID NO: 32783 - DNA, 419 bp, Glycine max
gcgggtctgggagacgaatgtcaagtggtttctatatgtgaagatgatgttccaagaactctggatttggtccgaccatgcccttctgatttccagctgggaaattggcgaatggaagaacgccccggcatttacgcaacgagcataatgtaaacctttacggttttaaaagctctatagttgggcctaggctttagagttttcattttgttaaggctttgtgtcttttgtttttgaatttataatacaaggatctttcttcatctgttcctagtctctacccattctcattcatttgcatgtttacttctttttctaaaacggcagattcgatgacgagtcccccgaaggtactaatacctgggacccgtctatcaacttcgagcaagaaatgaaccacacggaagatgaaagagatg

SEQ ID NO: 32784 - DNA, 213 bp, Glycine max
agcttgtagaatggcttttcatgatccatgcgacgatttcacggggttcaaggataaaatggacgacacccatcatctccatgacacacatgcacaaacgatgaccaggaaaatgtatgcaaaactggccatgcatgcacctatgcggacactcaacgctgagaaaattatggtcatgtgacgctcaggctcacgagtcgcttcctctatttt

SEQ ID NO: 32785 - DNA, 272 bp, Glycine max
agcttgatgtaagccatgtatgtgtttactggtacaggtctagctagcatggctaacatgaatggatgtcacggttgtggtttaattacttactatgattcgtgacgattcttcacaacgtcttatatgtggatggaaaataatcaatgaattgccatggctatttaacaccttaccagataaggaaccaacaaaagaaccatacttataagcatgtaactattatgacgtgttaaaaattgaagaacaatccacacttaaagatcacatct

SEQ ID NO: 32786 - DNA, 363 bp, Glycine max
  unsure at all n locations
tacgggactaattggaaccagcccaaaaagttttttgcaccttacgacccagcaagatacatttattgggactatattgatgcctggaccaatgtgttttggcatcaaaacaataaattcaagcattcgtggttgatctatttaaaaaataacactgtatacaatnttccaaactggtttctccaatggtggacttattgtggtccaatcccacaaatctttccagaagaagtccaacaaggatttcaacagttcaatagattgttaacaaccacgaatcaagaattccagccgatctaatgtattttactagctttgctttgtcatggatcttttcatggcaatacaggtatgggaaaactg

SEQ ID NO: 32787 - DNA, 352 bp, Glycine max
agcttggcttagcacattactatcaacaaagaattgtctaagtgacctgggctcaccgattcagcctcgcttatccacaggtagttcagcaagaggatgagtattcatcctcaaaggatgaactcgcttagcgcggtacgcacgcttatcgagttcttcagagaacgcctctatacaatgagaactgatgaactcacttagtgcagcatgctcgcctaccgagttcattgtgtcttccacacaacacagaaaacgcagctcgctctcttgcacttttcaaagctctaaaaggcgtattacacatgcactgtgtgcatcatactcaatacaatataccaacgcaaatagtcct

SEQ ID NO: 32788 - DNA, 319 bp, Glycine max
  unsure at all n locations
gaagcaacggnctttttggtatataaatcntgatgctttctacatccgctcatggaagagcgttgatagttgcctttatcaggcaataccaatacaatactaacatggctcctgacagaacccagctgcaaaatataagcaagagagagcatgagtcctttaaggagtacgcccaatggtggagggacttggcagcacaagtggcaccccctatggtggaaagagaaatgataactatgatagtggacacgttgccagtgttctactatgaaaagttggtgggttacatggcctctagcttcacagatttgatatttgc

SEQ ID NO: 32789 - DNA, 330 bp, Glycine max
gcacggtttatgaagaatgcgggagcttcttcggcgcagcaaaaggacgttcccccagtataatactcataccatgaagttcaccctatcgatgctccctctatttctatatgctttctaaaacttattatccctgcttaccatattcctcttcctctctaaaatctatcatccctgcttaccattctgctgctcctcctattcctataagactcctctaagccctactcagaaagaacaacgacctaatttgtgccggcatccaactttttcgcccttgaaggccttttgaatgttcattccatttgcccaatttcaatgtctgtccac

SEQ ID NO: 32790 - DNA, 159 bp, Glycine max
  unsure at all n locations
tacggaagcactcttttgaggttgttttcagctattgaanacatcccgtgcctacaatatgccaatcagatcatggttatgtatagaaaagacgcttccatgcctttgatgtacgcattacaaatgccttacttgatttgtatgccaagtgtggatgca

SEQ ID NO: 32791 - DNA, 459 bp, Glycine max
  unsure at all n locations
aggcgagcgccgtgacgcgttgaatgccgcatgtagacaatacgcttttgcganctcgcacacgcttatcctatagagtttatctttttgcatgcaattttcgaataaatcaggagacatgagaaggtaccgtaatgacgcataccatcacccacaatatccccatgatacacactgctaccattgatcatgaatggaactttaccactatccaatgcataatccgatctcagctcgcaaaacataatcccttaactatctcctaaccactatatccaactcaatttgctaagttcacgccatgctatggattaagccttctacatcgcatacactgaatcactcatactctccttcttaatcttctccccattccactaaccaaatcctatcattgcctttatgcaccccacccaacaactctctaagaaaaacgactatttgtcctgataacccccc

SEQ ID NO: 32792 - DNA, 291 bp, Glycine max
atctttctgctttcttactccacatacaaccagatcaggatgcacactccacaccacgagaaaacgacattcactactaaagatgccaatttcttttacatggccatatccttcggccttaaaaatgccagtcctacataccaacgactgatggactgagtctttagacaatagatcggaccaaacatccacgtatatgtggacgacatggtcgtcaagtctaaaagcatagcccaacacgtggcagacctacaagaattctttggggaactctgcaaatatgacatgtgc

SEQ ID NO: 32793 - DNA, 196 bp, Glycine max
agttttaagcaaactcggatgacaataacgggggagtcggatgtccgattaacccaatttatactctgagacgctcacaatcgaatgcaggagctctcaccaaattccaatgacaataacttttcactcggatgtccgatcggaccccgcaatatacctagaagccccaaatcgaaaacagaagctctgagcaaat

SEQ ID NO: 32794 - DNA, 214 bp, Glycine max
agctttatgcttatgatcgcgcgattcttcggataaaggaaagagagacagcgaatgcatatttttcttgtagtctaaccataaccaacaaaatgaaggctcatggtggagtgaaacagtcattattgcaaagattctgagatcaatggtctcacaacttgattatgtggtatgctcaattgaagaatccaacaacttacacatgatgagtatc

SEQ ID NO: 32795 - DNA, 335 bp, Glycine max
atctttgcttgtagcttcaatggagaatgaagaagaagagaatggcaacgtgagggagagagagagagctgtctgaaaagtgtggggctgagtgaagagagagagagagttgctttttaattttaaaaaaaagctttttcctcatttcttattattttattataaactatgccacatgtctccatttgagtggagcaaaaagggcccactttccctttttgactgtgacccatactcagccacaaaagtgaggaaaatctgacctttgaaacgctaaaatcttgcctcggtttgcatgccgtttctatggttccagttcctcgcgtttctctgcg

SEQ ID NO: 32796 - DNA, 417 bp, Glycine max
tcatgcgcatatttccttacatacgtgctcttgttcattacatttaaccgaaaaagtgcacgcgtgttctattaatgcagcttcattacctacatcatttacacgtactgccaaggtgtatttgttacttacatcacacgcatctccttggctgaatttgcatacatgcatactcaaagcattttggggtaccaaaaattgcacatgtgcacatcttggtatttctaatacctatatatacacaaacttcatgatgaatcttgactatcttcacaaaaaggtgctacacttcatcccttttttcaagtttttgctacctaaagccgcatgcaaatttaagcatatttttcttgcggactaaaattgtattccaattaaaaagtatattttttgtaatatgttttcttcatgccacat

SEQ ID NO: 32797 - DNA, 207 bp, Glycine max
acccgccgaccccagagttacccgcagcatgccatttttccacgacgggtcccgaaagctgcgccatctacaaaccaaacacacttcatcccacacctaaccaacactcaaccagctcttacagcagaaagagtctctacgcgctcatttcgaacggcggaacgaaatgaaacggaacacactggagagaaacaaaacacaatacaa

SEQ ID NO: 32798 - DNA, 335 bp, Glycine max
  unsure at all n locations
ttaacaactatttcggacgtgcagtttatgttatgaaagccttcttttacggttctcanagcgtattagaggcttcttttcaatggctactagatgtaattaagtctttacagaactgagtgaatgaactgaccatattagaaaattacaggacacaagaaatacctccattattatcagttaatggtacaagagtcttcaagtgcacatgccgtgcatacaataatcaaaatcaagacaagcacaaaacatgcaaaaagtgcacaaacatataccatgaaaaaataacaatacaaaacccaataaaagcctgtcccgtgaataggtgttctcgc

SEQ ID NO: 32799 - DNA, 337 bp, Glycine max
  unsure at all n locations
agtttcacatagctgtcagctaaattaggagccatgaagaagtcaacatacccatctaacattttcagatgcccagcctanacccatgagaagggagaagaaagaaaaagggcatgttactgtattgaaatccatggagatattctaccagaagaagcatgtgtatcaactaattaatcacctgtatcccattacttagagcaccaccaaaaaggataagtattgaatcacatacaccactggaatcacggatgacaacagcattgaccttaactctctcacccaaaaccaaccaagggtaaggaatggtctggtaacgtgcattcactgaattctg

SEQ ID NO: 32800 - DNA, 375 bp, Glycine max
  unsure at all n locations
agcttctaccaatacccattcctacaacttattatgaagaggaaggggggatcgaagacacatatatggacatagaaatagagatgacaacacaaattttagaggcaataatgaccaattccaaggtaaaggcagaggaagggattttgaaaagtctagggtggagtgctatagatgtcattgtagaagcaaagcttcatggtgaatcaaaggtgattcaaaggtgttttgatgataacaatgatgataacaaaagatgatgacaaaggtgatgacaaaaagctcaaagatcaatcaaagaacaactcaagtgaatcaaagatcaatcaaagaacaactcaagtgaatcaagaacantncaagagtaagagtcaa

SEQ ID NO: 32801 - DNA, 316 bp, Glycine max
agcttgtagcatattgaaacctcaatatatcgagaagctcgacattgaaagaagaaactctgagcaaattgaaacgacaataacttttcatttggatgtccgattgagtaccgcaatatatcgagctgctcgatattggaaacataagctctgagcaaattcaaacgacaataactctttactcggatgtttgattgagtcctgtaatatatcgaggcactcgaaattgaaaatcaagctcgaagccaattcaaacaacaataagtttttactcggatgcttgattgagctccttaatattttgagacgcttgaaa

SEQ ID NO: 32802 - DNA, 481 bp, Glycine max
  unsure at all n locations
cgcgatttgtttgcncgttgctagnctgngacatttggtagattagcgaccaccgaattanacgatataactatttactcggatgtctctttttatcgggtaatatatcgagacgcgtggtattgataatagaagctctgaaccaattgaaatgacaattactttatacacggatgtcctggttgagtccgttatatatcgagacgctccatattgatacaaaacattttataaaattaaaccacgataactttttactttgatgcccgagatagtggcttaatttatccagagatggctcaaaatgagaacggaagctcggatcacattcaaacgacaattactttttacttggatttctgactgagtccccgtatatatcgagatgctaaaatttaaattccatagttctggaaaatttggattgacatgactttatacccggatggcctgttgagtccttgaatatatcgaaacaccc

SEQ ID NO: 32803 - DNA, 368 bp, Glycine max
  unsure at all n locations
agctttggctccatctatatctaaaataaaaacacggtgtgagtcttcttgcttcataagccacaacatagaaaggcctaaacacaagtcaaaacacataagactaacaaccaccgtgttatggtcatctatcggatctcacacgcatnctaaggtgtcatttttcactatctcaacatacatattgtggtcaactaccactagaactctcaaaactcagtggtcttccaacattctagtctggatgaatgctacgagtacaccttcatgacaatataatggcacggtcttacctattggctatgcctcacacttgtcgagatttccaagttgacactatggaaactcgaccacaaacttggtgccat

SEQ ID NO: 32804 - DNA, 381 bp, Glycine max
atttaaattcctaagatcatgagcatctatttgtgtcttactatgaaaagtggtcagataacaagcatagattcaaaaggtactaagttgcctcctaagagcgcttctttaacgtctttaactggacgcatgatggcttgtaagtcacggacctaacactttgcttacctttggctttggacttggtcgcctgctggtccgccatgtgtcgtatgcaatactcaaacctttttgtggatgagcagaggtgaactctaaagggggtggcggcgcgtctattgcccgctaccgaccatccccaggctgctgtggtgtttcgccctgcgcctgcctggagacgcaatactttttgatgaaagcatcattactagggggcctgat

SEQ ID NO: 32805 - DNA, 209 bp, Glycine max
agttttggctccacctttctctattttaagaacacaccgagagggttcttgcttcataacccacaacatacaaacgcctaaacaaaagacaacacacataacactaacaaccaccgtgttatggccatacatccgatctcatacgcataccaacgcgccattcttcactatctaaacatacatattgcggccaactacccctacaactc

SEQ ID NO: 32806 - DNA, 286 bp, Glycine max
agtgttaaccatgccgttctacaaatcaaagaatacaactatggggttggacgaaggacctgcgacattggattttgttcttgaacccgaagtcagtgtcaaacggagtgtactacaaaatatctataaatgtgactgtaataatgaaagcaaacaagaatttgttcattttctttgcggagctcacttggaagttctctttgctgcgatagttatcttacgacctttacttttattatttcatacaagaccaaaagtcaaaatttccacactcatacaaccaccg

SEQ ID NO: 32807 - DNA, 373 bp, Glycine max
  unsure at all n locations
aagatttctctccatggtatgacactttgtttaacagttgggcgattgtcgacagtgtgcggttacgattattctaatctattagctcaacctccaactagcaacttgttcgtggcccgtgattctaagcacggacccactcttgncctttggccacgttgcagtccaatagaaatatcagatatagctaatttacattcgtatgaatataagatatagattaatataagccattagataacgatcgaatgagtaattacttcttgctaaagaatgccgaatggggcatcatgttttaagttactagcattcttcttcttgggagaatccatgtgaaaccaacaattataaaatacctataatattactctat

SEQ ID NO: 32808 - DNA, 230 bp, Glycine max
gactaatagcgcacacaatgcctgaacacactcctaaatgcctttacaggaccaagatccaccaatagaaaatgacaactacccatgcgctgaaggcctaaacgacgacacatgtatttgaaaattgggtgataactatcatgccatcatccattggtcgccacaaaataaaacattccaatctagtccatacgagacaccatatcttaatcatcaaattgtctacaaag

SEQ ID NO: 32809 - DNA, 345 bp, Glycine max
  unsure at all n locations
ctttgatgctggatcaggatgtcgctttatttttttaaattcgctatgaaattngtgttgttgagattctcatttctgcccgggggctggagtttggaggtatggatctatatttttctatcttaactttttcaaattactactatgtaattattatcaagtctatttttgttatgtttagtctgttaacaattaccataagcaattactgattttattccttatgatattgcgcatatgtaaatttgtctgggccccttgggtggagtaccctcaagcatagggcatttgggtctttctgacatatgatggaaaaagcgctgacttgactgatggatagggttg

SEQ ID NO: 32810 - DNA, 328 bp, Glycine max
agcttgccattaattgtacatctggtgtggaaaatattttctctttgggtgtcgtccagtggctgcatctgacttcacaagagccttctcaccattagcatatcaccctgcatagctttctcctcaagctcttcttccacctcttcttcttcactgatttcagattcactggtgatttctccatctgccttcatgatcatggctctcctggttggacagtcaaaagcaatatgtcctctgcctaagcatttgaagcattttatgtttctggtaccggtgttggatcatggcgtacaattatgcttagctctagctactgacattccat

SEQ ID NO: 32811 - DNA, 350 bp, Glycine max
  unsure at all n locations
agcttgtgcatccaataccctgatgaggatgtcccatatgttcttaaaactggactgattcatttgcttccaaagtttcatggccttgcacgtgaagacccgcacaaacatttgaaagaatttcacattgtctgctccaccatgaaacccccagatgtccaagaggatcacatatttctgaaggcttttcctcattcattagagggagtggcaaaggactggctgtattaccttgctccaaggtccatcacgagctgggatgaccttaagagagtattcttagaacnaatnttccctgctttcaggaccacaaccatcangaggatatctcacgtattacacaactcagt

SEQ ID NO: 32812 - DNA, 326 bp, Glycine max
ctttatatatatagaggcctgtgtcagctcgcatggaactttgaataactctatttcatcaaacataatcaccaaagagacattcctaaaacgcaaacagaaggtacatatggcataaaacctcagaatctgagctaaatgaatggcaattatattatagatgaatcctctgcaattgacactgattcactgaacaggaaacttaccttcatccctcttacactttccaatgtccacaagccccatggttggcccaatccctcccatagccacaagttcagtgaagtggtgattgcgatggccatcccctcccatagcgaaacagg

SEQ ID NO: 32813 - DNA, 316 bp, Glycine max
  unsure at all n locations
agtttatcaaggaagcgatctagtctatagggagaagcatgtataacactcgttgcaactttgatgaatgaaagtcttatgagatacacttcaaagttccacttctctccctcttttagtcccttaatttcgctctccccccttctctctttctttctctccattaaagcatcctctttaagcttcttatccatggaaattcttggtggtgaagcttcctcttncttggcttattccctagtggatggtgcctcccctctcctcttctccttttccttcgatgcatctcatggtgtaaaaccccactgaacacccc

SEQ ID NO: 32814 - DNA, 324 bp, Glycine max
  unsure at all n locations
agctttcttgttaaaactgccttgagaaaacgtccttgagaagctagagcttanctacacacacccctctaataactaagctcacctccttaagaagcttcctttagaagattcctaaagaagtcagagcttagttacactcacctctctaatagctaagctcacctccttgagatgagaagctagagcttatctacacancccctataatagctaagatcacccccatgccaaaatacatgacaatacaaaaaaagtccctactacaaagactactcaaaatgccgtacaatacaaggctaaaaccctatattactagactga

SEQ ID NO: 32815 - DNA, 364 bp, Glycine max
ctacatattttctatagtggtttgaaacctcagacaaagatggttcttgatgcctcaactagaggtactatgatgtctaagagcctaaaggaagcaattgtaatcattgactccattgcagcccatgattatcagagtcaccatggtaggactccaattcaaagaaaaggtataatgaaccttgatactcattatgcaattttaagtaacctttatcaactaaatagcttacaaaagttaagaataatttacctaagaattgtcttcaatccttcttattggactagacttagaccaaacatcattattgtaacagcatatttaaaccaatatttatctgttatccctcatttaaaataagttc

SEQ ID NO: 32816 - DNA, 302 bp, Glycine max
  unsure at all n locations
agcttatccttatggcctgcctgcggactggaccccccgtgccaccccggaagatctaagccaagcccttactttcgaggggcaactcccaccttatgaagactatcccgggcaagacgatggggaatgagatacccatcttggccccctgctncacctcaaagatccatccccgcatgaactaccccagccgaacatagtccactatatcccggcctcacccacacccgtaaaagaatctgtctccttcgcggaagataacggaaagattgacgcgcttgaagagaggttaagagcagtcg

SEQ ID NO: 32817 - DNA, 415 bp, Glycine max
  unsure at all n locations
aagagacaaatattccaactgacttagattagcatattctttntgaatgacaaacaatgcgcctaccagggaaggagagtctgctgatggaatctcccataaccataaatgagattttggatgttagcatttcgtttctaaatgaccatttagaggaaacactgggttcgacaaaaatagaagaaatccactcaaagtgtatcaatctcgcacaggtaagtgtttcatcctaattccgaaccatagatatgtcatgacttgactttgcaaattatttcctatcaaatcaaaaattacatgcgtgatcatggatcaatagggcttcccttgggaatgggttcttttggtggtctcttctttcggcttttgcgtgtatttggcttttgattctcctggctttttctttttctgttct

SEQ ID NO: 32818 - DNA, 331 bp, Glycine max
gtactgcagcttgcaagtttctctcgagctcgtcgatgacacaagcagcaagctgccaagcttctcttgagctcattgcgatcgtgggtgggacttgcggcttccaacaaaaccagtctaccaccgcaccgcgctgccatgtcgcatgtgttctggtctcgcgtcgtctggtctcgcatcgtctgaacagctccaacctcccgtgaatgaagaacagggacaaacaccaaatgaaagaaccaaaatccctaaagcacagcggaccagtgggcacacaatgatgtcgtatagtggaaaaaaatatctcaactgaactcgcgtgattcccgct

SEQ ID NO: 32819 - DNA, 293 bp, Glycine max
ctgtttcactcctatttattcatatgcatattggaaagcttatttcatcatgtacatatctgcattcaaaaggcattccagactatcatacattcatttaggaagacaatcattcacacattgctaagaatttcatgctccttatatttacctatgtatacacattattgccaggtggtttccacgctaccgttatgtaaacatcaaacattggggcaaacctaaatccagcaaaaactcttacaagcaaatcctaatttcatgtattcctaattctaaaaccaaatttggat

SEQ ID NO: 32820 - DNA, 304 bp, Glycine max
  unsure at all n locations
atcttgggtacactangaacacacaccctatcctgaaacctcaagactccatcagttcccactctaaaactactctctctccctgcaactatggactataattgggctgacaagaatgggtcagacttctgaccctcacggatcttgctcaagagttcgctggtgactctcaacatacccaacttaatgctactacaggtgatctcacatgccaaactcatgtctctaaactgctctaagaagcccaactctctaacatcaaaccagacatttgaaggatttcctacttacgcatcactactac

SEQ ID NO: 32821 - DNA, 331 bp, Glycine max
  unsure at all n locations
gataaatcaatgtgaatggacctcgttcatttacttattagcattgttggcgtttgggaccatactatttccaaatgtagacggcctagtggacttagcagtgatcgaagcctttcttgcttatcatcacagcaatgaaagcccgatcatcactatnttagccgatgcatatgatacgttcgacctgagatgcgaaaagagcagtgcaagaattgtctgttgtatgcctgctctttatgtgtggttggtctcccatgtttttcgtcatgaaggtaggcctgtctatcctctataaagtcatcacatgtgccctgaaagggaaaagcaaatt

SEQ ID NO: 32822 - DNA, 233 bp, Glycine max
  unsure at all n locations
tttttagccctcaatttttaaaatcataagttttcatccatgcattctttaaatacccaaactgaaattcctaaagctagcaatgtacggggcaaaaacttataattttaaggattaaattctggatatttaaaaaataaacaatacgaaaacctgacgagtagctactgaaattttccctttaaaaggtccacagatgaaaacttcnaattcacgactaacacaaacatgac

SEQ ID NO: 32823 - DNA, 355 bp, Glycine max
agctttttgtggggaatttatccgatctaggtgataacaaggctggtgactcgctaacagccaaggcaaattactaaagccaactttaattcttttcactttcattctatcaccaaatcaagagccattacagaagatgtgcactatcttgatagaattttctataacttggaattcagcttctcttaaataaattaaaattaaagatcttttgaattcatgaattgctattttcattattggctgcatatgttatgtataataatactttggattggtcagatttgcatttaatgctagttgctcaatggtgcgatattatctataatatagaattgttctgtaaagaaccatg

SEQ ID NO: 32824 - DNA, 347 bp, Glycine max
  unsure at all n locations
agcttgcctcaaagaggtccaggaatgacaaggcagccgaaggaactagttccgctccggagtatgacagtcaccgctttaggagcgctgtacaccagcagcgcttcgaggccatcaagggatggtcgtttctccgggagcgacgcgtccagctcacggacgaccagtatactgatttccaggaggaaatacggcgccggcggtgggcatcactggttactnccatggccaagtttgatccacaaatagtccttgagttttatgccaatgcttggccaacggaggaaggcgtgcgtgacatgagatcctgngtaaggcgtcactggatcccgtttgatgccgaccta

SEQ ID NO: 32825 - DNA, 158 bp, Glycine max
  unsure at all n locations
tcttcaagaataaatagttcttcacattctaccataatatcatgtntactcactttgagttcatcataatctttgngtgcttgtgcgcattctctccaaagatcacatcttttttcttttttgatgaatatgtacgtcattaagttccttaatatcct

SEQ ID NO: 32826 - DNA, 356 bp, Glycine max
  unsure at all n locations
agctttgaaagtatattttgactaaatacactcaaaagggaccaaattgtgacaatatttgactaatagcattaatggtttcaatgctaatacgatatttttattttatatagaaatatagtattgtattagcatgagaaaacataaataaaattaagacaaagattaaaacaacttaaaaaagaaaaaatacagataatttaatttaataaattatgtgagctaataattaatgtttttttgtattgaataattagtttatatataataataaatttaattatatgatataagttggatcgggttgggttaaaaaaatataacttggtatccaacccgtatatgattangtctta

SEQ ID NO: 32827 - DNA, 413 bp, Glycine max
ttggagggtttggatgaatacctcaatgatgcattgaaccttgaatcgagttttgaagaccccccctaatttattttattgatattttattatttaatgatttgtagctgtcatgcgtgttggtcgttgttgtattactgagtgtttttcatgtgtgttttaatggaaaaagtgtgaagtatgaattgaaattgtataagtgtcaaaaagttgccctcatagattgaaatcttgaagtattactgagtgtttttgccacttcgataattcattttagggttgaatcgagacccaaaatttgtcttaatagtttcattgacatgaaaaatacaggaataaaaaattattttaaccaaaataacttatacacataacaatctaagtgccaaaaattacccttatgaattgaaatc

SEQ ID NO: 32828 - DNA, 345 bp, Glycine max
  unsure at all n locations
agcttttctctgtatacatggtccggaattgtggaatncaccgcactcctaagtccctctttgctccttgccttgttatgaacccagctcactatgcccttattttccccaaattctggttcagttggccttttcccagttactagttccatcaacaccactccaaagctgtacacatcactcttctcattcactttgtacgtgtagccatattctacaccaattcaaacaaaatccatacattaataagcatgattaaagatcgcaaattaacatacacaatacactacaactcatctcttatcaaaagacaggagctactactcaatgctaaccaggagcaat

SEQ ID NO: 32829 - DNA, 287 bp, Glycine max
gatcggccaataactggctagttaagtatgtgaaaaaattctttgcagtccaaagactaatgcccgggcttaaagttatttacaccagaaccataaggaaaagtttaattcaacaaagaaagaatataaaattacggggacaaaattcgcattgatggggaaatggaggtacccaattgaccaaatgttgaaggcaaagagagaaaatggaagaggacttactatcagctgcagaaatcttgagctgctcaagagcgggggcattatttggagcacccgatgatgca

SEQ ID NO: 32830 - DNA, 287 bp, Glycine max
agcttgaaggcaaactggatgcattggtcaacttggtaacccatctggccttgaatcaaaaatttgtacctgtcgcaagggtttgtggtttgtgctcctctgctgaccaccatacagacctttgcccttccatgcagcaacctgcagcaattgagcagcctgaagcttatgctgcaaatatttacaatagacctcctcaacctcagcaacaaaatcaaccacagcagagcaattatgacctttccagcaacagatacaaccctggatggacgaatcaccctaacctc

SEQ ID NO: 32831 - DNA, 309 bp, Glycine max
  unsure at all n locations
atctccatcattgggggcgcacttgagttgtagatccctctacctttgggcgtaatttttgaaagattcatgttcccttttacacatgttctgtagctacattctatttggagccatatcaaaattgtactgatactgcctaataaaggaaaccattangtctttttaggaacggacccgggaagacttcagatngctgcaccaggtgatgggtgccctactaaactttcctagaagaaatgcatcacaatttctcatttttgcgcatgccccattttctacagtacatctcaagtgaattttgggcaa

SEQ ID NO: 32832 - DNA, 349 bp, Glycine max
  unsure at all n locations
agcttgtgcaaatcaaatcactcctacattgcatctctagcatgcattttctttctttacccactcctcacgtttggttttttagggaaaaacaccataactaaacgcgccgcaaggtatccctatcgcaccagatccaaatctagaacgatgggtgatcaagaggagacgcaggaacagatgaaagccgacatgtcggctctgaaagaacaaatggcctccatgatggaggccatgttaagtatgaagcagctcatagagaagaacgcggccaccgccgccgctgtcagttcggctgccgaagcagacccgactctcttgcaactacgcaccatnctccctcaacata

SEQ ID NO: 32833 - DNA, 330 bp, Glycine max
  unsure at all n locations
aatcttttggagggcccaagtgggcttggttgctatttgcatccccatttttactaaatacacccccctgcttttttttgtgattcttttttcgtaaagttacgaaaacttacgaatttcgtaacgatacttgttttctttccgtaatgttacggaaccttgcggatcacataatcatccccttcttgacttatggaatgttacggaacctcactaattgtgaaacgatgcttccatttgatctccagtgtggcacggaaccttacagattgtgcatcaatattntcttttgtttcccgcatgtcccggaatttacaaattcttaatgat

SEQ ID NO: 32834 - DNA, 308 bp, Glycine max
  unsure at all n locations
acctttgtgagttgaaacaaattgaacgggcctgaaagggtggccgaaacattaaatgggcatccaagaaattgttatgaaacatcttgaatgatgtcattcccatatattaagctttgcgagttggtcaaagaaaggaaaaacaattaaagacatagcttttaactattcaagagtangttgccatactctttgtcactattcgccaatcaactactactatatttacatccggtcatttccaacactccgtagacactattcataagaactctaagagtggtctaaaatccatttgctatctttct

SEQ ID NO: 32835 - DNA, 405 bp, Glycine max
cttaattatgtctcacttaaccactaaggcattttatttatgcttacaaggttgagattttatgtttcttttattttctaccaagtacataacaattgacttgtagcgatcctcaaggcttatcaaacatcattgattgtggttcctatcttgttcttcctttcacatttttttgtttccttgtttaattcccgcaatgctaattttgtaattctgtccgaatttcttattttcatatctctcattatacttaacctttttcggtgtttttttgtgcctacattgcgtttcataacgtcctctttcacctcgttttggaatcattccattctgtgtactgtacgctaaaaaacaaataaaagttaaaatgcatttatggctcaattggtgtgcgaattccattct

SEQ ID NO: 32836 - DNA, 331 bp, Glycine max
  unsure at all n locations
attatggcgcacccatcagatgtggtactacgtggcggtcgggcgatggtgcacaacaagttttccacatccacaaatcgcgcataaacacaccatcccctgttgcccacctccaactgagctcacgtactcccacgtagcccatatcctcgtttctctcaacaccgggtccccatcaatcctcccaagcttccccaacatgcaagtaattcaacattcaacagcacaaactatcacagccaagataacacggcaaaggcagaaaactctgccataacaccaaccacaatcacagtttttctcacttacagaccncactaacaattccttc

SEQ ID NO: 32837 - DNA, 472 bp, Glycine max
  unsure at all n locations
agccgccccgngttagctcgttgacantcgtttggatagcaacanacgcttgggctaagtggcttggttaaaataccctactttagtgtatttccnccttcgaaccgtgtggaagtgtgattggtttgccaaccgcctgactctttcttgaagggtgatcctaaaacaactacctactcgtgtaactctaagaaggaaggggattatcgtggacgatggtgggtgtgttcttttcggtgatgatcacgacgaatcacaacactcgttgatggggtgcaccttctcatacctggatctggcgcatcacctatcaattggtggtgtatatttgggcaagctagaatagtcccacatttcaatacatgcaacgcggtgtagtttgtcagcggaaacaggacgcataaaactgaccatcccatctcgtcctggttcgatcgactcttttgttaaacacgaactgtctacttttgcc

SEQ ID NO: 32838 - DNA, 318 bp, Glycine max
agcttggattgattcagtctaactagggatagaggtttactaatctacgctatacaatacaagacaaaagcatgattgatcagagaaacatctctatatacatcagcctggttgttacacagacctaacatctttacctactactgtcagtcttacggtttttagcctagacttagcttaactctgctctaaatcatcaattatcaatgtttctttcaacaatgccttatctctgaatttaaccctatctaagactacttccctgagttcgatactcggattcatccgctttaattttaaatacttgacgatccgatg

SEQ ID NO: 32839 - DNA, 395 bp, Glycine max
gttatcatgacaacgatacatggattacattatatcttgatgcaatgacatatcccatgtctgttatatccatccacttgtccacactaacctaaatcacaaaaacatacatgtgtcagtcatgtaaacattatttataaaaaaaggcataaacaacataccttggataacccatccacatgtagggacaacctcaactgttcaaatctctccgtgccaccaaagagctttatgtagtcttgtgaccatttgccatgttctttaatcaattcattgcgcatcagtgcccaagattcttctcccatatcgaacaaagcagcaagtgactgatatccacagttaccatctgctttcacatcaataatgtcctcaatgaaaccctgtataaatggtgc

SEQ ID NO: 32840 - DNA, 194 bp, Glycine max
gaatctttcctgtataatatagagcttgttataccctaatttcgtctggcgaccgttgattggtggaatgcaaccttcgcttcaccgcttctaggtacttaacacccgccgttaggcaatctgtgaagttccacgacatgtctgaagtcgaaaggaagcattgttgcacaatccgtatagttctgcaacattcc

SEQ ID NO: 32841 - DNA, 426 bp, Glycine max
  unsure at all n locations
gcgaacagggctattannctaancccgccttgaaatagccggctacgttggcaacgagacacggcactactttctagtccaaaaagtaagctagccgcgccacaacatagatgcgacaatatcccaagctccccgaaaagaggttaggacggtgatcgctcttaccccagaggcaccatgtggatggacggttgctctacccttgacgggagtccagaactttcccgaatggtagccaagggccaaagcgatgacagacacctactcccccccgaaaaatatacgggcttctcgctattgtaacgtatgatagactaaggcccacgtaatagaaatcgtagaaacttgttgacgctcaaacctgacaatatacttcttttgaataaatgagttgtccatgttctactcaaacctggcaatcaatct

SEQ ID NO: 32842 - DNA, 373 bp, Glycine max
  unsure at all n locations
aggtggcatgccctacttgcgctttaacgatcaaattgaaacctgcaaaatcagagtctacaaaggctgttagattcaaggaggtacctttgggataccacacacctacatcgggtgtacccatcaagtatttaatggtccttgaaacctgccaaatcagaggcttgaaagcctgttatatttaaagaggtacctttgggataccacaaacctacattggctgtacccttaaggtatttaatggtccttctaactgcttgttaatgagattccttacgattcgactgatatcttacacataagagaacacctagcatgatatccgatctacttgtagtacgtagagagtgatccaatctacctatatatttgn

SEQ ID NO: 32843 - DNA, 126 bp, Glycine max
acaaacattatgacctcctgcaaaatcaccctgatggagatcacctaattaatggctaccctcacacacaacgcgctgtcttcttcaaatgtctggccataacatcatcctcacaatcacacacac

SEQ ID NO: 32844 - DNA, 392 bp, Glycine max
  unsure at all n locations
agctttatgataaatgaaaccaaccttgtaacatgatgtattgcatttatttccatcattacatagcattttgaccaaaatttacattgcatattttgcatttaagccttagtcttaacttgttttcattgttttccccttcttttagaacttgttatgcgtgtcttttgttgttagcataagttttgggcttggaaacactcaagtcattggaagacatcaaggaatgtagccaagagtttttaaggtccaatgggtgaattgaaaacaatttgggagagtctggaacatctcatggcctatgagatccactgtttntaaacttgtaaatcttgtagagcatctcaaggtcgtgagttgcatctcacacatgtgaagtcgacagcataaca

SEQ ID NO: 32845 - DNA, 386 bp, Glycine max
  unsure at all n locations
agagcgtatcttanacncnctttatataactagaggacatttgcccttaatctattgcaggggttgctttttgtggactggcggggacttgccgagcgctctaaggttctcttcccctctgcgtataattaagagtcacgctttttgattgtttactgcctccatataattcttcgtaagtataatctagtcataaaatatttcaaaaatactgggatatatttaacatcaggcatgtgggacttattcaggtaacgtctttgagaaaaactatggtgttttattgaaagattttcaaggaagatggaatctacatgctaacgcttattgatttggttgagatccaatacatccacgtactaattgcctcgttgatacttaaatcg

SEQ ID NO: 32846 - DNA, 239 bp, Glycine max
ttccatcattacatagcattgtgaccaagatttacattgcatatattgcatttaggccttaatattaacttgtcttcattgtgttccccttctattagaactcgttatgcgtgtgttttgtggttaacatacgttttgggcttggaaacactctagccataggaagacatctaggaatgtatccaagagttttaaggaccaatgggtgaatggaaacaattgggagagactgaacatct

SEQ ID NO: 32847 - DNA, 355 bp, Glycine max
  unsure at all n locations
aaaagagagcaaaaagacaacaacaaaacaacagagaaaacccgggggannaaaggggcgactgacccnaanaaanaccgaaaaaggaacaaaccaaaggatgttaaaaaaggccccaccggggggagacaaacgaaacccaggaaaaaaggggaaaacaaaaggggaaaaagaaaggccgacaacacacgaaaaaagaaaaaggggaaacgggagaaactcaaaaactaaaaaaagcgaaagagacacagcaccaacaaagcacaaagacagctgacggaagagaaccaggcgaaacgaaaggcaaaagggaacgccagaccagaaaacgaagtaaaaagaaagcaacacgaaa

SEQ ID NO: 32848 - DNA, 302 bp, Glycine max
  unsure at all n locations
tcactaaagcggtgatccatctccacacatattttatcaatagcaacatanaaaatctctgcacggtaatgatgaagaatagtgatagtcctcccttctgctcttgaacgaccccgaactggtatttcgtcatccatatttggtaccagaatactnttagcaacacaaaatccttggacatcggcaaaaaaattattccagccactctctctcattgtgcccaaccgagctttgacaacatcaactaattccatggcattcacaatattaagatcttntctttgcaatatatttgaaagctc

SEQ ID NO: 32849 - DNA, 124 bp, Glycine max
tgaatatatatatatatgaaagctttttgtgaaatccttaagctttaaaagaagtaaccatgatagatggactctgttatcagttatgtgtataaggggacccaaacagaacacttgttacgat

SEQ ID NO: 32850 - DNA, 178 bp, Glycine max
  unsure at all n locations
taagtattaaatggcagcgtcaaggagatcaaaatacaacttattttcacaaattagcacatattatgcatgcagctaagaagatgtcagttcttcaaagtggggatgttatgatggaatcccaagaagctctggatgtgcttggctgtttctcgtatatntatgggagacaataact

SEQ ID NO: 32851 - DNA, 285 bp, Glycine max
  unsure at all n locations
ttttcttcatggaaacaatttttccaagcaaattcgatagagagagaagttcctaaggggttgaaccctttntcacttcacttctccccctatttatagacaaaaggcgcagaagacgacgttagtctctacgtgctatcatgctntgagtcttagagatagcanaagaaagtttaaaagtgcgggaccaaatggttcccgcatgtcatcgggcccgccgcctctggatgacanaaggcgcagaagaggacgttagtctctgcatgctatcatgctttgagtctt

SEQ ID NO: 32852 - DNA, 298 bp, Glycine max
  unsure at all n locations
tttcttgttagaggtaaaacttcaaaaccttgccattntttctttcatcttcttattcctttaacaaggttcattatgagtcttgatttaggcatgttcacgttggttttttgttacttggtgatatatgatttctatcaatacttctttgcatgtcattataactatcatatntagatagctntttcattacagaggcaatgtagttttggaacatcaattttaatggttcctcttgttgttgtcctatgttgtgtcancgtttaacgttagattaanaattaagcccaattatata

SEQ ID NO: 32853 - DNA, 273 bp, Glycine max
  unsure at all n locations
gggcctttccaagtggaaggccttggaggaaagaggtatccctatgttgttgtggatgatttctccagatttacctgggtcaactntatcagagagaaatcagacaccctttgagtattcaaagagttgagtctaagacttcaaagagaanaagactgtgtcatcaagagaattaggagtgaccatggcagagagtttgaaaacagcaagtntactgaattctgcacatctgaaggcatcactcatgangtctctgcaccatcacaccacaac

SEQ ID NO: 32854 - DNA, 277 bp, Glycine max
  unsure at all n locations
atgaagaaaaagtggagaagaacgttcttatacctgctcgactatctcaagaagaagctgaggaagaagatccaggtgaaccaccttcacctctaccataacaacaagatcaagaactagcatcaccagagtttactccaagacgagtaagatctttggtggacatgtatganacctgtaacttggtcatacttgaacctggaagctctgaagaagcgtcaaagcaggaagtatgggtcaagggcaatggagaagagatacanatgatcgagaaaaa

SEQ ID NO: 32855 - DNA, 398 bp, Glycine max
  unsure at all n locations
tgtctttttcaccaagagagtgccttggataagaagcttagagaggaaacttcaatggaggaagataatgagagagaganagtggcatgaaaaattgaaggaagaaagggagagaggttgaactttgaagtgtgtctcacaagactctcattcatcanagttgtgacaagtgttacacatgcttctatttatagcctangtcactaactaaatgaaattcacttgtctttcattntatgtgaaactaagaagaatattccaaggatatgtcanaggcatcttagcatattccaagaatatgccaaaggcatcttaatatattctctttagatgtcacaagaataaaaggtgtgactctagcacatggaaaaggaatatgtcacaagaatattctaaag

SEQ ID NO: 32856 - DNA, 192 bp, Glycine max
aagtggagaagaacgttcttatacctgctcgactatctcaagaagaagctgaggaagaagatccaggtgaaccaccttcacctctaccataacaacaagatcaagaactagcatcaccagagtttactccaagacgagtaagatctttggtggacatgtatgaaacctgtaacttggtcatacttgaacctg

SEQ ID NO: 32857 - DNA, 255 bp, Glycine max
ctcgtattgcatcaccattggtggaggtctaccaaaaactgcttgaaatggtgtcatacccaagctttggtggaaggaagtattataccaaaattgagcccaaggtagcatagtaacccaactcataggatgatcaaatacaaagcaccttagatacatctcaagggtcttattaagattctcagtcaggccattggattgagggtgatatgaagagctcatggccaatgttgtgccttgagctttgaataattg

SEQ ID NO: 32858 - DNA, 267 bp, Glycine max
  unsure at all n locations
cgcccgaccgccacctagtaccacatgtgatgggtaccccataatcctacaagcttgagatgaggaagtgttgaagggtgaaacttcctgctnttattgttgaccacagagtggtacctggagatatgtcgcgggggtcaggagaccttgnggacgtcaggtggggtgctattgcccaaaaccaagcttgaccaatcccgacccaacccgggcatagtcggtcagtgagaacctgtgatgtacctaaacaggcgagctcctggcagt

SEQ ID NO: 32859 - DNA, 384 bp, Glycine max
tactcagcttgtaaagaacttaggaaaatcaagaacaaacttgttcgctcatcgttcgcgtgtttgatatccactcgacaaggtttgaagtaaaggaaaccttcaatcctataacgcaacgtggcggacaaaagtgggcagttaacttgaatgacctttattgtcaatgcggaaggtattctgcgcttcactatccatgttcacacattattgcaacttgtggttacgtgagcatgaactactaccaatatatagatgttgtttacacgaatgagcacatcttataagcatactccgcacagtggtggcctcttgggaatgaagcggcaattcctccttctgatgaagcatggacactaatcccctgacccaactacaattcgt

SEQ ID NO: 32860 - DNA, 268 bp, Glycine max
  unsure at all n locations
tatccttatggcttgcctccggacttcactccccgtgctttcccggaagaattaagccaagcccctactttcgaggggcagctcccaccttatgacgactatctcgggcaagacgatgaggaaggagatacccatctcagtcccctgctccacctcanagattcgtccccccatgaactaccccaaccaaacatagtccgccatattccggcttcacccacacccgtaaaagaatctgttcccttcgtggaagataagggaaagattg

SEQ ID NO: 32861 - DNA, 469 bp, Glycine max
  unsure at all n locations
acactcacaagcnnaaggggtggctgtgtcacacgtatattaactggagatgtggggccccggttagagaaacaagtttttggtttaccttggaatccttaacctaagtggaggtggccacaggggatggtgggtttatgcgcgccttgtggatgaagaaagcctggtgtgcaccattcgccgaacggcacctaataacacatgtgatgggtaccccattattcttacagcctgaaatgaagaagtggtggagggttgaacctccttcttttattggtgaccacagaatggtaccttgagatatgtcgcgggggtcaggagacccttgggacgtcatgtggggtgctatttgccaaaccaacttgaccatcccgacccacccggcattagtcgtcatgaaacctgtgatgtacctagcggcgagctctgcngtcacagatnaaggatacagacccaagcaagatgctgg

SEQ ID NO: 32862 - DNA, 298 bp, Glycine max
  unsure at all n locations
tttgcatcaaaccaccgtgagtggagttccttctctcttcactcttctcttcacacccatacgttaaattgacttggttcattgtgggctgtagctgtctctcgacttgattcaagattggattcaccacacggaagcactgctgtgttcgggacaccactcagcatttctaagattgttccttaccaacctctccatggatagatggagctcanagtggtaattcctatcatttcccttctctgtgctctggtttttcatataataaagtgattcttgcttgatgaattctctaatc

SEQ ID NO: 32863 - DNA, 340 bp, Glycine max
  unsure at all n locations
agttaaaggctttangcncnnnttnatcnnnaacaaccggnggngccagtcataatcttgtattctaccactttatatggaggttcacattatgctaatgctttcattcatgagtaatttttagctcatgctagaaactcggcgtagtaactaccctacggatatcatcataagggataatatcttcttctgagaactactaaagtcacatatatatccatttaaaactatgctttgacctttcttgtgtagctggttcctatcaccccacaaattaaccgaatcaatagaaattatctatattttctctttcaaatggcctactatcccagaacaatgt

SEQ ID NO: 32864 - DNA, 330 bp, Glycine max
ctgcaagtctcacagctctatataaactacagtgtaactgaaaacagttgggaataatatcagaattcataaatctcacaaattctctctctctctctctctctctctctcgctatctttctctttttgattatccttgtctaatttggtatccagagccaaaaagatccttcgatggcagaatctcctcctcctccttctgctactcctttctcttcatcgtcagcgttctcgcacttgatttctgagaagctcgactgattgaacttcttgctgtgaaagcaacaagtagaaccagtgatcaaagcgcatcaactacaccgttacttg

SEQ ID NO: 32865 - DNA, 329 bp, Glycine max
  unsure at all n locations
gaanantgggtgtgctgatacanntntnnncnnngacaaccgggnntatatgggaattgttttttcnaaccctnaaaccggcgggttaaccgatccctggcctagaaaatttctaagagtacctactgaaccaagaaccgctgtgatacaacaaatggaaatcgccaaactgaaaatgcatgtttgtgccagtgaaaatactagaatcagtcaaaaggttaaaatagctcttaatccaaaggatcgatcctaatgactgagttactgcctgcacaagcaattaacttttaatcatgtgatatcataggactaaatacgagactgtatag

SEQ ID NO: 32866 - DNA, 367 bp, Glycine max
  unsure at all n locations
agcttatagtttgcaatagtgcttagggttctggttggaagttcttccttatggccgataattaacttgggtccctgtcttcatgatttttaagtccactgtgcaaagttgtttcaagtttggtctttggcaagtgcgtacaaagatattcatgacccgctgattaataggaaagattcatcacctataggatatgaggagactctnggtgtactgctaaatagctgatttcttaatatgatgcaaggctaactcaatgatgtctactccaatatcaatgatatacagtcttggaaattgtgggtttctgctctaaaaaattcagatattgaaagttctatttccttaatatcttggttctatagag

SEQ ID NO: 32867 - DNA, 475 bp, Glycine max
  unsure at all n locations
cggacgcgcgcgaggcaggggnnnnnnagggagtcttacgcttagancccccantntntnctnanncnncngtcctannatgagggannagnaggaggatgcnnaaatatcnttttgtacaaacacacgagacaccgtggtggggcgcctaggtgccagttttcctaggaaaatggcgttcacacaccttttcacacatgtttactgattaaaattataaaatcgttaataaatctcttaaactacctggcaattataaagaaatggtccaaaaaaaatattaaaaagtttgttcctataaatacagaataatctttgattattgacaaatgaggatagaaatcctgagttgaatttcttttttccaaatttaaaacaagcaagttgttgacctcaatgctttaatgggctaaggggtgtgggaaggaattaaaagatcttatgccaatacaagagggttgatttttcaaacatc

SEQ ID NO: 32868 - DNA, 499 bp, Glycine max
  unsure at all n locations
aggggtagctgngcttgtatatcacggcaattattctcnngaccngggatcctctagagnggacctgaaggattgcagcctatactanatctttcttaanccacacacacactgagcaagtagtcatattcagtccatacttccaatcgatcatgctcagtatgatgcatgcacctaacctcaactctcatatgcaatgtgttaccatccccaaaggatatagccctaagcgtgtccatatgacactctcacttangaaaactangcaagtagtgttgaggtcacccggtcgtgtacaggtaacttccccccccccacagtgatcagcctgaatctcaagggagttccaaaccgagtgacatgcccccaagtacaagtattccttctcatgagaaactgcaagtacttactggacaagtttatactatttccatgtcatatgaagtatgatacatgtggcaccatcaatgcactgaccaggataattaaatattctaag

SEQ ID NO: 32869 - DNA, 336 bp, Glycine max
  unsure at all n locations
agctggtatctagacncanaaatactagtgagaaaggggccacaatggggaagttttgttgtcaagggcaacattttccgttccagggccaaaccccctccctgtgcacctctttgactcagtctccactaccatatctcttctctacatggtcccataatctttagcttcacactcagcaacatattaacacacagcttacagcagcaacagaaagcgaactttgtacaacaccaaaccagtttcactagaccatacattctcatcattgtaacgtgacactcaattacggagtgatcatacccttggacgggactacaaacgcaaatattgctc

SEQ ID NO: 32870 - DNA, 500 bp, Glycine max
  unsure at all n locations
aaatacanncccccacnnnaagttccagctacaccgcaactaataaaacngccgnngggngannnggataatagaaatggtttttttttttttngngaataccttgatatgggagggggnagtgggtagaataaaatgaggatggttaggatataatgnaangnatttgtgggatgaatgaaattttggatgtgaanatttaaangatcggaatatataattaaatgtgatgggtattnatatttgtagaagatttagataaggaaaggttgaagggtgaagagtnctgntatgattgatgaggagaaagaggtggatggagatgtgaatagaggagtgngagaaatagaagangtgatgtgtggtgatattgaaaaaaaataatttgtataataaagaagggattgggtattattggaattagtaaaatgtgtgtatgtaataagtgattgtatggaatggaagattaatgtatatatagtangaagatggaagttgtg

SEQ ID NO: 32871 - DNA, 337 bp, Glycine max
  unsure at all n locations
ttctttttatgacttcttcgngctaaatgagtgtggctcgctaaccgactgcattgccctaaatgcctatggcgcgctgagcgagagtctccaaatcttcacttctcttcaagctttattctgagtttctgcaataaatataactccaaaacattataaattcatcaattaaaacacctactagacaaaaacttatatgatgccaaaatcctacttatttacacaaaaagaagcaataaaaagagggaaaatctgacaatctatattgactcaattacaggtatacttatgcacaacagttatcaaacacccccaaatttaaagcttcgttttccct

SEQ ID NO: 32872 - DNA, 158 bp, Glycine max
  unsure at all n locations
tttacaacctcagttcccttcccttatcaatcgatttcctcaaagcagtaagatatagatcgtttcaccctatttatccaaaataccanaaatggataagaaaggatcatatgttgagtgacagggtgagcaagggagggactaaaatgggagcccca

SEQ ID NO: 32873 - DNA, 461 bp, Glycine max
  unsure at all n locations
gcccnnnggggttctagcatganctgaatttgaaccagcccagataacntttcttgtgcctactttttatcnncncccttncacttggctctttttctgcacaaatttatagcttttcactggtgatgatcatgaaaggcttaacncctctatcaatcccaataatccacttccaagcaaggttgaaatctgagtattgggttaataatttccatttttcattaattatgaatatgcttaagactgaaaaaanaaatagggttaggattcctttcctaatttaaaacttaatcacaaattgtttgaatgatattcaaacctaaattgtaatctcaatgaatntaaggattaatctgattgaactaactctaatgacattgattgaactcttacatcttgatcattctctntagaatngtgataatttatctgcattggtctagtgaactaaaaatgatgag

SEQ ID NO: 32874 - DNA, 351 bp, Glycine max
  unsure at all n locations
agcttgtttctacactaatgctatactggatactagtataggttggaatcttattaatatgtatataacaatgttataccaaactctatatattctgttgtgttttgaataggtgtgtatgagaatgattttttagacatgtattgtgattctttagttgttcttcatttttctttcacataacagaccgttccgaacgaacataattatttggaatttgtatctctcatatttgattccatttgcctcaagtactanggcctgtgnnttgctgaaactaacataattgttttgtttgctgatatttttttggaggccattattgagacataattaattgaagcattttac

SEQ ID NO: 32875 - DNA, 456 bp, Glycine max
  unsure at all n locations
agccannnnnnaaggggngtcggacngacccgtactnctgcgacactatataaatactaagctcgtcatcgtgagacatcagaggctagtantttaataatgtgtgtanngaaaaatcaccaaatggatagagaaaaatctataatcatacatcttaggcaaataanggcttgctacccccaacaataatggctttttgattcatctttgacattgtgattttgaaaataaaaacccaaagttattaggcattttatcaacatacaactcccactgatctgcaaaagaaatatgagtaaaaatggaactgcgacaaaaacaataaagaagatgatttctcttatcattccagaaagaaaatgangaaccactgcaacaattttaattcctatggacatatacactatgaaattacagtaattaagttataaatgcgatgaattataaaagatttcn

SEQ ID NO: 32876 - DNA, 311 bp, Glycine max
gtttggtgttggcacattcccatcacaattattttctgttggattaagtggcctcagaataattaagaaaggggagttgaattaattatgaacgtgtcttgactaattaaaaaattatccttcttaatgttactagattcaattaggctttactactaaactatgagaaagtaaagaacagaaacgataacttagacaaaagtaaagcggagataaaaagtacacaacggatagataaagagtgtagggaagaagaagacacacatcatatttatactggttcggcctcaacccgtgccaacgtccaatct

SEQ ID NO: 32877 - DNA, 267 bp, Glycine max
  unsure at all n locations
ctagctactgaaatcacacatctaaagntttttcttgncatgaaaccaacatggcatgataatcataacatcttggagccatagttgacctaagtgaaatataaaaagcttcacacttaatgagtgacgactccactttgtgcaatctatgctatcgagtagcccacttatctaataaatttgttgtgcaaaggatatggccagattgcttgaagaactacaacaactatatcagggaggcatttcaacttagaagtggaacaaaaa

SEQ ID NO: 32878 - DNA, 373 bp, Glycine max
  unsure at all n locations
tgcttaatcaatactatgacaaattaatgatggctatctcttacaatcctactatggtaatatatgctgggaactagggaatcctacttttcaagtcttttttaaatgtatttatatgagaatttaacattaatattttaaaaaaaaattcaagactccataggaactacaagagaaaaaaatttcccgtgagaggaatcaagaacagggatggngagtgaggtagtattccccgccctgttgacatccctacattgaactaaagtgataaaaaaagtaagattataaataagagtacatttataaagatactntatactttgggtttcttatgttacacaactcataaagtatacacatatgttaaatgatg

SEQ ID NO: 32879 - DNA, 198 bp, Glycine max
  unsure at all n locations
tgtatcgaaggacaatggatactattatgcgcagctgcagatcatgnngaaaggaaatngttggaccaacgttccaagtacagctcacttttagaggatcactaacactcgacaacatgatcgactaatcatgatgtatcgaactatgtactactgttacactatccatgcaactcagtacaagtcacgaaactatgt

SEQ ID NO: 32880 - DNA, 522 bp, Glycine max
  unsure at all n locations
aggggtacgtttgcatgagatacancgcgaattcattnactcgcnccccgaagcatcctctaggagtcgacctgcagagcttgcaagcctcttanccattcaagaataaaccagcgcattggtgatggactgtgaaaggtttgaaaaccttaactccttgaaagcgcttgaatgcaatcnaaacactttcagcaaaaaaagaaaatccatatctatgaaacttagggtcgataatnggaatgagaatgagaaaacggtttgagtacccgtatcgtgctgtttcttcggaaagacaaccagtgtgcgaagaaagataanggagnnggtggaattggtgcttgtggatgcgcctcggtggctccggaacgatgaagctcttgaagccgaagtggaggtggatgaacccttacgtttctttgatgattctaccatatgatnggagttttgcaaatggaatcggtganataaacgaaaatgaaaaagaagatattgcagtaccgagtcgattgatgagaaatgatn

SEQ ID NO: 32881 - DNA, 385 bp, Glycine max
  unsure at all n locations
agggatatacttgtgacnacggtaactataagctacaccacacttggatgccccttacttatttatttttttaggccttacctgggaataaacaacctatgctgatgtaccgaattgtgcaccaaagtaccccaaaggcaaagtaagcccatttgtctccaaaggtgatcctaggtggcaatgggccttatacaccttgataagccttttaatgataacccaaacatattttggcacccacttacaagatgggcctttttaacaactaacacttaaattgaataagtgtgcatttatctctcattggcatgatcactacaacttgacttctctgaactggctgatcaatatatgacacactgtgagagctctgcttcttgttacn

SEQ ID NO: 32882 - DNA, 440 bp, Glycine max
  unsure at all n locations
aggcaggtttgctgagatccccnnnnctttactcaacactacangggganggnaaggggggacatacttccccnnnnggccaacacaccccgagcggcggggggatatacgttcttcaacacggtccaatcnccgtcccaacaaattacgcatatgaaaaattggtcaattggataccaacaacgtggtcaaacccggcctcaatttacatattccggtgcgcggatcccccctgctttctcggctctctgataccctgaaaagaaacccaactaaatccgttgttcactattctccccggccggttattttcttgcttccggctgtctcattaaacgggcaaggcgatagcctcgtattcatgacaacgttatgcctgttagtgttccatgagtatttgacatccttatcatgttgcgttttataaactgcattatgca

SEQ ID NO: 32883 - DNA, 353 bp, Glycine max
  unsure at all n locations
agggggagaggtgaagtaaaaaagggttcacccccttaggcacttctctttctctctcgaaatagctgaggaaaattagttccgtgaagaaaatccaagccgaggtgcttccgtaacgtttccgtgagtaattatgcgaagattctcgaccgttcttcaagattcatcgtccgttcttcgttttcttcagtcttcaacgggtaagtacctcaaaccaagcttttcaattcattctatgtacccgtggtggtccacattntgtttcatgtatttttattcttgttntcatttactttntatacccactnttgacgtgcttaagccatttatntaagtcatttctcgcttaatct

SEQ ID NO: 32884 - DNA, 460 bp, Glycine max
  unsure at all n locations
cgggcacacgattttgattngctannntnnnaccccacncnnnnaacaaagcgggggnnnnanacagggagggngcacactccttttttttaaaananacgnncncncgggggggcgggagagaaacaaaccccccacaacccgggagggagccaaaaccacccgcgcggtacaaaaggacttccacaaccttgggggtgggccccgcctggaagaagggagcctcccctaccttcaagctcaaccctgggtcttcaaacgacaatcccagaaaaccacccctacacagaggatcacgtggccgaactaccatttacgcactcaagtaagggactctgaccctaaaagactgtcaaacgagaccttcaccctcgtgtgaatcccccattggagcccggtgctcagtattgcatggcgatattctgccaccaccactacctacatttaccatccatcaccn

SEQ ID NO: 32885 - DNA, 254 bp, Glycine max
  unsure at all n locations
tgttgccctaaattgacctgtaatccagttataaataagagtatacatgtgtgatactacacccaattacaataaaacctttctatacttataatatcgaaataatgcanatatggaaatgtgtaaagtttctaatgcgagaaatatgggattgactntattctttgtatccttaattaaatcctatcttgattataaaaataaggattacatgtgtgggtattacacacatcagaaaacacttcgttcacact

SEQ ID NO: 32886 - DNA, 401 bp, Glycine max
  unsure at all n locations
cggttgcgagtgagttctacatncatccagctgcgatctggcttgtggcaatgatcaatggttttttaaaggcaacgggcccagggtgggaaagcaaaaattgggcaataaaaagggagaaataagggaaaccctgcttaaaaggctttcttatcggttaatttccccaacccacattgtttaattcacaattacaacccttgtcctacctacacccatattcccaaaggccttcctattcaacacaaacttggttaccactttcatgatgaacacactttacaccaaccaaacatcaccaagaatgattttgatcgaaaagctgtgattcacccaaattcgtgtatatgctactgtcctattactgatatgcatgtagtataacctgcanggtctaactn

SEQ ID NO: 32887 - DNA, 413 bp, Glycine max
  unsure at all n locations
aggacgttaaagactgagactacagttncaatnctnccnacccacacaggtgaaggagaacgcagaccgttatgtcgcganntnngctggccttgtgacctaggtttgattacactctaaccacttaaaggtctgcttaatataggaatccaagggaaaaacaattaaataaggtaacaccacactatgaaacacattgcaacatataattaatatgtgaagtgactcttcttccatccataacaatggattgatagtgtaatctgactctagtttctctgaattgaatactaagtgcttgatcctatgtgatatatatatgagtgagcatgatgctactcactgtttaacctgaatttatcagggtgaaatacactaagacacatgagctgagatatggagtacactatctg

SEQ ID NO: 32888 - DNA, 349 bp, Glycine max
  unsure at all n locations
gcctcatattaaatgatgcatgattgattaatgatagaaatctataaggagacactttacttaaggaaccgagattcgagtacttctactcacattccttataggttgggggcatgtgtactgttcaatcctgggagccttcttttagaatcgcataaccgagtaatgtagaaattcacaaagagatgctccacttaaagatcaaggattgagtgatgcactcatatcaacttctcagcatgcttanaacttgaggggagggggggtggtatctgccctgcaggcccctaaaaaggagatcttgatctcaacttgatcgcattggacctggccccatacgagaccaccg

SEQ ID NO: 32889 - DNA, 197 bp, Glycine max
  unsure at all n locations
tttttaaaatatcccaattttttgcttaccactcaaccccaaaatccgagagactcaccatagcctccttctacatggaagggccagctttagcctggttccaatggctttcccgcaaccaccaactcacaacctgngctagttntctcgaagccattgaggctcgcttttctcacttcccatatgaagacccactg

SEQ ID NO: 32890 - DNA, 244 bp, Glycine max
  unsure at all n locations
agcatttgtgaaattcaggacatgccgaaaaaaaaccaaaaaatattgatgcacaatcgtaagtttcgtcacacaccgaaatcaatggaacatcgtgcatattaaggaggtccgtacatccgtagtcaaaagggatgattatgtatcgcanggtcgtatattcngaagaaacagtatcgtacaaattctagtttcgtacttacaaaaaagatcccaaaaaagcagaggggtgtcttataaatgg

SEQ ID NO: 32891 - DNA, 450 bp, Glycine max
  unsure at all n locations
aggnagtcgtgtcctgtaanctacggcgttattanctcggccccgtcatcctttgagtcgacttgaggcatgcattctcttantttggctggnnagannaatgggctggggggtgggaatatatttaattttatcctcctaaataagtggctcaataaaatgtctaacctgatgtatttaccaaattttacctctccatgatggtttcttgtcctatcaacctctataacctcgggctaagttggtttatataatttgcttcttgagtaatctcatcggttccttaaaaatgcttacactattgagtaactccttgntgttagtcttgggatctattcatggtgttaattcttgtacgagtttaataactcttgtactttaattaaaccttttatgttatgcagagatgatatanaatgtggcaatcatgtttttttttgtcctttgtgg

SEQ ID NO: 32892 - DNA, 471 bp, Glycine max
  unsure at all n locations
cggggcaggttctnatgtacnctgngacacnttttnactcangctcactagactcgggttccccttaaaagaagngcgtttagttttgtngnnnnnnnngancnnnnngggggggggggaggcggaaaaangncgcaaaccaccaaggnnanaacgacggagaaacccacgctacgaccggcattcccatacagcgaagnancccacccacccaacaatggcagtacttagccaataacaacccttgttcttacctaccacccaattattcacgaaggccattcctatgtgcaacacaaagcttgtctagcgcacttccaatgatgaacaccaccttttgtcacaacccaaagctcaaccaagaaagaattttgctcgaaaagctcgtgaattaccccaaatttcggtgtctatgctacttgtccctatctactgaaatgcatggtggcataccccggcgggggctacccc

SEQ ID NO: 32893 - DNA, 217 bp, Glycine max
  unsure at all n locations
ttttaaagtaactctccaaaaataataattaattttggcaaaaatataaggatatacaatgtgaattaacatgattatttcatatttaaggtcagatttgaatcttnactatttgattanagatcaatatcactttctttaattattntatcatttaatccctgatatatatgtactatntaacccttactatataaaatttacttaagtctcattt

SEQ ID NO: 32894 - DNA, 108 bp, Glycine max
ccctatagatctgtccctctttggtttgtactattcactaggcctgattaggccccagcttttaagttagtaccctttcaaatttgcttctgcagctctttttctact

SEQ ID NO: 32895 - DNA, 467 bp, Glycine max
  unsure at all n locations
cggcatttaagctaagacnncnggatctactttactacctaccgangcggnnngggtagagacccttttgtttgnttnangaactctacacgacggagtctgttgcttgcacctgattaacagggctagataactatagtgctagacatagtgtgcacgcgtctagtttctatgatgatgatcttataaaggagtataaatgacgctaactacaacaagagacatctgcgaacggagcttaatgtaaattattccaaactcacgagacatcagtcgtggtattttttgtccttcacatataacacgtgaataatgtcatatagagaacaaccctagttgcatcaagtatcttcgtgggaggacgcaacgcttatacttatttgtattcgcattaaaatgttcatgttcactgtcctatgatgcaactaaatataccttcgtttcgaatcgtgatgctcaatcttttg

SEQ ID NO: 32896 - DNA, 236 bp, Glycine max
  unsure at all n locations
ataaagttaaagtttgatcttgctttagttcaaganaacgattttaatataagttagatgcatgaggtgactaatgtaagaaattattttaatcttggagagggttgtgttaggctttcgacagccaacgtaaaactntatcgaatctctatgacatggatcaattacgtaataatgtgaatgctaggtcgttgccccgaaaccaccgcgctgtatggctcgagtacagtgtcaaa

SEQ ID NO: 32897 - DNA, 473 bp, Glycine max
  unsure at all n locations
agggatgtttgggctgattacagcggnatnattctagtacccgagcttccttagagggacctgagggattgcatagctttggttattccgggaaccccctttagtgggacacccgtccaccctaaggcacccacccatagggaacctccccaagttccaactccgaacacgactcgaccgggcggtatttccacacgacaggaactttccctccgaggcctttgccggattcaccccgctccaatgacgtacgaagatcttctaccattcctcatcgccaatcatttggccgtggtaacttcccgaagggtnctcgaaccccctttcccgaagtggtatgaccctaatgcaacttgcaagtaccatgggggtgatccggngcattccgtcgaaaatgctggggcttantacaangatcacatttaatggatgctngatgctgactttcacaagatcggtcaatgtaggaccan

SEQ ID NO: 32898 - DNA, 449 bp, Glycine max
  unsure at all n locations
cggttgttccatgtctcacttattctcgcttcttaaatgtgctggnaagccatatggnntttttttcttgtgccagcctaccttattccgaaggtcggtttgatgttattctaaagcctttgatggatgatttggagaagttatggagtcgtgttttgacacatgatgtgttcagggagccaaatttgatgagggactttaatggactcccttactattgcatggtgtctgggtgtggaactcatgataaatttttttgtccgctttgatggagcataagaagttgttacattacaatatgagagggaaaagtgtcatttgactcgcattgtaggttcttaccagcattcattctttaggactaacaaaaaccttagaaaggggagaagatatgatagctccacctaggtgacacctatcagtgtgcatgagtaggaattgcaaaagtc

SEQ ID NO: 32899 - DNA, 200 bp, Glycine max
gctaaaattagggggtgaggtcctttttttaacatcaaatcatgtggagtggtggaatttgtgtggaccaaaaaaaagtgattgaatgtactttctcgaaactgttgataagctcaaaatattgaatttgtgtgaacatataattgctttctttgtgtttctgctatgatctctgctttggtatgtaaatccctaacatc

SEQ ID NO: 32900 - DNA, 340 bp, Glycine max
  unsure at all n locations
aggctgcttgctgtatcaggattatataacaggggacatggtatccgtaatataacattttccgtngacagcctaccctggggtgtcctaatgcatcttttttttttaccaccacaaaccagtctgggtggaatctggttgcaccaggaaaacagacataaaatgggagaacgagaaaaaaaggaaaccacaaaatgcgaacctacacctctacatatatgcctgcatatttgatcaatgtacactacacgttttcctattatttatgtctacctgctcactggattaatcggaatgtactacactactactgtgacgcacgcatgatacggatttgtgt

SEQ ID NO: 32901 - DNA, 376 bp, Glycine max
agcatattttagaaaaccttcctggagaacgctctgggagaaaccttcctggaaaacctaaacctaacctccacacaccccttatattagttaagctcacccccataccaaaatacatgaaaatataaaaaaaagtccctattacaatgactactcaaaatgccctgaaatacaaggctaaaaccttatactactagaatggccaaaatacaaggcccaaaagaagtaaaaaccaattctaacatttacaaagaagaatggatccaaccttgacccatgggctcaaaaatctaccctaaggttcatgagaaccctatggccttctttagtagctctagcccaagcctcttggagtcttctatccaatacccttggg

SEQ ID NO: 32902 - DNA, 437 bp, Glycine max
  unsure at all n locations
agggtcagtaagctgatatcgaacttantaattnagctaaccactccgaagggggnnttatctagggaaccagccatttcgganaacctggccaggcgggggggcttatcaacttgacacttcatttgggcagggctactaccccacacacaaatgacctcctccgaccggggataatctcctcgaacctataaacttactttacccgcagaaggctcaagccttgggggcttatttattggttattggtcaacaagtacatgtgtattgatcctgaactcctttcacacttaacccacaaatgacaaagcgggtncttttgaaaactattcccaaatgggtttttgtcataacctcggatggagttaatattgattaaccaccaggatttccccccacgaaaaagatatttatgggagtatttgagaagaaaccct

SEQ ID NO: 32903 - DNA, 294 bp, Glycine max
  unsure at all n locations
atttaggattccattttctagtaccgtggccaaaatgaactcctgcttccatcatctcttccaagattatgttccaatatctttntgtcatttatatttatccccacacttttctttcatttcanaatcganattctataaattttttgaaatgaaagaaagagacccggtatactgaaatagaaataagtgttccaaaggaaccttctcttctaccgaagattggcctttgataaatgatcnnggccatttttctatttaataattaatatgaatattctctttattatcttt

SEQ ID NO: 32904 - DNA, 431 bp, Glycine max
  unsure at all n locations
cggggacaggtttcagtagcctacgtgacacttacttantcaagcatgaccgggngngagangcttagaggaaacacttcctcnttgnnnncccncacgccggngaagcgggccagtatttatcttcctaacccaaaagccatgtggtcanggtactaatcgcctgccttggcagaatctattgtgggacattcaaggtgacacccaggttctccgcggatgtgattctagtgtgcattctctccctgttcaacagtttgcagttgcatgtcctccttcaaaattttgagagtatcctgactggtctatactcgggcgtctcctcactggagctcactgtcacctctacgtctgaatgaattgggaaggatttacaatgttgccgggtgcggcacattgcccgggggaggctaaggggcaagcacagcaac

SEQ ID NO: 32905 - DNA, 416 bp, Glycine max
  unsure at all n locations
agggtttgancttgttaccgcnntcaatctagcngtcactctgctgcgcctgtttaaataactttttatttttggaccagncaccttaggccccggatgggtgaattcagccttttctgaaatcatttttggtggggttggtggccaaggtggtcccctttgatgccgaaactgctttgggtgatagggagccttttggttactgggtgtgggtaaggagaggttgtcattgctgataatgacttgttgggtggcggaaactgctgtttagaatggaatcacacatgggttcttcctcttctcaccctcttcatttgccccagttnttttgcatttatcaaaacatgatgatccgatttgctcttttaaacccacttcgatcattttgcaggaatacccaatcacaaagcttgagg

SEQ ID NO: 32906 - DNA, 501 bp, Glycine max
  unsure at all n locations
ncgggatgtgccttttgctagngtatctgacactatccctactttactcaagctcgctctaatgtacattgatgtctgtatatatggacgtcgctnttgcaatnttgcttaaaagggagcgtccactggttaaacctacctttccaatggttttccttcccagaattggccttgaggaagcttgcctcaaagatgtgcaggagagaccaaggcggccgaaggaactagttccgccccggagtacgacagtcaccgctttatgagcgttgtacaccagcagcgcttcgaagccatcaagggatggtcgtttctccgggagcgacgcgtncagctcanggacgacgagtatactgatttccatgaggagatatggcgccggcggtgggcaccactggttactcccatggccaagtttgatccagaaatagtccttgagttntatgccaatgcgttggcaacagaggagggcgtgcgtgacatgagatcctgngttatgggtcn

SEQ ID NO: 32907 - DNA, 388 bp, Glycine max
  unsure at all n locations
ttgtttgtgaggatngatggggactcggtgttgagaggaacgaggataagggctacgtgggagtacgtgagctcagttggaggtgggcaacaggggatggtgggttatatgtgatttgtggatgtggagaatcgttttgcaccatcgcccgaccgccacctagtaccacatgtgatgggtaccccataatccgacaagcttgaaatgangaagtgtagaacggtgagacttcttgcttttattcgttgaccacagagtggtgcctggagatatgtcgcangggtcaggagaccttgnggacgtcatgtggngtgctattgcccataaccaagctttgacaatcccgacccaacccgggcatagtcagtcagtgagaacctgtgttgta

SEQ ID NO: 32908 - DNA, 245 bp, Glycine max
  unsure at all n locations
aaaacccttactggcattagcctaaaaacccttagccggcttaacctaaaaattagcactggaccgaggtggatccaaaaaacccctagctaccatcgactaaaaatagcctggctgatgtcngcaaaaaaaccttagtcgacgtcaaccgaaaatctgtagccgacattggctaaaatatcctagccaaggttgaccgaaaaatcactagctaatattgactaanaagtagctctaactaatgt

SEQ ID NO: 32909 - DNA, 434 bp, Glycine max
  unsure at all n locations
gctttcttgagtgatntattggacattaaaaggtgtttattgatttaaccgaaattggccccttcccaatggtngtaccttcattttgccttcacaacaccgacgacgacgaccactttaaaggtgacgaacccacggcccaccctacgatgtcaatgctgatagaaggagagtgacacttacaaatggaaaaggggcccaaaggttgatcgtgttcaagtgagtggaatgagacaaggcttgtagaagtaaaagggcactgattggatcctcacgtacgaaaaaaatngcaagttgtctgataaggatgagtgacattgttcttcngtctgaccaaggaatttaatttcaaatgtaaatacaataaaatttgatttgatacttaacataaatagatatctatatagatagataatttgaaacaaaatcaattn

SEQ ID NO: 32910 - DNA, 381 bp, Glycine max
  unsure at all n locations
atatatatatatatagatatgggtatatatatatatatatatatatatatatatatagaatataaccttcattatttttaggattttttttgggtaaaatgagaaaaagataaaaaccaaaactttcttaatacaactatgtgatgcgaaaaaacatctatagcaaaggagagaggaatatcacactcctcaatgcacacgaacataattttaaaaaangaatcagtcagatattagttgaagtgcatgatccaatttctatagcttgataatntcagtcttcaaaaaaagcccgaaacgaatcacatcacanatataatttcactccaaagctgataatttatttntatcattattttttggttagcatgctacatattn

SEQ ID NO: 32911 - DNA, 403 bp, Glycine max
  unsure at all n locations
cggggcgcgtagccctcgannncgtgaccttaatcactcagcttgacacgttggaagaagtttgatggttaaaatatattcttctcaaccttattccttaggccggattctttccttaaattcccctcggaaggttgcactttacttaaccacaggtgctgtccaaacctattgcaagaagggaatcggcactttaaataccttctgggaggccgtttatttcaaaactgctcggaccgtcgacaatggaatggtggataaccaaaaaattagtaaacccgtctaatgttgcttgtaacgtctgtttaaagaatattatgaccccttaccttccatggggtgtaaggaggccccattgtaaaaaaacccactcttggttttctgcctggagaaaaataaaaga

SEQ ID NO: 32912 - DNA, 214 bp, Glycine max
  unsure at all n locations
tccgtgataaaaaagtnttgattgtacttgatgatgtggatagttttgatcaattagataagttgtgtgaagcatgtaactatgtaggtccagatagtaaacttattataacaacaagagataggcatttgcttagaaaagagttggggacagacatgtctatgaggtcaaggcatggagctttgccgaatctctggagctnttttagttacat

SEQ ID NO: 32913 - DNA, 463 bp, Glycine max
  unsure at all n locations
aaaanatgatgcctagctnncctttgtatantcgngngacaatnattaannnagccttataccattaggngagatggactacatgatcatataggtctttggctcggttaagaccaaatttgggagatgtcttgtttatcttttaccattattcagaacctnttcaagttaacattattaaacttaaatagatggagggatgaaaaaattggagatttcaagttttaacttttgaagaccaagatgataaaatctatcttgagggtatatatataaggtttacctcgatcttaatgtgtttctcatctctcctctacatgcgatctgatgcacttctatctgttagccaataatgcttaactctcttctgtgacaacangcctcatgatatattcaacttgcaagtaagtgggagatagaccgaatagatgcctactgacttattttacattttatgcagcca

SEQ ID NO: 32914 - DNA, 341 bp, Glycine max
  unsure at all n locations
tcaactttgatcatttgaaaattaaatcttagatnncagagctctnttagagcacaaaaattcgtgctcttctcttcctctcccttcattcatctctttcttcctccaagctcttatccatggcctcctatggtggtgagcttcttctagactcatcttctcctcgaagtggcatctcctctctcttcattctcgattctgctgccattcatcttgcaagaagcaaaggaatccattgatgaagaagatcctatgcctacaagctccaatggagcttacatcatgggggacaaaggtatagtgcttttacaactctctcctccactacttgtatgaatatg

SEQ ID NO: 32915 - DNA, 491 bp, Glycine max
  unsure at all n locations
acgggggcggatgancccttgtannnccncnnnaatnaattttactcaagctaccangccatgggnttngaagttaattgataccatccttttctttggatttaaggaatatactatggatcagtgtatatatcggaaggtcagtgggagtaaggttatttttctaatcctgtatgtngaggatatatnactttgcaactaatgatcttggtcttcttcatgagactaagaagttttttctagtaactttgaaatgaagatactggtgaggcagctatgtgatagggatagaaatattctgaaatagatcacaaggattgtangcttgtctcanaaagcatatatcaataaagtactanagagaattaggatggaaaagtgctgaacatcaccccgtccgagttcagaaaaggagacannnattagcctcgcacaatgtcctacaaatgatctgggaatgaaaccaatggaaacaatttgtatgcatcatn

SEQ ID NO: 32916 - DNA, 437 bp, Glycine max
  unsure at all n locations
atgattcctacgnngagaggngcgcttggtgttcccttaagttttgtatttanaatggagcctaaattccattaaccaaaccactttgtgtgaatgtaggatgtgatttgcttctctaaaatttttatttggtattttggccaatggtaagtaataatttgggaagtctctcacctcatttccttccttaatcacccaacccaccctattacttccttgggttctcttanttattaaccaaaaaatcattattgatatttaacatgtcatgattgttatgctatacacataacatatgagctctttgatttttaattaatgactgagantaactaattaccccttagagtgaatngctcactacaaaggagctagatcttgtaggaattgaagcttaggtctatacacctgtnnttaattactntctgtattaacan

SEQ ID NO: 32917 - DNA, 337 bp, Glycine max
ctccaataaacctcctgaccttacagcaaaatcaacctcagcagtagaacaattatgacctctccagcaacagatacaatcccggatggaggaatcaccctaatcccagatggtctagccctcaacagcaacaacaacagcctgctccttccctccaaaatgctgctggtcccagtagaccatacattcctcttctaatgcaacaacaacaacaacaacgacagcatttactgagacaacaatccactattgaggcccctcctcaaccttcattggaagaatattgacgcaaatgacaatacagaacatgccagttcagcatgagactatagccctc

SEQ ID NO: 32918 - DNA, 476 bp, Glycine max
  unsure at all n locations
aggggtggtcganccttcagtacncncnnntnctattntaagccttgagcacacacaacgagnanaacctgtgaagccgacggttcgttgactcccgncacataacaaaacgcggaattgaatgtgaactctacccattcaaacgacataacttttactggatgtctaatgagccccaatattcgaacgctcaaattgaaggtgaacttctagcaaatcaaacgcccatattcttttactccgatgtctgattgaggcccgtcatatatcgagacacctcgaaaattgaatgttgaacatctgaatgaattcaaacgacaataaccttttactcagatgtctgatatagtctcgtaatatatcgagatgctccaaattgaatgttgaagctctgagctaatttaaacgacaacaactttttacacggatgtctgattgagtcctgtcatatatcgagatgctccgaattgaatgtt

SEQ ID NO: 32919 - DNA, 277 bp, Glycine max
tgcttgcactcgctattcctgactttgacaattaactctgaatatttactatcaattctaagatgttacagaataaaataaagatgttcggcgagatttatattaaaatatctaagaaatgtattgtatcttctaaaatgtgataaatattcaaagtcaggaacctcgtattttggttcatgttctgtaccaaacaaatttatattttgttatgacctaagttgatatttaataaactcttctgcacatatagattctattattattaaagttcata

SEQ ID NO: 32920 - DNA, 422 bp, Glycine max
  unsure at all n locations
cgaagttgacttaaacnnntttatcttacgnagaaccnggggnngagtggggaggttatttttgggnaggagcccggggcgggtgtaggaaggaaaacaaaacccccaganacccccagggaagaaatagggtggctgctattcatacttatgatccactgctatattccttaattccacgatgttccaagggaaatgcttgattgggccaagcgtttccacataattttgtggatttgttccgggcttttgtaccttcattaagattctcgagtgatgtatatccttagagatctaatagcagttattgtttactagacgacactttgattccaaaattttagattatggagtgcttaaactttcggaggagagaatattgaaggaaacaccaccagaatagttggtacatattaattgtn

SEQ ID NO: 32921 - DNA, 280 bp, Glycine max
ctactgctctaagccaggcaccacctcgtgctggtatcaaggtattgacttttttaagcttatgctcatatttaactacattgtggttatgcttaagattctgtgacatgaaactctgacttccttttaacatccatttggtttggttatatagataattttgcaccgtgtaatttaccacctcttggaagacataggatatttgataatagagagggcccctgtgacttctgaaacgcacgttgctgggcaagcagaagtgctgaatatctttgaaatc

SEQ ID NO: 32922 - DNA, 239 bp, Glycine max
  unsure at all n locations
gcgaaagagtatctagcgaatactacccacagggggaaaagaaccttacncaaaaaaaagggggagggaagcaccccaccgcccgaaaacgaccacacccaaaagagggcaaggccagcacaagcaggcgcaaacgacacacacaaaaaacgcggaagccaggcacacacgacggaaaacaacacaccaaaaaagcggacgcaaaaccaacaccggaaacgacccaacggaacgcagag

SEQ ID NO: 32923 - DNA, 539 bp, Glycine max
  unsure at all n locations
nnnnccataaggggaagggatangccgnnannntnntngnngacnnntntactnnnannncnnngcngnagtacnnannagngnngangagnngcactagcgatgagagaanactctacgctcnnntggnannnnnnnnnnaannacggaaaggngcggggagtgtttcaagaggaaacggcccacccaaccccccgaccacaaatnggcgcacaggaaacaggaaatccacgcgggcgggaccatccaacaccaagacagcaatggcacatggaccattgacattggaggacccaaccacncaaaaggacatcggacccgtggaatgggcagcatgaactcacaacaactaccctttgggggagattaccaagaggctaatcactactgtgccacctgctagacgcttgaaccacaacaaatacgccagctttatgacgttaaaaagcgctcctggaggcacctatatttatgaccctacttgtaaaattatctcctcgctgattcaactcggttataaaaattattcgttaatctat

SEQ ID NO: 32924 - DNA, 460 bp, Glycine max
  unsure at all n locations
aggaaagctgtggctgattaccngnnataattatcgccggagacaattggaggnacctgagagatgacccattttttannnnaccgcccgaaaaggggggactcaacaaactcccacaaaaattaatggcgttagaatggcctcaaaaatagaacattcaatttcgagcgtctccattattacgggactcattacacatccgagtaacaaagctattgtcttttgaattagcttagagctttcaacaatcaatttccagcgtctcgttatataacgggactcaatcagacatccgagtaaaaagtcattggcgactgaataggctcagagcttccacattcaatttctagcgtgacaatatgtgacgggcctcaatcagacatccgagtaaaaagctattgacgttagaattgctcagagcttacacatcaaatgtcgacgactcgattatgacaagaag

SEQ ID NO: 32925 - DNA, 405 bp, Glycine max
  unsure at all n locations
aggaggcgaatctgtaagcacaanntcaccaccagcgcacccangaggngantgggacgcgaaaattgctcgaacgnngacccgaccaacgggggggaggagagcaagcccaccccgacggggaaaacacaccagacagaagacagacgccgcgcacgagaagacgacccagccagaaaacgccacaacaaccgaaaggaaaaaaagaacccaannnccccaaaggcgagaaccgagcggacccaccccccggaccacggaaagccacccgggccaggagccngacccgaacaaagcacccacagagaaacaaacgccggaaagcggacaacccagaggaaacccaacaaaaacgccgacccccgacaccccagacgccgccccggagacaaacgacgaaaagcc

SEQ ID NO: 32926 - DNA, 363 bp, Glycine max
  unsure at all n locations
atttttatctcttgttccatcaaagcaaacacatgaataatcttcctattaagagcatacacttctatattggtcttgcctaggtgatacatcaattgaaaattatagtctttcataaactccatgtaacatatttgtcttatgtacaaacaaatacttccaactcatgagatcagtgaacacatcaacctttgcttcagaaggataatgtcttcatattttcaaaacaaatatcatcacaacaattctagatcatgtgtaggttagtgtctctcacacatcttcaactatcaagatgcatatgctataaccttcctatgttacacaccaatatgcaactcanaccttgataagagacatcat

SEQ ID NO: 32927 - DNA, 358 bp, Glycine max
  unsure at all n locations
aggttacgtaccttagacncggaacattactcanctcaatccganggggangggaaactctgttttcttttcncnaangtcctggagattgtggtgggtcagaaccctcggactaagcggggctattgccaaccagcttgccaatccaccacccggctaacgacggagaacctgaagtcctaacagcgactctgcaccacaataaagaaacagacccaacacgtgctgtgtggtggcactggaataggaaaagagatgggctcggtatgataccaagtggaatcatacagctaaatgagaagagccaatgcttgaattatacccagggtaacatacgctgaacaatcagaccacgggg

SEQ ID NO: 32928 - DNA, 367 bp, Glycine max
  unsure at all n locations
ggaatannccggcgtcatcttatgcgnaantatatacccctcacaggcggggcacgaagacaacttcctcaanngaaacncnggccggggagggaagagancannggacccaccccnccaccaacgnngagcgcgaaccacaacgagaacaagagagagacnaccgcccacggaaaaaaaccancaagannaggaaggaagaggggccaccaacagacgggaaagaaggccacaacgaagaccaaggcaaaaacaaccggaagaaaaagcaccccacaagngacagacaaagaagaaaccgcccacagcaagagacaaagcaccacaaacccacaacagaccgacaaccggccaaaaggaaaccacc

SEQ ID NO: 32929 - DNA, 371 bp, Glycine max
tatcattttttcttatacaaaaatgaagctgggaggccacttgttaaacaagtggccacaaatatcttaagaaggggggttgaattaacatattgcaaactatttccccaattaaaattttattttaattctaatgcaagttacaagttcccttaaaaatgaactcttaaataatgattcaaataaaacaatctgaatataaatgcacaacaataataaataaaagattttaagggaagagaaagtgaaaactcagatttatactggttcggccacaccattgtgcctatgtctagttcctaagcaacccgcttgagagtttcactatcttgtaaaatccctatacaagttttgaacacacaaggacaatc

SEQ ID NO: 32930 - DNA, 252 bp, Glycine max
  unsure at all n locations
ctaataagggaaatctatttttttttaaaatatataaccttttttgttcgaataaaacaagaaaatatccattttcaacaaaaatgaatttccatagcttcagcnttgtagtaaactagagcagtgagcccgcactctgcangacagcagaaacaaaacatgaccccatttctttgaaatgcaaaaagaanaaaaaatgcaacagtttttggcacatgtaacctttgagctntgaccggagaaatacttaat

SEQ ID NO: 32931 - DNA, 367 bp, Glycine max
  unsure at all n locations
actaaacctggggctgaggacaagtttaaatatatcgaatctttaattaatgccaaatgtttgactgatctctaattangcatgatatttcatgtctatgcttttgattgagcgaaatccatgcttgggtgctaaatattagaaaaatttgatgtacctcgtgtttgcttaactaaattgagtgttgttgccaattcctaatacatgctcattaatggtgattattgttttaccatttaaaatttatgtcgttcatgtatatcttttctttctccattgctctactatataaacacgtgtgagtatacaactaatcacaccactcaaatctctctcattttactctctcctcttgctctctgaactt

SEQ ID NO: 32932 - DNA, 489 bp, Glycine max
  unsure at all n locations
aggggccggttagccccgtanagcnancgnnaattatnatctangctgtcgcatcnaaanccggagaggtagtgcatatgttctcttactgnactaanccatnngcggcccaggtttcatggtctggtgaagatcctcataagcatctaagggagtcccatattggttgttccaccatgaacccccctgatgtccaagaagatcatcatctttctaaaggcttttcctcattctctagagggagtggccaaagattggctctactaccttgctcccaggtccattttcagctgngatgaccttaagagggtgttcttggagaaattcttccgtgcatctagaaccactggcatcagaaaagacatttcatgcatcatgcaacttaatgggagaaagcttgtttgagttatgggaaagattcaaaanatttgtgcaacctgacctcaccaccatattctggcaactcctcttcatattctatagggactn

SEQ ID NO: 32933 - DNA, 394 bp, Glycine max
  unsure at all n locations
gggagaatgtgaatgtatgtatacatgattctgatgatgtcaaagaagaatcaaacaaggctgcttcaaatgataagcatttgcttcaagaataattcaagagtgcttcaacaagcacagccatgttttaagattcactanagaccaagccttgccttaaaacaaagtgctttcaagacatgcaaggctctggtaatcgattaccaggaagtgtaatcgattaccagaagacagggttgagaaatagctgttgaaaaatgttttgaatttgaattntcaacatgtaatatattaccatatgtctgtaatcgattaccagcaacgaaactttggaaattcannattcaaagtcataacccttcaaattataactgtgtaatcgactacacaaaca

SEQ ID NO: 32934 - DNA, 311 bp, Glycine max
  unsure at all n locations
cctccgattaacaggaccttcatagatttgatcngatgccaaggtaggcacaacaacaggggcaagcacagtagcatgcgcaggaacaccagtagcagccagacgcaaatgcatttgtgccacctctacgacaaccaccatctctgctcacatgcggatgatagagctccagatgcacgcatatatgcaacatgtggccgaccagcaggcggccaaacataaggtttaggtgcaactgaatgaaagctnttacctgtacaccctgcatcagtagcgctaggaccccaatccttacccatggcctactcccg

SEQ ID NO: 32935 - DNA, 283 bp, Glycine max
atctaaaaacctcgccaaaggacggtcattctccttcttggaaggtaccacaggatatggtacttccacaacttcattcacaactttttcacttctactcttctttgcattctcatttttttcatctttttcaatcttctattttctttttcttgggcattcaatcattttttcttgaccattattagattctctctttcctgagttctctcaccttgctcatcatttttcttgttatcaatacctctcttttcaatgcggtaagccacatgactaagaaaaa

SEQ ID NO: 32936 - DNA, 475 bp, Glycine max
  unsure at all n locations
aaaacatcggttgngactgancgacgtgacngttanaatatttttncttgntgntnctactaggggaggcgtttccgatattgaagatattttcttttaaaaanggatgccngganaccttggagagccagggaaaagaagtcttgttgagggaccttaaggacacaagaggctagaaatcaaactctctagggttccacttggtatggatttgaacctaacttcagaattgtcaaagggcttcagggagagggcaaaaaaaaaaggtctatagaactttatgggtattggnttgtattntataggtaccaaatgattaactaccattcttacattattaaattgttttcactatagaaatcaattgctaagtgcaaccgtggagagcaattctattgacccanatgttgttgcagtgctacactcattttgtcagctgaaacactgatcccattctcatgtgatagacatacan

SEQ ID NO: 32937 - DNA, 292 bp, Glycine max
aaacctccggggcagcaaacccaacatgagcacaataatatgacctttcaagcaatagatacaatccaggttggaggaatcatccaaatatgagatggacaagtcctccacaacaacaacagcctgcccctctatttcagaatgctgctggtccaagcaagtcatatgttcctcctccaatgcagcaacagcagcaacagtcacaacaaagacaacaagcaactgaggctcctcctcaaccttccatagaagaattagtaaggcatatgaccattcagaatatgcaatttca

SEQ ID NO: 32938 - DNA, 469 bp, Glycine max
  unsure at all n locations
aggttacgtatgcttgtacctggaaataaaataccgcctgccganagtgacatgtaagaatccacggtcccttctttttatttcccttatangagagtcgagtagagttcactggccgtcacttaacaacgtcgtgactgggaaaaccctggcggtacccaacctaattcgcctgcaagacattccccttttaccaagctgcctaataaccaaagggcccccaccagatcgcctttcccacaagtgccacagcctgatggcgaaatgcgcctgatgccgattttctgcttacgcatctgtgcggtatttcacaccgcatatggcgcactctcaagacaatctgctctgatgccgcatagttaagccaagccccgacacccgccaacacccgctgacgcgaacccntagaggacgcttgaatatatgtcatgcttggacacatagagggttgcggaaagatacctgtgac

SEQ ID NO: 32939 - DNA, 347 bp, Glycine max
  unsure at all n locations
agctgttgagattaaaanngcctaaancatttccggagatgcatgtgaattaggaagcatcaacaagaatcaagccaaggctattgtgcaaggaatcaatggggcaaaacacaccaaaagattatgatgatggatggctcaaattctcacaaacgttaacttatcactttcaaattgagctttcaaaactctcatgacatgtagaagaaaaacaaagatttcaaatcacaaaatgtcaagagacttttattatcaaaacaattacccatttcttgaacatatcctataatttaaagaaaaatatgcaaagttgtacatgcaaacaaaaatgacctcaaatattaaac

SEQ ID NO: 32940 - DNA, 367 bp, Glycine max
  unsure at all n locations
acgagtatactagatcgccatataaaaacgcggccaaaacaggcgggaagaaaaccgttttctctaggccngaacccagggcgggggaagtcanaaaaaccccactccgaccagacaggcagtacgggagacgcggccatactacaaggcgcaaaacgagacgcatcgggcaatggggcaaaacaaaaagctcacccgtggagatgagcgagtactgagacagggcaccgcataactatccccgcgtgtaagcgacaacaaaattcatgcaacagtcccatagaaaaattctcagcacagtgagacgtgacaatcctgtcaaacaggccaaacgacgacttacaactctcgtgacgacacattaaag

SEQ ID NO: 32941 - DNA, 483 bp, Glycine max
  unsure at all n locations
agggttgctcngcatgatanctagngcgatatactagctcggcacccgagatcctatagagtgcacctgaaggcgtgcaagctcctataaaggctcccccaaaacgctnccgcgaggctcctgtaggaagctttcctccaaggctactttgagaagctaatatctaatctaccctggcccctctattacctaattaaatctccttgaaagtagtgccagataatataacacgataacttattccaacttcanatataattactaacatatatgtatatatatatatatcagggtgttacattgaccaaactcgctagagatgtcatcacccaccacaaataacaccgaagtcgtgatcataagcatggagactcanatagagcatggctcttctcactgcatctttaggatacctatgctagtcgaagacacatcgagagcgaagaggacgagtatcataaactagaccgtgataacacttag

SEQ ID NO: 32942 - DNA, 107 bp, Glycine max
actgtgaaaaggttttgattgtagtatacatgtatcattaccattgttgtatcgatccacacagacattgaatcaatcatatctaccctcaatatactgtgtatcat

SEQ ID NO: 32943 - DNA, 461 bp, Glycine max
  unsure at all n locations
cgttnacaccacagggaanaagggtgaatgaccgttagacnacnatatatatnanccnnacaacangggagggggaagaaaagcggganactttctttattaaggagnnngggccnccggaggaagcgttcctaactaagaaatatttcttctcactaactcatgaggatgcatgatgcaccanagatgatatggactaagaagcaatattcaatataacaatcaatacaaatgtcactcaagggagttaggcatgtaaaaaaaaaacaatctcagcttttctcaagcttcagattagtctcatgttgtcatgttgtcccctatttcacaatttttcccagacaaaatctctaataaggaacaatattgatgcatggccacaaactaacataatgcaacaaagtatatttgatagacacacgtgacattaaatcttattatagctattaaagattattaac

SEQ ID NO: 32944 - DNA, 331 bp, Glycine max
aagaatgcagtttttggagctcaaaaacaaggaaccatggaatttgatataaggagagagaacacagatattcagagaatagatgcaatggtactgctgtgaacagttacactgaacttaagcaaatttcgatgcactcgctgagcgagttatgcttgctgagcgagaaagagatgtttggtttctctcgatgatctcgcttagcggcccaatgggctcagcccaacttgaaattaaaaaataatttggttttagagttgggcttagcgcaaagcagtgcactcagcgagttctgcagataagaaatcctgcaactctcgctaagccggac

SEQ ID NO: 32945 - DNA, 429 bp, Glycine max
  unsure at all n locations
gctcggccccgggatctctaagtcacctgaggctgcattttttgagatactnggtgnacttttactgccatatgcaaaagtgttgtaccccaacataattgctttagaagtaatataataactaaaaccataaccatgtctagagacataaaactaatgatacagaaactagaaatttcaccatccaattatctacaaattgtgatatttttggcaacaaaatttttataaataaagcaaacgttgtagatttgcaaccagccaaaaaaaatgatnttaggacttgactttatcgtacatgataatagatcaatcactattacaaaagattacttattaatntctacanactcacaaatgtcacccataatatacgaactcacatcagagttacgaacaaagcgtggtgatgcccccactaatactagt

SEQ ID NO: 32946 - DNA, 371 bp, Glycine max
  unsure at all n locations
tgccctaatntacattgatgtttgtatntatgggatgagtttgtatgccattttntgtttaagaatagggtccactggtaaactactttccaatgttgccttccagaaatggcccgaggacctggctaaaaggtccagaagacaaggcaccgaaggaactagttccgctcccgagtatgatagtcaccgctttaggagtgctgtacaccagcagcgcttcgaggccatcaagggatggtcgtttctccgggagcgacgcgtccagctcatggacgacgagtatactgatttccaggaggaaatagggcgccggcggtgggcaccactggttactcctatggccaagtntgatccagaaatagtccttgagt

SEQ ID NO: 32947 - DNA, 310 bp, Glycine max
  unsure at all n locations
agctgcngcnataatancaaaattgcctaaatcatttccagatatgcatgtgaattangaagcatcaacaagaatcaagccaaggctattgtgcaaggaatcaatggggcaaaacacaccaaaagattatgatgatggatggctcaaattctcacaaaggtaaacttatcactttcaaattgagctttcaaaactctcatgacatgtagaggaaaaacaaggatttcaaatcacaaaatgtcaagagaactttattttcagaacaattacccatttcttgaacatatcctataatttaaagaanaatatg

SEQ ID NO: 32948 - DNA, 424 bp, Glycine max
  unsure at all n locations
gacactataaaactcagctttagccaatggactaccttgaataattctttgtatgcctttgagccttgttcctttcctggtttgaacctacttaaaccctaagtgaaaaaccttatataccatatccttaaggaattttgagctttggaatggttttgggaataagtgtggggggtttttgtttcattggacaacttgtttttttggctatgcttcatgatgtattttggtccatacttgatgtacattgtatattggttaaatgttggacatgctgaatgaaatgttgtttctcaaagactaaagattaaaaaaaaaaaaattcgaaaaaaaaaaatcgaaaaaagaaaaagaaaagcaataagttgagtgaatagaacttanatggcacaagaatgatgaaactcttggttctactcttcat

SEQ ID NO: 32949 - DNA, 329 bp, Glycine max
  unsure at all n locations
ctttggaacccggatatggaatctgcaccaataatgccactaaggtccaagttttcaggccttatagttatacatcttataccgttcaacttgaccatgcacggatgtgatggtgacccaatccaggtgatgctaagcaccgtttgggaattgngatcaacagccctgtactgtactgaacattctacataaagaanagaaggacaacaaagaaaaccagcctcctcagaaatacagcanaatctcgtctcatgcagtcctcctctgttgttaaagacttgctagtcctgcatgcttcttcatttgtgcattggataaagacatgtatg

SEQ ID NO: 32950 - DNA, 257 bp, Glycine max
  unsure at all n locations
aaaaattataataaaatatattgataacattctcaataaaaaacacttactggattgtattttcattntgaaatggagaaggtagtacactaaaaanttaaaaaatactaataatatattattttacatcactcttttatatgttgtttataaatcagtatcaccctagttagtaaaattagcatgaattcttattaaatgatatacagcggtaaaaagagtgtaattttgatatatcgttagcataaattacattt

SEQ ID NO: 32951 - DNA, 222 bp, Glycine max
  unsure at all n locations
ggttttaaaataaaaggggttcctctttttctataattttattataaactaccccacatgtctccatttgagtggagcanaagggcccactntccctttttactgtgacccacactcagccacanaagtgagaanaatctgacctttgaaacgctaaaatcctgcctcngtttgcgtgtcgtttctctggttccagtttctcgcgtntctctgcgtccgtcg

SEQ ID NO: 32952 - DNA, 169 bp, Glycine max
  unsure at all n locations
ttctctccatgttactgagtccttcataaaaatattggagaagaagctgctcagaanatttggtggtgagggcaatnggcgcttagttttttanatctctcccagtattcatatanngctctctcattgagttgcctaatgcctgaaatatcctttctgatggtcgtgg

SEQ ID NO: 32953 - DNA, 363 bp, Glycine max
  unsure at all n locations
gctattggtggatcggcaaaagtcaggtaatggctcgcatggaggtggttgataattcccccaacctttggcatcaagatgtcaggtgctacgggggcctaattaagaaatttcatcaccggcttcctatgaggctcannatgcaggagcagccccaataacgagatcctggctagcattttatcaatggttcgatcactttgaantcactctgcttaatgattcttaggaatttgttgcgttctaagcagatggttccttcctgccagaattatnctctttcttggaggcttttcataggagtcttgtcattacaaggccttttctcccttgtatcacatactcttcttttcctttgcttta

SEQ ID NO: 32954 - DNA, 209 bp, Glycine max
ctaattactagcaccatatccttgcagcatttccatttcattgacacgagtgcagggcttcagaccttcaaaccaagtcttttatgtacgtgggactgacaatcctctttatagatatactcactaattgcacctctgtgtatgggtggcgacccccgatgtgatactgtacaatgtcttgtgactgctatgtatcccctgtattcatg

SEQ ID NO: 32955 - DNA, 334 bp, Glycine max
  unsure at all n locations
atctttttgttcggatggnggacctgnggttggtccaaccgcgtcaaaagtctaggcaccttgaaatggtcttgatggatgcaaaggtatgttgtgattcagcttttgctttgtaaaataatgtgatacggtttatgctctgttttgctgtttgggtgtttgatcccctatatgagttgtaatttatgggatctggttagtcatttcagagactgggttttaggttctctttctgggattttacgttggctnttcttgttctataatgantattgcgatttgattgttaaatacaattgtttttctttcttggtccatatgacatgttgaatga

SEQ ID NO: 32956 - DNA, 365 bp, Glycine max
  unsure at all n locations
tgctatcaatgttaatcccaaactcctttgcatatggtatttactcataatcagtttcgtgaattgtctgctagtatattggaaaagctatagattaattaaactaaaccaaacctgcaatacacattatanttttgtttgtaaagagaataaatattgaaatggacatgtntaaacaattgcaatttatcatacaaccatggctattcagtttccaattgattctgacaaaaataagaatatatagaagaaaataaaaggtttgatgagaattctaaattacccaaatacgggaaccagtgactaggagtaggatcaaataactagtggataccctctaacaaatgatagcagacatgcttaac

SEQ ID NO: 32957 - DNA, 297 bp, Glycine max
  unsure at all n locations
tccaaaggtacctaaagataaaaaagccaaaaggagacttgatggttcaagacggtgggatcaacatcgttctgttgcacagtagtttcacttggtcaggcaattttctactccagcagttattcatagataactcaactagtttccctacccatggaatgtangagagggggatcatgaacctaaagccacaagataagggacaatggaagatatagcatatgttggacaaaagggaagcaaacagttaaaagtgtctgatcaaacaagtgccttaaataatatcaacttaatagt

SEQ ID NO: 32958 - DNA, 426 bp, Glycine max
  unsure at all n locations
aaaaactttactagatcancttaatctaactgactactanttatttctatggaacatgtagttttttcccccaagattggaggaaccgaaggatcatacaccatatgtaaaaaaatgataggtgaagatactaagtgatgcgtgcatactacgaactgctgctggttctgcatcactcctctgttacacccattgaaaaaatgtaagttaacaatataatcatttagatatangggaaatttgcaaatctcttccatgaccataattcctgacttttgatcaatttataaaagactnttgaataagtaattacttattaaaaaatggttatggctttgaggcctatnttcttggttattcattgcacagcanagcatatagagtgtttaataggagaactttatgtgtggaagaatttgccatgtt

SEQ ID NO: 32959 - DNA, 331 bp, Glycine max
  unsure at all n locations
gaaattctgatactggggacagatgtcgtaccggatgtcacgacttcacgcttcagaacatgcagattatatgtgtctgtatgaacagattaaacaagtaaataacacaagagaattgttaacccagttcggtgcaacctcacctacatctgngggctaccaagccacggaggaaatccactaaaatagtgttagttcaaagtctaacagccactgtttacaaccttctcacctaaccactacccgtgcaatctctacctaagagccactcttagatatgagaaccctgctcactccctctcaaccacactcccgtgtgtacaaataaatc

SEQ ID NO: 32960 - DNA, 116 bp, Glycine max
cgctatgatggacccaaatgacaagagctccagaattaatgcatactttaactaagccatcagcgctaatacaacccgcaatggcatcgagcctctaacttaaggatactttacta

SEQ ID NO: 32961 - DNA, 195 bp, Glycine max
aaacccgcggaccaactaatcctgggcaatccctttgcactgcgtatacaaagccccccgacgcctccacagtgccacctgagcgaggcccgagcgattctctacgccggcgatcaacgaagggcctctaacatgttgagcgatataaccgccacccgcacccgtgacaacctgcggtgaaagaaatttacgcct

SEQ ID NO: 32962 - DNA, 447 bp, Glycine max
  unsure at all n locations
aaaaaaatgaattttcattgactancnaccggcatatactancatcggacccgggaatcctttaaagtggacttgaaggttgcaaactntttcagaccgnaagccatgctaaccaccttggttccttgatacagggcatacaaatccctttcttcagttgggtggcccttaccactcggatcacgaccaacatattgaaaatttgccctgcctttatccgtgccttgcatgcactgtacttcattggaccgcattatgcatagtgatggaaaatggcactatggtagtctangatcaaaactccatcttctagcctaagagaacaaagaacttatagataaattcatgattggcaatacaaatgatagatactgaattaatgaagtcaacacttttgggtcattttgacatatatgtgacacatccattatatacctagtttttaaa

SEQ ID NO: 32963 - DNA, 496 bp, Glycine max
  unsure at all n locations
nnnccttcgttaggggactgagtnatcanancttntatactcaagcttgtgaagggaatgatgatgggagaaaaagggatgggaatgtttctcaatatcctttagtgggaaaaaaaagcccataaaactcccgtgggtggaagaaacccctaccatggattctataaagtaattaagggaggtttttcatcccagggtccttaaagtccttatttaattatcaggtggattaagggttattagttagaataaaatacctttcctaaagtattatgggatggtaagggcataacatgatgcaattggttttgcctaattactactaagttaaaatggtttcatttatatttatcatgtcatgtgtactaaaaatttaatattgtaactctttatgtaaacatccatgatntgtacaaangatatgatntactttattagttttatatatgatgagtttaagacctagaaagacgaattcaaattaatgaagaagnan

SEQ ID NO: 32964 - DNA, 325 bp, Glycine max
  unsure at all n locations
aggagtgacctgatcagcgaactacnaccgcttactgagggggaagaggggctctctgcnnngcnaanaaagcggggggccgaacccggccgcgcaancctcaccgacaaaagccgggagccctgcggaacagaggcagaacctagtccgcccccaaaaagccccccgaagcagaagcgggccgcacagacaaaacagacgcgcgaagagagccacacgaaggccaccgaaaatgtggcaggcgagacctgcgaagaaaagcgaagaagaactacaagaggtcggaagaaacacgagagccggcgactaaaacgggggcgcaaca

SEQ ID NO: 32965 - DNA, 423 bp, Glycine max
  unsure at all n locations
tgacacaatcaatattctgtgtcttatcaagccactgttgtantttaacanataaaaagatttgtggtgtgtttgctcactgactaaatcttaattgtattacagacgaatatgaaatctaagcaagcacttagtcttttctatcaaagtgttttgaaagctttttcgaactatacaagaatatatagagagattttcacaaaacaaatttaaatgttagcgcacaggttcgtaacccatgtctttaaaacttttgttatttataggcattcatcttcaagtatttgttgtctctaaacaaatagttntcttcacttgagcttgcatatgatgtttatggtcgttggggcattgcattaaatgcacgtacttctttatgccagaaaaccactcttattcactctcatgtagaataattcagca

SEQ ID NO: 32966 - DNA, 373 bp, Glycine max
  unsure at all n locations
ttcttgtttcgacctacttacccgttgaagatcgaagaacgatgaaaaacgattgaacaacgtcgaaaaacggtcgaaaaccttcgcgaaattcctcacggaaatgtttcggaagcgcctcggcttagatattctttacggaaacaatttttccaagcaaattcgaaagagcgagaagtgcctaaggggctgaacccttttgcacttcacttcctcccctatttatagcanaataggggagatgcttgccgcccagctcgcccaggcgagcatggttgcttcctccataagcaacagccttctggaggaatnctctggagggcccaagtgggcctggntgctatttgcaccccctttttactaatacaccccc

SEQ ID NO: 32967 - DNA, 417 bp, Glycine max
  unsure at all n locations
ntgatcttccaccaccgccaccaccatcatcttagatctatatttttatattaataagaccttgaatttcaggcctggattttggctaaaataataatggaattggaccaattaacaatttccctatttgcatggaatgtttgaacaaatataaagtatgttatttgactatatgggttttatagataatctatttatgattgttgcttcatggtttggttgttagtttctcaatgaatgttgtatggatgtgtagttatatttgattatttcaaatttgttacgcactttggctctttgttgatgccaaaggaggagagaaatgggattaaaatcaagaactcacatgagtaatcaatntaattttaagatatgcacaaattcaaaaacaaagggggagaatctatgtgagtgatc

SEQ ID NO: 32968 - DNA, 326 bp, Glycine max
  unsure at all n locations
cactnctctacatgataaatgagtacaaccatttgtattcttgcagggggggttcctaaattcaaagaacactttgccttcttacaactatctctattagagaatgatatgcaaattaacaagtaattttcttctattcattagaagtgaccactccattaattgtatctgcatgttatagaatttgtaattcatttgtgttcttgaaatattattggtaggttataagcatcaattttggtgtagaaaccaaggtgtttttttttaaaaaaattgtctattatcctcttttagatgcatcctcattttttaaattgagcttatta

SEQ ID NO: 32969 - DNA, 300 bp, Glycine max
  unsure at all n locations
tcgattaccctgtgtatttctgatacgttggannattcaaatccaatntggtgaagagtcancaactcnttcataataatgcacttgtgtagatcgattacatgaactatggtagatcgattaaccagtgataactctttgaataaaaggtcaaaagttgtaactcttgacatgattttctcaaggttataactcttccaatggttctcttgatcagacatgaagagtctataaaagtaagaccttgacttgcattcaatagaactttttacaactctttgacaattttttagaacttct

SEQ ID NO: 32970 - DNA, 488 bp, Glycine max
  unsure at all n locations
aaaaacaaaggacttttagnatgtcnnnttatatatattacctgcgatggggctaaatcggataatcacagcgaagnnttagcctcgttgtcanacagnaacacncacgngggggggccttcgatgctatacgctctatttcgaangagttcaaaagtgcacccctcgaagcgttttatttcctatttcttttgggagaataattatagtcgtgtgcgttactactacaaattcgctttctattgactaacggaaggctaagtctccagggttggtctctcttcaggatcaaggacaactctctatgacgatgtattattactattaaattctgatcagattttcccctgcaccaattactctgtatgtgtggctattaattcatgcatgcctagtgcttgactaatgagctcagtgcctaaattacattcatgctcaatgatcgtacatgattaattggcgtatgtgtatcttgaacacatatagan

SEQ ID NO: 32971 - DNA, 334 bp, Glycine max
  unsure at all n locations
tatcttgtttaatggctagacatgatacatgtcagggcttggtttggttcaaggataaaagggatgccccacattatttccatgacacanatgcaaaaaatgatgatttggaaactttatgcaaaactggtcatgcatgcacctatgcggacactcaagtgtcaaatttttatggtcatgtgatgctagggctcaggattcatttctctatttagtcaacccacgcttccaaatatgttctttatcaattgtgcattcatcgagtcatttgggcgttcggaaaattttacagcatcacccttcagtgataccacattttttaaaaatggtttga

SEQ ID NO: 32972 - DNA, 325 bp, Glycine max
  unsure at all n locations
cacaacatcctccttcgttgtttcctttgttgccactaccacctncttcaatgagcgaaaattctcaaattcctcctcatttcattccctatttgccactccctccaccaccagtaacttataatcaatccccttctaccgaaaattctcaaagatctcaaacttttcttcaatgtcacaaaacacctctatcgcatttcataagcctcccaatagttatattcgtgcacaaactccttcaaatgaggaagttgatattacaatagaggaaggaggagggagttctacaaagaagaaaaagggaaaacgattattcttttcaatt

SEQ ID NO: 32973 - DNA, 367 bp, Glycine max
  unsure at all n locations
ntcaccagatcatataagataaatncattcatccaatctgtatatanntatcctccaaaatggtcaaattctctgccctatatatttcaaccctttccatcactggcacaggagtgaatctttctcatgtgcaatattaaagttatattgtcatccattcctcacaatcagaaaccacaaacattgccatatattangaaataaaaaacctaactcatactcaaacatangcacatcacacaacaacatgcaatgtcatctattaaaatagagcatcatcaatgaaaataataaaggaccatanacctccctacgaagcgcgtagacaatgcaaatgataacccttgaacatataanaccccaaatg

SEQ ID NO: 32974 - DNA, 389 bp, Glycine max
  unsure at all n locations
agatgaggaagtgtagaagggtgagaactcctgcttctantctttgaccacanagnggtacctagagatatgtcgcttgagatcaggacaccttcgggacgtcaggtggggtgctattgcccaataccaagcttgaccaatcctgacccaacccgggcatagtcggtcagtgagaacctgtgatgtacctaaacatgcgaagctcctgcagtcaacagataaaaggaacaaagaccacaaatcanggaggcttgtggtggctggccanctgtgaattatgtgtgatatatggggtgtggcctctggtaatcgattaccaagggtgggtaatcgattacaaggcttnaaaatgaagacaggaggctaagatggtctctggtaatcgatta

SEQ ID NO: 32975 - DNA, 254 bp, Glycine max
gtccgtggccaaatgatggtggggatggtggtaggcgtaattgttaacggcggaggtaaggtactacaacttcgatctagtttttttccgtataaaacttacaaatcaataatccgtaaattatataaaacttatggattatcaatccgtcaattatatataacctacggattatcaatctgtaaaaagacaatccatatgaattatgcgaattttcagtaatccgtatagtccatacggattctcaatccgta

SEQ ID NO: 32976 - DNA, 381 bp, Glycine max
  unsure at all n locations
aggatctttgctantcgccttaatatagcttgctgttaaataaaggtattcagaacatattgtttttaatgggtttcaagcctggaggcttcaaatttatattgaaaggacctctatctataattttggactttatgaacaaaagaaaagagttgtgtacatatacctgtcctttcactgcctgtgttatttaggataggctaccctcctttggcggtggagctttcaaaaccctaaacctcagttggcttctcaattggacatgactcaacggggatagggaagcactgactcacggagaaggctgagccactagagcacacgtcagcatcgagcaactgtaatcgatactcagaggaacacgtgtaactggaactcgga

SEQ ID NO: 32977 - DNA, 384 bp, Glycine max
  unsure at all n locations
accttctgaggttgccctattgtgtgctgtttttttttttagacaaattcccttagcaatcccncaaattaaggacttatcataactcgaaacccttatgctttcttagaaccctanaacaacgtcaaggatatcaaaattaagctcaggggtttattcaaacaaatcattattacttttggctcaacaggggtgcaagggataaattcatcacaggttagctttttggctgagtggctaaaataaaaagaacatggccttgatcatatccaccttatgtaaataatctaacagtctaagaatgatgcaaaattaataatntataaacagacgttctctcataattaagttcacacagctcacccggacaagataaagttatcg

SEQ ID NO: 32978 - DNA, 108 bp, Glycine max
atgtctaagcgagaccttacaactagggacagctagcagccaaccttaacactaccaactctcaagaaaaccactcatattatccatctaacatcagaattacaatac

SEQ ID NO: 32979 - DNA, 143 bp, Glycine max
ctataaaatgcattaaatatgataaaatgggacttgtactcacatataatattagtttacaaaggtactcttcaggaggtttttgaaaatatattatacatttaatcattagggtcttactatgtgctccagtatctttattt

SEQ ID NO: 32980 - DNA, 469 bp, Glycine max
  unsure at all n locations
agaaataccttttnccttagtangcannccnaannananattacgcctggcgccactaaaanagaaggagcactggagcggagaatttcttttatggtngccaancnggcaaatggatggtgaaggaatggcattgaccatatcaccgggagagtgtgaaccttaaattttgattgacacaactatcatttaagacctggatctttggcatggaatcttctgaaagagtggaactgaattgtatgaaaatgaagatgatgaaggctatgtttgattgtgatagcacttaccaaaagctgacctgtcttgaataataatccctcgacccagtttgagctgaatgaattattgatgattgaacctgacctatcagtgtatctctactacctgattangtgtngagagctcatcaaggagcgtggtcaagcaattgtccaattggggagaatatcaggaaattattcaaatg

SEQ ID NO: 32981 - DNA, 327 bp, Glycine max
  unsure at all n locations
tttggatgataccaaggatgatgacaaaaagctcaaaagtcaagaccacttcatgttaacaaatatgatgacttcaagattcaaagaatgagttcaggattaaatgaagagtacttcaaggttcanaaggaaatttgatttcaagaatcaaggagatttgatttcaagaatcaagaatcaagattcaagattcaagtcccaagaatcaagatcaagattcaagacttctcaatcaagataagtattaaatnttgttttcaaaactgagtagcacattaattgttctcaaaaaccctttaccaaagagttgtactctctggtatcgat

SEQ ID NO: 32982 - DNA, 439 bp, Glycine max
  unsure at all n locations
agggcgctgncccttgattcctgancnacattntanatactccgctccacaatcccantnccttgaataggccttctttttttttttcccagtggagtcgccaactgtcgcaacgtgcccttctcgggcgagcgaaggcgaggctcacgggtgcgctttccaaggaggaaagggtgcggagtctccaccacgttatttgtgggaacgtcggaaaaccaaatgaaaccggcaanatgaaaatctaagncgggagttgtattacgcttgagaagtattacacctcttacttttctcgaagacacagcctatttttagaatggggaaatgtgtatctaactttattcttttatttttgaggcgacaaagcgggctttgctctactaccctctcaagaggagtcgactactagtcttctatgctgatagtgatctttacttag

SEQ ID NO: 32983 - DNA, 371 bp, Glycine max
  unsure at all n locations
cttggccgagaagaatggatatcctgcaattaattttccatgttaaacagtctgaaagtaccaaatatttcctatcaatattcagggttcaagacacataatcatggtacctcaactactcagtggtatatttaggttaatccatgcaaaggtgtccatatctaactaataaatcaaaatgtgaaccacaattggcactctaataatggttcagaaagtttattggatctaagggatctaaggataagttatgcattcttttctttttcaacacttgaggcttgtgaaataataaatgttcacttctgctttactctttcactnggtcatgtactatgcatttgctacttatttgtctacttattggagcg

SEQ ID NO: 32984 - DNA, 373 bp, Glycine max
  unsure at all n locations
ataaaactcagctagccaatttcattgcatcctattatattatgatctttncggagttttctggtaactgggtaggttacttcttcaagtaaggatattacagtttgaagtaggtgtagatatgttttcttctactcctctctttttatctttttttatgtgtgcgtgcgtgagtgtgtggcatgagatcctctcatatgttgtcacttatcattatagagaacggctgctctagaaagatcaattagggagaaagttggatggcagaaattcataaaaagaggagtgcacacactaaggaagctacagtaccaggtttttcttttagccgaagtttgtaattgccttgcaacattgtattatgagacttgat

SEQ ID NO: 32985 - DNA, 249 bp, Glycine max
  unsure at all n locations
ctttttggccacattttaaggagtccattattcacttagaatcaaaatttcagccaacaattcattcaccagaactcaaattcacaatagacacaatcataaggaaacctaaacgttcaagaaaaggatcacaatcaaagactctccaagaattctgcatgaacatgttaaggactaattaacatgcaaagatttgactcanataaaataataggctaaaagaatttcatacactcatgaacaaatgag

SEQ ID NO: 32986 - DNA, 363 bp, Glycine max
  unsure at all n locations
actatgtctcatttttccttacgaacgttctcttgcacaagacattctattaactaagaaaaatgcacccatacataatcaaggcagcttcattacctagattatttacacgtacttccaaggtgtatttgttacttacatcacacccatctccttggctaaatttacatacatgcatactcaaagcattttggggtaccaaaaattgcacatgtgcacatcttggtatttctaatacctatacatacgcaaacttcatgatgaatcttgactatcttcacanaaaggtgctacatttcatgctcctttntcaagttttgctacttaaagccgcatgcgaattcagcatatttcctttgctga

SEQ ID NO: 32987 - DNA, 431 bp, Glycine max
  unsure at all n locations
gctttcnagtttctggtntctgaacctgaaaacttgtgctttcatctttcatctcttctccctttgccaaaaataattcgccaaggactaaccgcctgaattctttttgtgtctctcttctcccttttccaaaagaacanaggactaacggcttgaattcttttgtgtctcccttctcccttgtcaaagaattcaaaacgacacagtctgagaattcttttgattcttccctttcccaaattcaaaagtgttcaaaggactaaccgcctgagaattattttgtatccccattcacaaagtatcaaaggtttaacagcctgagatctttgtcttaacacattggaggctacatcctttgtggtacaagtagagggtacatctactngtgtttgactgacaacaagacagggtacatctcttgaggatcattc

SEQ ID NO: 32988 - DNA, 344 bp, Glycine max
  unsure at all n locations
cttttgagccttgtttccctttccttgttttgaagctcactacaagccttaagtgaaaaaccatgatatcaccatatccttaaggatatttggagctctggaattgttttgcgaataagtgtggaggtttttgtttcattggataacatgtattgttggccatgcttcatgatatatnttgagccatacttgatgcacattgcatattggttaaatgttgggcgtgctgaatatgatgctgtttctcanaggctacaaaaaaaatcgaaaaaaaaacaaaagcagtaagttgagtgaatagatcttaatgacacaagatgatagactctggttcactcttatgt

SEQ ID NO: 32989 - DNA, 286 bp, Glycine max
  unsure at all n locations
cgtaacgtttccgtaagtaattacacgaagattctcgacagttcttcaagatccatcgtttgttcttcgttntcttcagtcttcaacgggtaagtacctcaaaccaagcttttcaattcattatatgtacccgtggtggtccacattgtgtttcatgtattntcattttcgttttcatttactttntatacccctttttgacgtgcttaagccatttatttaagtcatttctcacctaatctaaaaataaaataaatttccaccgatcgtttgaattgataatccg

SEQ ID NO: 32990 - DNA, 381 bp, Glycine max
  unsure at all n locations
ttttttgttaggatgcttcaatggaggaaaagaaagagggagagaaagatagaggggggagcacgaaattgaaggaagaaaaagggagagaagttgaactctgagttgtgtctcacaagactatcattcatcanagttacaacaagtgtttcacatgcttttatttatagactaggtagcttccttgagaagctttcttgagaaaacttccttgagaagcttctctgagaaaacttccttgagaagctagagcttatctacacacacccctctcataactaagcccaccttcttgagaaacttccttaagaagattcctaaagaagttagagcttagctacacatacctctcctatagctaagctcacctccttgagatga

SEQ ID NO: 32991 - DNA, 405 bp, Glycine max
  unsure at all n locations
ctgttngatgtgtggaggccttgttagtatctcattgtaaatagggacactatgcacaatgttgttaataatcccatctacatctttagttcctattcctaacatatacgtctntatacgcacttccatgagatgttatngctctanaggttatcttcaagaggtacataatgtttatttctaaaatcattgtcgaaaaggaatgtatgaaacgttnttgttccaacatangttaatatggcttagcgtatggtttcggtctcttctagttcccgtgttggtggtcgttcttcgtctttttattcttgatctttaagtttgatcttttaattattgccatctgttccatattncggttatgtnggttttacttttgtgatntacataaatcttgctggtatgtgt

SEQ ID NO: 32992 - DNA, 75 bp, Glycine max
tcatgatgacgattcaagctgatgcaagcagtcttgatgtttacgtagatgatgacacactgctctaagagtgat

SEQ ID NO: 32993 - DNA, 113 bp, Glycine max
ttgttgttttcttgacaataccaaacaaaactgggaatgattgcgagtcttcatattgttccggtaaggcacaccgtcctctactacttcaactactgttagatgccacttgt

SEQ ID NO: 32994 - DNA, 280 bp, Glycine max
accagcgggacattactctgagggcataaatggcatataacctcctcccatgaatgcagacatcaatgtaaattgagagcaagcttatgcgcatattttcttacaaacgttctcctgcacaagacattctattaaccgaaaaaatgcacccatatacaatcaaggcagctgcgtcacctagaatatatacacgtacttccaaggtgtatgtgttacttacatcacacacatgtccttggctaaattcacatacatgcatactctaagcattttgggtacc

SEQ ID NO: 32995 - DNA, 485 bp, Glycine max
  unsure at all n locations
atctactggnttgattgttcatcgaacctgataaaagcacggggcaactgctggagcgtataaaggggacaccaaaatgctctttttattagccgcaaccgggggggggtgaggagcttcggcacactctcntcaccaccctaacgaaattgaccatgtagtgcccacacagactcttgcacacccacatctatccggactgggacaaatgaaaagctcccactggcgcggaaatcaaacaaacgcgaacgtaaggagcatttgagcccgaaaagcactctatgttgaagaataacgcaaattagaagcgcaacggcggcatcacacagaccgggttgattcgtcataaagtgaggggaaacaaccaacaatctgtgcgaataacagtgggaatggtaaagtacaggatatgatgcctttccaacctcctggagaaccggcggccagagttcgccgcgcagatacacagagacgaccgcatcgcg

SEQ ID NO: 32996 - DNA, 252 bp, Glycine max
  unsure at all n locations
agcttgcanaatttatcactctatatngcaaacaggttcaccacgagaaccttgagcctataanttttgcaagatagaacaaccctaatcacccatttacaaactcctccaccagcaaaacgattccacattntccatttccccctttttatcacgacatcaaagaaaatctaagcgaagaagagaaacaagaaaggccacaaaacaaacttataagtcgaagcgagaccttggtataacagagctattcat

SEQ ID NO: 32997 - DNA, 318 bp, Glycine max
  unsure at all n locations
gggnncgagacttagactatgcaaccgcccnaancgagaagatccnccttttttttttagacaggaggtggtctaatcacctggaagcgcagagtgtgttttcctagctctatctcttccttatcctgttacgatttgagattcgatgctccaaacccccaagtagctatattctcaagcccgttaggacctacgcttgccaaagattataaacatccggcctcaggaccagatccccaactaactctgcctctctcacgggcactatggcctatagtggagatctgcaatttgcctttgaaagctgagatagacagc

SEQ ID NO: 32998 - DNA, 389 bp, Glycine max
  unsure at all n locations
ccagagagctagagacntctaataaacccaccngggaggggaaaacgggatttgttattgagtncgacgagaagggtttattaaaagttctctctacagagatatatctagagcacacacaatacaccatacaaggcacttagagtagcgtgaaagtatacatctcatacctcttcaacttccttagagattgtcccaatgtggtatgtattgtgctccctattatatactaggctcccataagacctttggctcaaaacgttatccatattctctacattttaacccggttattataaaacatcttatggcttgatatggtcacattggtcaggcttgaaatctatctttatagcggagatgtattctcagaaactaagaccttttgc

SEQ ID NO: 32999 - DNA, 227 bp, Glycine max
  unsure at all n locations
atagtcaccctcgatacaagaccgagatgactatagagtagtattccctcatatttgatctccccatatcctacaacttagtatatgtgttattatcatttcgaaatgttgtgacatgtgtttcaataaatccaacgaataaaaacacaataaatggtaaaacaaggattctttgataaattatnttcacctcacacgtagatttataacatgttcttagttaagta

SEQ ID NO: 33000 - DNA, 408 bp, Glycine max
  unsure at all n locations
aataaacaaccacggactctattgaaatttggacctttataacttggacccatgctactaatagcatcaatcataggtngataatatgctgaattaattgcattaaatggcacagaagcatcaatcatccactttgcaatggcaaggtcacatttttctatgactaccttactttgcaacccactctttaaagacgttgagctctacgggttgttttatgcatgaaatactgacctatgcgaatgatgttcttcccctatttaggtggattgagattacatactcttatagtgctctgcacttcatccacaactattctcatttgatcttcacagattcattactatccacatatgcctctcgacatttcttctcttgttttacgtcaatcaagattatgcttcattg

SEQ ID NO: 33001 - DNA, 498 bp, Glycine max
  unsure at all n locations
gataaagaatcgnnntgnntgtagcntcggancntggttattacgcggaggaactgatcgnggtacatagaacacaattgncttataanaaacggacccggggagggttgaggttgggccccttgtgaacccacacaaacattggcctttcattgcgcaacctggaaccaatggaccacccggagcttaaggctgcaagaattaccaaaaaacggcccgaccctagcggggaaatccaccccagcncaagcattatgacccttgcagccacagatagcaccttgagtggaggatcaacctaacctcagaatgcccanccttcacaacaaccaacgcaggctgctccttcttacaaaaggctgtggccgagcgaacatacattcttaccaatccacaacagaacaacccagaacaggcacagtgaggcctccacaccttcctcgagacnttgagagcaatgatatgcgaacatcagttcacaggaacagagcttatcag

SEQ ID NO: 33002 - DNA, 559 bp, Glycine max
  unsure at all n locations
nngggggcgcgccgattttatgatacctaagcattgcatanccgttanantannnangctncnctttcancanagagaagagaaagatgaaggatcgaagattttcatttagtgnggatgtctcctccacctctagaacctcacaatcactcataacctcatctcaagctcttaggacgacttccctcttcgagcttcgttctctgaanggtcttcgtacagcaaaaatctctcanactctctagaacttggacctttctctctctagaaatctctagacatgtagaagcttcaaaanaggccaaacctcccatccannatctgatttcacgcttaaatangtggcttcgtttgtgcttgcgcgcttatgcgcactctgaactgcttagcgcgcattactgaatntcngcttagcatgcgtcttctcgctcagcggatggactcangtggtgcgctcagcnggatgaaccctcgctcagcgaacatgcacatctcatccttcttncagctcttccttgcgctcaccagaagtgtgcgctagtggatgctcgctanctag

SEQ ID NO: 33003 - DNA, 368 bp, Glycine max
  unsure at all n locations
agcttatataagttgattcaaactntctaacttgtttttcttgttttaaaaatcaaacaggtcccttaagaacaaagtttaaccaagttttcaagttatacttctattgtatctattaagcacataaaatgaatgaccaagaaagtcaaattacttgtttttgcatctgcaaccatcgcggtccataataatcatattgttgtccatagcccgtatgtgctcaaggcaattacagaacacaacattgataattcaaccaacatttctgtacaaaagcaatttgaattggtacataagcaaggcaatatctaaacctacctctctgggcacaatattaacaaaatcaattcaccactataatattcatc

SEQ ID NO: 33004 - DNA, 367 bp, Glycine max
  unsure at all n locations
tagcttgagatgcctgacctttagcaaacagtatgtattcttctgcgaacagtaaatgagaaacacgagggccatttgaggtcaacttaactggcttccacctcacctcccatcagacactacctaagagatcatatcaccaagcctctccatacatgatacaaataaatatgggaacaatgggtctccctgacgaagccctctcacaggaataaaactattttttgttctacctccattccacatgatagaaatagaagtagatgacagagcatgtataatcacagacataatggtattatgaaaataacaaaaatnaaaaagagtttcccaccaacaaaatcctagttcacacgatcatatgcct

SEQ ID NO: 33005 - DNA, 496 bp, Glycine max
  unsure at all n locations
taacacaacacaacagatcgggaagtagcctaaccaaactttgatgcaatggcttttnncncnnngnncgggagggtgtggtgttgataacatcccaccccgctctccaaacacaaactatgataactgttttgtagacatccggcctatttaccagtgctccacacagcggcactgatggacgccagtaggctcgagttacttcttctatgcttacacccctgntataagaacatactaactacgatttccncacccactgccggatgtcctcgaaggcaatgacgattacaaactctgtgtcttctcacctacatcgatgtacactaaacccgtgatgtggacgctattactccaaaatcataccttcgccgattctatgtgaatacagctctagcgactttctagtctcatcaattcggctaggggcagcgaaagactcacttaccatggtgggatctaatacatctttagaccccgcgctagctacctgtcg

SEQ ID NO: 33006 - DNA, 424 bp, Glycine max
ataataatagtgggtgtagcggtattttatcacaccttatctcatccagagtttatactgtctagactatatcatattcaaatcttattgcgtccagatcgtatgtcgtcacgtcttatcttatcttgtccagacgttatgtgatctggctcataagtctggacttaaaatagatttgtaagtattggggctgaagacctatataacagcaccaatgtgataggctagggaggttttgtccggagaggagaaggattgctgggttgtaggaattcagcgtatagtactgtccatgcacactgctcatggagaggaaaatcgtcgttgcgaacagcttaatccatactgtcgaaatgatgtcggtgatatgcgtagggtacttcgcgcgtaacgacctgaatcataagatatggggtcgctatcc

SEQ ID NO: 33007 - DNA, 527 bp, Glycine max
  unsure at all n locations
nagggaggcagatgactaggnccatgcancancgcgacacntnaatnnactcaacctnggcacgatntatgngaagcacagtgactggagcatattttgttatgaatcatccaacataatagggagcgaattcatagtgacccgttagtacaaaacgcgagatgactatctagaaatattcactcatatttgaggtcgacatctccaacaactctagatagtggttatgagaattctcaggagaatggagctagagcccatgatgaacttccaacagaatgcgaagcctcaacagatcatgcgctcaccactatattggtgatatctcaaaaggagcaacaactacatagtctcttacagattatgcaccaacacgctttcttgccatgatggagcctaaatttatagaacccttggagtgaaactgaaccttgccctccataaaacgggacaagtcgaagaggcaacgtggagcccgataaaacctttataatccgtgctcgaacaaaggggttttaaaataatcn

SEQ ID NO: 33008 - DNA, 169 bp, Glycine max
gtcatagcatgaacccacgggcaaagcatttatgcccgggtggcccctacaagatttacggtagccacatcgtaaagctctacaccacaaagaatcaaagctctttggagtcccagatctaccccgacaactcttaacgcccaccagacttcaccccaaattctacccc

SEQ ID NO: 33009 - DNA, 497 bp, Glycine max
  unsure at all n locations
gccgttggatctagtactnnctgannaaccaacnnaaaacgaaccnagattgaagagacggacagacttagattctatgtttttcctccgcggacgcgggagccacgtggaccagtgtgtaacttcttatctctctccctaattagttacggggcaacaaccgcgtaagacatctactgttgtagccgcatctatctgcgagcggatcttgcgttgctgttgatcactcccatcagcacatgagcaataccacatacaaccattctaacaatgagctgagtctccaaaagacggataccacaacgcgtcgtcttcggcctacaatactacggctgccgccaccccctatgagctccacaggacctattgtgacggcaatggcagtctcctccaatcggtcccctttcacaagcccttttgcaaacgagcataacctttaactcatgatctcacagtaacaggtcttgtaatactcccaccgcaactcagcctgaccc

SEQ ID NO: 33010 - DNA, 323 bp, Glycine max
  unsure at all n locations
ttaaaagtcttattaattagaaaggtggagctttaggctttaaaaaagcctattacgcttgataggttggtatgtttatataataggcttcatgaacgtcaagaaaataatgtatataatgatacttgaatttcattnttgtctactaaaaagatcataaatgggtctttntgaacatcangaaaataagttacccttattaagaggtttttcttttgctataacatccaagaatntaatgcaaattgaggataaaagatagtgacgaaacaagtcatgagacatanaagcatcaagatctcagtcctagccggatgatgatg

SEQ ID NO: 33011 - DNA, 332 bp, Glycine max
  unsure at all n locations
acttgggtttgccttgttttatgnacnntcaganannnggnatagatacacattttnnttgcccaacccccgcgggtttaaacaaaaccccccccccccacnnncncaccccaccaaacacaaaaacaacacacacacaagaacaccacgaaaaggcgatttaacgggggatggtgtaataaaagaggagggggtgaggaacatgtggagctggggtaatgtgcgaggagatattacaagtgcgggtatgaccagatactaagatttaaaatatatatcgggggtttaggtggaccggtaaacggataagtggagattcaagaatggggtgg

SEQ ID NO: 33012 - DNA, 382 bp, Glycine max
  unsure at all n locations
agcttctccccctattttctatatatagggggagaagtgaagtagagaaggggttcagccccttaggcacttctctctctttcgaatttgcttagaaaaattgtttccgtgaagaanatccaagtcgaggcgcttccgtaacgtttccgtaacgtttccgtgagtgatttcgtgaaggttttcgaccgttcttcgacgttcttcattcgttcttcatcgttcttcagtcttcaacgggtaagtacctcaaaccaagctttttaattcattctatgtacccgtggtggtccacattctggttcatggtatttttattctcgtntcatttactttttatacccccttttgacgtgcttaagccatttatntaagtcatttctcg

SEQ ID NO: 33013 - DNA, 556 bp, Glycine max
  unsure at all n locations
cgcccccgcaggacggagggccttgnagnagnacccctngctnnactatagannacnncgaccgnnngacgcgnataagtggactgtgtggcaagtcancaaataatgngttatactcgcgaatgggacggacaacatggaagggtggatgattcgtcaacaagaagcaaatcacaccaaaggcctcattttcgcttcaagtactaaatactaggattagcgttcacacaaccagagaccttgactccaaaactctcttaaagatcaaccctctgcctcacaatgaaatgtgctctagtcattcacagcacgtgtatgcgatcaccaatacatgctatcgattacacatggtttgaaagtgtgcaactcgatacacatcatatgtactcgactacaagagactctgaaacgtggtattcaattctaatgaatgtcacactgtcaagaaaacaactgtgtatcgatacactattctgtatcgataccaagagattttatgatatcgcaccgcacatcttcattaattggatgcctcaagctataaagtactggccan

SEQ ID NO: 33014 - DNA, 389 bp, Glycine max
  unsure at all n locations
cacatgtgngactacgtggcggtcgtgcgatggtgcacaacaagtattccacatccacaatgcgcgcataatcccaccatccgctgttgcccacctccatctgagctcacgtactcccacgtagcccatattcttatttctctcaacaccgggtccccatcaatcctcccaagtttctccaacatcaaagtaatacaacattcacacagcacatgctatcgcagccaagcataacagggcaaaggcagaatactctgcccaataacaccaaccaaaatcacagcttttctcacttaaagaccccagtaacaatttcttcgatccaattcgttaaccgttggatcgactccaaaattgtattggaagtctataatgtatacgcctacatt

SEQ ID NO: 33015 - DNA, 440 bp, Glycine max
  unsure at all n locations
cccgttgattcgtagtaactgaacatccaacngactaaaactgagttgattatggagagttgatttcttttgtttcacagagcggcgcgtgtacactaactatcaaactcttgccttcgcaaggaattggccccaacgagcttgccttcaaagagttcaagaatggacaagtaacccactgaactagtccgctcccgattatgaccgtaccgctcacgagcgctgacaccaccactcttcaagcctcctggatggactttctctgggacgacactcccgcttaggacgcgagttactgtttccagaggaataggcgccgacggggcatactggtcttcctggcattttatcccattaggcttatttatccatgttgccatcaagaggcgccgcatgaatccggaaggcgctgctccttatcctccatcccactctgatcc

SEQ ID NO: 33016 - DNA, 371 bp, Glycine max
  unsure at all n locations
agcttgngacagattgcattagattatcagaagctgaccacaccatggcattactcaatanaggctagttcatattttctatggtgaagtgtcctcacataatgggacgagttgtgatgctacttctggnggaaaccttcactactggaaaaagggaattctatgtcggttctacaacactttntaagacggttttgaactgtctttgttaccaacgtcgtagaaagtcaaaactttctaagacgaatttctgaaaaaaataactgtcttagaatgtattttttttaaaaaaaatanaataaaaattgagaattctaagatgattatctggaaaaccatcttagaatgtctacaatctaagaaatgtttct

SEQ ID NO: 33017 - DNA, 461 bp, Glycine max
  unsure at all n locations
ntttagggaatccgangatgaccntnattccaacngcatgacttatacccccaacatgaaaaaattttttacccataagcttaccacgcgcgtgataaataaaattcaattttaggtccaatcctttaccacaaccaccgattaaaaaaacnttgattcttggagaatgacccaaacggtattggtgcgtactacattataaaacaactttgggggtcacgagttggtggatctgacattccacaccaaattttcctccaaatagctgatacgtaatcttctcttttgaacatgttgttgtgtgtgttgacactctgaactaagcacccaacaccatacatatacagaagagtgaagagaaatcagatattttgtagagagaaaaaaataaataacaggggggttttcttctttcttcttggtcctttcagattggtcccacaacactttcaggaagcaan

SEQ ID NO: 33018 - DNA, 400 bp, Glycine max
  unsure at all n locations
agctnctacttatgtggcttgttggtgcttcttcaccttcttgtctgcaacgcgaatattgaccattgttcttccttcccgcaatgcttcttttcatgtctgcctgagtgggcttataccctaaaccatacttcccacgatatccttgagtatttatcaggctagtaatgccgccgttgttgtttcctaaacccatcccgggttcaaaaccgttccccaacataactcgggccatcattaccactgcatcggacagacaaagttgcccatagagggagtccacggaggagatgctgaccacctcacaagactggaaagcagtttctaacgattcttctgcggcttccacataaggcatggaggatgggcagcttaccaagatatcttactcgcctgacac

SEQ ID NO: 33019 - DNA, 488 bp, Glycine max
  unsure at all n locations
gcagtgatgatcctacgaccctganacgcgaacnnnacanannannncannaatgacccgctaacctagaatantattatcttancgctcttaaccnanggatttagaagagcttatgggctgagtgcaacttgaaatcgtgcaacccacaagtcacccctaccgcccaccatggcatcccccttttggtctccagacaggctgatgcttaggtggccattggaccctttataccacttgaactaaacctactaaagccctttagttgataacgcacaacatatatttgtcactcaacgtacaatgattgagccatatataactactcacactctaaaatgaacatagtgtgtcattaatcctctcatttggcatatacaactacaacttgactgtctcttgaactgggctcgtttctatagatgacacacttgtgagagctncttgctttcttgtctagcctgtgaagactcagccttagtgatctt

SEQ ID NO: 33020 - DNA, 274 bp, Glycine max
  unsure at all n locations
cagacatccaaccatactataaggacaattntcagtttcttctaaacttgataacttattttagccccactaatcctacaagagagaatatagttctttttttaaaaaaacacacaattattttcttccttggaagcctctttggatctgtgcacacctcagttgcttatcagttaccaaatgagcaatgacaataactcattgttgcaaaaattgccaaaacctctatcctctaagtgaattacaagacgcatgagtcaaacttcgctactcg

SEQ ID NO: 33021 - DNA, 334 bp, Glycine max
  unsure at all n locations
tctggaacggaggaatttgatacataccaatgcaaacacgattagactatcaactatctttgcaactcttgatagacgtctgataggggagaatgaacaacaagctattaagtggctacttccttcaagatcattgccttcctttattccttttcaaaatgtntctgttgaaccaaacttgaacgtctgattctaccctagtttcagaggacatcacatcttggaatggaaaacctgcaacaaagtctgaagaagacaatggatgttgggactcaagttcttgatcctaagatgaanaagctcanactaaagaagctaaatctacttaatctct

SEQ ID NO: 33022 - DNA, 361 bp, Glycine max
  unsure at all n locations
agcttgccttgctcatgatatatttganggacttatgatcactatgaatgacaaattccttgngataaaggtagtgttgccatgttttcaaagcccgtactaatgcatacaactcctaatcataagttgaatagttaagggtaggaccacttagcttttcactaaaataagcaattggatggccttcttgcatcaacacagccccaatcccaacatttgaagcatcacactcaatttcaaaagattattgaaagtttggcaacgcgagtatggnggcattagttagctnttgcttaagaacattgaaagcttcttcttgtttctcttcccatttgaaaccaacatttttcttgagcacttc

SEQ ID NO: 33023 - DNA, 562 bp, Glycine max
  unsure at all n locations
cgcgnccctaaagaagggaattgnngcangnatcccctgcgaanntcacatnnacnnaacnnnganctacttattgcttttgcacatggccagaanataagtctcatncatttatgacgnaactcctggggtgtactcatctatacaagcaagtctgcgtatgcatcaagtccttgactntcaagacactgcctgagcttcaacaatgctcggctctccaactgtcggacnactctcctttggtcaaaccaaacaccttgccaatgtctgacaacgttttctcctcgccatcctcaataccanatcttagccctgatatgcccctttcttttgggcttaagatatttagagggtgtgcacatgcatcctcattagctgtggtgagaccagtcacatctgggatctcaanttgctgagtctgcagtaatctcctgcaattggataacaatgtgatcaatctgcgacattcataatanntatgttgctcacananggcagaagggtctattctgaccatacccaacattctccacattaggagaagaccacgctacagaaattn

SEQ ID NO: 33024 - DNA, 286 bp, Glycine max
  unsure at all n locations
agcttgtgttattctatnttcctctcaccctccattcttacaaaaagcttttcaagagacctactattggtgactgtntttcaagagaaggtcttcttggttgaacactgaacacaagggaccaacattccttggattcattgtaagaagcgggatttgcttcttggttgatcactggacacanaagaccaacgtcttttgggttcattgcaagaagtgggtacaacttcttggttgttatcactagacacaagagaccaacgttcctttgggttcattgcaagaa

SEQ ID NO: 33025 - DNA, 307 bp, Glycine max
  unsure at all n locations
ataagctgaaccatgttatcaataaacacatgttgttgtttattcagaacatnagaaggnatctgctttatcttagtgagagtgattctcctanattcttgagtgattcaagaacacctcggctgtatcaaaggactttcacaacctttgtgtgttgccctcgctggaaagagtgattctttccttcctttcatcatcacccttgttctttcacaccacaattccagaaaatccacctctgcccagaattatctcgtggccataactcccattttacgcactcaaattaagtgattcttgagcctaa

SEQ ID NO: 33026 - DNA, 329 bp, Glycine max
  unsure at all n locations
acaaganaaaaactagnatatgagtacatggataatggaagcctacactcctttatttttggtacgtaatatgaagaatgctttcataattcgattaagtggacttgcatgtttgtttgtttgttttgctttttaattccagtcacaattagcggctctttaatcttgaatatcttatattgaatgaatagcttgctttgtaaaatcacagataaaatanagggtaaatttctggattggcctcgacgcttccacataatatttggaatagctcgaggacttctgtatcttcatcaagattctcgattaaggattatccatagagatct

SEQ ID NO: 33027 - DNA, 296 bp, Glycine max
  unsure at all n locations
gagagagaccaatcatgagcattaatatgttcttgaaataggagttagctgtttgctcaaagtccaaaagaaacttgtctcagcgtctatgcganacanagaccaacatgttagccatcgtcagncagtaccaagaagaactaaatctagccacgacccatgagcataaagtggcgaatgagtatgcccgagtatacgtggaaaaagaggctagaggaagggtgatcgactcattacatcgagaggcgacaatatggatggaccgattngctcttactttgaacgggagtcaagaa

SEQ ID NO: 33028 - DNA, 323 bp, Glycine max
  unsure at all n locations
agctntaaccttatcgtctctcacagtctttagatttgggagccaatccaatccttgtgttcggactctcagccacttatgatagctgccgatgatcccattactgcttcccctaagctctctgtcctttcttcacaccgcatcacatgccttgtgaactccttagagtaccctcgcattggggttactgaaaccccgtgcgatgaaaggcgtgatgcttttgtctgatggcactcctctcatggggtagccaagctgtcttatggcgaggacgggattataattaatacaaccncttgttccatcaagggaacatttggaca

SEQ ID NO: 33029 - DNA, 357 bp, Glycine max
  unsure at all n locations
agcacgtgaagacatggcgcttagtgcaagggttgcacgtagncggtgtaaaacctaaaaattattctaagtcttttctgtccatcttttcacctaagcttaaaaagcccccttgttcactactaaacgaactgaaaaattaatcataatcataagcaactatcctaattacatgcaagagatacaaaatgacaaagagaanagggaaagactagttgggttgcctcccaataagcgctcttttaatgtcattagcttgacgcatcatcctgttatcctgtgtccaataaggttccaacttccagaaccttcttctntagtctttttttcttcatcacattgaccttcaaacaaaca

SEQ ID NO: 33030 - DNA, 468 bp, Glycine max
  unsure at all n locations
agcggcnnncaacnncagaagccgagcgttgcnagnccgatagananccannanttacananncacgctggngngtaaactgggctgaagttcattttagctttaactgcagaactgcagggtagtaggaattgactgtatgcactgcaatatgtctgtatttggtactaataaactgagatctaacaggtgtatattaaacagaaaaccttctcgaggtatgcatcaattgtataacatttgacagaatagcttctctcgatgacacttaaaaacctattttaatatatacatgacctctgagtctattgcataagtacttctgtcattcttagagcactaggtccacacgaatgcgataagataatgtcgtcgaaagagatatttgtaagaatcaaggatagtttactttgtataaaggcaggttagattaacatcaaatatggccttctagaaaattaactggga

SEQ ID NO: 33031 - DNA, 206 bp, Glycine max
  unsure at all n locations
taatngagatagtgctatcaagatcactttcgtctttgtntttcaagcacaatagntgtttgctgcttatctactatcctatcatgagtctattcacattcttttacatgtctgttcaagttgttggttccatatttattacttttgcatttataaccttggtcacaatgcttatatatagcaacatccccttccctattaaaatg

SEQ ID NO: 33032 - DNA, 287 bp, Glycine max
agcttgaacaaattctcataaattaaaattgctttgggctcagtgagactgactcgcttgcccaggcttattcaacctacaaaggctgggtggcttaaagagactaactcgcttagccaccaacaaaagacaaaaaacatcttagactgtggcctaagaaacacaacgcgctaagtgcggcatgctgacttagcgagttcatatgacacttaaacaaaacaggaaatttaaactctcgctatgcccaaggtgcaatggcttagcgagttcatacaaacattcatata

SEQ ID NO: 33033 - DNA, 261 bp, Glycine max
aaatcgcgcataaatacaccatcccctgttgcccacctccaactgagctcacgtactcccatgtagcccatatcctctgttttctcaacaccgggtccccatcactcctcccaagcttccccaacatccatgtaattcaacattcaaacaacacatactaccacagccaagataacagggcaaaggcagaaaactgtgcccaaaacaccaaccaaaatcacggctttttctcacttaaagacccccgtaacattgccttcg

SEQ ID NO: 33034 - DNA, 428 bp, Glycine max
  unsure at all n locations
agcttataaaatgttccactttctaatcatgtgaaggccaaattattatcaaacaaggtgggaaaacaattatcaataacaattatcaaatgtcacagcatatttgtttttgacatgaaagtacaataagcatggtgagatccaactagaatagtgataaggcatgagagtttcatcacttgtacatgacatgtaaggggatgagatgttcatgtgcagtgtattgttgcaatgaanatcaatatttgaattattatggtgaaaatcactgtcaaactctctataataggacaacattgaatgagtcaattatttaaaatgaaaaaaaagcttgaagatgttttaacttattttacaagtctcttgataccttatctaatagctatgccatcttataaaagatcactttgatcatgtcaggccaatta

SEQ ID NO: 33035 - DNA, 519 bp, Glycine max
  unsure at all n locations
nagcggcacgtgtacaatangcaancctaattcatncnnnccggacttnntggangcaaatggagaattttttttcttnaatgccnccctcagggaagagggcgttatgccttctccataaaccaaacatttatgtaaatttatagcanactcatgcgcatactttcttacgaacattcactcgcacaagatatttttctaattaagagaaacgcgcccacgcacaatcaaagcgccttcgttacctagaacacttatatgtaccttcaaggtgggtttgcgacctacatcacatgcatcttctttgcgtaattataatacatgcgtactcgaagcgctttgggtaccaacaaatggctacgcgcccattctgggagtttcatacccatactcacacaacacttttgatgaatctcgtgtgcccacccaacaaaggggcggcactatatgcgcttaatacagggttttgttcctataaccgatggcgaacctgttatatttcttgttagcaaactgcgt

SEQ ID NO: 33036 - DNA, 443 bp, Glycine max
  unsure at all n locations
gagagtgattcatgacccctgacatnaccncnagccaacaccggngcccagagagggaaacttgtttttntttaccaaaccaggtgtttataagaaaaatatccttcgcaacactttctaaacgaggatggggaattgtccaccaaaatgataggtaatgtttaatgaacttaaacaaccttttctttaaaacaacgtcttcaataaacttgggcaatcagactaaaaacagggaataacccatctagaaggatctgagctctacactgcaaatccgccggtatcttgggccttccaagaagagttctgcctacttacattattacgtagggcctgaaaaacaggacaaacacggggcttggctcttaacagccccaatccaaatataacgtaatgaaccaagaaccctggtgctccaccccactttgtattcaaaagcaacg

SEQ ID NO: 33037 - DNA, 377 bp, Glycine max
  unsure at all n locations
agcttgctactactatcttttcctttttgangatgacaacttctgagatcgagagacacacacacacacacacttgttcctagccgatcactcacataaatttccattctccccctttgtttttgaatgtatgcttctcttaaaattaagttgattactcatgtgagttcttgatttaatccccatttctctccccctttggcatcaacaaaaagccaaagtgcgtaacaagtataagacaatcatacactattaatcattcacaaggcatgcattgaagaatataaaccaatcatgaagcaagaaacatgactagatcagatatattaaacaaatcacatagtcatctaacataattcataattgttcaaacacac

SEQ ID NO: 33038 - DNA, 521 bp, Glycine max
  unsure at all n locations
gggagatggaagcttgagatcntcatnatcacacnngacgcaacgggancatacatgtggtacaggttttggtgtcnattgtcacacaagttggcactgccatggcgcataacccacatccctgtggccacttcaactgaactacgtactccaagtacccaatatctcgtttctcttaacaccggngtccccaattaatccctcttcaagccttgccacaacattgcaagccagaacaaaccattcanacaggcacaatgctatcacagccaagccaaacagagcaaaggcagaaaactctggtcanacaccaaccagaatcacagctgtttctcgcttaaagaccccagtaacaattcctttcgatccattcgttaaccgttggatcgactcgaaaatttaatggaaggctcttgtacataagcctacattgtgaccggtgggatctactagcaaacattcagaactcattctgcactagactttcacagccaaccaacacaagcattttcttgacttgg

SEQ ID NO: 33039 - DNA, 500 bp, Glycine max
  unsure at all n locations
gnnccctattaaccgagtcanganctnctgnnnatctgacacacnnangccaagcgcgacnaggnnnagnaaggagaagccaatttactttnnngactttttgacacgccggcataagggcaggagggnnttctccatctcatatcattcgcgcatcagcctcatcatgagtacgtcgaaagacaaatttctcaatttatcaaacgttcgtacgaaggctacactcttctatgtaaaatatctccaccttatcataatgcaactcactacgagtctgaggtagcgtagtataccgtttttggcacaacatcacgccccttggttgcgaaacacactctgtctgaatcaagctacctattacgaatcctgttttgtcgcgacgtgtgaataataaacaacgctctctcttgcctatcataatggatcagactccttggcgctacttcactgctttgtggaacttgcccgaatggccctgggttagaaacatttttggttac

SEQ ID NO: 33040 - DNA, 336 bp, Glycine max
  unsure at all n locations
ctcacagnnctttagattgtgggagcgaatccaatccttgtgttcggactctcagccacttatgatagccgccgatgatcccattactgcttcccctaagctctctatcctttcttcacgccgcatcccatgccttgcgaactccttggagtaccctcgcgttgtggtcactgaaacctcgtgcgatgaaaggcgtgatgctttcatctgatggtactcctctcatgggacagcccaactgtcttatggcgaggactggattataattaatacaaccccttgttccatcaaaggagcattaggacatacttcgcatgaagatagaatactgattct

SEQ ID NO: 33041 - DNA, 210 bp, Glycine max
attatatgccctaatctgactccgttgattagtatgacaatttgaattctggagagctgccgttgtgcaatttcgagcgtcttgatatattatgcgcctgaattggactctcgtgtcataagtatgaccatttcattttctcgagaccttccgttgttcaatttcaagcttctcgatatattatgcacctgaatcgtgacttcgtgtgac

SEQ ID NO: 33042 - DNA, 412 bp, Glycine max
  unsure at all n locations
agcttctccctcttttccaataaatanggggaggagggcagaacaaanaggttcaaccctcctgatagctgagaatcacttgaaattagtgagaaaaattgtttccgtgaagaaaatccaagtcgaggtgcttcctttcgtaacgcttccgagacgtttccgtgggtgatttcatgaagattttccgccgttcttcatcgttcttcgttcattcttcatcgntcttcaaccactaagttcctgaaatcgaacttttcaatgcattctatgtacccttagtgggccccacttgtttcgcatgcttttattctcatttcatttactttctggaccccctgttgatgtgctgtaataatgtatataaggcattntctcgcctaatcagaaaataaaatagaattctaccgatcat

SEQ ID NO: 33043 - DNA, 199 bp, Glycine max
  unsure at all n locations
cccgcgggtctctcctacacnaacccggaaggggtatagttcccgaaggggggtaagcaaaatttgaaacccctcgtttcaggcgtggaaatacccggacgctttggggggttcggggggtgattcggagatcatctgcggggacctgctggggttcgaaacgacccggcgggcctcaaggcctgcccaagggtggaac

SEQ ID NO: 33044 - DNA, 383 bp, Glycine max
  unsure at all n locations
agcttaatgctgtatggtttgtaaacaaacataaggcgaggcttgttgtgaagggatatgcgcagatgttcggggtagacttctcagaaactntntcttcggtttccaggttggataccataaggctgttgttagctcttgctgcacaaaaaggttggattatacatcacatggatgttaaatcagcctctttgaatgggcacttggaagaagaaaattttgtagagcagcttgaacgatttgtagttcatggacaggaggagaaagtctatcggctgaaaaaggccttgtatggcttanagcaagccccaacgtcttggtatggcagaattgatgcacatttgataaacttatgctttgaaaaatgtctaagtgagtttacc

SEQ ID NO: 33045 - DNA, 330 bp, Glycine max
aaaaaatatgcttaatgcgactatccatgctcgtttgcttgtttcaacccgtacaagaccttgtttaatctgtaaactttatgctcacttccaatcttgacataacccggtggttgttcaataaatacttgctccttcaagtatccatgtaagaatgttgatttaacatctagttggcaaatgggccatgaattttatgccactaaagcaatcatcaatctgatcgtgtcatgtcttgcaacttgagaaaaaacttctgtatagtcaatcccatattgttgcttgtatcccttcgccaccaaacgtgccttgtacttgtcaacttcacca

SEQ ID NO: 33046 - DNA, 293 bp, Glycine max
  unsure at all n locations
gcagtgttctttagatgtgcaagataaagtatattgcattaaaaataaatgagataagggaagagagaattgtacattcgatttattttggttcggtcacttcctgtacctacgtccagtcctcaagtgacccacttgagattttctactatccttgtcaattctttataatttctgaacacacattgngattcctcacccttgtgtttgagtttctcacatgccaagagataaacaatctcttgattacaactattgagttttattagatgaacaaaatgatgtctctcttt

SEQ ID NO: 33047 - DNA, 356 bp, Glycine max
catcaagcttttttttttgtgcatagaatgtggggaaaaactagtaagtgtcatgaatctctgacataagcttcaaccaattaacattgtttgaatgacaactgttgtagttgcaccgcaatcacatagtttgtccaccatggtatgctttatgttcctattggttatagttttggtatgctttatgttcctttggttatagctttggtggtagaatgtttaatttggagtccacaagaggaggatctccatatggtgctggagttattgctggagatggtagaagacaagcaagtgaaatggagctggagctcgcagagtatcatggcacgtatatatgaaattagcccataaat

SEQ ID NO: 33048 - DNA, 428 bp, Glycine max
  unsure at all n locations
cctcggggccatttcctgcgaaggcaaaaattaggacatttantttaccagngggacactactcttagaacanaaatggcatacaacctcctctcataaatacaaacatcaatgtaaatntagagcaagcttatgcgcatatttccttatgaacgttcacttgcacaagacatcctattaactaagaaaaatgcacccatatacaatcaaggtagcttcattacctagattatttacatgtacttccaaggtgtatttgttatttacatcacacacgcctccttggctgaatttacatacatgcatactcaaagcattntgnggtaccaaanactgcacatgcgctcatcctggtatttctaatacccatgcatatacaaacttcacgatgaatctngactacctacacaataaggtgctacatttca

SEQ ID NO: 33049 - DNA, 329 bp, Glycine max
  unsure at all n locations
agcttgtatctcttataagagaatgagcatgtgattggaagtgtgactgataatgttactcactttgtcagattgattgtgaaggaatacattaattgtatcccaatgagagtgtgatccttaaactttgagagaaatgactatcatttagtactgattcttgcatgaatctctgaagtattgactcaatgcacgatattgaggatgatgaacgccatatttgattgtgatagccacttatccacanagctgaccatgtgcttgaatgaattatcccttatacctcatttgagctgaatgaatgattgattgattgaaccctgagccta

SEQ ID NO: 33050 - DNA, 151 bp, Glycine max
taaatcctacctcatggggcatataccaaagctcaccatgcagataatcatacttttcatgtgctagtcctatagaatattgaaaagagtgttcaaattggtgggaggacttgaacatttttgattttcagactatacggctttcctaatg

SEQ ID NO: 33051 - DNA, 558 bp, Glycine max
  unsure at all n locations
cagggagagttttganatcttgtangcatttgnancnntcannaanntnagcgnaanacnccgggaggcnttagagacgacgagctttatgcaagcttgaaggccctgnntatcataaangcaagncgccancgcagggcgctttagcagcgaatagaccactcccaccccgaggtgcaagtaagccaacttgcacaagaacttacgagaagtctaatgggaatttatggctaccatggagcctaacccttatgagcattgtaaagcagtgctcataacgagcatgcatgaagagggcctanctcatgatgttgctaacggtggtgttgacgatgatagtaatgatgacgaagagaaaactccagagagagaaagagagagagagagagagctgtgtgtggaaaatgcagaaaaaatgatgataataagaaaaattgtctcaccgagggtggcgattcatgacggtcttatatcccacaaccacgagtcatgtagtggagaaagctaacaacggagcatgtattgagcctaccaaggatgtaccttattctttggccg

SEQ ID NO: 33052 - DNA, 434 bp, Glycine max
  unsure at all n locations
gggcaagtttgttcttcgttgacctttgaanacnaaacnncacngaacccnnnangagagagagnggccttttttanaaattctccaacgggaggcagggtcttcgtgaatgcacaaaccaactgcccacaataaatgattaaggattatagactgaaatcaatttattatgcgcaggccatactcgcacatcccagtctcgaatgcccaattgacatatcgatatcactgacactctctacaattatgacctactttgcaacacaccaggtgtaagaaaaaaaagccaaagatacactcctctgaacagccaacattttcatattaaaaaacgtgtgtttacaccacacccaaatgattctaaagatctcatttaccaaattaccaaatgaaaaaggttgaattaaattcaatctcctttaccaagcgtggtc

SEQ ID NO: 33053 - DNA, 408 bp, Glycine max
  unsure at all n locations
agcttncatcagtttctgacctctaacttctcaaggaaactttcttccttgcttgccaaggaagctaccttccttgcttctcaaggaagcttctcatgtgctagagtcacaccttccatgcttctggcatctaaagggaatatactaagatgcttttaacatattcttgaaatattccttttagattcacatgaaatgaaaattatatttaccaagtgaaatttcattaaattagtgacctaagctgtaaatagacacaagtgtaatatttgtcacaacttaaatgaaagagaaacttgtgagacacacttcanagttcaacttctctctctattctccttcaaaatncacgccacactctctctctctctttctctcattctctttctgcattaaaacatcatctct

SEQ ID NO: 33054 - DNA, 531 bp, Glycine max
  unsure at all n locations
nnnnnnnnccgactggcagngtcgangaacctganaacnaacnngacaanacctncctggtcatgatgagggaattatcttttnntcttnntcccannnngtganaacgccaaaagaagtcgacagacccaatgaatagaattcatatattccgaaaattcccttcttctttaaaatnacaagaacacgatgcacttttggattcccgtttggggcctcacttgttctttttctctacccttcacccaccattttctcttccatgcccaanatgcatgtcctctntcttttgttggttttccattgtcatttcgctgaaccctttctaccctaatcttagagtacaatcccctgctctctccgatcaaccattaccgactgctcaccacccattctgtcttcgtgaacaccgtcatccttactactcctagctgggngcatctatgacaatcgtctgcatgtcaccgnccctcacctcatcatcctagacctattgcgcacgctctttgcnacatcggccacttccattcg

SEQ ID NO: 33055 - DNA, 335 bp, Glycine max
  unsure at all n locations
agcttatctcatgtcagacaccctaatatcagcagttgcaaacaatcacagtttacttggtgccaacttaaagtggaattaaacaaggtataaacttaaagttcataanaaagttaaataatgctcaaaataggcaatcctagcttaaattntaccctatccttgatgtcacccaaagtcggcaagtacaacttatagaattcctctctgaatgcatccacaaacctaaataaagtttagaaaccatcaagaataagacaattagaatctgtttgatttgtataaatntaagggacaacaagatacatctactatattatagtattttcactttt

SEQ ID NO: 33056 - DNA, 446 bp, Glycine max
  unsure at all n locations
tcgactcatgaacaggggatcttgatcgtgtacgangctgcngngcatgccgtgaatctttccggtggtctccatgaatatcttanccactgtagtagcagtgtagtgcaccggaagtatccccatatgcacccctttggagaaacggtccaccacgaccaggaccgccaagggcggcaagccaactataaagttgagggagaggtcctcccaaggtctcgtcggaattggtagcggacatagtaatctctggctcctacggtggtcattcttggtctgttggcacacgatgcacgtggagatgaacaactggacatcctgcttcatagatggccagacgannattgcactgatgcgagccaaggtctttgtattctcatgtggccgccagtgggagtgttgtggaattctgcgacgatggtggagatggcctgaagacctttggg

SEQ ID NO: 33057 - DNA, 499 bp, Glycine max
  unsure at all n locations
ggccacgtttgtacatcgatgaaccctgnnnatcaaaancanaaccgaccccnntngtgaggtagagagggancacttctttttcanatgttctgccacccnangaggagggtgctggagggctaagtatcnaaccaccagactctaaatggcatggtttaagttttataatgttgtaataggaatgtagttccatcaggcctaagttattaccgaaacctctgagaacggaaggtaatttggaatttggcgacctcatgagacatcggttgttgggttttaggcctccttcgtacaacacacaacgtgtttcgataagagaaatgcccatatggatcaactctctagtacaacgacccgcgcttgtcttatctataatacacgtcgctgcattactgccttacctacataaagtactccattattcttttgatgacacgctttaccaaggctaatactgagagcttgacagaacagtcctggttgggccgtgcacatc

SEQ ID NO: 33058 - DNA, 368 bp, Glycine max
  unsure at all n locations
agcttganaaattctcantcagatagttattagtagcaccaaatatgatatcatccacatatatctagatgattaggaattgacttctataatctttacgaaatagagtagtatctacctttccataatctttgctttaaaccatacaaggctttattaagtttgaatacatgatgagggtagatagaactctcaaacctagggggttgttccacatagacttcttccttgataagtccattaaggaacacactntntacgtccatttgatataacattataccatgatgagcaacaaaggatagtaaaatgtgtatcgcctctagacgagtaacaagaacaaaggtntcactattatctataccttc

SEQ ID NO: 33059 - DNA, 547 bp, Glycine max
  unsure at all n locations
ggggnctcgtggacccgtcccgangacgcgcancttnattactcaacctatgccgccaacatctacaatagacctcctcaacctcagcttctattcagccacaacagaataactatgacctctgcaagcacaggtaccatccccgatggaagaaatcatccaaccctatttggtcgaaatcttcacaaccacaagcacaacaacaaccctacttttcaaatgcctgtggcccaagcagaccatacgttcctccaccaatctagcaccacagccacaacagaaacaacannacagtaagggcccctcgcaaccctcgcttgagaacttgtgaggcanatgactatgccaaacatgcagtntcagcaagatatcaaagcctccattcagagcttaacttatcagatgggacagttggctacacagttaaatcaacaacagtcccagaaatctgatagattacctttctcatctgtccagaatcacananatgtgagtgccattacattgaggtcangaaagcagtgtcaaggacctcaccaatagcatn

SEQ ID NO: 33060 - DNA, 377 bp, Glycine max
  unsure at all n locations
agcttgaatcggtctctcagtgtgtataaagttatgagcattntaattgctcgacagcttccgttgttcattttcgagcgtctctatatgtgatgcgccttaatctaacttccgtgtgaaaagttatgaccatttgaatttctcaagagcttcctttgttcaattttgagcgtctcgatttgtgatttgcctgaatcggacatccgtgtcaaatgttatgaccatttgaatttctaaagagctttcgttgttcaatttcgagcctctcgacatattatgcgcccgaatcgggcattcgtgtgataatttatggccatttgaatttctcaagagtttccgatgtttaatttcgagcgtatcgatatattataagcctg

SEQ ID NO: 33061 - DNA, 276 bp, Glycine max
  unsure at all n locations
gaccattccattctgatcataccaactttttcaaatatatcatagcacactttatgtggtctgatgctacaaggctatttatgtgactcaacacaattctaaagtcttaaacaaaaggctatctttanaagtaaatctttatctttacaatcttgccaatactggatcataggatattaatctcatgtcatctatctttcagaagatctcttcttttttatcgaaagataaagacgtgtcttatggagatttaccaagaggtgtctgggtaactga

SEQ ID NO: 33062 - DNA, 436 bp, Glycine max
  unsure at all n locations
agctttttatatattcgggactcaatcagactgcgagaagaagtattgtcctttgaatttgctaacgcttcngattcaatttcgagcgtctcgatatattacaggactcaatcagacatccgagttataagttattgtcgtttgaatttgctcagagcttcaacattcaatttcgagctgttcgatatattactggactcaatcagacatccgagtaanaagttattgtcgtttgaatatgctcagggcttcagtattccatttcgagcatctcaatatattacgggactcaatcagacatccgagtaaaaagttattgtcgcttgaatttgctcagagcttcagtaatccatttcgagcgtctcgatatattacgggactaatcagacattcgagtaaaagttattgcgtttgaattgtcagagcttcacattca

SEQ ID NO: 33063 - DNA, 335 bp, Glycine max
  unsure at all n locations
atactctctctaccatgtganattcgtgctctttatggtttatgtgngtggatctttaagcatgtagccttagctacacaaccatcaaccanactaaagcattntgaatatggctttcatgtatcttgtacgggtagtcatataatcttataggctcttagcgaggtattacactctggataatttgtaaaatattaatggatgacatcatcgaagaagaaaaattgtttgtatgaatntgtttaaattgtattttaattcttgtgcattgcaagttgcaacttaataaactggttgaatgattgaatcactcataaaaaataaaataaaaaagt

SEQ ID NO: 33064 - DNA, 451 bp, Glycine max
  unsure at all n locations
aggagtgagtgttctgtataccttagnaaccanaannnatntagacnccggatactctnagacgagnngangcatgcagcattttcaatatttgngggcnngcttctgggattgggtgattatttgaaacatattgcgcatgttatggtgatcgttaacaatgagataaactctgttatcatgataaaacatagcaacctaccaatttttgacatcatgatcaaaccaacaatgtaccccatcaaaccaaaatattctgccaaaattctgaaataagggtcagctcgaatgacatctatgacttgtaaacatgagaatatgtcttgattccaaggacacctcgaatggttttgagattatatggttaatttacccattcactgtgaatgctttcactcctatttttgatatcatagaaccaatctgcctacgattgaaaggcttgtactcc

SEQ ID NO: 33065 - DNA, 204 bp, Glycine max
gacgggagctagcttacacaacgctacaatctctttttatcaacggcgagaggacctcacaaatatctcagggaccaataaacgagagaactgcttaactttttaggaggcgtataactaaggagtgcaaaaaattatgacagccatatagcagataccctcaaatactcgagaacgaacagcagtcactacataaactttggc

SEQ ID NO: 33066 - DNA, 318 bp, Glycine max
  unsure at all n locations
gcccgagtgctctgccacntaatctagcagctgacaccatgggaagatacttttttgaatgtcgctctaaatgatggcagtagttcaatacaaccaggcaaataatttatcatgtgatggagtgtcatagctaatatcaaacattaacaagtaattgattgccacccaactcggtggattggcttactaacacaatatcaaaaaaacccttgctagtttataaagacaccttacttattccctgtacaacgttctaataatactatttatataacatttccaagcttcgagagctcataacagtctatcactatcact

SEQ ID NO: 33067 - DNA, 392 bp, Glycine max
  unsure at all n locations
agctatcgaatctgaatctcattctttatcacattgtctttttcgtactaaaccaaaacccaattcgctaactttntaccaaaatattaatttattaattaggaggggcatacaaggaaatatattttcaaaacctatttaggaataaatttaaataaaatacaaaatcaaatctattgtccgaagggagcgccgttgggttttctatcctaaatcctaccattttcccttttcataattctcactctccgcaatattattttccttcaaagtcattggtaagttaaagacattnnttttttataattntntgcccatanaaaaaaaataattccatgtatcgaanattgaatattcaatgtaaaccacaaccttaattgaacattatattc

SEQ ID NO: 33068 - DNA, 478 bp, Glycine max
  unsure at all n locations
gggagaggagagtcagagaacttganaccaaacnatagcaactnnnccaacgtgtagacgaattatttacctttagaaaactgcgccgtggacagacatcgctatagagatatccaacttttagggcacatgctacacaaggcctggcatcagtacctctcagaactgaggcccaacagacatacatatctgctaagacatacttgttcttgcaaaactacatactacaaacttttcttgagccacctgtaccttgcctagaagaacgagtgatgcataagaccctgcctaagatcgctgttcttcaagacatcaaggaccccagactgagcttacgcattcagatgggaccgttggctactcaattggattagcgcccgttccgaagactggtgatgaatctctcaatcgacataatctcaaagtggtgttgccactcgtcctagcgtgaaggtgtgcaagactcaaccaaacaccg

SEQ ID NO: 33069 - DNA, 272 bp, Glycine max
tgaagctctgataccacttgttggacaagtggcctcagatctcttaacaacgggggggttgaattaaaatattcgaaactctttcccctcattaaaaatctatcttactttttacttaagttatgaattcccttaatgacaatcttgttatatattaatccacatgaagcaacttgactatgaatataaagcactaatacataaaggagattatcggaagagagaatgcaaactcaattatatacatgttcggccacacacttgtgcctacg

SEQ ID NO: 33070 - DNA, 213 bp, Glycine max
  unsure at all n locations
tactcacgcttcaagaaaaggcccaactctccttagatatcatatntcatgtttaaataagtggctntgttcgtgcttgtgcgcttagcgcaattctgaaccgcttagcgcgcattagtgaattatggcttagtgtggctcttctcgctcagcggatggactaaagcggtctgtttagcgggttgacccttctctcagctaatatgcacaact

SEQ ID NO: 33071 - DNA, 381 bp, Glycine max
  unsure at all n locations
agcttntgcggattttgnngtctttgccagtgaaagggaaatcgatgtggggtctaanatataagggcaagtttaagtcacccttggcttggaccgaatgatgataaactggggcaacatgaagaagggtgagggatgaaggggagaagcccgtgcttgtgaacttgccatttccaatacaagcccaagtttctcaacccaacccaacaattgtcattatctcagccaataaccaaaccttctcncttactccaccgcccagttatccacaaaggccatccctaaaatcaaccacaaagcctacctaccacacttccaatgacaaacaccacctttagcataaaccaaaacaccaaccaagaaatgaattttgctgcgaga

SEQ ID NO: 33072 - DNA, 287 bp, Glycine max
ccatggtgatatctgactgaacgaaaaaaccccaatcacactcgtagcgtggattcttcagcgctccagatacgaattaatgactcaagttctaacctgctataccattacacgcttgagctattgaattcatttcccctgaatgagaattagagcttggagaaactttttcgggttctttacaaagactggcagatacaagtgacgtaaaatgacgtacgctccggtctaaacagaggtgcatagatggcattgtggacttgtattggcgcttcaatgtgtggccc

SEQ ID NO: 33073 - DNA, 362 bp, Glycine max
agcttacaacattgtcggtcatatcataagtgcaaatgcaatagaacaagcgatattttgcttccaaacaccccacattggtcgggtactcatatcataagtgcaagcctatattgctttagaaaaacattaatgcaactctatattttttctgttttgacctgagggttacaaattacatattcttcccatgatttgcatctgttgcttgcaagcctatattgctttagaaaaacattaatgtatccatttgactgtgttatcattaaattggcattgctattttagcaatcaccaatgatcttgtaaacttatagggttggttaatggtaaggataaaaaggtggataataaagttgtat

SEQ ID NO: 33074 - DNA, 261 bp, Glycine max
  unsure at all n locations
tcaagaatcaagatcaagattcaagattcaagactcaagaatctagagaagacttaatcaagataagtatgagaatgattnttcanaaactgagtagcacatgaatttttcacaaaacatgtttaccaaagggtttttactctctggtaatcgattagcaaattgctgtaatcgattaccagtaacaaaattgttntgaaaaagttntcaaattgaatttacaacattgcaattaatttcaaaagttgtaatcgatacaat

SEQ ID NO: 33075 - DNA, 213 bp, Glycine max
caactgacattgcgcttggcggccgcgcttaacaaagtattttctacacctactgttcgttgatttgaccaatgctgttatgggaatgtttcgacaatccttcaaaaccctatggatacattctgaaaggttggttgtcatgttgccatatcaacgtccttctctatcataagccatcgtccatttttactgttgaattcgatcaacccatgt

SEQ ID NO: 33076 - DNA, 533 bp, Glycine max
  unsure at all n locations
aggggaggagccagggttaganngtacctntctnatctcanacnnntacacatccngnnntccnnctcagtcatagcaacttatctttctcagcttttcaggccaaaggcggaaacctctggccaaactcaaacccaaaatcacagctttttctcacttaaagaacccagtacattttcttcgttccaatcattcaccggtggaatgacttgaaaatttactggaagttcatagtcataaatctacattttgaccgtcgggatctgctagaaaatatccaaaccccatatgtactaccctcttcacaaccaaccatacacaagcatttttctgcacttatacaaaaatcttgctgacatttcaacagcaaaattctgcataaagtgcagatgtcgaagaccactctngccttcatccaatnttgcccaaatcgaatnctacatgtcccaaatcatgtttcaatcatgtctaaccaatgacaagcttcagactatagcaacacacaatctaggtatccaaacctctcattaatg

SEQ ID NO: 33077 - DNA, 291 bp, Glycine max
  unsure at all n locations
catcgaatatcccntatatanaccgaccagaggnaagggaaaatttatttacccccgcccgggagggtatggcgaaaacctccccggtggccaaaccaacacttattacgtcaccgccgttaagaaacggagctaaaacacctgcacccgtcagcttcaccagcgaactaatatgaaccgcattaaaacggcagcttggcccacaagcggacatccctaataagggattaatgttatataaatgggaccccaccgagagtagatgcggcttgcggccctttaatcacggcc

SEQ ID NO: 33078 - DNA, 281 bp, Glycine max
  unsure at all n locations
gagagtaatatgtgcaccncacaacnaacaccgaccagaaggggattatttactttcaaccggggaggaggaaaacccaaaggacccaaagccaaccgcacagggaacccgccaaaaaaggagcgccacccaaaaaaccaaagagaagaaaacacgaacacgcgaaaccacgcaggggaaaacaggagaacaggaagaagcggagaacgcacagacggaaaaccaaaagaccagcgggaactaaccagccggaagtggaagaagggccggcaagacccgcg

SEQ ID NO: 33079 - DNA, 372 bp, Glycine max
  unsure at all n locations
agngggaattattatctatttacttnnactcatnnatntattgattttatgtattataggagaacttaaaataaacacggttgttacagtaatcaattacatatccatggtaatcgataattactttgtaaatcagttataaaactgttttgagcttctggtaattgattactagagagtaaaaactttggtaaaagatttttctttgaanaattcttttggacaaattgtgctattcaatcttttctttgaaaaattctttttatacttatcttgatgattatcttgaggctcttgcatatcttgagtcttctcttgaatctcacttgaatcttcttgatttctttaatcttgtttgaaaaatctttggca

SEQ ID NO: 33080 - DNA, 520 bp, Glycine max
  unsure at all n locations
agggcatatcaattcnctttctttgtaccgacncntanattnatcaacntncctannaacatntcatgccgggggaccttcttctagtattcatttctacagcatcctccaacccctttgccttcccaactagagcaatcccaaccaaanaattgggaaaaaccggaaagggagatctttgagaaccttcaggaaggtganggtgacatacctctgctagatgccctcagcgaattccagataacccaagttctaatgagtgtgcaccataaaagaagctcaaggcaataaaaggattaacatggcagatatgtgtcaccttgataggaaatctgttctcacattcctgagaaatgtanggaccangtactttctgtataccctacatttatngngaacaatanatntgagaatgctttgctagatctaggagcatcagttagtgtcatgcctctgccatttcaatcttatctttgacctttcatctacaatggggatcatttgcaatagagtgtgctcn

SEQ ID NO: 33081 - DNA, 296 bp, Glycine max
ttttttgccaagtattcagactagccttattcattttacatttctagcctgacaaatcacactctatcccttgcaaccacctctgcaattattttcatatcaactgctgcttgaactatggactgaactcctacttcagttcttggtgtgggagacttgtttctgtaaagcaaaatgatcgtaaacctgtgatcctgattttccatcctattttaaagcggaatttcacataatttcgttctgatagatgattcactagatcagcaaaataaaattgttggtcaatagaaccttac

SEQ ID NO: 33082 - DNA, 162 bp, Glycine max
agcttgtcccattaacacgggggggttttcttgcgggggcgacccccccttttaaaccttcctgacggcaaaatacgttaattttgtcaataagctctctggccgattgctccttagtctttgcagtgatgccccggctcaagctaataccgacctttccgc

SEQ ID NO: 33083 - DNA, 260 bp, Glycine max
agcgtctcgatatattacgagtctcgagtcaaacatccgagacaaaagttattgtcgtttgaatttgctcacaggttcaacattcaattttgagcgtctcgttatatgacaggactcaatctcacattctagtaaaaagttattgtccgtggaattggcttagagcttcaacattcaatatcgagcgtgtcgatatatgatgggactcaatcagacatccgagtaaaagatattggcgtagaattgcgtacagcttcaca

SEQ ID NO: 33084 - DNA, 551 bp, Glycine max
  unsure at all n locations
aaaggtggacggaatgcgatagcancnccgcgacactctacaatacnnaacactngagatcanngaagcgcnngaanaggagagacatcgctgtctcattttgtcgaccatcagacgcggcaccctgggagatagtgtcgcggggagtcaaagagacctttgnggaccgtcanggtgggtgtgctaattgcccataaccacagctgtgaccaatacccgacccaaccccgggcataggctggtcagtgagaacctgtgatgtacctaagcacgcgagctcctngcagtcaactgattaaaggaacaaagaccacaaagcacggaggcttgtggtggctggccaactctgaattttgtgtgatatgtggattatggcctctggtgatcgataccaagggtgggaatcaattcaacggcttaaatgacacaggagactagatgtctctgtaatcgataccaggggcgtatcgatatcatcttgatacnaagtcatgaactaatgacgctctggtatcgattccacccagtgcatcaatacacagagggatggg

SEQ ID NO: 33085 - DNA, 289 bp, Glycine max
  unsure at all n locations
ccatttcctagttaaccatgcattaggtaccatgttcaattattttgcttttaagtgaaacgggcttatgatcccaacatggttggctcgtggtgcctaacacatgaaactaagaatgtagtgtgaagtttcacgcttcccccttnttttgttttgtcttgtagaggagaatgcaaggatgagcaaacatgaaaaccaatggtatgcaattttgcagatcaaaatagttgttgaacgcatatgcctgatgatgccatgactcatgcaaaatgtgacgccggaatatgat

SEQ ID NO: 33086 - DNA, 525 bp, Glycine max
  unsure at all n locations
ggcaatctttctgaattgcatgncncnncgcnanncatcnnatnnacncnaactcgaacgcnannngcangcagaggaggaggaggaagtgaattgttctntctccnanacaccgacgagaggcgcgggtgaagcgaattgcactcacctacagagcacagaccggacctgagaccttgcatacctcaacgcagggcgatgggacaatacaaatgctatgctgcaaatagcgacaatagacatcatccaccgtcgatacggaatcgaccacgcctgaacagatgcgcaccctcctagcaaggataccaccgtcgaaagagaataacactgattgggaaggcgtaccctcataacagacaaagaacgggccccttcttccaaatgccgtaggtcctaggaaccataatttcttaacgctatgacaacccaatagccctaatactgcaagcgtggagcgtttccacaacttccttaagaacttggtaggcacagcgttgccaacatcgactacacaagaaccaaccg

SEQ ID NO: 33087 - DNA, 550 bp, Glycine max
  unsure at all n locations
gggtnncngnggcgganagtttgatcgatttcctttacnttgcacaatcaatnaannacaannncnccnnnnggnnagaaaggngaggagcaaggacgtattacnattcttccangacaacnacacgcggcggcgagggatttctagattgancccaccacttcacgatcaagcctcatttcaagttccctgaccagaacatatgaaggatctacactcgcgagaggggtggttgccacattccagagacgatgcagttcccgtttcatacaccaaacgcggaggacttcacatcgcgggtattcgacagactcttacacggctcacatagcataggtctggtctgcgaaagagtttttctgtaaactatgtgagttagccacattcttcctctttcttatcgatggccggaggcccctactttatcacaactttccgttgggtttacccttcccacatggttcgacccggagtattcgtacccacgggctcgggatcgactccccgcgcatttatctatgggctctgacccaattgcgaccactcagcc

SEQ ID NO: 33088 - DNA, 494 bp, Glycine max
  unsure at all n locations
gcagaatttgtgatctatacnncttganacacaancnnnattaaacacngagccnnggagagaaagaaagttatttttccactttgagcgaaacggggaggagatgggaacttttctaatactagaaacaatgatggtcccatttcaatctaaagtaatcctaagctattcatgtaacctgtcctgggctgccagcaagnggtgaaatctgtgaagtacccatattccactgctatttagactggtagcgagctgtggagccgcaaacacactcgaatttttgctaaggtgggcggcaatccataaatatattggaggttgttgttctattttcatacgaaacgagattcgagtagttgggctatatctcgggtctacacttctaagatatgattgggtcgtgatactttcctaaaggtaatctatactgactgtaccaaacctccatcacttggccgaggggacttactcactcgttttaaacataataaacg

SEQ ID NO: 33089 - DNA, 354 bp, Glycine max
  unsure at all n locations
cagtagagcctagacatganacnacacnaacaacccnggcgcggggggggggggtggtgnccactcccccccgggggggggggaaaaaccacaccccccgccgcgaacagaagcgagcgaacaaaacagagcgcagggcaaaccggacaaaaaagccgaagcacgcaaacacggggaggacgagcaagacagcaccagcgggagaaacacaacagggaagggacagagaacggcagacgcgcggaacccaaccacggcacaccacagagacaggcccggcggaaggggacaaaggcacgcgagggccacaacagcagaccccaccacgccaaaccgcaagggcgagaagagggc

SEQ ID NO: 33090 - DNA, 363 bp, Glycine max
  unsure at all n locations
agcttttggaatatatataatgtgataactntacctagtggttttgtaaagctcaaactgtgaccaaaaagcactggatgagaaataatgaanaacaccacaactgccaagggatttcataccacctcatctcattttcttgctcccttccttgtcacccaataaaaataataaaaatatgatgtatggntgaaaaataatgttaattntatctgttgaggtgatcatttntcttttggagaggaagaaggaaatactctaaagaaacaggtaattntattacatcttacaacaagaatgcangtttcccattggtttatcanaataattttctaattattttataaataaaaacattattga

SEQ ID NO: 33091 - DNA, 397 bp, Glycine max
  unsure at all n locations
gccagagtatgcatgattcgaccatnatctcagctggaaaaaataaaggttcgggttaagatgttttctctccactctgngngaagcgaaaggaaagaccatgttcgaaccttgagggaaagtacatggtgataggtttatactatatctacggccaggtggaccagttggagtgcctaaattttcctggtttaaatgttgcttctggtatgaaagctctgatttaaaataggctgaattcaaattatctgtttttttctctttagaataataatgtttagggctatatacaagctccgtaccttatggactgagtgtgatccttatgaattcatataatgactgcgtgtgacttcttgctacaaagttgctcactatctgatttcatcatgcncaa

SEQ ID NO: 33092 - DNA, 546 bp, Glycine max
  unsure at all n locations
nntacggaaagtcccgacngcatgncgtctgcnatctcagcctntacgaacanaatggcctcattcttttccaaatatgctggttgaattttgtacgcatcaacaagaatcaagcccaggctattgtgccagcacatcatgggggcaaacacaccaaatgattatgatgatggatggctccaattctcacaaaggtaaatcattactttccaattgagcctttcaaactatcatgacatgtagaagagaatcaaggatttcaagtcacaaaatgtcgagaacttttattnntcaaacaattacccatttctttgacatatcctataattcanagaanaacatgcanattcgtacgtgcacacaaaatngaccgcaaatattaaactaaaaatccgacgaaactaacaacattaacaanataacacaactaacagattaacaanaccaacaaaactagccaaaccaaagaacacttcccccccccccccatacttnaacaacacattngtctcaatgtagcacaatttanagaataagaaccattan

SEQ ID NO: 33093 - DNA, 365 bp, Glycine max
  unsure at all n locations
ggatgtctagctagagctcaccaaacacaacgcagccgccnngccaagaggagagagataattncccacaacccagcagaggcggtaggggacacaacaacaccccgggggaccgacggcgaacaaaaaacagggggcagacaaacagggccaaaacccgcggcgggccccaacagcggcccagaagaaggcggggagcgacaaagagaaacacgcgcccgcacgaggagcaagtgcgggcaaccaacacgggaggccacaaccccaacaaaagagggacggaccgagggcgggagcaaccggaaacggcgggacgaaaagggcggactgacgcagggccaaacgagagggggcaggcagaaggc

SEQ ID NO: 33094 - DNA, 401 bp, Glycine max
  unsure at all n locations
ggagagcgcatcgagcnnccanaccacaccacacgcccagggccgagagggggggtgtcttcggcttnncccgccggcggaccaggagaaaaccgacgccagaggcccccccaaaggagcgcgccgggaaaaccacaccccagacagccccngggagaaaccacaaggggaaggacagggctgccaaaccggacgacccccgctactcgcaaaaggacggcccgcgggacgaataaacaccgcgcaccgggggggccgaagaaggacgccaggcggagacccccgcaccgggcccacgcagacaggaacccccgtcagccctgggggccggagcaacaccaccccccagggggagcggccgccaagagcgaaaagggcagaccgccagggccgacaagggg

SEQ ID NO: 33095 - DNA, 137 bp, Glycine max
  unsure at all n locations
tacagcagtaaattggaggggagcgatccttgtgttctgactctcaaccacttatgatagctgccgatgatcccattactgctttcnctaagatctctgtactttattcaaaccgcattgcatgccttgtgaactcc

SEQ ID NO: 33096 - DNA, 477 bp, Glycine max
  unsure at all n locations
gcgacaacagcggagaggtttttgatatgatacccgcacaattatanacnaccnnnncccnnnagannngnctgctctgaggacaacacgttttaactctccccccgcacgggcggatggcattgccagattagatacgtcgagaacatcttgnattgcttatggagtatgcttcaagccgaagagggattaatagacaactgccctgcttctgaggtggaaagaagtganagccaggatcacccgagatcgatgacgttgctaagataaatancgtgaaataaagaatggaaccaaatactcattactgctgaaagaacaacatggggagaataaatcttgtccagaagttatccttccaaatcttggaggaactcttctaatataagaaaccttgggaggaaaaccacaaccaagttgtctgattctgattttgtcattcatcttgccaatcttgtgtatgttaatatttaatcn

SEQ ID NO: 33097 - DNA, 493 bp, Glycine max
  unsure at all n locations
nnccccgagcaggtccgaagtcnnccntnnatacancncacgcagacannncggaggctacaggagagnngttagtttttccgccgaccacccctcgcggcgggactggaccggaaacacaccatagccaaccgcgccacagggcatgccgatcgcaccgcataccgatctagaacgatgggtgatcaagatgagacacagcatcagaagacagccgacgaggcngcgagaaacaacgaaaggccccacgacagtgcactgctaggaatgagagcacgcagcgcaaagacagggccacagcagccgttgtaaatgcagatgccgaatctgacgcacacacaatggggaccgcgcaccagtcaccacaaatcgactaagctgcgaaagaccacatgcgccgatgcagcctcccggcatacaccgacaggcacccgatggatgccgccaccaccgcaacaacctggnacgaagggccaatggaacccacctgaac

SEQ ID NO: 33098 - DNA, 147 bp, Glycine max
  unsure at all n locations
gtttatatangcacatatgtgagaaaaactaattgatataagaaactagctagaagggaaattagaaaagtgatcgatatagctgtgattttgtgtttgtatgtggccacatgagagagagagcaatgatgacattggagtcatcat

SEQ ID NO: 33099 - DNA, 492 bp, Glycine max
  unsure at all n locations
cncaagcgagttgatganttcatgacantcttgnacacnacatanacncaagctagccacccanatcgcccaggagagcacagctcgccttgcatagntgggttgcttcctcacgaggcagcggtctatttgaggattatgtgaggaaggcccaacagtgctctgtctgttatgtgcacccacatgatcactaacacacccctgactactntgagggagaactctttaccagagagtgcacgcgctacaaatttgaaacacaactttatcgctttacagatgttcagaacactgctgatgattatatgatcgtatttgactactgccgtttctgacctcactaagagcaaagagcgtcataacattgacgcgagctctgaaattatatatgagcatcttttggatttgattgcgcattccttaatataaaaaccctatgtggtgccagctctaaagacatacaagtggtgtattacatagaccgcgatgagg

SEQ ID NO: 33100 - DNA, 351 bp, Glycine max
  unsure at all n locations
agcttttcatattcttatttggtggctngaattaccttacacatacaaggcttgatatagctcgtagtgtgagtgtagtttcaagatatttgcactctccaactaagcaacacttatgtgcaacaaggagggttcttaagtatgttgcaggttcaatcaaacttggagtactttatgagagtgtggataatttcaagttggttggctatagtgatagtgattgngtagggttcttagatgataganagagtacatcagattntgtattcagtcttggcttgggagccatcacgtagagctccaagaagcaagacacagttgctttatcatcatctanagtngaatatgtag

SEQ ID NO: 33101 - DNA, 419 bp, Glycine max
  unsure at all n locations
tgcatgttcctttttgttattgtgtgtactntgactacgattgctaaaagaacaaaatgcaatgagtaatgcgacaacgaattaaacatgaatgcatgataatgataagttgttaaagtattgaaaccacatagaaatttcagcanagacatagggttgaatcacatctcattntcattaagagataatattgtttatcttgtcaaagccaaagcataaataaatacaaacgtcttagcggttcctaattatgtgggacatcaactcgatcatataaagacaataatcgaaaagcccatgaacttcctcaggagccgagtatacatccgccattgcctttgctctggctaacagccttggaagctcttgactcccattcagagtgaaagtgaacctatccatccacttcataacttctc

SEQ ID NO: 33102 - DNA, 462 bp, Glycine max
  unsure at all n locations
agcttgtatatctgccactggttcagctccaacactaaccaacagcactgcttccatcaccaaggcagctgcaaaaatgaacaagaggggcagcttcttgtccattntcggctctaacagagaatatcaacagttcaccacaacttggacgtaaagtagtgcctccactaaagatattggtcacctttacaagataccaaagtgttgaaataacgaaggatcaattagacaattaataaacacgactacaggagtgtnttccttatatacgcaaacttgaaccaaagacaatngtgtatgtggcttgtttgtatgtaccgtgtgcattttactaagattatgctaagtgtctgttgagtcaaaatatgcacctcgtgtaatcgtgtctgacatggacattaaccctattaacatttntgtcattcgcctactcgattggtgtttcttaatgactataacaaa

SEQ ID NO: 33103 - DNA, 240 bp, Glycine max
  unsure at all n locations
taatccgaggcttactagtgttgccttatgcncttttggcnganaaacagtatgatatttaatgatatgctgatacttacagtcagaacaatgagaatgagatccttgttacgctntatcttccagacatttatttccctctctactatccacgagactattgcactaaagatggctcaagtaagttataataagaaacactttcattggttccggatatcgctccacggtttctttcta

SEQ ID NO: 33104 - DNA, 461 bp, Glycine max
  unsure at all n locations
ttccctgttgtttctttgagaagctntctcaagaggcttctttgagaagctagatccttatctacccacacccttctattaactaaattaacctccttgaaaataattacggataaaaaataacataacaaataatcaaacatcaaacataattactaatatatatatatatatatatatatatatatatatatatatatatatatatatatatatatatatatatatatacatatatcagggtgtgacaactctcccaccctcttagaaatttcgcccttgagatataccttactcaaacaaggatgggtgagtntctcgcatctgactntctaattcccacgtggcatcttcttctgatgcaccttcccagatcacctngaccaacganatctctntctctcttaggtgttgtgtcgcctattctcgaccctcaaaggcaatgttatatatgtcatatn

SEQ ID NO: 33105 - DNA, 294 bp, Glycine max
  unsure at all n locations
tatcgtaatcgattacaccagttattttgagacaatggctatgttatntaggagtctctgctttaattgattatcatgtgatataatcaatcacttctctttctataagtgtaacagaagtgaacaagaacactntagtcgattactttgagtatctaatcaattacagtgttcttgaaccgtttccagtttttgaaagaacactttaatcgatgtaaaagataatctaatcgattactttattgaattatttgaatgagttaggatcacttgccgatattagttaaagaaaga

SEQ ID NO: 33106 - DNA, 431 bp, Glycine max
  unsure at all n locations
agtctagtgcttagtatgacttcttgataccagtgatcctaaattagttagatgccaactgtaggcaatgtaatgtactacagttcctcttaaattnttctgctgtaagttctatttgtgctaaatttatttaggttatttccaattgcatgtcagatttaccccggatgcctcttgagatgagatatatagccatggacttagttgttgagtctaacagagattatagcctaatagaaaaccatataatccatttccttcggngttctgtgagaattttttntggtttgggttcttgtccaagtaaaagcgtataattatagtttgctttggagttcagaagatantaggaagatagtattatcttntttctgaatttgctatctcttcttattcgataggatttggtgaacctaccttcatatatccat

SEQ ID NO: 33107 - DNA, 508 bp, Glycine max
  unsure at all n locations
aaacccaggaaaagggctttgaagtagcntnttanactctangcctcatgtanaccatggatgaaggataatctaaagtagttattattataatttttttacctaatntggggtggaaatgaatatattcctaatattaatttcaaaaccattcaatatatatatatatggttcaataaaattgctcttggaccacaatttttggtaatttaaaaaacaatataatttgaaataacttctaatgggatatatngattcatatttcattaagttactcttaggagaactgagatanaataataaaagtaaatataatnntattctatatantatatattagataataaattatatacaaagtattattagaaaatgaatanatagatctaaatggtataaaggatatatacattcttngagataaaatcatataaacacatggtagagatatattgggtaattcgcgattatattattattatatattatgataattaaatttcttatn

SEQ ID NO: 33108 - DNA, 276 bp, Glycine max
  unsure at all n locations
agcttataaatatctaaattattatnntaaataaatatttgtttgatagattagatttaaaaatataattgtcaatgatattntatatcattntatgttaaaagagataaaaatntacatgtaaattaagatattttntatttatcaatatatntataacgaatgttctaaaattagagattgaccactcaactaaagttgattaacatagagataaaagtaagtgttatgtgtacattntttaagagccatataagaataaagtgaaattgacat

SEQ ID NO: 33109 - DNA, 544 bp, Glycine max
  unsure at all n locations
aaaacagactgcatcggctangatgatccantcgaanacacacaagcccgaantgaggaagngtagaagggtgagacattctggctttatttcgttaccacatagctgntacctgaagatatgntgccggtggtcaggatacccttagcgacctcaggtggtgttgctatttccacaacccagcgtagaccaatcccgaccaactcgggcatagtcagtcaatgagacactgtgatgttcctacacaggcagctcctggcagtcaactttataaatgaacagagaccacaagccatgacgcttgtgtggggctggccagctgtgaaacttgattgctatatgggatgtggcctctggtaatcagataccaatggtggcgaatcgactacaatgctttatattgtgaagacatgaagctatgatggcctctgggtatcgactaccactgggtgaatcgattaccaccctgaatatgngatcatgaatctaagaaggcttctggnagccgatcccaatgggtagaatcattatcaggttaggaatg

SEQ ID NO: 33110 - DNA, 285 bp, Glycine max
agctaccaagtttttagttattcctcaaactgcctaagcgagcgggaaagtctataacaacttccgttgcccatcggtttggggtgaaagtggttgaacaaacaattaatgcccaacttctccacaaagcctccgaaacgcatatatcaagccgtagataggatgcctaatttaatggtgatgttttaagggctctaaatcagatcaaatgcgccatgtcccatcttttatggatcaaatcactggacaacacaggactcatctatctctacccaactttgctat

SEQ ID NO: 33111 - DNA, 627 bp, Glycine max
  unsure at all n locations
ggggnnnccgcaggtagttcatttttctattgtacnnnntcnnnnanaanattcatnnnacnncnacggnnanncacaannnnngagcanngaggggaaaaaagagagcanggacgnatanactttancgcnccananccaccacacganacncgggcgagcggggaaaccagcaccaaagaaaacgagaaccnccaaacaacgagaaaaacccgacgcaaagaacgagaacacaagngcgcccaccccggagncaaaaaggaaaagggaccgnngcaaancacaaccaagcccccgggcgcgaaggagcacagcagccacgaacaaaancacngcgacgcacaanaggacaagcccgaccaagaagaggacccgcgcganaggaacangcncagaagcccgaagaaggcaannnccaagcaggcccgacacacaaccagcacccaanccggacaagccgagncgaaaccnaacgggcgcgcaaanncagcacagaaccgcccagcaaaaanacgagcggcacgacacaacccggacccaancagaccacgaannnaaagnganaggcgncgggaccgcgacgagcacccgggncggccacgacgacgcaggcangaccgcacgccg

SEQ ID NO: 33112 - DNA, 337 bp, Glycine max
  unsure at all n locations
agctntncactcttatgtctgnattaagcgcataatatatcgagaanggcggaattgatcaatggaagctcttgagcaattcaaatgatcataactgttaactccgatgtccgattcacgcgcataatatatcgagacattcgaaattgaacaatggatgctcttgagaaatacaaatggtcataacttttcactctgaggtccgattcagactcatcatatatcaagaccctctaaattaaacaattggagctctcgagaaattcatatggtcataactattcactcggacgatcaattcaagcgcatcatatatagagacgcttgaatttaacaa

SEQ ID NO: 33113 - DNA, 544 bp, Glycine max
  unsure at all n locations
gcaagcaggtgattcntccttggtacttgcgacacttaattactaagcttgcatcgtgcttttgctagcggaggaaatatgactaccatggctatgaccaccgagagcanagagnggagccgctganggactacaaagctctctcttgtcaacatacgatcggtgtagaattattagccagcttgagcgcgaacttccatagaaacgttcagatcgtcaagatatcctatgagctaacagtgatgcactcctagccgatctatgtgtgatgagactccataggacctacgggagcaaagaagtgagattggatttacatcacacacgcctccgtggctgaatatacatacctgcatacttgacgcctgtatgggtacctcaaacgatacgtgctgacatcttggatattttaagagccacgcgtagtcaaactggaccatgacacattgctatctgccctagattgacgctcctgtgaagcgttattgacaattgtatgtctcctaaagccccggcggacaaaacctaggttcctttattgaaa

SEQ ID NO: 33114 - DNA, 346 bp, Glycine max
ggagaatgtgaatgtatgtatacatgattctgatgatgtcaaaagaagaatcacacaagactcattttgcttcaagattaatacaagattgtttcaacaaacaaagcctcgattcaagatttcttcaagatcaagccttgcctcacaatgaaaggtttcatgtcattcaaggcacatgtaatcgattaccaatggtttgaaagtgtgtaatcgattgcacatcatatgtaatcggataccagagactctgaacgttgggaattcacattgtatatgaagggtcacagctattcacgactaataactgtgtaatcgattacactaattctataatcgattaccagag

SEQ ID NO: 33115 - DNA, 196 bp, Glycine max
  unsure at all n locations
atgagaagctagagcttanctacataccccctatagtagctaaactcacccctatgccagaaaacatgacaatataaaacaagtgcctactacaaagactacttccaatgaatgtgagtttattgcaattacacaatcacaaaatgggcctcaaccttggtggggtttctctctttggtgattcactcaatatgga

SEQ ID NO: 33116 - DNA, 364 bp, Glycine max
  unsure at all n locations
agcttgtaatattaattctccttcagataacctctcttaggtgagaggccatgaatggttntatatctaacgcaccttgtaagcaaaagaatctccagtttgaagtgtagacaatgcacaaacccaatttactgtatcctanaatttactntaattatgaagaacggtggtgacaaggattgaattcttgaccacttggtcgtaaaatccttggtaagagccaactcttctaaaagtttaagctcttaggtagaggtttattcatttgtagcactaaatgatgtttataagtcttatttatggtgcatatcgatgttggtaactacataccgaaaacttgatttggtgcanacattcttgatta

SEQ ID NO: 33117 - DNA, 294 bp, Glycine max
acattactcttagagcaagatggcgtataacctcctcccataaatacaaacatcaatgtaaatttagagcaagcttatgcgcatatttccttactaacgttctcttgcacaagacattctattaaccgaaaaaaatgcacccatatacaatcaaggcagcgtcgttacctagattatgtacacgtactctcaaagtgtatttggtacttacatcacacacatctccttggctgaattcacatacatgcatactcagagcatgttggggtaccacaaattgcacatgtgcacatc

SEQ ID NO: 33118 - DNA, 347 bp, Glycine max
  unsure at all n locations
agctttttgcattttctaacgacaataactnttaactcggatgtgcgaataagtcccgtaatatatcgagacgctcgtaattganaactgaagctctgagcaaattcaaacgacattaacatttgactcggatgtccgattgcgtcccgtaggatatcgagacgctccanattcagaacggaagctttgagaaaaatctaacgataataacttttaactcggatgtctgatcgagccctngtatatatcaagatgctcgaaattgacaacggaagctctaagagaagtcatacgacaataacttatgacttggatgtccgattgtgtcccgtacgatatcgagatgc

SEQ ID NO: 33119 - DNA, 354 bp, Glycine max
  unsure at all n locations
gatggagaatacgatttccatggcttttctgattttgggctnggaccctttgagtgtgaagntgaaacgagacaatgatnggggactntcgaanacagagttctttgatgaggttggaaatggactttatttggatacagatgttgatgagtatgactaacacanttaattggatcttgaagaatccatggtacccaacttcaattcatttgtaaggaaggaatgtagcgatggtaacctgaaaaatgcattggttttggttgaagaaatgctttgttggggacaagaattgctatttcctgaattnntcaaattagtgagacaactttgttcatctctttcacaaatcaagtc

SEQ ID NO: 33120 - DNA, 312 bp, Glycine max
tttaattgaaccaaaatatgtacgcttttattattctttgtattgcaaatcatggggatacaatctttattttgtaatgccataaagccacttgtatgttcttcagtagacattgaagtacaggttctatttttctcacaattttcattgaaaaaatctaccgtttaagatttaacaatcattgattattcaatgagtaaaatcatctatggagctaagataatgtatattgaaatatataagttcaacacttacagttccaatgattggagtcccaatattaacaattattaaagtcaaatcacacaactc

SEQ ID NO: 33121 - DNA, 390 bp, Glycine max
  unsure at all n locations
ctcagctatacaattataataaaagaacaatgacaatngaatattctatacatgtttcctttgatgagtctaatgccattcttccaaggaaggattttctaaatgatatttcagattccttagaagatacacatattcatggaaatcattctaaagaaaaagacgaaggaagaaatgaggattctcaagataatggggctagaggaaataatgaacttccaagagaatgganagcctcaagagatcatcccctcgacaacattattggtgatatatcanaaggggtaacaactagacactctcttaaagatttatgcaataatatggcttttgtatctataattgaacctaaaaatataatagaagtcatagtacatgatacatggatca

SEQ ID NO: 33122 - DNA, 332 bp, Glycine max
  unsure at all n locations
agtatcctttatatgctttgtcttttatttctctaaagtaatgatcgaatatgccaaaattatcctatgcgtagaaaacatgtgatttcttctcaaaaaaataaaatcacagggttagctcgcctaggcgagcataccctactcaaattagttaaaaaagagggggggagggtgagtttcttcacccaaaacttctccctttcactcaagaatgccatcacccatgggactggccatccttcactcctagttcaccattcttttgcgtttccaatcccattntgcattgttgatcgtccccaacaagtaagttcctcattcttggtctctct

SEQ ID NO: 33123 - DNA, 218 bp, Glycine max
  unsure at all n locations
gacacatagaaactcacgcttcaagaaaggcccaactctccttagaaatcatatntcatgtttaaataggtggctntgttcgtgcttgtgcgcttagcgcaattctgaaccgcttagcgcgcattagtgaattatggcttagtgtggctcttctcgctcagcggatggactaaagcggtctgtttagcgggttgacccttctctcagctaatatgcac

SEQ ID NO: 33124 - DNA, 328 bp, Glycine max
  unsure at all n locations
agcttggttctttctacttacccgttgaagatcgaagaacgatgaagaacgaatgaagaacgtcgaagaacggtcgaataccttcgcgaaattcctcacggaaatgtttcggaagcgcctcggcttagattntcttcacggaaacaatttttccaagcaaattcgatagagcgagaagtgcctaaggggctgaacccttttccacttcacttcctcccctatntatagcaaaataggggagatgcttgccgcccagctcgcccaggcgagcanggttgcttccttcagaacaacagccttctggaggaatcttctggagggcccaagt

SEQ ID NO: 33125 - DNA, 283 bp, Glycine max
  unsure at all n locations
ntcaccagatcatataagataaangcattctttcatctgttatatatcctccacaatgtcaaattctctgcctatatattcaacctttccatcactggcacaggagtgaatcttcctccatggtgcaatattaaagttatattgtcatccattcctcacaatcagaaaccacanacattgccatatattatgaaataaaaaacctaactcatactcaaacataagcacatcacacaacaacatgcaatgtcatctattaaaatagagcatcatcaatgaaaat

SEQ ID NO: 33126 - DNA, 415 bp, Glycine max
  unsure at all n locations
agcttcctctgtgtcatttcctgcgaaggcaaacatttggagagttagttntaccaagaaatgctattcttaaaacgaaaatggcatacgacctcccccaataacacaaacatcaatgtaaatttagagcgaactcatgcgcatacttcctttcgaacattcactcgcaccagatattcttctaactaagaaaaatgcacccaggcacaatcaaggcaccttcgttacctagatcacttatatgtacttncaaggtgtatttgctacctacatcacatgcacttnctttgctaaatntacatacatgcatactcaaagcattntggctaccaaaaattgcatacgtgcacattctggtatttctaatacctatacatatacaaactntgtgatgaatcttggctacctacacaat

SEQ ID NO: 33127 - DNA, 483 bp, Glycine max
  unsure at all n locations
cgctntatgtgatgaacattggttaatggttatgcatgaagagtttattcaatttaagagagatgatgtatgggatttagctcctaaaccaacctctcacaagtcaatcggaaccaaatgggtgtttcgaaacaaacttgatgaatctgacatcacagtaaagaataaagcaagattggttgcaaaaggatacaaccaagaagaaggaatcggctatgatgaaacctatgctctagctgcaatgttagaagctataagattactactttcatttgcttggattatgaatctcagaactttttagatggatgtaaaaaatgtcttccttcatagatgcattgaagagaagtgtatgtagatcaaccacttggatttgtgcatatgacacatctaccatgtctacaaacagacaaaggctcttattgtttgaagcagcaccaaggccatgtataatagattgccaattgttaattagataatctn

SEQ ID NO: 33128 - DNA, 282 bp, Glycine max
  unsure at all n locations
agcttgattcgtgttttgttttatctntagtancactttggttattagtcgattcattcaaggaaacgtccaaagaanaacgtccgattgattntttttattattttattcaaacatattttgattattttattattattttgcctttttggatttaaccgaggttacagcgtgaacgatcggttagattntgctttaatagtgattaaacgacgttgcaacacaaatgatcggntganattcattntatcatttattaggtgagaaacaacttaaataaac

SEQ ID NO: 33129 - DNA, 506 bp, Glycine max
  unsure at all n locations
nnnnaaggggacgggaagggatcccgacgncngacncatagacacncagccggatggtgtcgcagcctttatggtcttggcggaagtgtgggttgaaatcacatttccattcagaataggccccacacttgccacgttgtggttcaagttattgatattaaatccggctattacttcctcttgggaagaacgtggattcattgcctgggagtgggcccttcaatgcttcaccagaaattgaaattcgcaatgggtggacttttagtgatagtgtcnggtgaagaggacatgttaatgagctgcccttcttcgcccatacgtagaagcggcggagaatcattggaacggctttcaatccttgaagtgtgactgccctctgtggaccaaatcgtcctacttctcttcaaagcgccatatggtgggcgtgtatgctaagaacgattgagcccgatgggttngcangactgcctcggatgcgactggtcatatcaagaatcatcaatttg

SEQ ID NO: 33130 - DNA, 280 bp, Glycine max
  unsure at all n locations
agcttgacagacctgcatttttacaccgaccgagttaccactcttgacactagatgacacttgtccatgcttgggggctcgaccgactcgtcccccttctatttgtcatgctacatgacactacgagacacacatcaaccctccatgtcagccttgatgcaagagcatgaacgcctagcccatagcagcccgactccccaactaacaagttatctctaacctcttattatntgaacataatggcatccctttatctctttatgggtattcaattgtctat

SEQ ID NO: 33131 - DNA, 545 bp, Glycine max
  unsure at all n locations
nnnnnngcggggnccggggnnnaaattccccnanngatnnatngannannaacnncnacnggagggagagagggatagagagagtgagagtggcattgaaattgaatgataatacggagagaaagtggacgtttgaagtgtgtctcacaagtttctcattcatcagagttgtgacaagtgttacacatgtctctatttatagcctaagtcacttacctaaatgggaatttcattttcatttcatgtgaatctaaaggaatattncatgaatatgccaaaggcatcttagcatattccctgtaaatgccacaagcatggaatgtgtgactctagcacatgcgaagcttccttgagatgcaacgaaggtagcttccttangaagcaaggaagaaagcttccttgagaagctagggggggggggtggaggncnnnaactccncggaatacggnattgtagtatcgtctctcagcctggnggcctaaatatgtgtgaatacttttactccaatcctcctgttggagaatctctcaaataatgtagtccg

SEQ ID NO: 33132 - DNA, 484 bp, Glycine max
  unsure at all n locations
ggcagatatgctgcatgaactganancacaacngaanaaggannngngaagagangganaggataggttctcattaacccccacaggaagagggagggaatacgaaccaaccacaccccccaaacaaaccgaacccaaaggggcgccgaacaacctgagaccccccacagagcagaaacaccgcgaccggcggcccaagggaaccaccacaagaaaaggaccccgccatccatgcaccccacggccggacccgcgacgtgaacaaccaaaagaagcctactgacacatcgcggagaaagaaggacgcaccacaccgaaggaggccaaaaagccccccaaatgaggccgggagagaaaagagagccaccaccacgggcgagagcgcttagaaacacccaacgccgctacaacaacccgcagagcctacggctaccaccacacccggctaggggcaaggaagacgacccccatataagacacacgg

SEQ ID NO: 33133 - DNA, 440 bp, Glycine max
  unsure at all n locations
agcttagtanatctaatctctatcacgtctggcttaagacgttaaagaagcgctactagaaggcaacctanaattggctacgaagaagctctctgcgaagcagtccaggaaaggcaccattgaagagggttctagtgtggccccacaagctgacacaggttttgacaaccaccgactccagagcgtggaacattagtagcatttcgaggccactgagggatggtcattcctcaggcagagacaaaggcagctaagggatgatgaatttccagatttccttggaggaggcggaaccatacaatcgaaatcaccaaacttgtgatttatccttcattactgctttcaattattctattattttggtatttcctttgtgatataacattatctgcttccaattgttatgcccattgtgattaaactgaacatgcagttatctg

SEQ ID NO: 33134 - DNA, 503 bp, Glycine max
  unsure at all n locations
nnnccggagcagcctancgacagcgcacccttanattctaagcctncactgatgtgcagggcggagccccttcggcttgctgtttcattttacggctttggcctttgttcttccttgcgagatacatttctctatgtacacttgccgtaggctataaccctacccaaactttccggcggtttcttctgtgcctaccangcttggtcttgtactgtggtcttgccaaaaccaatctatggttggaaccgtacccaacattaacccggccaccatcattgtcgtatcaaacaagaaagcttgccagagaggaatctacgaaagcatgcttactaccttaacgattgganatcatttccatgacttctcgcggcttcacatatggcgagagaaggggaactacangacgtcttctactgatactatacaaatgtcctcactataaactcactttggtggatgtaatggaacactcactgatgatcatggccccaaataacaatgag

SEQ ID NO: 33135 - DNA, 285 bp, Glycine max
cattggttactgtggttcgttggcaaatgatggttgtgatggtggttggtgtgattgttaacggcggaagtaaggtactacaacttcgatctagtttttttccgtataaaacttacaaattaataatccgtatattatataaaacttatggattatcaatccgtcaattatatataacctacggattatcaatctgtaaaaagacaatccatatgaattatgcgaattttcagtaatccgtatagtccatacggattctcaatccgtataaaccagtgctaaatg

SEQ ID NO: 33136 - DNA, 527 bp, Glycine max
  unsure at all n locations
gagtnnncancaggggnggnancctcnggctagcatgatccccctgnanatcaaannnnnnacnnnncccnnanncnnanagagagaacccacacttcacttgtttcctttcacaacgcacagaggggtgcgagtcgaattaaacatgaatgcatgaccatcgatagttgtgacagtattgacaccacatataacattcatctaagacataggggtgaatcacatctcatattcattaagagataatactgcttatcttggcttgcccaaacatcttggaatacaaacgtgttaactggaactacttatgtgggacatcgactctatcatatggagaaaatattctgttatcccattaactctctcaagagccgaggataccgctggcctgtctttggatagattctaacatcgaagactggactccatgctagtgaagctatccatgatccctagatactgtacggcaagaggtgtagagatatacgatgctatgggtgccaaccatctaatctgcctggcttccg

SEQ ID NO: 33137 - DNA, 207 bp, Glycine max
gattaaagatcaatatgcaactgatgaattagtagagtgacctctaatattacttaagcatccttgcattaattgctgcaaacccgcacttactgcctgcaccttgatagaatatgaagagataggactttcaaaatgtactaatagagattgtaattgaacacaacaatttctatgtataagatgtgtgatacttagatgtgtatt

SEQ ID NO: 33138 - DNA, 354 bp, Glycine max
  unsure at all n locations
agcttgagagggtgttgggtgatggaaccctaaccctagtggaattgggatcgagttgaggaggaagaggagagaganattgaagccgaaagaaagagaaggatgcgtcgtttgtatgtgtggtaccaacgaactccttttactgagaattgaggcaacatcggaaatgaagagaagagaaagaggtagagagagggaagagaaagactcanagaagaggcaaagagagggaagacaaagaggcagagaagagcagagagagggaagaagcatgaccagtgcgctgcccgatgcgagaaagagaaaatcacaataacaagaaaaagcctattaacaactgtaatgagagagaaa

SEQ ID NO: 33139 - DNA, 376 bp, Glycine max
  unsure at all n locations
ttcttcactagtaatcgattacacatttatattntgaagggtcatgactnttcaacttgaatatcaagaatctcgttgctggtaatcgattacaaacatccggtaatcaattacaagtntaaaattcaaattcaaaaccctttttaaaagttttttttcaaaattgtatcttggtaatcgattacactgcctggtaatcgattaccagagccttgatctcttggaaacacttgttntgaagcaaaagcttgatcttgaattaatcttgaagcattgcttgtttggtgaagcaaccttgtatttatcttgaagcaatgtttaacctttgaatgttngttgaagaatcttgaaaacaaccttgtttgattattctttg

SEQ ID NO: 33140 - DNA, 326 bp, Glycine max
gagctctagattgaaagaggagaatacttgtttaagagacaaattgacaacgtcagaagacaatgtcaagacattaaaaaatgtcatgcttgcatacatccaaatgaaggaaggatatattccttttgagttaggtgctatgtttggtcataacactagtaatgtaggtgtaagtacttctcttagtcttgtgttacatttgatatattattaacattcgacgtgaaaagattgttatttcataccatgaatgaagtggacataatgtgccaacaccaagaggaggctcatcattagatacgaatctccatgcaacttgacatatg

SEQ ID NO: 33141 - DNA, 499 bp, Glycine max
  unsure at all n locations
gggcaccggactacgattcatagncnnacgcgacacttagaaactcaacctgatgcatggcgtcagctctataggatgccatataccttactgctatctccctanacagaggcgcggacaatcgattgtctcatcggcaacacccacgagactgacaanacccagccttgccgcaggcttatcaggtgcgtactcatccagctttggactggggcgatatagcgaacaagctcgagcgattgcctgtcctcaagaaaacaggctgaacatcattagggcacgcaccttaacttctgcgacacatgaagctggattgcaaccgtactgattacccgatgtgaatcagttcgatgcgcctgctgggctgccgtagacgtttagagcggcaactcgaaactttgtctacatgaactataacaatgtccttcctataacttaactgttggggaggtcactgaccactacaacgttggcactggggacccacaatgatgtaacn

SEQ ID NO: 33142 - DNA, 275 bp, Glycine max
  unsure at all n locations
agctttaacctcattgtctctcacagacnctagagaagggagcgggtgcattccttgtgtccggactctcaaccacttatgatagccgccgatgatcccattactgcttccgactagctctctgacctttcttaacgccgcataccatgccttgcgaactccttggagtaccctagcattgtggtcactgaaacctcgtgcgatgaaaggcgtgatgcttacgtctgatggtgctcctctcatgggacattcttcgcatgaagatagaatcctga

SEQ ID NO: 33143 - DNA, 516 bp, Glycine max
  unsure at all n locations
gnnccgctgataggaaaagctgnangtacnnntagnannatctgacacactatacaccactcaaccgncgtgatgaagagtagagggactcatgtagtttngataatgattcacangacgacgaacagcccaaagagtgatttcaagattgactcaacccctccaagatcaagtttaatttcaagtttcttgaaacagagatcacgaagattccagattctagagacagttgacttcaagattcaagagaagatgaattccagttcaggagaagaaatcccaagactttcccagggacgtttggaaagattttcaaaaacaaccttgccttgtcttgtttccaaagaagtttcttacattttttaactacagaagtttactctctctatccatacccccggcaagttggtttctagcgttcaccggattgcaccatccatcgattccaaatgggtacctttacagggttgggatccgtccccgtgtttaacttgatttcaaacattgggagtgcct

SEQ ID NO: 33144 - DNA, 306 bp, Glycine max
  unsure at all n locations
agcttgtaatgttacacagtcctacaaaactccgaatgatcgttggtcttcatattgtnttggtaacgcaaaccgccctctactacttcaactactgtttgaggccacttgtcccataattttaaaacaatatatatatttgggttgaatggttcatgctataatagctttcagaaattcaccccccctcttaagttattgaggccacttgtccaacaattttaaacatatatatatatatatatttgggttgaatggtcatgctatcatagctctcaaatattcttgaaaataatataattggat

SEQ ID NO: 33145 - DNA, 395 bp, Glycine max
  unsure at all n locations
ggggggccgggggcctgnngnttcctgtnncaaaacttccaatagcttgtgggccatctgcaagcatattgttggttttnaccacggacgtacttaagcaaatggatacactctccataatgaacatcatgatattacagcagctatcgctatttcttacaacgtatctgcccagaatttataaccgaaaatgccccaataaataaagcactcggacacaatattaccgactacatgtgtttgtacttcataacacttcctggctaattaatactcatctaaacgtttgggacataatgcctccccattgtttatatcttcatccccctgtgagatctgaattaccaaacggctattagcttttagaatcgtctagcgatgattaaaaattcttc

SEQ ID NO: 33146 - DNA, 514 bp, Glycine max
  unsure at all n locations
cccacgttttggcgtcncgancggactgannacacanaccncaacattgncaggagctccagcttgaccgcgcggtatcatttggcgttagtccaggnacgccgggcgtcatttaaggacggacacacgaatcgaaagaccnnaagaatcccgcctgtccnacttcacaacagcgtaagtattttgcgcccataccgcggattgagtatggcaccccacaatcgaacaaggtaaccacaaattattcgcacacacctggaccccggcaacacgcggctcatcattcatcaatctcagcccccactggcgtatccaccacaagcctgaaacaaagttgatcgcaatccctccggcatgggactaacgacgaaagcgaccntcctcccacgcgttttccggctacacagacctcaggcactgttcctcttgcacgctgctcggcctccccgagacgccagagcacaaagctcctcccgacacccggaggacccaacggaaaacatgagcgccgacg

SEQ ID NO: 33147 - DNA, 408 bp, Glycine max
  unsure at all n locations
agcttgtattttagtcctcgatcggncatctttcctggccgacgccgactgtcatttttttcgatcaatatcggtgaataatatttttttgccgaggtgggctaatgttttcctggccgaatgaatgggaacatgccaatttcggccgaaacgaaacatcggttgagctcgcacgaaaaaacctatccgacctacattgtaagttttttatgcaacgccgaaacaagaaaacttcccctgccgtaggaaaaaacattatgggcagcgagcgttattttaaaataaaaaattgcgcaatgtcggctgaaaaatatcagtcggggccatttcacgaccgatgtcggttattgtgttttctattcaatccctgaatgaaatatgcatgatgtcgatcccgaaatgtntgat

SEQ ID NO: 33148 - DNA, 364 bp, Glycine max
  unsure at all n locations
gagttagttatgaatattangactttacactngatgttggtgacactccttctttctacacatgtatgcctttcatgtaagcagaaaataangtgtaatgctcatgatgaaggcttatgggagaacattcctatctgattggcatttacataagtaatgcttatgttatggtatagttaacatcattntgttgcatatttacactctatattaacttaatttgtatagatgcaattgccactaatgtgtttattattntatttgtataggaacatggctacaccaccaagctaccttcctcctaatcnccagcttctatagagtctacctctaggaggactaaacaatgtacacggctcataag

SEQ ID NO: 33149 - DNA, 502 bp, Glycine max
  unsure at all n locations
aggagggaaacagtggctctgaatgctctgcctaaaaacctngaaannacacagnaccaggagangccggaccagncgacccgacgcacgcgaacccacggtttagttgccaatgcctaccagccaacacaggggcggagcccgaggcacgcaaaataagaccacaccagacttcntgagaagaaccatccgcaagacaaacgagagacacaaccgtgccaaaaatcccacaggagccacagagtagaccgcacacaaccgcaaagggctgcaccagaacccctcagaaaaaaagcaaaacccgggataacgcccacccgcatattcaggagcaagcccctgcggaggagtagaacaaaccaaagaagcacctccacccacacacgccaagagcacagcaagccagggaaaaccgacaggcccgacacaaggaccacaaagagaagagccatcagattaacggagaaagggacgcaccacgcgacggcaggggaagaccccg

SEQ ID NO: 33150 - DNA, 281 bp, Glycine max
gcgaatcctgcgctaaaggcgtgatcacgaccatacttgttaagcccaaaaagtccgcttaatacgaggtcgcctgagcttacttaagcctataagaggagtaggaagcacacgaaaaagacacaccgagactaagagttatctaaagaatacatactatgtctgagcatcccaaataagaaaaatctttattctatggcaatcattcccgtcatctcactttattcatctaattccttaatctattcacatgaccttttaaagtatgaagcatgaccatg

SEQ ID NO: 33151 - DNA, 407 bp, Glycine max
  unsure at all n locations
agtacagtaccattcanatataaaagtggtcncattctatcatatngcaatnaccaagctgtctggctttgacgaggaattaaaaaggaaaaattcttttaattttagccttgttaaaaaaataaaaaataaaaacactgtacttttatcctctaccacatagaagccactatgatacttaacgagctctatctagcattttggactcgcttaattaaatgagtaattgaaggactactctaactattttttttttttaccagcgtctataaacattagttaagaaattaaaatatatatatatatttattataaaaattatatgagagggtcaaaaaagtatgaagaatatatttatactatctataaaatatattgttttaatttttaactatgtcttagacatc

SEQ ID NO: 33152 - DNA, 442 bp, Glycine max
  unsure at all n locations
acgtaaatcgtatactagcactancanctgnanaacnacaaacngtgatgctgtaagcgacctgcatgcatgcagccaatgtgtcttaagctattggcgaggacaggggcgcgatctggtgacttttacttccgtactgccttcggatcgaacgtcgaatgctgcatggtcgttaaaccctgtccgtgggaaaggttcaaagttgaacctaggagctcttaactagtatgacacacctacttagacgacagcagggataacttacccaggttacttttgcattttggaggaaaagtagatgccatacctcaggacntgcgactatgctatttctgacagcatgtacagaacaacactgtacctaatcgagatatcacgttacttaggagctcgcatccccgcttcaattggacgcggctcacgactaggctgtacaccatcc

SEQ ID NO: 33153 - DNA, 468 bp, Glycine max
  unsure at all n locations
cggacgtnnaacgacgatgactgangncannnannngaccgggagcgaacgaggaccgaccggacgaagcactttcatttctcaaccgcaaacagaaagggcggggcgcagaacaccaaacagaccccccagaggcaacgaaagggggaggaaccaacggcggacggggacacgccaaancacagaagcgacaagacagaggagaaacggcaccgagagaaaacaacaagccgagcagcaaccacacaaaataacacccccacgcagcgaagaagcgcgctagcccgacgagagaccaaaaaagccagccgacggcgcacgtgtaaaacaagacaacgagcaacaacgacaacacatgctcagcaggaacggaagcaaagaagaacacgagaaaaggaccccgcgcctaagaataaccaaaacaacacgacggcccggccaggcgacaggcgcaaggaaaccgcggcn

SEQ ID NO: 33154 - DNA, 451 bp, Glycine max
  unsure at all n locations
agcgacgacgtnttanagcatgcttgaaactggaaaanccgccanaccggggtcccaagagctaacagccgccgccacttttttcttcgttctggacaaacaggggggggggatgtcggaaatccatatatctctagtcatctcctcatcatagacggtgatccatcctcacacaagctctattgatgaaccaccatcatgagactcgatctctagaaataccctaacggaaacgtctcgctctacacttgaagacccacaccgctgatttctcacgcattaaggtacaaactgccctagcatgtcatatgcttgacattcgttagactactttctcactatgttagttactcgtaacacctgtgctactaaactattggcgggatggcaaagtaaacggactgggcatcaatgaacactctacggaacagttacttaccataaccctcac

SEQ ID NO: 33155 - DNA, 447 bp, Glycine max
  unsure at all n locations
caccttatctgggggagcctaattctaaatgtngtatttgtgctcggggntatcattcgctgaggggtgattatatttatatatttatccctatacattntaaaattntcattnttatttttatttttttatttctcaatttataagtntaagatgacatttggtattttattaattntacttataatgtactaatgttgatacgactgtagagatattaccaatccttatttatttaacttctccatgaagattgtaattatcaatccttattactttaaatgcctatcagtccattttcctttntgcaaatttgaattttcgccattggctaaaaactgtactagaatatgaatgaatgtgaattgataatgggtgctagaaaacattgtagtgcagacagtagatgtggcttggtagctaaaagattggactatatgtatatat

SEQ ID NO: 33156 - DNA, 446 bp, Glycine max
  unsure at all n locations
agcntttcntttagnatanacttccttggagaagctaagagctngaggctacaccacacgcccttattaatggactacagcttaccttcctctggagatagcttcctttggagaaatttccgttgagaaagcnnttccttgagaagaattcctagagaagctatgagcttatctacacacacctctctaatagctaagctcacctccttgagaagagaagctagagcctagctacacacccctcataatagctaagctcaccctatgacaaaatanatgagaatacaaaagaagtccctactacaaagacaactcaaaatgccctgaaatacaaggctaaaacagaatggccaaatacaaggcccaaaagaaagaaaaacctattcaaatatttacaaagaagagtggatccaaccttggcccatgggctcagaaatctaccttgg

SEQ ID NO: 33157 - DNA, 318 bp, Glycine max
  unsure at all n locations
ctatcatgagtaaagatcgnttacccactcattaatacaactagcttattgctagcaaaatcgagtcatattcatagtcctgatgctttcaatgttaatttccttattgtggtaatgcttcttctgatgatgagatggcttttgatctgaggatgaatcttctccaccccaaaaaggatcctgcagtgcaagattgagcanagttgtaccaaaaaagtcatccgtgtccatattttaacaaaggagtacaccttttccaatggaaacgaccttctaaggagactgcattccctactagcaatgtgttgaatgatattt

SEQ ID NO: 33158 - DNA, 402 bp, Glycine max
  unsure at all n locations
aggatgggttgttgtatgctganactggaaaaccanacnnccgtgtccanagagcgaccgagcagcaacttctataattctacaaacaacgggaggggtggaaagaaaatacacctattcccataatctagcagctcgcagcaactgaagccttgccacatataggatgcgaatcttcgagaatcctcacacaagttgcctaaaataaaggttacactgacccaacacttataactccaatggccaggaatagacgcctactattgaaagcatagactagaagtaacacaatctccaagctcacactggagaatatgcatatgaactagctcatctaaaagactaaaccacttgaatatccataacaaaaaagacccacctgatcttatcctaatgaaagcn

SEQ ID NO: 33159 - DNA, 405 bp, Glycine max
agcttctgatggtgccctattgtgtgctgtttttttttttagacaaattcccttagcaatcccccaaattaaggacttatcataacttgaaacccttatgctttcttagaaccctaaaacaaggtcaaggatatcaaaattaagctcaggggtttattcaaacaaatcattattacttttggctcaacaggggtgcaagggataaattcatcacaggttagctttttggctgagtggctaaaataaaaagaaacatggccttgatcatatccaccttatgtaaataatctaacagtctaagaatgatgcaaaattaataatttaaaaacagacgttctctcataattaatgtcacacagctcaccgggacaagataaagttatcggcttaccgaaccatgatctc

SEQ ID NO: 33160 - DNA, 356 bp, Glycine max
atgagttctggttgcaaccttgtctttccatttttttatgtgtgcatatcttttcattctcgtctccctttgccaaaaagaattcgacaaggactaaccacctgaattctttttgtgtctctcttctcccttttctaaaagaacaaaggactaatcgcctgaattcttttgtgtctcccttctcccttttcaaagaattcaaaaagacacagtctgagaattcttttgattcttccctttcccttaaacaaaagatttcaaaggactaaccgcctgagatatcttttgtttccccttcataaagattcaatagactaacccgctgagaactttgtcttaacacattggagggtaca

SEQ ID NO: 33161 - DNA, 382 bp, Glycine max
ggtttgcattcttggttttacaatctatatgcgtcggcttaagaggaatattagatttatgttatcttttgtttatccaatagtacttgcttatagtattaaaactttcttatacctttttttttttctgtaaacttatatatatatatatatatatatatatatatatatatatatcaaagtctattgagtgtgtgggacactctacaattattctcaactacatataacatgatcattttatgttcattgaaaattgcgtcttaacttgattttcatgattgatgttaattatcacttaatatcttgtatagtataaaaaatatctacttaaataaattggcatgaccgttatgatcctttaaggaaaaaaaattgaccg

SEQ ID NO: 33162 - DNA, 403 bp, Glycine max
  unsure at all n locations
gggaggnntttgtgcctcntagcactcgaaaaccngaccgggatcttacagggacctcagatgcaaccggctgctatctctttgtggacacaagagcgtagccggagtgaaccaaccgtgttgtaaaaggacttgcatatcttcttactttttgccagtaggccgatctgttgcattccttcgtgaagacacatatcaattttctttattagaacacattatcctatcccactaacccaaataccaaaacggaggcatgtaaccctacatctattaaaaaaacgcagaggtgcctcatgggacatcttactaccctggaggactactagccgcaaaccttcaccagccatatcttaaaggtacccgtttatgaacttcagactgatcagcaagacatatcgaa

SEQ ID NO: 33163 - DNA, 425 bp, Glycine max
  unsure at all n locations
agcttgtatctcttgtgcaatntcttagtcacttaaaaagttatgactttagaaataatcttcagaaacaagtcacttgaagaattgtgacttttggaaatgtatttttcgaaatcagtcactggtaatcgattaccattgaggtgtaattgattacacatcaacatatgtgactcttcattttgaattctgaaaatcttaaagttttaaaacactagtaatcgattacagctttgtaaatcagtttgaaaaacaatgcaagctactagtaatcgattactaccttctggtaatcgattaccagagagtaaaactctttggtaaaagattntgtgaaaacttcatgtgcaactcaatgttttgaanaactttntagtacttatcttgatngagtcttctcttgattcttgaatcttgatcttgat

SEQ ID NO: 33164 - DNA, 326 bp, Glycine max
atcgaaataataaacctctcactcgcttactatggattattgctactaataataatcgccatctgtcaccatgaaatattatcttaatgtgatttgctccatctgacttcatgccacatgtttatgcaagactctatttcgatgttgataatttataatatactaaaagaaccaaagtcgagcatcttaacttatatgaatcatgacaatatgttattcaataatgcaattaatgaaatactacatgtgtgactatcattaaggaatattctcttattgataatatcactatgaagatggcatcatgttatacataacatcaatta

SEQ ID NO: 33165 - DNA, 413 bp, Glycine max
  unsure at all n locations
agcttagctctagatgtgatggaccttntcaggttntggagaggatcaataacaatgcctataggttggacctcccagaagagtatggagtcagcaccacttttaacatttctgatttaactccttttgcaggtggagctgatattgaggaggaggaactaacagatttgaggtcaaatcctcttcaaggggaaggggatgatgcaatcctccctatgaagggaccaatcactagaaccatgagcaagaggctccaagaagattgggctagagctgctgaagaaagccttatggttctcatgaaccttatggtagatttctgagcccatgggccaaagttgggtccaattatctttgtacatattagactaggatgtcattatatttggtccttgtatatanggctccatatt

SEQ ID NO: 33166 - DNA, 278 bp, Glycine max
tctcattcgtgaaagttacaacaagtgttacacatgcttatatttatagactaggtagctgccttgagaagctctcttgaaagaacttccttgagaagcttctttgagaaaacttccttgagaagctagagcttatctacacacacctatctaaaaactaagctcacctgctggagaagctttcttgagaagctagagcttatctacacacaccgctctaataactaagctcacctacttgagaagagaagctagagcttaactagacacccttataa

SEQ ID NO: 33167 - DNA, 419 bp, Glycine max
  unsure at all n locations
agctngngttatgttgcgcgtactgatgggtacaatgaggtgtgtgctggggtttgacccacgcgggtgttgaagagacggcatgggcatctccttccttcctttntgcccgtgttgccccgattcttttggcattcgcgnttgtggaggacacgtaatcaaactttcctcttttcaatccaacctcgattctttccccggcaaacaccagatccgcaaagctggatggcatgtaacccactagcttctcatagtagaacactggcagagtgtctaccatcatggtgatcatctctctctcaaccatgggaggagctacttgtgccgccaaatccctccatcgctgcgcatattctntaaaagtttcaccctctttcttgaacatattctgcagttgagtacggtcaggagccatatca

SEQ ID NO: 33168 - DNA, 352 bp, Glycine max
  unsure at all n locations
cttctttatccccatatcaattatgcagcttgtagttaacatgaatggccctcccaatattataggaatgtcattatcttcacagacatccattaccacaaagtctatcgaaaagataaaatgtttactctgaccaacacatctttaattactctgtatggtctggtaatggagcaatcaacaagtngtaaagtcatcctagtgggcatgatctccaactctcccaaccttctgcacatggagagtggcattaagttaatattggctccttggacagagtggcatttgctgtaaagctttccaagggcatggttatttccagtttcctgaaatatctaanaatcttgcaaat

SEQ ID NO: 33169 - DNA, 403 bp, Glycine max
agcttggtgtatattatctatatgctccagctagacggggagtgttgaatatcttttggggcttctaaattagatgtgtatgcatcattactaaatatttttttcttgttttagaaggcaacacacatagactagactacgctgtcacatagactatgctaggctgtcttttccccctttctctctcttatgctgtgtactctataaattgtaagctgaaacatgaatatcaagagtcatgtgagtgaaatttccttacacttaaactcaagtgtgaatttgtgatgccttgcttctgtggatcggcgcctgagtttctgtatgatggtgtttcttttaatcccctttgcctatatcctgctattgtgtgtccatgaagacagctgcctttgcactacctact

SEQ ID NO: 33170 - DNA, 315 bp, Glycine max
ccgtgatgttctcgtaagagcgaacagtgaaatacaggatgaatccttgcctcctcgggtagtttgagtttgtatgagacttggcccacacgttcgattatctgaaacggcccaaagtatcttttggttagttttgggtgtattgaaccaactacggtgcgttgccggaagggacgaagcttaacgtagacccactggcctatgctgaaggtgacgtcacggcgcttggtatccgcgaatttcttcatggtgtcttgtgccttttgaaaacgatgttgtaacttccggtggatctcttgacgcgagtgtagcatg

SEQ ID NO: 33171 - DNA, 414 bp, Glycine max
  unsure at all n locations
agctnccattgttcaattntgttcgtctcgatatattatgcgcctgaatcgcacatccgagttaaaagttatgaccttttgaatatctcgagagcttccattgttcaatttcgagcgtctcaatatattatgcgcctgaatctgacctccgtgtggaaagttatgaccatttgaatttctcgacagcttccattgttcaatttcgagcgtctcgatatattatgcgcctgaatcggacctccgagtgaaaagttatgaccatttgaatttctcgagagcttccgttgttcaatttcgagggtctcgatatattatgtgcctgaatcggacatccgagtgaaaagttatgaccattttaattgctcaagagcttccattgatcaattttgtacgtctcgatatattatgcgcctg

SEQ ID NO: 33172 - DNA, 375 bp, Glycine max
  unsure at all n locations
cagcagaatttagtaatgacccactaacctagaattattatattctattgccattaacctanggaattaaaaaaaaaaaaacttaatggctgagtgtaactgaaatcgtggcaaccaaaagtcacccccaacaaccaacaagtcagccaccatttggtctcccaaaaggctgatgcctaagttgccaattgggcccttattacaacttgaactaaacctaactaaagcccttttaattgattaacccaaaacatatttttggtcaaccaactttacaaggattgggacattatttagacaaactaaacactctaacaattgagacaaagtggtgtcatttaatcctccttcatatgggccatgatacaactcaca

SEQ ID NO: 33173 - DNA, 380 bp, Glycine max
  unsure at all n locations
agctttnatttcgtccttcaagatcatgcctttgacccatgatgattcctttcacctctttggagcttgagctcactattgctgccctataaagcccctcaaaactttgctttggtcgtgttcttcctttcgggccttcttggtttctcgttccaaggcttcagcggtggccatattgacgtcccttagttcatcatactcttttcagactttgatggctatggacttgaacttctcttcgactacccaggctctttcaagctttgcctttagggttgtacctcatcactttcttccgaagctttaacctcgtcatctctcatagtctntagatgtgggagccaatccaatccttgtgtccggtctcttagccgcttatg

SEQ ID NO: 33174 - DNA, 375 bp, Glycine max
tcacatgtggtactatgtggtggtcgggcgatggtgcacaacaagttgtccacatccacaaagcgcgcataaacccaccatcccctgttgcccacctccaactgagctcacgtactcccacgtagcccatatccttttttctctcaacaccgggtccccatcaatcctcccaagctttcccaacatcaaagcaaaacaacattcaaacagcacaagctatcacagccaagcaaaacagagcataggcagaatactctgccaaaacaccaaccaaatcacagcttttctcacttaaagaccccagtaacaattccttcgatccaattcggtaaccgttggatcgactcaaaattttactggaagtctataatacat

SEQ ID NO: 33175 - DNA, 125 bp, Glycine max
ggggtttctctacgcgcagtggctttttacgggggcgcaggcagaagctcagtagcagggcatgacggggggaggcgccacgggctaagcagtgcggcgcagcggggaggtggaagccgtgaaag

SEQ ID NO: 33176 - DNA, 416 bp, Glycine max
agcttttatgattaaactaagttaactaacctacggttaaaaaaaaataaaaacaacgttaaaggaagcttacttggattgctgaaattggatgcaaagaaagaagcaaggagaacaagcaaagagtgagagcacattgcagagaagaagcaccaacgaaatgccaaaaatgtagtttaaaagcacaaatgaaaatgtaactgccaaaggcagctatgccttattgtttgaggtttcgaatgccttgcttagcgcatcaactcgctaagcgagcatacataacgtttaagattccaaacacacgcacttagcatgcaaactcgcttagcccaatgaaaaaattcaaattttccagagaagactttgggcttatcgtgaagagtcgtcgctagcgaataatcatgctccttaaatgt

SEQ ID NO: 33177 - DNA, 117 bp, Glycine max
tcactgagctcacgtctccgcgtacccatatctcgttctctcacaccggtcccatcaatctcccagcttcccacattcaagtatcgacatcaacaacacaactatacagccaaaaac

SEQ ID NO: 33178 - DNA, 51 bp, Glycine max
  unsure at all n locations
accttgtcgccttgcgtataatatttgcccatggttgaaacggtggcgaan

SEQ ID NO: 33179 - DNA, 413 bp, Glycine max
  unsure at all n locations
agctttatttnttatcgggtgttctccctttattttggtttctaagttttcacactacaaaaagtttaaattgttttgtgctgctggagcttctacaccttgcattgcattttcggtttatatctgtatcattggttaatttttaaaaattattcttttccagcccaaaagcttaaacctgtcttttgtgtttttaaaaaatctaacatttcgattttgaaaaccaaatctgtgatttttatgtctgctccctccccagtggatttctatattgtgttcttggtggaggaacgcactaaagctgcggtttttatttcaaaactctatgagtacacgttccttttgttggtgacttctcacaaacatctctaatgattaaagatctttacatgcatatatgtatagttataaat

SEQ ID NO: 33180 - DNA, 374 bp, Glycine max
  unsure at all n locations
ctagaganagctacatgaagctgcctcggtaaaaactgttgttcttccttcgttaatcgttggatcttctcgaaatttggtctacaactttacaagacacttttccatgatctgaccgttgagatctttgagaagatgtctggagtgtgctcgaagcttccgttcccgagagcatttcttatttaagcacttcagcctttgctttcgtgtagcataggaaaaacgtcatttcttcttctttctttcttccaaagccatttctaaagttccaagcactttctccatcacccacagccaccattagccactacaaaccatcattgttctccattgaaaccccacaccgagaggaacccttcaaccgaagcggagtc

SEQ ID NO: 33181 - DNA, 363 bp, Glycine max
  unsure at all n locations
tatcttgattgtgtgtaacccaccatttttatagtaaaacactggtaatgtgtctactattattgttagcatttttttctccgtcattgaggtgccacttgagctaccaggtctctccacctttgggcgtattctttgaaagatccgtgcccctttttgcacatgttctatagttgcatcctatccataaccatatcaaaattgtactgatactgcctaacgaaggcaaccattatgtccttccaagaatggactcgggaaggttccaagttagcgtactaggtaacagctacccgtgcccctttttgcacatgttctgtagttgcatcctatccaaaaccatatcanaattgtactgatact

SEQ ID NO: 33182 - DNA, 324 bp, Glycine max
cgccagtagaactggcagcatccatggccattactgattcttcttacaatttgtttaaaaacaaaccttgtttggtaaatagtttttaaatgaagccccctacagtaaatttgcctatcttgcctatcttaagacatccttttcaactctacaggtaatctgtcacacatggtttatatttatttctcgagaattattcaatctgcagccaacccaattcaagaactaagcaccatgacaaatttgcttaaaatgtagtattatatttgcttttaattagatctgcttaaaacggcaatagttctaagattattaaaaaatatc

SEQ ID NO: 33183 - DNA, 512 bp, Glycine max
  unsure at all n locations
aaccaacgcnacactgatgaccagtanngacntnntagnannaacanggnnaangngagctnggatccacgggatccgctagagtggacctgcatgcttgcttgtctcgntgtattcaaagcacagacccaagaggtgtggtgctgtaacgacaatgtggccatagaaaaacaataacatcataaacgacgatgtacttgggacaatcaatgcggaccaatagtgctgacccatgcttgactctttaacaaaatggtaacgtgataaatatcttacagtatagatgttacgtaaagaattgcatcgagcatgaatacccaaactgaagaggatataagtgattgctaaactcatagcctggaacgcgaaattctcttgttaaagaagacgcgattcttattgaaagagcgggccgatttattaatctgatcctgttcctaatctatagaccacgactactcaactgaccgcatgaggtaatgcatcgaggaaatgctaagatatggaatacg

SEQ ID NO: 33184 - DNA, 379 bp, Glycine max
  unsure at all n locations
agcttttgttttctatccatatctggccttgacattaaccagacttaacaccgccgacaatagcgtcaaggaattgttgcaccccggatacaaaggcttctttgagtcaccctgcaatctttcatacacaggggcatgtgcttgctggaaagactcttgtccaaggtcacgaatcatatcctccaagcgatgtcccatttctacatcaaacggtttggattgttgcccactctgcatgtctgtcatttcaccatgccatatccacgtcgtataatttctcttaattccatcacacaacagatgctctcgtatgtcatccagtatttgtcgtcttccattcaaacaattgatgcaaggacaataatattntccatcttca

SEQ ID NO: 33185 - DNA, 270 bp, Glycine max
  unsure at all n locations
agctcgtattaaatatgtctttaaaacactcncaatgagaaagtgaatctttattcctttattaatatatatgtgaggggtaaagggtgtcacataggcttcttgtgaacgactttcctgatgaatgaatagtgcataaaatcctggtcactatacccgatatgtctgaatctaagatatcagcattggatgattctaaagacctgtcaaccatcaccttgcgagaactcatatatgctctacaagcccaggagcacagaataatgatga

SEQ ID NO: 33186 - DNA, 296 bp, Glycine max
  unsure at all n locations
acatttggggttgctatggcgctctataagtggattcccattaagttagtatacaagatcatcttgcttgccacaaacttcattntgggcaacaccaatcactatggcatcaagaggcccaagaccggcccaatagagctcaaactcgccacagggaaaaccccacatcctgatgttggtcaagttgcacacataaaatgtggtaacataaaggtatacacaatatggctcacattaagtgactccattgggtccttttttaccgacaaatgttagacgttagaatattagttttt

SEQ ID NO: 33187 - DNA, 389 bp, Glycine max
  unsure at all n locations
agcttaggttcccattcttgtatctncaatgcaaggaaacatgcatatggctaggaatccaaaatttggttttagaattagaanaacatganaaattaggattttcttgtgagaatttttgctcgaatttgggctgccccatgtttgatactttacatagaggtagcgtggaaaacaccttgcaatagtgtgtatacataggtaaatataaggagcatgaaattcctagcaaagtgtgaatgattatcttcctaaatgaatgcatgatagcacgaaattcccttttgaatgcaaaagtgtgtgcataatgtaaatagcttgccgatatgaataaatgtgaatgaaacaataaaaaanaaatttgtatgatatatatntcaaacatatgt

SEQ ID NO: 33188 - DNA, 421 bp, Glycine max
  unsure at all n locations
agctntactttatattttagtaatgacccactaacctagaattaaaataacttaatgccattaacctagggaattaaaacaaactaaatgactgagtgtaactgaaattgttggcaaccaaaagtcacccccaacagccaacaagtcagccaccatttggtctcccaaaaggctgatgcctangttgccaattgggcccttattacaacttgaactaaagcccttttagttgattaacccaaaacatatttttggtcagccaactttacaaggattgggccattatttagacaaactaaacactctaaaattgaaataaagtggtgtcatttagtcctccatttgggccatgatacaactcacaaccttggacttttctccttgaaacttgggcttgtattcaaatagtatggacagcact

SEQ ID NO: 33189 - DNA, 493 bp, Glycine max
  unsure at all n locations
nccccgccgtgcctgaagcatgcagtacggacactttngttaccatgcttccncctcaatttcgagcgtctcgatatattacgagcctctttcttacatccgagtaaaaagntatggtccgttgtattggatcagagcttcaacattcaatttcgagcgtctcgatatgttacaggactcaatcagacatcagagaaaaaagttatcgtcgtttgaattggctcagagattcaacattcaatttcgagcgtctcgatatgttacgggactcaatcagacatccgagaanaaaagtattgtcgtttgaatttgctcaaagcttcacattcaaattcgagcgtctcgatatgttacgggactccatcagacatccgaggtaaaagttattgtcgtttgaattggctcagagcttcaaaattcaaatttcgagcgtctcgatatggtacgggactcaatcagacttccgagtaagaagttattgtcgttgaattgg

SEQ ID NO: 33190 - DNA, 414 bp, Glycine max
  unsure at all n locations
agctnngattaagtgttgatgtctccaagaacatacttcatattgcatggaaatagtatagccagtcgaagaaaaaaggggttgcacttctaatcttttatgtttaagtgagttgagagagtgagtgacaagtgtggggtggaccaaagatcatggagtgttattgtccacaggattataagattctgcacatctaatgggtattaagggattttatgacaataagctaattaacatatgtaatcatgtaagttacctagatcaacatgtcatttaaattaatcatgcacaatgttaatttacacagcgtgaatttatatcgtcctatctttcatagtgtaaaaaataaattctaatgaaatttatattctactaactttgtcacataacataatatgtatataattgatatcg

SEQ ID NO: 33191 - DNA, 419 bp, Glycine max
  unsure at all n locations
agcttgnttatgtctctnaagtttgcttctgctcaacaagggagggctttcttcgtttttggcgattcactcgtggacagtggcaacaatgatttcttggctaccactgcacgagcagatgcccctccttatggcattgacttcccaacacacagacccactggacgcttctctaacggccttaacatccccgacataatcagtatgactttgtgacatgttagaaaattagtagaatggattagtgactaaatttagtgacgaaaaattggttattcctcactaactctaaaatcactaaatttagtgacatttttaaatataaaaaaattacatataaatttttcagtcactacatttaatttttatacaagttataagaatgtttgtttggttctagtctcccatttgcatgcatg

SEQ ID NO: 33192 - DNA, 402 bp, Glycine max
  unsure at all n locations
gagcactcctgtggtttaagacacatatatgttcgtgggcttcaactgggtgagatattactatacaaaatcctatcagtattgtctatgtcaacaaatcaaagccaaattgaatggatgagactaagtagtacgtgcataaagtcctttaaggggttgaggtttgtcagcagaaaataagcacgaaagaatctgggaattgtctcagctgttttgaatgggacagcaacgaggaggaaactaagaattaaatatggtttgaagctccgatcgctctatccattaaaagtggaatgtgcaattagacatatggtctgagtatgtctgggaattgattgagtaattaaagaagatgcatgttaattactatgttgtccattctaanatgaatattaattaata

SEQ ID NO: 33193 - DNA, 118 bp, Glycine max
ctttgggatcattcttacgagatcattaccgtggaactcgtgaaggcaactgggtgggcttatctatccttgtctggagccaatcctacatcactacaaagttctttctgtatccact

SEQ ID NO: 33194 - DNA, 342 bp, Glycine max
atgaagaaagcatgattttcagcaaagcacagatctcaagatcagaattaagatagactcttataaaagtgtttgaaaggcacaaatgcatggccaagagagtttctatcttaacaaaaacttttccaaagcattttactctctggtaatcgattaccagatgttgtaatcgattaccagtggccacaaagctttctggaaatgttttccaagttattttcgaagttttcaaagctcttatccattaccaatgctttaaaacagctaaaaatgattttgtaagtgtcgaatcgattacacatcatatataatcgattaccatagcttttgaacattgcacat

SEQ ID NO: 33195 - DNA, 368 bp, Glycine max
  unsure at all n locations
agcttctctatatattatgcacatgatggtcataacttgtcacacggatgttcgatattggcgcatcacatatcaagacgctctgaattganaaccggaagctctcacaaaattcaaatggtcataacctgtcacacggaagtctgattcaggcgcagtatatatcgaaacatttgtaattgaaaaaagaacgcactcgagaaattcgaatggtcataactttgtcaacggatgtccgatacacgcgcataatatatcgagacgctggaaattgacatcgtatgctctcaagagattcatatggtcataacttatcacacggtagtccgattctggtgcataacatattgagactcttaaaattgaac

SEQ ID NO: 33196 - DNA, 416 bp, Glycine max
  unsure at all n locations
agcttgttctttgattgtatcatgcatctcttcatgacatcgtaatggacatatcattcttgcatatatcatttatcatattcatgcattgcatttgcatgattcattgcattatcatacatcttcatttagcatgcctttgttttgccaattgcgtacattttcatcatttgcatgctatgttcactcatgcatgatcctgacacatatttgctcatgccttgcattntctgcaaaaaaaaaaaacagaaaaaacgaaaacaaaaaagaacaaaaagaaagtcacaatgaagcatgaaagtttacaccacattcttagttaaatgtgttgggtaccatgatgatagctataaaccaaccatgttgggattatacactcatttctcttannaaatgattganaatcatgtgaacat

SEQ ID NO: 33197 - DNA, 332 bp, Glycine max
tttgaaaaaatcttcagaaacatgtttcttgaagaattgtgacttttggaaatgtaatttttgaaatcagtcactgggaatcgattaccattaaggtgtaattgattacacatcaacagatgtgacttcattttgaattttgaaaattaaaacgtttaaagactctggtaatcgattacaagtgttgtgtaatcgattacacaagtttaaaatgatttaaaactggttaacacaagttgtaactcttggaatttgaaatcttaacattataaaacactggtaatcgattactaccttctggtaatcgatttcagagagtaaaactctttggt

SEQ ID NO: 33198 - DNA, 343 bp, Glycine max
  unsure at all n locations
acttgattgttacctcaannccgcagcggaggcggagaggatcccatatctactcgatactcaatgggagcgcataaccctaaccaaggtttatcagcctccatttctacgagaatacgactcgaacgcaacaggtgcttgtcacggtaaagccctggggcattccattgatcattgtacggcgtctgaatcgtaaagtgcaaggtctaattgataccgggcaggcagataatcgaggagaatcgcttgttgaattctaacattcacaagcaacaccttacatggggcaattcttgaactagtgacatgactcatcacgactagcacgtatatgcctaaacca

SEQ ID NO: 33199 - DNA, 399 bp, Glycine max
ttctttgtcttgagtcatcaagtgattataaatatgtgaccatggcatgagtttcaactaacaatcaatcatcaatcatctttgaatcatctatctttcaatctttacaacatcatctctcaacatctttcaatcaatctttcaatatcttttctatagaattttctaattcatttctcttcatctttctaaaagttttttatcaacactttctcttccaagaaaagttctttgttcaaaaacttgtgctattcatctttttcattctcttctccctttgccaaaagaacgaaagactaactgcttgaattcttttgtgtttctcttctcccttacaaaagattcaaaggactaaccgcctgagaattcttttgattcttccctttcccttaagcaaaa

SEQ ID NO: 33200 - DNA, 338 bp, Glycine max
aaaatttatgcttaagcgacatataggttaaggttaagtgaaaattcatgttgaacactttattacatggtttttgaatgaatttaattgaacttaaatgtatggggattatgaaattgctacaattggattctacagctatatgttaggaaattcacatttttaaggattgatcacgtgtgaaagttacgattcataatgtggaatgccttacaaagcttatggaactactaggtgggttcctaagtgtattgtgtaaaaaatggcgaatatataacataaaggggaacttgtggtattaaagctgattgaatgtatacatgcatacatgacattac

SEQ ID NO: 33201 - DNA, 407 bp, Glycine max
agcttccttatttcttcagttgccgggggcggtccttccaaggacaaaactattggttgtgtcgtgacgttgggctgaggcaatgtgctgggtgccggtcttttgaggatcgggggatagaactcgacatcccttcgagcatagtcttgagggtcttcgtggacctcgtcgggctgttggggaggctctctttcaaggacaggagaagcaatatggcccgcatcgtcttgcatgacaggaggtgagtagttgggcggcaatccataagggtaagccgctcggttgtatcccagatgagggttgccatcatgccccagcgtgttccttccccatcctactatgtttgagggaggatggcgcgcggttgccaagagagttgggtctgctttggcagccgaactgacagc

SEQ ID NO: 33202 - DNA, 309 bp, Glycine max
acatatactgtaatcgattactttttgttttttcagaaaacattctcaacagtcacatctttttatctgtttcttaaatggccatcaagggcttatatatatgtgacttgagacacgaatttaacaagagtttttcagaacaaaaaagtcttatcctcttataaagcaaaatcggtttatcctcttacaaattccttggccaaaacacttgtgattcaataaggaattatttgagtgctcaaattgttcaatctatctctttcaagagagatttcttcttctcttcttctttattctgaaaagggatta

SEQ ID NO: 33203 - DNA, 335 bp, Glycine max
  unsure at all n locations
agctngtgttgnattttcatggttgacgtgccgctttgaggaagaccagataagatgaaatggacgggctgtttagtttgcacggcgtgctgaaacagcgcgaggagagtctcaataggggtgtgaaagagatgcancatgagatggatgctttggagcagcagttacagatggtgttgatgaatactgatgtnttggaagggtggttgatggataatcaggggaagaagatggccggtttggagaatcccgaggatgcttttgagtgtgcggatgtgctctccaagcatatgcttgactgtactgctgctgatttggcgattgaggacacgctt

SEQ ID NO: 33204 - DNA, 527 bp, Glycine max
  unsure at all n locations
nccccctgttgcgagttcangtagttcgcananctagannaataagccccgcggaaaagaccggggctttggggcttcatatatataatttactctttaganangcaaagngnctntggaaagttcgtagtctttgtgctagctctcaagacacgtgggttcaacggtgatgagacttttttttttcttttttgcangctggcaagataagacgaaaagaaaaaacgcccccntcttagatcttttgcagaaattgcattgcaaattaaataaatccctctttgtttccattaagaaaatcttacagtgaagaaaagttgaaacatttctcattgggtaagcataatgctgatgctggaagtgatcactacttcaattaccgaacaacctatccaactaaaaatcttgtgaacatgatatgaggttatataaaacatatttcaatactgcgcagttcagtattgcttgagtaccaaatttaccctcggattatatgataaccaatatcatggtctgagaatgaaaag

SEQ ID NO: 33205 - DNA, 318 bp, Glycine max
ataaatagttgtaaagtgattggcttggttgggcaccacttgtgctaaattaagcgttattaataaatcatttgccttttaaaaaaaaattaaacttcaccaggaattgaaatcatgcaagtcggtgacaattagagcatctaacatatcaatggcgacaatatttgtactcccttgcttcaaatataaggaaaaaatatattctcttaatctcaaatataaaaaataactgatttcacactattaaatagcactatccctctcgaacatctttgatctaattgatgtcctaattacaataactatactttatcatta

SEQ ID NO: 33206 - DNA, 292 bp, Glycine max
  unsure at all n locations
atgctctttctcggcatcatgcattactttctatgcttgaaacaaaattgattggtcttgaatgtttgaaaagcatgtatgaaaatgatgaaacttttggagaaatttttaaaattgtgaaaattcttcagaaaatggtttctttagacatgaaggctttcttttcaaagaaaaaaaattgtgtgtgcctaaatgttctactagaaatttgcttgtttgtgaagcacatgaagganggttaatggngcattntggggtccaaaagaactctagaaaattacaagaacatttt

SEQ ID NO: 33207 - DNA, 398 bp, Glycine max
  unsure at all n locations
agctncttgtttactcgctcttggtgctcagaaaattcaaannacanatccctcttattactaggctatttgaattctttagttcctgaatgtacaaccttcanattgttgctcgttcccctctttattntctggcaaaaataaaatcaatatcaaagaaaacagagaattgtcatggttattattactcgaaccagaaggaataacatctaaacaagtcattntattcttagaatgtgaaaactctgcatatttatggagaacatggngtatggaggcacgtaagtatgtgaataccacaagtcattntctccaattcaagggattgattaattgctctaggaaaaaaacatacatctggtatattgtttggtttgcagctgtttggagcatttgga

SEQ ID NO: 33208 - DNA, 225 bp, Glycine max
tggaaaaaaactggtactagtgaattataacccctgggcattcttatcatcactcaagttgctatttgcattattttatttgtttcctactaaaaaccaaaatcataaaaatattttaatcctctttttaatcacatcatctggtaatttaataaacttgactaattggaaatacaatgggtcctttgggttcaatatacgaaattttgagttcattgttactac

SEQ ID NO: 33209 - DNA, 494 bp, Glycine max
  unsure at all n locations
agacaaccggagttttgatgattcttttgncncncannnnannangaacancgggcacctgtacaacgacctgccgcgtgcgagcacgtcttagtttttctcaacaagcacagacaccccgggggcgttactttgattaacacatcccacctattgaaccgactttagatgttagtcttgaataatggatggacttatactctatactctgtcatgtgctgctttatgcatctaacatgtggaaagtagaggtttgcacccattgaaattgtgggaagccctattgttttattcaaacagaacatatatagtgcttggcgagccatgttgtcggttttcgtgcaccttacaataagcgcacattagcaaattctgatagaattggctcctacgctctaccaatgattttgcaggtttattaaaatcataagagtgcttcccttgttataactatttatcttatccacgtatcttcctgaatcaggccccgtacn

SEQ ID NO: 33210 - DNA, 299 bp, Glycine max
  unsure at all n locations
tcgcccttcgactgcacgtttctcactgatccacccnatttgcttcgcttagcttcgatcacaagaacaaaccctaacccctttttctgtctcggatcaacacaatgtcacactgtatccgcgtgtgtgtgtttaaatgtgcaccttttgggatactcggacgcgtggctgcgtgatgggtctgggaaaggaatatcacacaatccaaactcattggataataagcccagtctatcaggcccaagaaacttacgagttgttattctcactttcgtattagtatttgcacccatactttc

SEQ ID NO: 33211 - DNA, 402 bp, Glycine max
  unsure at all n locations
agcttcttttggaccttgaacattcaatcaactcctctntcagaaccatgctatgtgctcgcgactggtccctttcttcccttcgcaacttgagttcattattgctaccccatagagctccgcgaaatttgttccggccatactcttccttgtgagccctcttggtctcttgttcaagggctcttgcggtaattgcattctcttcccgtaacccggcacactccttccgaacgtgtgtagcagccaacttgaacttctccttggcgagttttgcctttcctaactcgcttttgagagcttggacttcttcgtcctcttccggtgcttcaaaattctcttcgctgacgactnttaacttggcgagccaatctaaacctcgtatgcgaactttcagccattcgt

SEQ ID NO: 33212 - DNA, 580 bp, Glycine max
  unsure at all n locations
agcgctgtnnnnnaactgatntcattgtatcaccgtgacacnctangaatanataagcctntgaggggtgcgtagccccacccatcttnnttcatagtagaagtatcttatatatgtgttcntacncatcacgaantattcgtcgtcgcctttttctatctattgnnggggtacnncacanntgggccccgcccagaaatcccttccacnccttttanagcnngtgnnntctttgaaaagatcacgcttccccctctttcttgcaaatggttctatatattgcattcctattccggaacccatatcaaaatatgtactgatacttgcctaaccaaaggcaaccatataggtcctctccaagaatggactccggaagattccaagttagtgtaccacgtaacagctaccccagtaagactttcttggaaggaatgtattacacattctcatcttttgcgtattcccccatcttctgacaatacatctttatatggttcgttgggaaaagaagtcccccttttccttgtcaaggtcccagcaccttggaccttgggaggggtgatgatattgtggtctaggn

SEQ ID NO: 33213 - DNA, 276 bp, Glycine max
agttatggagttccttggctggcagaaatttacttggatagacctaatggcgcatctagaagcgacttgcaggtcctagtttctctgaaggcttgctcatgcccacacattcaactcacttgcaggaatttccggatcatgccaattgtcttcgtctaagagatgatgggcccaacctttagacatggatgctgtacttgatagcattaagaaactgtcatcatgtggactcatcgcagcaggaggagtcatcttaaaaaaatcaaatgagccact

SEQ ID NO: 33214 - DNA, 277 bp, Glycine max
  unsure at all n locations
accggcaaaagaatcaagtggttcttatatgatgacaattnaattatcctgctgtgatgaatgggaagcctcgggaaaatggacagaaggagaacgagggaggaacccatgctgtgactgtcgttcctagatggccaaattccccactaactcaacaatatcaataatcaggccaatatcaacccttctcattacccaccacctatcaaccaacaatgctctataagtccacaaatgctacccctagatcagccactagacccacctgccacacata

SEQ ID NO: 33215 - DNA, 485 bp, Glycine max
  unsure at all n locations
aggannagagcnncaggtgactgatncctgaaaaactgnannacnggnaatnggcaaagaccncnanancgaccngcaggcngcaagcnngntttgnanttttgtnaacaccccacacnccgggggcagggagagattcaaacaccaccccaccgcccgaaacaagnacaaagttnggaagacaccaccatcacaaagggaagataacgccagggagacgccacaaggaccaccgcgggaagcccgaaaaaagggcaacaacgaacccagagagaagccccagaaaaaaatgcgaaagccaaaagcccctgcaaggaaaacgagcccacacaaccacggaaacgagcagcagcggaaagcacaaatgaaatcaatcaaaaggaaaaacgaaaatacaaaagagatggaggggccagccaaaaagctgggccacagggagacaaagaaacagaacgaaaaacaactggcagggccgcccaagcact

SEQ ID NO: 33216 - DNA, 303 bp, Glycine max
  unsure at all n locations
tgctcatttctgctccaaatcgcgaattgttatctttttcggagtcntgaagtgcgtggctacgagtgtgacttcgaaaattcaggtttgggtggacttctttctctcttaaatttcgtgggtatggggttttgggagatatgatagggtggtttgttagatttctgctgtgtaatgattatttgtgaaggaacttgttgaaagcttgttgaaattgccatgtttggatgagttagacatacccattctgttttagggttttgtgatgatgtttatatgctgaaattgcctatggaaactgtt

SEQ ID NO: 33217 - DNA, 636 bp, Glycine max
  unsure at all n locations
tgannttcatacccncncgcnnnccggggagtaacggattcacnacnnatngncnacnccanggnngaattngnagctcggtacgccggtgatccatctagaagtcgaccgtgcagcgccagtgcaagctttgtacttatgttcgtatgagcaatntncaatgaacgttgcatgaagggattnttatcttcatcaacagcgcatntcatcatattaacactatagggtcccttcactagagtctatcgatttcaaagaatgtngcatcgtgaactagtctgataacatgtctgctttcttaaatattgacattttgacatgttagcgacaatagcaaatagataatgtgagagcaaataacagtcttcacttaattgaatgttcataagattcgagtacatgacatatctattatatgaggtacttgcaagcttgtaacatgcgtgcatatcgtgagctaaaatgacttatctatatcttgtttatacaataatagattataacacgcatttctttggaattttgtatgatagcatctctgtacaaagtaacgatcgatccagtactccagaatgaatgtgtggcttatacgtggggcatacattcttacgaacatgaggtntggaaggtgttctg

SEQ ID NO: 33218 - DNA, 339 bp, Glycine max
  unsure at all n locations
tatcggaagtggaatttctagataactcttaaacctcttctattacacttaatntgcaagagagctaaattctccaatggtcatcctccaattgcaactttggtaatattcaagaaaaatattatgtagtaattgatttgagaaacatctatanaaataaagtcagttgaaagattagagataaatttagatttgtaccttgattgttgataatctcctttgctcatgtaaaatgccacccactaagaatactcatgtatgctgccanacatgngtaggtctattgatacggttagaaatcaacattgttacaaataactttctgaggtaatgacttga

SEQ ID NO: 33219 - DNA, 412 bp, Glycine max
  unsure at all n locations
agctttgnatggtataatgtgtangacacccctatgttggtcagagctcgaaaaaagccttaccttatgaccagaagtggtacatcaaaccacaaagaaggtcaagtttatccaagaaaagatgacgactgctcanagtatgcagaaaagttatcatgataagatgatgaatgatcttgaattcgagggtggtgatcatgtattcttgagagtcactccctggactggggtttgtcgagcattgaaatcccgaaaactaacacctcgctttattggtccatttcaaattcttaagagaagttgccctgtggcataccaaattgcattaccccgtctttttctatcttcacaatgtctatcatgntgtctcaactcataagtatatccctgatccatcccatgtgattgaatt

SEQ ID NO: 33220 - DNA, 407 bp, Glycine max
  unsure at all n locations
ncccacgtgagagataccaagatctccggcacttagataacatcctccgagaacagatgatcaagagtttgatgaaactaatatttgacaaaaagctccaagtcgggagcttttgtgantacaagatgatgatctcagaatcaagaatgagntcagatgaatcaagacacttcaggttcaaagganattgattcagaatcagaatcagtttcagattcagtccaagatcagatcagattcagatcagagagactcatcagatagtttaaaaagttttcaaactggcagccatgatttctcaaactttccaagagtttactcttagtatcgatccagatatgtatcataccagtacaaatgtttcaaatgacttacacgtgaatcgaaaacatctcggagattaagcg

SEQ ID NO: 33221 - DNA, 390 bp, Glycine max
agcttcatctttctaatattctcactaaacctttggctgaggacaagtttaaatttattgaatctttaattaatgccaaatgtttgactgatctctaattaagcatgatatttcatgtttatgcttttgattgagcgaaatccatgcttgggtgctaaatatttgaaaaatttgatgtacctcgtgtttgcttaactaaattgggtgttgttgccaattcctattacatgctcattaatggtgattatgtttttaccattcaaaatctatgtttttctgatatatctattctttctccttggctctactatataaacaagtgtgggtaaacaactaatcacaccactcacatctctctcaatttactctctcctcttgcctctctggaac

SEQ ID NO: 33222 - DNA, 277 bp, Glycine max
atcctgatgatggtgtaccatatgttctcatgattggactaatacatttgctgcccaagtgtcattgtcttgtgaagatcctaataagcatcttaaggagttccatattgtttgttccaccatgaagccccctgatgtccaacaagatcatatctttctaaaggcttttcctcattctctagacggagtggccaaagattggctctactaccttgctcccaggtccattttcagctgggatgaccttaagagggtgttcttggagaaattattccgt

SEQ ID NO: 33223 - DNA, 412 bp, Glycine max
  unsure at all n locations
ggagagacggcccctgatcatgctatntctgtanccccgnatnngcangaccgggancttaagagggtgagcagnttttgngtgnntgnaggnnnaanaggnngagnaattttaaaannnaaccccccacgcggggcaaaaaacgaaaccgcaccgncaaaaaggaaaaaggaaaaagaacacacaaacacgcagaggcaagacaaagacaaccacaaaacgagaaaacgaacagcaagcaaagaaaggaaagcgacgaaaggaagaggaacaaacacaccagggcgccganaaaaagaaagagaggaggaccaccagacaaaaaacacaaagaaccaccaagagcgggaacggaaaaccaaccacgggaccacacacaacaacaccacgaagacaaacgagaaagaagacg

SEQ ID NO: 33224 - DNA, 410 bp, Glycine max
ttcttgtatgattatggggtacccatcacatgtggtactaggtggcggtcgggcgatggtgcacaacaagttttccacatccacaatgcgcgcataaacccaccatcccctgttgcccacctccatctaagctcacgtactcccatgtagcccatatcctcatttctctcaacaccgggtccccatcaatcctctcaagcttccacaacatccaagcaaaacaacattcaaactgcacaagctatcacagccaagcaaaacagagcataggcagaaaactttgccaaaacaccaaccaaatcacagcttttctcacttaaagaccccagtaacaattccttcgttctggttcattaaccgttggatcgaactcgaaaatttactggaagtctctaatacttaagcctaca

SEQ ID NO: 33225 - DNA, 370 bp, Glycine max
  unsure at all n locations
ntcaacatcagggttggggcagcanggacatgaaagtatctattctatnccaatnctctccctttgnctttgtatttagtatttttttaaaattgaactaacattctatgctcttaagtttggcttcttttcatacttgtatataaatgtaaggtgtccctttcatacccccttttgtgttgcttggacatgcttgtgagntttttgttttccttttctctttntgataatttgattggacatgcttgtgagttttttgttttccttttctctttntgataatttgattgatgtgtgagcaatgatggttaggaggggagaaaaatgtctgaattctgagctatggcatgcatgcacgggccccttggtg

SEQ ID NO: 33226 - DNA, 169 bp, Glycine max
cgacatcccgcatatgtgttgttttatgacattttgcaagacaaaagcttattttatttttggttcaaccttctttatgagtctctattgcatgcaaggaaggtggaagagcacactacaggtgcgaattttatctgaaaactccatgaatacagggtccttttctttg

SEQ ID NO: 33227 - DNA, 337 bp, Glycine max
atagttaagaagacccgagtaggaatgagttgaatttatctatgaagcatgaaattagccgcagccattgaatcagtctcaatccaaagctcctttaaattaagctcccacgcatgctccaaagcagtaatgagcccccaaatctctactatcataagagaacaacaacccaatttcctggtaaactcgtttatccaatggccattaccatcacgcatcactccaccacagctagccttctcgccaacatctataacagaagcatcaacattgtacttaaaatagcccactgaggcaaccaaacaaaaagcctatccgcagaacaaggttgcccatg

SEQ ID NO: 33228 - DNA, 202 bp, Glycine max
ggcggtgctctgcccgatgatccgaaagacgaagttgttcttggaacgcgggatccaccgacccacagctactacgctgcgggaacctccccataggaccacaactagaatcaagattactactaaggccagccatgattacgacggtcttaccgactggaggtaggcctgcccatccgacgctaatacagtggacgtactc

SEQ ID NO: 33229 - DNA, 277 bp, Glycine max
acaaatcaatgcggagacatttttgtccatgcaaattcgctcactttctataagcttctgcttattagtgcacagctccttcaataatttaccatatcttggaatttgctttattgcatccaacaggaggatgtttacctctacttttctaaatgtttccaagatctctttctctgcctattacacatttttgttgggaactgctcctggaaggaatggaagatggatgtgctgcttctgccaatctcaattaccacgggcagaagattcacctgca

SEQ ID NO: 33230 - DNA, 356 bp, Glycine max
accattgtgttgtggtgcatatacagtcgtaagctctcttcgaatgccatgttctgcacataaacatttgcatattcttgtggagcaatattcatcacctcgatctgcgcgaagagtctctatagactttactagctcattatcaacacttgctttgaagcttttaaatgtacaaaacgcttccgattcttcctgtataatataaccgccatgttttcttgaataatcatcaatgaagcatattaagtatctcttacctccattagaaaatgggtttattggaccacaaatatcagaaagcaccagctccaagacatctatagctctccatgactcttctttgcgatactgagatc

SEQ ID NO: 33231 - DNA, 255 bp, Glycine max
ctgggatctcaatcaggtctggggagtatttaaggtcacatatctttatattcacaaaattctgtaacaagaaaaaaccatcacaatgttcagaaattattaagatgctaatcacggccctaactaaaagaaaaatctaatcattcagatgagaaaagggtgaatagttaaacatagaagaatcgtatatcgtgcattagtatacacattgttagctgaattatacatttcctaagggactatgtgatatagacc

SEQ ID NO: 33232 - DNA, 377 bp, Glycine max
  unsure at all n locations
cccaaggcggagttgttgatttttgacacannatttggnangggcgcgaaagcgacggggcggcagggcagttaattgctacacgagccgaacacgggggggtacgaacnnaaaacaaacaccggacacggagagccaaccacccagagggagcggccgcagagaggagaagacagggccggacgagaaccgcaacacgcaagaaaagcggcaaaacacacgaaacagggcggccacacgagacgcagacgggaaaaaagcgcagacccggcgagaaaaaggggaaagacgcgaacagaagcagggcaggcggagacacgaaggaaggaacaagcgcaacgaccggcgacgagggacgcaagtgggaaagacaagan

SEQ ID NO: 33233 - DNA, 479 bp, Glycine max
  unsure at all n locations
naaaactgttttaccccagggatcgnnagnacganacnnnnnnnttnggnnanacaaccccggccanggancagnagggataaattgtccaaacanctaagtcanattatgaggaaaatgctaagacaggcaggtgcgggcatgtgtaaaaagtccgatatgacatgatgcctttanatgtagaaatagttcaattatttccaaaaccgaaagatgagtctttaagcattgatgcctagtctgaataattcaacattgtatcaggactgattttcactaataacttaccgcttgtaacggaatatatgtaggtgttgattattctaacacacatgtgaacattagtgtacaaatggattgtgactacgaagagtagacagagcttctttgcctgtgaattaaaagtgcactcccaccaagcgtaaacggaggccttgaacaataccttctgtgatacaaccgactctaaagtcatacac

SEQ ID NO: 33234 - DNA, 504 bp, Glycine max
  unsure at all n locations
ngccaagcagaagcgggtgttgaccgatcgtctgcannacacnnaanttngnanccgggatgcggtgnattgaactgcaagcatgcgaagcgcgattttctttcttaccttccttagcctcggagagcgagggcgacaaccatcagtgtacccatctccacttttggatgctcagtgtacgtaacagagtgccggcgaccatccttgagaaagagcttaaggactacacgaacctatcaacgaatcctgaggttcataatgatgtgtatgttgagcgaaaacaccagctagcgccctatggctcctaccttgccttcctcccacgaccactgtatatagacgcatcacctacactaacaccatcgatatcaccgaactctccacgaccatgatcaggacgggttagcactatgtggaaagtgatgtgtagtcgtaaggtcatggtcatgctaccatgagtcaaaaaagtgctcgcttgtatgatcattactattggataagggg

SEQ ID NO: 33235 - DNA, 233 bp, Glycine max
  unsure at all n locations
acggggctccacttcttgctctctccttcaataatgataccctctanagctccacaaattgctcatcatttgtaccccaaattgcaaaaggaacccattctctgagtcgtgaagcacacctctacgttgtggggcttcaaatctcaggaatgggtggaatgcttctacatgaatctcgtgggacttgggatatagggagatatgacgcgtagtgctactacgtttatgcctta

SEQ ID NO: 33236 - DNA, 325 bp, Glycine max
  unsure at all n locations
gcaccgggttgatgatcctganctcgaatttagtagtacaacnccncgnaggggaggcggaactttctttacctgttgacacacggggggggtgggtttataacccaccaccccaccatgaagatgccaggtggacggctcgcttcccacgacgctgagtgtggaacagacctagtagagcgaagcgtagctacaaggtgggggacaagaccaaaggaaggaaccactcgtggtgagcggtgggacgccgtcgcggggtaagaggaatgagtggatcgctggaaggacggaactcctaactaggcaccgggcgcgtgtacggacc

SEQ ID NO: 33237 - DNA, 501 bp, Glycine max
  unsure at all n locations
agcagagagacgagcgntttgttgcattctttganacctagnanaactcggcnaganccccgggatcctnagagacgacctgcagggtgcaagtttgttttcaacttttctaacagnnnngagccagaaaatagtgccgtaaattactcatcaacacaacttggggaccaatgatacccactattggcgtaatgcttgacatacgatgacattgggcctggtgcatttgatggtacccgagcatcttgtgaaagcccgattttgacatccttgaagaacttatatgaaacatacgaccacttgaaaaatgttgctgaatgtagccataggttgatcatcacaggtcttattggttgtaaagactaataaactttgatgtgcttgaaatggatgggaggaagctatatttataaggtcaaagatactttaacgtctaaatgtgaactggccggtcttgatatgtttaatggagaagtaatatgtaggctaatatctaatgcg

SEQ ID NO: 33238 - DNA, 256 bp, Glycine max
  unsure at all n locations
aaagtatcagatactctagcacatcagtgtcatcnctgtttattagaccaatcaaaacctgcggtgaatctgcctgaatgagacactctgacagacaaacatttccatatagacttaccatagcctcaaggacacgctcttgaattagttcgttgtcctgaggctataaaagagtcacgaaaatatcctttatccgagttgcatcagaatgttcctcatcggcatcgactatttcctctaagaccgtgagtgcata

SEQ ID NO: 33239 - DNA, 366 bp, Glycine max
  unsure at all n locations
actttgattgcttattcaatggagcngacaagaataggtncagactgatcaacacatgtacagtggccaaggatgcttgngagatcctaaaaatcactcatgaaggaacctccaaagtgaagatgtccagattgcaactattggccacaaaattcgaaaatctgaagatgaaggaggaagaatgcattcatgacttccacatgaacattcttgaaattgccaatgcttgcactgccttgggagagagaatgacagatganaagctggtgaaaaagatcctcagatccttgcccaagagatttgacatgaaagtcactgcaatagaggaggcccaagacatttgcaacatgagagtagatgaactca

SEQ ID NO: 33240 - DNA, 251 bp, Glycine max
accgggtgttctgactgaatggaaacccgactaacacgcgcgccttgttcttttaacccggcggatgtcttacttccatgactggggtgcaatgtggcagtgtaagacgatactaggctatctatcctaatactaagtgatgtcttctgaaatgtctcctgtgatgacaagcaaattactaagaaaaagaactctaatgactgttagccttggtgaacccaagtttgctcgtaccgttacatagaatgggc

SEQ ID NO: 33241 - DNA, 496 bp, Glycine max
  unsure at all n locations
nccacacgtgaaaaaaacctgacgnacgacnncnnnntngataanaaccccgcatggagacacatatactgcgatcgatagccaaatttttttttatgagatgcacacaacagccacctgcttggacgagggacaagactagggtctcaaaggacggtgataatgagagagaagaccctactatgactacagttcctatgcacacaaaggtaccatcctcccatcaatgtacatactcagcctatcacacaaattcctctgccccaccaccctgtattccatagaggccatacctgagtgctccacatggtctgtctatctctctaccgatagcataacccatctcttgctcctacctctgcaccaggcttaaaagaaccgtggtcctctaatcgtggaagattccccacacatccgagggactgtgcttgagtggctctcacttgtactcggaaattctcatggatagcgttaacccctggctgggttgcctggg

SEQ ID NO: 33242 - DNA, 363 bp, Glycine max
  unsure at all n locations
agcttatgttattgacctccattntcaactctaagcttgattttcacttcattcttttgctctattctcacttgtaatttcaaaaccttattttgaactctttaacgttggaaacttgaatctcaactccctcattcttccttataaacttttataagcctacaacatgtaaagggggtctcaaactcttgaaccatgtgcttgctgttgaacttacatgaacatgttgcttccaaatttttgagcttgttgtcatgtcctgaatctatgtgctgagttgctttccttaagttttttatgccacaaatgagttctttgcatgttaaaacataaagttagcctaaaatgtcacccaaatcggag

SEQ ID NO: 33243 - DNA, 433 bp, Glycine max
  unsure at all n locations
gcttcacaatctcccctttttgtgatgacaacccttttttcttaaacacatacacatactttttcctagtcgattattcacttaattctccatattctccccctttgtttttgagtttaagcttcactttaaattaagttatttaattatatgagttcttgatttaatccctattttctctccccctttggcatcaacaaaaagccaaagtgcataagaaatataaaacatacataaatgattataatatcactagacatatatcatcaaaataattaagtttaaaactcataacaattaagagtaagtaaatataatcatgttcagttatactaatcaaatattaaaagaaatactaagtattcaaatgtcataanaatataaatcatttgggtaagtcactagcatcttgcagtcctaattctcttctaat

SEQ ID NO: 33244 - DNA, 426 bp, Glycine max
  unsure at all n locations
ncgacctgcaagtttgctatcnnanatttgcgccaacacangaaggacgcggacacggcgncccgaacaaancacaagccgacgaagagagcnncagacncggcnggggaggggggcancgcgaacccaaaccccagggagggcncaaggaccaccacacacacgcccgcaaagaagaaaccaacaacacacccgcccccacgggaagaacaaacnacanacaacaaccaccacggggacgcaagaccnagagggaagaccgcgaggcacngagcccgcacnggacccgcggcacagaacagagcccaaacaccaacaacgagaacgacaacgcgagcaaacggaccgcgagancgagngccggcgaacaagacggaggggaagggganncaaaccacgacccaaagaagacggaaggaggggccg

SEQ ID NO: 33245 - DNA, 504 bp, Glycine max
  unsure at all n locations
nccacgtctgtnccaggttcangacgntangcannnacgngatantatanaacacccangctncgatcacctaaggtcaagctgcatggtggntggtgctttttttataactgcctacacatacggggggagatcgatctgacaatacaattggacacaacatatgctacattactactcaacagatgcacatagaccctacctatagatgcttactaggcctgacgcggataaatataaacagagaggtcccttcatgctacaagcaacgctggaatctgaggaggatgggctatttcttctaagaccgtgagaggatgaccttcatgtgagattatcttaccatacgtcgcactaggacgacgagaacgaatacttgctgatgtatattctatccatgcagaggtgccacatcctatattggatatatctccagttcaatgctcctgctagacgggtcaccataagcttgcatacgcgaagtttagagagcaactatagctn

SEQ ID NO: 33246 - DNA, 401 bp, Glycine max
tttctttctacattatagcaaggttcgcattggtccattatactttacggctaaaatgggtatgtctctttgcccgataataagcccgagattatactgagtggacatgatgtacatctccaatgtggccttctagtatggataatcctctcctgtgaagcatggtgacctcatgacacatgctacctcaacaacgaattggatgttgttgttatcttccatcaggatcttttgctttagacattgtctggtgtataacctttataggctcagctctgataccaaatgataatggcaaatatcaaaagacgggtgggtggattgtgatattataaaattttacaaacttacttccttgaacataaacgttattgcatgatgataaagcacgttaaaacaaa

SEQ ID NO: 33247 - DNA, 406 bp, Glycine max
  unsure at all n locations
agcttgaattattttttgcaattctcgagtagataatgcactaccatctctgcacagaatcaaatctataggttaaaaataaatggcactagaaccacaagttcaactggattttagtcaaaataagtgcaaatggtgggaggcaacaacgtaacctgttaggagaaggtttgggaggctatacaaatcatcctgttggatatgtaattaatcttagtttagtccaagttcacatttaatcttagtgaggttcaggtgggatcagtatcctctcgtattcggnggtaacatgtacaatatataactaatataaagggaagtttgattntctatttaaatttctctcttttccttacagagttaatngtatactccgaatttctatattatttttgagcgagcatct

SEQ ID NO: 33248 - DNA, 379 bp, Glycine max
actaccggatttgtatcttggatgggtgattgtgttcttacatggagttctaagaagcaaggcattgtgacactttctacttgtgaagccgagtatgtagctgcaacttcttgcacatgtcatgccatttggctaagaagattgtcggaggaacttcagttgttgcataaggaaagcacaaagatctatgttgataatagatctgcacaagagcttgccaagaatctggtgttccatgaatgacagtagcatatagatacaaggtatcatttcattagagagtgcattacacagaaagaagtagaattgactcatgtgaaaactcaagatcaagttgcggatattatcaccaagcctctcaaatttgaagatttttgaa

SEQ ID NO: 33249 - DNA, 422 bp, Glycine max
  unsure at all n locations
agctnttcttanataatgttntccactcttanaagggtggggtgataaataatattaataattaanagaaagagaataaaatagaggaaagagttaagatagcactaacttttgcattattggttggatggttaagaaataagataatgaggaaaaggtcacgggttcgatcgcttttgctaacaagaaatcaacaaactaaccattaacaaataaagaaagagaaccgaagagtttgaattatgagaatgtaaaattttgacacatgtaacgttatccaagtatggtgatctcgtgatattnttcaatgaaggttggcgtatagaggctntttttttgttngcctatgactctctatttataaaatcatatatgtgtntaatagaggcagataaactccttaatttacaaaataatataat

SEQ ID NO: 33250 - DNA, 409 bp, Glycine max
  unsure at all n locations
agctttgaatgatgcctaaatagtggtgtgtggtgcgggagacggtttttttcctctgcctgtannngngcgttaatgattttgggttttgacttgtgagagctgttgttttgtgcctgatgagtcttgaacttatggaaatgtggagattgtgttgctgaatttatgactgtatgttgtcttttgtggtgataggaatcaacaatatgggcagcgttcttttcacaagtactggcagtaaatgacgcgacggtaaagtttgagatttgggacacatcatgacaagagatgtagcatagcttggctccgatgtattacagaggtgttactgctgctatcattgtctatgacatcactagctcggtatgatatctttgcatttggatattgttgaatacctatttaaatg

SEQ ID NO: 33251 - DNA, 420 bp, Glycine max
  unsure at all n locations
agctntgattcaattctaacgatnanntaacttttactcgggatgtcccgattgaagtcccggtatatatctgacacgcctcgaaatttgaatgttgaaagctctgagccaatttcaacaacaataactttttactcggatgtccgatttagtgacgtaatatatcgtgacgctcaaatttgaatgttgaacctctgagccaattcaaacgacaataactttgtactcggatgtctgattgaatcccgtaatatatcgagacgctcgaaattgaatgtggaacctctgagccaattcaaacggcaataactttttactcggatgtctgattgagtcccgtattatatcgagacgctcacaattgaatgtttgagctctaagccaattcatacgacaataactttctactcggatgtctga

SEQ ID NO: 33252 - DNA, 258 bp, Glycine max
ctctgagcttcaacattcaatttcaagcgtctcgatatattacaagactcaatcagacatccgagtaaaacgttattgccgtttgaattggctctgaggttcaaaattcaatttcgagcgtcgcggtatattacgggactcaatcagacatccgagtaagaagttattgtcgtttgaattggctcatagcttcaacattcaaattcgagcgtcccgatatattacggcactgaatccgacatccgagtaaaacgttat

SEQ ID NO: 33253 - DNA, 421 bp, Glycine max
  unsure at all n locations
agcttaaagtatgttctagtcattcatccctacgagatgttgttgaagtattggcgatcagaattgccattccttggattatagggttgaaccaagctcaagcttttacaaaaaggttcatcaagtcaggttgaaatatggaagtaaccatcctgcaaacttggggcaaaagatgaatcgagtcacatcactgcttcgtctactgccaaacatatttaggattattgatgtccttgttacttccagtttcaccttgacaaagatgtcatggaccatgttgaaaatctaaattgattcaaccccatatcctgcgtaaaaattcgcaatacttcgactgtacatcattcgcatgcatccatgcttttcattggttgcattgctcattgcattctttccttgaaaaataaaatanaataaaatg

SEQ ID NO: 33254 - DNA, 335 bp, Glycine max
  unsure at all n locations
taaggcctgtnttcgtattcaaatcacatcattgtttcaaatgttgttcttttatcaagtccatgcaaaaacatctggatgcatttggtatttgggaaagtccttcattgttcttattctcaatgttttttttaaaaaaatccttttgttgtgttttgatccaaaaataagtttaaaaaatattggttgttgattctttccaaaacatgttatgttcaagaaaaattttctgtttgagtcccaaaaagagttataatctataactaaactaacaaaatatcaaagcagacataaactagtcaaaataaactagccgtagtttttcaaacaaaaaa

SEQ ID NO: 33255 - DNA, 98 bp, Glycine max
  unsure at all n locations
taggcgtaatcaacagacacgctaaaggctccaattactagccttataataaatacagcccgaccctgacactcatttcagtacgtgttgtaataccn

SEQ ID NO: 33256 - DNA, 421 bp, Glycine max
tttcgagcgtctcgatgtattacgagactcttcttacatccgagtaaaaagttattgtcgtttgaatttggttagagcttcaacattgaatttcaagcgtcttgatatattacggaactcaatcagacatccaagtaaaaagttattgtcgtttgaattaggtctcagcgtcataattcaatttcgagcgtctcaatagattacgggactgaatcagacatccgagcaaaacattattgtcgtttgaattagctcagaccttcagaattcaatttcgatcgtctcgatatattacgggtctcaatcagacatctgaggaaaaaagttattgtcatttgaatatgctgagagcttcaacattcaattttgagcgtctcgatgtattacgggacttaatcagacatctgagttaaaagttatt

SEQ ID NO: 33257 - DNA, 440 bp, Glycine max
  unsure at all n locations
agaggggacgcagcttgatcctcgctgaccnctgnannaaccanactttgagaggtccacagancgtcggggggaacaagtttttatgtggtttantccacanggagggcgggaatggggggatttacctagataatatcggcgtagaggaatcagtttgtattcagcaacttttgcgtttttgggcggttgatcaaattgatatatgatgagcacgcgcgggtgtgaattttgactaactataaggagaatcttatcttttctaaaaattaaaagacccaaactttgggtttaaagagtaaatttgatcttgttcgctgacctattagtgtttactgagtttgcacaaagttggactatgagatttcttggcagccttgatgatgagaaaaatcttaagtcgattttagcgaattagtcttaataggcagatatttatg

SEQ ID NO: 33258 - DNA, 395 bp, Glycine max
cctgactcaccataaaccttgacccattggtagtttgtcaatccttaccctcggaagcaaacaaagaatataggggaaatttccaatcaaagaaaaagagaaagaaaatttccaatgaaagcacataaagataagaatgaatattccccagtcaaagagtgggagaaagcaaaaagaagagaaaggaatattcccaatcatagaatgggagaaagttaacaaggaagataaacaacgatagaaagctcctgatcaaggatcgaaagacaacagaagaaatgtgcagagaggtctttgtgaccgacaatatctgaacaatacagaattgccaccatatgaacgataaaagaatgaaagggaaccacgacctagaatagtcttctacctttgattac

SEQ ID NO: 33259 - DNA, 402 bp, Glycine max
  unsure at all n locations
agcttcaattatatgcgttgaatgaaaaaacattgaatataagggtcacatttgcttggatgttgaaataaagtggaattccacctatttgatgttagatactactttgaagcatatgaaggcatttgaggagtttgaatttcatgacagaaaatatgctaatgagttaagaaaagggataggtctgccttcctatgaagattgngaatatgttgaggctattctaccattcttgagcattttctataaagtcactttgcgcatctcaagtatctcttatgttactagtaacatttacatgttagaggtggtaggtatttggcatggggttatggatttgcttaactctaacattaaagatagcgctacacataagatggctaaaaatatgaaagaaaaata

SEQ ID NO: 33260 - DNA, 137 bp, Glycine max
  unsure at all n locations
cataaatctaaattatcaaatgtactcaagacgaaataataataaaactgtncaaaaagcatggaaataaaaagcctgatattgacaatgatcctgtgtatgctcattcaagtccagtgctggtgcagatgatggat

SEQ ID NO: 33261 - DNA, 367 bp, Glycine max
  unsure at all n locations
agctttactttataagacaacacaaccaagttctgagggaactcgttcatctgaaccatcttcagcatttccagcaaacttgagggaatccgacgatggtgcatctgaagcacatatcatggcagacgagcaaccacaaagggttactcttgatgattactccagctctaccatgccgcaatttttcacaagcattgcgcggccgttagtccaagctcacaacatcacatatccatattccttgatcaagctgatccaaggaaatttgtttcatggtttgcccaatgaagacccttatgcacaccttgcaacatacatagaaatctacaatacagtgaanattgcaggggtgccgaaagacgcaatg

SEQ ID NO: 33262 - DNA, 229 bp, Glycine max
cagccttgcctttattttatctgtctttcttcacagctccttcagcagtgttagtgaagctgacttcaaatcccatgaattttttgtggggacgaggtgctgaatggaaaaacatcgcttggatggcttgcgatcatatatgtactcctagaaatcaaggatgtttgggtctcaaagctatcaatgatcttaatacagcccttcttattaaatggaagtggctgatgtt

SEQ ID NO: 33263 - DNA, 399 bp, Glycine max
  unsure at all n locations
agctttgattatataatttcttgattnctaaaatacccatttttctctccccctttggcaacatcaaaaaggccaaagtgcgtaaaatatgaataatttaatcatacacaaagcataatttgtaaaacaaacataaaagattctaaaacatacataaagcaaaacatgaataaaaccaaattgtaatgcaaaccacttagtcatatatcacaaaccataaatatcatgttcagtcatactaagcaaatattaaaagaaatactaagtgttcaaatgtcataataatatagccaaatacacgactagaaatcaaaatactattaataatagtaatgtctaaactgatggtggtggtggaggtaaatcaatgcagtcgcgaatgatggtgacatcttcttc

SEQ ID NO: 33264 - DNA, 345 bp, Glycine max
  unsure at all n locations
tataagttgtgataagttaatgaaattttgtggtttatcaagaactggatatagtctcactgatcaaaatgaaccattataactttttatgtttgatctttgtttatctcctatctaattttaagtgacatagaatttgaatttgattttgatattgaaaatctcttttattttataaaatagattttcaccatttgaatgtgtttttttgaagaacgtttgtctatttcgttaatgttttcatccaaatgataactntatttgcttttaaaaggcattaaaaaaaaattctaaaatgaccatntaactatcttttgtgatattngctttatactatatcatatg

SEQ ID NO: 33265 - DNA, 397 bp, Glycine max
  unsure at all n locations
agcttgatgtggaactngatctangaagccacatgtgacagagataaatacttataacttattcaagttagtgaaacttggcggtttgccaagaatcggatgtaggttatgtggttaagatgaactggtataaacatcatgtgtcttatactgattttctctttaaactaacttaaggtgtgaatttgatctttgcttttgaaaaaaactgatccaataacgctttgttagatatgaacaaatttgataaatatttataactctcagatagagtattagaacggaagacttcattagatgatgaactattgattctcagccatctctggcaatgaatgaacagttcaaaatgcttntcttgcgtattcttgataaagcagtgtgtatatacagatgt

SEQ ID NO: 33266 - DNA, 363 bp, Glycine max
  unsure at all n locations
tgtaatcgattacacatatactggaatcgattattatttcatattttcangaaatattctcaacagccacatctttatatgtggctcttgaatggctatcaaaggcctatatatatgtgacttgaaacacgaatctgctcagagtgtttcagaacagataggtcttatcctcttataaagcacaatcgttttcttctcttacaaattccttggccaaattacttgtgattcaataaagaattatttgagtgctcaaatggttcaatctatctctttcaagagagatttcttgttctcttcttcttcattctgaagagggattaagagaccgagggtctcttattgtgataggattctaaacac

SEQ ID NO: 33267 - DNA, 405 bp, Glycine max
ggcttgctttcttagtctagaccaggaagataaagtgatgtggacgacttggagagattttatgtgtgttattaatgattcccttacccaccccgcaatatcaagaagccttttcaaattttagctcatatttatatcctttggatccctggtgggatagctttgaaaattatgatcataactaaatttgatatccctaaacaggtggaaaaaatgataaaaggagcgaacaaacaggaaaaaaaaaaaaaagatagacacttcttaatgttttagattagattgctttaaatttgtatcggatgagaaagtcttacatgaacatttcgctcttactgtgagacccaaatcatcattcttgccccttaattaggcttgaatggaagatttgatctgatatatcat

SEQ ID NO: 33268 - DNA, 290 bp, Glycine max
  unsure at all n locations
ntatcaccattcccagacacctttagtcgaagctctcatgaatagagattggacttgaaatcttcaagtgttatggagtccttgactacactaagacaactcattaaattatcataagagggagggagagaggctaacaaaatcatcaccaaatcttcatcttccatcttgacaccactatcgcgtagctccatcagaacaaagtttagctcatcaagatgtttctttagtggcacacattcccttatttggaggccaaacaaacattattccataagcaacttgttgga

SEQ ID NO: 33269 - DNA, 417 bp, Glycine max
  unsure at all n locations
agcttttgtcttgtattctatattatatacaatgacaacaganaatttaataaatccgagctacttgcttagagaaaaggtggtgagatactttgccaaaaaaagagcccaacatcagcaaattagagaacaattacagaagtgttcaagattaagcacttgtagaactccacttcctgatcttcatcgccacagatcaaaatgctatgcactttgcctaaaagagttagacaaaagcaggaaaatacaacagctattacactattttcactaccttgacaaaaaaagttcatatagtaagcacttccgcagttccaagaaatttggtgaggttgaaaccttcagaaatcacggtttaagtctgcaaatgaatatcanaaccaagttgtcaagaatatgatcctacttagaattggg

SEQ ID NO: 33270 - DNA, 390 bp, Glycine max
  unsure at all n locations
tcaagtanggtgcctccttannnacctccattaattntttgctttaccccttctcttccattgttgtttcttcatttttctccatgtatctcctcacatgtcttgtgataaatgtttttaacatgattctttaaagtttccaccgattaaacttgctatagaagctagatttgattttctatggttcaaatttcttgttcttgaaccatgaattgtgttgagtttagcttcctttgagttttgtcttgttatttttttgtggctgaaacctagaccattaaattcttacaaaaatattaaagtataataaaacctcaaaaatctagagtgacttgttcacctattgtaagtttgtcatagaagtcatgtctagtcatgaaacttgtcaca

SEQ ID NO: 33271 - DNA, 408 bp, Glycine max
  unsure at all n locations
agcttgatttanatcttgatgctttggtcatcctaataactcagcttgccatgaatcanaagtctacacctgctgcaagagtctgtggtctatgttcttctgcagatcaccatatagatctctgtccttctttgcaacaatctggagttaatgagcaacctgaagcttttactgcaaacatttataatagacctcctcagcagcaaaaccaacaacagcagaataattatgaactctcaagcaatagatacaatccaggttggaggaatcacccaaatctgatatggacaagtnctccacaacaacaacagcttgtccctcctttctagaatgctgctggtccaagcaagccatatgttcctcctccaatancatagcagcagtcacaacaaagacatcaagcaacta

SEQ ID NO: 33272 - DNA, 304 bp, Glycine max
  unsure at all n locations
gacctaccaccacatcaaaacacgtcttttggtggggannnagccggacagagcggtcattattaacaccaccaccacctctttcctagggaccaacaccagcaacaacaagtggtgaaaagcttccatgcaagcaacaactacgatgcaagcctcttggcaatgaacctatctgccagcttacggcaactcaatcaactacaacatcagaatgccacccgcgggggcgacgaccgcaaccgctcctatggtttcatgggggagacacatccaagccaaacgaactaaccaacttaactaacac

SEQ ID NO: 33273 - DNA, 417 bp, Glycine max
  unsure at all n locations
agcccgaatatgcttgtactgttatnagcgngggaagtaattcttgttagtgatttttctgctacatagtcacttttttatctcatggctgttgcattcttttaccttagcaaaagaccagccatatgaaggtagttgttttcctattgctgtcaaagcagactaacaatatggagtgctgatttctgcttgttagttggaaggattggaaagcatctacattttccttctatacaatgttataaatcctagacaaagcctgattganattgcaatgcattctgctgctaattggtttctagatgtcataaaaatgtggttaaaagccaaaggaatcaatgtattagagcattattgaattgtagtcgatgtgtctcatgatatgngaaatgtttgaacttatatgtgccattgtgt

SEQ ID NO: 33274 - DNA, 436 bp, Glycine max
  unsure at all n locations
gcattagcaagctagagtttggttactatgcgaggaaatgcactagagcctagctgtgcgccgctaagtgagcnntgactaaatctttaacttatttttcaagatttttgcatcaagtttttctccaaagcacgttgaaatcttcttcttttaacttttgctaatcaaaaactacaaagatattaatttctttattatttcattaaaaacaccggtgaagtaaaaaaattgcaatcattcttagccaatattgactatcaaattaactcagattttgcaggtatcacaaggtatgttatgtgtggcttcattgagcataattacttacatcttttgtttgtttaagagttacaacatgctttntttcatatatcattattagagaggtggtcttcaagatgggctatcatgaaagaaccaaagaacattttcaaag

SEQ ID NO: 33275 - DNA, 359 bp, Glycine max
  unsure at all n locations
tatattgcgganatcattttccaagcttagggcatncattnagggattttaatgcttatttttaatctgaacaatagttgtgtgggggccaaccactacaaaaaaaatactttcaacattgttattttaacatcggtttttgataaaatcgatgttaacaaatgagcggtgacatttttgtaaataaactgattttgttaaaaaaaacccaatgttaacgtgacaatattaacatccgttattaaaaaaccgatgttaacgtaacaatgttaacatcgagttttgaaaaatcaatgttaacatcgtcatgttaacatcgattttacaaaaatcgatgttgaattttaatgttgtgtttt

SEQ ID NO: 33276 - DNA, 186 bp, Glycine max
cacactatatgaactaaacgtagaccagctgatgcaccctatttgatacataacataagtcatactactcttattatgtattgtacaactatacacatagcataatatgaaataaagcttaaaccattctagtacagtcattttgaatctcatcattaatatcaaacatctatgtgtgccacttag

SEQ ID NO: 33277 - DNA, 508 bp, Glycine max
  unsure at all n locations
nccctagtgnaaaggggattcccangcacnatcngannaatangnnancanncnccgcangncacaccatgtttactatacatacgacttttgttgctatctatccgcacgaaaagaagggggggtgttatgtgttgtaatgcaccccccaccccaaaaacaatgtagcaaaaagtaatgcttaagccaatccaagcaagacattttgaatctcatcattactatcatgcatctcaaagaaaatgaaaatcatgcatcgatgtgcatagctcaacagtgcattacaagaaaacgtgccttctaagccgaccaagggaaaaatgtatgtatatgtgtgaacattgttcaaaatataacacatatatataaagatggcggagcaatctagacagatgcacaacacattccataaatatattctgaggatgatgtgtaaggaaatataataaagcatgggaggaaaagctgacgggcactagaatacgaaggtgtatgacaaatgacacat

SEQ ID NO: 33278 - DNA, 388 bp, Glycine max
  unsure at all n locations
catttgntttggtggttcgttggcaaatgatggttgagatggtggttggtgtgattgataacggcggatgtaaggtactacaacttcgatctagtttttttccgtataaaacttacaaattaataatccgtaaattatataaaacttatggattatcaatccgtcaattatatataacctacggattatcaatctgttaaaagacaatccatatgaattatgcgaattttcagtaatccgtatagtccatacggattctcaatccgtataaaccagtgcttaatgctaaagaagaagagggacttacgacggagacgatggcgaagtcggtgtcaacggcaagggcactcactggcagcacaatgcggactgatgcatgaaaggtgac

SEQ ID NO: 33279 - DNA, 434 bp, Glycine max
  unsure at all n locations
taaccaattctcattgcaatcctcattatatntatgattcttttcggtagttnttctggtaactggttagtatagctctacaagtaaggatatacagtttgaagtaggtgtagatatgttttcttctactcctctctttttatctttttttatgtgtgcgtgcgtgagtgtgtggcatgagatcctctcatatgttgtcacttatcattatagagaacggctgctctagaaagatcaattagggagaaagtcggatggcagaaattcataaaaagaggagtgcacacactaaggaagctacagtaccaggtttttcttttagccgaagtttgtaattgccttgcaacattgtattatgagactcgatggtcttgattctacttcagttgtgttatgttgatcctggaattgcagtgaggagatggaacaactca

SEQ ID NO: 33280 - DNA, 424 bp, Glycine max
ttatttttacatttatgacaggcagcacgcgctgatgcgcaggtgcctttactatccacctcactgcatgagggtgcaagccaagcactcgtcaggcaccagtaacaggcaaagagttgagggctatgaaacagacaggatctagtaagcgacagtgccgcacacactgtatatattaatgatacactcgaggcgtcacgcataaacaaagcctaggattacatgtaagctgtctgctcaatagaacaatcattgtaggcggaatcttatccaactgttatcagataaccgctatcgttcagaacgatcgagtccgtacatgtaagaatgctggtcgggccgaaaaatcacatgttgaacttcttcgtagacacttcatactatctaatggagctccttaacataatttagagtcgtatgacgg

SEQ ID NO: 33281 - DNA, 288 bp, Glycine max
gactggaatcgataccaaacatggaatcgattacactttttaaattaattggaacgtgtaattcatttgaaacttttcaaacatttgctactggaatcgatacacaattggtatcattacagaagtaaactcttggaaacatgtttgaaaaaatgtgctatcattttgaaaaactttcatacttatttgattgaccttctcttgatcttgatctgaacttgatctgatctgattttgaatctgaccttgatcttgatctgaatctgaacctgatttgactctaacttc

SEQ ID NO: 33282 - DNA, 192 bp, Glycine max
acgtaaatctgatagtgcgaacattctctcttttgttccctatcaccttgctgcacaattctatgtgtatgacaattctgcgccgctgcatctactactgctgttcctgatgggtcttcatcacttacataacaaactggtatcaagagctcaagtcgcgatcaaaggaattcaagattctcgtctgaatac

SEQ ID NO: 33283 - DNA, 420 bp, Glycine max
  unsure at all n locations
agctttgcttatntggtcttcgccagtgaaaggatcaatgtgggtccgaaaagaggcaaatttgatcatcctactaggacgactgagaaaactggggcaaataaaaagggtgaggatgagggagaaacccatgctgtgactgccattcctatacggccaagtttcccaccaacccaacaatgtccttactcagccaataacaaacctcctccttacgcaccacccagttatccacaaaggccatccctaaatcaaccacaaagcctgtctatcgcacttccaatgacgaacatcacctttagcacaaaccaagagcaccaaccaagaaatgaattttgcaacgagaaaacctatagaattcaccccagttccagtgtcctatgctgacttgctcccatatctacttgataattcaatggg

SEQ ID NO: 33284 - DNA, 291 bp, Glycine max
  unsure at all n locations
gagtcaacaagttcaagatcaagtttaatttcaagtttcatgagaagaaatcaagaagattcaagagaagatggaattcagattcaagagaaagaaatcaagaagacttcacaagggaagtattgaaaagatttttcaaaaaacaaacatagcatagttttggttttcaaaagaatttttctcagaattntctaagttactagaagttttactctctggtatcgataccagttcctaaatcgattactgtgcaagttgtttcaagtttcactgattgcatgttcatgattc

SEQ ID NO: 33285 - DNA, 325 bp, Glycine max
ttgcttcttgctttcatagggtattttgatctccttttggtgctctaaaatgtgggaatgtgctcaaatatgtggggcaattttggtttgttttcttgcttgattgggttggattggggggtttgtatgggatggccctatgcctatgatgcattttgaagcaatgggacatgccacattgtccccgttctcttgctagtgatacctaaacgcgcgcccaccaagtgttcggtgaaatgcctcaatggcattagcgcgtgacttttgtaaggaaacaacccatggaggcatttggtttcacatattctctatattttgggacatg

SEQ ID NO: 33286 - DNA, 293 bp, Glycine max
ccaagctagctaccaccccactaaaaaaagctcattccttgattgacttcatgataatgcaaaaaagaagtccctactacaaagactacccaaaatgccctcaaatacaaggctaaaaccctatactacaagaatggccaaaatacaatgcccaaaagaaggaaagacctattctaatatttacatagataagcgggctcatacttaacccaagctcgctacctaatttcgagcattctcaccattggcaatttcaaaatcatgtctgagcttaaagaaatacccttcgcatt

SEQ ID NO: 33287 - DNA, 410 bp, Glycine max
tttcttaatgtctcatgattgtcacgtcttgatgcaacaatgggtagtcatggccatacgagacattttgcctaacaaagtcaagcttgccataactcgactgtgctttttcttcaatgccatatgtagcaaagactttgatcttgtcaagttagatgagctggacaacgaggccactattatattgtgtcagttgaagatgtagttttcacctgctttcttcaacctcatgggtcacttaattgttcatctggtaagagaaatcaaatgttatgggccaattcatttgcattggatgtacccggttgagcgatacatgaagatcttaacagggtataccatgaatctacaccattcataagcatctattgtggaaaggtacatcgcaaaagaagtcattgaattatgtt

SEQ ID NO: 33288 - DNA, 406 bp, Glycine max
tagcctagatcaaatcgggttcccttctttggtatgttttgtttgaaatatccctatgggagagatgccggaattcaaattatcaacaacttcttcattaagtgtctacctattttgctatttcctaaattaccctcacttatgcctttaaacctaaatctatttttgacacagaacgcactcattctccgcttatattcatttggatcatatcagcacgcacactgtccatttcattacatttccaagctcaaagtgtagagagaagaagaaaaggaagaatggtgagttaaaaaccctatatctagttttcatctccacttgatttatactctttcattatcattttaacacctaaagtgactctgtattggctgtttgaacttacatgttcccattccctcat

SEQ ID NO: 33289 - DNA, 360 bp, Glycine max
  unsure at all n locations
tatcttattatatgacataagangcattggttgtagtgaaaagtatttatctattaaaataatcacgtttatgtgatttcaatgtataatgacgacaatggagattaagtttaagtcctattgcatctaatgtgaccctgatcgattctatattgtctacctatctaatgagtagttattattaaaaagaaatggcttttattgcactcttctatccttatatgctgattattttcagtgaataaattactattgtccgacctttaaaatctaagaatggttatcatcatctttcttatacacagtgcgataatgaatctcatgatgtgccttcatcattgagtccataattacagctat

SEQ ID NO: 33290 - DNA, 487 bp, Glycine max
  unsure at all n locations
aacaccacgtgtnggggaagtagancgcngcaacnnacgnganannatanaatactcaagcttcaggctgctcaattgcttagattgagcacattttgtttatggtctatgcggnggaccacagaggagcatgaaccacagagtctggcgacaggtgtagatttttgattcatggccaggtgggttaccaggttcaccaaggcatctacttgaccttcaatagtcttactctgagctgatgaagatgaattcttggctacttcatgcactcctttaatgacaatagcctcattattcgcactaaatcgctgagagtctgaagccatcttctcaattcaatatttggctattacctgcggcatgtctcctaaggcgtctacatagcgtgaacgatcatactcctctacacgaactgagcccatatataatatcgtaaaaagtgctcaatatttgcgggcggcactgcgctatttttaaacttccagtt

SEQ ID NO: 33291 - DNA, 466 bp, Glycine max
  unsure at all n locations
gccatgccaagcccttatgattttnttctcacnnccatcatagattaatctctttcttggaacagacnntctgatactttcattctnntgttcanaggtctatgaagaaagttttcccagaaaaaattttagggaanagaatgngannaaatataaccacannngcttgtagttgaaagtaccactttcctgttaataagaaattcnnccatttgtgcattcagaaaaatcttgcttcgaacttcgaagattnntagttgctggttgacttggtgtgaaatggttcanngctaccgattaagcattgtcattgttgccaagaacctggctcanaaatttttgctcttgggatgcanaagggttngctattgccaaatacaagacaagggatgaagaagaagtgagctcaatgtcttcaaatgtaaactgtctttgtctctcaggctgcaatctatcagatgaatat

SEQ ID NO: 33292 - DNA, 389 bp, Glycine max
  unsure at all n locations
aagatacacattataaatgaataaataaataatatacattactcgaaacagaacatgttaacaagcatacacaatattcccaaattattatcttgcctgtttgaaatcctcatcctgacttgtcactggacgtggttaatgaaagaaaaatgtacaatacttcaaacatattaacaggcatacacgcaatattcacacattatcttggcaatttgaaatcctcattcacgtttgtcattggacaaacactacggatatagccactgatatacgaaatcatattcaatgcctttgaaacatctggttgtgaaactgtaacaggttntgatataagggctgaaatttgaattccagaagtagagattaaacatatctcaattgtttcttct

SEQ ID NO: 33293 - DNA, 407 bp, Glycine max
  unsure at all n locations
agctngtttataatctcggaatgaagaatctccatatgcctgataaagagggaggaaaacaagataattcatctaagacctggattaatacgttgtgtctaaaagtaatcaagggattgaatcagaaaccatataagccaaccacaaccttaaaaattggcattgctccaatgtaaaacctgactgcatctgcataggcctccgacttgatgcacttgcttagtctatcgggtaggtcatatatgaactactttcaacaaaggtaaaaagtatgtcaatcatattccacttccacaaaagactcagaagtcataccactaagtcaagtatggaaacataaatatttcagtgatgcaaagccggaataaagaaacatgcatgattgctttaataattaatacctgaac

SEQ ID NO: 33294 - DNA, 412 bp, Glycine max
  unsure at all n locations
agcttcatctttgattagttttattaactntgaaggcatgaataacaataatccctcttgccaggaaaatcaagatctgaaattgagatatcacanattccttgtgaaaatgaacgtatctattggtatcacatcattcctttgcctattatactagctagcttgattccttccatattttgtaagtnttttttataatttttggttttgtttttggagcagtgaccattgtgctacttcatttactgacctttatcgaagctgccccaagtgttccattgaaatctgccttaactgttgcaaagaaatacgcaatggaagtatatcaccccggtctgaactgaagtttcaatatgtgaatagaggctatgattatatgcatggtggtgatcctttaccagtgtcttgtgat

SEQ ID NO: 33295 - DNA, 423 bp, Glycine max
  unsure at all n locations
agcttcctctacatttatgtaaaacaaaattcaaacagcacaaactatcacagccaagaaaacagggcaaaggcagaaaactctgcccaaaacaccaaccaaaatcacagcttttcccacttaaagaccccagtaacatttccttcgtttcaatttgttaaccggtggatcaactcgaanattttactggaagtctctagtacataagcctacattttgaccgttgggatctgctagaaaacatccagaactcattctgcactactctttccacaaccagcaaaacatagtatttttctgcacttatgcaaaattctgctgcacaatntcacagcaaaattctgcataaagtgcagatttcgaaaaccacacttcccctcatccaatcttgcccaaatcaaatcctacaagtcccaaatcatg

SEQ ID NO: 33296 - DNA, 321 bp, Glycine max
  unsure at all n locations
tttgatttttggcttgttattttttggggctgaaacctaaaccataaaattcttacaaaaatattaaagtagaagaaaacctcaaaaatctagagtgacttgttcacgtattgtagttttgtcatagaaatcatgtctagtcatgaaacttgtcacataagatttcttatgttgngctgaattttattttcttgtttctttgtctaactcattngttcatgagtgtatgaaattattttagcctattattttgattgagtcaaatctttcatgttaattagtgcttaacatgttcatgcaaaattcttagagagtctttga

SEQ ID NO: 33297 - DNA, 512 bp, Glycine max
  unsure at all n locations
cccaganagaggggnnacctagngtctttgctagtnntcctagnannnacnnnnnnannnnnggnanaganccncgagagtctatgnataggagnngnangntttgatttataaatttgattggganngaaaaggagccagaagaggggcgcgctgtgaaaacagaacaaaaagccaaaacgcgagacataagaagagaacaatcacacgcccagcattattggtttaacaaacatgaaagatgctcagacccacatatatcaatacatggataaaaccaagattgcatgcgaaccaacttaacctgtatcacaaaccattatattcatgatcagtgttactcgacaaatgttcaaagcaatactaagggggccaatgtcataactatatagaccaagatacgactattaatccgaatactataattaataaaatatctaaactgatggttgtgggggagagaatcacgacatctcgatgaaggtgaatcttataatcacttgtatacttgn

SEQ ID NO: 33298 - DNA, 355 bp, Glycine max
  unsure at all n locations
agcttgtttgtggagcttctatggaggctggatctttgagcttcaatgaggtcctttaatggtgattttccaccatggagatgcagcggaatacaaaggagaagaggtaagaggcggcgccatccattaaagaataagcatggaagaaggagcttcaccaccaagatgaaccttggataagaagcttggagaggatgcttcaatggaggaaaagaaagagagagataaagagagaggggggagcacgaaattgaaggaagaaaaagggagagaagttaaactctgagttgtgtctcacaagactctcattcatcanagttacaaaaagtgttacacatgcttctatttatacact

SEQ ID NO: 33299 - DNA, 364 bp, Glycine max
tatcagatatcttgggggaagctccttttttggctattccctagtggatggcgcctctctcacctctttctttgtcttccgctgcatctccatgggaaaaccaccattaaggcctattgaagctaaagatccacctccatagaagccccacagcagcttcatcactacccttatggataccacctattacacgccaccacctgcatgatgacacgggtcatgtcccttccccgtcttgaagggacctcttgatgcggacagtcatgggacatagaagatgcccagagactcattctaccccgccccatcagggcaccccaacatatgctacccaactccactaccatatcttgcataaagaccc

SEQ ID NO: 33300 - DNA, 381 bp, Glycine max
agctttatctttacatttctctaaccatcccaatccattcgaatcatacaattgctacttcaaatcattctcaaacactcatttcatacagagcaatacactgcatatcattttcaatcaattcactgttcaaacacgccttttgtaacaccctgatatatataactatatattaataattatgtttgatgtttgattgtatttgttgagttatttatccgtaattatttcaaggaagctaatttatttaatataaaggcgtgggtagataaagatctatcttctcacaaaagcctcttgagacagcttctgaaagatgccacggcgaaacttgttgaggaaacctcttaatgaagcttattgatgaagctacatgaagct

SEQ ID NO: 33301 - DNA, 246 bp, Glycine max
tataacactgcagaataaccatataatggaagagttagacccaatttatacaaggtatatactcaaaagttagtcgtatttaccgactaacagtatgtttaatagaagatgaatgctagttactcaatgagtgggacacaataagcttgaatacaatgaaactcgctgacttagcaaagctaagattcattcaatttgctcaagtttccttcgtctagtggactgacagcggtgcaacacttattc

SEQ ID NO: 33302 - DNA, 453 bp, Glycine max
  unsure at all n locations
ngcctgtacaaatgcccgcatgacnncanttnagcaagnacgggcgagcgataagtcgagctgacgcatgcagccacacctttgtttntaatattaacccctaacgcgggagggcatcaaatcacacagccagaccaccggatctgacatggagtacacaaaggccccgagtaatgaaccgacccacgagcacacagcaatactctgccagaacctacccagcgagacgcctggcagagagtggacattcctagcaatacatgcaccagaattggaacagcgccatagtgctagacatccactgactatacaaagccgcccacgtgacacttgaaattcgcatacaggtgcaagcaaaaccccaggcacgaaacacccacgttgatcagaatacaacaccgcaagaggtgcgatgctgcgtgtgcgagacccacccagagcgggaggacgagg

SEQ ID NO: 33303 - DNA, 336 bp, Glycine max
agcttttttttagtcatgtttgaaaaccatgcaggggttatgtttgaatttagcttcagctaagacctcattagctatcattacaccatggaggatatgtctgcctttgaggaaagcaatttgcctttcatcaattaagcgaggcagcacaagagccagcctattagccaggactttggacattattttgtagacacaccctatgagagagatgggtctataatcattaagagattgggggctattggttctggggatgagggctatgaacgatgcattacttcctttggggaatctgccattaatgaagaattcatcaaagaatatgataaaagc

SEQ ID NO: 33304 - DNA, 236 bp, Glycine max
tcataaagcccccactgctcatcttttttttgtcttgtactacagataacaaggtctgctgcatccacagaaagttcttctgcctcaatccttctcgtcatcttataagttgaattgatatcctctattgattggcgtccctgcttgacaaagtgttcaagcttgtttcttccaagtgaatgacctgtaagcaccattggtacatttaaagcacctggaagaataacagcagtatc

SEQ ID NO: 33305 - DNA, 412 bp, Glycine max
tttgcaatcttatgttgcaaatatttacaatagacctcctcaacctcagcagcaaaatcaaccatagcagaacaattatgacctctccagcaacagatataaccctggatggaggaatcaccctaacctcagatggtccagccctcagcaagagaccagagcctccattcagagcttaaccaatcagatgggacaattggctacccaattgaatcaacaacagtcccaaaattctgacaagctgccttctcaagctgtccaaaatcccaaaaatgtcagtgccatttcattgaggtcgggaaagcaatgtcaaggacctcaacccgtagcaccttcctcatctacaaatgaacctgccaaacttcactctattccagaagaaggtgatgacaaaaatttacctaacaatttc

SEQ ID NO: 33306 - DNA, 328 bp, Glycine max
gcttatccttatggcaactcccgccttatgacgactatctctctggtctgacgatgaggaaggagatacccatctctgtcccctgctccacctcatagatctgtccccacatgaactaccccaaccgaacatagtccgccatatcccgacctcacccacacccgtaaaagaatctgttcccttcgcggaagataagggaaagattgaggcgctcgaagagaggttaagagcagtcgagggccttggcaattacccattctcgtatttagcggatttatgtctcgtgcccaatatcgtcattcctcccaagttcaaagtaccagacatt

SEQ ID NO: 33307 - DNA, 406 bp, Glycine max
  unsure at all n locations
ttctntattctatcgtttaagccgttatctcgcctaataaatgataaaatgaatttcaatcgatcatttgcgttgtaatctcgtttaatcactgttaaaacaaaatctaaccgatcatttacattgtaacctcggttaaaccaaaaaaagcaaaataataataaaataatcaaaatatctttgaataaaataatcaaaaaaaatcaatctgacgtttttctttggaggtttccttgaatgaattgactaataaccaaagtgaaactaagactaaaatcaactcacaaatcaagctttgtccataaaaatcacttataacccgttttaaggtccaacgccttatacggtcctctttgcttttatcggttaacatggacagttcataagcataaaatcagcatgtaac

SEQ ID NO: 33308 - DNA, 365 bp, Glycine max
tttcttcaatctgagagctcgggatatgtggatcattgtgaaacccctctccatacttcacaagggatgcatgtgcttgggaaggtagaaaatggaagttttgcattggaggaaaggatagatttggtggtctaccagcgataagaaactgcttgtgtgcttcttcactggaagtttgctctccattacggtccgtattagaagattcagtcttagatatttgaactggtggatgaatagtgtatccaggataactgcgagtttgaaacaagccttgtcaatagacactttatagactaattcagaatatcattatttaacaaacttgatatgagagtagatacaaaattggtacttgccaaatc

SEQ ID NO: 33309 - DNA, 438 bp, Glycine max
  unsure at all n locations
tagaaaactaagcttggcagatctatgccagaatgcaaggggacatatatttctcttactttgacatgnatnntaagctagatgacggcgattgtgaaacaccaaatattattacatatggggctttggtggatggtttatgcaaagcgaacagggttgaagaaacccatgaattattggataccatgtcagttaatggttgtgagcccaaccaaatagtgtatgatgctcttatagatgggtnttgcaagactggaaagcttgataatgcacaagaggtgtttgtgaagatgtcatagcgtggatactgtcccaatntgtatacctacagctctctaataaatagtctatataaagaacaaaattggatcttgtttgaaagtgttgccaagatgctcgagattcttgcactccaatgtggtattacacaacatgatt

SEQ ID NO: 33310 - DNA, 448 bp, Glycine max
  unsure at all n locations
agcctttgggtgttcctcttttccttttctcangccctatcattctcacatactggatnttaagtcttattagtgtctttttctaggatactctacaaaccataaaggctataagtgcctgtctcctactggcaaaatattcatctccaaggatgtggtgttcaatgaaaccaggtttccatatactgatctgtnntctaaatccatatcctcctctaccccaacatccttgtcctcctttttagcanacattccccttgttggtcctccacttgtcactcccttaccaaacactgtacccaactccccttcccctcctcctcanacttcccaaactcatgttcttgattctggttctgacattcagtcagttcccacttctcctattcctcnaaattccaaactcctgttctgattctggtcttacactcagtcagttccacttact

SEQ ID NO: 33311 - DNA, 379 bp, Glycine max
acgcagacaagtctcttagatgcctatgtgcccataatctatcttttgtcttctacaacaatgccttgagtagttcaagtttcactttaccgccagcaagtgaatttttatttcgatcaatgtgttcatcctaagcagccttaactgtacaattacctacaactattttggacatgggtatgaccatatataaatattgaaaccaaagattccttggagtaatgtgatgccaagaagaaatccaagattcctataagtataacccatgggttgaaaagaagcaagtgatgcttactattaacttcgtcttccagttcatgaggtccaaggccattcacattccctgctcataaggcgcatcgattatcatcatatcata

SEQ ID NO: 33312 - DNA, 276 bp, Glycine max
  unsure at all n locations
tgcctcanagaggtccaggaaggataaagcggccgaaggaaccagttccgctcccgagtatgacagccaccgctttaggagcgctgaacaccagcagcgcttcgaggccatcaaggggtggtcatttctccgggagcgacgcgtccagctcaaggacgatgagtatgccgatttccaggaggagatagttcgccggcggtgggcatcactggttacccccatggccaagttcgacccatacatagtcctcgtnttttatgccaatgctttgcctat

SEQ ID NO: 33313 - DNA, 426 bp, Glycine max
  unsure at all n locations
agctntgtggactagtgatattaatatatnttttagaagagagacaaagctaggaaggaaacaaaccaagagagtgaacataggtgcctgaaggaaaagttgatggtttgaactttgaactaactaataactaaatagtggatatgatatgtgataatgagagagacagtgagaaaaatgaaccatatccatatctctgatgctgtgtttgatggagcaaaggacatgactgacatatgctggtcatggcctcacgggtcaggctagcatgcattacatcatgcacgtgcgtgttttagcattctaccattaacggccaacggacgttcgcaacgacgtcgttcttgcaagagaaggtatttaactacttattgtacgtaggtaaaaatatctcaactcttaatgccagagtaaaccctattagtc

SEQ ID NO: 33314 - DNA, 233 bp, Glycine max
  unsure at all n locations
ctaataagtaggaatgtaagcttcatggagaatgagaagtggagatggaacgatgcanaaaatcagtaaatggattatttgaatcaagaagagttagttgatcatcctcctggtcgcgacactagattacttgccgacatatattagaggtgcagtgttgttgtgcttgaaccaacaggatatcatgaagcagaaaaagatcctaaatggagggttactatgcagaaagagct

SEQ ID NO: 33315 - DNA, 360 bp, Glycine max
agcttgcctctatatgtccaggattacaaggcagccgaaggaactagttccgctccggagtatgacactcaccgctttatgagcgctgtacaccagcagcgcttcgaggccatcaagggatggtcgtttctccgggagcgacgcgttcagctcatggacgacgagtatactgatcttcaggatgaaatatggcgccggcggtgggcatcactggttactcccatggccaagttttgatccagatatagtccttgagttttatgccaatgcttggccaacagaggagggcgtgcgtgacatgagatcctgggtaatgtgttagtggatcccgtttgatgccgacgctatcggccatctcct

SEQ ID NO: 33316 - DNA, 459 bp, Glycine max
tctagccacatggacttaccttgaattaattcctttgatagcccttttgagccttgtttccctttccttggtttgaagctcactacaagccttaagtgaaaaaccatgatattaccatatccttaaggaattttggagctttggaattgtcttgggaataagtgtggggggtttttgtttcattggacaactcgttctgttggctatgcttcatgatgtattttgggccatacttgatgtacattgtatattggttaaatgtggacatgctgaatgacatgctgtttctcaaatgctaaaggtaaaaaaaaaaaaattctgaaaagaaaaagaatagcaataatgttgagtgaataatatcttaaagggacaagattgatgaaactcttgttctactcttcatgtttaattttatcttacctcttttaatttctagttttttcttaaatgactattccc

SEQ ID NO: 33317 - DNA, 443 bp, Glycine max
  unsure at all n locations
ttagcggatttggtccgggattgctaaagatcacagcgggtctgaaaagaggcatatctgtgcatcctgctttgatgaatgcagaaactgtggcaaatgaaaacggcgacaatgatggagaaacccacgctgtgactgacactcctatacagtcaagatgcacgccaaccaaacaacgtccttacagacccaataacaacccctcttcttaccctgtgagtggatgtatacacgaccgtgatgaagccaaaagaagattgaaacgaggctcatttaacatcaatactaacacaatcatgagtcaaaaacacaaagccttgagcacgaggaatggaaaacaacccatgcgttcaatgagaaagatcaagtaattcaggggatatgcatcaataccactacaaagctcaactacgctggtgatatatgataactcgtaaccaccn

SEQ ID NO: 33318 - DNA, 377 bp, Glycine max
  unsure at all n locations
cgactaatacacttgtaaaaacatagaaagttagtntatttatatgtatataccatcaattgatatattggtatatgttactcatcaacaacaacaacaacaacaacaacgccttatcccactatgtggggtcggttacatggatcaacttccgccataatgttctatcaagtaccatacttctatccaaaccattaatttcgagatcctttctgataacccctcttatattacttttgggtctatctctgcctcgaatagtctgacttctatccatctgggctactctcctcactacagattctaccggtcttctctctacatgccctaaccacctaagtctaatttccaccatcttctctacaataggcgctact

SEQ ID NO: 33319 - DNA, 381 bp, Glycine max
ttagtcttaaacctttctcggatggatctcacgcaacgatctatcgattcgttgattcaaagtcaatctcataccataggtggtccgaaatcaaatcgtggcactccatgttcgtctaacggcgtttcggttacttcgattgcgacagtttctgcagttcgagacatttctttgggttttccgcattttgatggcgatacaccactcttggagtggatcttcaaagaagagaagttcttcaattatcatatcactccagatctcgatcgaagtgataattgctctattcattttcaaaagatgtgattccctggtttaacatgttgcagcggatgcaagttggagcacctgtgctgagttacacgtgctctggaaacacat

SEQ ID NO: 33320 - DNA, 251 bp, Glycine max
cgcctcatagaggtccaggaaggataaagcggccgaatgaaccatttccgctcccgagtatgacagccaccgctttatgagcgctgaacaccagcagcgcttcgaggccatcaatgggtggtcattgttccgggagcgacgcgtccatctcattgacgatgagtatgcctgattccaagaggagatagttcgccggcggtgggcattactggttaccaccatggccaagttcgacccatacataatcctcg

SEQ ID NO: 33321 - DNA, 365 bp, Glycine max
  unsure at all n locations
tagctntaatatatctatggtaaggcgtgttgtntgttacatttcatcagcagcaatgtactttgtgtcttgacacaatccacacacacaccagcattttccaacatccaaaaacaaagtcctaggataagttaagaactccaatctctcgcactatcttgttttcacattattattattactacttgtttgtgtgtgtctgttctacattgttgcttgctaccctacccatgatcttggaactgtgacgagatgccacattgattaacaacaacaacaataaccacgttagatctcaagttggagtctttgtctggagacacccattatggggggtgtgagtctgaaggaatcatggtgtttct

SEQ ID NO: 33322 - DNA, 533 bp, Glycine max
  unsure at all n locations
cgagtganattgattcgtcgcattcgacacctgaacactcagcttgactctatacgtgcaagatggagtgaggcggtcgaatgaaccaattacgctccttagtatgacagccaacgctttaagagcgctgaacaccagcagcacttccacgccatcaaggtgtggtcatttctccaggatctacgcgtacagctcaatgacgagtagtatgccgatttacaataggagataggacggcggctgcgggcatcacttgttacccgcatggtcatgtacgacccaacatatctcttgagatttattcccatgcttggtctatggaggagggcgtgcgagacatgatatactgcgtgaggggtccatggaatcgcgtctatgaagatgctatctcaccgataataggacattctttattgctggaacacggccgcgagtgctaatcttgctcataagaagaacaccgtcctgattgtctttactaagaagccatcctccacttgtagtgcatacctgagacagattcttccaccacn

SEQ ID NO: 33323 - DNA, 402 bp, Glycine max
tagcttgatgcactattgggaggagggcttttggttatttacttcatttctctattcctgaggctgattcaaacacttggttctctccaatttcagcatatgttgctaggcttattcttcagcagatgataatgaattgtgaatttctcatcatattggtatagctattagccactgacatcactttctgtgcatgagctatattgtgcaaccatgataggtaggcctaaattagatagcgttagaacttccactgctatgtgtacttagctcttcttggctaatgcacatttttatacattaagatcacataattacatccatacatgtatatagagaagatgatctagttactgtctaaagtctcattactcttgctaagattattctcttttttacaat

SEQ ID NO: 33324 - DNA, 434 bp, Glycine max
  unsure at all n locations
tctaaggattgcagcatcattggtacatttacttatagttacaaatattatnacccaaaaaaaagttgcattcttttgacaggacaaagtctacccaaaagattattaagatactaaaaggaagtacgtgaatcgttgtacaacatgtttcattataagagagtatacattactcacagtgtgtctttgtacttctgatagttaactgatagactaactactgtagttagtagttagtctgttatcacgtggtagtatagttagtgcttgccagctatgtaatagttgtcaactaacttaggttacattagttggtagttaatccaaatatataaacaatcttgaattctgattacagtggggttgaataatatcagatatctcaatctcaatgtcttctcttctctcaaaatctcttcaactctattattcat

SEQ ID NO: 33325 - DNA, 196 bp, Glycine max
  unsure at all n locations
tatctctntagctattcatatggtcataacgattcactcggatgtctgattcaagcgcataatatatcgagacgctcgatattgaacaatggaagctcttgagcaaatccaatggtcataacttttaactcggaggtacgattcatgcgcataatatatcgagacgttcgaaattgacaatggaactcttgaacaa

SEQ ID NO: 33326 - DNA, 355 bp, Glycine max
  unsure at all n locations
tctgttatgaatttcgagtgtctcgatatactacgggacacaatctgacatccgagtaaaaagttattgacatttgaatntgctcatagcattcgttgtcaattacgagcgtctagatatattaaaggattcattcggacatccgagtaaaaagttattatctttttattttgctcagagcttctggtttcaatttcgagcatctcgatatattacaggactcaatcggatatccgagtcaaaagttattgtcgtttggaattgctacgagcttccgggttcaattacgagcgtctcaatatgctacgggacacaatccgacatccgagtaaaaagtattgtcgtgtgaattact

SEQ ID NO: 33327 - DNA, 215 bp, Glycine max
tgcattctactacggattttcacttaccgttgggatgacaaaagcgccatcggaatcaaaaaacgcaaaaatgatgaccctatggctgcagactcgtcaatcccgtgggtatggatattgaaaggagggataagaattttttgaatgcaaacacgtacaccctttcgtgatacttataatttggtgcatgggtggctcgaccagacgagctaacc

SEQ ID NO: 33328 - DNA, 381 bp, Glycine max
ctataaatactcaagctggttcaggtacttacccgatgaagatcgaagaactattatagatctattgataaacgtcgaataacgggggaaatctttgcgaaattcctcacggataacgttaccgaaacgtttcggaagcgcctcggcttagattttcttcacggaaacaatttttcctagcaaattctaaagagagagaagtgcctatggggctgaaccccttccttcttgcattcctccactatttatagcataatatgggaggaggttgtccgccagctcgcccatgctagcagggttgcttcctccataagcacccgccttttgaggaattatttggatggcccaagtgggcctgggtgctatttgcactccactttt

SEQ ID NO: 33329 - DNA, 374 bp, Glycine max
tgcatctttttatacctcgatcggtcgtctttactggccgacgccgactgtcatttatttcgatcaatatcggtgaataatatttcttttgccgaagagggctaatgttttcctggccgaataaatcggaacatgccaatttcgggcgaaacgaaacatcggatgagctcgcacggataaacctagccgacctacattgtgagttttttatgctacaccgaagcaagaaaacttcccctgccgtaagataaaacattatagtgcagcgagcgttttttttaaggaaaaatcgctcaatgtccgctgagaaatatcagctggggccatttcacagcctatgtccgctattgagttttctattcaatccctgaatg

SEQ ID NO: 33330 - DNA, 156 bp, Glycine max
ggagtatgacagtcaccgctgtaggagcgctgtacaccatcagcgcttcgaggccatcatcggatggtcgtttctccgggagcgacgcgtccagctcacggacgacgagtatactgatctacaggaggaaatagggcgccggcagagggcaccact

SEQ ID NO: 33331 - DNA, 399 bp, Glycine max
  unsure at all n locations
agcttgtctttgtgttagatctgatttatacatganttangacttgtatgatccaatctacgcaaaattggatgacggtaagagggatttcgaaatctgcccaacttatgcagcaaagagctgtctaaatttgtgcagcagataattgtgcttgtgcagaaaatgttgtgtattctttattatggacattttctaggcgatcccaacggtcaaaatgtatacctatgtactagggacctccagtaaaagtttcgggtcgatccaacggttaacgaagcggaacaaagaaaatgttactgtgtatttgagtagagaaagtcgtggtattggaatgtgttttggcagagctctttgcctctgccctgttttcttgattctggatagttcatgatggttgga

SEQ ID NO: 33332 - DNA, 450 bp, Glycine max
  unsure at all n locations
ctaacttgagtcatcaaatgattataaatatgtgaccatggcacttatttcaagagactgatttccttttatgcataacaaatttctttcattcaattctcttcatctttctaaaagtttttgttcaatactttctctttcaagaaaagttccttgaccaaaaacttgtgctattctttttctttattccttctctcttgtcaaaagattgaaaggactaaccgcctgagaattcttttgtttcttcctttctccctcttaacaaaagatttcaaatgactaaccacttgaaatatcttttgtttcttacaaaagatttcaaaggaataaccatctgagaatatctttttccttttcccttaaacaaaagatttcaaaggactaaccgcttgagatatctnttgtttccccatacaaagattcaagggactaaccgcctaagaattcttt

SEQ ID NO: 33333 - DNA, 457 bp, Glycine max
  unsure at all n locations
agctntgtccatattaattacctaaaataccatttaaggtccaatgccttaanatggcctttttgcttttattggttaaacgtggacttttgaaagcctaaagccaacacataactntgtcactactttcaagaaaacaagagatcattaatagtccgatgccttaatgttntctctcctttcaaaaggatcaaaagatcgtttaaagggtccaacgccgtaaaacgaccctnttttgtattggtcactatatcttacaaaaaaggataaaaacaacttaaccaacgtttagttctcaaagaactacgtaggtctgtgatcgaggtcgtacccgaatcanataaacattaaaatgtagtaactatggaagtgatcctaggtcgtttcccaacgagaaatggataaccaaatgttcataacagatagtaggaagtagtaacaaaatgggggggggggg

SEQ ID NO: 33334 - DNA, 270 bp, Glycine max
  unsure at all n locations
cgcctcanagaggtccaggaaggacaaggcagccgaaggaactagttccgctctcggagtatgacagtcaccgctttaggagcgctgtacaccagcagcgcttcgaggccatcaagggatggtcgtttctccgggagcgacgcgtccagctcagggacgacgagtatactgatttccaggaggaaatagggcgccggcggtgggcaccactggttactcccatggccaagtttgatccataaatagtccttgagttttatgccaatgctt

SEQ ID NO: 33335 - DNA, 430 bp, Glycine max
  unsure at all n locations
agcttataggagtgtgtttttgacattgtatcagagtggtcatagaggcactgaaaagtttaaatcatagactttatgtagcgaaagagataaagacaagaaagggaagtaatattaagaagaataagattattaacagagcagaagagagtcaccatcaacgcatacatgagaacagattctagcttggatactgaggagagatactacagataatagagaagagactgtacaaccaaatatgatgagctaaatacaagagaaaggtgactctcctcaagcaggatttatcttactaatagttgngtcaattgtcaataccacgagtagaagccctaataacatcttaatgcttatgaaatggttccattgtggattggatatacaacaagaagttgaacaaaacacaacttcgatggatagcatgaaa

SEQ ID NO: 33336 - DNA, 273 bp, Glycine max
  unsure at all n locations
ctcagctcgagactgtcttatgatataatgtgtttatatatatatatatatattcatataattatctcttagttntaagagaaatacttaaaacattttttttcaattattcttaaacgcatcttataaatctatggagttgtctttacgcagatcctggatatcctgctaactatgacaatcctgagatgggatatggaggaactacatgtcctcctgattcttatagcatgcatcaggtatgtgacactctcttacaagttttatatgtat

SEQ ID NO: 33337 - DNA, 415 bp, Glycine max
  unsure at all n locations
agcttatcaaaatttgagaatggacttcanaagtctttcaaaagattacaaactacttcaaggaaaacatgaaggaaaaatagataattctttagaaatttccattcaatcatgtgatgactttgaaagtctaaaattaaagacaacaaagctttgtcttgaaaatgaggatatttgtaaataaagatatagtatattggaagaccttcagaagttgaaaaatcaactggaaggcttacaaaatgagtatatcacactcaataaacttcatgattgcctanatgaggaaagatgtnatctattgaaagcatgttcccaagtccataagaattatgaaaacttggaggcaagtaaacatatgatgtagctcccagtagagcttgtaggcctcggatcttntcatcaatggagtatt

SEQ ID NO: 33338 - DNA, 459 bp, Glycine max
gaaacctgaaccatcattagcaacatgaaacctgctgaggtaactagagccctgttaacccggtaacccaaccggccatgaataataatctgccctggtcgcagactctgtgggttatgcttcttttgcgacaacacacaaaacttttgccttctatgcaacaattttgaacaattgaacagcctgagcttatgctgcaaacatcaacaacagaacctctcaacctcagcagcaaaatcagccacaacaaaataattatgacctcttcaagcacaggtacaatcccgggtggaggaatcacccaacgtagatggcgatcttcaaacgcacacacacaacttatttcaaatgttgtacctaagcgaccatacttctcaccatcgacaacagccaaaacacaacagtgagctctcacaacttcctgagaactggagcaatgaatgcaacatgcgtttacaa

SEQ ID NO: 33339 - DNA, 431 bp, Glycine max
agcttcttcagtatcatgaatttcattttacattctaatatttctcatcaatatcaataaaaataccgttgtgcctaaggaacaataatatggtaaatctaaatttgttatagaggaaaattagacaagtaaagaatagtcaaacttgaattaaaatctaagagtggtaaatgagttgtcaaggtaaccttaattgtgtactaatttcagtgaacacagattaacactctttagtataagttgtcaaggtaaccttaattgtgtaaagtagcgaaatgaaattgtattacaagaataatattttaagatcaaggactagaagtgataacataatgatcaactattcatgatgggattagatataaacaaataactactcatgatggaacttagaactctatttttatttaattagcttgatttttatatat

SEQ ID NO: 33340 - DNA, 349 bp, Glycine max
  unsure at all n locations
tcttactacagaaatgtaatcgttatttctcttcatatacaaatatcttaggtgcacgttaaactctacgttcaatcaaaaggaaatngaagtatatcgtgcagtagctaattatatacctactaactcagcaaacatttctttttctttttgtttttaccttccaaaaattggttttggtgatttgtttttgatgtcaattcttataactctcacttgcaggatgagaaacctgaagatccagtgaccggccaataggaatcaacacaaatattaatgtgtgaatttcacatccagcaagttactagaatcctgaagagcgcctgctgtacgtatataatacgtatgc

SEQ ID NO: 33341 - DNA, 412 bp, Glycine max
agcttcagaattcattttcgcgcgtctcaatagattacgggactcaatcagacatccaatcaaaacattattgtcgtttgaattagctcagagcttcagaattcaatttcgatggtctcgatatattacgggtctcaatcagacatctgagtaaaaaagttattatcgtttgaatttgctgagagcttcaacattcaatttcgagcgtctcgatgtattacgggacttaatcagacatccgagtaaaaagttatcgtcgtttgaatttggtcagagcttcaacattcagtttagagcgtctcgatatattacgggactcaatcagacatccgagtaataagttattgtcgttagaaatcctcagagcttcggattcaatttcgagcgtcttgatatattacgggactcaatc

SEQ ID NO: 33342 - DNA, 357 bp, Glycine max
  unsure at all n locations
tagcatttnttgttcggtattggcctaaaaagttgcaatgtagttcggctatgtttcttcgtgtgagctcaaccgaagttgtatttcggccgacaccggcattttgtcggccaggataacattagcccacctcggcaaaaaaacatgattcaccgatattgacagaaaaaaatgctagccttagtcggccaggaaagatgaccgatcgaggtctaaaaaagaagcatgaccggattacgccgatcgaacatttcctattagatatgatgtgaacctgagtaggagcggatcanttgatacaggttacggaggttntggatgaacgccacttcagtgaaggaagataagtcatggtag

SEQ ID NO: 33343 - DNA, 594 bp, Glycine max
  unsure at all n locations
acacccacggcacgtaatccacgcaacgcacgaagacggcacaaaacacacanaaacagnaaggtaaattgagacctacgtagacacgctagacaatcccagacccggggatactctatagagacccgctgcatgcancgcangccatctacantacagacataccagcaaaaggacaacggcacagacggagcatatatcaacaccaaacaaacccacagcaggataaacgcccaaccccaccacaagtatgggcacaacgaaagagacaagcatgcggcaaaaatcaccctacgccatacctagaaacggatgctaactacgatgcagcaagaaagacacgagagacacgccgcaggcaccagccgaacaaatgtcgggacaaacactcacgaactaaggaagacacaacccaaccacccacatgaactctaaatactgaccaagcagagaatcaacatgaactcgccacataaagaaaattcgcactgagcgccagcgaacagagaccaagcctgctcaataagaatatgaaccaaaacacacggcagtacagacattgacgagcacacacacacaacggcggagaggacg

SEQ ID NO: 33344 - DNA, 430 bp, Glycine max
  unsure at all n locations
tagcttctcacatatagtttcaacccgaggtcctctaagagacttagtgtaaatattagccaattgatcattagaaccaacaaagtgagtcttgatttcaccagacaacaccttntctcttacaaagtgacagtctatctctatgtgtttagtccgctcattgaagactgaattagaagcaacgtcaagagcggcttggttatcacanataagcttagtgacttaagtgtctccaaactgtaattgtaggagaagttgcctaagccatgtaattttgaatgcagcaacttccatggcatggcatttagcttcgatgctgggtctagcaactatattttgcttcttacttctgcatgagaacaaatttcccttcaagagtcagaggtagacctcctatctgatggtgatcctacccaatcagcatcagagt

SEQ ID NO: 33345 - DNA, 285 bp, Glycine max
tggaccgaatgggaatattgattgattcatagctcatctattggctatactcagatctttggcctggattatggcgacacctattccctgtagccaagatcacttctgttctactatttcatgctatggctatcattaccattggccgcttcaccagttggatatcaaatatgtgttattgcatggtgagatgctactgtgcatcaaatgattgattgcacacattgccattctaccaatcacgcacattgagaacaagaatatggatatcaactgttggacaat

SEQ ID NO: 33346 - DNA, 423 bp, Glycine max
  unsure at all n locations
tcttcttcgtccgcttatccctcatgtaagactacacccgatttagacaaccccattaggtttagactaacttatactgagtttcgtccgcggatccctcatgtaagactagacttagttcaagcaacttacgaaagtttagcctaatatagcctaagcttcatccatagatccctcatgtaagactatgcttaaaccaaacaacatcattgtaaaaccataattaaaaccaaaacttaacccacagatccctcatgtaaggctaagtttcaatgttgcttcaatcacgttctaaggcaacagtacattttccaatgttaaagtcacctaactgtgcacacaaatgggtgatcagaccangagcatacaaacattaagcattgaatgaagcattgaacacaaaatacataatcaactagatat

SEQ ID NO: 33347 - DNA, 413 bp, Glycine max
  unsure at all n locations
cgaaacaagatgttgagagtgtntgacagaaatcacattctcattttgaagtcccctcttttcaaaaatagaacatttaaaattgagattgatgtgatagaacagaagtgttttaccactacagtaaacagtgaagagtggttatggcattacagatntggccatttanattttagagatctgattaagctaaactcaagagaaatggtgctgggnttgcctcagatcaagcctnctagtgaagtatgtgatggttatttacagagtaagcaatcaagaggcactttcaaacaaaatgtaccaatcagggcaaaagagaaacttganggtgattactctgatgggtgtggccctatgcanactgaatctctgggtggaaatagatactttcatatccttattgatgaattgac

SEQ ID NO: 33348 - DNA, 405 bp, Glycine max
gtgtatcgagtaacaatgacgaaacgactgtgggtactgtataatgcattggatgacactcattatacaatagggtatcaaagataattgggaccaggaaatataatacgttattttaacaagtaacagtaactacttagattctattctttatgaaccaaagtcactgttatcctagtgctgtaaatatcagaaggatgcaccacaactgcactgaagtcacttggaagacattcgagttcattgggctaattactttctagagaaagatagaaataaaacttaagctctatttggcactttacaaatggatataccccagaatagacaccatgagttgttcaatttatcgggagaatgtgcaaaaaataaatacataatgtgaaaaaacgaaatgaaatatcg

SEQ ID NO: 33349 - DNA, 590 bp, Glycine max
  unsure at all n locations
cgcgtacttacacattanaatcacatacagcacgaactgatcacacgtaccaagtgttgaatatanacaaaaaaagagagnnaaaatttgaaatttgagagccctgcntatancngacactatataagactcaagctcaagaagcactgtacggactcaaacaagcgcacagagcttggattttaatgattggcacatctctgagtcacacgggagtcagataatgctcagatgaacatcgcatatacccgaaggacacaacgtgtgaacctaaactgcttgtatggatatgacccaacaacaacaggcgttcgactcaaaggatatcgaatgtataaatgcacagaagacgctagaatatgacatgacataacttagtaggccagcctactcccttggatggaacatacaacaacattcaagggaatgatgcctcgaccactaatgcaagaaactgatatattgagaagatgcatatcgacaaaagcactctcaaatacccccacacagggaactaaaattggaacactgcaaacaagaagaccgatgccccaaggagaccaacaatggaccttgacccctaggaatgc

SEQ ID NO: 33350 - DNA, 351 bp, Glycine max
  unsure at all n locations
tatgctngcttgtgtggcttctatagaggctggatatntgagcttcaatgaggtcctttaattgtgagtttccaccatggagatgcagcggaagacaaacgataagatgtgagatgaggcgccatccactatggaataagccatggcagatggagcttcaccaccaagatgagccttggataagaagcttggagtggatgcttcaatggaggaaaagaaagacggagagaaagagagaggggggagcacaaaattgaaagaggataaagggagagaagttgaaattgagttgtgctcacaagactctcattcattaaaggtacatcaagtgttacacatgcttctattata

SEQ ID NO: 33351 - DNA, 470 bp, Glycine max
tgccaaaattcaagtagaagagagatatgttgctcattctattactttgtaattgatctcaaaacattataatcaattacactacatatgttgaactcattgctctcaagaaacttacagatgaatcaattcgtttaacaccttagaatcatattaataatgcataaaagaagacttaacctagaacaatcatcatgttagtctataacaatcaatacaaataccacatctattaaacttgtttgacattgtaaaattattaaaccaaaactaagaccttaagacatatcttcatagttttatgctttggtccaacaataattcttcattcgaaaatatgttactactgtttatattataaatgttaagccaaaatcattaataagaccatctaaactcattatcctttttcccatacttataatatttgtgcctccaacctacttctattaaatggtagacttataata

SEQ ID NO: 33352 - DNA, 227 bp, Glycine max
ctatcgagcgtctagctatattacgagactcaatcttacatcatagatcaacgttatggtcgtttgaatatgctcagagcttcaacattcaatatcgagcatctcgacatgtatacgggactcaatcagacatccgacataagagttattgtcgtttgaattagctcagaagttcaacattcaatttcaagcagctcgatatgttacgggactcactcatacattcg

SEQ ID NO: 33353 - DNA, 402 bp, Glycine max
agcttcttttggtccttgaacaagcaatcaactcctctttcagaaccatgctatgtgctcgcgactggtccctttcttcccttcgcaacttgagttcattattgctaccccatagagctccgcgaaatttgttccggacatactcttccttgtgagccctcttggtctcttgttcaagggctcttgcggtaattgcattctcttcccgtaacccggcacactccttccgaacgtgtgtagcaaccaacttgaacttctccttggcgaagtttgcctttcctaactcgcttttgagagcttggacttcttcgtcctcttccggtgcttcaaaattctcttcgctgacgactcttaacttggcgagccaatctaaacctcgtatgcgaactttcagccattcgt

SEQ ID NO: 33354 - DNA, 452 bp, Glycine max
  unsure at all n locations
ctgagggtgcgtagcccaccatctnttcatagtagagtatcgataatgtgtctaccatcacgattatcgtctccctttccatcattgggggtaccacttgggccgccagatccctccaccttttaggcgtgttctttgaaagatccgtccccctttntgcaaatgttctatagttgcatcctatccggaaccatatcaaaattgtactgatactgcctaacaaaggcaaccattatgtccttccaagaatggactcgggaagattccaagttagtgtaccaggtaacagctaccccagtaagactttcttggaaggaatgtattagcaattcctcatcttttgcgtattcccccatcttctgacaatacatctttagatggttcttgggacaagtagttcccttgtacttgtcaaggtccagcaccttgaacttgggaggggtgatgatatt

SEQ ID NO: 33355 - DNA, 321 bp, Glycine max
  unsure at all n locations
agctntcagccatttcaaacgatcataactttntactcggatatctgattgagtcccgttatataacgagacgctcgaaattgaatattgaagctctgaactagttcaaacgacaataactttntactcggatgtctgattgagtcccgtaatatatcaagacgctcgaaattgaatgttgaccctctgagcatattcaaacgacaataacttttttctcggatgtttgattgtgtcccgtaatatatcgagacgctcgaaattgaatgttgaagctctgagccaattcaaacgacaataactttttactcggatgtctga

SEQ ID NO: 33356 - DNA, 390 bp, Glycine max
  unsure at all n locations
actcagcttaacattcaatttcgagcgtctcgatatattacgagactcaatcttacatctgagaanaacgttattgtcgtttgaatttgctcagagcttcaacattcaatttcgagcatctcgatatgttacgggactcaatcagacatccgagaaaaaagttattgtcgtttgaattagctcagaagttcaacattcaatttcgagcgtctcgatatgttacgggactcaatcatacattcgagaaaaaagttattgtcgtttgaatttgctcagaggttcaacattcaatttcgagcgtctcgatatgttacggggcttaatcagacatccgagtaaaaagttattgtcgtttgaattggctcaaagattcaacattcaatatcgagc

SEQ ID NO: 33357 - DNA, 151 bp, Glycine max
  unsure at all n locations
agcctatggtgtgttcgatgcgggtttatctggggcggnagacgatcttgaccaacaccttcttcatcgtcatcgctatcactatcattatgatctgaatactgaatgtacggtctaacaagggatgggctctaaaacatggagtcacatg

SEQ ID NO: 33358 - DNA, 462 bp, Glycine max
acctacactttagtaaaatcatccattaaattgcgacccactctctttctttctatacgtgggtgcatagcaggatcccagaggactatcgtatgatcttatatacacctacttaactcatggatacaataaatattccctttacaaccatgtaatgattggtatagtacggatttacatctattaagggaatgagcctatatttaactatatgaccaaacatctcatgtgtctactatgaattccagtccaccaaaataaaatgatctcgcggcagcgttttaatcgcttactgactgcacggaagcccagacctgtgttcacgccattgagttccaacagtatatcatacttggtttctttcaagaatgttatgttagccatcttgtaaggacactcattagtttagactatagtggggttcgacatctattttacccataagtatctcactccacctcc

SEQ ID NO: 33359 - DNA, 344 bp, Glycine max
  unsure at all n locations
agcttganatgatgtaatgtggaatggtgagacttccttcttttattgttgaccacagagtggtacctggagatatgtcgcggnggtcaagagaccttgtggacatcatgtgggctgctattgcccaaaaccaagcttgaccaatcccgacccaacccgggcatagtcagtcagtgagaacctgtgatgtacctaagcaggcgagctcctggcagtcaacagataataggaacaaagaccacaaagcaaggaggcttgtgtggtggctggctggctgtgaatcttgtgtgatatatgggttatggcctctggtaatcgattactaagggtgggtaatcgattac

SEQ ID NO: 33360 - DNA, 476 bp, Glycine max
  unsure at all n locations
cttgaggaagcctcttaatgaagctacatggagcctggctcgtattaacgattcccaacccttcgtaaccattggatcttttcgaaatttggtctgccgtttcaaaagacaagtttccacgatctgaccaatgggatctttgagaagatgtctggagtgtgcgcgacatttcctgttccgagagcattgctcactttgtttgtttgagccttgtaatccaagtagcttatgaaaaatgccattccttctcctttctttcttccaaaaccatttccaatggttcaagctctttcttcatcacccacagccaccattagccaccacaaaccgccgttgttctccgttgaaaccccacacccgagaggtacacctttacccgaagcggaatcttccaacttggcttgtagtttcggtagccaacgaaaacctaatccgaccttttcattttcttcaaggtaccacggtctatgtgatcn

SEQ ID NO: 33361 - DNA, 438 bp, Glycine max
  unsure at all n locations
agcttgttaaattgtggttntcttgatgaagattntatgtgcttcagttgttnttttttatgtggttttgaagtttaactaaagtagttgtgtgctttgtgaaatgggttcagggtcttttggggctaataatgtttgtggagagagaagatgatcgttgtgctgagcatgattattgatgggtagcagaagtagaacggtaaacgttaacactaatgacactaacaaggttctgaacgggatgccaagctacgctcctccattgccttcttctaattccatgtgaatctttctgaggacccttatgtcgttaatgttgatttcgttctatattgagctatgataggttcctggatcgtagtttgcttcgtttatgattctcatgtgggagattatttatatggtgcaatatttgtattctagttaactttatgaact

SEQ ID NO: 33362 - DNA, 191 bp, Glycine max
tatctctatgtgctttgttggatcatgttgaaaaggattgagtgcaatgctgatggcggacttattaacacaaaccagtccaataagagcattatattttattttgaggtcatcaagtttgatcttcatgcataacaactcactaaactcctgagccatatctctaaattctgctactgcacttgatcttg

SEQ ID NO: 33363 - DNA, 418 bp, Glycine max
agcttctgttttctttttcgagcatcttgatatatgacgggacacaatcggacatccgagcaaaaagttattgtcatttgaattttgtgagagcttctgtattcattttttagcatcaagaattattaaatgactcaatcagacatccgagtaaatagttattgtcgtttgaatttgctgacagcttctgtattcaatttcgagagtctcgaattattaaatgactcaatcggacatccgagtcataagttatcgtcgtttgaatctgctcagagcttttattttcaatttcgagcgtctcgatatattatgggactgaatcggacatccgagtaaaaagttatggtcttttgaatttgcttagagtcactggtctcaatttggtgcgtctcattatactatacgactcaatcggact

SEQ ID NO: 33364 - DNA, 410 bp, Glycine max
  unsure at all n locations
ataagcaaattcaaatgacaataactnttgactcggatgtccgattgagtcatttaataattcttgacgctagaaattgaatacagaagctctcaccaaatttaaatgacaataactntttactcagaagtctgattgtgtcccgtaatatatctagatgctcaaaattgaaaacagaagctctgagcaaattcaaacgacaatagcttttgactcggatatccgattgagtcatttaataattcgagacgctcaaaattgaatacagaagctctaagcaaattcaaatgacaataactnttgactcgaatgtccgattgagtcattntataattcgagacgctcaaaatngaatgcacgagctctcaccanatntaaatgacaataactttttactcagaagtctaatt

SEQ ID NO: 33365 - DNA, 509 bp, Glycine max
  unsure at all n locations
agagggaaatttgattcgtggcactgcgacacctgaactctcagcactacgctcncttggagcgtcttgcttacctcgacacgctatacttcactctctacaaaaacggtgcagtcgcccgtggttattcggatctccatcgatgcgtatcgaggctctagatgcgcatctggagccaaacacacgaaccaaatcaaatctgatgtcatgcgagttttctcgaaacaacggcatgtgagagaaagccttacgcctatgttgtgtactgaagcaatggggcgtgacacattgatccgattctcgagcaagctgtgtacaaacgcgcgcaccccaatcgtctgagatgtgaccgagcgtatacgacatgattttgcaaattgtgaggtgggactgttcataaatgtaaatacagctacgagagtctaatattgcccgaatgcatctcaactcagaatacaactttgtgcttgatggcaaagacctcccctgctatgatacacataatgtcn

SEQ ID NO: 33366 - DNA, 437 bp, Glycine max
  unsure at all n locations
agctttcttgagataacttcattgaanagcttctntgagaaaacttccttgagaagctagagcttagctacacatacccctctcataactaagctcacctccttgagaagcttccttaagaagattcctaaagaagctagagcttagctacacacacctctataatagctaagctcacctccttgagatgagaagcaagagcttagctacacacctcctataatagctaagctcaccctcatgacaaaatacaaaaaagtccctactacaaagactattcaaaatgcctcgaaatacaaggttataactctatactactagaatggccaaaatacaaggcccanatgaacganaaacctattctaatatttacanagataagcgggctcatacttagcccatggggctcgaatctaccctaggctcatgagaaccct

SEQ ID NO: 33367 - DNA, 403 bp, Glycine max
  unsure at all n locations
tgccaacccatggaagctcctaatatctcccacactntttgtggtgggccattcttggatgaccttgattntctcagggtccacttggaccccatttctaccaactacaaaccctaaggaaactatattatctacacaaaaagtacacttctctatatttgcatagagggtgtttttcctacggactgaaagaacttgcctgagatgtcctaagtgatcatctangctcctactgtacactaaaatatcatcaaagtaaacaactacaaatctacctatgaaatcccttaagacatgatgcataagcctcaaaaaggtgcttggtgcattagtgagtccaaaaggcatcactaaccattcatacaaaccaaactcggtcttgaaacgngttttcactcatcac

SEQ ID NO: 33368 - DNA, 399 bp, Glycine max
ttatcttgcagagttatgtctcgtatcaatttaatgaattacaaccttctcataatcgattacacatttgtttctgagactgactgatttattcaagagtctttgtgtttaatcgattaccatgtgatataattgattacttctcctactataagtgttttagaagtgaacatgaacactttaatcgattactttgagtatttaatcgattacattgttcttgagttgtttctaggtgtttggaagaacactctaatcgattaaaaagataatctaatgaattacttcattgaattaatcgattgccttgtagatgtaattgattacaggccgttatatgtgctttctctataaataaacagcttgtgttctctactaaacaatctcgatattacacaa

SEQ ID NO: 33369 - DNA, 300 bp, Glycine max
  unsure at all n locations
tctagccanatggacttaccttgaattaattcctttgataccttttgacccttgttcctttcttgtttgagctcactcagccttaagtgaaaaacatgatttaccatatccttaggaatttggagctttggattgttttgngataagtgtggggggttttgttcattgacaacttgtttgtgctatgcttatgatgtattttggccatcttgatgtacattgatattggtaaatgtggaatgctgatganatgtgttctcaaagcaagagtaaaaaacataaaaaaaaatctccaaaaat

SEQ ID NO: 33370 - DNA, 465 bp, Glycine max
cgtaggattatggtgtacccatcacatgtggtactaggtggcggttggcaatgtgcacacaagtttttcccttccacatgcgcgcataacccaaccttccctggttgcctaccttcactggactcaccgtcttccacggtacccatattcctcgttctctaaccaccgggtcccattaattcttccaagcttacacaacattccagcaaaacaacattcacacagcacaagctatcacagcccaaccaaaacagagccaaagcagaaaactctgccaaaacaccaaccaaaaatcacaagcttttccactcaaaaaacccaggtaccaattcttcgatccaattcgataaccgttggatcgactccaaaatttacttgaagtctacagtgcataagcctacattttgaccgtggggatctactatcatacattcagaactcattctacattactcttgtcacacg

SEQ ID NO: 33371 - DNA, 355 bp, Glycine max
agcatttgatttgtccaacttatatccacccctaatgttattgatacaaaataaagaatttttatcaaaaaaaaaacatattcattacatcaaaatgtaaaaggcatttattttctttttcatccattaaaacctttctaattttgtaattttaacaaaaaaagaatattaaagagaaaaacctatgatgtatttttttatgagactattatgtattcttatatctgtgttctagtaatacaaaattaattgtggagtgacatggacccaaaagttatatactaatataattcgatttttttctaatatacttttagagataatctcataatattgtcatttcaaaaatgtgatc

SEQ ID NO: 33372 - DNA, 435 bp, Glycine max
  unsure at all n locations
cttaaggaatgaagtcttaattggtcatctctcaagatgttgtaaaacttaatggngagattgatactttaaagacaaccttagccaaacataaattaagaatttataaactctgaccatcataattgttctaagctcaattgatatctttgatatgctatgtatgctccttgaatcaaaatttatataatttgtcttcatcaaaatggggcagattgttagaattggacaacccatcattgaacgatccattcattccttttaagtttgatgagtaacaaagatataaatntatgaccactaataacttacacttaaaagtgcaagacatgtcatatggaagtattatggtaataacttctatctcttcagctcctttcttgattgtcgccactcttcaatcctgtgcctatttttaaaagaataatcacatat

SEQ ID NO: 33373 - DNA, 384 bp, Glycine max
agcttccttagtttgagagaagcttatgtcatggctgccgtgcaaactcagttgactaaggtcccacttgacgagatcatgatcagagaatttgctgagcggcacttcacccataacttcgcttctcataatgctggcacaattcttatcctctacaagtatgagaagattcatctttctgctttggagacatatgcacattcgattcactgtgctattgatagcaaaaccactgccaaacactgtcaggaatcattcatctacagtcttcactccattgtggcaagaagagctcattcggataatctaactatgtatcaatgttaatatgaactgcacctcgctcctcattggagagctcaacttcatactattctccaccga

SEQ ID NO: 33374 - DNA, 62 bp, Glycine max
caagttgtgagctgtgtctgatctaccatggctgcaaacgtgtattattatttgggactgtc

SEQ ID NO: 33375 - DNA, 407 bp, Glycine max
  unsure at all n locations
agcttgtagcatattcgaacgacaataactatttactctgatgtccgattgagtcccgtaatatatcgagacactcgtaattgaaaacagaagttctgagaaaattcaaacgacaataactttttattcggatgtccgattgagtatcgtaatatatcgagacgctcgtaattgaaaacaaaagcttgtagcaaattcgaacgacaataactttttactcggatgtccgattgagtcccgtaatatatcgagacgctagtaattgaaattagaagctctgagcanattcaaacgacaattacttgtgactcggatgtccgactgtgtcccgtagtatttcgagacgctcgatattgaacactgaagctctgagaaaaagcaaacgacaataacattttactctgatg

SEQ ID NO: 33376 - DNA, 471 bp, Glycine max
  unsure at all n locations
tnggagttgcgaaagccccacttcatcattaggaataataccttacatcttaaaccgaccaaatagacctaaccagaccattatagttgctggttgaataccttcaccacttcagtgtatcacacaattatggcttttctctaatgaaacactcttgccttttaacactctaattcccctttgagttctaagcaattcaagagattatggccacaacaaagaacaattcaccaatatgtgtaaggtaaggctagacaatgaaaaggttaaccaagattaaggctaacaatggttttatgcacanatgaaggaaataatattcagaatttangaattcangtaacaatccttcatgcaaccaatatattacctttaaagagttntttcttntaagttcttcangcatgaaccattcagcccacttttttttatttntaatatnnttatcacaaaatcgcttcctttctttcc

SEQ ID NO: 33377 - DNA, 413 bp, Glycine max
  unsure at all n locations
agctnttcctctgtttgttctgttaggatttctaagcgttagagagaagaagagattgtagcctccatttcactgtcaacgtgcaagactaatttctctctgcaaaaacattatgttgcaaatcccaacagtgagaatatgcaaaacaggttctaaaggtggttccaaattcacgatgatccaacggttgacgagtccatgatcataattttactgggacagatttgggtgtatgcgggaaaagagaaagttcagtgcgagggacatttcttccaccatagtcattatctcanacattccaatgataggtgtatgcaaagataagtttcaaactatgtgttcaaatttcacgatgatccaacggttaacaagttcnggatcattggtttacaaagacaagtttgaatgtatgc

SEQ ID NO: 33378 - DNA, 522 bp, Glycine max
  unsure at all n locations
tggggaccggaaaccgtagaccatgcgacactcacaatactaagcttcttaaagtcacttnctcatttactagtcttgacaagtggtcagtcactagattttcaaatcctttcttttcttgaatgactagatcaaattcttgcagcaatagaatccatctgattaacctggacttagaatcgactntggtcaacaaatatttaatagctgcatggtcggtgtacacaataaccttggatcccaccaaatatgatctgaatttttccagggcatatacaattgcaagcatctccttctctgtggtggcatagttcagctgagcatcatttaagaccttgcttgcatagtagataacatgaaaaaatttttctttctcttgcccaacacagcaccaacgacatagtcacttgcgtcgcacatgagcttaaacacttggctctaatccagtgctataatgactggaacgaacactaagctgggtcttaaggcattgaatgccttccaacactcttcatcanatan

SEQ ID NO: 33379 - DNA, 445 bp, Glycine max
  unsure at all n locations
agctntgagtntttgtacatgcagaagagtttatgaactcanggacaatactcaagccccactaaaacttgtgtcaatactcaatagcatgaacacattgagttcatcattagaatatattcaatggttgtaaactcttttataataacatttgtatacaaagagaagagattataacatttgttttatatgcaaactatgatttgcttacttctttttaggtccttacctcaattggtaacttttgcatttgctttatagctatagggatgatttttgacatattgaatatgtacataaaggaaaacaaatctattactaaggcttaccangaggtatgtgtgtatgcctatgttatgtgttatcatgctataattggccattatcctttntctttcctctatntcctctagtaataatatntctcttggtgctcatcttaatc

SEQ ID NO: 33380 - DNA, 330 bp, Glycine max
  unsure at all n locations
ntagtgactgtgtgtgacgacaaatcttatattgagtgtcctcatggatatgttctacaatcggttntgcatgaatttctaattatcataacatatgattcatggaagtgatctgggcattctttctttctttacattttttagccatgggccaaacagctatcccaatgtacattatttttgtcatttgcaagcccctttgagtcagacacttgatattttattgaatcacaaacctaagatgaaagtttcctaccttaccttaagataggagagcagggatgttntcgatggagatttctatcatttagtggctagttgttggtattg

SEQ ID NO: 33381 - DNA, 428 bp, Glycine max
  unsure at all n locations
tttcttcacagtttatctntttcaaacttgagttttggaagaccaactactaagtctttcctaactagatgatataaacgatggatgttaatgtgttcaaccctacaatgccacaaccatgaatcatcatctatcttactcaccaagcaacttagctcatgaaaagatgcatgctcaacattcagcatataaatattacctattctcttaccaatgtggacaactttaccagatatggcttcacttataagatagcaatttctgtcaaactcaatcttgaaacctttatcgcatagttgactaatggttagaaagttatgctctagtgcatccatatgtagcacattctttatctgagttttgtgttaattccctatatttccttccccagtatattttgctttgttattgtctccaaacatgacata

SEQ ID NO: 33382 - DNA, 397 bp, Glycine max
  unsure at all n locations
tcatgatgatgaatcaagttgattcaagtagttttgatgataacttagatgatgacaaanagcccaagagaatgatttcaagattgactcaacacgtttcaagaatcaagagaagtttgatttcaagattcaagagaagatgaattcatgattcaagagaagatatcaagaagacttcacaagggaagtattgaaaagatttttcagaaaacaaacatagcacagttttttttttcacaacagtttttctcaacattttctaagctaccagagtttttactctctggtaatcgattactagtttcctgtaatcgattaccagtggcaaagtttgatttcaaaagttttcaactgaatttggcatgttccaattaatttcanaatggtgtaatcgatt

SEQ ID NO: 33383 - DNA, 332 bp, Glycine max
  unsure at all n locations
acactctaatactaagcttggacgccatgctaaatctatcccatggtctttttattttgtaatagtgcatccgcttttaaattatgaatataattttttctaacttacccttattatattatgagtgtagaagataataaaatcatataatattttgaatatttaaggaagggaattcagcaaaggaacttgtttgcttataatcgaggtatctaatgacattcttatttttgtgcataaccttaaattatatatgaacggaatcaatcctgtgatcgacaaatctgtatatcgatactcatttgttgagcgctntgtccatgttacatgaa

SEQ ID NO: 33384 - DNA, 439 bp, Glycine max
  unsure at all n locations
ggcatgcttgctacngcacttgatactggctctatacgagcctataatagcacgtagtaatttgactacgctcgagtaatgtacatgttatgttatatgcagtcaaggatacatcatgtttcattcttgtttgcgacctgtgttctattatatgcagacctgcacttgtgtattgtgacactcacactaagtgtcccacaaaaaatgctaaaaaactagaaaagaatgggcgtgttagaactttgaacaccacaaagaagcatctagatgcattatcttggaaacacaatcaaggagcaaaaccccattctacgatctctctgaatttgaaccaatcgagacaaagtgagcactcaacgtacgaccgtagcaaaggacggagcatctaacggtatggtcatagatacatacaaactgtagaccatctgacatccaaccg

SEQ ID NO: 33385 - DNA, 457 bp, Glycine max
  unsure at all n locations
ccaacattcaacttcgagcgtctcngtatattatacgactcaattagacatccgagtantaaaggtattgtcgtttgatatntctcagaagcttcacattcaatttcgagcgtctcaatatatgacgggactcaatcagacattcgagtaaaaagatattgtcgtcttaattggctcaaagcttctacattcaatttcgaacgtctcgatatatgacgggactcaatcangcatccgtgtaaaaagttattgtcgtttgagttggctcagagcttcaacattcaatttcaagcgtctcgatatatgacgggactcaatcangcatccgagtaaaaagttattgtcgtttgaatggctgagagctcaacatcaatttcagcgtctcgatatatgacggactcatcagacatcnagtaaaagatatgtcgttgaattgctagagcttcacattcattcg

SEQ ID NO: 33386 - DNA, 433 bp, Glycine max
  unsure at all n locations
tagcttaccctatatgacactccttataccaccaagtttctagctcggtcacttttgaaatcccgctaactgagtacaaagtgacttgcagcagtttggtgagtaattaagcactcttctatatgtcaaattttaaaatcatttacatatcaaatatgaatttcatgatgtttcgagtaccatatacttatttatgaaagctacaagattcacccatttgaacttgaaagggactatgaagtgtaggatagattataatcatggtaggaagactgtaaaaantggaaatggatggaggaaatttgcacaatcatagaatttgcttactagaactcaaatcatattngaattcctagatgcaacttctaactttgtttaatttggatttgttggaattaaagtatattactactgcactattatcaagttataa

SEQ ID NO: 33387 - DNA, 53 bp, Glycine max
tgtttgaagcgatcccagtgggcttgaattagtgaagtgtcaatcgtcatgga

SEQ ID NO: 33388 - DNA, 392 bp, Glycine max
tagctcgtaggcttctatttacaaccatacattggctttgaacaccatgagaaaattcacacaaaaaactgaattagtgagacatggagttacaagatttgctaccactttcttaactttgcaaagattgcataagcaaaaggccaatcttagaaggatgtttacttcagatgaatggttgaagtctatggcagctaaagagcccaaggggaagcaagcaacagatgttgttcttatgccatcattttggaatgatgttgtctatgctttataggctatggggcctcttgaagtgtgtcgatgtggtgaataatgaaaaaaacctgaatatgttcatttatgaacaatggaatggccaagagcttcaatacaatgaaagatagatatggata

SEQ ID NO: 33389 - DNA, 412 bp, Glycine max
  unsure at all n locations
ntatacggataaccactctggtatctccgctcgtcagcttgacttataagtcagtatgacagatcttgtgagcgcggatgatgacgtaagtctccgcgtgtaaacaggcttgtcggccgcgattgacgaatggcgcaggagacgactttagtctctgcgtgctatcaggcttctcggctttcagatagcagaaaggtttatacggataaccacgcgggtatctccgcccgtcagcgtgactcattagtcagtatgacagatcttgtgagcgcgtaagatgacgtaaatcttccgcatgtcaacgcgctagttggccgcgtttgactaatggcgcatgagacgaccttagtgtctgcgtgctatcaggctattcgtcttaccgaagcaaaaaggtctattctggtaaccactc

SEQ ID NO: 33390 - DNA, 379 bp, Glycine max
  unsure at all n locations
agcttctaaggttgtagaataatcaattatcaactgtggtaattgattatcttgagcaacaaagccttcttctataaatggctntataatcgtttagtaaaactggtaaatgattaatttgacgactctagccaaatttcaaatagaagtgagttgtgttgcttgttcttacactttgtaattgattacataaccttgtaatcgatcacattgtgttgaacttatggcttctaagaaactttgatatcaatccatgcatctatcatgtttgattcacactaagcatggataaagaaaaactaagacttaatctaccacccatgcctagactaatacattcaatacaaatgccacatcttttaatatgtgtctaacattg

SEQ ID NO: 33391 - DNA, 400 bp, Glycine max
  unsure at all n locations
ntctccactaagtngcctgatgtctgatatgtcttttctgatggtagtggtcctagatgcanggaagaatatctccaagaacaccctcttaaggtcatcccaactaaaaatagacctgcgagcaaggtagtatagccaatcttttgtcactccctccagagaatgaggaacagcctttagaaagatatgatcttcttggccatcanggggcttcatggtggaacaaacaatatcgaactccttaagatgcttatgaagatcttcacctgcaagaccatgaaactngggcagcacatgtattagtccagtcttgagaacatatggaacaccctcatcatgatattgaaagcacaagctttcataagtganatcaagtgcagccatctccctagagtcctct

SEQ ID NO: 33392 - DNA, 386 bp, Glycine max
agcttatgcgcatatttccttacgaacgttcacttgcacaagacattctattaactaagaaaaatgcacccatatacaatcaaggcagcttcgttacctagattatttacatgtacttccaaggtgtatttgttacctacatcacacacatttcctttgctaaattcacatacatgcatactctaagcactttggctatcgaaaattgcatacgtgcacatcctggtatttctaatacctatacatacacaaactttatgataaatcttgactatctacacaataaggtgctacatttcatgcttttttcaagtttttgctacctaaagccgcatgcaaattcaagtatattttcttttgctgactaaaattgtattcaaaataaa

SEQ ID NO: 33393 - DNA, 408 bp, Glycine max
  unsure at all n locations
ctagcttctcaggaagtttcttaagaaagcctctcaaggaggtgatcttagctattagaagctaggggtgtgtgtagctaagctctagcttctcaaggaagtttctcaaggaagttacctaggctataaatagaagcatgtgtaacacttgttgtaactctgatgaatgagagtcttgtgagacacacttcanagttccacttctctccttctttnttctccttcaatgtcgtgcccctccctctctctctctctctctctctctcattcttttcatccattgaagcttcctttctaagcttcttatccaaggcttattccctagtggatgatgcctcctctcatctcttctcctatatcttccgctgcatatccatggttgaaaatcaccattgaagaacttcattg

SEQ ID NO: 33394 - DNA, 333 bp, Glycine max
  unsure at all n locations
agcttccttntagtgcgtcacgtttaataccgagctcgatggtggtgcgagcctttgatggtactcggcgggaagtgatggnggaaatcgacattcccattcagataggcccccacacttgcaatgtggtgtttcaagtaatggatataaatcctgcctatagctgcctcttgngaagaccttggattcatgccctgngagtggtcccttcaacgcttcaccagaaattgaagctcgcagtgggtggagttttagtgatagtgtcgggtgaagaggatatgttagtgagctgcccctcctctgccccatacgtagaagcggcggaagaatcat

SEQ ID NO: 33395 - DNA, 386 bp, Glycine max
  unsure at all n locations
tggttcgaggtacttacccgttgaagatcgaagaacgatgaagatcatcgaagaacggttgaaacctttgcgaaattcttcacggaaaacgttacggaaacgtttcggaagcgcctcggcttagattttcttcacggaaacgatttttccaagcaaattcgaaagagagaggagtgcaaaaggggctgaacccttttcttcttcccttcctcccctatttatagcaaaataggggaggtggttgccgcccagctcgcccaggcgagctcagctcgcccaggcgagccaggttgcttcctccagaagcaacagccttctggaggaatattctggagggcccaagtgggcctgtgtgctatttgcacccncatttttactaagtacac

SEQ ID NO: 33396 - DNA, 446 bp, Glycine max
  unsure at all n locations
agcttgcacaacatgtaaatagatctatttttttacaaaatgaactaactaactaacttctactaatatatagagtgactgatcagaatgaagggatgggccttgattagacctatctaatntacctaattaaactaattgcacataacaaagcccaaactcacatcacaattattcaagtgcataggttctgactttcaaactcaatntatagaaaaccgatgttaaactaacatattaacatcggttttactgganaaccgatgtcaacgttcatcatgcgtacactttntctgctgttgttcattgtgtttaacatcgggtatttagaaaaccgatgttgtcatatgtatgttaacatcgattcttcaaaaccgatgttacattcatacattgaacatcgtcactttcaacatctgatttagaaccgatgtagaatgttctaa

SEQ ID NO: 33397 - DNA, 468 bp, Glycine max
  unsure at all n locations
tatttcttcatgccactaatgaaagtacttatgtaatcacaagttatatgtttaatgacatttgacaattctataagaaaaaaggtctgttaagtgttaacattagaatattcatatcatggaagcaacttgcagttcaacatgaaatacttgattttctcatacttggatcattgagaaaaacggttgatagaacacaacagaatattaattgcaatatgctaattttggataccggaaatgtctaccaagcagtntaagaaataaggttgctaacaatatgttacacagaatattaattgcaatatgctaattttaacaaacagattatgtcatttagagaagaggaaaccttgtgtgtcatgagaggtngagactttnggaaaacaacaaagaatttatgaagggtaatgatccaaaagaggaataccaaatcatggacacatccaaagggcaatacattctcac

SEQ ID NO: 33398 - DNA, 396 bp, Glycine max
  unsure at all n locations
agctttgagccattatcctgactctccataaaccttgnacccaggtgagaatgccaatccttaccctcggaagcaaaaaaaggaaagaaagaaaggaaatttccaatcaaagagaaagcacaaaaggaaggaaaggaaattcccaatcaaagagatagcaaacaaggaaggaaaggacattcccaatcaaagagtgggagaaagagaacaaagacaagaaaggaaattcccaatcaaagagtgggagaaagaatatagacaagaaagaaaattcccaaccaaagaatgggagatagtaaaaaagatagatgctcctggtcaaagaaaccagaagacatgtgccgagaggtccttggaccacacgatatctgaacaatacagaattgtcaccaaatg

SEQ ID NO: 33399 - DNA, 294 bp, Glycine max
  unsure at all n locations
tacaattatatgatggagtgggacaagatcaatcgataggcataaccaacccaaatcataaattagtcataaccaaaatataatccaaacaatcataatntaaaaacacataanatccaatcataaaagactaaagtccaaataccaaaagataaataaagtgcagaaaatgataactnatataccatagccaaaatacacggcttnaaaagaaaattatanactaaactctaagactgtggacgtggtggtggaagatcgaagctctggcgaatataacccacatcttcttca

SEQ ID NO: 33400 - DNA, 322 bp, Glycine max
agctaacacactttgtggacgtattttctcatgtatagtgtaaaattagttgttcatgtttgagtgtccatttgcaagtttcaaaactacgtttctgatccaattcgatctggagtgttattttagtgttggtatattagaataaagtgttgtgtttgctctaataatattttagccattagtatccaattagatgcattagttgcttgaaatataatagaccggacataattcggctgttcaaaatatataattttggcaaaatacttttgccgcctaaatatcccccataatattgttatattacatttcgataatgatc

SEQ ID NO: 33401 - DNA, 270 bp, Glycine max
agcactatatgtattgatatgactctttacaatcgattatgaatgacaacgttcatatacactagaaatcgactaccaatatcttgtaatcgattacaccattctgaaatcaattggaacgttgctcatttagttgagaactttttgaaatcgaacttcgccactggtaatcgattacaggaaactggtgatcgattacctgagagttgaaaatctgggtacttagaaatgttgagaaaaactcttttgataaacaaaactgtgctatgt

SEQ ID NO: 33402 - DNA, 400 bp, Glycine max
ccttcactttcgatattgtttgattctcaactagtttatgacactgttagttcttctcaaatgcctcctttcttgtgtgtaacagataaatccaaagtttccttgtgaaatcatcaactattgacatgaagtatctaacttttccctttgattatacctttgaaggccctcacaagtcaaaatgaatgtcatccattctattcttgttggtgagcattccagtactgaatattactatgtgacacttaccatacacacagtgtcacaaaaaaggcttccaatttgtactctccaactgaccttgttgctcaattcaacataccattctactaacatgtcagcctcatatccataactttgcttggcagatattgtctcacactaaactgatcctatacat

SEQ ID NO: 33403 - DNA, 406 bp, Glycine max
tcaacacacaatctatgtgtgctacacccctcatattcaatgggctttataagatcgaatatagcaaattaaactgatgtaaatgtgaagcaaactttcacctcacacaagtccataacgtcaatctatacttgctcaaactgaatgtatacctaaaattccaccgaatcaaataagatcttcatcaccattttgccctagaaaagctctcagtcacttttgtcatatgtactcccttagcacagcaacctatctacatgtctacatgacatttcagctaagatgactaaattaacactcattaccacatatatagaacttaccctcccacgctcaagccacactctattcactcattaacacccattatcacttttaccgtaggtaaaatacatttatctctacc

SEQ ID NO: 33404 - DNA, 307 bp, Glycine max
  unsure at all n locations
tagcgtaacatcaagcgttaacttacagagagtaagtcttgtctttttcactttcaagaattcanaagccgtaagagagtggcgcttatcgcctcctgtcctgctcaccccagcttaaaaactcatgttataaaatggatctgcgacttaacgtaagatattgcacttagcgctgctacaatgaaatctttcttgagaaaaagtggcacttatcgcatcatccacgctgaacgcactgtgtaaagttcaattaccgagaagatgtggggcctatcgcagtgatgtgcgctttgctgaactatcagcc

SEQ ID NO: 33405 - DNA, 412 bp, Glycine max
  unsure at all n locations
ctttgcaacttaaaatngagagcatgcttaatgctttaattgatagatagaacacagtttacgagttgggacaagaccttgccaaattcatgaatgtcacaccaaaatcttgaaaactgattggaagtaaaacttgcatcttttataaaattccattattatttgaagggcatataaaacaaatgttcatagtagaagaatttacactatttaattaaaaaatgtttttctaaaaaacacccacatttaataatgtagaattgattacaaaaaaaaatgtagaatcaaatttataataaataaatatacacaaatacggaatgcgagggaaaatatccattaaatatatatntagctctatacatgttgattaagttattagttacttacagctgttaaaagaaaatactaa

SEQ ID NO: 33406 - DNA, 321 bp, Glycine max
  unsure at all n locations
tttctngcgtatgtttatgagttgaattgattgactgcatgaatgtattgaattgtgacgtgtatatcatatgctttgaatatgtatgctgtgattagaacagaatgaacactatttacgagcatgactgacattgttacttggtttgactgcaaattatatgacattcgttagccatatccaggtggatttgtgatctctaattgtgagagaacgactagcattatgtactcagttttgcatgaatctctgaatattgaatgactgcatgagtctcaagaatacgaatgccatgattgttcgacattacctcttatccat

SEQ ID NO: 33407 - DNA, 324 bp, Glycine max
  unsure at all n locations
cgagacccatcttcaagacataaacaagacacaacactttgtgcgtgatcttcaaatcaaatagggtcagtaacagttccacctatgtntcattacaacaacagagcgagactagaattgacttcatggaagacaaggctgacctcatccattggaattacacttgatggaaaattggtatcatcccttaatggcttctagagctcgagttactcgggttgttttgtggtttcatcatgctactgtggccataacagtataaacacaccgcaactatctacgtagataaaacctcatcatngcgctaggtagaataagaaatca

SEQ ID NO: 33408 - DNA, 253 bp, Glycine max
  unsure at all n locations
tcttgcttgtacgtttttcatccataaacctatgtggaacatttgacattgttataccctaatttcgtccggtgattatgattngatgatatacaacctctgattggccgcttcaagatacttggcaccctgtgctgcacaatatgtgaattcccgagatgtgcccaaaatcaaaaagaagcatgcgtacgcgatccgtgaaaatttcgcaatgtgacataaatcgtatggaagtgtttttcgcataccgcga

SEQ ID NO: 33409 - DNA, 304 bp, Glycine max
gtcattctacacctaaataagatgaggacatagccgctcttaagatataacttcctaacaaatattttcatgcaggtggagcttcttctagtaatttagacttaccgcaacctcttatccctcttccattcccacctagagcaattccagacaaaaaaatggaagaagtagaaaatgagatcttggagaccttcatgaaagtagaggtgaacatacctcttctagatgccatcaagtttattccaagatatgccaagtttctaaaggagctgtgcacccacaaaatgaagctcatatgcaatga

SEQ ID NO: 33410 - DNA, 352 bp, Glycine max
  unsure at all n locations
agctntgaaaagtgttgtntttcaccttctcgctaagccaatttgttggcttaacgagcttccactaagcgcaacactcatgggctaagcgcgaggaagactctggaagaagatgagttgcacagattcgctaagcacaccgcttcatctcactaagcgcactgcttcagttcatccggtaagcgagaaaggcacgtgctaagccaaaattcactaatgtgcactaagcggtccataagtgcgcttagcgcacgagcacgaacaaggccacctatttaagcctgaaatcagattctagagagagagtttggactgggattcacagctttgcatgtctagagattctaaagag

SEQ ID NO: 33411 - DNA, 446 bp, Glycine max
  unsure at all n locations
cgttntgattattgttgttntcttctcattccccctattaatattacttagactagtcttctatgattgcctttctaagttcttcaaaaactaaggttttatttaatgttgtttgttgtgaccaactatagtnttacacatatgaaagcttgaagcaagtgatgccatctagtattcaacccaacacgtttcagactgtgagttaatgtttgttccttgctcttaaccatcatttntttgtctcattgcaatgaatgtaactgggatgattttacaaatttctatangcagtgtgtggaggattagctggatctatggctgctttattcacgactccttttgatgtgatcaagactagattacagacacatgtatttaattatcatgcccttcaattgtataaattcttattgctactactggtgcagccatctaattagatgttg

SEQ ID NO: 33412 - DNA, 411 bp, Glycine max
  unsure at all n locations
tgcaagcttgctttactatcatgaaactcgtcttgcccgctacaataaagaagcataagtgctaatttctttgtccttgaactacactcaacgctattngcaccaaaattattacaaattatggtgattctggtggtttttagggttcatatggtcgtggtggttttcctaaccgcagtgttagatgcggtggtggtggctccagcagaagtcgtggtggtggtcagtttgccaacttttagtatcaacatttgccttaagtatggacactgcgcaattttgccactttaagtctgatatgagttttcagcctcatgaatcagtcaccttctttgattctaccacacttcnaccaattccctactccactggttcaatcagagcttctaatacctggattaatcctaattc

SEQ ID NO: 33413 - DNA, 450 bp, Glycine max
  unsure at all n locations
cgtcgctggagctaacccatcaactgtcctaactctttcagactggtgactcctangctcttgaccttgacttgatagaacctctntttaagcanaggcgcctgactcgatcccatgttttactaaagtgaaacaaaacccagtgcgaatcaagactccgacatctatcatgggtggaatggatgaatgcatgaagaaatgcatatgacacagaccctccgtcgagattgtcctcttcttagatacaacattcgggcagcatggctcctgatgtatgcatntaagaaggcgacacgaaccctccgtcggttcgtgacaaagtgaggggatcaagacgcaacccatgcatgatgcggatgcgataaaggcacaacacgaggatgtacatagtatgacaatatccacaaataatcatacagcaaaggcgtacatgacatttttaaactacat

SEQ ID NO: 33414 - DNA, 426 bp, Glycine max
  unsure at all n locations
agcttgaaatgatgaagtgtagaatggtgaaacttcttgcttttattcgctgaccacagagtggtacctggagatatgtcgcgggggtcaggagaccttggggacgtcaagtgnggtgctattgcccaaaaccaagcttgaccaatcccgacccaacccgggcatagtcagtcagtgagaacctgtgatgtacctaagcgggcgagctcctggcagtcaacagataaaaggaactaagaccacatagcaaggaggcttgtgtggtggctggccaactgtgaactctgatngatatatgggatatggcctctggtaatcgattaccaagggtgggtaatcgattacaacgcttaaaaatgaagacaggagactaagatggtctctggtaatcgattaccaagggagtgtaatcgattaccaagcttg

SEQ ID NO: 33415 - DNA, 451 bp, Glycine max
  unsure at all n locations
tatccttatggcttgcctccggacttcaccccccgtgccacccctgatgatttaagccaagcccctactttcgaggggcaactcccaccttatgaagactatcccgggcaagacaatgaggaaggagatacccatcttagccccctgctccacctcaaagatccgtccccccatgaactaccccaaccaaacatagtccgccatatcccgacttcacccacacccgtaaaagaatctgttcccttcgtggaagataagggaaagattgaggtgcttgaagagaggttgagagcagtcgagggcctcggcaattacccattctcggatttagcggatntatgtctcgttcccaacatcgtcatccctcccaagttcaaagtaccggactttgataagtacanagggacgacatgtccgaatgggcatcttcggatgtatttatcgaaagatg

SEQ ID NO: 33416 - DNA, 395 bp, Glycine max
  unsure at all n locations
agctntgcctttatggctngtacctcatcactntcttccgaagctttaacctcatcgtctctcacagtctttagaattgngagccaatccaatcccttgtgttcggactctcaaccacttatgatagccggcgatgatcccattactgcttcccctaagctctctgtcctttcttcacgccgcatcccatgccttgcgaactcctttgagtaccctcgcgttgtggtcaccgaaaccccgtgcgatgaaaggcgtgatgctttcgtctgatggcactcctctcatggggtagccaagctgtcttatggcgaggacgagattataattaatacaaccccttgttccatcaagggaacatttggacatccttcgcatgaagatagaatccctgattc

SEQ ID NO: 33417 - DNA, 464 bp, Glycine max
  unsure at all n locations
tgtgcaaatcanatcactcctacatctcatctctagcatgcattttctttctttacccactcctcacgtttggttttttagggaaaacaccataactaaacgcgccgcaagggatccctatcgcaccagatccaaatctagaacgatgggtgatcaagaggagacacaggaacagatgaaagccgacatgtcggctctgaaagaacaaatggcctccatgatggaggccatgttaggtatgaagcagctcatggagaaaaacgcggccactgccgccgctgtcagttcggctgccgaagcagacccgactctcttggcaactacgcaccatcctcccccaagcatagtaggacggngaagggacgcactgtggcacgatggcagccctcacctgtgatacaaccgaacggcttacccttatggattgccgcccaactattcaccacccatcttgcaagaagatg

SEQ ID NO: 33418 - DNA, 141 bp, Glycine max
gctcatatttatggggcaaatttgggggtttatatgcttgatttgttagagatgacgggttggaagggatggccttacgcctatgtggtattctgaaacaatggggcatgccacattgcccccattctcttgcaatttatg

SEQ ID NO: 33419 - DNA, 337 bp, Glycine max
  unsure at all n locations
agctttgagcatattcaagcaaatatcatctnttttactcggatgtctgattgagtcccgtaatatatcgagacgctcgaagtggaacaccgaatctctgagcatattcaaacgacaataactttgtactcggatgtcagattgagtccagaaatttgtcgagatgcttgaaattgaagaccaaagctctgagcaaattcaaacgacaataactatttactcggatgtgtgactgagtcccgtaatatatcgagacgctcggaattgattatcgaagctctgagcgaattcaaacgacaataactgttactcggatggctgatagagtcccgtacta

SEQ ID NO: 33420 - DNA, 392 bp, Glycine max
  unsure at all n locations
tctcgacatattacggggactcaatcagacattccgaataanaaagtttattngttgntngaaatnttctcatagccttcaacatttcaagttgtgagccgttttgatatnattacgataccctcaatcggacattccgagtaaaaaagttattggtcgttgaatttgttcagagcttcngcattcaagtccgagcctctcgatatactacgggactcaatcagacctccgagtaaaaggctattgtcgtttgaatatgctcaaaacttcgacattctagtccgagcgtctcgatatattacgggactcaatcagacatccgagttaaaagttattgtcgtttgaatatgcttagagcttctgtattccatttgagcgtctcgatatattac

SEQ ID NO: 33421 - DNA, 446 bp, Glycine max
  unsure at all n locations
agcttatcatctttaagtgattgatcatttgtagtttaatattttctattcttcttagctcaattgacatctctttgactcttattttctcatcttaactcatttttggtctaaggcaagtgattgagcttaattgagaattgtagctaaatttcaaattttgtgcttacttgacatatctatcttgtgtagggcctagaggagactacagaactccaaatggaatgtgtaagtagtccctagaaagttgagaaaaggatcttcaattgtgttacaaatgctttagccaattctggcatttcaagggtcacattgagcttggaagtcagagcctctgcacttgaataattgngctataagtttggacttttattttgtgaattagtttagttaagtagttaggtagttattatagtatctaagtaagtcactaacactctatatat

SEQ ID NO: 33422 - DNA, 441 bp, Glycine max
  unsure at all n locations
ctgagatacatgtaaccctgtggcatcatcaaaacattcagcttgatcctttgtctacaatctccccctatatgatgatgacaatcctgaaatcaagacaagctatatacaagatgatagcccgttcacatagcccttactccccctatcttttggcatgtatgcctaactttaatgattttaattgatttctaacccaagttctctccccctttggcaacatcaaaaagaataagcaagacaatcaatagataaacagagtcaaacattaaaccaaaataaatccatacattgtcataatcaaccaaagcaaagtctagaaatataataatagtgcaagattacgataactagagcaacataaagccagatacacggtgatgaaacanagtactaataatacttaatcactaatattacttagtcataataataacatat

SEQ ID NO: 33423 - DNA, 456 bp, Glycine max
  unsure at all n locations
tgcatgcgtgcatgacgactctacatgatccgcgtgagccttgctcgtatgtcccgtattatgaggcgcacgccacatcactggccgtcgcatcacgacgtagtgactggaacgaccctgtcgttgcccacctgactcgacttgcagcgaatacttctttcggcagctggcgtagaacctaagacgccggcccggatcgcactttcctcatgtcgatctgctgatggcgactggtcctgatgcggacttcatttcttacacctctgcgccgtctatcactaccgatattgtgctctctcancacgagactgatatgccgccgcatagctgtctcaggccagcaccctcctacatcaggtgcgcgacttaatgacagcgtctgagcagacacgaacatgtcgacaactgagtgcgggggtagtcaccaactagtggcgtgggacatcagccatcgcg

SEQ ID NO: 33424 - DNA, 437 bp, Glycine max
  unsure at all n locations
tagctttctctagttaattatcataagaccccacaagaaagcttccatggtgatccctacaaatttctctaaaccctgcctaagatggtttttccaaaagtcgacttagaatctatagaatttaagataatttttctaattacaatcttagaattttaaaaaaaattaaaaaaacctacagtaatatttttttatcaaataaaaactcaccataattgactatagaatttacaaatcatatttgataaaaatcatctctcttcccaagatgatgatattttgttactcaataaaattaattntaaattcatgattgatttggtgaataaaatcttanaacttataagaaagtcgcatttttcccctaattataccatgcaataatattaaaaaattcaaatgagattntaaattaaattatatatgaagaatattta

SEQ ID NO: 33425 - DNA, 427 bp, Glycine max
  unsure at all n locations
tggaccaagttacttgtctgcttgaanttttggatttgtcacactattgaactataattattctcaaatactctgattgatgatttgtagttcatacaggctctggttatcagactcctggtttaatgacttgtgaccaaaattggttaatcagtttttatttttttatgtttaggtgtggactttggaatatcttattttagaattcatatatcttgttttatggtgggaaattaaaaaaaagtataaatctggtatgtgtgatattcaacgataataaaacaagtgataaatcaaatattatgttccattntataaatacactagtgctttatgggtgtgcctcttggcactcccactagtcccactgctctaacaattattttatacttcaaatacccttcattgaatactttgtccttatttc

SEQ ID NO: 33426 - DNA, 444 bp, Glycine max
  unsure at all n locations
ggcatgtttatgcttgtgggattttnntgtgatagtgaattttggccggagaaatgttgagtgaatagataaaagtaccttaccgnngatttgtattttttatgaggtgaattggtgtttttacatttggagttctatagtagcataggcatttgtgacactttttctacttgtganatgccgagtatttgtatgctgcaacttcttgcacnatgtcantgctcatttggctaagaaagattgtttggaggatacttctagttgttgcaataagggaaagcacattagatctattgttgatatatagatactgcacaaagagcttgccaaagaatcccggtgttctcatgaacgaagtaagcatatagatacaacgtatcatttcattagagagtgcattaccaagaaaagaagtagaattgactcatgtgaatactcaagatc

SEQ ID NO: 33427 - DNA, 422 bp, Glycine max
  unsure at all n locations
ctatntggctttctctntattatgaacaaagatcgaagccatatcttagctagctacacttgttcataataatgcacacaacttcgaaagtggttgcacacttaatcatttacaaaagaagatttttaaagttttatctcatagaaaacacttcgtccaagaatataagccatatagagtatactagattcttanaaacatttatgatatanaaataatatntttatacagactagatggatgctttcaattaagtgaacacttangtatatagaaaaaaacatttgacggcttatgttaagtagatggattattanaaccctagatgggattgtgatgctagtcttaatgatacttgaagaatntacaagacatacacatgacacagaccctagctcttcaatcttggtctttgaccttga

SEQ ID NO: 33428 - DNA, 268 bp, Glycine max
acctcatttctgtagtcgacgacaacgctcgacttgtgaacttatctgccaagagtatataactggaataactaatgtgcctttatcacatctcttcacacagtaatgctgagcaaatgaatgtcagcattcactgtctatctgcattaagtaatgaggaaacgacgagaacagaacctctgaaaatttgaataatctatctatcactccaacgatcgtatgatcatgtatgcattcctcttgctcataaatcctactgggttcaact

SEQ ID NO: 33429 - DNA, 366 bp, Glycine max
  unsure at all n locations
tgctgatgttgcaggaacatatggtgaaacaaccttgctccatttctttgttaangagattgttcgctcggcacgaatcacagcttcatacaggatcatgcggcataataactaatacataactgaggaagagatcgatgatacgtatggacataatacgactagaactcgtttctgatctaagtgctgagttatgcgctgttaagatgacactcacaattgactcggatgtccttgcacgctctatctcaaacctatcaagtggatcggctaacatgcagaacctgttaacgggtcgtttgtgtgaggatgtaaagagtgacagctttgtcatgtctatgaagtggaatcagaactatgcacaca

SEQ ID NO: 33430 - DNA, 336 bp, Glycine max
agcttttactttatctgtaagctgtagccattaggtcgatcaccatgtagctaatgttgctccccctatctctagcatatcatatgtcaataagtacttgcagtttctcatgatgaaaaatacttgaactatggggcatgtcacttggtttgaaactttattgagactaaggtcgatcaccatggttaggaagttgattgagcacgacatggtgacctcgacacttgttgcctagttttactaagtgaaagcgtcgtgtggacacacttaagctattttttgactaatgataccacattgcatctgatatatgaagcctagtgcttgcatcatact

SEQ ID NO: 33431 - DNA, 294 bp, Glycine max
gtgaatctctcccacgtctcacggagtgtgtcgtcatacccttgttataaagtcgctatgaagttttgctgcacctcttaccaagtattgatgctattattcggatgtgattggagccatgtttttgccttacctgccaatgaaaatctgaaagctctgaggtagacagctacatcatcttcatgtgatgctcccatggtactacataattgcacaacacttattgctgaaaggaggaatgactatgttggtgatatgctatggtccttgttgattagcatagtcaccaagagt

SEQ ID NO: 33432 - DNA, 400 bp, Glycine max
  unsure at all n locations
agctntgggactgtaaaactatataacagcaccaaggttctagtttaggtctctcttcgattattcgtttttagttttagtctctctctctctctctctcttcttctctctcctattttcgtttttagttntaggcttttcttagacactnttttgttttgcaattccagttttgacttttcattttagcaataaaatnttgttcttcaatctataatttcgttctctattgattaatggaaggctagattttctggtgttgttccttttgaggacgaagcccaactctctntgaggtttcgctggcaatgtggtttcctggcagttntcccttcaccagttatcccaatttcgtgaatattaatcagtgcacgcttcgtgttcgattaattgcctctga

SEQ ID NO: 33433 - DNA, 389 bp, Glycine max
  unsure at all n locations
tatagaatatataataagagatctatgactattgaagaatctattcatgattcctttgatgagtctaatgttattcctccaagaaaggaaattctagatgatattgcagaatctttagaaaaaatgcatatttatggacaagattctaaaggaaaagggaaaggaagcaatgaagatcctccagaagaagccatatcaaattatgaacttccaagagaatggaaagcttcaagagatcatccccttgacaacattattggtgatatctcanaaggggtaacaactagacattctcttaaagatntatgcaataatatggcttttgtgtctatggttgaacctaaaaatataaatgaagccataatagatgatcattggatagttgctat

SEQ ID NO: 33434 - DNA, 427 bp, Glycine max
  unsure at all n locations
agcttgaaatgtttaagtgtagaatgttgaaacttcttgctnttattcgctgaccacagagtggtacctggagatatgtcgcgggggtcaggagaccttggggacgtcaagtggggtgctattgcccaaaaccaagcttgaccaatcccgacccaacccgggcatagtcagtcagtgagaacctgtgatgtacctaagcgggcgagctcctggcagtcaacagataaaaggaactaagaccacaaagcaaggatgcttgtgtggtggctggccaactgtgaactttgattgatatatgggatatggcctctggtaatcgattaccaagggtgggtaatcgattacaaggcttaaaaatgaagacaggagactaagatggtctctggtaatcgattaccanaggagtgtaatcgattaccaagcttga

SEQ ID NO: 33435 - DNA, 450 bp, Glycine max
  unsure at all n locations
tatccttatggcttgcctccggacttcaccccccgtgccaccccggaagatntaagccaagcccctactttcgaggggcaactcccaccttatgaagactatcccgggcaagacaatgaggaaggagatacccatcttagccccctgctccacctcaaagatccgtccccccatgaactaccccaaccaaacatagtccgccatatcccgacttcacccacacccgtaaaagaatctgttcccttcgtggaagataagggaaagattgaggtgcttgaagagaggttgagagcagtcgagggcctcggcaattacccattctcggatttagcggatttatgtctcgttcccaacatcgtcatccctcccaagttcaaagtaccggactttgatatgtacaaagggacgacatgtccgaaggggcatcttctgatgtatttatcgaaagat

SEQ ID NO: 33436 - DNA, 207 bp, Glycine max
ctagatgacacttgacctgcttggcggctcgaccgactataacccttctatttgtaatgctgaatgatactactagacactcatcaaccctccatgtcagacctgatgcaggagcatgaacgcatagcccataatataccgactccccaactaacacgctatctcccacctcttattatttgagcataaaggcattcctttatctct

SEQ ID NO: 33437 - DNA, 299 bp, Glycine max
  unsure at all n locations
tcntcggagggagagaacgagagagagagagagagtggcacggtttatgaatgataatacggagagaacttgaacgatgaagtgtgtctcacatgtttctcatacatcaatgtagagacctgtgttacacgagtttctatctattgcctatgtcactacctagattgagactctcatattcatttcctgagaatgtagaaggaatatgccgagaatatgccctaggcatcttatcatatcccctttatatgccgcaagcatggatcgtgtgactctagcacatgggacgctttcttgag

SEQ ID NO: 33438 - DNA, 443 bp, Glycine max
  unsure at all n locations
ttagagaccttaggcatgcaagctntgagttctatggccccaatgacatctatccnccacatggaaaaaggccaaggtgtttacatgacattcagaggatgtggcggaacattgacattgtccgcgtacgcttgacatttatggcattaccttacatgggcgcagcaatcgctttccatagtgagctagtaataacctgctctaaggatattcctggccataccatgcccattggcatgtgtcccanatgcacccccgtggatttccttaatcatgtagttcgcctctctggcatctatgcatcgcatgagggtcatgtcgtcgtttcgtttgtacacgatggtaccactcacatagaaactagtatccaatctccgtaacgtgcttttggcattgtcggaaatccctggtggatattctttgttctcgacatactggctaat

SEQ ID NO: 33439 - DNA, 395 bp, Glycine max
  unsure at all n locations
tctgtccctgagaaactggttcccagaagacaacaggggagtaatgaatgctgaataccctaaccttgcaacatgtccctaggaagtagacacggagatggacaagaaaatccgcagtattgtgagtagcattnttgaatagacgcctctntgtgcctgattgctgagaaaagatgttccaacatcttccaacccaagtgtttctgtgcctgatgctaagaaagatgttccaacatcctccgctccaaatgctgaagccctcccttcacccagtgaagaggaatcaacagaagaagaggatcaagcctcagaggagactcctgcaccacgggcaccagaacctgctccangtgacctcattgacctggaagaagtcgaatctgatgaagaaccca

SEQ ID NO: 33440 - DNA, 450 bp, Glycine max
  unsure at all n locations
agcttggctaattctgacccaatcctttcatagtcagtcagtgagaacctgtgacgtacctaaacaggcgagctcctggcagtcaaccaataaaagaacaaagtccacgaagcaaggagacttgtgtggtggctggccagctatgtatcttgngtggtatatgaaaattagcctctagtaatcgattaccattcatgggtaatcgattacagggtttanaaatggagacaggatgttaagtagctactggtaatcgattaccaattgtgtgtaatcgattacatactttggtaatcgataccagagaggaaatcccttganaaagatattntgactattgcgtagccgtatgggacgcattgtatgcgtacctatgtagttagatttcttgtgaaagagtctaccctctntcttttatctcttgtagatcgcgatgcagcacagttgatc

SEQ ID NO: 33441 - DNA, 377 bp, Glycine max
  unsure at all n locations
tccatcanaaagtatatgttctccttctcatatctgtgtcgtggagttcatctaagtttggtggatcatctggaatatttttttgcaatccatattttctcatgaccctatctactacatgtcattccagaattgcaaaacatatgagagatacttttgcacgaagaatcatagatacctcaacattattagttaatcaccttatttgaagtgtctcataaggtgtccaccagaactgcaagacatatattattattgtcacatatttataaatgaataagaaacacaaagaaatacttaatagaaataataaaaaaatgaacttcatccatatgtagtctattaaatatgatgcatataagtctgattgtatgggt

SEQ ID NO: 33442 - DNA, 423 bp, Glycine max
  unsure at all n locations
agctgtgccatgtttcttcataatattaacactctcccacactcctatctattagtatgctttgaatctctcttctctcatgtataaggtatctttctggttgagctatgaattaattattaatctaattgttaagcagagtaaatgattctattataacgattcttgtagttgattacattgtgtgattgaatattttttttggttggatcatcactattccgtaaggatgacaattggatctattcatctcgtaactntctaattcttccataaataaattcagccaaaatatgcaattatcaaagacaataatggattgcatatgttgagtcaatgctatcattggatggtcagtgaaccatccaacatatttcttataccattggatcaatgggagcaactccaatgggtgtggagagt

SEQ ID NO: 33443 - DNA, 338 bp, Glycine max
tgcagcatccataaacaaataggagacaagatagctataaaaaccttccaagtattcataatctacaacaccatcaaacccatagctttagaatccttggttgaaaaagagaaaaaaaagaagcactatttacaaatgacaaagtcaaacatgcatctaggcacatcacgtacacccattcaaaacatagaaacactagttttttaaaaatattcacaaccatgctttccgtcacgaccgcaacggtatcacaattacaattatggctacatcggacgtattaatctgcaattttctataatgtcataggatcacgatgaaatcgcgaccccgaccat

SEQ ID NO: 33444 - DNA, 405 bp, Glycine max
tagacgaccttgttgagtcgagaatacttgattatatatatggacttgtttgaatatgatgtataaagaggtgaatgtgagcctcttttcccctttgaaagactcgtttaaaataatgttttaaaattacttttaatgaatatttgaattctttatattccttatcacgatatatgtgaggggtagagggtgtcacaactatcatccaaacaatttatgattaatttttgatattatgacatacattcataacctagtccattgtgcatcctaaacataatcgcgatcatgaaaaataagaataggattggagagaaagaataattttcacacagagttgaaataccaagccttgactcacatatctacttgcttgaagtggatccttgaatggataattgttca

SEQ ID NO: 33445 - DNA, 395 bp, Glycine max
  unsure at all n locations
agctntgatagtttgtcgtctctcttattgtattctcccacgatatacttgagcttgaacttggtgaatgcctttntaagtcaggtagctatggngaagtaccttgtcatttgaggatccttagtttacgaatctccattcagttgtctagtgataaatttggagctgctccagcacttaaagtatttggttcctactctttnttctaatcttaggccgactaagaaagtgtcgcaacatgcccttntgcaggcgagcgaagcaaggctcacgggtgcgctttccaaaggaggaaagatgcgtggagtcgccaccaacgtttttttgtgggaaacgtcggataaaccgaaggaaaccggtcaaaatgaanattctaagttcgggagttgtattac

SEQ ID NO: 33446 - DNA, 350 bp, Glycine max
  unsure at all n locations
nttatctggtggattcacttttgatcacaactgtaccatattgaatatcattagtcaccacanaaggaccaatccactttgacctcaacttaccactcgtgagtccaagcctagagttatacaataaaactttctgtccaaccacgaagtccttcttagcgatcaaactatcaaggaacttcttggtcttctccttgtagaatttggaattctcataggcttctaaacggatctcatctaactcacttagttggaacttcctttcctttccagcttgatcaatagagaagttgcaggtctttacagcccagtaagctttgtgctctatctctacaggaagatgacatgcc

SEQ ID NO: 33447 - DNA, 287 bp, Glycine max
  unsure at all n locations
ttagcttccgtgatttgtggagagcctntacacaatcgagaactattatgtattgactcttgctatggtttaacgacaacaggacagtgttaacgtgcgctccatgtttctgatacgaccaacgtataagtcacaatatgaaatcatgaatatctatataaggaaactgaatagcggatcaaacattctggacgttatatcatttgcactgaactatcaatgtgttaccaggcatgaggagtctctggtcatttatgaccacgatcactttctggaattataatccc

SEQ ID NO: 33448 - DNA, 460 bp, Glycine max
  unsure at all n locations
tgaacacgatcatcgacactgatggaaganctgtgtttgacatgagtggatggaaacttgcttgatgacaacaacgagtatggctgtgtgaactactttgcaattgtctatcctatggagacagcgacaaccaatagtgagtatgatccttatcatataaaaactcgccatcagactttacaattgtggggaactgtgtatattaacatgctcgctgtaagatatgaatactatactcggtaatacaagagaacctcctgaagctttcaatgactaatagagtggggtgaaaggatatacagagaagatcgatggacaaaatcattatcacattctgaaaacacctatcaggttgaaagaatgcatgacttactgctctatatctacacgacatgatgctgcatgctctaacgatgaaagaccggcgagggcacatggtggtctactctctaatgttttn

SEQ ID NO: 33449 - DNA, 276 bp, Glycine max
tgcattcttcttaccctcttattacccacaccatacatcaaacctatcaatgtttagataatgacatctacagaaatgcagttgtgaaaggaaaggggcctaagctctacttgtgatgacaagtttttccctagccatcgttgtcctaataagcaacattctgttctactgtgggaagaagaggatgatcctgcatttcatccagatccaccatacgatgctgacacagctggtgaccccacattgcaagatcatcatttgtcttataatgcttta

SEQ ID NO: 33450 - DNA, 404 bp, Glycine max
  unsure at all n locations
agcttctgttgtttaacacctctcttgtgcctctgttatccgatttccaacaaggcaaccttggctttgcaccttacggtgagtattctggcgagtcataggtgttatgcagacatctagtcaaagaggctaataattaatgggtgtgggtgttgataaaaccccaaacaatgatgttctaggggtaaaatggattcttgaagcatatatcatgatagggcattgctatagtgcactaattaacactgctattttggccgttattgcagccgctctggctactattaataaacgactccactatcctggtattgactactaaattngatgccctagttaaaaaagtaattaaatggatcatacccaatatacaaaggtagagaaagaccatagagaacctaatg

SEQ ID NO: 33451 - DNA, 451 bp, Glycine max
  unsure at all n locations
tcagtagcagataaatatctcatacatggctaaaggcatgagatattttcaaagcaaacttatagtcaaatgatgaatgttcattatttttataatttatcttctgaaattgttaatttcatgtttcacctacaagactgcatcatttctttcataataattgttgcaaagcattgaatttgctgacaatgtgttttctagtgatggaatttgttaacaaatatttattgagatttttctgcccaatttgaagccatcaatttgttgattatttgctatatatcataagatggtggtgcatagcaatntttggttgagccatgtctacttagtttgatantttgtactctgtaaaacatactttgtttaattcataccatttctatggaaattttcaattacatgaaatcttaatctttgagcaccaacctcggacatgagcaccaatcta

SEQ ID NO: 33452 - DNA, 397 bp, Glycine max
  unsure at all n locations
agcttctctctatctataaatacgacatcaaggatcgaacaacgacgacgaacacatacagaanaacaagaagtcgtgaattaagaaacaagaaaaaaaattaagaaatacactgagcttaagagagtccatcctttgtgatatacaaagtacttgtgagagattaaaacttcattgtatattcactctttgggtgttgtaaagaatctctggttctatttcaaaattttgtttatgaaagtcaggagtggcttagtgataaaataatacttaagtgttcttagatttaggagatatctaaggattgtgntagtagtgacctccacaatacttgatagtcaaaagtggtagaaaagaatagtcgttgtaatcaagtttgattagtagaaccttttac

SEQ ID NO: 33453 - DNA, 454 bp, Glycine max
  unsure at all n locations
tcttggttctccaagctcgatttgcgccagggattcgatcagataagaatggctgagtctgacattccaaaaaccgcatttcgaacacatcaggggcattacgaattcacctaacaatgatcccatggtagtcaaactggagatttctaactttatagtgtgcagagtcttgattgaccagaggagctcgaccaatattctctattggtctaccttcaaaaaatttgatattccaacaagtcagatcaagccattctctgaacaactcataggcttcttgngagagacaacttacacaatgggacatgtcaacttgctaacgactntcagaaacgagaagtgttccaagaccataatgatcaggtatctcctagtcaaagcactcatttcttataatatattaatttggtgggtgcacttaataaattatgggctattatttcaactccctatc

SEQ ID NO: 33454 - DNA, 388 bp, Glycine max
  unsure at all n locations
ctattagcgacctatgaatactcagcttaaggatttcaaattccgtctgacaaacaataaattaggttttattgtaagtaaataacaaatntagactattaaacaaaatcaacgaagaaaactcaaatacctgaatatcctcccatatcaaatccttctgagcagtagggacttcctttcaggtgtcatatgtcacgtcgaccttatcacgagcgacaatccctaaatatgtttttaatttcttcttgtggggaccgtcggccttgccggtagcaggatcaacgttgaccacaagtctttctgccccaggtggtctagtggccaatgatcatagccgtgtcgccttgcgtgtccgcttcaacgtagatggagacgctgatgcgtctgc

SEQ ID NO: 33455 - DNA, 376 bp, Glycine max
  unsure at all n locations
agcttgtgcagatctccagctccatgttttggggtacttcanacagctacacacatttcatctgtggttggaaccataaatccaaagggttcccaaaccaatattagtagtgatggcggagcanaccaatcatcattaaaatcaacgganagattagaagacatacaaaggaaaaaaagaagcaagtgatagagaaagttatatggngcgtgcctgacaaaatagaaacggtgaaataagtgctntacagatatactcaccttgtacttccaaacacggtgaaataagtgctttacagacatactcaccttntacttttangtagatagctangtttgtgtaattgtttaagtctgagaatttgataggaatatat

SEQ ID NO: 33456 - DNA, 414 bp, Glycine max
  unsure at all n locations
ctgtgaataactatagacatagacattaagtgaatagtntaactctcttttttaaaatntaaacataaaaatgttgaaacaaaattntgggctattttcaattcaatatttccttcattctttgtcttatccacccctttgtctgtttcatacttagattgaggaggaaacaatcactttaatctatggaagtggtggacactangttatgttgattccagtggttacctacatctacatgtgcaattctccaattntgttcctactaaaaaagaaaaagaaaacagcagaaaaagtgtcctgatcatggaactgaaaaaatgtttttntatcttgcagctgctagccgataaacaatggagatgaatctaatgccttcactctttcggccttttccgcgctcacatttttgtc

SEQ ID NO: 33457 - DNA, 452 bp, Glycine max
  unsure at all n locations
agcttgtgaaatttggatatccaccattaaaaacatttctagaaagatctaaataatatttatattatgatttataaataaccatgatcataaccataagcataatagtttacaacaaaatgctctctttgaatcaattgaattagcaactacacatttcctttagattctctatttttctctacattctaactntcaccagtataatttcaatgatgtttctatctcacttagctacttcaaagaaaatgacttcactcaatttcattcataaagaaattgttaaaactcactgtttgtagcttttaacaaggttgttacccagagtacagaaggctaccaaattcaagatatgcaagactacgataattatatccatttgaactcgataaagaattcagaaatatcttctcaaattctttatcattgaggattcagagtacattaagttt

SEQ ID NO: 33458 - DNA, 436 bp, Glycine max
  unsure at all n locations
atactcagcttctgatattgaatcaagatggattcacgggagtttgatgataacttagatgatgacaaanagcccaagagaatgagttcaagattgaatcaagaacacttcaagaatcaagaggaaatttgatttcaagattcaagaatcaagtttcaagaatcaagaataatcaagttgaagattcaagaatcaagaaaagactcaatcaagataagtactaaaaagttttttcaaaacattgagtagcacatgaatnttccacanaaccttttaccaaagagtttttactctctggtaatcgattaccagtttattgtaatcgattaccagtagcaaagattgttttcaaaaagctttcaactgaatttacaacgttccaattgatttcaaattggtgtaatcgattacaatgatttggtaatcgattaccagt

SEQ ID NO: 33459 - DNA, 398 bp, Glycine max
agccttgacttgagtcatcaagtgattataaatatgtgaccatggcatgagtttcaactaacaatcaatcatcaatcatctttgaatcatctatctttcaatctttacaacatcatctctcaacatctttcaatcaatctttcaatatcttttctatagaattttctaattcatttctcttcatctttctaaaagttttttatcaacactttctcttccaagataagttctttgttcaaaaacttgtgctattcatctttttcattctcttctccctttgccaaaagaacgaaagactaactgcttgaattcttttgtgtttctcttctcccttacaaaagattcaaaggactaaccgcctgagaattcttttgattcttcccttccccttaagcaaa

SEQ ID NO: 33460 - DNA, 426 bp, Glycine max
  unsure at all n locations
taagagagaatgtggtttatgcaatgattgacctatgcttaagagataatattagaaagtttgaaatggccactaaaatttatgcttaagcgagatttatgttaaggttaagtgaaaattcatgttgaacactttattacatggtttttgaatgaatttaattgaacttaaatgtatggggattatgaaattgctacaattggattctagagctatatgttaggaaattcacatttttaaggattgatcacgtgtgaaagttaagattcatagtgtggaatgcctcacatagcttatggaactactangtgggttcctaagtgtattgttaagaaaatggtgaatttataacataaagggaacttgtggtattaaagttgattgaatgtatacatgcatacatgacattacatgtgggtaggcacg

SEQ ID NO: 33461 - DNA, 385 bp, Glycine max
  unsure at all n locations
agcttgtgcattcaatatcctgatgagggtgttccctatgttctcaagactggactaatacattngctgcccaagtttcatggtcttgcangtgaatatcctcataagcatcttaaggagttccatattgtttgtttcaccatgaagcccccaaatgtccaggaagatcatatctttttaaaggcttttcctcattctctagagggagtggcaaaagattggctgtattaccttgctcccaggtccattttcagctgggatgaccttcagagggtgttcttggagaaattcttccctgcatctangaccactgccatcagaaaagacatttcangcatcangcaacttagtggagagaacttgtatgagtactgngaaagattca

SEQ ID NO: 33462 - DNA, 392 bp, Glycine max
  unsure at all n locations
taaaanaatagtcaataaacaacttaagagagaagtagaaatacttggtctatattagttcactcaaatanagctacgtccagctctcctttacataactataanaggatccaataatcaaaactttcattacaactaggtattctatcctaccactcttggctataaaagtattctctatgtcactcttgacacacccttagactccccctgaatctaagaacacttaagtatggtttaacactgagcaactntngattntctcaaacaaaagtttgaatgaatacaatgattcaacaacactcanagagtggataaatagttaaactcaaatgcaaataactttgcttagcaaaggatgaaaagaataagtggtgagtatatcgtccact

SEQ ID NO: 33463 - DNA, 397 bp, Glycine max
  unsure at all n locations
agcttgcatntctctcccatggctgatatcanatctatgatggtatcaaagctttgctatgctactcacattcttcctctcgattatcatatccttcattcttacatcatgagtgaacaacaacaagatcaatcactcaatgtacgcagtccttattactttcatccgggagaaaatccagggatagctntggtttctccggttcttgattcatccaattataattcatggagttgatctatgcttattgcattaagcacgaagaacaaatatgagtttgtcgatggttctattcgaagacctgcatcagatcatgaacttcatgtagctgggaagggtgcaataatatggtggcttatggttggtcatttagctctctttcattagaaaaaatact

SEQ ID NO: 33464 - DNA, 429 bp, Glycine max
  unsure at all n locations
ngataagtaacctcatccttactaaattaagtatcttggcaacaaagataaatcacaagatcttttatttggatgtattgngggcagggtgaaattganaggtaggaattagaaagaacaagaaaaagaaaatggatacaaatgaatcataataccttatcagagaatacatcatgcaactaaaacacaagggtaccatacaaggagaaatcataatttgcttcctttcttttcattcctttttcatgaatatggtatctttcattctactagcttgacatnaacagtttttttttttttttttcgtgtcaaacattgctgacacgttattattcaacttttaatccccacaaatttttcatatactgctagcttgaagcactgagtcagtaccaacaattcattagtgagttgttcaatgtattaatc

SEQ ID NO: 33465 - DNA, 388 bp, Glycine max
  unsure at all n locations
tatcttatccttatggcttgcctccggacttcactccccgtgccactccgaaagatttaagccaagcccctacttttgaggggcaactcccgccttgtgacgactatcccgggcaagacgatgaggaaggagatacccatctcggccccctgctccaccttaatgatccgtccccacatgaactaccccaaccgaacatagtccgccatatcccggcctcacccacacccgtaaaagaatctgttcccttcgcggaagataatggaaagatagaggcgcttgaagagaggttaagagcagtcgagggccttggcaattacccgttctcggatntaagcggattatgtctcgtgcccaatatcgtcattcctcccaagttcaaagtacc

SEQ ID NO: 33466 - DNA, 358 bp, Glycine max
  unsure at all n locations
tccattgttaaatttcgagcgtctcgatatattatatactctgaatcggacctctgagggaaaagttatgaccatttgaattgctcaagagctntcatagttcaatttctagcgtctcgatatattatgcgcctgaatcaaacctccgagttaaaagctatgaccattngaatntctcgagagcttccgttgttcaatttcgagcgtctctatatgtgatgcgcctaaatcggacatccgaagtaaaagttatatccatttgaatttctcaagagcttccgttgtcaatttaagcgtctctatattgatgcgcctaaatcggacatccgagttaaaagttatgatcatttgatattcg

SEQ ID NO: 33467 - DNA, 338 bp, Glycine max
  unsure at all n locations
tcttcttcttctcatcacaaccttacaaagaagacaaatagctaccaattcattgcaccttaactctattcattcattcatattcatattagtaaaaagtaaaaaatccatcatcccttacaataaaaagcagaaggggatacaactatcacagaactaatctactttacttaaacaacctcttttgaatcctaactatagaaaatcaaaatcaggacctgatataacaaaaagaaccaaatcaaaattccacaggttgtctaagaacacaactgcaattagcaatcttcctacaagctnggcatattacttaatacaaccaacatcatgctacatga

SEQ ID NO: 33468 - DNA, 408 bp, Glycine max
tgttgtaaacttccttgaacatgtgttgaaatattcgttcttactgccctgttctgaatctgtgtgctaagctatgttccttgagtttttgagtgttaaaatatatgattatccttatatttttcttaaataggagtttttttagaaaaagttatgaataaaacaagttttagaacattttactagataaaatttgtcacgaaaataatctagcaggacagttgtatggattagttattattacagtttcgacctcaaaaatgagtttattgagcgtgaaaatgtaaggtagcatataagatttgcgaaaaaccaattctcggagcatcgagaggactaagaataagttatgagtgagacttggttaactgatcgatagagttgatttggagagtagaaacttacatt

SEQ ID NO: 33469 - DNA, 355 bp, Glycine max
ctattacacacatactgtaatcgattaccagaggatgttttcagagaacattctcaacagtcacatcttattatctgattcttaagtggccatcaaaggcttatatatatgtgactagagacacgaattttataagagtttttcagaacaataaggtctaatcctcttataaagaaaaatcgatttatcctcttacaaattccttggccaaaacactggtgattcaataaggaattatttgagtgctcaaattggtcaatctatctcttttaagagagattacttcttttcttcttcttcattctgaaaagggattaagagaccgatggtctcttggtgtgaaagaattctaaca

SEQ ID NO: 33470 - DNA, 458 bp, Glycine max
  unsure at all n locations
ctaagcttgccttccttacaagtcctttgctacctcgttagccactggatcttctttgattggaatctccgctgcctgcttaacaaattaaaagagaaatcagtacatgcattacagtataaaagaattttcataatgtcattcaatatcaaattataatatactaacctctgatgctatttataagaaataagttgtaatgtacactaatagattcagaggtagtatcataaatttataaatttttataataattatcttacaaatcatactaaccctaatttttaattgattgattgatactgaccatgtaaagggttttcatgatttgatccaatcacaatatgcaatanatnggttgtcttctatgataactantacaaaaatcataccaataataatttctaattgatagaatacaagtatttatagacacaacatagaagctttactcaaat

SEQ ID NO: 33471 - DNA, 397 bp, Glycine max
  unsure at all n locations
agcttgttaatggatcaatattcctaatgtgaaactaaatgtcttgaggttttcatgcaggcatcttattcgtgaatttcaagcaacccccttagataactcaatataaaagtactatttgtcaccttataaatgtgattgtgagcagccacaatgctcanaagtcctcctacaaaggaatcagctgctccagttgtgtcaattgcttccacctcaaaaccagcaacccatcctttatagtcctgtgcaacaataaggaacatctatatgattaaacataactaaccaatnttggattagcaaatagatgggaggaaacatttgagctccatttntatgcatttaggattagatatttacactaaaatagtgtttaggactttgcccctgtgactga

SEQ ID NO: 33472 - DNA, 326 bp, Glycine max
  unsure at all n locations
tnctgaacagattgatcagctgtttcatacagtctagtctgattgtctcctttatcatcaacatcactggccctggcattcaaattctcaatttccacctgttcttcatcttcattgactgtctccaatgagattgcttctgtcgacaaaaatggagtgtgctggtcatttttctccccagaataatcctcataattggctgcagaacctaaatggtcggaaccatgataattacttctcaaacatcttctcattcttgatgaacttttcattaaatctagcttccagaaaacctattatataatcaaatgtttagttaatcaaat

SEQ ID NO: 33473 - DNA, 412 bp, Glycine max
  unsure at all n locations
agcttcaagaattaatggcctcatcaaactacttgttccccgaaggcaattcaattaataggcctcccatttttaatggagtgggttaccactattggaaaacccgcatgcaaatcttcatagaggctatagatttaaacatttgggaagccatagaaatagggccttatattcccaccatggttgctagaaatacaacaatagaaaagcatagggaagattggagtgagaaagaaagaagactagtacaatataacttaaaagccaaaaacataattacatctgccctgngaatggatgaatactntanggtatcaaactgtaaaagtgaaaatatatgtgggataccctacaagtaacacatgaaggcacaacagatgttaaaagatctaggataaacacattaactcat

SEQ ID NO: 33474 - DNA, 429 bp, Glycine max
  unsure at all n locations
tgtacgcacatcgttcgcgtgtatgatatccactccacaaggtttgaagtagaggagagcttcaaccctataacgcaacgtggcagacaaaagtgggcagtaaacttgaatggtcgtcattgtcaatgcggaaggtattctgcgcttcactatccatgttcacacattattgcagcttgtggttacgtgagcatgaactactaccaatatatagatgttgtttatacaaacgagcacatcttataagcttactccgcacaatggtggcctcttgggaatgaagcggctattcctccttctgatgacgcatggacacttatccctgacccaactacaattcgtgcgaaaggtcggccaaaatcaacaaggataagaaatgagatggatngtgtcgaaccatctgagcaccgaacaaaatgtagtagatgt

SEQ ID NO: 33475 - DNA, 371 bp, Glycine max
agcttgccttatagagatccatgaaagacaaagcggctgaaggaaccaattccgcgtcctgaatatgacagccatcattttatgagcgctgatcaccaacatcgcttcgacgccatcaaaggatggtcattcctccgggcacacccgtccaacttaaggacaccagtatactgacttccatgaagagatagtttgccggctgtgggcatttttagttacccccatggccacgttcgacacatacatattcttccagtctatgcgcatgcttggcctatagacgatggcgtgcgagatatgcgattctgggcgacgcgccagtggatccctttctatgcggatgccctctaccacgtcctggatatccttta

SEQ ID NO: 33476 - DNA, 402 bp, Glycine max
agctttaatctgtcatatctttctctgaactctgatacttgttgagttctggcccagtggcccctattaatgtaccaaaattagactcttcttgttcaaagaaagtcttggtcatatacatcaatttgagttgaggtccacattattgttatgctactaaactattcaatagtaattcattaaccagggaaaaaaattatatattcatttatgaattcggaattaagaaggaactgattgcactgcaaacttacaaaggtacaagatatttgatcaatgatgaaggcttccacggtgcactctacttgatcgatattgggcaaaacgaccatgctgattcatttgccaaaaatctgtcatatgtgcaagtcatcaagaagatcccagtagttataactgaaa

SEQ ID NO: 33477 - DNA, 531 bp, Glycine max
  unsure at all n locations
ctctccacccttcatatattgcacataataaatcacaccctaaaatttcctccagcaccggcgnntttgatcttatccttacgttacantactcgtaccgagacctctgatcgactgcagcatgcagcttctatcttatattgctatatatagggggagaagtgaataacaatagggttcacgcaccttaagcactatctctatcctcttgagatagccgacgaaaattactctccgtgaacataatccaagctcgagcgcttacccacacccccgcatcgtttcctgagtcattaggccaagatattaaaaagcccctccaaattcatcagctcgaattgagatttctgcggtataacacagcctacctacctttaaccacagctccataattccatctatgtacacgtggcggccacattatgtatcatgttcacttattcccgttccattcgttatataccccttgtgacggcctataccactatttaagctatcctcgctataccaaacaaaataacttcaccgtcc

SEQ ID NO: 33478 - DNA, 391 bp, Glycine max
agcttatgttgtgatttctcatgtcctctaccatagtacaatcgaactgaagatgcgtcttatattaaatatttgaatcttttattcattgtaaacctaattccaactgaatttagattttaaaatttgatataccccccacattcatcatatattttaacatttattaaattttaaagatattgtaaccttaatcaatcttaatatgactatgtcttttaaattatacactatgatacatctcattaataaagaacatagtgcttgatgtatataaattatttgcatacttaccttttcaattctaaaagtgtggtgtctttgatctattcatatttactataataccatacaatatttacgattaataatcaaaacatctatgattaat

SEQ ID NO: 33479 - DNA, 365 bp, Glycine max
gatccaaactccagaccagcacacatacccgctgctattgctccgctatgaatataccatctgtgatagagcgggaagaacctatgccattgtccatgcattatcgctgccccccgcgaagcagcagcgcacttctactcatatcgatgcctcaactcgcctctcctgatgatccttgaaaagaatcggcatggcaagcgaagaccaacatctacatacacaatgcacaatgacttgtcgaacatcaagctaccattgtccataatctatcctgtgtaaggacggaaatgctcgcatccattgtccttatcagttatattacctaacccatcaacacaaccgaagctatttcgagacgcaaaccg

SEQ ID NO: 33480 - DNA, 360 bp, Glycine max
agcttgcctcccagctcgcccaggcgagcagggttgcttcctccagaagcaacagccttctggaggaatcttctggagggcccaagtgggcctggttgctatttgcacccctatttttactaagtacaccccctgccttttctggtgattctttttcgtaaagttacgaaaacttacgaatttcgtaacgatacttgttctctttccgcaatgttaccgaaccttgccgattacataatcatcccatcttttgacttaccgaatgttacggaacctcactaattgtgcaacgatgcttccatttgatttccggtgtgtcacggaaccttacggattgtgcatcaatatcttcttttgtct

SEQ ID NO: 33481 - DNA, 389 bp, Glycine max
agcttggatggattgatggcgacccggtgttgagaggaacgaggataaaggctacatgggagtacgtgagctcagttgaatgtgggcaactagggatggtggatttatgtgtgatttgtggatgtggatcctgacttgcaccattacccaatgccacctaataccacatatgactagtaccccataatcctacaagcttgaagtgagaaagtgtggaagagtcagtcttcctacttttattcgttggcaacagagtggtacctgtagatatgtcgtatgggtcatgacaccttgtggacgtcacgtggggtgctattgcccaataccaaacttgaccaatctcgacccaacccgggcatagtcagtcaatgagaacctgtgatgtacct

SEQ ID NO: 33482 - DNA, 216 bp, Glycine max
atcttctgtattcaatttcgagcgtctcaatatattacgggactcaatcagacatccgactaaaaagttattgtcgtatgaattagctcggaggttcacaattcaatttccaacgctttaatatattacgctctcactcagacatccgagcaaaagttattgtcgtttgaattatctcagagcttcacaattcaatttcgatcgtctcgatatatt

SEQ ID NO: 33483 - DNA, 286 bp, Glycine max
agcttcggtagaaagtgatgaggtacaagccctaatggcagagcttgaaagagcccgggcagtctatgagaagttcaagtccatagccatcaaagtctgaaaagagtatgatgaactaagggacgtcctatggccacagctgaagccttgaacgagaaaccaagaaggctcgaaaggaagaacacgacctaagcaaagtttttaggggctttatagggcatcaatagtgagctcaagctccgaagatgtgaatggaatcatcacgggtcacaggcctgatcttgaa

SEQ ID NO: 33484 - DNA, 394 bp, Glycine max
  unsure at all n locations
agctttacatggagctatatcagttcacacaatatagttcaaggaccaaaaagaaataatcattcaagctcaaagtggtcaactaggggaaaacttatcaaaggattcacaagtcttaagaaagcctatcaaggtctcccttttcacaaaattcacaattattcaaggatatgtatgtcaaaacagagaatagaatactgctattgaaaggatcaattctcacacaataagagaatcaaggctcanaactcacctatctgagggtaactctaagaatagttcacaatcatgcatgctaatgtcccctcccgaagaaactccaattacccaataaacacattacttttgttatcaataaaattctaaacccaagacattttcacagtactagaac

SEQ ID NO: 33485 - DNA, 383 bp, Glycine max
  unsure at all n locations
agctttgcatgtttagtgattctagagaaagaaagatgagtctttgaatggttgtgagatcctataggtgaaggagacatcctcaccacttgtatttttgcaatctttcatcttgttcttctcttttttgtaaagcgcgcttcctggttatggaaagctaaatcctatgttggatcttctctataggtacttgatgtaaatatctttttatctatttaatgatgttctgtgtgttctctatgctatctgcttttcattctagtatgcctctaccttgatcacatagatgcatgctttgttanggtcatttcacagtggaaactggtctgattcttatgaccttgatacgacacggctaaattgttgtactatcacgaggaatc

SEQ ID NO: 33486 - DNA, 390 bp, Glycine max
agctttaacttaatcaattcaaaagccttttgtgcttgttcattccacccaaacgcacccttcttcaaacattcggtcataggacttgctatagtgctaaaattctggataaagcgtcgataaaatgatgcaagacaaggaaagatctcacctccgaactgttgtagggctcggccaagtcttgatagcatccacttttgtttgatcaacggatactccatctttagacaccacatatccaagacacaccacactttcaaccaagaaatcacactttttcctctctccatagagttgttgtgctcttatggtctcaaatatttgtttcaaatgagtgaaatgcccctctatagatttgctatacaccaatgtgtcatcaagataaacaac

SEQ ID NO: 33487 - DNA, 376 bp, Glycine max
cgctggtggaatcttgaaatatatgctgaatcgaatctcatatattgtgtgccgtgtccctcttagagattgattcaatgaacttcacgatctattgcctgtataaggcaacccttgcctctacaaccttgacttcaggtcgtctacaaggtgcttcgaggctgatacggctctatgccatctagcccgatatatatctcattctcaatgagaaccattctgttttgcagtgaagaaatgctgccttcaacatgcctatggtcataatggccttaaaccttggaagtgttgctgtcctgtctgctactccacattaagtgatggtctgacgcgttctactaaacgaaagattaatgcttctctctttgactgcact

SEQ ID NO: 33488 - DNA, 326 bp, Glycine max
agcttgtattatggtatacatgatacatgtcacggcttgggttgagtcaaagataaaagggatgccctacattatttccatgacacatatgcaaaaatgacgatttggaaattttatgcaaaattggtttctctgcacctatgctgacacttagtgtcaaatttttatggtcatgtgatgctaaggctcaagatttatttcctctattttagtcaacccaacgtttccaaaatatgttcttttatcaatttgagcattaatccgagatcatttgggcgtttgggaaatatttcacagcatttaacctttatgagtattacacattt

SEQ ID NO: 33489 - DNA, 332 bp, Glycine max
gagctaagcgcgccatgctgtgctaagcctattctgcacacagaaatggtttttgtgtcttcgagcttaatgccagcctgctgcgcttaacgcctgagtaaaacccatacagcgcgcttagctcacatgttgcgctaagcgcccagtcaaaatttcagtttatttttctgtttgtgaaaataacctgtgtgaatctcttgtgtttatttcacatttcgcagatggcatcccacaaaaggaaatctctctctacacctacccaagtcagatttgataggtccatatttacatctctacaagcttgggagacatacactgacattgtggtgcct

SEQ ID NO: 33490 - DNA, 404 bp, Glycine max
attcttttatttaataaagaagcttgagagatatgcaatctctcacagaaactatgatgtcacacaagttcactcgtcaactcaaacaatagatcaaatgataaagatgcaagttgaacgacccggcacagcagctgaccttaaaattgagactaaaagttgcagcaaaggatgcttcaaaggttgatcgaaattcacgcaatcacagcaaaaatatccttgaaaaaataagaacgatgatttggattataaaggagaggaaggttaccagagagaggagaagataaatggaaaggaggctaatcgattggagtatgtatcgtcattggtcacaacttaataaaagaagaaatgggttggctatgtcaaaatagaaatggtctgttagtccattttaccctgac

SEQ ID NO: 33491 - DNA, 493 bp, Glycine max
  unsure at all n locations
cgaccaccgcgnacaccttggagtttgtattcgatgccatgactatctagggattgagctcgtcncgggatccttagagtcactgcagcatgcaatcttgttatttatacctctccttcctgatggatagagcatgagaccaagcatgataaagattatcccgctccataagtttctgaacatctaaactgtggcacatgatgagaatgcactgtatgaccccgatcaccctcttagcgtcaaaccatgaagatattcaatcacttctgtgagcttgaggcgtttgtcttgatccatacaattcttgacagccttgagctcgttaatttctagtcctgtaagagcatttatcatgcacaatatatcccaccatcctgtgacaaatgctctgctccgaaggggacacaaacacaagtccaattcctttaaaggatgttacatgctctcaatcaatgggaacattcctgatgcaatcccccgcttatcattatgc

SEQ ID NO: 33492 - DNA, 356 bp, Glycine max
agcttgctttattacaagagaaagatcatgtgactagaattatgaatgataatgttagtcagtttgtcagattgatcgtgaacgaatgcattatccataaaccggtgagagtgtgatccttatcctcgacagaaacgactatcatcagtactgatttgtgcatgaatctctgaagtatggactgaatgcttgatattaataatgatgaaggccatgttcgattgtgataggcacttacccaaaaagctaaccatgtgcttaaatgatttatcccttgaacccaattttgagttgattgattgactgattgattggaacttgagcctatacaatcttaattcttgcttccttgtctt

SEQ ID NO: 33493 - DNA, 397 bp, Glycine max
atatcagattcttcttgcctggcactacaaaacctctctggtgggtcatatagatgtcttcctttaaaatcccatgccagaatgcaagtttaacatttaactggtccaagtgaagattctcgctactatgctaaaataactctgatggtagtatttttacaactggaaagaagatctctgtgaaatcaaatcctttgttcttgtgaaaccctttcaccacaagtctcaccttgtatcttcttctaccgtcagaatctttctttagcctatagacccacctaatctgtaacgcgttcttccttcttgcaatttagttaaagacacgtctattcttctaaaggatgcatctcatcttcatcgtagctccactcatagtgtcatccctgtgtacctactg

SEQ ID NO: 33494 - DNA, 406 bp, Glycine max
agcttctacttatgtgacagggcgggcttccttcactttcttgcctcaaccgcgagctttgaccaccgctctttcttcccacaatgcttctctctatatccgcctgagtgggtttatagcctaaaccatacttccccgacttcctttggcatttatcaactagttatgccgccgttgtctttgcctaaacccattccgggttcgtaaccgttccccaacataacacgggccatcattactgctgcatcggacaggcaagcttgcccagagaaggagtccacggaggaaatgcttaccacctcaaaagactggaaagcggtttctaatgactcctctgcggcttccacataaggcataaaggatgggcagctcaccaagatgtcttcttcgcctgatacgatgacca

SEQ ID NO: 33495 - DNA, 411 bp, Glycine max
agcttgcattctcattatcatcttctgatttgacttccaacactctaactcaatttcttacggtgtaagaaaacaaagacttcagaaacgcgtgaactctttcgcggtttccaagaaaccagaacatccaccgtaactccagaacaaaacaacaaacaataaaaccccagaaaagacaattcataatttcatattccgccaaatgacctcatccatatattatattaatacgcactcattaacaccaaaacgaaaaataacactacgagaactcatagaatagaacaatgaacaaaacattaaaactaaaagtttgatgtatatgcactctccattctgctgccgcggtgtctccgaattaaattaattaatttttaatatcattgtcatcatagtcaggggtggacctat

SEQ ID NO: 33496 - DNA, 328 bp, Glycine max
  unsure at all n locations
agcgtgagctgtgcgttaagctctcgcactaaccttgagcggcgcgctaagcgagctgtccactttttccattnttcttcaaggctttttcttccacttcttgcctcaattttccttcaaaacacttaaatttttccctcttgacttctactgatcaaaataacaaaaatattaatttcttcattatttcattaaaaataataatcaagtcaagaaattatactcatttattagtcagaatagactattaaattaactcatatttcacagttatcaacaacaattgattaatttaaataaaagccaccattgagtgcatagatcaatt

SEQ ID NO: 33497 - DNA, 420 bp, Glycine max
  unsure at all n locations
gcagcatgctagtttactcgtacaggtgccagtcctgagtgggatggccaaagcgagaatatttacctcaccctctatgaaacgatgaccactgtcccaatcttagtgttacctaatccgaatgaaactttcgtcgtgtattcccatgcctccacgatgggtatcgaggtgtgcttatgcaaaggggacatgtagcggcctatgcttgtcgaccgcttaacatacatgacaggaatcatcctacacactatcttgagcagcagactgtatctttgatcttatacttcggaggcattacctttatggatctcactgtagagcgttactgaccataacagcctgagatatttgtntgatctaaaagaacttaacattacgcacacgcaatggttacagttccctaaagattacgactttccg

SEQ ID NO: 33498 - DNA, 202 bp, Glycine max
  unsure at all n locations
agcttatggtttgatttgtgacctcaccatggaagaggtctccacggaggccattgcctccctcatccaatatctacaacgcggnctttttatgtagcttattcntttggggactttcaattaacacacacagtggccaccccgacgagatcctgcgagccttctgggaggaaggaaaccatatcttttctggggatcttat

SEQ ID NO: 33499 - DNA, 306 bp, Glycine max
agcttggttttaatttggtgtatggtaaggtatatgtccatgtctaggaatgacataattggtttactttgatgggctaactcaaaaatgatgggacaagtctcgtatatcaacttggataggagggatccctcgcttttgtgcgggccatatgatttttttaaaaaatctatgtgaatgctattatgtgctcaatcttaagtttgctactatgcatattttaacagcttttattgcttttcaaaaatataaatacatatatattattattgtcagctcatgttattaactcaattcctttggtac

SEQ ID NO: 33500 - DNA, 310 bp, Glycine max
  unsure at all n locations
agcttctctttccgttctccaaattccaccgaatccagggatcatactccatagttcaaagaatataaaattcatggcccagacaaaaatcttccgttcttcttgccattcaaagcacaatagataataaacccacacaccccataccttctccctttttctttttctttattttatgtttattgtgagagaaagaaataaagccgagcgttgagaatcccgtctctgtcaacttncacggtccaataatttcgattcagccattcctgttccttctcttttcttcttcctcggctcctcacttcttctc

SEQ ID NO: 33501 - DNA, 404 bp, Glycine max
  unsure at all n locations
agcttgttatgccctcaagatgttcaaggagttcatagaaaagtagagtggaagcaaaatcaaagtactcaaaatagatcgtgaccaagaatacctcgcttgtacaaatttctttgagcaacctggattcaaaatcaactaaccaccaatacacacctcaatagaatggagttgttgaaaggaagaacaaaacaatcatggacatggtgaggtgcatgctgaatgccaaacaaatgcctaaggagttttgggtggaagcaattgctaccgctgtctacattttgagtaggtgcccaacanaaagtgtgtgtgataagacaccagagtaagcctggaatggaaggagaccatcaatcagacacctcagatttgttgggtgcatatcatacacacatgtttcaaac

SEQ ID NO: 33502 - DNA, 510 bp, Glycine max
  unsure at all n locations
ncgtgccancgcggancngcgnattgaantttcgtatttgatagacactgacacactacacggcgacatngagctccgcacgagtggatcctctagagtgcatgagcatgtcttcatgctccaattatataaacggcgcacttcgatgtattagaggactgctgtgtacaaatgactacaatttctatctcagaatatgctcacagcgacatatagagtaaaacccggtgtgtatacccgcgaccgaaccacacttaaagccttgagctcattgtccgtgtattatacaagagacccggcatgccattttgatcctttaaatgtactacgcgaaccccttgcagatcctcgagcaagaggaacagttctcacgatttacacacaatcatcccaatcacgctagagtgtgcgtacatacacatgatctcgtccgaactcctgcattaagggattgatgtcgatctttataaaagttgcacacctctcgcctctctctctactgttaccccg

SEQ ID NO: 33503 - DNA, 390 bp, Glycine max
tctatggacgtacctcgactgaaatcctctgatagcccttttgagccatgccacccttatcctttggtgaagctcactacacccctcttagcgaataactctgacatctacttatcccccccgcacccccgagctctgacacagcctgggtaaaagtggggcggttacagcctccttggataacatgtaatgccgtgcccgctacatgatctattccgacccttactgcatgaataccgcatatcgccacactgtcgcccatgcaaaatctgatgtcgtctctcaccggcttctcacgatgtacaactccacgcaacgtcccccatttcaccgaaatgcaccacactggacgaataccacctgactgacacataatcgagagattctgcg

SEQ ID NO: 33504 - DNA, 366 bp, Glycine max
  unsure at all n locations
agctcgcattctattacacaagtcttgcaattgattacctaaagatatcttcagaaaattatttccaagagtcacatctgttcaaatggtttttacatggccatcaaaggtctatttatatgtgactaggaacacacccccgctgacagtctttttaagaacacaaatgtattatttctcttataaagaaaaatcttcttatcctcttaaaaattccatggccaatacactngcaattcaataacgaattttttgagtgctcaattgctcaatctatctctttcaagagagaattcttctcctcttcatcttacttctaaaaagggattaagagaccgacggtctcttattgtatagaaatctgaa

SEQ ID NO: 33505 - DNA, 372 bp, Glycine max
agcttatgtctttctttagttataacgttagtttctcttaagtttgtgagtgtttatatagaacgcataaattattttttgagaaagataacgcgcatattgttaagagtaattaaacactctgtgtagtgtgaagctcctccaatctatcatcttatctaaattgagacgtattgaaattttgttgattcttacaacaattaccataaaagtcatatctaacataatttctgattggttaaccgcatgagcatatacgaatcatactcttgctattggttaatcttaacttataccagaaagtcgattcatcttatcttattcttttcttttcagtggtcgttcacgagcttatccgaatcggactttgtc

SEQ ID NO: 33506 - DNA, 504 bp, Glycine max
  unsure at all n locations
agtncaaaggcgggagcngaatttgaaacctgaagcaatgcgaacacacggcgaatacagctcgtgacccgtgatactatacactcgacctgtaagcatgcacttcttttatttttatacaacactgaacctctgattcgacttgccggtcatgtggcccaaaacatcttacgaaggggggttgaatcaatcatattgcatactattcccttaatgaaaatcttattttaatttccccagcactctgcacgtccctataaaaaactcttacatgattgatttcaaagaacaaactgaatatatacatcacgctatagtaaattgaccacgttaatgtcatgaaaagtgcctacttgtatatatactggtctgtcacacccttgtgccaccttcatgccccagtcaacctttagcaagtctattagtttgcaaatcctttacaatgttcgacacacaagcgcaatcctactttgtctccgatgtcttataacaagagaccctagc

SEQ ID NO: 33507 - DNA, 562 bp, Glycine max
  unsure at all n locations
cgccgcacccatctcnacattcccaaacttctgagcatcgctagcttcacgccatctatatcacaccctcgataacacccgcgcgaggttgatttgatgcgtggccatcacggccaatngacatggacccgggaactgtaagtcaactgcagcagcaacttcaatttatttttcatctcgaacaacacaacaaacaggtcacctcttatatacggcccataacaaatccgcgccagctataataacctcgcacaccgcgctgagaaaactaatctactgtacgcgcccccgcaccccatactttgcacaaactataatgcaacttgcaaaagtgcaggtgctgttcgatctctaccaaacgcaatgtctcccagtatatcatacccgacatgtaccctcaacgtcaacaccactgccatctgtcacaactgtcaatgcacatgctccgtcacacaacataaaacgcacatcatacatagattacataatcgcacctccaaaggcagaccgacacgtcaatcacatagccaaagtgactctccaactgcaaattcgcacgacg

SEQ ID NO: 33508 - DNA, 330 bp, Glycine max
catcgcttgcgtgtatgatatccactcgacaaggttcgaagtagaggagaccttcaatcctataacgcaacgtggcggactaaagtgggcagctaacttgaatggccattattgtaaacccgcacggtattctgcacttcatatacatgttcacacattattgcagtttgcggctacgtgagcctgaactactaccaatatatagatgttgttacacgaatgagaacatccttaaagcatacttcggacatgggtggcctcttgagaatgaagcggcaattccttcttctgatgacgcatggacactaatccctgacccaactacaattc

SEQ ID NO: 33509 - DNA, 344 bp, Glycine max
atcttcatgatgatgaatcaagttgattcaagtaggtttgatgatgaataagatgatgacaaaaagcccaaagaatgatttcaagattaagacaacaagttcaagatcgagataaatttcaagttttatggcaacaaatcaagaagattcatgatcaagagaagtttgatttcaagattcaagagaagatgaattcaagattttagagaagaaatcaagaagactctccaagggaagtattgaaaagatttctcatataactaacatagcacgttattgttgttcacaagaggtttctcacaattttctaagttactagagtttttattttctggtattgatta

SEQ ID NO: 33510 - DNA, 215 bp, Glycine max
atctttttgttttattctatgcacccgtagaggttcacattgtgtttcgagcatatatatactaatcttgtgtaccttttatacgccctgttgacgtgcttaacccattgcacttaagatcttttagctcactctgaattagaatactgtcttgcgtgagtgatgtatcgaataatccattaactacggataaaataaattcctaccacttagtg

SEQ ID NO: 33511 - DNA, 321 bp, Glycine max
tttatgactttaattcaaccataattgaggtgcaatatcaagttatcggtctgatcacaaatgaaactggtcccttcgacattacaatttgggatgatcttttaaattgaaattaccccgactattcatggtacttgccaacaatacttatggaaactatgcaacgttctcattcctatctacagcaaaatgtaggtataactaatctcattttcaatgcccttttttctatggaatcatcttatacccacttatatcttttttgtcgcatacatctttcaaaatctattctttcctattactcatattcttctcctcgga

SEQ ID NO: 33512 - DNA, 392 bp, Glycine max
  unsure at all n locations
agcttatatgccattcggaatatgggctcgtgtctgtgttggacaacacttagccatgacagaactgaaggtgattttgtctcttattctgctgaagtttcacttctctctctcattaaggtacacccattcacctgccttccgtntgttatagaacctggccagtgagttgttcttatgatgacaagaatttaagcaacaatgtaacagatgaatgatgaaaacatgcaggtaatgggatggttgatatagtcataagacatcatttctctagctgatgaatgctaataagttgtttttttatccaaattagataataatattttttttttatgaaaggaagatattcttatacttcgaagttatgagacgaagatgatcaaaatctatca

SEQ ID NO: 33513 - DNA, 130 bp, Glycine max
  unsure at all n locations
agctcgggtatgtccttctgattctgtctatacatttatgactntatggcataagatgaaattcaaagattggatctcttgttagttgttattaatgaatagcttatacacttgtgcttgagtgaaacag

SEQ ID NO: 33514 - DNA, 406 bp, Glycine max
  unsure at all n locations
agcttcctttctcctactgttctgtgtcgggccagcaaaactgttgcaggtatctttgcctctgaatgaacgttgtgcttattattatggcctattgcttcagtggcgtagatcccataacaattatgcttgcaccccttttgcttccgagactaactatttgattgtatgttctcttgttactaaacttttgatttttgaccggaactgcatgaggcatgaaagtttcaaagtggttcaaccacagtaaaataggatggtcagtttatntctgggttctatgacaagttttagatctgtcttgattactggaccattggatgagcacccttgtggtgttgaacaactagcttcattcttctggatgtggttatgagctttcgatgctagtggatcttatatatca

SEQ ID NO: 33515 - DNA, 224 bp, Glycine max
  unsure at all n locations
agcttctctttactttatctttagccttgagttgatctatcaaaatgcgaacttttgatctcagctcattttctcgatgcatagaaccattgacgttgaactcagttacttgaaggcgtcccattataccttntaccatccccattaacacctctgtgtattgtctgcctctataaatcttccccaaactacttttgcagcttcttccatataaaatgccactt

SEQ ID NO: 33516 - DNA, 159 bp, Glycine max
aattctgatcctatctggatgtccaaaaattgacaagttggaacaacatatagtgcagatggaatccttgacatctataattgctgacaaccccgccgtcatacaattgcccctccaatacgaagcttacgaagcattggatatatatccctttgtgga

SEQ ID NO: 33517 - DNA, 321 bp, Glycine max
atggaagctcctcatatctcccacactttgtggggtgggccattcttggatggccttgattttctcaaggtccacttggaccccatttctaccaactacaaaccctaagaacactatcttatctacacccacagtacacactctatatttgcatacagggtgttcttcctaatgactgaaagaacttgcctgagatgtcctaagtgatcatctaagctgctattgtacactaaaatatcatcaaaatacacaactacaaatctacctatgaaatcacttatgacatgatgcataaagctcatacatgagctctgtgcatta

SEQ ID NO: 33518 - DNA, 376 bp, Glycine max
attttggattatatatgtttgcggctataaacagaagagggtgatatattggtggataaagcaccctgcaccctagaatttgggcacttttgtctatctgatttaagttctagatcctcttctgttatgccccctcattatctggagaagatcatctggaatggatttacatagcgagtcagcaatcatccgtgcactatttatgctagcatgaagagttatgaactgctctactgcacgctgtgggttatggtccttaccataattacttagctctgcatatacactgccaaacacatcatataatacgattgacaaacactcttttatgctgtatcgcacgacggtgacacattataatgcctatccatccata

SEQ ID NO: 33519 - DNA, 265 bp, Glycine max
ttctatcgtttatatgcaaattgtacatgacactaattaaggatgacgagtgatgacaacggttgtgaaaaaatatataaattacactataaagatatctatgcaaaaccatcacaactcagacgtgtaactcctaccccaaacttacaaatacctcaatccaaactcactatagatttctataatcttctattgcttgatgaagccaagtgctaaattcaggattgatgctgcgtaatttctgcttcagaagctctccctgtga

SEQ ID NO: 33520 - DNA, 221 bp, Glycine max
atctgcggcttgcaatcttaatttgtatgtcaggcaatagtcatcttcctgagaacaagtgtatttgcgtattgcaatgtttggtttgttaacttaatcgtgcatgatggttgtggtgattttttgctggtggaattttccccattaatttaccatgagttctaactctttggaacaaagttacagaagcatgtgctgtgtgaaatgtaccatttgcattt

SEQ ID NO: 33521 - DNA, 366 bp, Glycine max
  unsure at all n locations
atcttttgtattgaactntctcattcctatgttattgcaagcttgtaaggaaacctgacaatatcatcatccttggtaagttcaataccatcttcaatatgcatgagatatctcgcaaacttatctcccgcaatgatcgctgtttctcgcaataacgatctttttgatagctcatgaacgagacttaacaatacatgcacaaatcatttgcgtccttacgcatttcttgacaataacatgtactcgacaaaaattcccttctaataccatcactgtccctccacatggaacatcacaatctaaaatatcctttatgaactatccactgctcacaagcatatctatatgtcatgagtgtgccatccc

SEQ ID NO: 33522 - DNA, 400 bp, Glycine max
  unsure at all n locations
agcttggagttgcatattgctaaggcttctggttttagttactccatattgtcgacaattaacttggggtcctgtcttcatgatctttaagtttaatgtgctaagttgtttcaagtttggtctttggcaagtgtcacaaagatattcatgacccgtaattaataggaaagattcaacacctataggatatgaagaaacttttagcgtattgctaaattgctgatttcttaatatgatgaaagactaactcaatgatgtctactccaatatcaatgatatagagtcttgggaaattgagggtttttgcttactaaaattcaaatactgaaagtnttatttccttaatatcttggttctataaagattgcaataaacaagaagaacagagacactcatcttc

SEQ ID NO: 33523 - DNA, 318 bp, Glycine max
  unsure at all n locations
agcttgctttatatgtttatntataggatggatctttgagcttcaataatgtccctcaatcatgattttcatccatggaggtgccgctgatgattaaggagaagaggtgataggaggcgtcatccactagagaatacccctggcacgagaagcttcacaccaagaaagtgtcttggattaaaagcttacagaggaagcgaatcacacagagaggcggggcgtgggaattgaacgaaatcatggagacaagatgaactctgaagtgtgtctcacatgttctacattcatctacattatgacaagtgctacacatgtttc

SEQ ID NO: 33524 - DNA, 402 bp, Glycine max
ttttgttctgttcaaacctgcaaggcgcgaccaaggtgaatattgctacgcacatgccctggtctcgacatagattcatagtgtgcatataggtttcttaactcatgatcatccagtatctgatttgcgcccccacccatgtagtttccagagtaagagtaactacaatagccatcacagcaagctttataactggttggaacaaagttctacacgggaatcgtgcatgcctcacccaggccggctgcaggctggcttatccaccaagaactcgcattgtccatggacctaaaggttcatctttgtgaggtctcgaccgaatatcgttggggacagtcacaccgtacacaaacatcatgtgcgctatgggagactgactggaatggaatgaatgacaatacg

SEQ ID NO: 33525 - DNA, 386 bp, Glycine max
  unsure at all n locations
ggctctactcttttcagaacttgcatcatcgtagcagttgccaacacagaaggtagataactcatgaacctcgaatctgcaatgttggaaaacaaaacgaaaagcaaattaaaatctaaaaacaatattatgaataagaaaactgacttgcatgaaagatgtaacaaaaatacctccaatgagggagagaagaacgccttcagacttagtgaggaactcccagaagagatgatccttcaatccaagtcttcttgtgaagtaatcaagaaaagagagagaggttggagggttcatcttccatccaagagtgganaggatcaaaatctccatctttntaatcgtcttggcttcgaacaagtatctactcttcttcacctacacaattc

SEQ ID NO: 33526 - DNA, 402 bp, Glycine max
  unsure at all n locations
agtctttatttcagtggcaccagcaccagtgctccggtcgttaccaccaatgactcgctggccaacaaaaacctgtccaaagagaaaaagtatttatatgggatccaagttaaaaggtattcaatccaaaccgaacggaatatagtatntttatgggatccaagttaaaaggcattagatgttaatttgtaattcttatttcttagttgttataggttgatcaaaaataaatttttatattatttcttaggtggtatagttgtaatccaagttatactatttttatattattccattctttaagaattatgaagacagacaaataatatttatctatctttcacaaaaaaaaaacaaaacactgggttatcacatctgacataatggccactacaatgttct

SEQ ID NO: 33527 - DNA, 406 bp, Glycine max
agtcttcttgttatattgtatgtcctctgacaaatactgtgctaacgaaatggaataataagacaagtgtgttacttacataatcatcgacagtatatgcatttatcaagccttggtggcggatgcattaaatacagtttgttagcaatcgctcttctacttaatttagattcttaatcaatgtcttaaaatactagttagcattttacttatcttaagctatagtatatagcctcgtcctcattaataattggcagtagtaaagcagtaaatttacctggagagtataatggtgaaaggaagggagaaaacgcatcttgcagtactcattatacattcatgtgaacaaaattaatggaatggttgatatatatacagcatgtttcaacttcaatgcaaataaccc

SEQ ID NO: 33528 - DNA, 405 bp, Glycine max
cttcttgcaattcttcggttccttgaagatatattaacactttctttgcagctgtccagtgctctattcctggattactttgatatctctcaagcattccaaccacaaaagcaatgttaggtcttgtacacaccgcgcatacataaagcttccttaatgaaatgatatggaatgttcctcatctgctccctttcaagctcatttttaagacattgattcatattgaatctatcacctctcacaataggtgccatgtttgctgaacaatctttaatccgatatctttctagaactttatcaatataggcctcttgagacaagccaagaatcccttgagatcggtttctatggatctctatgccaatgacatatgctgcctctcccatatcattcatatcaaaattc

SEQ ID NO: 33529 - DNA, 334 bp, Glycine max
ttcttgccgtcatttatgagggtactttgtatcaatcaatgattatataacatttactacaggtgactatactttgaacttatcttaatttattgatgctattatgaaaattatataagcaactagatgtcccgactagtaacaagagaatatgcaacttgcaggggacttaatattgaattttggtgtcattatgtacccctgttgttttccaccattggattatgcattgagatttacgtaatactattttattttctattttgaatattgcgatttctccttgttatttatctggttttcctaccaattttcttacttgttcatctattat

SEQ ID NO: 33530 - DNA, 386 bp, Glycine max
  unsure at all n locations
agcttgtttcaaaggtgaatgtgttagtatttttatatgcagaagcaaaccaagaaccttgtgtgccatcgtatgttgagaatcatagtgaagaaaatttagcaccaaaacgatctctcagcaaactattgaaagatcaaactttaggaacaaaatgcttttgtggatataagaaggctaaaacgtttacatgatccaaggtctgctatagattcacagcagcaagttgaaacctccagtctctacctaatgtaagtcctgctctgtttcagttctcaatttgtcctttcaatgactattgttgatgctatcatactcactttcctgtttcctcatanttaatggttaacattcggcatattatgaataactttctttaatccttc

SEQ ID NO: 33531 - DNA, 235 bp, Glycine max
agtcttcaatctttaatataaatcttcacgacgcgagctccacaatcgttaagggttagtgctttctggggtgatgtaaagcgttaaaggtttcacctatggccttatggggtatactgtctggtcttcgaaccctcctctcacgtcaaagagccgacaaaatattaattaaaatacatagacgatcttatgcgacaccatgccattagtttatttgaactttacattctatgac

SEQ ID NO: 33532 - DNA, 323 bp, Glycine max
  unsure at all n locations
agctttggattactcagttcatcagaatgctagacgaaatatagatgggaatagaggtaacaatggccgtaatgacggaccgaggcagaaccgggttgagggagtaaagctcaatgttcctcccttcaaaggtagaagtgatccagatgcctacctgnactgggaaatgaagactgagcacgtatttgcctgcaatgactacactgatgcgcagaaagtcaagctagcagcagctgaattctccgactatgcccttgtttggtggcataaataccanagagaaatgttgagagaggaacngcgagaggtagatacatggactg

SEQ ID NO: 33533 - DNA, 428 bp, Glycine max
  unsure at all n locations
ntgagcaaattcaaacgacaataactntngaatcggattttcgattttgtctcatagaatatcgagacactcgtaattgaaaacggaagttctgagaaaaatcaaacgacaataagttttaactcggatgtcctattgagccctgttatatatcgagacgctagtgattgaaaacggaagctttgacaaaaatcaaacgataataatttttaactcggatgtccgattgagtcccgtaatatatcgagacgctcataattgaaaactgaagctcttagcaaattcaaacgactataaattctgactcggatgtccgactgtgtcccgtacgatatagagatgctcgtaattgacaacagaaactctgagaaacatcaaacgacaataacttttaacttggatgtccgattgaccccttaatatatcga

SEQ ID NO: 33534 - DNA, 435 bp, Glycine max
  unsure at all n locations
agcttgcttctacaatctttctcctttttatgatgacaaacctaaaatcaagaaacacatacaaactctatcttctaatcgatcactcacttaattccccccctttgttttttgagtttaaacttcacttgaagttaagttatttaattatatgagttcttgattcagtcccaattttttctcccctttggcatcaacaaaaagccaaagtgcgtatagagacattaaatcatacacaaactcataatcatncaagcattttaatccatacaacaagcaaggaggacaataattcatacataaactaagcagggaagatataattcatccattaactataataaaatgtcagaataatagaaagtcatcccagataaccannattaaacaacctaattagaaagtaatatactaataagtgtatcaaataagtca

SEQ ID NO: 33535 - DNA, 420 bp, Glycine max
  unsure at all n locations
cttctagtatttataagtcttcttgttcaagtgtgctttgtctctaattgaatataagncttctcttgagctaatgtctaatgctcatggtcgttggagcatttaatgcttacattaaatgcatgtattttttcatgttgaaacaccattctggttgactgttgtgttgagcactatagtaaaaaccacttcctttgactaaaggacaatatcacaagaaggggtcttgaattgcgattctatatcttggtttttttaaatccttttcacactcaaaccaagttttcctccgaaagaaaaactttgtaaaatagataacaaattttcaaaaacacaatcaaatgatgaaagatgattntgccaagcccaagatatnttcaaatgtataaatgagaattcaaaccctaggtcaattaaagc

SEQ ID NO: 33536 - DNA, 438 bp, Glycine max
agcttcatgtaatgtgctataagttggggcactggagggaagaggtgttgggcttgttcttcgagcccagtggcctaccacgtggcatgtttgtaggtgggtttgtgaaagctagtaaggtggtcccaagaggatcccttgtctgagtatgagaaaggaaattctacgaaagggagttcgccatggaattgtctgtcataatgacaaagaggtgaatggaatgagaggaggaaaaaatgtaagaggtgtatgaaatgtttcaagacatgtattctgtagagatagggggagcaatatgaacactaagctttggagcttgaagtagtattatctatctacatgcctaactctatgcgtggtattcgtatagattggtgcatctcattctctatcttctcatatgcatatcatgcattatcatgtacacgcaggaacatt

SEQ ID NO: 33537 - DNA, 461 bp, Glycine max
tggcttctcttgcttagtgcattctattctattgtatcgctcgcttagtgggctcttctcgcttaacgcattctattcaggtatgcacgcttagcacctattgcgcgctcaacacacgtgacaactctcgagcttaacgcctctcttagcgcttgtgccttcctgacccgcttagtgcatgttgcgtgctaagcgcgagctctgggctgggcctttctgatttcttctttttcttctttgctatttctcactttttgcttttagcacctccagtttttatatctgcagccaaaattaaacacaacatcaattctttaatatttaagcgcacataactactacataattatcttaaagacaattttgcttgattttctactatcaaagtacaattatttagcacgtatcactatatgatggatctaggaactcatcggtaagattaccaaaagctgatgttg

SEQ ID NO: 33538 - DNA, 219 bp, Glycine max
  unsure at all n locations
gcatgcgtttnctatacactaccaagcccagaggcgttaacggcgccggtggccatgctaactccgctgccggcgtacgtggtgacgttgagttggagccttggggagtcatcgacggcttgagtctgaacggggttggtgagactgttgaagttggagatggatagatgaaagaatagagagcgtggaactgaagaagctccactctttgtctatcgt

SEQ ID NO: 33539 - DNA, 363 bp, Glycine max
  unsure at all n locations
cgtgtncgtctccatacctgaaacaagacatagaggaatgagtcatgntttctacgcacccctccgagaaagagatatgaacagcaatcaacgggagttcgtgtgagcagttgataaaaactaacctagaatatattggtctgccagaatcactcagaacaaaaaaatgcttcttcctttctctccatgaaatggaagcatcattctgcactttatttattaatgaaacagaatatgatattacactatatatccagtgtcatgccctcttattgcttgaatctaatagcataaacctctgtatgagaacaaatgcagctcttaactggaatttcaaatatctcatcatagctataacaacag

SEQ ID NO: 33540 - DNA, 346 bp, Glycine max
agcttctagtctcaattttgagcgtctcgatatattacccgattcaatcggacatccgagtaaaaagttattgtcttttgaatctcctacaagcttccgttttcaatttgcaacgtctcgaatatattacaggactcaacttgacatccgtgaataaagtgattgtcaatgcaattgtctcagaacttcggatctaaattgtgagcgtctcgatatattgcatgactcattcagacatccgagtgaaaagttattgtcatttgaatttgatacgagcttacgttatcaatttggagcatctctcgataaattacgacactctggtcggcatccgagtaaaaagtca

SEQ ID NO: 33541 - DNA, 463 bp, Glycine max
  unsure at all n locations
tgaaggcaaactggatgcgttggtcaacttggtaacctatctggccttgaatcacaaatctgtacctgtcgcaagggtttgaggtttgtgctcctctgctgaccaccatacagacctttgcccttccatgcagcaacctagagcaattgagcagcctgaagcttatgcagcacatatatacaatagacctgctcaacctcagcagcaaaatcaaccacagcagagcaattatgacctttccagcaacacatacaaccctggatggaggaattaccctaacctcagatggtccagccctcagcaacaacaacaacagcctgctccttccttccaaaatgcttctggcccaagcagaccatacattcctccaccaatccaacaacagcaacaaccccagatacagccaacaagtgagggccctccacaaccttccctcgaagaacttgtgaggcanatgactatg

SEQ ID NO: 33542 - DNA, 395 bp, Glycine max
tatctttgtttttaagaaaaagtcagtttctcaactcaaacagaaagtgtcagaacatttagcctgaagacttctagtttctgagtaacgagagcatcatgcagaaaataataacagagaaacttcgggtgatgggtgcttagaggatagtcagaatagatgcattgcttcaaaattgtgtcaatccagcagtcatattgaagtctttctcgatgaatctaatattccttctaatgatactttgatgcctcaagatacatttggagggtgaaaatcttagcaactacaggttgagtcaattccacatgttgcacttccagatggaatccagcataagatttctggaagtaaactctggtcttaacataaacagatctaaactcaaagatcaaaat

SEQ ID NO: 33543 - DNA, 467 bp, Glycine max
  unsure at all n locations
tcccaagtttttaagttcttcctcanaactgtcctaatctaagttcccaaagtcctattaacaacttccgtttgcccatcggtttgtgggtgacaagtggttgaaaataacaatttagtgcccaacttgctccacaaagtcctccaaaaatggcttaagaacttagagtccctatcactaacaatgctccttggcaaaccatggagtctcacaatctccttgaaaaacaaatcagccacatgggaagcatcatcaactttcttacatggaataaaatgagccattntagaaaacctatcaacaaccacaaaaatggaatctctaccattgcttgtttttggcagccccaaaacaaaatccatggataaatcaatccaaggatacttcggaattggcaatggagtatacaatccatgaggctntaccttagactttgcctttntacatacaatgcaatgttcacaaaa

SEQ ID NO: 33544 - DNA, 440 bp, Glycine max
  unsure at all n locations
agcttatgtcaagggttatttcgntggaagaagtgtatgtaagaaagagctttatcgaagtgtcggaggaaggagagtcgtttctttccgaactaaagcatttgcatcaattgcaagtggtggacttaagcattccatgtgcttgaatttttccaaaggaattgttctttgacaacttaagtgattacaagattgagattgngaacttcaaaactctttcagctggagatttcagaatgcctagtaagtatgaaaattttaaatctttggcattggagctgaaggatgacactgacaatattcactctcagacaggaataaagttgttgtttaaaacagttgaaaattttgtgtgggagagctgaatggtgtcaagatgtattaatgagtcgaaattgatggacttcacatttgaacacttatcatataacaacctacat

SEQ ID NO: 33545 - DNA, 437 bp, Glycine max
  unsure at all n locations
tctctaaattggttacctgttgcagaaatacattggatctaatatgaaagaacaaaacgcaacatattntactaatgagtgtcttgaagtgtaactatgaggtgaaatcctacatccgatagaaatgaaaaaattaaatatcatataaatgaagaaaaaaaaaattataattaaggttttgaattaaagtgtgatttaagtatacttatgtgattactctaaactcattagtataaatttcaccgatgtttaccgcctcaatttcataacagagtcaatatgccataattgggtatgatgcatcagctcatatgatttagaccaagaagactttctgtttactacaaattaacttgcatttgcagacagaaatggaccaaaaggaataatcagcaaagttgggatatctatattatagttggatgggattacatact

SEQ ID NO: 33546 - DNA, 443 bp, Glycine max
  unsure at all n locations
tgtctttctttacctataaatacgacaacaagaattgaagaatgatgacaaacaagggcagaaaaaaagagtagtgaatcaagaaatgagagaaaagaaaagtattagttgagaaatacactaagcttaagagagttcattctttataatacacaaagtacttgtgagacattataactttattgtatattcactcattgagtattgtaaagaatctttgattctacatcaaacttttgtttgtgaaattcaagagtgacttagtgaaaaaacaatacgtaggtgttcttagattcaagtggagtctacaggttgtgccaataatgaccataagaatactcataagccaaaagtgatagaaaagaaatcaagtctgattagcggaatcctttactagttggtanagaagaactagacgtaactcaggttgagtgaaccagtat

SEQ ID NO: 33547 - DNA, 424 bp, Glycine max
  unsure at all n locations
tctcggctcatgctgcgaacgcctctagttcaacactcttgcagcctaaggcacccacccagagggaagctccccaagttccaactccgaacgcgactcgaccggccggtaattccaacacaacaaggaacttccctccgaggccgttgccggaattcaccccgctcccaatgacgtacgaagatcttctaccatccctcatcgccaatcatttggccgtggtaactcccggaagggtcctcgaaccccctttcccgaagtggtatgaccctaatgcaacttgcaagtaccatgggggtgccccggngcattccatcgaacaatgtttggcccttaaatacaacgtccaacatctaatggatgccggatggctgactctncaagaggatcggcccaatgtaaggaccaacccgctcgcaatcat

SEQ ID NO: 33548 - DNA, 381 bp, Glycine max
  unsure at all n locations
agcttggtttgnttccgcagactcaacagaagtcagttgggatagagatcagactatgtgcatgaatcttacacccagtgggttattgataggaccaagagctttggcctaccctaccgcttacctagatacctatcgtccaccatcccaccatcatccttgcctatcccctttgatactaaggaagagtttcatgaacaattaaccaaagaaaggcaagaaaaagacacttggaagaggagatgccaggagctcgagcaagagaatgagactctgaaggggaagatagcccaacagagccgttgagtttttatccagaaccagaggatgattgagaaggacgacttgcttcgtccatagacgctttgtccaccgagatgc

SEQ ID NO: 33549 - DNA, 454 bp, Glycine max
  unsure at all n locations
actcaagcttgaggttgtgaaaagaatagagtccatcatcaccaacttcttcttgtagaagaattctattggtctcctgagatttcacaagatacacatgagggtgaaacagagttgtcttacgcaaattgactcacacttaactgatttttcgaaattgaaggaacatgtaacaacttatgaagcttaaaggttatggcactgtcattacgagatacaaaaattgacgaatcggagttggagatacttaaacctttaccattgcctatgaaaatctgctangtctatcaaaatgagtaaattgtatattattttgagagtcaccagtcacatgaaaactggctctagaatctagtatccaagtggagccagatgcatcattaccatgacaggaggagtttgtgagcatggcattgggctgactgggactacgaacagtggacttagcattggc

SEQ ID NO: 33550 - DNA, 431 bp, Glycine max
  unsure at all n locations
ttcttgaccaatcccaacccaacccgggcatagtcggtcagtgagaacctgtgatgtacctaagcaggcgagctcctggcagtcaacagataaaaggaaaacaagaccacaaagcaaggaggcttgtggtggctggccagctgtgaattttgtgtaatatgtggattgtggtctctggtaatcgattaccaaaggtgagtaatcgattacaaggcttaaaattgaggacaggaggctaagatggtctctggtaatcgattaccaaggggtgtaatcgattaccaggcttganaacgaagtcaggaaacttagggagcctctggtaatcgattaccagcctgtgtaatcgattacacagaggaatgggtcactggtaatcgattaccacgcatgtgtaatcgattacacagtgtattattgcatatttcatg

SEQ ID NO: 33551 - DNA, 464 bp, Glycine max
  unsure at all n locations
tgtgattgttaaaaatatatataaaaagattaaatccttgaggttntgcacttgcacgtttgagaagaaaactcactcgaccaggagcttgtggaaaatgcccaaagacaattgtgataatagggtacatctgatgttagtcactcatgcagactccttaggattccttatgaatccaaaggtggcctttcttgtacaaattctttcgggatcaacccatgacatcaagttttagcaagatcaactgacccatggcatgactctatgatattaaatcacgaaagtttcacttggtcacataccaaagtgtgacaatccattgccatccttcaatggggtgcatgatcgatcccaaagccatatattttcttgttgtgcagaataatcaaagctnttaaacgacaagggatgaaccttaggatctaaatctcaggtgattaattaaatgttgaatggctccacta

SEQ ID NO: 33552 - DNA, 273 bp, Glycine max
  unsure at all n locations
caagcttgtttangctgcttangtccttggactgaatgattcgttaggattcctcaaagcaactaaatcatgagtggtaatattggggagagacattaaaacctaaagaagagtaacaaaatacatcactcaataactaaagctttagaaattagcatcctcttctttgcaagagaattccaaatggcaaatgcagtcgagcgacaagaaaaaataaagtagccaacagaacaagagacatactaacctgcctgggagctgcgtgtctatcac

SEQ ID NO: 33553 - DNA, 444 bp, Glycine max
  unsure at all n locations
acatactgtgtaatattattagtaagaaacatagccttctatatttgataactaaaccttcttctccttttgcattcgtatacggcatgaaatatgttactcctggaaagtccccaccttctacttcggccaatccaccatacacaacatcaccccacccaaaatcgacttttccaaaatgataatatatatctcaagtctgacacaacatataacaccttacagttgcgaataagcatcgatccttaatcaccattagatctgccacagaatgcatatactcctccgtcacctaactnttcactaggttgattccactgcatacccaaatggatttgcacaaagctatcctgcagcggtgactgctgcacggtatggaacagcattgccgtaataacctacgggtaactgatgatagaaccgtgcacgtgcatcgactatgca

SEQ ID NO: 33554 - DNA, 402 bp, Glycine max
  unsure at all n locations
agcttgagtgttattctgttgaggttgagctaagcgcgccatgctgcgctaagcctattctgcaaaaagaaatgttttttgtgtcttcgagcttaatgccagcctgctgcgcttagcgccttgagtaaatttcataaggcgccctaagctcagcatgttgcgctaagcgcccagtcaaaatttcagttttattnttctgtttgtgaaaataaccttgtgtaatctcttgtgtttattttacattntgcagatggcatccaagaaaagaaaatctccttctacacctacccnnagccagattgataggtccagaatcacatccctagaggcttgngagagatacactgacattgtggtgcctcgaaagctactaccagagaggaatgtggtagtttattacac

SEQ ID NO: 33555 - DNA, 501 bp, Glycine max
  unsure at all n locations
cgatactatagacaactcaagcttgtaggattatggggtacctatcccagtggtactaggtggcggtctggctatggtgcacaacaagttctccacatccacaatgcgcgcataaacccaccatcccctgtggcccacctccaactgagctcacgtactcccatgtagcccatatccccgtttctctcaacaccggatccccatcaatcctcccaagcttccacaacatccaagcaaaacaacattcaaatagaacaagctatcacagccaagcaaaacagagcaaaggcagacaactctgccaaaacgccaaccaaatcacagcttttctcacttaaagaccccagtaacaattccctcgttccggttcatcaaccgttggatcgactcgaaaantttactagaagtctctagtacttaagcctacattgtgaccgttgggatctactagcaaacatccagaactcattctgtactgctcttcccacagccaaccacaca

SEQ ID NO: 33556 - DNA, 459 bp, Glycine max
  unsure at all n locations
agctttattacactcatatagtagtttcacaccatccgtgccaccaaaaccccaaaaaccacatcaaaaccatcgaaatgaacattnttacgaactttcaatagtgctcatggagggaaaatgaacacggaaaacaagagggaaaagataagggttccttatcattgaactagccctcaaactcaactaaagcacaactaccaagtcccttgagtagcggaattcaaggtctcaagctctctaatgaaaggttatcttggagagagagaagaaagtgaaatgatagtattctaagtggtggttcagactntgaactctttactttgnagttatgactctccctattncttctaatcacacctcttcacttgctaaactcaacccgtcccatccctatactcaagaaccactcatctcgattgaacaaccagcctcatcgctacggatcatactctaatc

SEQ ID NO: 33557 - DNA, 450 bp, Glycine max
  unsure at all n locations
actagctggatggttggcttatttgacttcttgtcgcttttatacataaacagccccaccatcccaattntgcaaaaatcatattcatatatcattggggcatttcaccgagcactttgtgggcgcacgtttggacacaaattgcaagagaatagggacaatgtggcatgcctcattgcttcagaatacaacctaggcttaaggccttttcattcaaatcctcaattcaagaaaacaagcaccaaagcaaaccaaaactgcctcacaaatataagcatgttctcacaatttaaggcaccaaaagatgaagaaaacacatcaatgggaagcaaaaacatcaaggatggaatacttacttgttggagtgaattgaaacaccaaaaacgaaagcaaaacgcgatcaanaatggcttangggagcaagaaaccgcaagccttcgtgtctttatc

SEQ ID NO: 33558 - DNA, 438 bp, Glycine max
  unsure at all n locations
agcttgtctgtctgggtggatcaaataaacctgagaattcccagttttagtggaccccaatatatactactctagaaaagagacaaaatagctttttacacttaatttaaccagaaatttgaaaaaacttttgaataaaaggcatgactaattactgtttactaaatgtacacgtaaatacgtttttcatctctcanaatatgacgggtttttacttcttttttgctggataaacgggtttttacttttatccttatacaaattaaattcaatntcagtttttatatntgacaaaaaaatgatatgaatttatacgtccatcaggaactgaaaagaaactaaaaactaatgtattttcaagaatgataataattttcatttatatataatatagttacaattcatttgaaatgatgatatacttaactttatccttat

SEQ ID NO: 33559 - DNA, 466 bp, Glycine max
  unsure at all n locations
ntataagcgcgggtctgcgggacaaaggtcaagtggtcgcgatgttctatgatgatgttccgagtacattggatttggtacgaccatgctctcctgattcttagctgggaaattggcgagtggaggaacgccccgacatttacgcaacgagcataatgtaaacctttacggttttaaaaaactttatagttaggcctaggctttagagtttcttttgttaaggctttgtgtcttttgttctaaatttataatacaaggatctttcttcatctgttcctacgtctctacccattctcatccatttcatgtttacttctttatttctgaaacggcagatctgatgacgagtcccccgaaggtactaatacctgngacctgcctatcaacttcgagcaagaaacgaatcacacagaagatgaacggaatgaggatgtgagacttcccncggaattagaaaggatagtcg

SEQ ID NO: 33560 - DNA, 375 bp, Glycine max
  unsure at all n locations
agcttgagcttcctagcttaagcaccataggcattcactagtgcaatgtgatctttagcttgttggtgtatcacatccattcgggtcctaagagggtcagatttcaatgccaaaaaggttctatgcacgtatgcattaccagtcgtgggaagatcctgttaaccaaaaacacctaaacaattacatggtgttcattcaattactcaaatcaccaagtggcaaagtttaaaataacagttcgcaacagcgatttcagcctcaacatcaaggttttggactcatgtaagcaatttcccgcaatgtcaaggatcgcgacgaaaccgcaatctaaaatcttgccatgtgggttatgctttaaactanatctacaaaaat

SEQ ID NO: 33561 - DNA, 477 bp, Glycine max
cttgagacaaggatcctccaaaagcaccacactatctgttttcacataaaactaagagagaggattctaggcttgcagaagtgtcactgcctccgcaaaccagtaccctccctcttcagttcacacaaccctgtaataaagatgagtattgtttctcttgcttacctgcaaattacatcaaaacagcattaaagaagaacaataataacaacactgaaaaacatgtgaagttcgctgaagttatcattcatgtcatgccattatttgagcaattaaaacaaataagctttaatcagctagacaagaaattatgtgcgtgtgtgtgtattatttagaccaattcctattatcctatagtattaactattaaatgacaacaaacatcttggagccacataaatattctatattctacaataatgattgatcatttgtcttgacttagtgcacatgaatatctggtcaatgcagctaatg

SEQ ID NO: 33562 - DNA, 443 bp, Glycine max
  unsure at all n locations
agcttccactttatccaagcaatttattttccaaatatcatgaactaccctaaaccaagaaaacagggcagaggcagaaaactctgcccaaaacacattcaaataccacagctntccctactcaaataccccagtaacattctctntgttctgattcgttaaccattggatcgacttgaaaantttactagaggttcctagtacataagtctacatcttgaccgttgggatctactagaaaatgtccagaacccaatatgtactacctttcccataaccaacaatgcacaagcattntctgcacatgttgaaaagttctgctgcacaattcaacaacattcttctgcataatanggcagaattcgaaatccatcttgcccacatccaattntgctcanatnggatcctacaagtcctacatcatgtataaatcatatataaat

SEQ ID NO: 33563 - DNA, 425 bp, Glycine max
  unsure at all n locations
aactcaagcttgagtgtttgctatanaaaacaaactaaaactcgagctttaagttttcatcattcgctatcagctnttcaaagtacagaaggtcacacatgttgcctaaaacatcccacttatctaggcatggcaacggggcccgtcccggacccgccccgattttgacggngaaaatccgagttgatcggggtcagggtcggggtcgggtttttcccgatagccaaattcgggttcggcgtccgggatgggattcttaatacctgccccgaatccgtccccaaaaccgtcccgctaataattaatatatataacacattgaaatatgacactattacattgaatcttatgttagtgtataattgaattttatgtcttatctaaaactatatttcttattctatgaaaaattatatttctttaat

SEQ ID NO: 33564 - DNA, 320 bp, Glycine max
atcttgatatatgaagtgtccaagggtgaaacttcctgcttttattgttgaccacagagtggtacctggagatatgtcgcgggggtcaagagaccttggtgacgtcaggtggggtgctattgcccaaaaccaagcttgaccaattccgacccaacccgggcatagtctgtcatggagaacctgtgatgtacctaagcaggcgagctcctggcagtcaacagataaaaggaacaaagaccacaaagccaggaggcttgtggtagctggccagctgtgaaacttgactgatatgtgagatatggactctggtaatcgattac

SEQ ID NO: 33565 - DNA, 409 bp, Glycine max
  unsure at all n locations
actaagcttataaaacaaaatgcctaatcattccaaaatgtttgtaatangacgcatcaacaagaataagccaagctattgtgcagcaatcaatggggcaaaacacaccaaatgaaatgatgatggatggctcanattctcacaaaggtaaaatcatcactttcaaattgagctntcaaaactatcatgacatgtagagaagaatcaaggatttcaagtcacaaaatgtcaagaacttttattttcaaaacaattacccatttcttgaacatttcctataattcaaagaaaaacatgcaaagtcatacgtgcacacaaaattgacccanaatattanactaaaaatccgacgaaactaacaacattaacaaattaacacaactaacanattaacataaccaacaaaact

SEQ ID NO: 33566 - DNA, 213 bp, Glycine max
  unsure at all n locations
atcttattcttttgntctcctaccctctttctaatctatgacactagttttataaaatgatttctaagaataatgatatatgatagcaataaaactcattataattaaattcttcgatctaacgcaacccaggagatatcaaatcatctaacgtatatatatatatatatatatattatatctattataatatatatatatatatatatatat

SEQ ID NO: 33567 - DNA, 250 bp, Glycine max
atatatggttaaatcccaactagctcttgcatatgccaacgttaaggctgtgaattatacataagattcactaaaatacacatctcatgaagctataactaaaaaaatatcttaagatatactaatagctcaattagctcaatattgtataagcatttgacaacttatacacttatccttatctttctaataggagtgagtcgtgtactttaagatttatctaattatgactggttagcatactcatact

SEQ ID NO: 33568 - DNA, 437 bp, Glycine max
  unsure at all n locations
caggtcccagaaaaagtctccggtatatcaccacaagcccctaccaacaaccgatcctaggccaacacacaatatactacaacaacacagccacaccatgtcatataagacccaacctacaacacggaggacactaacccatagaccgatagcatgcgccactaaaacatcatgcgtctccgacccgtactctaagaccgatacacacaaccgccttacaacggcacacgagcggaatcccgaactaggaacaatgaatcccactcataacacccatcaaccgacgggtacacaaattgcgataatatggcctacggggaacacanacaacgcacggctcacacacaaagacgacatcgcaatngaccgcgagagccacaaacgaacacctagccaccaatcacagaccccgctcctagacacaacagactccgacg

SEQ ID NO: 33569 - DNA, 519 bp, Glycine max
  unsure at all n locations
ccgcgactggcgttgacacctgatnaccnttcgcaaaacccccgacactatacaacactccacccngaagaccatncatactatgtcatcagcccacttcagctttgctcgataacacagccacagataggggctcgcctagagcacacgatactgctgccaatcaaaccaccaacgtaacacctacacctcgcaccacatctccctaccatgccagtgcgcagcacgctaggttgggacatcctaacagccataccatgaagctacacctcacacattgcaatatttcctcactcaataaaactttatcagactctagctcctgccgctgcatggcataatctcatacattgccctcccactctcctacttctatataccttccttcggagcccatcttacagacctgcggcgaccgctcatgacctcccatgctaccctaactactacgcaccctctacgatgcctcatcagaacactcgatattcctatacaccaacgccaactcccgctccaacc

SEQ ID NO: 33570 - DNA, 444 bp, Glycine max
  unsure at all n locations
agcttcaccttcaccatatccaacacaccccanaacattcaacaccttcgatctgcactttcttcttctactactcctaatcatcaaatccatcttgctgagttagtacccttcaactctacccaacactccaacaaagacaacaacacacaaaaggctcctctcactgacctattgaaacttggctatgcatcactcacccttgagcctccttttcgctccttgatatcacagatcacagaagaagacggtcaccctccactntgcataatatctgacatgttccttggttgggttaacaatgttgcaaagagcttaagcactangaacctaaccttcaccacttgtggtgcttatggtatcttggcctatatctctatctggtcccaacctcctcataggaaaactgattctgatgagttccatgttccgggaattcctcaa

SEQ ID NO: 33571 - DNA, 425 bp, Glycine max
  unsure at all n locations
tctgtganattccagatcctgacaacaccttcttcactcttacagacaattcgttcagctcctatatccacagagaagagattgctcttaaatccgcgcaacatcctctgtggaggctctactatgtctccacccaaatgctntacctttgagactctcttcctcagagctcgcttgctaatcttcaacagctgtctcacatcaattagagccagcttgccatcacttgatgcggaaacaagccatggaaactcataggcaagagaatacacaacagctgagtgaggaacagaattagtaaataagctggttttctatattttacgagtaagtcagttttaatggattagcatagtcaataagtggtttctatctttaaggaacaagttagccttaatactctgctttgctaatatctctgtatc

SEQ ID NO: 33572 - DNA, 375 bp, Glycine max
  unsure at all n locations
atcntgttctcacatcgttcgcgtgtatgacatccactccacaaggtttgaagtacacgagaccttcaatcctattacgcaacgtggcggacaaaaatgggcaattaacttgaatggtcattattgtcaatgcggaaggtattctgcgcttcactatccatgttcacatattattgcagcttgtggttacgtgagcctgaactactaccaatatataaatgttgtttatacaaatgagcacatcttacaagcttactccccacaatggtggcctcttgagaatgaagtggctattcctccttctaatgatgcatggacacttatccctgacccaactacaattcgtgcgacaggtcgtccaaaatcaacaaggat

SEQ ID NO: 33573 - DNA, 458 bp, Glycine max
tagacagtgtgtcattggtcatttcatcctctctaattttcttattgttgtcccctctattattgatacaaatagtacaacgaattgcaaaaattgtagatcactcctttgctttgatgtgctctccctcgagatattaagcaaaaaaaagacaacaccatggttcaccaatgcttcaacaaccctaaattgtgtaaagagaagtgccagcagtggcaacaatttatcaatttatagctccaaaatttccaattgtgtttgtctgaattaagagctgacattgagaaaatagcctcagttgcattgatatttgcctatatttatttctatccacctctttttaacaaatgtttccatcagtattataacgccgcttatccattgattcatcgaagttcaagtatatccaatgcattaataatttggaaactatattagtgaattatacagaataccac

SEQ ID NO: 33574 - DNA, 348 bp, Glycine max
agctttgtgtaatcgattacactaatttggtaatcgattaccagtgactgtttcggaataaatcaaaagatgtaactcttcaaaaggtttttgaatttttcaaattggttttaagtttttctaaaagttataactcttctaaatggtcttcttgaccagacatgaagagtctatataagcaaggcttttttttgcatctcaagtatcttgaatacttttccaatcaattctttgcaagccttgaatctctttgaacttcttcttcttcattgtaccaaaagctttctgaagttttctggttttccaaaccttgaaaacttgtgctattcatctttccattctcttctg

SEQ ID NO: 33575 - DNA, 422 bp, Glycine max
cttgttcgtgaactccaatcgagacatttgagcttgtacattctgaatcgcctctgcattgtgcttgacatcagcactgagctccttcattcgcgtgttatctgccatggcatgatgaaagcaccaatgaaaggaaaatacaagaaattatagaatgtactcattttgttcccgtactaaaaatgagaatcaacctctaagagtacagtgtgtacaattagaaggactgagtacaatactcacaaagagaaaaagaagaagaacaagacatgttcactcataactaccctctcactacaccacctcctacctctaaataccactattagttggttacataatccaccaacctagagttagggtttctctctctcacactctttctgttaccatagtggatacgtgagatttgcaaatattcc

SEQ ID NO: 33576 - DNA, 382 bp, Glycine max
  unsure at all n locations
ttcttcttttgtttcgtcttcctgcagctcgctgatattttcacgaagcctctatctccagctctctttcaaggtctctgttccaagctgggaatgatgaacatccattcctagcttgcggngggctctcaacaatagcttgttagttagaaaaagctgttagagttagttttctttctggtgtaactaactaaccaccctttttctctttccttcatatgtgtataaatatcttacgaattcagtaataaagacatgcaattatttggtcatctcacgtacacttgcgtcgtttctctctcctttatggctgttgatccatttaatatttgttccgtgctttcccctggacgacgttntcgagtagagaaatgatgcattt

SEQ ID NO: 33577 - DNA, 385 bp, Glycine max
tgacatgtgtccaatttgttggttattcgggcatttcttcatcacacttccacctctattggctgctccacgtatccctcaatgtgtcttctttttcagccttcatcccgagccttcttgctttctgttttatctttccatctctctctctctcgagctttctagagaagtctctgtatttcttcgatgctttgcctctctatttcttcaactaagtcctaatgtaagatgcgtgtggttcttgagactcgaggtgatagaattgatctctatgactgcaaagccgggttctctttcattcatgggaacgactcattcgatgttttcattcggcgtgagataaacgctgtgtttttggctctggcagtttgcttttgtactaccc

SEQ ID NO: 33578 - DNA, 320 bp, Glycine max
  unsure at all n locations
gagaaacccatgttgtgactggcattcctgtacggccaaatttcccaccaacccaaccatatctttactcagcccataacaaactttctccttacccaccacccagttatgcacaaaggccatccctaaatctaccacaaagtctgtctaccgcacttncaatgacgaacaccacctttagcacaaaccaacaacaccaaccaagaaagtgaattttgcagcgagaaagcttgagaattcaccccattccagtgtctatgctgattgctccatattacttgatattcatggtaccataccctagccaggtcatcacctca

SEQ ID NO: 33579 - DNA, 455 bp, Glycine max
  unsure at all n locations
tctccctctnttccctataaatagggagaggagggaagatcaaatacgttcaaccctcctggtatctgaggatcacttgaaattagtgaaaaaaatcattcccgtgaagaaaatccaagccgaggcgcttccgtaacacttccgaaacgtttccgtgaagattttccgccgtctttcgttcattcttcgtcgttcttcggtcttcaatcggtaagttctcgatatcgaacttttcaattcattgtatgtacccttggtggtcctcacttgtttcgcgtacttttattttcatttcgtttactttccgtacccccttttgacgtgctttagtcatttatttaagtcattttctcgcctaatcaaaaaaattaaataaatttccaccgatcattcgaattgaacatccgttaattccggtaaaatgaaatccgactgttcggtcatgccgtaccacg

SEQ ID NO: 33580 - DNA, 413 bp, Glycine max
  unsure at all n locations
agctttaataattgaattaaaaacgttcagaaattgctggtaatcgattaccatatatgtgtaatcgattacacagtgtaaattttgaattcaaattttaatagcttgtgtaaattagttttggacactggtaatcgattacatcctctggtaatcgattaccagagagtaaatttgttgaaaaatactttttaacttaaaattcttggccaaaccttttgctacttcaatnggaattcccttcctatttaatataccctttctaagactctaaagactgtcttgatcatccatcttgaatatctnntaattctttgtcttgaataaagctttgagacgcatgtgatcctttggcatcatcaaaacatcagcttgatcctttgtctacacatatcttgtggatcagttctagt

SEQ ID NO: 33581 - DNA, 463 bp, Glycine max
  unsure at all n locations
ccacatcaattagaccttgcaccttatgcttcaaggtcctacaatgcttaatggaatgccctgnggctcctccatgataagcacatgttgtatttgagtcgtatcctcgaaaaaattgaggtcgaggaaccttggggggttatggctaccattgaattatggagtagacataagagcaaggtagcataggacaccaaaattggggagaattctataaacttttttgctggaaaactccttccttggttggtgttttggtttgtgctaaaagtggtgtttggcattggttgtgtggcacgcaagctttgtggctgatttagtgatggccttcgtggatgattgngtggtgggtaatgaaaagggctaacgtcggctgagtaatgacattgttgagcangtagaanatttggcatgtangaatggcagcaaaacatgggttccttccgccttctcattctctcta

SEQ ID NO: 33582 - DNA, 442 bp, Glycine max
  unsure at all n locations
agcttattgtgtaaactctcattgtttgattaaagtactttgtctatcaaatatttactatttgtgaaagccaggagtgacttggtgataaagaatacttgggtcttaatcgcatggaaagattaagtgtaatgctaggagtgaccatgagaatactcattgtagtcagaagtggcatagaaaatacttggttgtgatcaaatatttgatcaggggaaccctaacaggtttaaaggagaactggacgtacctaaagagttgggacgaaccaatatacaaccggtgtgttttcattaatggtactatatataacttgtcctttgctttaagtcactctcacactatcatatccaagctttgcagactgattgtttcaacacacatcanatcctttggatgaaatccttggtccattgatatctgctctaagaaaagtctttat

SEQ ID NO: 33583 - DNA, 421 bp, Glycine max
cgcaaatgaccccttcatgctttaattaagcccctggtagctaccaagggttgataaccccgattgacgccaaaatatagggctagacttcctaagagcgactaccataaacgccacaattatggctaggagctttagaatccttgagacttaccatgggattataacccctgctattaccaaagttggagtttttataaaaaattactatttaagatatatgaaactttttttaacttatctaacagatatttcagacactagtatatctatattctctggttaaatttgtcatgaattgcttctttcactgctagtagcagtaacaggatagctctggaattaaacgtgatcaatgagcatgtattacaatatcaaaatctaatgagcaacataaggtgatgagcgtacgctagctaac

SEQ ID NO: 33584 - DNA, 396 bp, Glycine max
  unsure at all n locations
agcttctttttttctttcttntttttcacatttgtacagagagaggttnttcaaaatctacaacaaagactaataatcatctaccttatcaaagcaaaacgcactacaacgctgaccctaattttcaaacaaatggtcaagtgcttgtgcagctnttcgtttgaaaagtactaaatcataatacgccagactatcatcaaatgaagtggaaagagaaaatgttaggatttgcctcctgtgctcttaatctccatttagctatatttcttgattntnttttagtaggataggataagtataggtgaataatttttaaaaatatttaacatgattacatatttaatatttgaatcataaacaattgttaaattaaaacaatctcacgtcacatgcttc

SEQ ID NO: 33585 - DNA, 473 bp, Glycine max
  unsure at all n locations
ntgaagcactcacattgngttgaagcaatggaagaagatctaatgtctattgagagaaacaagacatggagtctcacaaagctaccaacaggaaagaaagccatagcagtaaaatgggtctacaaaactaagttgaatcctagaggagaagtaacaaagttcatagccagactggttgcaaagggatttctgcagaagcaaggtctggattatgatgaagtatttgcccctgttgctangttggaaacagttagacttgtaatagcaatggctagctacaattgctgggaagtacaccaaatggatgtaaaatctgcatttcttaatggctcactagaagaagaagttnttgtcactcaaccaccagggtttgtgatgaaaggtagagaaacagaggtgtacaagctgcataaggccttgtatggtctgaaacaggcttccagagcttggaacaagagaatagatacctttct

SEQ ID NO: 33586 - DNA, 450 bp, Glycine max
  unsure at all n locations
agcttctatggctagaatgatactttnaanaacctaatctanatgaagtctttgacttatcttgtaggtcgtagcttaagatgtgaggatgaaatctaatattagatgttaacaacttttcgaaataatattgatgtccaggtattggtaaaatttaaaaatcaatatgtgtaaagagaaatacgtgtgatttgtggngtgtagtgttaatcttttgagtatctataaaagagggtggactagaaatggaagatacaaatttcatcctacatctttaattgacctttcacattanaatggtgattctgacgtgacacttctatagaccgttgagaatgtacttatggaaatgtgataaatgatgtgaacaataaaacaatggtcgattagaaatttaattaagacnatagttttgtcctatattactaattgatcatgtccaatcaaatg

SEQ ID NO: 33587 - DNA, 473 bp, Glycine max
  unsure at all n locations
tgtggactataccttcggccaaacactgccgtgtttctgtctcgacccggatttaaggcgggctgcagcaccggctccgcttccctaactgtactggaagcggntgtcgtggctttatcctctatagttttctggagttttaacatgacctccgagatggaagccatttgatcttttaaggccgatagattgaccttcatctgttcctgcacgccctcttcattatccattnttctggatcgagtgttatagggatgccttggtgttttcttagttatgatgaaattcctaaagaaataaacaaaggtgagtatgccaccaaaacatgaatatgcaaatgaatgatcggagcacttggatccaccccaagggtttttagataacgtgatgagttcagaaattctcattntatacaaagaccaatgctttcatctagccacagatatacaaagggtgtacaagagaacctaacg

SEQ ID NO: 33588 - DNA, 216 bp, Glycine max
  unsure at all n locations
ttctccttacgcatctgtgcggtatttcacaccgcatatggtgcactctcagtacaatctgctctgatgccgcatagttaagccagccccgacacccgccaacacccgctgacgcgaaccccttgcggncgcatcgaatataaactcccatactgtctgctataccaagtactacccgtgagctcggactccactcgtcattccacggactaaacg

SEQ ID NO: 33589 - DNA, 411 bp, Glycine max
  unsure at all n locations
agcttctcatggaagttttctcaagaaagcttctcaaggaagctacctagtctataaatagaagcatgtgtaacacttgttgtaactttgatgaatgagagtcttgtgagacacaactcaaagttcaacttctctccctttttttcttccttcaatttcgtgctcccccctctctctttctctccctctttcttttcctccattgaagcatccttccaagcttcttatccaaggctcatcttggtggtgaagctccttcttccatggcttattccctagtggatggcgcctcctcntccctcttctnctttgtcttccgctgcatctccatggtggaaaaccaccattaaaggacctcattgaagctcanagatccagcctccataganagctcacaagcaagcttccatc

SEQ ID NO: 33590 - DNA, 469 bp, Glycine max
  unsure at all n locations
tgcttgtgaagcttctatggtggctgaatctttgagtcttaatgaggtcctttaatggtgattctccaccatggagatgtagcggaagacacatgagaagaggtgagaggaggtgccatccactaaggaataagccatggaagaaggaacttcaccaccaagatgagccttagataagaagcttggagatgatgcttcaatggaggaaaagaaagaaggagagaaagagagagggaggagcaagacattgaaggaagaaaaagggtgagaagttgaactttgagttgtgtctcacaagactctcattcatcanagttacaataagtgttacacatgtttctatntatagactacgtagcttccttgagaagctntcttgagaaaacttccttaagaagcttctttgagaaaatntccttgggaagctagagcttagctacacacacccctctcataactaagctcacct

SEQ ID NO: 33591 - DNA, 433 bp, Glycine max
  unsure at all n locations
agctntaagttaattcaaatgacaataacttttgactcggatgtccgattgagtcatttaataattcttgacgctagaaattgaatacagaagctctcaccanatttaaatgacaataactttttactcagaagtctgattgtgtcccgtaatatatctagatgctcaaaattgaaaacagaagctctgagcaaattcaaacgacaatagcttttgactcggatatccgattgagtcatttaataattcgagacgctcanaattgaatacagaagctctaagcanattcaaatgacaataactnttgactcgaatgtccgattgagtcattntataattcgagacgctcaanattgaatgcaggagctctcaccannattaaatgacaataactntntactcagaagtctaatggtgtcctgtaatntatcta

SEQ ID NO: 33592 - DNA, 441 bp, Glycine max
  unsure at all n locations
tttgttttcaattntgagcgtgtagatatattacgtcttgaattattaaatgactcaatcggacatccgagttaaaagttattgtcgtttgaatttgcttagagttactgttctcaatttcgtgcgtctcgatatactacaggactcaatcggactttccagcaaaaagttattgtcatttgaatttgttgagagcttctatattcaatttcgagcgtcttgaattattaagggagtaaattcgacatccgagtcaaaattttttattgtttcaatttgctgagagctggtgtattcaatttcgagcgtctcgaattattaaatggttcaatcggatatcanagtcaaaagctattgtcgtttgaatttgcttagagcttctgttttcaattctgagcgtctcgatatattaccggactcaatcagacatccgagtataaa

SEQ ID NO: 33593 - DNA, 391 bp, Glycine max
  unsure at all n locations
agcttggctttggtttagacatgtttgatacatgatttgggacttgtaggatttgatttgagcaagattggatgaggggaagtgtgattttcgaaatctgcacttatgcagaattttgctgtcaaaatatgtgcagcaggattntagcttggtgcagaaaatgcttgtgtgtggttggctgtggaaagagtagtacagaatgagttctggatgtttgctagtagatcccaacggtcacaatgtacgcttatgcactatagacttccagtataattttggagtcgatccaacggttaacgaattggatcgaagggattggtactgtggtctttaagtgagaaaagctgtaattntggttgatgtgttgagcagagttttctgcctttgctct

SEQ ID NO: 33594 - DNA, 397 bp, Glycine max
ggacctataaaactcaactatggaacttgctcttaacacaagtctgttgttctttgactgctgacagctagagacttttctttcttacgtgcttcgacttgttaaagttcatgttcatgaacttaacagtaccaattaattctttaaaggaaattgagtcaagattctttaaaacccttagtgttgttacttgttaatgtggctccttgtagagcttgtaagccttggatcttcttcatcaatgaagtccttcgcttcttgaagatcaatggccgcggaatggagaataaggaaaggttattggagatgccactttaacgagaagatgagtctcgaacaagctcaccaccataggaagtcatgcataagagcttgaaggtaggagaagatgggtgga

SEQ ID NO: 33595 - DNA, 429 bp, Glycine max
  unsure at all n locations
agcttccctatttatagaagagtggtgtggcttccttcaagagtgagtggtggatgtcaatcaatgcgttacattcacaatgctccttgtaactctaatcttcactttcctaagtggagtgtgtaagcctcaaggtcaaagaaaccaattacaagcctttggaaagtgcttcacaacttcctatgcatgccttggaatgtgttcctcaatttcctgtgtatttaaatttgtatgtgtcacaacctacccttcggcgggagggcgatgcgagggctcacgggtgcgtcttccatgagaggaaaatgtgcggagtcgccaccaacgtttattcaaggaaaaagttagaanaatcagaaaggtgtggtctacgaactntaagtgtgaaaggtttgngacaacctttaatcaaatgtgcaatatcatgtcttc

SEQ ID NO: 33596 - DNA, 456 bp, Glycine max
tcttagtttcagatgatgcagatgggcttgtagctacctcatgcactcctctaatgactatggcatcatttctggcgctaaactgttgggagttggaagccatcttctcaattaaatttctggcttcagcaggagtcatgtctccaagggctccaccactggcagcatctatcatacttctctccatattgctgagtccttcataaaaatattggagaagaagctgctctgaaatctgatggtgggggcaactggcacatagtttcttaaatctctcctagtactcatacaggctctctccactaagttgtctaatacctgagatatccttcctgatggctgtggtcctggaagcagggaaaattgtttctaagaatactctcttaaggtcatcccagctcgtgatggaccttggagcaaggtaatacaaccagtcctttgccactccctctaatg

SEQ ID NO: 33597 - DNA, 418 bp, Glycine max
  unsure at all n locations
agcttggagatgatgcttcaatggaggaatagaaagagagaaggggggagcacgaaattgaacgaataaaagagggagagaagctgaactttgaagtgtgtctcataagactttcattcatcaaagtgacaacaagtgttacacatgcttctatttatagactaggtagccttcttgagatgctttcttaagaaaacttccttgagaagcctctttgagaaaactttcttgagaagctagagcttagctacacacacccattcaanaactaagctcacctccttgagaagctatcttgagaagctagagcttagctacacacacccatctaataactaagctcacctccttaagaagctagagctcagctacacacactcatctaaaaactaagctcacctncttgacgaaatacatg

SEQ ID NO: 33598 - DNA, 431 bp, Glycine max
gttaaccttgacttggtagaacctcttgccgatttgatttgttcccatgcttgctaaagtgagacaaaagctggtgcaaatcaaaactccgatatctcatgggtggaatggatgaatgcatgaaggaatgcatataacacagatgcaatctaggaatgcgggggtccggggaattcgtccccttcttagacacaacgtctaggggtagcaaagtgccccaacgtacgtttttaagaaggcgacacggaccctccgttggtttgtttacacaagggatcaagacagaacccatatgcgatgcctatgcaaaagacacaatgcgggaatgtacacagtatgacaatattcactgaacataagcaaaagggtatatgatacttatgcatggcagtgtgaaaaatggcatgcaccgtgtttgctcgtgcccctat

SEQ ID NO: 33599 - DNA, 407 bp, Glycine max
agcttaatggtgcaatcccaatcgaaattggccaacttcataagttgtcaatactgaatttgagctggaattctctgggtggatcaattccatttgagattacaaagttgagcaatattactttcctgaacttgcaaaccaacaatctaagtggttccataccaacatccattgacaacttgaaatttctctttgaactccaactcagggaaaacaaactaagtggtgtgataccaagcatgccggggagtttgcaggtgtcactgaatcttagtagcaaccactttagtggtaatactcccaacaattttggtaatttggatagcctgcaagtcttggatctctcaaataacaaatttcctggtccaattcccaaccaactaactggaatgtcagctctgacatag

SEQ ID NO: 33600 - DNA, 449 bp, Glycine max
  unsure at all n locations
tgcctgtctgatgcagcagtaatgatggcccgagttatgttgnggaacggttacgaacccggaatgggtttaggcaaagacaacggcggcataactagcctgataaatgccaaaggaaatcgtgggaagtatggtttaagctataagcccactcaggcggatatgaagagaagcaccgcgggaaggaaaagcagtggccaaagctcgcagttgagacaagaaagtgaaggaagcccgccctgccacataagcagaagctttataagcgcaggtttgggagacgaaggtcaagtggtcgcgatatacgaagatgatgttccgagtacattggatttggtacgaaccatgccctctgatttccagctgggaaaatggcgagtggaggaacaccccggcatttacgcaacgagcataatgtaaacctttacggttntaaaagctctatagtt

SEQ ID NO: 33601 - DNA, 412 bp, Glycine max
  unsure at all n locations
atcttgatttacacacattatcaattttatgaataagaaaatatatttaagctatagtttaatatccaaaattacgattctagtgtcgacaaattatccataacgttttaattgttaaaattacaaaataaaagaactcaaataatagacgtctaatgaattaaaaaaatatataatctcataaaataatcttatgtataattacataacataaaatagtaaaatagtaaaatagtaaaatagatgagactcaacttcttataatgctctttattttcagcaatgaagctaataattattcgaaagatacattgcttggtttgcagctatacttatgctgaataataaatagacgacgtacctcttagcaagtcatctaggcgtacttcttgacatatcatnccatgaatat

SEQ ID NO: 33602 - DNA, 370 bp, Glycine max
tgaaagtgtgtaaaccaccatcttcttatagtataattctggtaacatgtctactatcatcggtatcgcctccctcttcgcattgggggtgctacttgagccgctaaatccctccacctttgggcgtattctttgaaagattcgtgctcctttttgcacacattctatagctgcattctatccggaaccatatcagaattgtactgatattgcctaacgaaggcaaccattacgtccttccaagaatgaactcgggaaggttccaagttagtataccaggtgacaactgtcccagtaagactttcctggaagacatgcatcaataatttttgatctttcgcatatgctcccattttcctacagtacacct

SEQ ID NO: 33603 - DNA, 392 bp, Glycine max
  unsure at all n locations
agcttctcattgaagcattctantctataactagaagtatgcgtaacacttgtaactttgatgaatgacagtcttgtgagacacaactcaaagttcaacttctctcccttgttcttccttcaatttccggctcccacctctttccttctcctcctctctttttcctccattgaaacatcctctccaagcttcttatccaaggctcatcttggcggtgaaactccttctttcatggcttattccctagtggatgacgcctcctctcacctattctcctatgtcttgcactgcatctacatggtggaagatgctcattaatagacttcattgaagctcatagatccagcctccatagaagcccacatgcaagatccatcatgttcatatgtctc

SEQ ID NO: 33604 - DNA, 405 bp, Glycine max
tctggaggaagcctcttaatgaagcttctagagaaagctacatgatagctttctcggcaaaaacgatgcccagcgttcgttaaccgctggatcttctcaaaatttggtctgcaacttcgcaagacacttttccatgatctgaccgttgggatctttgagaagatgtctggagtgtgctataagcctcttaatgaagcttctggaggaagcctcttaatgaagcttctacagaaagctacatgaagctgccttggtaaaaacgctgcccagccttcgttaaccattggatcttctccacatctggtctgcaacttcacaagacaatcttccatgatcttaacattgggatctttgagaagatatctggagtgtgctagaagctctcgttcccgagagcatctctta

SEQ ID NO: 33605 - DNA, 438 bp, Glycine max
  unsure at all n locations
agcttctttgttanaacttccttgagaagcttctntgagaaaacttccttgagaagcttctttgagaaaaattccttgagaagctagagcttagctactacacacccctctcataactaagctcacctccttgagaagcttccttaagaagattcctaaagaagctagagcttagctacacatacctctctaatagataagctcaccttcgtgagatgagaagctagagcttacctacacacccnctataatagctaagttcacccncatgacaaaatacatgaaaatacanaaaanaatccctactacaaagactactcanaatgcctcgaaatacaaggctaanaccctatactactagaatgggcaaaatacaaggcccaaacgaaggaaaacctattcaatattaccaagataagcgagctctacttagccatg

SEQ ID NO: 33606 - DNA, 475 bp, Glycine max
  unsure at all n locations
ctaagcttacatcaaccacttcgggtactgacctacttttatggtcttgatggggcctatgcaagttgaaagccttggaggaaagaggtatgcctatgttgttgtggatgatttctccagatttacctgngtcaactttatcagagaaaaatcagacacctttgaagtattcaaagagttgagtctaagacttcaaagagaaaaagactgtgtcatcaagagaattacgagtgatcatggcagagagtttgaaaacagcaagtttactgaattctgcacatctgaaggcatcactcatgagttctctgcagccattacaccacaacaaaatggcatagttganaggaacaacaggactctgcaagacgctgctanggtcatgcttcatgccaaagaacttccctataatctctgggctgaagccatgaacacagcatgctacatccacaacagagtcacacttagaagagggact

SEQ ID NO: 33607 - DNA, 441 bp, Glycine max
agcttgttatattgccgctgaagattatcatgagaggaaaccaaatgcttgtcgtttgatgtctgggaaggcattaccaatatcaacgtatcataagtggttggatagattgacgtctgatgttgtgtgttaaattccttatgttgaccaccgtgcaataagagaatttgagttgatctctttatttttcaaacatattagatgaagtccatcaattgtcatacaccaacctaagagggttgtgctacagtttgggtatgtttagaccattcctccacaccctgctactccatccctatgtatagaagatattgatgatagatgtattcagttctctgaataccttgcactggtgggtcaaatatgtgttacgcatagacagaatgcagcatactacatggagtgatcttacatgatatctcatcccttcatgagttcaca

SEQ ID NO: 33608 - DNA, 412 bp, Glycine max
  unsure at all n locations
ntgaggaagttccaactctgaagaaacaaaccttcttttgccattntgagggagctcaggatgaggaagagaaggaacaatcccctcaaggtgaggaacaagtgtcgaaagcggtcccttttaagaagccactggactatggctctttttatgaaacctcaaaacacttttctatgaaagagaagaacgatgaggaataccattttgagcctcaaaatgaggtactatcagtcgatgaatgtggtcaatctgctcagaattaagaagctgaagatcataacacaagagcttaaaatgctagatattagaatgaatacattcacccctatgagggtgtaaaggctgttaaagctcataagactatgggttctgaacctatacaagaggatgcaaatgtgaagatcattctaat

SEQ ID NO: 33609 - DNA, 445 bp, Glycine max
  unsure at all n locations
agcttagcgtgacaactctntntgaaccttcataattttctcccttttacctgannatgaagtgaaatttacattaaattcaataagaaggcttctattgagcacaaatgaaaactaaaatagaaatatttacaatcctaccaaaaattaaccataaattgggagatttatttacattntggaaacttttctatacaaaaaattagtcataaaagatgactaacaccacctgtgatcgattaaataatcaatgtaatcgattgtttcgaagaattaatcaattattntatcatttcaatctatcanagtgttattcccaacatctagaaagctctcaagaacaaagtaatcgattagattcttgatgtaatcgattaaagtgttcttgatcactnttgggaacactnntaagaacaaagtaatcgattaggatcacctggtaatc

SEQ ID NO: 33610 - DNA, 446 bp, Glycine max
  unsure at all n locations
tncatcaatttatctcttatttcagcctctgttgaagtgtcatcttcattcaccaatctggataggtggtccgctaccacaatttcagaacctttcttgcccttgatgactaaatcaaattcttgaagcagcagtatccatctgatcaatcgtggcttggaatcaactttgcataacaaatattttattgctgcgtgatcagagtaaatcactatctttgatcccaccagataagatcaaaatttctcaagtgcaaacacaattgtcagtaattctttctcaatggtggcatagttaatctgagcatcattcaaaactctgctagcgtaatagatgcgatgaaacattctgctcttctgctgccccagcacagcacctactgcataatcagttgcatcacacatcaattcaaactcttgtcgctagtctggtgctgtaatcacaag

SEQ ID NO: 33611 - DNA, 289 bp, Glycine max
  unsure at all n locations
agcttncattcttggttattattgtcttcaatctaaagaagtctttcacattcgacattcaagttctcgatgataagaatgtcatacgacgatttcgagcttcagatttctcagcgtgtaactctgcccatgtctgcgtgtctgattattatgaacacaacttcagatgtttatctgcttctggggtttttatgtgcatgagtgctcgctcctacccaatatccagagcctcgactttctgactaggaacattttggcatgattcttatttttaggtcattgtattcta

SEQ ID NO: 33612 - DNA, 465 bp, Glycine max
  unsure at all n locations
aagtcttcctaanaatattttgctagtatttatatgtttcacagggggggaaatccacttgattcaaactggacaaagcaaataattttcttggcatacatccttatgctcatttatcaacaaccccatgagagaagaatgagtcttctctatctcattttggctgtaactcatctcatctatgtaacgactcgccctttctacatgttcattagaaaactgatataaccaaaaactttattttacctcatgtacaactctccacatcaattcatttatgaacacacatatgacattttcacatttaacaaaccatcatctaaaacctcacaacttcaacgtaatgcatctatacactaatatcaactgaatagagccatgtattctgggcactacaacatgttatcataagatacaacatcatcagcactaaacacccaactatttagaactatatacacactc

SEQ ID NO: 33613 - DNA, 373 bp, Glycine max
ccttgacccaagagagaatgtcaatccttaccctctgaccaaaaaagaataaatgcgaaattccactcatataacaagagaaagaaaacttccaatgatagctaacaatagacaagaagggaacttcccctatcatagactgggagaaagcacatagaaaacaaccgaaatgtccagtcaagaatggcaaaagtcaaaaggaataagataacgaaaaaagctctgacaaggatcaatgataacagaaaaatgtcataaggtcttgaccgacatatctgaacaatcaaatgcacctatgacaaaagaagaaggcccacacctaaaggctttccttgatacaacaaatccggcgctacactttcgccgcataaaa

SEQ ID NO: 33614 - DNA, 578 bp, Glycine max
  unsure at all n locations
ccaccccccccccttatctcgncgtacnatacagctantctctctcctacacccnccccccccgcgcgtcggttgancttganaccctcgaaactccgaantaannaaatccannnacaanaacagagcaaacnnnaaatttatggggtatttgcgatgagagaccgcgctatagcgtatatataccatcatgtacctcgactttaggaaattaaatcgtcaccatcaaaaagggggagattgtccaagcaacaacttcgatgttttgatgatgccaaaggaccatgtgcttctaaagctcaattcaaaacgatcatgcgcttatcaagtctaatctcagaccaaaaaccatgaaattcaagagacatgaccaagatcaactctacagacgtatgaatggacactccagttgaaacagcaaaccgtctggccaaagaatataagttaacacgtctttacaagagacttactctctgcgaatcgactgctagacgattaaatcgaccaccactgcgccaaaacgaattcgaactatctatagcagctattacacatctgaattcaatctacaatgcgcc

SEQ ID NO: 33615 - DNA, 427 bp, Glycine max
  unsure at all n locations
atctagagtttgtgtgtgcgagngannnctctcacacgctttagaattcaatgtgttattgttaatcataccgtatatgtgtccatgctgaaggatgttcgttctcttacagttaatatattcattccccaacgtatatactctattagttcttacccgttgcttaagatcaaaaccactaaatgaanatattgtaattgactctagggtatgcaaaaaaatcatgtcggaaagagaatattcactgtgagtttactcatagtctctaacacatagttgtcactgctctaagcaagaacaacttcatatcaatatgatgttaaaatacaatcgaagatacacacgcatgtgctgattgtaccaataaccactctcaatnctaactaatgcacgagctgatactatcgactataaatctttacccgat

SEQ ID NO: 33616 - DNA, 343 bp, Glycine max
tacttcatcatacatgactcatgtcagcactcgtgttgtacgtataatgccaggcccgctaatatagcagcgtgtgaataaagcggaaccttttatcttacttttacttttaaacaagtgggtagcctttccaaaagtaacagtgaatactacaatataccagctctaaactactaatctctatgttctgcatggaaactcatgctactgcaatatgatcagtggtcaaaattatataccatactatgacaaattcatcatccgaccacaatcgatgtcatcgacagtgcgtgatacacatcagggattctattattgaaatatacaacaattggtaacaaaa

SEQ ID NO: 33617 - DNA, 434 bp, Glycine max
  unsure at all n locations
atcttgtgttatcaatggaatccaagattccatttgacataagtcgttcaattntgttcttagaaaggtgacctaagcacttgtgtcataatgctcctgagtttatattatcaattctacgcttagtaccacacaattctgcattaaaggattcaccatangaagctacagtatcaagtaaatatcaattatcattagccaagagtgaactggttccaacaatatctgaattgaaagacaacctaaatacattgtttccaaatgaacataagtaacccaatttgttcaaataagaaactgaaaccaaattccatctaaatgacagtacaacaaaagtgtctttcanagtaagaaacactgatgttagtagtggcaccagaatctaaccaccaagtgtttctaggtactggagctaaattgacctcagaacagac

SEQ ID NO: 33618 - DNA, 443 bp, Glycine max
  unsure at all n locations
taccttgaagacaagttgtagggcacgacttctctgaataggaaaactccgtggcttgcgcggtggcgcgacaagacgagacgccgaacgcgcaacaatgcactacgcccttcggccgaggtcgcggnggtgcgacggagatgcatgcaaacggaagaggtcacagcaaggtcacggtagatcgaaattntagagaaacggggaagcgggagctcgagtgcgagtgttcatgaattagcacgaaaaaccttataaacctcaatgttaacgatgatggctcaagaaaaacgtccttgacattcaaaatttcaacgacggtgttttcaaatacactgtcttaacttacctgctgcacaacctacaaagacagacaccccggtcaacgttgttaaatgtgtcacgtgccatgcacatggcacataaaatggtgacatatttacgga

SEQ ID NO: 33619 - DNA, 431 bp, Glycine max
  unsure at all n locations
ttcttgaatttgcgttctccaccattttttcatagtaaaacactggtaatatgtctactattattgtgatcatctctttctccgtcattggagatgccacttgagctgccaggtctcttcacctttgggtgtattctttgaaagatttgtgcccctttttgcacatgttctgtagttgcatcctatccggagccatatcaggattgcactgatactgcctaacgaaggcaaccattaggtccttccaataatggactcgggaaggttccaagttagtgtaccangtagcagctaccctagtaagactntcttggaataaatgtatcaatagttcctcatcttttgtgtatgctcccatcttccgacaatacatctntagatggttcttggggcaagtagtccacttgtacttgtcanagtctggcacattg

SEQ ID NO: 33620 - DNA, 458 bp, Glycine max
  unsure at all n locations
cattaagaggcttcctctanaagcttccttgtggcttctttgttaagctctctcaacaggcttctttgagaagctagatccttatctatccacacccctctattaactaaattaacttccttaaaaataattacggatgaaaataacgcaacaaataatcaaacatcaaacataattactaataatatatagatatatatatcaaggtgttacagtccccggacgaaattagggtatgacatatcctctggtcattgattaccaaagagaaaataccatatatttgaaatcacaaaattnttttataaaatatcctttggctaaacctgtgcattgtttgtcggtgaatacgattaacttttgtgtataaaaattgtataaattatatcaacctctcccaatctatgcgtattttgtagtgttataagtattttatgctaagcatacgtaataaatac

SEQ ID NO: 33621 - DNA, 329 bp, Glycine max
ttcttatcttgatcatcttaactcgatgtatggcaagtctccatgtggggttagctgaaacatggatgctatggtggcaagcacattacccatctgattttcctctctacgaatgtggtggaaagagacctcatcaagaactcaatcagtttcttgatgtacgcctgatagggtatcaactagagatccctagtttcccattctcccctcagctggcgaattaccaaggctgagtctctgtacactataagcaatatgacattaaagtcaattgccacttggattccgacggcacatgcctcatactcagccatagtattcgtgcaatc

SEQ ID NO: 33622 - DNA, 444 bp, Glycine max
ttaaaatctgaattaaaaagtccaataactgttggctttctataaccatatatgtgtaatcgattacacaatgcacattttgaattcaaatcttaatagctgttgtaaatcatttttggccactggtaatcgattacatcctctggtaatcgattaccatagagtaaatctcttgaaaaagactttttaacttgcatctcttggccaaaccttttgctacttcaattaagaattcccttcctatttaatatacccttcctaagactctagagactgtcttgatcatccatcttgaatatctttaattactttgtcttgaataaagctttgagaagcatgtgatccttctgcgtcatgaaaacattcaccttgatcctttgtctacaatctccgcctgtgcgatgatgacaatacttgaaataagacaagctatatacaatatga

SEQ ID NO: 33623 - DNA, 253 bp, Glycine max
  unsure at all n locations
atgcttaatttaggacncaaagacctttcaagctgagatgaactgactaatgcctccatgtgccacagaatccagacataaactatcatctcttaacgcctcactcttattatcatcatcacaccacatattaactttctcaccgtaggtgaactctacatagcatctctcacagttgtccatgggctattcctgcttataaacatctctaacatgatcacataaaccctaaacaaaatgggatgtctactca

SEQ ID NO: 33624 - DNA, 489 bp, Glycine max
  unsure at all n locations
ncgccgcccgcgtgagncttatttgatacctttgaattccgcgacctatgaatactcagctcgtccctcgtcgggactatgtttccacttgctaatctcaaccaccgcaatgacatattacacatttgacgcatgatacagtgcaaaactccttagaatgctagtaattgaaatcatctgggcataggatggaattactctattgagtgcgacatgcctgatgaccatagtgaatgtatgaatacatgcattctgacgatgccacacaataatctaacaaagtctgcttctttactacctccctaagagtccatgatacgctcgctacatattaatacccgatgcttatcaatcctcattgatcaggatctatcaagatctgcatatcctcaatacaaggtgtcatagctctacgctctgtaatcataccatgttggcactgatacccctgcagttttataataaattacagtgctttacatcattacg

SEQ ID NO: 33625 - DNA, 427 bp, Glycine max
  unsure at all n locations
ttcttggttcgctatccgcagactcaacagaagtcagttgggaaagaaatcagactatgtgcacgaatcttatacccagtgggttattgataggaccaagagctttggcctaccctaccgcttacccagatacctatcgtccaccatcccaccatcatccttgcctatcccctttgatactaaggaagagtttcatgaacaattaaccaaagaaaggcaagagaaagaaacttggaagaggagataccaggagctcgagcaagagaatgagattttgaaggggaagatagcccaacagagccgtgagctntttatccagaaccagaggatgattgagaaggacgacttgcttcgtcgganagacgctttgctccaccgagatgctagaagaaagaggaggtttatggatctgttctcccgtgcacat

SEQ ID NO: 33626 - DNA, 442 bp, Glycine max
  unsure at all n locations
ntacgtatgaactattaccctccttgcagcacacatgtgctagtacttggtttgagtccatagtctgacttaagtattatctgttaggaattttataattcctaattaattaatatgagttacatattatattataatatttatattagttatttgatatgtttgatataattcaatgagcggaaaccagttggtccattaggagataatgagaaccctaataggttaaaaccttggttattgttcccaatacatcaaatcaagaaacagtttttcctcttcccatctaaagagaaaacatagatcccataagaaagaaggtgatttggttgaggaaagtcattaaactaattgttcatgattgctgtaagattccgctgcgtattaatcaagctctgtggacccagatattccttaaaacctcttgatgatctgacctaat

SEQ ID NO: 33627 - DNA, 436 bp, Glycine max
  unsure at all n locations
tgcaggctctcacggnatgtacgcgaagatctagggtcaatggtgcaatatcatattgcgttacacaacacctaagaaaactgtgaccacctaattcattctactctattccacaagacgtatttataagatactgctaagtgccaatcatagatactcgcatctctgcataatacgtgttgttgagtataggaaccatgcttccttggttcatgctgattcttaagtagaatcgtctatcatatatactatatgaatatgaattcactatatgaatgctcaagttttatctctcataaaatactaatctgatcgatatcacatctcacttcattcagtctctacaatctagatatacttctggatcctatgtacataagctactactaaatcataactagccactccgtattgtggaagcgatctctaccttaac

SEQ ID NO: 33628 - DNA, 393 bp, Glycine max
  unsure at all n locations
tctangcgatggctctgtaagaactccactaccctagttagacgtgtgtttcatcagnccaagcatgactactgcctattcaccattagatcatggaataacttagtcattctactaatgcatatcgatgacatgatcctgtcaggaccaaattctagactagggcaagctagtgagacccaattcaatctatgtctcaattgaggatccttggcactatgaaatattatcttggcttataattatctaaatgcaacagaggtatctcactttcctagagaatatacactctatctcttttggaagatacatgtttattgacatgcaaaccgatcaatctatcgatggatcccagactagatacttactgcctgataaatcaatcttgatgat

SEQ ID NO: 33629 - DNA, 373 bp, Glycine max
  unsure at all n locations
agctntacattagatnttagtaatgacccactaacctagaattaanataacttaatgccattaacctanggaattaaaacaaacttaatggctgagtgtaactgaaattgttggcaaccaaaagtcacccccaacagccaacaagtcagccaccatttggtctcccaaaaggctgatgcctaagttgccaattgggcccttattacaacttgaactanagcccttttagttgattaacccanaacatatttttggtcagccaactttacaaggatngggccattatntagacaaactaaacactctaaaattgaaataaagtggtgtcatttagtccttcattngggccatgatacaactcacaaccttggac

SEQ ID NO: 33630 - DNA, 455 bp, Glycine max
  unsure at all n locations
tggtcataacgtttcactcggatgtcggattcaagcgcataatatatcgagacgctcgaaattgaacaatggaagctctcgagcaattccaatggtcataacttttaactcggaggtccgattcaggcgcataatatctcgagacgttcgaaattgaacaatggaagctctcgagcaattcaaatggtcataacttttcactcggaggtccgattcaggcacataatatatcgagacgctcgaaattgaacaatggaagctcttgagcaattcanatggtcataactnttcactcggaggtcngattcangcgcataatatatcgagacgctcgaaattgaacaatggaagctctttagcaattcaaatggtcataacttttcactcggatgtccgattcacgcacataatatatcgagacgctggcaattgaacaacggaacgtctcgagaaat

SEQ ID NO: 33631 - DNA, 446 bp, Glycine max
  unsure at all n locations
agcttgaatatgatgttttaatggatganaagaaagagagaaggggggagcacgaaattgaaggaataaaagagggagagaagtggaactttgaagtgtgtctcataagactttcattcattaaagttacaagaagtgttacacatgcttctatttatagactaggtagcttccttgagaagttttcttaagaaaacttccttgagaagcttctttgagaaaacttccttcagaagctagagcttagctacacacacccatctaaaaactaagctcacctccttgagaagcttccttgagaagctagagcttagctacacacacccctctaataactaagctcacctccttgagaagagaagctagagcttagctacacactcctataatagctcagctcacccncatgacanaatccatganaatacaaaananagccatactac

SEQ ID NO: 33632 - DNA, 474 bp, Glycine max
  unsure at all n locations
tatganaaggtttagccaaagactgtattntcatttgtctatggtccaatgagttacttcacatataaaggaaaaggaaaatatctgaatggaaacatcattgaaacatgtttagaagtattaataagatattttcactgctagatcagcagacctaactaatgacatgattttcttgttacttgtttcacgctgaatttgaagttgtatcaaagtcatgacttattagtcagtataatgctataaaatctgcaataaattaaaactattatggtttataactatttgaggctttctctcagtcatccaatcttgttgaacctaataggatgactatgccctgatgggagaaaaaaaggcgaagaanacaaacagatgaacttttcaggtacaaccattaatctatgtgaatatcanagtaaaataatagatacacttatgagttntgtggcctcagttaatagataaacatag

SEQ ID NO: 33633 - DNA, 434 bp, Glycine max
  unsure at all n locations
agctttctactctgtcttataacacggaatgagctctaccttagtttgttgctcttcttagtaagttcttaatcaatgcggtggcattgtccgaaggttcttatcaaattattgggtcattttgtccacttggctaaccatataaaagtatcaataagaattgtaatgtggggttccattgtgatgtggtagttgattatgctttacgtggttttgaagcatgacgagagttacacgccgagcatagtttccatccgtgccggtgatggttttcacaacttgaagggtaaattttagtttattggttgcgtttgattgtgatgatcatgcttaattatttggtgttgatntgcgaacattcttacgagattaagaccgtggaactcgtgaagccaactgtgtgggcttatctatccttgtctagagctgatcct

SEQ ID NO: 33634 - DNA, 475 bp, Glycine max
  unsure at all n locations
tagctacacgcaccctatntaaggatagcctatctatatatataatatatatctgaacatttattacaaaaataagggtaaattataaaagataaagaaagatgacaattacaaataattttttcataacatataatgtattatttggcatagcttaacttgaaaatagatctattaagacaatgaataaaataataaaactgtcaagttgtcaactgattaaagaatagtatattacgttacagtaaaaaaatagtatagtatagtagtagctttcaagtttttaactaaaatattatattttaataattaatataaacgtattaagtgagtaaattgtcacgcgtatgtttgtacataataatatatattacaaatacatgtgtaccagacgctcttagctggcatattgatttaatattgcatcatcacaagcatagagcataaactagcattatggttctctagatgatgt

SEQ ID NO: 33635 - DNA, 330 bp, Glycine max
  unsure at all n locations
agccngntatcttcaantttgtcnggggggagggacggggggaatatcatccaatgtcatatcttattctgactaaatcggctagattggaaaaattcatcgttctggttcttttaaaggtatttcctttttcatactattgtttagggaagcacagcccaaaatacctagtttaagttcatgatccacctgcggctatttccttccttggcgattgacatctgccaatacaactgtaatatacacatgtgatctttacattcaactgaatctcctcactaccactttgcgcaactacgacatttcttcttctgatatgatacctcacct

SEQ ID NO: 33636 - DNA, 475 bp, Glycine max
  unsure at all n locations
gaaactaagcttaacccaaatgtttaacacgagacgctaccttgagtgtctcttttactntcgnatncctagaaacaaagaagggtcttaacttttaagagattgtatgagaaagaaaaaagcaaaattatccttaaactatcacgcacatgatgaattatcgttaacaaaaatcaaactatgacagacaagggaatgtcattataatgaaattgtaaaagttatagaatttactatatataacaataatttacaacgagattctcttgtgataagtattaaatgaatgaaagataaatataatttaactctaaaatttaataatctagcaatctggattccctttcttaaggtgggagacatgttggctcttccaccttagctctcattgccaatatataatgtacctgtctggtcatgcatagctaagatacttttcacatctacagtgaagctctccgtatagctttacatc

SEQ ID NO: 33637 - DNA, 304 bp, Glycine max
tatcttatattatatgggacccacgagctcaagaccaacgaagaactgctgaaggtgccattccaactaactactggaaaagatatggacgcatggaaaatttatctgtctttacgatatatgttgtggaattccaagacgatgtgactacgactgaatggaatgcttatgcctttgctgttcattgatgccacctttatctatgtacagcgtgcctaaatcccataatacagtacaatgtgttatgtcaatggaccatacatggattatgttaatagttagaccttcataccttactcatact

SEQ ID NO: 33638 - DNA, 293 bp, Glycine max
ctgaagcatccattatccctagctatcctggatggttgcaaatactgccctaagtactagcgaaacaagaagactgacagggtaacgaagtaccacgtctctcaagagaaataacaagcgttgaagactaaactataaataaaaacattatttcattgtacaaagcatacctttcttggccttctggctaagatcaagtgtagcatctgttcttatcagttgaatatttgatatgtggaccattggctcacacgatattaaattaatcttttgagggggagggtccattatag

SEQ ID NO: 33639 - DNA, 451 bp, Glycine max
  unsure at all n locations
atcttcatgtttaactatgtatggcaaaacttcattactggtgttcaagatatacaagtgagcttgtaacaaatcttctacacttggagtgatcacctgcagtcctcttgaacccttaccacccactctgtcatcatgccgagactcangaagcccaacaggtttagccttctctaagtattctgaacaaaattcaatggcttcttctgcaatgtacctctcaacaatagatgcttctggatgatatagattctttgtataccctnttaagatcttcatgtatcgctcaaccgggtacatccaccgtagataaacaggaccacaacatttgatttctctgaccagatgcacaatcaagtgaatcatgatgtcaaagaaagcagagggaanatacatctncaactgngcacagttaattgcggcctcattntccaactcatcanacatgact

SEQ ID NO: 33640 - DNA, 450 bp, Glycine max
tagaagggatgaatcaaggatggaaagcatggtgttagaggataagttaaaggcttgtcagaggtcgaagagaagtttgacagaacagctgagcaaaatagaagagaatatgttgataatcattgatcaatataaggagaaggtgaacctagctgctagtcatggacatatgctggaaggtatcggctctgtagattgaaaaggaagcaagagagagggtgatagatttattgcacggcgaagccatgaaatggatgaatagattcgctctcactctgaatgagagtcaagagcttccaaggttgttagccagagccaaggcagtggctaacacatactcgactcccgacaaagtccacggtcttctcgattactgccaacacatggtcaaactaatgaccatataattaggattcgtcgaggcgtctgtgtatttatgctttgactctg

SEQ ID NO: 33641 - DNA, 436 bp, Glycine max
  unsure at all n locations
ttctntctttattatcctcatatttggaatcttgttgtttttgcatctccttggtccttattgaggtattatgtcattgtgatacttatgtgcttattacatgttttttgatatatcagtattgttttatattaaagttatgtgcattgtgagtgaactttagttttccgtttgagattcaatacaatgattaatatagataatttggacagtttacgaagagtcattttttatacataattcatacttataggttaagtatgttgtgttaaatttgatgaaatttatgtttattgcatatcgctntgttcttcgggtgcacacttgatcatggtgaattcatctcaccgctttcatgtcgtgtacttggagattaatgcgaaatggcttcaaaatttcatcacatntaacaaaacatacttaacttatacgtatg

SEQ ID NO: 33642 - DNA, 446 bp, Glycine max
  unsure at all n locations
ctagattgctcattagtgaggttgacttgatgagcaatgttgtgggtgagattgattcttcttaaatcggtggtacctctctttatatctgcagttctagcaattgttacattgaatttgaggcttccccttatgtcaacaatctttagacaagtcgtttgtccttttgcatgtagtgcaaggaggaaaattgtcccttgatataaattaggttgaactcccatcttgtttgccttttccttttgatcacctcctcttttacattgttgcttattttgatccttctgaatangttgcttccccttgtgtctagcttgaaatgtaccttcaattacatcatacagcctcatggaaaatcttagttcatgagcatgcaacttactcaccatctcanacatagttagtttcttaagatcacatgattcttcaatagtagaaactttggc

SEQ ID NO: 33643 - DNA, 435 bp, Glycine max
  unsure at all n locations
agcttagattgacaacaacttttgcaccttcaaatggtctcctttttacctggaattgaagtgaaatttacattaaattcatatggaaagcttctattgagaaaatataaaaactaaacaagaaatatttacaatcctaccaaaaagaaccataaattgggagaaatatatacatttttgaaaacttttctatacaaaagttagtcataaaagacgactaacagtaaggcaatgaaatgggaggaggcttgctatatacaatttcatagggagtagcatangcagaagtatggaaggtggagttgtaccaccatttagctaaagagagctaatgaacccaatgatgaggtctatctaaacacatacaccgaagataagtctccaaacgcctcttaacatcctaagtctgcccatctgtttgtgggtgataagagg

SEQ ID NO: 33644 - DNA, 404 bp, Glycine max
  unsure at all n locations
tgcaatcgattacacatatactgcaatcgattaccatatcatatcttcagacaatatcctcaacagtcacatgtttttatgtggttcttcgaatgactatcaaaggcctatatatatgtgactcgagacatgaatctgctaacagttcttcagaacacaaacgtcttatcctcttataaagcacaatcgtcttattgctcttacaacattccttggccaaattacttgtgatccaataacgaattttttagcgctcaaattgttcaatctatctctttccagagagatttcttcttctcttcttcattctgaaaagggattaagagacccagggtctcttgttgcgaaagaattctaaacacanatgaagggttgccttatgtgtctacaacttgcaaacgaat

SEQ ID NO: 33645 - DNA, 522 bp, Glycine max
  unsure at all n locations
ccgcgctgngcttganncactagnacnttcgaaactactnggcgattggacctgggaccctgngaacctcaacagccgacctgcagtcatgcacttcttgtttacgatcggctgagggttgtgacacgactgagcggactgtgtcaatctgagcctcaccattacatggcgacatgaaacaataaccttcactatcctgaatagatcgcgatatcctcactgacaaatagaccgattacaaggcataggaggatgctgaccaactttctatgcatgcatagaaacaggtcgctcaatttgctgagtctctagagcacgatgcggcacgantgacncatatagagtagggatacgctacgtcttactgaagcgatcttcatgatacgtatatgtgccaatatatctccacaatggattcacgaatgcgatctacttagctaagggtttgattgctcacctaaggctaccggactggacagcgatgccaacagacggtacattactggtgttgtctgacgaacn

SEQ ID NO: 33646 - DNA, 264 bp, Glycine max
  unsure at all n locations
atcataccacgtacgcatagtatcacaaaggtacaactcaggtatgagcttgtatcactacttataaatcaataatatacttttgcgtgaagcatatcatcaaacgttacatgatggagctcgtgtctactaatattcttatggagaaatggaaacttctggtgacatagaatcatatgaggatctatattaangttataaggctgacttggacacaaaatctaaagatgatacacaggctagtcaccgatctatcttttaatc

SEQ ID NO: 33647 - DNA, 371 bp, Glycine max
  unsure at all n locations
tatctnggagaggatgcttcaatggacgaaaagaaagagagagaggaagagagaggcggggagcacgaaattgaagaaggaaaagggggagagaagttgaactttgagttgtgtctcacaagactctcattcatcaaagttacaacaagtgttacacatgcttctatttatagactatgtagctctcttgagaagctttcttgagaaaacttccttgagaaacttctttgagaaaacgttcttgagaagctagagcttatctacacacacccctcgaataactaagctcaccttcttgagaagcttccttgagaagattcctacactagctagagcttagctacacacactcctctaataactaagttcac

SEQ ID NO: 33648 - DNA, 385 bp, Glycine max
  unsure at all n locations
tgtagccattagaagaggatgaacatgtgattggaagtatgactganaatgttagtaagtctgtcatattgattgtgaaggaatggatcgaccgtatcccggttagagtgtgatcgttaaattttaagagaaacgactattatttattactgatttttgcatgaatctctgaagtatgaatcgaatgcatgaaattgaggatgatgaatgccatgtttgattgtgatagccacttagccaaaaagttgaccacatgcttgaatgatttatcctttgcacccagtttgagctgaatgaattattgattgattgaaccctgtgcctatacaatgttatctcctgctaccttgacgtacgttgtaagagagcatcatcacatgaagcg

SEQ ID NO: 33649 - DNA, 352 bp, Glycine max
tatcttagctctgaaagaaaagatacgaggaagacaatatctccatttggtttggttggtgaaagttgaaaccttttcacgagctcaagttggtagtaactttcttaactcggcggtctctttttttctacatcgactctcgttgcgttttgcaaagatctgatctgggtcgtggatatttcaatgtgaaagttaaggttctttttgtcgcatagtaataattgaaagaaacaaaacaaggtgggatttttaaagggggtggtggagatggatcgttctgctatgactgttgggccaggaatggatatgccgatcatgcatgacagtgacaggtatgagctggtccgtgata

SEQ ID NO: 33650 - DNA, 417 bp, Glycine max
tcttaaagagtaagagacactctttatcattctctctttgtcaaatgtacttgccgactaagatgtttgtaccataactcatacattgacaatgtttatatttattttattttactaatcacatttacaacagaatgccttgaattgaaatttgatatatagaataaaaacattctttaataatagaattttaattcaataaaatgtattttggaaatgatatcattacataagactaaaattagttaaaatttatttatattttaatctatattgagatcgtttatctttgctctggaaggagtcctatggaaggaagatatagaaacgaatttactttgagattgaagaaatgttgattgtgatttgatgctagtagatattagttcactgatgtctagattctattctaagtga

SEQ ID NO: 33651 - DNA, 434 bp, Glycine max
  unsure at all n locations
agcttcagaccaaagctattcanaatctaggtatctaanacccctcaatttagtggaatttcaaggtttgagaagtgaaaatgagaatggggtaaatttggagcaaactctcacctcacacaagtctatatcatcaatctaaacttgctcaaactggtttttacgacgaanattctaccgaatcaaaatttgactcctcaacacccaattntaccctagaaatggctcttgccttcactttggtcatttgtttttctctcttgcacaacccaagctntctcataagtcctaaatgacatttcaaactaggattaactccctttaaccttcaaataccactaaatccagaattggccttcaactctanagcctcactctttcactcataacactacatttactnttaacctangtaactctaccttatcctacag

SEQ ID NO: 33652 - DNA, 241 bp, Glycine max
tctttccaaagcctcactcaacgactcgtctggaaattgacgaaaggatgagatggcacctgttccttcagtagtcttggactctgggaagtatcccttcaagaatctttcaaccacttcatcccaagtcttaagactattacctttagatgaatagagccatatttctgcctctacagacaaagaatatgaatacaagctcaatctaatagcatgctcatgcacaccagccagtatgaca

SEQ ID NO: 33653 - DNA, 459 bp, Glycine max
  unsure at all n locations
agcttcagttttantatgattcacttccaacggagcaggaatctcanagtagagagaanaagataatgcttcgaaaactcattntggcagcacacagaaatgtcaaaatctatgatgaacaaacccaggataatagttaaatttaaaagggttaaattggaggggggaaagactttctgctagattatcaggaaaaggtagagaaagttccatttacaattgttcttttctccatttaataaatagtttaacctcaagaaatattttcaggaattgatgttgaccacaacagcatggaacagattcaaaaaaggcattcanatcatattgaagcaagccattatagtaaataacaaagagaaagaaggctntanggcaaccagaatataccatatagaaatgttcccctgtggcatatgtacaaacataatcccttcagtaattttcaagagctagacg

SEQ ID NO: 33654 - DNA, 457 bp, Glycine max
  unsure at all n locations
agaaactaagcttgaagcctagagacngaagaatgaagaacacattttgatgttcaaattaacagatttgaattaatgtggtgtgttaaaagtagtgtaattcaaatgtaattgttcaattttgttaagattgtgaaatacattagaggttagccatagtagttggttgttaactaactatggttaagtcttacttagtgtataaatagcatgtaaacccctgcaatacggtggatgatcagtttttcaagcactaataaaattcccatatattcaaaagttgttattcactctttttctcccttgttcaatctttttcaagataccacctagaaatcttgatcctttccaacaagacaaagtcaagactaagccgatgttattagcaacagtccaaagttgtggcaatgtagcattggcttgaggctgatgtanacgtactattgaacttgactaa

SEQ ID NO: 33655 - DNA, 436 bp, Glycine max
  unsure at all n locations
agcttgccgtcacggagttntccgactatgctcttgtgtggtggaacaagctaaaaaaggagagagcaagaaatgaagagccaatggttgatacatgggcggagatgaaaatgatcatgaggaagcggctagttactcaagggatttgaaatttaagcttcaaaaactaaccacccaaggcaacaatggggttgaggagtatttcaaggaaatggatgtgctcatgattcaagcaaagattgaagaagatgaggaggtaactatggctcgatttcttaatggtttgactaatgatatccgtgatattgttgagctgttggagtttgttgaaatgaatgatttgcttcacaaagcaatccaagtataacaacaattaanaagganaggagtggctaagaggaagtttaccaactttggttcttctagttggaaagac

SEQ ID NO: 33656 - DNA, 476 bp, Glycine max
  unsure at all n locations
tcatgatgaatcaagattgattcaaggagttntgatgttaacaatgatgatgacaaanagctcanaagtcaagatcacttcatgataacaaagatgatgacattcaagaatgagttcaagattgagtcaagaacacttcaaggatcgagaggaaatttgatttcaagaatcaaaaatcaagattcaagattcaagaataatcaagatcaagattcaagactcaaagattcaagaatcaagagaagacttaatcaagataagtattaaaaagtttttcaaaatattgagtagcacaagaaattttcacaaaatcattaccaaagagttttactttttggtaatcgattaccagattatagtaatcgattaccagtggttntaaaacgttaagattntcanaattcacaatgaagagtcacatctgttgatgtgtaaccaattacaccattatggtaatcgaataccagtgactgttt

SEQ ID NO: 33657 - DNA, 449 bp, Glycine max
  unsure at all n locations
agcttgcttctgcttgtgtgttgagtgtgcgatgaaatagcatagaggaagtttgtatttatattagttgagggtgattgtcgatccttatttgtagggattgttggagctcggagcttatagataatgttaaagataaacatttgtttatagatgttttacctttgtagataatgtgtgagcttatagataatggtagagataaaaaattgcttatagataatgtgtggggttatagataattaattatttatcaataaataagatattcaaataaatntgaatattaacatgttagagataacatatttgttggagagcccagtactaaggatcatatgtccgtgctcatgtaaccggaacanacatggagggtggacatatatctctgaatgtgtcacatatattntgcggatacaaaacatatgatngaaaagattgactaatag

SEQ ID NO: 33658 - DNA, 472 bp, Glycine max
  unsure at all n locations
ntgcgggtagataactctagctcagattgtccttcatgtcattatctatatatatttgncatgatttggaaatgttgattagaaaaattgtgtggaatggcatggcggaaatatcttggcaaaagttttgtggccccaagaggaatggcgggttgggatttcgcaacttgcatgaatcgaataaagctttcatcatgaagttggcttgggggctgataaataccccgcatgcgttttgagttacgattcttacagacaagtatggttgcggggagaagagaaatgcttctacaacatggaggagtgtttagagattcaaatgggaatctacgcgcttgtagtgtcttcatgatacaattatcaactatccttatatctcttgatttggcttattacagggaagctccagcagtctcaatcttatgctaataacatcaggaatatattagcttctgatggctggagattggag

SEQ ID NO: 33659 - DNA, 408 bp, Glycine max
  unsure at all n locations
atcttgtgttaaanattntgatggggtgaaaaaaataaataacatgcaagttaatgaggtaattagcttatgcattcaaccactcaaaacatatataattccatatcatgcaagttaatgtgaataaaataaatagcatattggaagcaagtttcaaaaaaagggaggaatcagaagactctatagtgttacaaactataatataagaaattgttgataaataaactgcaaggggagcaaagtttcagaaaactgcttcacctgcagcttgacatattagtccttttactattaagaagagaanaaaggtaataccaaatttgacaaagttntttaggggcaagaaaaacactanggatagatagtgaattcaaaatagaaaaagtgataattatggctctntatcac

SEQ ID NO: 33660 - DNA, 419 bp, Glycine max
  unsure at all n locations
tattattatttatacatactaacaataaggtacattaacttggtaaattaaattatcggcgtaaatgtacatcaatataaatataatataataaaatattaacaatgttgttaatggcggaaagccaaaaattcactataaaaatatggcggatgacgtaacagaaaatgacggatgtcatggcgaacaaaaaaaaaatacatatttataaagtcactgaaattgaaaaaaacaatggattgcattcaaataaactaaaaatgtttcatgagttcatacaataatcaattatcaataccaaataaactcattaaagagttcacaataagaaaatgataaaaaataaaaggggtgtcaaatatcaaaaggaaaaaaaagctgcaaacaaaaaaaggggtgtcaaacagcanaaacaaaat

SEQ ID NO: 33661 - DNA, 447 bp, Glycine max
  unsure at all n locations
atcttgcattgcagtagtacttgtaatagtgactcctcaagttcaacccttcctgcatggctccaacagtacaaaaatgagaataaaggaatcaactataatgatcaggtcttcattattattatcacaatcagacacgttgataagaacatgatggatttcattcttgttatattntattctgtgttatcatgtcatgtttgcattanaattagagaaattcaggctacaaaatttaaggattttgacactattactattactgagaaattctctctctctcttnttggtttttctcctttgtatgtgctcaaactcataattcanaaaanaatacaccaaatatntattattctaaacgctcttaatcaatatgtcttatntctctatatntctctctctatcanatcatagantttctaatattntaattttttctctttaatt

SEQ ID NO: 33662 - DNA, 469 bp, Glycine max
  unsure at all n locations
tcatcagatgttgcatttcggtatcagctcctcttatttaagaacgatatgcacttcttgcattgtaaattagctttatcgtggtgcaactgttggcattgtgttccttcaacgttagtaagatgttttttggtttcaccatcgactttgtcatatcagcaataattttcttttcatccttagtcaatcgctcagcgtatggatgtccaactaaggacttggccaattcatgattatgaataccacaaatcaacttcaccatccaaccttccnctccatgcactggtttcccacgaagcctgaagggacaaccacatttcctactcccagtgtcttttctaatgaattctttattcctacacttgtacgtaccactcctttcacacncaattaagacaaatgaacttcttcctctgctatcggtatctgtgtcagacctcataatcattgcaacaaatccattntcatt

SEQ ID NO: 33663 - DNA, 390 bp, Glycine max
  unsure at all n locations
ttctngccatccagctcgcccaggcgagccaggttgcttcctccagaagcaaccgccttctggaggaagaatctagaaggcccaagtgggtctggttgctatttgcacctttttttttttactaaatacacccctttgctttttttggtgattctttttctataacgttacaaagttttacgaatttcgtaacgatacttgttatctttccgtaaggttacagaaccttacgaaacatgtaattactccctttnttagctttcgaaatgttacggaaactcacgaattgcgtaacaatacttcttttgatttcagcatgttacggaatttcacagatggcgtaacaatgttntcttttgatttccggcatgtctcgaaacttcatgtatg

SEQ ID NO: 33664 - DNA, 452 bp, Glycine max
  unsure at all n locations
tgctacagatattcttgggcctgtgttctgtgataagttacggtgatacacactgacaaacttgtcatttgtgataagctgcaccagtatgaaacaaattgattaatcaactgattttgctttttctgaattcaggtatttaattaaccaaaggcgtttatggagctaaagaaacacatttagagaaaacggtttatcaatcataaggtttaactatatatatatatggtcacggacaggtcaaggagtgtatagaaggggagagggggcaatatttttacataattatataatatttatgttntaataaataataattttaaaaatattgattattaattctatgaataacattagagatatatctattactaattcttttaagcaaatattatctcaaaaatatattctttatatagaattttctttaatataattttttatatacacac

SEQ ID NO: 33665 - DNA, 419 bp, Glycine max
  unsure at all n locations
ttcttgtttaccccatgttgagtttgcttacaataaagctgttcatagcactactaattgttctccttttgaagttgtttatgtttttaacccactaacttctcttgatcttttgcctatgcctaatgtttctatttttaagcatanagaaggtcaagtaaaggcggtctatgtgaagaagcttcatgagagagtcaaagatcaaattgacaggaaaaataaaagctatgctaaacaagccaacaaagggagaaagaaggttgtcttcgaacctggagattgngtttgggtgcacatgaganaagaaaggtttatggaacanagganatcatagcttcaaccaaggggagaatggaccatttaagtgcttgaaagaatcaatgacaatgcttacaaagttgagctacccagtgagtata

SEQ ID NO: 33666 - DNA, 469 bp, Glycine max
  unsure at all n locations
gtgtntgctccgtgcccctatttaagggacctaanaggtatagagctaactangcatttagtgataacccccaaggtagtcatatctctcttgatggtctctagaggtatcatcccctttgaagaacatattgcagtagtagggactactagcaacaataagttttcaaagagaaaagctctagatgagggttcactgtaatcaagcaagtcggagacctagcatgatcacagattcacctccgctccttatgttcccatgaacccgggtatagggcactntttccactcacagtgtgtgcaaatagtgttggtgtttgtgtgcatcanatgaataaatatttacctcatgcatacattntanaacgcactataagcaacaaagagtttatacacacaagcacataagacaaataaagggaaaccaacaaaggagaaagtcacgataaaacattgcacaagaattaaat

SEQ ID NO: 33667 - DNA, 442 bp, Glycine max
  unsure at all n locations
ttcttgccatgatcatggcagacttcgaggcctggttgaaggagttagagtccaagctgaaggagttcgagcagcgggcgactagggagagagaggtcaggcagcaacttgaagaagagttgctgatctacaagaatgaggttttggagcagcatgagaaaggctntaaaaaggttgtcaagcaggccggattcttccaaaaggaccttgacttgcgtctttttgaccctttcaattgtttttggaaggttattatgactgaatttgattgtcaatgttnttcacaagacctagtcaattacccatgcatttagatntgtcgtgctcatctttatacatgttctanaatcacttaataatatggttattagttntaaaaataaataatanaacatatganaaactaaatattcaaacaatataggagaaatctttgtcgagt

SEQ ID NO: 33668 - DNA, 442 bp, Glycine max
  unsure at all n locations
tcggaagaaagtgatgaggtacaagccctaaaggcagtgcttgaaagagcccgagtagtcgaagagaagttcaagtccatagccatcaaagtctgaaaagagtatgatgaactaagggacgtcaatatggccaccgctgatgccttggaacgagaaaccaagaaggcccaaaaggaagaacacgtgccagcaaagttttgaggggctttatagggcagcaatagtaagctcaagctccgaagaggtgaaaggaatcatcacgggtcagaggcatgatcttgaaggacgagctaaaggcttaccttangtcgaaaagaaatttgtcccaacagttaagcgagactgaagggaatatgtgggccgtcatcgatgagtgcaaagagaagctaaatctagcggcgactcacgaacaaaggctagaggatgagtacgccaagatatc

SEQ ID NO: 33669 - DNA, 275 bp, Glycine max
gcaataagctggaccgggatcttgagcgactgagtttgcagctgattcaacaggggagcactgcgggcgcggatcaaaaaagagtgcggaagtcaagccgcccggactcgagaactccgtctatgatccactaacagacacggcgcctggtccaaccgcgcgaacgcttgcctttcactcgatcttcttcttatctaaacggatgtgaaaaaccttatttacattcgagtgcgcgctctcgcactctcaggtggaaagtgtcgctcccccacgcg

SEQ ID NO: 33670 - DNA, 440 bp, Glycine max
  unsure at all n locations
agctntatgtattgtaaatacagagatttttataaaaagtgtatcctatctagagtagggatggccaaaanaatccacgcctgtggatatccgcatataacatccgcaatgaatttgaaacgggtagtgtaaatggatatccgctacctgcagatacgggtatttcatctacctattagttaatgcggtgggggaggatatcgtagtcccttgcaccatgggtacccactacccgtagaattaccaaaataacctcatatatatataacttcgtacccattgcccagaggctcttcgctatgcgaaggtatggtggagggatattgtacgcagccttacccttgcatatgcanagaggctgtntccggattcgaacccattaccaaaataacctcatatatatatatatatatatatatatatatatatatatatatata

SEQ ID NO: 33671 - DNA, 455 bp, Glycine max
  unsure at all n locations
tcacaacgtaaggaattgtcccagtggcaaactgtcgatatcacctgccctgtctccgtatcccaatacttaatattcttgtcatacccagcactcaaaaacttggtcccatcattgctgaaacagatatccctaacggctntcgagtgtcccatgtaagtcctcatacacttgccagagttgaaaacatcccacatcttaatcttggtatccatgccagcagagagaatcaaatggccatacttggggaacaacctaatagcagacacccctttggtgtgtccactccaagtatgaatcaatctctcgggcatataacaatgatcattactcgcctttgcatccttgngaggcgcgatccaagacctaccttggtaatccttctcctctttcccatgaaaaagtgctttatctttaacaacctcaactnttctccctccanaaccactcttctc

SEQ ID NO: 33672 - DNA, 437 bp, Glycine max
  unsure at all n locations
agcttgngtgatgttgcgcgtactgatgggtaccatgaggtgtttgctgnggtttgacccatgcgggtgttgaagagacggcatgggcatctccttccttcctttntgcccctgttgccccgattcttttggcgttcacgtttgtggaggaaacgtaatcaaactttcctctcttcaatccaacctcgattctttccccggcaaacaccagatccgcanagctggacggcatgtaacccactagcttctcatagtagaacactggcagagtgtctaccatcatggtgatcatctctctctcaaccatgggaggagctacttgtgccgccaaatccctccatcgctgcgcatattctntanaggtttcaccctctntcttanacatattctgcaattgagtacggtcaggagccatatcagaatngactgatactgct

SEQ ID NO: 33673 - DNA, 445 bp, Glycine max
  unsure at all n locations
ntctggagtagaaacatgggaccaactcattttatttcaaaaaggaagtcgtatctagtcaaggtctgagagaccatacaagtttcctaacgatttctaattatgtgggccattaagtctatcatatgctgacaatagccgagaagcccatgaatctcttcgggggcggagtacgtgtctgccatcgccttggccttggctaacaatcggggaagttcttgactcccgttcaaggtaagagcaaaccgatccatccacatggttgcctcttggtgtaaagagtcgatcacccttcctctagcctctttttccgcgtatacttgggcatattcgtccgcaatcctatgctcgtgggccgcggctagacctaactcttcttggtacttggcgatgatagctagcatattggtctccgtctcgcataaacgctgagacaagcttcttt

SEQ ID NO: 33674 - DNA, 448 bp, Glycine max
  unsure at all n locations
cagcatccaacttcgcatgagcaccgcctatcactctanaatcgatagattgatggagttcctcaacagtacgttggaacaatatctccatgcctttgtgcattccaacccgtcgagatggggaaaattcctcacgttacagaatggtcttataacaccgctgttcattctgccacaggactgtcaccttatcaaacagtttatggtaaacctcgtccatccattccccattatttgcttgggtcctctactattgaggctgttgaccaattgctttcagagtgacaagctatgttgcaagctctccataagaagcttttcaaagctcanactgctgtgaaggtgcaagctgacaaaaaacgcatggaagtgtcctatagtattggtgattgggtttatattcgttttttcccctaccatcaaacgtcagtttccaggatgacatata

SEQ ID NO: 33675 - DNA, 472 bp, Glycine max
  unsure at all n locations
gctcacgcttatacaggcatggngatgtcaagtgccaactattccacgccacacactctgctctttgcctccttgngcctntcttatcctctgccaactcttttaccctttctctttccactcttctttttcaaactaacataacaccttgaacgtgacttccccatttggaaccaaacaattagtccaaaatagatagataaatattcttatatcttaactactttttctttctttatttttatattcagcttcttttttcttttaatttgatttggtactagttctgtatattgcatcaagcattattcttctcttttatctttccgttttctgaatgttttgtccatttctttggatgctattctataatgacaatcacggctcctttttttcttccctctctanactaaaatatcgagtatatgcaatccgattcttatgtagaaggtctccacactttcctatatat

SEQ ID NO: 33676 - DNA, 327 bp, Glycine max
  unsure at all n locations
gatactactacaatacaaaggctaagatgagcggcacgcgccatgtattggtagtgggattagaactttgcttgtatctttctgtcatcctttacctcgcacttcgggaactgctgccactttcaccctttggattctttccttctcaaaccacaaagcaatttgtccaatttggatcacacactcacatacagccgattagaaagaccttcgcatttcactatttcttctcttctcacacaagatacatangattttcttcttctgctaccttcaaacatacaagaagaacatgcccctatcgagttacgtgactcactcacacat

SEQ ID NO: 33677 - DNA, 493 bp, Glycine max
  unsure at all n locations
gctctttctcctaagatttaatcggattatttttttgaatctactctgaaaagctctaaacctcatgacaatggaggatatacatggagaataagatcaagaacaaggaattaaagtgaattgaccgaacaaaaagatagaggcagaaaaagaacatcacatagacaaagatgctcttgataccatatgatgtagctccatgtggagcttgtaggccttggatcttcttcatcaattgagtcctttgcttcttgaagattaatggcagcagaatggagaaggaagaaagatgattggagatgccacttcaaggagaagatgagtcaagaacaagctcaccaccatangaagccatggataaaagcatgaaggtaggagaagatgagtggagagagaatgagagaagaagcacgacatcttgtgcctcacatgaggtctgaactntgaaatgtaattctcacatgatcaaagttggaacaatgcacacacaacg

SEQ ID NO: 33678 - DNA, 359 bp, Glycine max
  unsure at all n locations
atacaatccaagttggaggaatcatccaaatctgagatgggcaagtcctctacacaacaacagcctgtcccttccttctagaatgctgctggtccaagcaagccatatgttcctcctccaatgcagcaacagcagcaatcacaacaaagacaacaaacacctgaggccccttctcaaccttccttananganntagtaaggcaaatgaccatccagaatatgcaattctagcaagagacaataacctccattcagagtctgaanaatcacatggggcagatggctactcanttgaaccaagctcactccccaaattntgacaaattgccttcacagactatgcagaaatcgaaaatgtg

SEQ ID NO: 33679 - DNA, 566 bp, Glycine max
  unsure at all n locations
cgccgcgcancattgagaccgttngantttgcnnnacnntgtatacacttgtgacactctacaanactcaagctngcacagaggagcngctaacaaatttgaaacnccnctcattttttacgatttatattcaacatcttctcatggctcagttgaataaaattctttattaaaacgactcaatccaattgctctctatatgatctattccaacatgtaattttaccttgaaatatttcaactacatgattaaaatgaattacccagataaaagtgatcatctaaacacactcttagtgactttatccggctcgtctactggaatttacgtgtattcgagacacgaaaaattacaacatacctcaaatgttggtcaaacaatatgaaatcgacgagcacacaatcaattcgtgcgccaattgttacccaatcatacagagcagatcaatcaactctataacgtagagcatcgtacaataccaagctcacccgcacaaaatcaatcacaattttttagtgcataacaatcgtacagtactatagtcacgagtacatgcctgaactcg

SEQ ID NO: 33680 - DNA, 436 bp, Glycine max
  unsure at all n locations
tcactcctatatctcatctctagcttgcattntctttctttacccactcctcacgtttggttttttaaggaaaacaccataactaaacgcgccgcaagggatccctatcgcaccagatccaaatctagaacgatgggtgatcaaaaggagacgcangaacagatgaaagccgacatgtcggctctgaaagaacaaatggcctccatgatggaggccatgttangtatgaaacagctcatggagaagaacgcggccactgccgccgctgtcagttcggctgccgaagcagacccgactctcttggcaactacgcaccatccttcctcanacatagtaggacggggaagggacacactgnngcacgatggcagccctcacctgngatacaaccgagcggcttacccttatggattgccgccaactattcccacccatc

SEQ ID NO: 33681 - DNA, 368 bp, Glycine max
  unsure at all n locations
cccatctgacctactagcccaattaacatcgacactacccgttgaaaggatatnaggtgatacaccaaagcttccaaacatggaagcaaccatgagaggtgtcctctcttcataacctatnttcttcgaggcaacacaccttccataccaaaaccctaccccatcaatatcatgaccctccttttcaaccgcatctgtgaaactaaccagatcatctgctgcaaaaaactcaagcaaagctgaaattatatgatgcatcccttcttttgcatactcctccatgaccaaaccaaattgagaatgtctcccttggaacaccgacatggagaaataaatattccttaaaactcggcagatctgacaatcac

SEQ ID NO: 33682 - DNA, 474 bp, Glycine max
  unsure at all n locations
tctatagatgctggatctttgattcttaatgaggtctttcaatggtgattttccaccatggagatgcagcggaagataatagagagaaggtgaggggagacgccatccactagggaataagccatggaagaatgagcttcacctccaagagagtgccttggataagaagcttagagaggaagcttcagtggaggaaaaaaaagagagagagaaaganaaagggggtgagcatgaaattgaaggaggaaaagagggagagaagttggactttgtagtgtgtctcacaagactctcattcatcaaagttacaacaagtgttacacatgcttctatttatagcctangtagcctccttaagaaaacttcttgagaagcttcctttagaagctagagcttagctacacacacccctttaataactaagctcatttccttgagaagatntctggagaggctagagcttagctacacaca

SEQ ID NO: 33683 - DNA, 368 bp, Glycine max
  unsure at all n locations
attggtatttaaaatttcatttttaaggtttctntaacagtttaataaatgggaaaatattatatcacttataggtacaatgccaacaaatcaatggacaattgtgccttttgcaatgctgatggtgacttcttgatagttccccaacaaggaagtaagtcactacaacaatttccttgatggttcaatgttaactaagacagttgtgtttgggtttaatttcattatacttgtgtgcatatagatctctctgcacctagataatatgcttgttgatctgtgccaatgaacttggctggacttgaatataaaagaaatttcttaattgaaggatgcaatgcatatgaatgacacatattgttcttttc

SEQ ID NO: 33684 - DNA, 315 bp, Glycine max
  unsure at all n locations
aagttaagatnattanaggaattaaaganaaacaanagataggaagtgagttatttnattnntaantaatgaagagaataaagataacatgtaggtataaatatnatataaagaaaatacaacttatttaagcatgacttacgttatttcaccactttgtcgcataacattacctcgcaacaccacacatttcatttattttcacaacattcacgtactcaaggatctaaacacaatatcatcaagtcaatcaatatcgatcaatacacaagcgttatgcaacatatacactaaaacttaatcctatatgcaagt

SEQ ID NO: 33685 - DNA, 469 bp, Glycine max
  unsure at all n locations
tgctgcanacatctacaacagacctcctcaacctcatcaacaaaatcagccacaacataataattatgacctctccagcaacaggtacaatcccggatggaggaatcatcccaaccttagatggtcgaatccttcacaacagcagcaacaacaacaaccttattttcaaaatgctgctggcccaagaacaccatacgttcctccaccaatccagcaacaacaaaaacagcaacagccccagaaacaaaaaacaattgaggcccctccgcaaccttcccttgaagatcttgtgaggcaaatgactatgcaaaacatgcagtttccacaagagaccagagcctncattcagagcttaactaatcagatgggacagttggctacacagttaaatcaacaacagtcctagaattctgatagaataccttctcaatctgtccaaaatcacanaaatgtgagtgcgaatacattg

SEQ ID NO: 33686 - DNA, 461 bp, Glycine max
  unsure at all n locations
agtctacacagtttgagtcgcacacttattctaagcactttcttttctatctttgtccttcaaaagtgagaacacgaggtggttattcatagagaaaatggttataacctcttataatcgattaaatatccaatgtgatcaattattttaaagaagtaatcaattatattatcatttcaatcgattaaagtattcttcccaacatctgaaaaactttcaaaaacantgtaatcgatttgattattgatgtaattgattaaagtgttcttgataacttctgggaacacctttaagaatgaagtaatcgattacgatcatctggtaatcgattaaagtagagactcgtgacatatcagacatggtctcaactaaactatataattgattaaaccgaaactagaatntctctgcaagctacacatactcgtgtaatcgattacgataagccttgtaatcgattc

SEQ ID NO: 33687 - DNA, 407 bp, Glycine max
  unsure at all n locations
attatcttcgagactcgtattgtgagtcagatcaaatatttgatgggttactgaattcatattattccggaatgaggaatgagattcaacactcacatcaacatcatttgcgacaggagaatccggaacagtgtactctgtaagctcctcaccagagactgaggttgataaatactcaancgctgtcttatcangaatgctggactcttcaattttctcaagaggctggtcttcatgagtagctgtattcgatgggatccaggatacaccagtagatgttcttgaatgagaatggctctcaacagcttccacaaaacttacagagaacccaacctgacatgtttctgatgctncatgatcattgctgacatatgtggctgcgaatcatatgccaatataccaacttg

SEQ ID NO: 33688 - DNA, 478 bp, Glycine max
  unsure at all n locations
gcttgccatgttaaaggagaaagcatcacatccttttaaggctgannttattcagttctttctcttcatttatgtgcttaagcaacggaagctgaaccaatatacctgcggatattaacaaaccaagcctcacaataaaaaaaaaggcccaaaacaaaaaagtgtaatcgatattaaaaataacacatgcatgaattgaaaaagcatgtgttcaggcatgtaaagtaattgaggcacaaaaatgtgaagttaattgataagtatgatgaaaatcgaaaagagtgtaataagtgacgaaccatgtacatcanggttaacattcaactcgtgaacttgttttattagttcagcttgcgagacttgttcgggaaggtccacatcgaaggatttgattcccaattcggcgcatgcctttctcttcattcccacgtagctntgtgaatcctttctgttccctactatcacaactgctagtccc

SEQ ID NO: 33689 - DNA, 340 bp, Glycine max
  unsure at all n locations
aagctatgctgaaacatctaaacacaagcagaactatttttaatganaacctcttgcataagcgtaaggcttaactatcaagagcagaagcaaaacgacgaatgaatgcttaaccatccatgacgaaagcttcaacactgctgaatcatcatggacagaaccttacataaaaagctgctgagccaacaacaccatacgttcatccagacttttcacaaacactttgtgaaccaataataaccaacgcttaaccactcatgacaaaagctaaaatcatcaaaacatagctaagaggctgatgacaataacctacaacaggacaaatatcaataccacaatg

SEQ ID NO: 33690 - DNA, 443 bp, Glycine max
  unsure at all n locations
acataccanatgttggcctaagtaatttgctataatgtattacggttatgtgtnctaattngagtttatgaaaaatgacaaggcaccatagcatttatgtaatgttgagttatagttgggaggtttctttcagtactattattaattctgtaaatcagtgatttgtcctttctttccttccattccaatattgcattctcgaccactatgatttcttcatagtttcttattttcngttgtttatccaaacaataggggtggtcacaggtcggattggatcagatccgtggcattntccgatctgattcgatcaggttcaatttggaatggaatttgtctagtttaagtatgcaatccgaattgcagtggcaaagcttccgacaaatanaattgactaatgtggaatattatnggtcacttattcgcatttttaagtaaagatt

SEQ ID NO: 33691 - DNA, 441 bp, Glycine max
  unsure at all n locations
tgccacccagctcgcccaggcgatcagggttgcttcctctagaagcaatagccttctggaggaatcttctggagggctcaagtgggcctggttgctatttgcacccncatttttactaagtacaccccctgcctttttttggtgattcttttttcgtaaagttacggaaacttacgaatttcgtaacgatacttgttttctttccgtaatgttacggagccttgcggattacataatcatccccttttttgacttacggaatgttacggaacctcactaattgtgcaacgatgctcccatttgatttccggtgtgtcacggaactttacggatngtgcatcaatattttcttttgttttccagcatgtcccggaatntcacaaattgcctaatgatgagtgccaagcacctcacaaggaccanacaaaagttgcatgtcat

SEQ ID NO: 33692 - DNA, 328 bp, Glycine max
gatagcttctgccgatggaacagctaccggagagacgtcttactgaccctcgtttaccaatgtaagttctattgcgaagaaaaacttggttgaggcaatattgttcaatatgactatataaaggccacacatgaaagtaaattatgttctttgatctattgagatttgggtcatacaacagggaaacccatatccttgccattaatccatccttgcttcagaattgaacctggaatctccaagttggggtgcctgatccttactcattgaagtgtctgattgggtttggatattttgcgttggtgaacaaatcttcaagaacaaatct

SEQ ID NO: 33693 - DNA, 459 bp, Glycine max
  unsure at all n locations
ntcactacagctgtctatcttattaatagactttcgttgtcttctcttaattntgaaactccttactttgtcttacatggcacacaccctaactattcatcgctatgtatctttggttctaaatgttttccttacacttgggatgcacgacataacaaattcgaccctaaaacccttccttgtgtgtttgttggatatagtgatatacataaaggatataaatactttcatccttctagtaagaaattttttatctcatgacatgttgtttttgacgagtcattctttcaatataaaactaattgtcatcatacaatttcctctcctacacagcatgtagttagcataattgattcttggctacctcatactaactccagttcttgtgcagacctaacaacaataacaacagctnntgcttccgttcaccatgctcaaatctttaatgaatctcttgct

SEQ ID NO: 33694 - DNA, 437 bp, Glycine max
  unsure at all n locations
tagatgaatcatattatttcaaggctgatttaagctttcttgagaagcttctatgaagggtggatctttgagctttaataaggttcttcaatggtgattttcagccatggagttgcagcggaagataaaggaaaagaggtgagaggatgcgtcatccactagagaataagtcatggaaggagaagcttcaccaccaagagagtgccttggataagaagcttagagaggaagcttcaatggaggaagagaatgagaganagaggcatggaaattaaaggagaatagggagagaagttgaactttgaagtgtgtctcagaagtttctcaatcatcaaagttgtgacaagtgttacacatatttntatttatagcctangtgactaacttgtgaatntcattntcatttcatgtgaatntaaaagaaatattccaagaat

SEQ ID NO: 33695 - DNA, 386 bp, Glycine max
  unsure at all n locations
tgatttatgaattgattttagccttagttttactntgtttattagtcaattcgattaagaaagaaaatcccaaagaaaaaacgtccgattgatttttttatattattttattcaaagatattttttgattattatattattattttgcctctttttggttttaaacgtggctacgccatgatagatcggtcggatattattctaacagagattaaaagatgttacaactcaaatgatcggtggaaatttattttatttttgattaggcgagaaaataacataaataaatgactaaagcacgtcaaaagggggtacggaaagtaaatgaaataaaaataaaagcatgtgaaacaagtggggaccactaagggcacatagaatgaatt

SEQ ID NO: 33696 - DNA, 445 bp, Glycine max
  unsure at all n locations
gaatattgttgtagaagtctgtggaggcttcattataaaataaaaacttcgagtgtttggtcttagtggaaagcctaaatgtgtaggtatgggacatagcccagattgggttgaactagtataattctttggtgtgttgtttcctttcttacctcttaattatcatttgttgttgcgcacttaaaatctgttttagaaaaacctattttaaaaaatattaatattgattcttgttcaaaaggtttttataaaattgttttatcattcagaagcaacacctactttgagtaagaaaaaaaatagaaactactattttgcagattntgtagctttttcttagtaggttnttaagcaatattgaactgcaagactacttggaagatttacttgaaatattatttatcaatacttgtaatacacaaatactcttgttgactttgattct

SEQ ID NO: 33697 - DNA, 416 bp, Glycine max
  unsure at all n locations
aaggcgcaaaatctgtctctgcgcatttatcacccgcctcactgctcctgaatgataaagggcgcaaaatctgtctcttcatgtttacccaatcagcttgttgttcttgaatgataaagggcacagaatctatctctgcgcgtttagccactcaacttgttgttcttgaatgataaagggcgcagaacctatctctacgtgtttacccactcaggttgttgttcctgaatgataaagggcgcacaatctatctctgtgtgtttacccacttagcgttgtgttcctgaatgataaagggcgtagaatctatctctgcgcgtntacccactcagctcgttgntcctgaatgataaagcgcgcagaacctatctctgcatgtgttaccacccaacttgctatcatgctttgagtcttat

SEQ ID NO: 33698 - DNA, 463 bp, Glycine max
  unsure at all n locations
gcttattactntcatggnttattatgaatcttctgcagattctttatgtncaagaaagaaactaattgtgctcattatttctcaattgatttacaatttcattgaactgtcattntctcttgttgtgttcttatataccctaatctttttttcttttttttttaaatagtctttgggaagatgcatcgcttttacctggctttcagcttgtttaaagaccaatcagaagttttgttctatactctatagtgctaaaaaaatggagtattttgcatttggaattttggattgtttctctgaaatatcaaaccctgtaaatacagtttactggtttgctctaggtgaatagaagtgtgcaagtgcaagaacaattgngtaggaaaagtctttttctttctagataacatanaatgggagactgtattatttcggatcagatattcattntttagttaatgctctg

SEQ ID NO: 33699 - DNA, 475 bp, Glycine max
  unsure at all n locations
tttgaaagcatgtaatcgatacacatgtcttgtaatcgatttccagtgttttggaatgttttacaacaaccataaaaaatttgaatttaaatttcaaagttatgtaatcgattactagtgtttaaatattcaaatttcaaatgcgaagagtcataactcttcagaagtaactatgtaatcgattacaccattatggtaatcgattactagtaaggattttcgaaaataattcccaatagtcacatcttttcatttaaattttgaatggccatcaaaggcatatatatatgtgacttgngcacgaaattntcttagttntacttgctcaaaaagtcttatcctctcaaaagattcaaagtgtcttatcatctaaaattccttggccaaaacatttgtgattcaataaggaattatttgagtgcttcattgtacaatctatctctntcaagagagatntcttcttctcttcttctta

SEQ ID NO: 33700 - DNA, 457 bp, Glycine max
  unsure at all n locations
ntntggagtaganacatgggactcatctcatttatnttanaaaggaagtcgcatctagtcaaggtctgagataccatacaagtttcctaacgatttctaattatgtgggccattaagtctatcatatgctgacaatagccgagaagcccatgaatctcttcgggggtggagtaagtgtctgccatcgccttggccttggctaacaagcggagaagttcttgactcccgttcaaggtaagagcaaaccggtccatccacatcgntgcctcttggtgtaaagagtcgatcacccttcctctagcctctttttccgcatatacttgagcatactcatccgcgattctatgctcgtgggccgtcgctagacctaactcttcttggtacttggcgatgatagctagcatgttggtctccgtctcgcataaacgctgagacaagcttcttttggaccttgaac

SEQ ID NO: 33701 - DNA, 428 bp, Glycine max
  unsure at all n locations
tcacattctgcagaagacccatgatatcgtcaaacattttccccgtgtgagactcagccgacccttccaatttctcaggggattcgactgtttcagaagcacagcttgataacttatccacttcctcagaattttctgctgctccaaaaccagccactgcagcacaatttgcattaacatatggcatcaactatntaatttctaattaagagatataacaacaaanaaatcccatgctatggtcatgtgaaaattcaacatgataagattcactatcaaagtaatgggactaacatttaaaataaggacaataactagatccaactccttaagtgcttntaatgttgttctccaattggaattgaattctacctcagtagcttatgctaacctttaatgtanacctttactacatggattactgggtg

SEQ ID NO: 33702 - DNA, 379 bp, Glycine max
  unsure at all n locations
tgtctcagcgggtatgtgagacttataccaacatgtttgccatcattagaaagtaccaagaagaattaaatctagccacggcccacgagcacaaagtggcggacaaatatgcccgagtgtacgcggaaaaggaggctagaggaagggtgattgactcgttacatcaagaggcaacgatgtgggtggaccgattngctcttactttgaacaggagtcaagaacttccccaattgctggccaaggtcaaagcgatggcggacgcctactccacccncgaggagatccacagactcctcagctattgtcagcatatgatagacttaatggcccatataattaggaaccgctaggaagtttgtaggtcactcagatcttgact

SEQ ID NO: 33703 - DNA, 380 bp, Glycine max
  unsure at all n locations
actaagcttgagaaattanacacaattactttaccggattctgattgatcatgaaatttcgagacgctcgaattgaattcgaagcttgagcaattcaacgaaataactttttactggatgtttattgaatccaaatatatcgacagctcgaatagaatctgatgcttgagcaattaaacgacataacttttactcggatgttgattggtcctgaatatatccacacgctcaaatgaataccgaactctgacaaattcaaagacatactttactcgatgctgatgagtctgaataatgagacgctcaattgatccaagcttgacaatcaacacatactttactcgatgtgatgatccgatatatcacacctcaatgatccg

SEQ ID NO: 33704 - DNA, 409 bp, Glycine max
  unsure at all n locations
tctataccactgcctttggacatatatagagccnggttttcgcggttcttaaaacaaataaaaacataaaaagttagctagattaataagacaaattgaaagcccgactagcttttgatatttttgtttttattattgaaaaaaagattactgaaaaataactctaaactcttgatcatttgtgtcaaaccaaagtggcagcttaattagtttctttgtccaactcgacgtacgtttatctaaaagaagcagcaacaagggtgttctaataaattcctatataggttggagaacgagatgaatcatgcatgatatggatttggtacttacgcaagaagacatagtgtggttccagaaatctagaactaaatggattcaagatggagaccgtaccaagtattaccatctc

SEQ ID NO: 33705 - DNA, 438 bp, Glycine max
  unsure at all n locations
tctagaaggagattaactagatgttctattcttcttgtatgtggcagtccatgacgaatctccttgngaaaggcatctttaaattcctgcaataagggttgaacactatgagaaacataaatggttaactgagtagaattatcactctctctctcttgtgtatcactcttttcctcgggtgtatcactcttctttttcatattcctttgtggcgcctcactattttctttctcttgttctctcttttctctcattctgatttggtcatcacacacttctctaggggatagaggtttaagagtaaacgaggaagatttggctattcgtctgtagggctcttctttgttacggctcaacaaacgttgcatttgtgtagtccacgcgtccaaaaataagcgctgagattcgtccagtngatgatatacaccaccatttgca

SEQ ID NO: 33706 - DNA, 460 bp, Glycine max
  unsure at all n locations
gaactataaaactcaacttaccataattttctatgcgggatgttcttttcatccaagtattcttatgaaaagcctctctatgctntgaaccctcagtagcacttactacttaactcacacaactacantttgtgggtacacacaaccttaagaagcaacaatctcctaactagtctcctgaggttccctatcctaaatggattctatntaagggcaggtacctaatacatctcacaggaaaaacccatcaataagcctccctcccccaaaagatgtttatagactcattaaggctagatagaattttctctanagttctagagagtccgagctaaggaaattagtataanaaactaatgatatatatttacaattgttgagaaaagtccctttangaataaatgttctaatgatgacaaacaccatgaagcnaaccaaaatactaacttagttactaatg

SEQ ID NO: 33707 - DNA, 479 bp, Glycine max
  unsure at all n locations
gcaactcanaatctaggcatctaaaacccctcaatttagtggagtttcattgtttgagaagtgaaaatgagaatgggtaaatttggagcaaactctcacttcaaacaagtctatatcatcaatctaaacttgctcaaactggttttacgcctaaaattccaccgaatcaaaatttgactcctcaacacccaatttttaccctagacatggttcttgccttcactttggtcatttgttttcctctcttgcacagcccaagctttctcataagtcctaaatgacatttcaaactaagattaactcactntaatctccatttaccactgaatccagatttggccttccaaaccctcanagcatcacactnttccactcacaggactacattctcactttctaaccctangttaactctacccttcatccctagtagttntccatcagcaatttcagtacataaacatcacaagcatcatcat

SEQ ID NO: 33708 - DNA, 417 bp, Glycine max
  unsure at all n locations
ntntggagtagaaacatgggaccaactcattgtatgtctganagtcgtatctattcaagatctgagagaccatacaagttttctagcgatttctaattatgtgggccattaagtctatcatatgctgacaatagccgagaagcccatgaatttcttcgagggcggagtaggtgtccgccattgccttggccttggctaacaatcggngaagttcttgactcccgttcaaggtaagagcaaaccgatccatccacatggttgcctcttggtgtaaagagtcgatcacccttcctctagcctctttttccgcgtatatttgggcatactcgtccgcgaccctatgctcgtgggccgtggctagacctaactcttcttggtacttggcgatgatagctagcatgttggtcttcgtctcgc

SEQ ID NO: 33709 - DNA, 475 bp, Glycine max
  unsure at all n locations
actcatgaaggtagtcgttgactctacccttctgagngagnctgtataacattccctttggatcatcatagaaggtaggagcaaagtgtgactccaaagcttgcaacagggaggaacacaaggtgattaagccattgtgaaacatccattgaaaccaactaagagcaggtccatccatgtaaaatgaggccatggtgatgcgctcctcgtcgagggtgttatggtagtaaaaaaattgggagatcttgaagatccatcccatggtgtcgtggctgctaaaacaagggaaccttgagcttgatatgtgggcgtggatggttatgagatggtgatggtgtangagaaggggtgggctgagttggagctggtgtagttgttcctgaatggaatcaagacgaatgtgaggtcatggtgggcgtcaatgaaggtggattgattctgtgtgaggaggaggatagcttcttctaatcgatct

SEQ ID NO: 33710 - DNA, 388 bp, Glycine max
  unsure at all n locations
gcttttgctatatccttgaagggaattttgtcccanaattccggctccatctacttttcagtaaaaaaattatttttgggaatataattgtcagttgatttttgtgggggattctattgcgataaaacttgtttcccttttggattaataactatcttggtttgcttggccatttgaatctgcttttgaagttctgtttcagaatcgtcatcagattctgaggcaatttttgcccaagtctttntggctaagatggnggttttggtcaggcccatttctaggagagcttatagtgtttctactgaccaagcatagtcggccgatgtttgtttggcggngtccagtttgngggtttcctgagtggatgactcangtttgactgagatta

SEQ ID NO: 33711 - DNA, 416 bp, Glycine max
  unsure at all n locations
agctgtcttaagataacttccttgagaagcttgtgtgagacaacttccttgagaagctagagtttagctacacacacccatctaaaaactaagctcacctccttgagaagctagagcttagctacacacccctataatagctaagctcaccccatgacaaaaaaaacatgaaaatacgaaaaaaatcctactacaaagactactcagaatgccctgaaatacaaggctaaacccctatactactagaatggccaaaatacaaggcccagaagaagaanacaacctattctactatttacgaagaagagtggacccaaccttggcccatgggctcaaaaatctaccctaaggttcatgagaaccctaaggccttctttatcaactctagcccaatgctcttggagcctcttgctcat

SEQ ID NO: 33712 - DNA, 409 bp, Glycine max
  unsure at all n locations
tgagatgaggaagtgtggaagggtgaaacttgctnttattcgttgaccacagagtggtacctggagatatgtcgcggnggtcaggagaccttgngaacgtcaggtggggtgctattgcccaaaaccaagcttgaccaatcccgacccaacccgggcatagtcagtcagtcagaacctgtgatgtacctaaacaggcgagctcctngcagccaacagataaaaggaacaaagaccacaaagcaaggaggcttgtgtggtggctggccagctgtgaaacttgattgatatatgggatgtggcctctggtaatcgattaccanaggtgggtaatcgattacaaggcttataaatgaagacaggaggctaagatggtctctggtaatcaattaccacggngtgtaatcgatac

SEQ ID NO: 33713 - DNA, 338 bp, Glycine max
  unsure at all n locations
tgaatgacagtcttgtgagacacaactgaaagttcaacttgtctccctgttttttccttcagttgcgtgctgccccctctctctttctctccctctgtctttacctccattgaagcatcctctccaagcttctatacaaggcttatcttggtggagaaactccttcttgcatggcttattccctaccggatggcgcctcctctcacctcttctactttgtcatccgctgcatctacatggtgcgaaatcaccattanaggacctcattgatgctgagagatgcagccttcatagaagtccacaagccagcttccatcaagtgatatcagagcacatga

SEQ ID NO: 33714 - DNA, 341 bp, Glycine max
  unsure at all n locations
ttagtatgtntaagaatttatttcaagacaattgattaagctatatctgaaaataataaatcactttggttaattaacatgaaaaatgtatcgatatggtcaaagtgaaaaattacattnttaaagatgcgtttttcactttaaaacgattgaaccctttctttctttctttcttttttgttaaagatgacagattcaacggccgaaacaatagacataaactttaaaacaattatataattatgattgttttggatatatcaagctcaaacaatntgtagtggcttttcttttatagaagaacccttcaaaagagaaacaaaggatctacatatgtcaaa

SEQ ID NO: 33715 - DNA, 391 bp, Glycine max
  unsure at all n locations
tctatagaaggttcattcctaatttctctacaattgcttcacctcttaatgagctggtgaagaagaatgtggcatttaccttgggtgaaaaacaagagcaagcctttgctttgctcaaagaaaagcttactaaggcacctgttctagctcttccttgagtttctaaaacttttgaactagaatgtgatgcctctggagttggagttggagttgtattgtaacaaggtggacaccctattacttattttagtgaaaaacttcatggtgccaccctcaaccaccccacatatgataaaatgctttatgccttaataagagccatccaaacttgggaacattacctttgttccaaggaattntgtattcatagtgatcatcaatcacttaagta

SEQ ID NO: 33716 - DNA, 464 bp, Glycine max
  unsure at all n locations
gggaaatcaagataatgttgatattaattaatcacgctttattatgtaacattattttataacgttttagaagtagttaaaattatctataaaaaaaagcaataaaaattataaatttttttacaatatgtaatttaaattaatttatactaataaaaaattgtgttttgaaatatatattaatttaagtttagaattctattgatttaagttttgaaatatgtacaacaataatattttaaagcaataattgactttgtgatatatagagtgggtattaatcgatcaaatttgatctaaaattatcttgcagtgtttttcttttagttaaaagttactgtaatattaaagttcaaaataagaattttaaaaataaaactgaagatngtttgccttatatggtacgagtnttttttcatatagtcccgtaataattgacttatgtcatttatntaagatcagat

SEQ ID NO: 33717 - DNA, 312 bp, Glycine max
  unsure at all n locations
tcgcanactactcactctacactagacactggtgcattgagcanattggctaacgatganatatatagtgtggccagcacatattcatgacccttagatcgcttagatgcacactgatgctagaatggcagagttaagttcatgacatgtctacagctaactcttatgggatgaagatagagattaataaatggaataatatccactgcactataaagagactatactctctgatctctatataatatattaggacacaccatagactaatgagagatctctactatacaaagattacgttgaccctgtgat

SEQ ID NO: 33718 - DNA, 325 bp, Glycine max
  unsure at all n locations
tgcctcanagaggtccaggaaggacaatgttgccgaatgaactagttccgctccggagtacgacagtcaccgctttaggagcgctgtacaccagcagcgcttcgaagccatcaagggatggtcgtttctccgggagcgacgcgtccagctcagggacgacgagtatactgattntcaggaggaaatagggcaccggcggtgggcaccactggttactcctatggccaagtttgatccagaaatagtccttgagttttatgccaatgcttggccaacagaggagggcgtgcgtgacatgagatcctgngttaggggtcagtggatc

SEQ ID NO: 33719 - DNA, 475 bp, Glycine max
  unsure at all n locations
agaggatgcttcaatggcgganaaganagagggtttgaaagagagaggtgggagctctaaattgaaggaagaaaaagggagagaagttgaactttgagttgtgtctcacaagactcccattcatcaaagttacaacaagtgttacacatgcttctatttatagactacgtagcttccttgagaagctttcttgagaaaactttcttgagaagcttctttgagaaaacttccttgagaagctagagcttagctacacacacccctctcataactaagctcacctccttgagaagcttccttaagaagattcctaacgaagctagagcttagctacacatacctctctaatagctaagctcacctccttgagatgagaagctagagcttagctacacacccnctataatagctaagcttacccccatgacaaanaacatganaatacaaaaaanagtccttactaganagactactc

SEQ ID NO: 33720 - DNA, 491 bp, Glycine max
  unsure at all n locations
tcaagcttagctacacaccaccctctcataactaagctcacctttttgagaagccnccttatgaagattcctaaagtagcttgagcttagctacacatacctctctaatagctaagctcacctccttgagatgagaagctagagcttagctacacaccccctataatagctaagctcacccccatgacaaanaacatgaaaatacaaaaaaaagtccttactacaaagactacttaaaatgccccgaaatacaaggctaaaaccctatactactagaatggccaaaatacaaggcccanacgaaggaaatacctattctaatatttacaaagataagcgggctcatacttagcccataggctcgaaatctaccctaaggctcatgagaaccctaggaccttcccttggatctctagcccaatctacttggagtcttctacccaatgcccttgcggagtaggattgcatcactctctttcgtagcttctatg

SEQ ID NO: 33721 - DNA, 476 bp, Glycine max
  unsure at all n locations
agcttctaaactntgtacaagaatgaagctctgataccacttgttagacaagtggtctcagatatcttaagaaggcgggggttgaattaagatattcgaaactatgtcttctaattaaaaatctatcttactttctacttaagttatgaattcccttagagacaatcttcttaaatattaattcaaatgaagcaacttgaatatgaatataaagcaataataaataaaggagattaagggaagagaaaatgcaaactcagttgtatactggttcggccacacccttgtgcctacgtccagtccccaagcaacccgcttgagagttccactaacttgtaaattccttttacaagttctaaacacacaagggacaacccttctttgtgttagagatttctacaacaagagactcacagtctcttaatcccttagagaatgagaagaagaagaggaacaaatctctcttgaaagagatg

SEQ ID NO: 33722 - DNA, 490 bp, Glycine max
  unsure at all n locations
tgaccaattcanatgaacgaggaactccttcaatactgttaaaaggaaattcttgatttgcttgataaaggtttaatccggaaaagcaaaagcccgtggtcctgtgcggctttttatgtcaacaaacattctgagcttgagcgtggaacaccccgtttagtcataaattacaaaccactgaaccaagcattacaatgaattatgtaccctattccaagcaaaaaggatttacttaacagattaaattctgcaaagatattttctaaatttgacatgaaatctggattttggcaatccaaatccaagagtcagataggtacaaaacagtgtttattgtacttttcgggcaatacgaatggaatgtgatgccattcggactaaagaatgccccttcagagtttcanacaattatgaatgatatttntaatccctattcacaatttgtcattgtctacatagatgatgtgttaatcttttcccacaacattga

SEQ ID NO: 33723 - DNA, 246 bp, Glycine max
  unsure at all n locations
cggcggctggcatggccattatcaccgcacgtaaagtgcttgatttggcttctttcacgttaaaattatggattgataatccgtaagttgtatacaatttacgaattgataatccgtaccttgtatataacttaccaattgatcatccgtatgaaccttacngattctcaatctataagtcccttttaatttgttttaatattctcttattgacaatccatatgacttatatagattgctgatcca

SEQ ID NO: 33724 - DNA, 460 bp, Glycine max
  unsure at all n locations
actaagctttagcccttanacgaaatttcatttactcggatgttgattgattccataatatatcgagacgctcgaaattgaatgttgatgctctgagcaaattcaaacgacaataaatctttactcggatgtctgattcagtcccgtcacatatctagatgctcgaaattgaatgttgatgctctgagaaaattcaaacgacaatatctttttactcgcatgtctgattcagtcccatcacatatcgagatgctcgaaattgaatgttgaagctctcagccaattcaaacgacaataactttctaatcggatgtctgattgagttccgtaatatatcaagacgctcgaaattgaatgttgatgctctgagcanattcaaacgacaataacatcttactcggatgattgattgagtcccgtattatatcgagacgctcgacnatgaatgttgatgctctga

SEQ ID NO: 33725 - DNA, 478 bp, Glycine max
  unsure at all n locations
cttcagctcctctgacattcatttgangaaggagcnncttcattaccttcatccttggcttgtctacctctatccacttactaaaaatttatgccccagcactattccttccttgcccatgaaatgacattttctcccattgagaactaaaatagactcttcacatctttataatactctttcaagatttgatacgcactcatcaaaagatggcccaacaacagaaaaatcattcataaacacttcaatgcctttttccaccatatcagagaaaatngacatcatacacctctganatgtagatagggcatcgcacagaccannaggcatgcgcccatatgccagtacacccaaanggcacgtganagtagtcttctcttgatctttgcgatctacaacattctgattatagcccagatacccatccatanaacaatantaagaattcctttgcgagtctttcangcatctggtccag

SEQ ID NO: 33726 - DNA, 472 bp, Glycine max
  unsure at all n locations
tgatcaacccactntgttatgacatcgatgcagggtttccagtcatgtttgaggttggttacattggcatggagagcctcttgaacatcttttctattaagatatgcgtacacataattctcactacatggatcagtcacaatctgcaaaacaaataaacatggcttcaattctagtgaagttcatgcttcatgcaatgttgagttttctaaaatctattaggccagccaaatatttgaagcttactgtgttccttttgggcagggctgtgagatttgcattcttgcatagtggagcataaatattgtataaatcaatgtattcaatatcctccccaagttcatctccggctgcatcgcacacactntcctgaatctttgatgatgatgaatcacaagctntgttgagataagctgctntgtctgagatgattgcatggctggcaagataatcatacagtccgtccgagtca

SEQ ID NO: 33727 - DNA, 435 bp, Glycine max
  unsure at all n locations
tggactgtgctagatagataaacaaagatgtgaaattttatgaattgatttgggcaagattggatgagaggaagtgtgattttcgaaatctgcactttgtgcagatttttgctgtgaaattgtgcagcaggattttgcacaagtgcagaaaaatgctatgtatttgctggttgtggaaagagtaatgtagaatgagttctggatgtttgctagtagatcccaacggtcaaaatgtangcttatgtactatagacttctagtaaaatgtttgagttgatccaacggttaacgaattggatcgaaggaattgttactggggtctataagtgagaaaagctgtgattntggttggtgtgttgagcagagttttctgcctttgccctgttntgcttggctgtgatagctngtgctgtttgaatgttgctnttcttggat

SEQ ID NO: 33728 - DNA, 464 bp, Glycine max
  unsure at all n locations
tangggcaggtactatcaggttctangcccatgatcattctatcaccacccccgcgttcggctaaagatattaaagaagctctcctaggaggcagcctagtatctctaactttgctctttaatttcctgtttcatacttgttctttttcttgaactatatcctgaattcgcctaagtttatatgcaattataggattttaagagaaaaaatataacaatgaataacacaattttgtaaaggattttcttcaccaaaaaaataataattacctcgcttgggcgagtggccagctcgcctangcgagcatggctatggtgaaaaacataaaaaggggaggggtgaagccattntcaccctattcttgcccaaaatcaaaacctcccncaagagcttacgggagccaccattggcagcagcccccaagcttcctttgtgcactttttggttcattttttcacattcc

SEQ ID NO: 33729 - DNA, 478 bp, Glycine max
  unsure at all n locations
gattaaatctgtatgtataacgaattcttattaatggatttcaattntaggtaaggtctataagggtaccatgacaaataatctgaatgttgcaatcaagcatataatcaatgatgatggaaatgtggacacttttgtcagacaaattacaagcttatctcatggcagacaccctaatatcagcagttgcaaacaatcacagtttacttggtgccaacttanagtggaattaaacaaggaatatacttaaagtgcataaaaagttaaataatgctcaaaataggcaatcctagcttaaatcttaccctttccttgatgtcacccanagtcggcaagtacaacttataaaattcctctctaaatgcaaccacaaacctaaataaagtttagaaaccagcaagaataagacaattaanatatgtgaattgtataaatntaagggacaacaagatacatctactatattatnagtatttca

SEQ ID NO: 33730 - DNA, 454 bp, Glycine max
  unsure at all n locations
ntgatggtgttgagaagaaatcacatgtttgtcatcatcaaaaagggggattttgtgaatgtatgtatacatgattntgatgatgtcaaaagaagaatcaaacaaggctcattntgcttcaagattaatacaagattgtttcaacaaacaaagccttgattcaagatttcttcaagatcaagccttgcctcacaatgaaaggtttcaagtcattcaaggcacatgtaatcgattaccaatacatgtaatcgattaccaatggtttgaaagtgtgtaatcgattacacatcatatgtaatcgattaccagagactctgaacattgngaattcaaattntaaatgaagggtcacaactgttcaagaaaaacaattgtgtaatcgattacactaattctgtaatcgattaccagagaggattntcaaggaatatcgtcaacagtcacatcttatcat

SEQ ID NO: 33731 - DNA, 462 bp, Glycine max
  unsure at all n locations
ctccgcaagacctatgaaaagatctgngatctagctattatagaagtctccatttaagctattgcatctctcactcagtattacgatcagccgctaaggtgcttcacgtttggggactttcttctagtaccaactgtggaagagtttgaagagatcttgggatgtccgctaggaggaagaaagccatatcttttttctgggttctatccatccatggtgagaatagccaaggtagtcaaaatctcggcgcaagaattggaccgagtaaaacaaaatagaaatggggtggtcggaataccgaggaagcacttggaggagaaagcgaaggctntggcggatcaaggtgaatgagctntgttcattgacgtcttggagctattggtatttggagtagtcctttntccaaatatggatggattggtggatntagcagcgatcaacgtcttccttgcttatcaccat

SEQ ID NO: 33732 - DNA, 463 bp, Glycine max
  unsure at all n locations
tgcannaatgatagtctctaccaaagtctctntccatgttatatctaacattttcagttgaatagaaatatggtgctaactntaagtggcctanattagtaaaaggacatgctcccactctgaatgatacttcctcataaaaaacaaaccattcattttgagggaagaaaaggagaacaaaataagaaaaagaaatggacagagaaagacactcaggctaaggatggtactaactaagcctcgggttaaacagcttgtctccatgtcaataactaaacaactgtagaggatgtcccatttatctaattcatctttgaatagaaatggcattccctgaccttctagacatcttcatgagcttgactagaaatctccggttgattatccaagggcatgtattgngccataattgcccttatctcagagtccatatatctctgcagaaaaatatttctcatgtaat

SEQ ID NO: 33733 - DNA, 485 bp, Glycine max
  unsure at all n locations
tattgatctgactatgtttctaattattataaattgatttatttccagcctattaattcaatccttactatcttaggcaaggaaattatggactgaagagagggaactaggactactggatgagttgttaggaaaacaatgctcagtatttgaagtcacaccatgcatacaagtcagcctattatgtgtgcaacanagaccaaaagataggccagacatgtcattagtggttttattgttgaatggtgaaaaattattgccaaaaccaaagactcctggtttttacactgaaacagatgttacttctgaagcaaaatcttcatcggtaaatcacatgctatgctcagtaaatgaactttacattacaattttagatgcaaaanaggaaacagaggcaagaaaatgccaagggttcaccttcaaatgtgggatatatcaattatttgagcattcataactagtaaaagttgtactatgangctcta

SEQ ID NO: 33734 - DNA, 466 bp, Glycine max
  unsure at all n locations
tgaggaatcttanggaactattatagacactactatttctgtcgaattgcacacatgagttgttttacaggtaagggatgaattcattgcaattgggggttaggatgaacatgaatagggatccttataggattaaattgagatttattttaggatgtttattgaattataattttcttttacaattataaatacaatatttttttgtttgacggaccaattgatgtcctgatgcgaatcggttcataaaattgaatgttcttgttgtttcatatttttgacctatgattntgattcatttattttaatatgatagtgagaaattatttgaggggttttactctccatgttgtgaanaacgttnttgtataactttntatattaagattatggaatgatgattcacattgtgagtaagtgacaaattgaacttgtgatgaatggtgatatacatgtgtattgagat

SEQ ID NO: 33735 - DNA, 442 bp, Glycine max
  unsure at all n locations
tgatgactatggtgtgttgtgggacttctccaccaatgtagatctttaattnttggcccttacctaactagccacgatctttggattggtcttctatctttatagctccatagggcttaacgtctttaatagtaagggggccactccttctcaattgtaattntcgagaaacaactttaatcttgagttgtagagcaatacttgttgtccaggcctaaattctttgaggaggatatttttttcataatacctcttggttctttctttgtagagcttggatgattcgtatgccttgagtcaaagttgagaaacttcatggctcaatgagcttttatttctaataccactggtaggtggcattctttnttgtacaccatttgaaatanggaaaggccaatgggtgttttgaaggttgttctatatgctcaaaggcaatcatcaa

SEQ ID NO: 33736 - DNA, 341 bp, Glycine max
  unsure at all n locations
ctcacttagttatcttcccttaagtaatcctggcttcctcaatgagctctgctcttcttaaataaatcgctatcttgacttgattataatgactaagcatcataaattcattacttttaatattctctacacaaaacttaaatgatattaatgtaataattattttctcaaaaaggaacaagtatgagaaaatttttacaaatttctatataatttaaccgcaaaatatattcttaattagcagctatcatcagccttctttatttatatgttgctcaacttgacaattgttatccaatgtgatacttcaccttcatacttanactctaacaatattcata

SEQ ID NO: 33737 - DNA, 407 bp, Glycine max
  unsure at all n locations
ntctattatacattaagcaaggttcagtgtttcgcattataagtttgcctaaattagtgttgaataaccagtaaccaaagaaaagcagaggtaaaacttttaaagaataaccaataaccaaagttgtataaagaataagcagaggtgaagaagctaggtaggctctacttttgaagtggttactggttcagtgctgaataaccagtaaccaaagttaaatgtccatttactcttactctgatgctagttcataacatgttatatgtttgttccttttacagcctgggaagcctgggaatcaattcatttgatttaagtagtttatgcatggaaacgtgttaaagaatgataattgaatcattnttttatctagtgtatgagcatgtgaaataacaaacgatgtcact

SEQ ID NO: 33738 - DNA, 471 bp, Glycine max
  unsure at all n locations
ntagtggtttttttattagtcattgacatctacatattctgagttttagtctcttccatctttgacattctattaggttgttgttgttgtgatgaacctctatttgaaggaccatgaccacctttataaccttggtaattccctttgaaacgttgttgtggtcatccttgattctgcatatagtgtacttccttttcctattgatagtaattggatgttgaacaatgaccattctaatgattaccttcatagaaaccataactaagtacttgttgaacttgatgatgttgtgatttgtgagagcttcccgattaaagttgtcgaggaagttgaccaatctactntgttaaggctnctaattgttgacttatgagcatgttctgaactagaattgaattcggagtatccaactccattattcctttcctgtgaacatgagccctatcatgatgacctttgatatcactagct

SEQ ID NO: 33739 - DNA, 452 bp, Glycine max
  unsure at all n locations
tctgtagctaatttgaataactccaatctatgaaccttattaaagaggattcaattcaactatgctctattcatgtgtatttaccattcactatctaagtgtgtcccctagctaattactacataggttttttttatatcataaaagtgcccgaaataaagtaccagtatggcaaacaaagctaggcacattctgatatttcttgctttggaatctctatgaacactacgataaattatacaacaggaggaatccaggctaaaaggaatagaattcctgaaataattattatgacctttcaaaaagtggtttcttttacaaacgattgaagatggactagttgcgagctggctcttgcatgatgcatttggaattacttcaacagcacgatgagcangaatgattcatccaaacttgtacaagaccttaacanatcacagacatgtgtgcgt

SEQ ID NO: 33740 - DNA, 456 bp, Glycine max
  unsure at all n locations
ntgngataaaaatggtcattgaccaatctctattctttgacttgacccaattatctagtgaaggtgaacttgacacaaacctttgggataaagctttttattctcacctcgaaaaagctttaactaattcagaataaacaagcaatttcaaagacataaaaggagtgagatttgagttctgaaatgcctgaatgcattcaaaactctcattggaaaagaaatccatgtctatgaatttaggatcgataatggaacgagaggagaaaaggtttgtgtaccgtatccgttgttcttctgatgagaacagcaaggaagaggaaatggaggagggaatctatgtttcctgagcctcgaagtgccgctggcttcgactcgaagaacccttgtgctnnttttatggttccctcatttgagagagttatntgaaatttcaatcggttaaagtgatagagaatg

SEQ ID NO: 33741 - DNA, 463 bp, Glycine max
  unsure at all n locations
attgccttaatcatttccaaatatgcatgtgaattangatgcatcaattagaatcaagccaaggctattgtgcaagcaatcaatggggcaaaacacaccaaatgattataatgatggatggctcaaattctcacaaaggtaaaatcatcactttcaaattgagctttcaaaactatcatgacatgtagagaagaatcaaggatttcaagtcacaaaatgtcaagaacttttattttcaaaacaattacccatttcttgaacatatcctataattcaaagaaaaacatgcaaagtcgtacgtgcacacaaaattgacccanaatattaaactaaaaatccgacgaaactaacaacattaacaaattaacacaactaacanattaacaaaaccatcaaaactagcanaaccaaagaacacttccccccatacttaaacaacacattgtcctcaatgtagcacaat

SEQ ID NO: 33742 - DNA, 489 bp, Glycine max
  unsure at all n locations
gctctgtgtacccttaaaccgtaaatagtggctattcatattatatagccaaccttttactctatctgnngcctcaagtttggaagctgattaactatcgaatgaataatagatagataggtgcttgtcccccgaccatctcttacaaagtcaataataatgttgcctttatattgtttgttgctagagttattcatttatttatgcttacaagttacaacatattgaatactaatgtcactctcgagatatatcctcgttaagattgtatacaaaaatgctaaaaaaaaattatatgatcttatacgaaggtcaatgcgttaaatatttcgatattcataagaataatcttatcactcaatacatatatagtcatatctcattcaaacagaattacctaacactgtaatctataccaaaaaaatatggtgcagaaacaaattacgaaatttagttctttatgtaaatgtagcattatgctatttaata

SEQ ID NO: 33743 - DNA, 416 bp, Glycine max
  unsure at all n locations
caagcttcggaagaaagtgatgacgtacaagccctaaaggcatatcttgaaagagccctggtagtcaaagagaagttcaagtccatagccatcacagtctgaagagagtatgatgaactaagggacgtcaatatggccatcgatgaagccttggaatgagaaaccaagatagcccgacaggaaaaacacgaccaacacaagttntgaggggctttatagggcagcaatagtgagctcaagctccgaaaaggtgaaaggaatcatcacgggtcaaaggcatgatcttgaangacgagctanaggcttgccttacgtcgaanagaaatttgtcccaacagttaagcgagactgaagggaatatgtgggccatcatcgatgagtgcaaagagaagttaaatctagcggcgactcacaag

SEQ ID NO: 33744 - DNA, 475 bp, Glycine max
  unsure at all n locations
gctcctgtgccttcctccaccatgtctaaccccacacctttttctcaccactccacctttggtcctgcaaaaacctggttcgccccatcaccgtctgaggaccccaccggtgccctgttcaaactcactcagacgggttcagtgccaacatacctgaaggagttcgaagacttggctattagaattattggcttgatggcccccttcctgttgagttgcttcatctcnggtttgacaccggagatccgccgcgcagtccaggcccatcagcctatgactgtggaccaggccaccggcctcgcgaagctctaggagcagaagctgtcggactttcgtccaccgtctcgttcgcgtccaccgccactggcccctcttcctttgtgttccaacctgcttccaccgctcttgccattgcgacaaggagtaccacagagggcatcgntgcgcctctcggtttcttctccttatcacggac

SEQ ID NO: 33745 - DNA, 473 bp, Glycine max
  unsure at all n locations
gggatattntnntgaaaatggttatacaaaaacgatttgttntantaagagatgaaagtcaatttanaaaaaaacagaattaaaaacactattaatccttaaaatttcaatttgataagcaaatttattgtctgaacaagtttgaattaacattttctatttgaaaacttatactcaaaatattcttactgagattttgaaaatataaatttatttataatgttataaaaaaaattaaaattgatctatcaaatgtaattatgagatgattttcctatattttaaattaatataatattcatgcacactntttattgagtatatgtataaagtaattgacaatctatgacaatgtgatctttnttacattgtttgtgtattttaattaaatntacatatgtaatataattaaacattctacaataatntataataataaatacttaagaatgcattaatactaattaagttag

SEQ ID NO: 33746 - DNA, 461 bp, Glycine max
  unsure at all n locations
tgcacaatctataatttaatgatctgctaatataatatgtattgttagacanttttcgaaggatttactgatccttgttttgtttttaactaatggagcaggttaaagagttccatagaagagatggttttgaggtagcaagtgctgacaagatggctaagtcatgcatggtttattttgaaatgcatctatccctaaggaaaaaaataattacaaaagcttttaatggtagttatagtatctacaaggaaactttntgtaaccaggtctattgcctttntgtttgagtaactggacatgcaggtacaataattgttgttgaagatgacaagggacctgaaagaggaatgccgagcttcaattctgagttacccaattccaattcatggtaaattttgtctttgcaatagttcttggatangcttntcatatgtggaanaatcttgttcatttgtcaatca

SEQ ID NO: 33747 - DNA, 381 bp, Glycine max
  unsure at all n locations
ntaagtggaaaaccatgatatcttcatatccttaatgtatttggagctttggaattgttttgggaataagtgtgggggaattttgtttcactggataacatgttttgttggctatgattcatgatgtattttgggccatacttgatgtacattttatattggttaaatgttggacatgctaaatgagatgctatttctcanaggctacagagcaaaaaaaaaaaatcgaaagaaaaagaaaagcaataaagttgagtgaataagatcttaaatggcaaaagaatgattagactcttggctctattctttatgtttanaatttatctttagctctttttattcntttttcatttttttcttaatatgcacttattccccatt

SEQ ID NO: 33748 - DNA, 429 bp, Glycine max
  unsure at all n locations
tcaacccactgataataggacatagactaaaatacagttggtagtattnttaggaattcaattgatatatgatagtggtcaataaacatatatgatttctaanagcttacatgttgacattgactattcagtttatacctatataaattatctaattttggtgagggattgatgttgaattaaaaaaaactaacggaagatgtaaaaaatgaaagttttcttagccaaaaaaagaagtaatccttaatagcatgtagaaatgtgggttttctgtctccgaccgagtttgttttcttctaattggatcaaaatattttaacaaaaattgcattntgtgcacattcatttataatatgtaaaataaataaataaatttaagtctttgcacacattnttcagtcattntttttcaatgtcccttatntttta

SEQ ID NO: 33749 - DNA, 375 bp, Glycine max
  unsure at all n locations
tatgactcggtcaattgagaattcttgatttacatgtttggaagattgagattcaatgagatatgggtcaaatggattaaggggtgcttgatgtctactanggtatcaatctttgttaatggaagcccaatgttggaatttatggtatcaaaaggattgagacaaggagatcctttagatcccttcttgttcaatgtggttgtggaaggcttatgtgggttgatgaggaaagcattagacaaaaaattagattctagtttcaatgtggggaacaaaggagtgaagataaatatccttcaataggaggacaacacaatcttcatgggagaggctaccttggataatgtcctaaccatcaaaagcattctntgatgc

SEQ ID NO: 33750 - DNA, 445 bp, Glycine max
  unsure at all n locations
tatattagtaaaataaagaagagaataattagtgctttgaaatagtgtgacctacaacttttaatctttgattatgaagatcattntgtgaaaaagtgagttatgattctctcttgagttcaagaagacactcattcatttaagcacggttcttgcaaaggattgatcgggttgtgtctatcgttgactntattttttcgtgtggtttacaccctattagtttgtgcatgaattactgaaggcatgctggaataggtttttctagtttgggctaaggttaggtttctcttaagttcttattcacaaaggaccctanggttaggtaccttagtctcttttttgggggtaggaactgagattgcttgtgatggtttgtaagaattctatatggatagtgaanatctaattcgggtttggataaataactggatagcttctctaatat

SEQ ID NO: 33751 - DNA, 462 bp, Glycine max
  unsure at all n locations
tgctaacccatggaagctcctaatatctcttacactttttcgggtgggccattcttggatggccttgattttctcatttctaccaactacaaaacctaagaaaactatattatctacacaaaaggtacacttctctatatttgcatagagggtgtttttcctaaggactgaaagaacttgcctgagatgtcctaagtgatcatctangctcctactgtacactaaaatatcatcaaaataaacaactacaaatctaccttagatcccttaagacatggtgcataagcctcataaaggtgcttggtgcattagtgagcccaaaaggcatccctagccattcatacaaaccanacttggtcttgaaagcggntntctactcatcaccctttttcatcctgatttggtgataaccacttttaagatcaatttttgaaaagatatntgcaccatgcaacccatcaa

SEQ ID NO: 33752 - DNA, 478 bp, Glycine max
  unsure at all n locations
attcttttgacattgttcaagttcctcttgcatggctgatgtttcctctatggaggggacgcatcactagaaacacggctaggagactcttgaaagattagactagggatgcagaagaaggccttagggttctcatgagccttaggatagattctgggcccatggactaagtatgagcctacttatctttgtacaaattagattatggggtattgctaggggcacccagcaacattactggtgcacccaacaattntttagaattcccaaaatacccatcaccgtatttttttctacaaaaagttggtttatttcattnttgtttacattgttgctttctttgtttctccatggtagtgctgtgcggtatttggagctttgagagagtttanggtgttgttcgcaatcggcaagtgtaccagatcgcacaagtagtataaaatggtaagaatcgagtatcgaactctcggngaacttg

SEQ ID NO: 33753 - DNA, 432 bp, Glycine max
  unsure at all n locations
tgtagaatggctagacatgatacatgtcanggcttggtttggttcaaggattttatggatgccccacattatttccatgacacaaatgcaaaaaatgatgatttggaaattttatgcaaaactggtcatgcatgcgcctatgcggacgctcaagtgtcaaatttttatggtcatgtgatgctagggctcacgattcatttcctctattctagtcaacccaatatttccaaaatatgttcttttatcaatttgtgcattcctccaagtccatttcgggcgtccggngaaattttcacagcattcacccttcaggtgtagacacgttttttcttcaaaaatcggttatgatcaatgaattttttttcaaagaaaagttggaaatcatctcttttcaaaagcatgtcgatttttagctagacaacttattttctc

SEQ ID NO: 33754 - DNA, 477 bp, Glycine max
  unsure at all n locations
tcctcttgaacccttaccacccactctgtcatcatgccgatacttaagaaggccaacaggtttagccttctcaatgtattctgaacaaaattcaatggcttcttctgcaatgtacctctcaacaatagatgcttctggatgatatagattctttgtatacccttttaagatcttcatgtatcgctcanacgggtacatccaccgcanataaacaggaccacaacatttgatttgtgtgaccagatgcataatcaagtgaatcatgatgtcaaagaaagcagggggaaaatacatctctaactggcacagtataattgcggcctcattntccaactcatcaaacttgacaggatcaacgactntgctacatatggcatggaagaaaaagcacaggcgagttatggctaacctgacttttgttggcaagatgtctcgtataaccacggctaacaattggtgcatgagcatgtggtaatc

SEQ ID NO: 33755 - DNA, 451 bp, Glycine max
  unsure at all n locations
tganattgacaacggaagctgtcgaganattcanatgttcataactntngtcaagaaggtcagattcaggcacataatatatcgagacgctngaaattaaataacggaagctgtcgagaaattcaaatgctcattacttttcactcggaggtccgagtcaggcgcataatatatcgagatgctcgaaattgaacaacggaagctctcgagaaattcaaatggtcataacttttgacacggaggtcagcttcaggcgcataatatattgagacgctcgaaattgaacaacagaagctctcgagaaattcaaatggtcataacttttgacccgaaagtcagattcaggcgcataatatatcgagacgctcgaaattgagcaacggaagctctcgagaaattcacatagccataactnttcactcggatgtcagattcaagcgcataatatatc

SEQ ID NO: 33756 - DNA, 459 bp, Glycine max
  unsure at all n locations
tgtaggattatggtgtacccatcacatatggtactatgtggcggtcgggcgatggtgcaagacaattctccacatccacaaatcacgtataaacccaccatcccctgttgcccacctccaactgagctcacgtactcccacgtagcccttatcctcgttcctctcaacgccgggtccccatcaatcctctcaagctcccacaacatccaagaaattcaacatcccatcatcacaaactaacaaaaccaagcaaaacagggcaaaggcagaaactctgcccaaaacacaactcanaatcacagcttttcacatacaaataccccagtaaaatttccttcattccaattcgttaaccgttggatcgactcgaanattntactaggagtctctagtacataagtctacattntgaccgttgggatctgctagcanacatttagaactcattctgtactactc

SEQ ID NO: 33757 - DNA, 471 bp, Glycine max
  unsure at all n locations
tgttctgaatcacctttatattctatctcccttgctctttcaactttgtactagtctatatacgatcctttttctcacatcttgactgactcggctatatcatagcaagagtgagtgacaagttagccataatcggggggaaggcgcagaacaagagatttgagctgtgaacaagcaaaacaaggaccaacacctgctaaagttggtgaatatttgactagagagttggccaaagttgttgtatatatctataccgcagctcttcaaagttccacgaaatattgtctatcgaaatagacctacggagtggaagaagaccaaccaaccattcagaaattcagataaaacaagatatgccaatcgccaagtaaaacttgcagtacacgaataaattctctgaagacaacnactatttatatacgacatctagagtttgcaacccatactcatcanataagaatatatactctc

SEQ ID NO: 33758 - DNA, 457 bp, Glycine max
  unsure at all n locations
tgtctccacatctctatcttcccatntattntctttatcgactctccaactcggactatatcatcctaaaatgcatgcactgaggcactgactcttacatatgctcagtaaacacatccaagaccagggcaaaatgctaggagctcaaaattgacccttaacagaatttaagtaatcctttgacaacccttgatgcaaagctatagttgtatgaaaaactgtcattatcagaaaattataataggatagtcaaatatcctctgtttagttntggttggaacttgctacttagtttgttgaaattactgaccatgacatcttgcttggtattaatgtttatagaananaatgataagtgcaatttcatttccagaagttgtctanaattctcaaatntgtcttccatgttntactcagttcttcaacttctgtaacaatgataaactnttaatctcat

SEQ ID NO: 33759 - DNA, 254 bp, Glycine max
  unsure at all n locations
cagcctgaatggcgaatggcgcctgatgcggtattttctccttacgcatctgtgcggtatttcacaccgcatatggtgcactctcagtacaatctgctctgatgccgcatagttaagccagccccgacacccgccaacacccgctgacgcgaaccccttgcggncgcatcgaatataactatccttgatgtatgctagtccgacgtaatcaagatgagctcggcttccatcgtcatcgacggcgataacagacg

SEQ ID NO: 33760 - DNA, 460 bp, Glycine max
  unsure at all n locations
ntgcaagtaattgtaacattaatattgtggcaacctatcattcctatagataagccgctaatggaaaagacagacgagtgtggtttctgactattaatctttctctgtcatgatcagtaatgtaatatgtttgtataatggtttatttcgtggaaatcacaattatttaagcagaataattttttatagtttaaatgactaattattcatttattaatttaactaacattanggtgagaattaagataaatgtgatgcanaaagcaacatatatctaacacaagctgctattattatttttatatataaaaaaaacactgctattagatcatgctggcccattttcaatatgagtttgctttagtcagtgaatcctcctgtatgagtctctgttcaagcgtccacttcataagtaatcatgtcattttctttcaccattggtacgagttagtctttccct

SEQ ID NO: 33761 - DNA, 422 bp, Glycine max
  unsure at all n locations
tgtagcagggtaattattatggttaatggttggactatattgtgagatacattgcaagctgtctataacaatagttnttgttagtataatataatattaatatgatatgaagaataataatgtataaatgaattacaaattagaaattacaaatctgtattaagtattaccattagtagctgaacgttgtctttttagttgttgtaaaatagttttcctacgcttccttcgttcaacatatttgtccatgagtagttcgatttctgcaacaattggcttataattgctaaacaacaccaaaatcaaatgttgaaactgagttaaataagttgctgtaataggttgactttgaaatgataccaacattatagttatttgcatttgcatgagcgaagtaagagatatgtatttgcaatcgaaaa

SEQ ID NO: 33762 - DNA, 444 bp, Glycine max
  unsure at all n locations
ntagctntgtccncaaggcttcatgtagactggtcctttatcgcgaagtgaacctcggatccctgtcagatacaatactagaaggaattccatgcaaccttattacttccttgatgtacaactccactagcttctccattctatacttcatattcactgggataaaatgagcagatttggtgagtcgatctactataacccacacagcatcatgtccacgactagtcttgggtaaactagatacaaaatccatagatatgctctcccatttccattctggaatttccaatggcttcaattctcttgatggtcgctggtgctcaaccttagccttttgacatgtcaaacatcttgctacatattcagctacatctttcttcatgccatgccaccaaaaacttctcttcaaatcttggacatcttagtcattcctggatggaaact

SEQ ID NO: 33763 - DNA, 109 bp, Glycine max
agccctttcattttattagatgtcgctcgtcatgaaattggtcgatgcaaaattcgacattgggtcatacataactaaaactgatgatctaagacctcaatctaagatt

SEQ ID NO: 33764 - DNA, 406 bp, Glycine max
  unsure at all n locations
agctttgcatattatcaataaaattgatatgctatcttcaaatcacaaacatccaattgtgctacatctctagttgtcattgcatgaatgtcaaactttctaatattaacaagatgatttatacttatagcatcttctgcataaaaaccaccacttcttccacatctaatactatcaaaatcataatcctcttccaccttatactcaatcgacttctcatcttccttattgtcattgtcatcatcttcaactntatcctctccatcttnatgcataaatacattaccatacgcatcacccaacacataaaacgaagctcccaaatcgccgaataacccttctcctactattatgncctncaaaccctacaaaataacacatttcaaaacataaataaatacatagc

SEQ ID NO: 33765 - DNA, 484 bp, Glycine max
  unsure at all n locations
actcaagctngaaaacaaaatttgctattaatttctattgctacaactttcataagtgatgatggctacttgcacacacatntgaggagtgtgcatttgttactcttaacgaaagaatcgccattcccttctcccttgaatagctcctcgctgcttctttctttgtctggaccaaaaacgtaatntgctttgctaaatcttacaagtttcctttacattttccattttgtctattatgcgttaataacttattgattaatttgcactgatttgatcatggggacatgtattaaacgatgtggattacatagttatatatcccatatcgacggtattataacatatgacgatttatgctgtttaagacactaaccatattgattatacgtatagcatagaacactatcattattcgaattccggaccacgatgcacatacctcccttatatacatcactaatctacttgttttaactattacatg

SEQ ID NO: 33766 - DNA, 401 bp, Glycine max
  unsure at all n locations
agctttaccagttatcaaccattctctgcctatggcgaaagccatggcctctacacagatggacgacaatgtagcattttttgagtaagcaactaactgagcttgcagagatgcttaccaacagacaacaatgcttgaagaacatcaaaaattgattacagatctgcgaacacaaaaggatgatgcacacaacgaacattcaaaaacactgcaacgcaagggggattcactgcgaaagaaaaagtgcacagacnacaaatttaacaaattcaatctccattttctattgaagtccagaatgagagaatctctgaccactatcatcacgagtaactcgtgttcacaaacagtttttacaacatatgtcttacgaggactctgtcatgttattaatacagata

SEQ ID NO: 33767 - DNA, 422 bp, Glycine max
actcaagcttgtataaatatagtgtgcctttatctaaagccaacttatataaatattgtgtgcttttattcacttgcactttcattcttctccaatcttattttcatccaacctaagtttcctcacgaagctttttttgtttgtctacatcccacttttttcatccttctatccatctcttgtttcttgcattgtgaaccaatggtacatgcacaacctagacctattgatgacttgttgttaaacttacaagacaatcatatttcgaatcaagtgtgagaaggccaagagagaatgatttgtctaaggtataatactatttgggcttttacacacttagatcggatagataattgtgtcaaagacctaatcgctgtagctgattctgctcatgttataaatgctggaaaaattgatattaa

SEQ ID NO: 33768 - DNA, 230 bp, Glycine max
tatacaggcatgccacactgtctgaggactactatcatcaaatgcctcatacaatggagcttcgacaatctgcaaaggttgaaatgcattgcgcattcttgccaattccaatgacactggcttgatacgacaaaaatagttactaaatatgatttttagctactcaaaaactctcataactagcatatttactgaaaattgatcacaacgtgaacattgagaactttgtt

SEQ ID NO: 33769 - DNA, 458 bp, Glycine max
  unsure at all n locations
tcttatccaggcaattcttggtggtgaagctccttcttccttggcttattccctagtggatggtgcctcccctctcctcttctcctttgccttccgctgcatctccatagtgtaaaatcaccattgaaggacctcattgaagctcaaagatccagcctccatagcagctccacaagcaagcttccatcaaaatggctttgggatggtagcctcagatgactcatcctccatatgctgaggtacctgngctgtgggaccttcgtcttccttgtgaagagaangttgggtcccaggccaggctaccatctcattaaactggtctactgaagggatagagttttgaggtgccaccatatataaacattgcagtaaaatgatctgtccctgatgaatgctctgaagcatagtgtcacaacctacccttcngcgggagggcgacacgaaggctcacgggtgca

SEQ ID NO: 33770 - DNA, 492 bp, Glycine max
  unsure at all n locations
acgcgcgctgtactggaacatcacgatatnggcgaanccactcggactcgccatactcagagccagctgaggccttaagctttttttgctggaagaaacaggtactaaacgaacgtacgcatcctgacatttgccctaatttgaaattataatagaacaattaatgacaactatctacgtcatctcctgtcctaaagttagtggtaactgaactggtatcccgttcgatttacaaattactcttgactcatgtcaacatcagcaatgttagtctccattattgtaacgctaatgcatatacgttaaatatattccaatgaacgctaaacattagcatatttacactaatatctnttgatctttaatgcctggatcactacgactgagatattaaacaaggatatattcgaccagatactattaattcaactttgaaactntaacatattaattgctttgagatantaacaacacactaagacatctcnatct

SEQ ID NO: 33771 - DNA, 364 bp, Glycine max
  unsure at all n locations
actcagctttcaaataagtttttcataataatttgtactatttacatantacacattctttaaatagtccttacacccatcgccataacttataatatcataaatgaaaaggattatcaacacccatttacatatttagaaaaggatctagtaaaaacaatcacttttccattcattggagacatatttaaattacacttagacatttccttatgctttgttgaattacacaaaatatttttattttactcttacaatgacttctcttatagatggatacatgtgtaatatttnttacaccttaaagagagagagtgtataacgcaaaaagaacagtcaatatactgtttttaaaacaattata

SEQ ID NO: 33772 - DNA, 311 bp, Glycine max
  unsure at all n locations
tctgctttataagtgcgggtctgggagacgaatgtcaagtggttgcaatatgtgaagatgatgttccaagaactctcggatctggtccgaccatgcccatctgatttccagctgggaaattggcgagcggaggaacgccccggcatttacgcaacgagcataatgtaaacctttacagttttaacagctctatagttgggcctaagctttacagtttctattttcgtaaggctttgtgtcttttgtccttgaatttataatacaaggatctttcttcatntgtccctggnctctacccattctcattcatt

SEQ ID NO: 33773 - DNA, 264 bp, Glycine max
gtgaataaccagaatagctcgtactagtaattcaaagaatcagcaacgtacctcagcaggccaggcatcagactcctgtaaactcacatttgtctccaactgtctgaattaaagaactccaatccatcaccacttggcccagccatttgatctttctttctactacactttaaatttggtataactttattcaactatgattatatcagaacctaacacgttttgcttcacttcaccaaattgatactcccttgctttctcctc

SEQ ID NO: 33774 - DNA, 418 bp, Glycine max
  unsure at all n locations
tatacaaactcaagcttgaattaaagtatctgaaccttcatgttacacagnttgntccttaatgagctggttgcaaaaattggcaaactgactattcacctacccatgcaacttcaataccacctaatgatcatgtctatttggattttgaatccccatcaccataaacagatcccacacttgctgggctttaatacaaccttcgcaacaatagcccatatgaatgcctttcccacataaattttgaacgttgagcacccatgctcaagaccttgttcgccaacccaaccacataccatataccacatctcctcaaatttgatatgcctttgttgggtcaaaacattatcaactacgtccaattatgaagtgactcctttaactagcatcaagtccttggtagtcacttttctatcca

SEQ ID NO: 33775 - DNA, 358 bp, Glycine max
ctactcgatacgtgctatgcacccgcagttgtgcacattgtgatgctcgcatgaatattcccggagcgtctagtgttcatagccgatcttgacgagcttatacgctcctacttaagacattcctcggataagttatgaacataagaaattctcaccgaccgccggagttatattatccgcgaacttctgtgagaatcacttccgaccgacctggcgtgccgtagccacgacggtaagcatttagaggaacctactagtgtaataatcaaacagacatcttttagtaaaatcccgcggagaatcaatcggacgatgtctctgtgcgatttcatattcttaaacgaattgatgaataact

SEQ ID NO: 33776 - DNA, 488 bp, Glycine max
cgccggtccgtgagctttgaacatgatacaaggcgatctactgtaccgggagctctaagcttattgcgtgtatgcacgctttgtaatggccgagacatggatggctcgatcccttcgagctctaaccaaaatcatgccttcgcctgccaagaaaagatgtgatattacagcggtagaacgtgactaatctatagcatgtaggactatttagtaccctaaacatgtcgacctggctggcagggcctccacatagcataacggagatacaacatctccatttttgacatcactacaacgaaagatgtggctgcggtaaaacctatttcacattctctaacaatacccacatcttccacatttcattatccgagacacccataatcctgcaaaactgcatcactgacctttcatacgctcctctgcccacaccatctttgcacactaccttcttacgcacacggctggagccactggaccattcgcttccg

SEQ ID NO: 33777 - DNA, 381 bp, Glycine max
  unsure at all n locations
tttaactcgaaaggccctcatagacttttttgagatgtttatggatgtctgaaatgaaaataaaaggccatattggattagagatcatgtatggaacgatatgttatcacattggaatgcacctgngaacctttccaagtgtgcataggcaaaaaaaaaaaaaaattagacatctaaaaaggtggatgtatgcacacaggtggttctatcagccttcgggatcacgtcattcgcttggtatgtacattaaaattataatacatatttctttgtattgtttaacttacttcttaatgtttattttataatgtttgttaataatagtcacaagagtttggtcgatctgcatacatagatgaggtctttcagcacactcattta

SEQ ID NO: 33778 - DNA, 402 bp, Glycine max
  unsure at all n locations
attaagagacttcctcccgaagcttcctcgtggattctttgagaagctacacccttatctatccacacccctcttttaacttacttaacctccttcaaaataattacggatgacaataacgcaacaaataatcaaacatcaagcctaatcactaataatatatatatatatatatatatatatatatatatatatatatatatatatctctatatctatctatatctatctatctctgcatcccccccgcgatccctcttctctcntccatctccctacactctctcttccacatagtcatcatatcctctcatacatcgcccaacataccgccacctccgcctgcggacaccaccctgtgtcctctcatccgcttgtatccctactcttctctactcaccc

SEQ ID NO: 33779 - DNA, 430 bp, Glycine max
  unsure at all n locations
ctataaaactaagcttctcgggccattcctgttattgcaaacatttggaatgntagctctaccagtgggacattactcttaaaacaaaaatggcatataacctcctcccacaaatacaaacatcaatgtaaatttagagcaagcttatgcgcatatttccttacaatcgttctcttgcacaagacaaaaaaaaaatgcacccatatacaatcaaggcagcttcgttacctagattatttacacgtacttccaaagtgtatttgttacttacatcacacacatcttcttggctaaattcacatacatgcatactctaagcattttgnggtaccacaaattgcacctgtgcacatcttggtatttctaatacctatacatacacaaacttcatgatgaatcttgactatctacacaataaagtgctacatct

SEQ ID NO: 33780 - DNA, 398 bp, Glycine max
agctttgagccacagtcccaactcaccataaactcttccctcacaaggaaacacaatacacaggagaaagacgaaaggagacaaggagaaaattcccaatcaaagagtgggagaaagcacataaaaagactagacagaaagttcccaatcaaagagtgggagacagcacaaacgaaaagaaggaaaattcccaaatcaaagagtacgaacacgaaaagaaaggagagacaattcccgatcaatgatcgaaagacaacagaagaaatatgcataacggtcttttacaccagaccacatctgaacaaatacagagttactaccaagtagacacaaaagaaggcggggaaaaccatgacctgaagcggtcctccttctttgattgccaaccacaatcctgt

SEQ ID NO: 33781 - DNA, 400 bp, Glycine max
  unsure at all n locations
ntgtagcataaggactaatgtttgcgagctttggactattcggtcctatggttgctgacggaggagctggagtggatgatgnaaggatttcatctgctctagccctttntctcgatgccatctgtgactaaaaagaactcanaattgcttagaccaaatttatttaagtttaaaaatagatgggtgcttagcgggatatagattgctcagcgcgcccttagaaatatagcatatcgacttaacgaaatagtgtgtgcttcagcctaatcaacaccgcaacaaatatgtgctaagctcagtanggttgcgcttagcagcaccaagaaattctgaaaattcactaagtatgagggcttagcgagccagacacgcttagcccaatgatttccgtaacgaaatg

SEQ ID NO: 33782 - DNA, 364 bp, Glycine max
agctttcatcacttattccgcaccagcatgattggagtaccgaccttaagtgttaatttgtgattaggtatccctgatgttttcaatgagtttagaaatttacgtgtcagtaatccgaaagtaggattgagtagttcatcttatttatcaatgttatcagtgctacaatactccttttcgtcattgggtatcaatgataagacaataatttattttgtcaacaatatcttttttagaggcaagaacaactcttttttgcaagtaatctgcgttgctatagttatgtgtcaagttgggatatgttgcatcaacaattgcctggataggatcagtatagtcctttataaggaactcatctgggatg

SEQ ID NO: 33783 - DNA, 418 bp, Glycine max
  unsure at all n locations
tatgcacggaanatgtaattatgaaattgagatgccctgtgaaacaccatttcctagttaaccatgcattaggtaccatgttcaattattttgtttttaagtgaaacgggtttatgatcccaacatggttggctcgtggtgcctaacacatgaaactaagaatgtagtgtgaagtttcacgcttcccccttttttgtttttgttttgtagaggaaaacgcaaggatgagcaaacatgaaaacaaatggtatgcaattttgcagatcaaaaagtttgttgaacgcatatgcatgatgatgccatgactcatgcaaaatgtgaggctggaatatgataacggacaaatgcaggatatgtccattatgatgttatgaagagatgcttatgcgatgcatgatatgaatgcattttacggaca

SEQ ID NO: 33784 - DNA, 424 bp, Glycine max
  unsure at all n locations
agcttatgcgcatatttccttacgaacgttcgcttgcacaagacattcttttaactaagaaaaatgcacccatatacaatcaaggcagcttcgttacctagattatttacatgtacttccaaggtgtatttattacttacatcacacacatctccttggctaaatttacatacatgcatactcaaagcattttggggtaccaaaaattgcacatgtgcacatcttggtatttctaatacctatacatacacaaacttcatgatgaatatcgactatctacacaataaagtgctacatttcatgctcttttcaagtttttgctacctaaagccgcatgcaaattcaagtatattttcctttgctgactaanattgtagtaaaaggtatatattctttctgtaatgtattttctttacataacatg

SEQ ID NO: 33785 - DNA, 466 bp, Glycine max
  unsure at all n locations
ctaagcttaacatcagaccacttccagggtgctggaactacttttatggacttgatggngcccatgcaagttgaaagccttggaggaaagaggtatgcctatgttgttgtggatgatttctccagatttacctgggtcaactttatcagagagaaatcagacacctttgaagtattcaaagagttgagtctaagacttcaaagagaaaaagactgtgtcatcaagagaattangagtgaccatggcagagagtttgaaaacagtaagtttactaaattctgcacatctgaaggcatcactcatgagttctctgcagccattacaccacaacaaaatggcatagttgaaaggaaaaacaggactttgcaggaagctgctanggtcatgcttcatgccanagaacttccctataatctctgggctgaagccatgaacacagcatgctatatncacaacagagtcacac

SEQ ID NO: 33786 - DNA, 466 bp, Glycine max
  unsure at all n locations
ccgcgccgtgtcttgaccttaggggattgactgctaccgggatcttaagcgactgggcagcggctttgaggcttgagcattcgatgaacacgnacctgtagtcgatgagaggcatgctcatgcatgtgaagaaacttatctaactgagaattgtgtctatagacttgccatgatgatgcttgatgcacgacatatcctacttacagtatgacagatgacctcagggatgatccatgataaatgccgctcatgggagcggggcatgttaccgactagacttcgcgaggcttcttgcagctttaccttgatctctaagctctcgcctttctgatgtccaccatgttgctcatgtcgctaatctcatggcgctcgcagtatctctaacatatactaggttatcgtgctgagacgtataataacaatcctataagctgtcatgacgtatatcgaagatgactacacctcg

SEQ ID NO: 33787 - DNA, 452 bp, Glycine max
  unsure at all n locations
tcttatccaagactcatcttggtggtgaagctccttcttccaaggcttattccctagtggatggcgcctnctctcacctcttctcctttgtcttccgctgcatctccatggtggaaaatcaccattacaagacctcattgaagctcaaagattcagccttcataaaagccccacaagcaagcttccatcacttatcatattgccttgtatgtcttatgcatcatatcatattgtcattgtgaaaacaacttttcccgacaaaattttcgttgtaagtcgctgcctacaagtccattgctaaaagtttctacaacgacattacaatttgttgacattacttatgttttaacaatgataattatcgccattattttcacacaattgttgctaccataagtaatttgtagtagccattgaagttattgttgtatttacaggccttaacaactaac

SEQ ID NO: 33788 - DNA, 259 bp, Glycine max
  unsure at all n locations
agcatctcntacttcgacatcaatggcggacaggacagcggtgcttacctcgacggtcgacgctgacgatgatccctcgacggtggacggcgcgctcgctggctcgcgcgctcctcttcaccgcggctcgcggcttcgggctgctcgcgcttcgtcgatcgcggctgacgaagaacacgaagaatcaaacggagaacaacaaaaaggcaccgcgaggaagaagaagaatggctctggggaagaatcaaacgctccgcgg

SEQ ID NO: 33789 - DNA, 453 bp, Glycine max
  unsure at all n locations
actcagctttatcctggcttctatggtggtgagcttgtctttactctctttttcttgaagcgacgtctccaatcatctttcttcttatccattccactgacattgatcttcaagaagaaaaggactccattgatgaagaagatccacggcctacaagctccacatggagctacatcataaaaagctatgtcttaagctcatgtgctacttcatcgccatccgatacctaaagtagtgaaacccctttgtgacaacaaaatatgcttttgttgagaataattgttgaggagttagccctcacagtaatggataaccacaaattggtacttgcgagatgatcttaaggttgtataaccttggagggagcgactntaagtcatgacgatagttcacatagatgacttggtaaccctgacaaatatataagccatcctcagatggtgagagccgtca

SEQ ID NO: 33790 - DNA, 325 bp, Glycine max
agctttataactttaattaaaatgtccacaaactgctggtaatcgataccatatatgtgaatcgatacacaggcaatttgaattcaaatttaatagctgttgtaaatccagttctggccattggcaatcgattacatcctctggtaatcgactaccagagagtaaatttgtttgacacagactttttaacttagatttcttggcccaaccttttgctactccaattggaattcacttcctatctaatataccctttctaagactctagagactgtcttgatcatccatcttgaatatcttaactcctttgcttgaataaactttg

SEQ ID NO: 33791 - DNA, 446 bp, Glycine max
  unsure at all n locations
agctntaccttagtttcgttgcttacagaanaataaaataattcctatggttggaggattgtgaaatgacatttagaaagttaaaggagtttctttccactcctcctatcttgacaaagcccaagtcagggttgcccattataaaatacttgtcggtcttcgagcatgtcgtcagctcagttctagtacaggaatttggagttgaataaaagccaaattattttgtgaaccgggtgccttttggtttcgagattaggtatcaaagttagagaaattggcattggcagtacggatcacagctagaaagttaaagcattattttcatagttacccaattataatttgaaccaattaatctatcaaaacaaattntacagaaacaggatcttgttgatcagatgatgaagtggttgttgaactctcagagtttggtatatcgtttgaaa

SEQ ID NO: 33792 - DNA, 380 bp, Glycine max
  unsure at all n locations
taagctttaagcagattntagtaatgaggcactagactagaattaaaataacttaatgccattaacctatggaattaacaaaaacttaatggctgagtgtaactgacattgcggcaaccaagagtcacccccaacagccaacaagtcagccaccatttggtctcccaaaaggctgatgcctaggttgccaattgcgcccttattacaacttgaactaaacctaactaaagcccttttagttgatcaacccataacatattattggccacccaactttacaaggattgcgccattatctagacaaactaaacactctaaaattgagacaaggtggtgtcatttacgcctcctccatttgcgccatgatacaactcacaacc

SEQ ID NO: 33793 - DNA, 346 bp, Glycine max
aatcaaaagatgcaactcttcaaatgatctttgacttattcaaattggttctaattttttctaaaagttataactcttctaaatggtcctcttgaccagacatgaagagtctataaaagcaaggctttgtttttcattgtcaatcaatctttctaacacttattcatacaatcatttacaagccttgaatctctttgaacttctttttcttctttgtaccaaaagctttccaaagttttctggttttctaaaccttgaaaacttgtgctattcattcttttcatctattctccctttgccaacaagacttcaccaaggactaaccgcctgaattctttctgtgtct

SEQ ID NO: 33794 - DNA, 336 bp, Glycine max
tacgctttcacatacaccgatggtattgatctttctgcatccgatgatgaagatgatgatctctcggaagacgacgaagccaaaaggtccagtcagcagcagcaaaggcctgtttcgaagccacttgatgtgcatattgctgagaacgagttgactaagcgtgacaagcaagatcttttagcaccacatgttgctgagcaggcaaagaaggacgctctcaaggatgatcacgatgctatcactgtggtcattggaagccgcgcttcggtgctcgatggacgagatgatgctgatgctcatgtcacagatataacagtagacaatttctccgtgtct

SEQ ID NO: 33795 - DNA, 413 bp, Glycine max
  unsure at all n locations
tgtaatctggcttcttttaagtcatcatcatgattagtcagattatagccgcattattggtgcgtgctagtgtgctatataactagagagttctcattgtccacttcttttgactttnttcgtacccatccactatagctagcactaattctatattctcctaggtttgaaacttaactttaaatcatgaagtcagccatccattgtttgattntttttatactaaaacacatttttgagtcaaataaaattattataagtaacaatttttttaattaaattaaaataattntgtcaaataattcatatgtctgatttgattattataattaatgtccttggctcaacaaagattatgacaaagcactttanaaagccaggttatactcacatccaaagcatgaccaaaatag

SEQ ID NO: 33796 - DNA, 298 bp, Glycine max
agcttggagccggtcaaaatgccacagtagctgtaatgagctatagtggttatgatatacaagatgccattgcgatgaacaaggcatctcttgatcgctggtctgcgccctgtattgttatgaacaagcatgtcattttattcggcgattttatgcttttggttgccttatattttattgtctacgctttttaacgcagcatttctgatcttgaccttccctgctgtataggtataatgccatcatctacaaccattcgaatgacacatcataccgaatacttacgcctaatacaact

SEQ ID NO: 33797 - DNA, 438 bp, Glycine max
  unsure at all n locations
ntggcacacagctaatcattaccttcttcatggaattatggtaaacacagttctatcacacaataaaaaaagtgtcatataacctgcttaccgtctctcttgattttggtcgaagaccatgccattttggaattgcatgtgcactctctacataagctgcatttgttccagtaccaacaatcactccagcaacaacatcctgattgctgaatcttgctctagctactgttccgactgtgtcattaacctanatcacatcaccaagttntgtctctggttcaagacattaagtaaccaggaaatttaaaagaaaaaaaattgaaactacaaaactcattgatctaaattntccgccatatagaaactgaannatattctcanagccagactanaggggaaaaagaaaacaagacaaacaggaagagaagtacactgact

SEQ ID NO: 33798 - DNA, 486 bp, Glycine max
  unsure at all n locations
nacgacgcgntgacgctgaggcntcttganactttgcaanccagctcgtacccgggatcctcagagtaacctgcagcattcagcttttcccctatttttataaggagggggagaattgaagtggactctggtccatcccactgagcccttgtctctgtctcgaacttggttagaaacatcgtttccgcgaagagaagccaagcctatgccactccgaagcgcttccgtgagcgatcacgcaaaggtagtgacgcgttcttcgacagtattgattacgacttcctcggcctctgagcctcaacggcgaagtactctcgacccggctcttcgagacatctatgtacccgaggtgagtcacaccgagcccctcgcatttctctatctcgcttagtagagctttacgatacaccgttgacgcgcttacgacacgacattgaagccgtatctctgctatcccactaataagatagtgatccaccgatcgcg

SEQ ID NO: 33799 - DNA, 450 bp, Glycine max
  unsure at all n locations
ggacctataaaactcagcttaagaaaaaatggcctcagcaagcttttatnttttaaagttattcaacaaaggcctccatctttatggagagggtaccactactggaaaacccaaatgcaaatttttatcgaggcaatagacttacatatttgggaagccatagaaatagggccttatatacccaccacagtagacagaattacaatagatggaagcacatcaagtgaaagcataacaatacaaaaacctactgatagatggtctgaagaggataaaagatgagtacaatacaatttaaaagccaaaagtataattacatctgccctgggaatggatgaatatttcacggtttcaaattgtaagagtgctaaggaaatgtgggacactctacaattaacacatgaaggaacaatagatgttaaaagatctacgataaacacattaactcat

SEQ ID NO: 33800 - DNA, 446 bp, Glycine max
  unsure at all n locations
ggacctataaaactcagctttacttggtgattgtgaagttttgaaaaattatttctgcctatgccgagtataacattttctgtttataacttattgatgtattaattgcattgatcatcactgaaaaatgttagattttggtgtctcatttcttgtttttataatgattgccaggatcactattttgatgtgataaccaacatagttggtttggttgctgctgtcctacgtgataaatttacttggtggattgaccctattggcgctattttgcttgcactctacacaatttcaaattggtctaaaacagtgcttgaaaatgctaggtctctctttctctcttcttattctgcgtcttatgctttgttcaattacgtactctatttaaatgatggttacctcttggnttagtttccttggttggacaatcagctccacctgaagtc

SEQ ID NO: 33801 - DNA, 369 bp, Glycine max
agcttgaataagtagcagcaccacaccctcaacacctttatgcctattcagatgaaagcttgttcctttcaaacacgctttttgagaactacattgacccaactggtggttttctttatcctacaaagatcaaccctcattatgattcattcactcatcgtgatgacattcttccaactaatgaagaaaacaaactactcccatgtccagaacgccaaaagtcctcctacgaggaaacaaaatgtactcttcactgcaagagtttactaaacacaaataccatccaatttcttacatgggtttgttgtgccttatgataattgttgttccttgcaagcagaggaactgcaacagcaactcttctatgag

SEQ ID NO: 33802 - DNA, 437 bp, Glycine max
  unsure at all n locations
nttatgtcttgctaatgttaatagatattacctatctattaaagccaagtcatggcttaaggcctgtatcaatcctattctcttctaaatcatgacaagaatgataacaacaaaactaaccataatctcatagttatgaacatgatatattntctttgacagtacatttgttccccttataaaattctctataacagttgttgttcatatggtttctgtggcatgcccttcagaatgcttttgcaaccagtcttcaatattgtatttcctaaggtaggaatagtgcataccacttctgagttgatctctgttatcattcacaggttntattcttccagttagatagttattcagtgacttggttaaggccctttggcaagtaactggggagctctctcaatgcaatatcataattntaagcagttaatactatgtga

SEQ ID NO: 33803 - DNA, 445 bp, Glycine max
acgccggtgccttacatcagcctggacgtcccgcatctctaagcactgacgatgccgcttataaactatatccatattctgtgggtcattcaccttaaaaattcttttatccatctcctatactcccttattcctatcctattctgaatcactatgacaaatgatattatataacgtctcatgcatgaagaactgcacacccataacatatattgggcctgattacccataacctacaacggcgatgtcacccctccacctccactgtcccccacgctcaccccatataccgcgacccctgcgctctcgccccccccccacctccctcgctcccatccccccgccaccctcccgttcccgtcgctcccagcccacccccactcccccccctccccccctccacacccctcgcccccccccgctccgcacccttcccctcccccct

SEQ ID NO: 33804 - DNA, 425 bp, Glycine max
  unsure at all n locations
agaactgcttcttcctgantatttgatccatctctcttttcaccactatgaaaccattttcaactgttggcaatgacgagctattatttctattatttaaaagttcatactgcaaagagtcttggacactacgaagctgttccaatacttcttgcacaaattcaacatctaatccaaatctatcctgctccaaccattttcccaatgccacgtagataccttccagatcattgtctgaataaattacatctgggatgccaactgaaccaagagaaccacaaaatttatccaacgaagtacagtatgtatcactttttccattccttaaatcccacttatcaacatggttacaatagaacttgagagttcctttcagttttaagatatccttgcaagcattaactagcttttgagaaataactctc

SEQ ID NO: 33805 - DNA, 418 bp, Glycine max
  unsure at all n locations
agctttctcggttccatttcctgcgaaggcaaacatttggaaagttagttctaccagtgggacactactcttaaaacaaaaatggcatacaacctcctcccataaatacaaacatcaatgtaaatttagagcaagcttatgcgcctatttccttacgaacgttcacttgcacaagacatcctattaactaagacaaatgcacccatatacaatcaaggcagcttccttacctagattatttacatgtacttccaaggtgtatttgttatttacatcaccacgctctcttggctaaatctacatacatgcatactcanagcactntgnggtaccaaaaattgcacatgtgcacatcttggtatttctaatacctatacatacacacacttcatgatgaatcttgactatctacacaata

SEQ ID NO: 33806 - DNA, 451 bp, Glycine max
  unsure at all n locations
tgatattgaaagagaanttgttctacattctatatttattgntttgctcatcaacttcaatgagttcttgttacattggcaaaaaaacatgttcaaattgcattaattgttattcaatttagttgctaatttgtctaatattgttggagcatcatgtaagcactgngatatttttcgaaaaagtcaaattacaatagtgaaagaagcattgcaaaaaggagaaatctcaagtgagcatgacttgaatcaagagagcaggaaacactaaatgaagctcacattatggtacattacttagtttagtttctcttttttcttccatgattgatgtgcttgaaataattgaagaagatgacataagtttagagcanaaggctaaaatatgtgctttngtaaattctgtgcaagcttttgaatntgttttcatcttgcacttgatgaaaaatattct

SEQ ID NO: 33807 - DNA, 347 bp, Glycine max
agcttattaatgtccttaccgtttcacattgagcatgtatgacaccagtgactgatatgatgtgcaaagctgggactcttactatccagttgttataactcacacactcttaccttgacagtggtgggattaagagaaacactatcacttgtgaggactgaagattggcgattattgcttgcgatatgtcattcttgctaaccatttcattagacgcgcgtcctattctgctactttcatgatcctatgacaactgtgaacttgagaactgtccaatccagctctctacaacgcatgccgctatctcatgagtgttgattgggcaactctataacttttgcttctgc

SEQ ID NO: 33808 - DNA, 451 bp, Glycine max
  unsure at all n locations
tattgganatgaatcatatctcattctctgttttcatgccttggattttatntgtaaatgaattaagcagcttgttgaataatgagtctgttatttacttcatattaattttacgtgtcatttgctgcagactgattgggagggtggctacttcccgcttacgctgcactttagtgaagactacccaagcaagcctccaaagtgtaaattcccacaaggtttcttccaccctaatgtttatccttctgggactgtttgcttgtctatacttaatgaggatagtgtaagtacatctctcttgataattgcatgactgcttgaaaccaatntattttttgtgatattacatgctaagcaaacagttaagaattataggtttattgttctatacaggggtggagaccagccataacagttaagcanattcttgtgggcatccaagacttacttg

SEQ ID NO: 33809 - DNA, 103 bp, Glycine max
agagggtgactactactggaaccccctattgcctatattcaccgccgttgcctatttagctgtctgtgaagccatagcaatacggcctcatataccttccata

SEQ ID NO: 33810 - DNA, 453 bp, Glycine max
  unsure at all n locations
ttgtgtgattctataatcgattaccatatgtggcaatctgattaccgttttagcacaaaagaaataaagatacttagacagaaaaaaattaaatgattactccatttgataattgattgcccagtttatggaaatgcagaacaaagggtattttgacgaattaatcgatttcctaattctataatcaattagatctattctatttgtaaaaaaattataaatacttgttgcaacctacctcacgacgggatgacaaaagaaaataaagaataagcatgtttgtctcctaaggagaaaatgagtggagtcgtcaccaacatttatttaaggaaaaatattagaaaaaccaaaaagaggtttgcgaatnttgaaaagaacggttcgagagttgtttatgtatagggaatgtattagcaccccatgcgcccgtcacaagggatgacaaccttcaat

SEQ ID NO: 33811 - DNA, 392 bp, Glycine max
taacttttattccataacgaaattcaataaatacgcctcctatccttaatggagaaagttaccactactgggaacaccgaatgcaaatcttcattgaggcaatagacttacacacttgcgaagccataacagtaggaccttatgtacccaccatggtggctggaaatgcaacaatagaaaaacctagagaagagtggactaaagatgaacgactattagtgcagtacaatttaaaggctaaaaacatcattacttctaccctacgacatgatgaatactttacggtttcacattgtaagaatgataaggatatgtgggacactctacaagctacacatgacggaacaactgatgtcaaacgatctacgataaatactttaactcatgagtat

SEQ ID NO: 33812 - DNA, 460 bp, Glycine max
  unsure at all n locations
tgaagcggaaatgcccaaaaaaccaataaattactactaattaattgattgtgttaagatttgactgttggaactgcctaacaaattatagtagataagatttttatgctatttttaaggaaaaaataaaagtcatgttgactgataggataaagcagttttgatcctattctctangcatgatttgttagtggtgttatctttctgttagtgatgttatctttntgttagcagttattatcttttccatgcttttaaatacgttgcttcatatcagaataaagtaagcctttgcagtctcaatttctttctttatgctcccttttattgtttaatatttctgcctactcttattaaaaaaaaacaacaaattggtatctagagctcttatctttaagggatctgtgagttgagagaaatcacaatggagggagaaacatcatacacagcaagttcacca

SEQ ID NO: 33813 - DNA, 315 bp, Glycine max
aaagtacatatttacatacatacatatatatatatatataactcagatatgaaaaaattcctcggataaaccttatatatttttactcgagacaacatttattatacatactatgaatgacatgaaaacaattattaacaactaaagaatccacataacattaaataaaaaatacaattatgcttaaactactataaagattaacttcagaacatacaaaataaaaactaatacaaaggtttattctttgtctatgggacatatagctcgaatttctcgtgatttaggagctgcagcaactttgcattccatttg

SEQ ID NO: 33814 - DNA, 445 bp, Glycine max
  unsure at all n locations
tcagttcanagcattgaataattaaatatttggcatttagcttgtgcacaacacaaggaacttatgcctttgaagggaatggctatagctaaatgggaatccaaatttaatttatcaggtgctctacactagtgaaccaaatcttccacaatccctcaccaccagtgtgaacaaaacattacatcagcgtgtgatgattgttgatgattatgtcattgcctcgacaattgtagtatatacatgtgactcaatcggtagtgtttgattcttccatttcaatttacacgtttattgattttcttctttcataatgcgtgttaatcctaccttctttntgttctgttagcaagcaaaggaaagctaatatactctntctctttgttctttggagaannatggtggaaacaagtcaaccattgtgtcaactcttcacaccccattttac

SEQ ID NO: 33815 - DNA, 414 bp, Glycine max
  unsure at all n locations
tgtaaagctgactatcttcattccacagtcgattggataatgaagagatctacgcctacttccatanaattgaacatctacccaatcgcggggctcgatacacacaataccttgcaaatgcctagtacggctgactgacaacaatcaatataacatctctcacaagagtcacatgctccatttcagtttggattcattgcttcctttgagttcgccataccttcttgttgtacagataactccacattctcacgattgcaactttaaacaataaaatacccattgtctttcgtggagacgtatattacagcagatcatacaggtgagacaatatagacttaactgacccaacattctatagattatacgtctgttcaaatactcagactttgacccacacctcttgtgagaccg

SEQ ID NO: 33816 - DNA, 445 bp, Glycine max
  unsure at all n locations
tgtggtcaagtaggttttctcaaaagttgtagacattttgtgctcattcatatcttattcaattattactgcatgaagtttcttggctgcatattgaatctgtttgtttgatggtgagatgattcttaaaaaaaatgattccttgactccaataccataaatttcgtggtggataaccttgcaaactgaagagataagtgtcaagtcgtattattctatcgcgaaacaaaggttgatactggttttaaatagcgtttccgcaactacaattgtagtcacaatgtcaaagtattttgattcatcataatgcaaccacaaccgtaattgcagccgcattagtcacagttttctgcaatataaaggttttctgattcaccacaattgcaactgcgaccacgatngatagtattagttacttgctgttccctgccccaatatagttact

SEQ ID NO: 33817 - DNA, 382 bp, Glycine max
  unsure at all n locations
cacgatgcttggtagttcgaccatctagaccctttgttgcgcaatcatctgtagaacaaatncacatatccatccgaatacatgaatgagaaaacgttagggctcctatatttattacattggaatctatctaatataccgaaatgatctgtttaataaaatcataaacatattcccaatcttagcaagcatatacgacactgatcttcgactataccaactatgacatagtaactctttcactttctcaaccatatgatctataacatactttgcaagctcacttttgacattacaaaccactccccacgtgaaagtcaagccaccctctgaaagcggaccgtgtgtgacacgtactgaacatatggcgttgccttctccg

SEQ ID NO: 33818 - DNA, 442 bp, Glycine max
  unsure at all n locations
tctttgagaaaacttccttgagaagctagagcttagttacacacacccctctcataacaaagctcacctccttgagaagcttccttaagaagattcctaaagaagctagagcttagctatacatacctctctaatagctaagctcacctccttgagatgagaagctagaacttagctacacaccccttataatagctaagctcacccccatgacaaanaacatgaaaatacaaaaaaaaagtccttactacaaagactactcanaatgccccgaaatacaaggctaaaaccctatactactagaatggccaaaatacaaggcccanacgaagganaaacctattctaatatttacaaagataagcgggctcatacttagcccatgggctcgaaatctaccctaaagctcatgagaacnctagggcctacncttggatctcta

SEQ ID NO: 33819 - DNA, 335 bp, Glycine max
  unsure at all n locations
agcttcaagaaaattatggcctcagaanacttcttatttccagaagggaattctatcaatacacctccaatctttaatggagagggttaccactactggaaaanccgaatgcaaatttttattgaggcaatagatctaaatatctgggaagccataaaaatagggccttatatacccaccacagtagaaagagttgccatagatggtagttcatcaagtgaaagcataaccatagaacaacctagagatagatggtctgaagaggatagaatacgagtaccatacaacttacaagcccaaaacataataacatctgccctgcgaatggatgaata

SEQ ID NO: 33820 - DNA, 436 bp, Glycine max
  unsure at all n locations
tgtagcaaattcaaaccccattaaattttaactcagatgtacgattaagtcccgcaatataacgagacgcttgatattgaaaacaaaagctctgagcaaattctaacgacaaanatgttttcctcggatgtctgattcagtcccgtaataaatcgagccgctcgtaattgaaaactgaagctccgagaaaattaaaatgacaataactttttactcggatgtccgatagtgtcccgtagtatatcgtgaaactcgacattgaaaacagaagctntgagcaaattcaaacgacaataactntttactccgatgtccgattgtgtcccgtagtacatcgagactctcgtaattganaacagaagctcgtagagaattcaaacgacaataactntttactcagatgtccgattatgtcccgtagtatatccatacgctc

SEQ ID NO: 33821 - DNA, 273 bp, Glycine max
  unsure at all n locations
gcgtatgctcaaatcgtcaccagtaaaccggacactgacgacctccacatcgcctgctaaagctgcatgcgcactgctccactgggccccacacccataatctccctcaacactatggggccgtgcctccacacttgcacatggcccatatccaaccctntgtctctcgctcgcgatgtatatagatatacatccacccccctcccaacacatcccattcctcatcctaacagtcttctcgagaaccatccaacgagggacacagaatattat

SEQ ID NO: 33822 - DNA, 162 bp, Glycine max
aagggacaaccaaggaccttcatcggagtttcacgacactgcaagatatatagctatgccgaacatacgtctaaaagttacatttcaatctgctaacaacaatcccatttcaagaacctcattttacgtggaacttacaaataatgacattgctacgaaatg

SEQ ID NO: 33823 - DNA, 509 bp, Glycine max
  unsure at all n locations
cggccacgcaggccattcgaggcgattgancncatgagnccnttcgananccccagacacnatataagactcaagcttgggcgtaacacacacccttattatgtcggcattcaacctttttcatnccacgggangcaaccaggatgagatgccaactgctcggcctaataacacataccctcaccttggaaagcaccatgcttgggtacacgctctagaactgagactcacgaggctcgtatctgttgcaactctcctgtcacatacattcgtgagattcataccagcatagatatatcctaccgaacatataatctaaccataatcatagacattcgaatctacaccatagaattcacacaataacacgtggttaatgagaggatagacaagatatgccattaccacatacagtgctcctgatagatcagtaacatctctctctacctcactcctgctcactctccgttgaagcatgccctcattcatacaatacactcatatctccg

SEQ ID NO: 33824 - DNA, 464 bp, Glycine max
cgcgggtccgtgggcttgatcatgatacttgggaacactcgaccgggatcttagagctttgcttatgaacttgactatacatcagtaatacgcgaagtttgacttgcaactttaccacaaaacatagtgaatccgatatatctttcctatatttagcggtcgtggaaacatacagtgatgaaggagaactcggtaatccttctattataaataatctttgcccccatgaaacagacttttgacaattgatcttcataccctgacgctcagacagaaattgcttacatactatccttcaccaatcttacttgaacacacagtacctctcacagaatacgagatcatcatcaaatccagataagatgacagataattggaccatgtgtggaaatatgaattggttcgcaagcatcatcccttctaatatattcctaatccatcaagccgctctcatgcaataagag

SEQ ID NO: 33825 - DNA, 436 bp, Glycine max
  unsure at all n locations
cagatgatagtgatgacgtacaagctctattcgcatatctagaaagagcccgactagtctaagagaagncaagtccataacttaccaactgaatagagtatgatgaactattggactgtaatatggccaccgctgaagccttggaacgagaaaccattgacgcccgaaaggaagaacacgtgcaagcacacgtatgaggggctatatatggcaacagtagtaagctcatgctgctaagaggagataggaatcatcacgggtcacaggcatgatcttgacggacgagctaatggcttaccttaggtcgaaatgaattctgtcccgacagctaagcgagactgaatggaatatgtggtccgtcatcgatgagtgctcagagaatctaaatctatcggcgactcacgagcaaaggctacaggatgagtacgccgagaag

SEQ ID NO: 33826 - DNA, 419 bp, Glycine max
agcttagaaaagaatggaatatagtcaaataatttctctattaatggtttctattcaagggacaacaaaggaaattcattcgagtttcaagacactgcaacatatatagtcatgccgaacatagtctcaaaagttacatttcaatctgctaaaaaaaatcacatttcaagaagttcattttacgtggaatttaaaaataatgatattgttaggaaatgttttaaggatactagtttaaaaaagttagcaaataatttattttaaaaaaattaaaaattacacttagaagtacatgaatctatgaaaaatgttaaattttactctctgtctctctctttataaaatatttttattttacgacacttagtattatatattctcataagattaaaagtgcaccacgtcatttatcaatgaat

SEQ ID NO: 33827 - DNA, 454 bp, Glycine max
  unsure at all n locations
ttgatatggaaattaagttgaaagtaaaggatggtatgtataggacatcaatcaatgtaatgaatgcagaaagctgtactgtgcctgagtgggtagcatgaacaaggtggccatttggtaatctaaccgtgatggggttaatttgatgatatgagtgaaagtttgttaaggaggaggaaacgtgatcagtggctcctgaatctaatatccaggaggtagagtttgctttttcgtaagatagggttatacctgttgcatcgttactagagcaagatgaaatggaagcgacctgaggcttggtggatgctgagtttcctgcatatggctgttgtattaaagccagcaatgccttgtactgctcangtgaanaacgaaccaattcttgagattcttggcgctgtatttggtcatctgtggcctttccttctacttgccactacgttgtagctattac

SEQ ID NO: 33828 - DNA, 396 bp, Glycine max
agctttccgtgagtggtgttttattctataccgcaactccggtgagagcatgccatcaaaaggcaccattgccatcgccatgcttaacgtctcttcccttcccatcagaagacacaatccaactaaaccaacctatgcgttttctcacactcgattaagaccattggaactccaccctcacaatataaaatatttatttcaaaccccaacaatccattcagcttcacaataattttcccattggtttatcatcattatcaaattcaaaacactcccccatcaactttccacacatgcttgattttagtacaaaaatgaaaaataaaaaataaaaacatcagttacaggcggttttaaacccccataaatgtaaaagtgacatgtgtctttacctta

SEQ ID NO: 33829 - DNA, 467 bp, Glycine max
  unsure at all n locations
actcagcttgttcttttataaaatgagaagttctggactcattattttatctattaatcttgnggtggatccaagtactccgatcatccatttgcatactcacgttntggtggcatactcaccgttgtttatttctttaggaatttcatcataactaagaaaacaccaaggcacccctataacactcgatccagaaaaatggataatgaagagggcgtgcaggaacagatgaaggtcgatctatcggccttaaaagatcaaatggcttccatctcggaggtcatgttaaaactccagaaaaccatagaggataaagccaccgcaaccgcctccagtacagttagggaagcggagccggtgctgcagcccgccttgaatccgggcctagacagaaacacggccatgttcggtcgaaggtatagtccgcaagcttatccttatggcctccctccggacttcaccccccg

SEQ ID NO: 33830 - DNA, 165 bp, Glycine max
agcttctgttttgaattacgagtgtatcgatatattacgggactcgatcggacattcgagtcaaaagctcttgctgatcgattatactcatagctcgagttttcaatttcgagcatctcgatatactacggcacacaatcggatatccgagtcaaaagttattgt

SEQ ID NO: 33831 - DNA, 315 bp, Glycine max
ctgagcacattcagacgacaataactgttgactcggatgtccgattgtttcccgtaacatatcgagatgctcgtaattgaaaacagaagctctaagcatattcagacgacaataacttttgactcgggtgtccgattgagtccggcgaatatcgctatgctctaaaatgaaaaatggagctctgaaacaaatcaaaagacgattactttttaactggatgtccgattgaatcccgtcaaatatccagacactcttaaatgaaaatatgagccttgaacaaattcgaaacactataacttgtgactcggatgtccg

SEQ ID NO: 33832 - DNA, 357 bp, Glycine max
agcttataatatatcgatacgctcgtaattaaacatcggaaactcttgagaaattcaaatggtcttaactcttcacacggatgttcgattctggcgcataatatgtcgagaggctcgaaattgaacaacggaagctcttgagaaattcaaatggtcataacttttcacacggatgttagattaaggcgcattacatatagagacactcgataatgaacaacggaagctcttacgaaattaaaatggtaataacttttcacactgaggtccgattcatgcttataatatattgatacgctcgaaactaacatcggaagctctccagacattcaaatggtcataaatcttcacacggat

SEQ ID NO: 33833 - DNA, 453 bp, Glycine max
tgaatcggacacccgtgtgaaaagttatgaaccatttgttatttcacgttatgctttgttgttcaatttcgagtgtcactatatgtgatgcgccaaaattggacattcgagttaaatgttatgaccatttgaattactcaagtgcttccgttgttcaattctgagcgtgtcgttatgtgattctcctgaatcggacatccgtgtgaaaatttatgaccatttgaatttctcaagagcttttgatgttcaatttcgagcctctcgacatattatgcgcccgaataagacatccgtgtgaaaagttatgaccattttaatttctcgagagctttcgatgtttaatttcgagcgtatcaatatattataaggctgaatcggacctcggtgtgaaaagctatgaccatcttaatttcatgagagcttccatgtttcattttcgagcgtctctatatg

SEQ ID NO: 33834 - DNA, 419 bp, Glycine max
  unsure at all n locations
gttttctaagacggtgtgtttttatccgtcgttgaaagttaacactctccaacgatgttagcctcctacgaacggcggcngaccgtctttgtatgtggtttacgaccctcgaagacaaccatttttttagcagtggctcatcagtcacctttgattccttttcttaaaacaggtaactcggctaagctatgcaaacaattagtagcctattcaagggactcaggctttctctgtaatgaatcacggtttgagaatctttatgagtggtgataataaaatactgataaacattgattaatactttgtgtatgcatgatagagcggtttacggaagttgacaccccacgctattcatcactacttctctgcaatctacatacttaaaaataaaaaccatctttaaatagttattctcagcc

SEQ ID NO: 33835 - DNA, 453 bp, Glycine max
  unsure at all n locations
actaagctaacaggcccttataggctgaaacaagcaccaaggtagtggtttgaccgactaanaattactttgattcagtttgggtttcaagctagcaagtgtgatccatccttgttcatatataagcgtcaagctcacactatttttcttctagtatatgtggatgatattatcttcaccgacagctcatcttctctcatccaacagattacaactcaacttcattttgcattctctcttanacagctaggtcaattggactatttcttgggtattgagatcaagtatctacttgataggtctcttctcatgactcanagcaagtacattagagacctccttcacaggactcacatggctgaagttcattctatttcttctcctatgacctcttcttgcaaactgtctanaactggtggtgaattatttcangatcctactctctacagatct

SEQ ID NO: 33836 - DNA, 480 bp, Glycine max
  unsure at all n locations
ncgcgcgtgtcctgacatcacgactaagggatncagctgggacccgctgaactctanaggcgagctgcggcctgttagcttgtaggattatggtgtacccacgacatgaggaactacgtggaccgccggcgacggcgcagaacatgattccagcttccatacactgcgacatatctcgccatgccgagcagtaccctccaagtgacgttacgtctgctaacgaagaccatattatcggacgtctactcaccgggtacctataaatacttgcaaccgtaccgaaatgcactgacgctactcattcacacaacgtatactatcatagcccatagcacagggcacaggcacaccattatggtcatggcaccatcgaaaatgacagcttctacacttagagaccccagttacaattacttctatcttaccaccccacgatgatcgactcgatacgatactggagccttagtaatatcatgaccg

SEQ ID NO: 33837 - DNA, 446 bp, Glycine max
  unsure at all n locations
ctaagcttctgggcctttctgcaagcttacattggttagttagntntaccaagaaatgctactcttaaaacaaaaatggcatacaacctcctccaataaacacaaacatcaatgtaaatttagagcaaacttatgcatatacttctttacgaacgttcacttgcacaagacattcttataactaagaaaaatgcacccatgtacaatcaaggcaccttcgttacctagattatttatatgtacttccaaggtgtatttgctacctacatcacatgcacttccttggctaaatttacatacatgcatactcaaagcatttggggtaccaaaaattgcacatgtgcacattccggtatttctaatacttatgcatatacaaactttgtgatgaatcttggctatctacacaataaggtgctacatttcataaattattcaagtgtttt

SEQ ID NO: 33838 - DNA, 392 bp, Glycine max
agctttaacctttggttttacacttcatatccttgcaagcaaaagcttgaaagataaatattgctaatttctgctagagtttgtctaaatttcctccaattagatgatcattccagatccaactcagtatgagtatagttaaatgcccaaattgcagtcccattctgtgtcacttttataatgaacgcattctgtgtcacttttataatgaacgcattctgcctaatgtcaatacagtacaagagaatttatttgtttcataaacaaagaactggacgacaggtagaaaattatgattcaattcagaaatccattgcaagacaatagccttgagattgaagagcttcagcatctgctacatgtctatatgactaacgacccaaaacagttac

SEQ ID NO: 33839 - DNA, 430 bp, Glycine max
  unsure at all n locations
tcttgaacgtgatcaatatatttattgtcacagaatatatgatgaagatgtggttcgtgatatcttttggtgtcaccctgattcagtgaagttagtcaacgcatgtaatttggtgtttttgatagacagcacctacaaaacaaaccggtatagactcccattgctcgattntgttggggtgacaccgactgggatgacattctctgccggttttgcatatgtggagggtgaacgcgttaataattntgtatgggctttacaacgcttctgaggcctttttttaaagcgtgatgccctccctggagttattgtcactgatagagaccaagcattgatgaatgtagtgaaagatgtattccttgaatgcacaaatttgttgtgcatctttcacataaacaagaatgtgaaggccaaatgtanatcactaatt

SEQ ID NO: 33840 - DNA, 257 bp, Glycine max
tagctgttcttcatggttggcatttgcgccaacctaacgtaaaaaatgctcttctccaccgtgagcttaatgaggaggtatacaagcaacttccctcacggctctcggttgataatccttaccaggtatgcacgctgcaacgttccttatacggtctcacacaagctacccgacaatggttcactcgtctctacttatttattgtttctcatggctatcacaaagcctccgctgatcattccctcttcttaagcttc

SEQ ID NO: 33841 - DNA, 445 bp, Glycine max
  unsure at all n locations
taggttatggatcactgtatggtttccttgaacctctgtctatacacaacgtanagaacaaacgtgaagaatgtcaacattacattcaaacatgggtcacagaatcacaacgagaagtgtacttgggagcttacctgaatcaataagttgaattgatgttgtacaatatggatattatgtgcattattgttgcctaactaatgtttttcgtcttcagggcacattggcaacttgttgttctgtgtccacgggacaatattgttgtttggttttgttctttgcataagaagcttgatgttaacatcaagactgcagtgaacaagttagttntaacattataagtcaattattgtatagaaattgtagcgtataaacacaatgattatntgattatatatgttaagttatttntaaactagtgcaatgaagacattaaccactactt

SEQ ID NO: 33842 - DNA, 168 bp, Glycine max
cacgtgtgcgcgatatgtgaagacgatgctccacgtacttatgatttggtccgaccatgcccttctgatcacgagctgggacattggcgcagggacgaatgccccggcatttacgccatcacgcataatgtaaacctttacggtcttaacagctctatagttgggcct

SEQ ID NO: 33843 - DNA, 444 bp, Glycine max
  unsure at all n locations
tgctcttaagatacttcttccattntaaacccttctgtacaaattgatggactaaattactacaaagtagccaaattaccaaaacattatactagcattaaataacacaattagagtcaaaacaaccctctaagtctaataaaagataaggaaagtgtcttaattggtaccttanaagtatgtgtatttggcacttaacagtttaccacatgtctaagaaattgaacttgttgaggcaaaatttgcattntgagatcttagcattgagtttcctctccttcaagatttgtagtagaatcttcaagtgtttggcatgttcctcttgacttctaaatcatgctagaatgtcgacgatgaanactgtaacaaccctaacaaaaattacaacttaagctattagaagaaactctgtgttgtgtcatttgtgcttgtatgtacttaatt

SEQ ID NO: 33844 - DNA, 282 bp, Glycine max
agctttatttagccagaatccctgattactttcggcttgcagaagatggattgacactccaggttagaagaggtatcaccttcatatgacttatcacactctacaaactgaaacggttgctgcttgtcacacaataacagataccgaaaatgcactgacgttacttcactaaaaaatggcacacgtgggagactgaactgtgggatgctacctctactatacacgacccagtatcatgtgatgtgagcgaagagtatgcacctacactatctaactcacacc

SEQ ID NO: 33845 - DNA, 424 bp, Glycine max
  unsure at all n locations
tccagaggctacccttccccctttggtgccactgttttatacgttggggtcaatttcgccatttcctctctcaacgcactttccgccactctctgtttctttactctctctgatttccagaatgtgagtcagttactcctctcttcatttcccaaatccggatattcacgttaaaatagcagctaaactaattctaggtaaataagtgttctcgtgtctggtttctaattccggaattgattctaggtccaaaattgaaataaactttaagcatgtttttgcgttgaatgaaaatttttaaaccgaacaaacatgtgactntacttcaaaatcaattntacttcaattcaattntgcaaacgatcactcaattacacactanaacttctgannacgtaactcagtggtagtttgtgggtgttga

SEQ ID NO: 33846 - DNA, 479 bp, Glycine max
  unsure at all n locations
gcgcgcnctgngtgtggcntctgaaccctggaactccantcggacccgcgaactctaaacngacctgacgcattttcctttaaccttttttctacactgtatatngttgcaagcagaagcttgacacatatatatcgctcacctgtgttacagcccgtctacactcctttcaattgcatgatcattccagatccaactcactatgagtatagctaccgcccagattggagtcccatctctgcgccacttttataatgaacccatctgtgtcacttttatcatgaacgcattctgcctaatgcccatacagtacaccagaacttattcgttccataaacacagaactggacgacaggtccaaaatcatgatcacatctcaattcattgcagcacctagccttgacatcgatcagtctcacatctgctacatgctcatatgactcacgcacaccaaccagtactgggtttctagcacaccg

SEQ ID NO: 33847 - DNA, 436 bp, Glycine max
  unsure at all n locations
tttgttntcaatttcgaccatctcgatatattaccgttctcatccggacttccgtgtataaacttattgtcaattcaattttctccgagctttggatcaaaattttgagcgtattgatatattacgggactcattcagacatccgagtaaaaaattattgtcgttagaatttgatacgagcttccgttttcaatttggagcatctctcgctaaattgcgacagtctgtcgggcatccaagaaaaaatttattgtcgtttcatatttctaagagtttccgttttcaatttggagtgtctcgatatattacgggactcaaccggacatccgtgtataaagttattgtcatttcaatttgctcagagcttctagtctcaatattgagcgtctcaatatattacccgattcaatcggacatgcgagtaaaaagttattgt

SEQ ID NO: 33848 - DNA, 390 bp, Glycine max
agcttctgtttttaatcggcctataaaagatatatattgatgacagtacaagaagtacccctgccctgttacaaaaggttccctacagaatattccacacagtttaatgagccaaaatacatgacggaaacatataaaaacagaaatagtaatgttgtatggtgtttcccagcacaactgaagttaagatacacaatattatatgctccctaaatccggacaatgcacgaaactaccccaacatgttcctcgtgaattcattcccttttgcttcatctcccaaaaattccaaccaaccaacaaatgacaactttctgaaatttatcttgtaaagccaaccaccccaatatttcgcccacgtagcaatatatcatctcagttgagtcattc

SEQ ID NO: 33849 - DNA, 431 bp, Glycine max
  unsure at all n locations
tggacgtacaccgatatttggtgttttttgaggttgttatatggaatctaacttagaagacgccaaaatcccactcaaaaccatgcaattcgacggaactgaagttggtgagtattctagaacttgttcagcagaatgatgcaagatacaaacaccgatattgaatatatcatttttggccatattacattatgcacttgaaaacaaaatgaaaagtaaaagactggttaaaataaatgtgaacttttttctacgtattatgatggtaatttctcacctatatccacattggagttatccgtgcgtntcaaagttaaccgaacacataagatatgttgaagaccaataattactaactttattatgataatactaccattgagaataaaagaaattatctttttaaaagacaaggcagacgaatacttttg

SEQ ID NO: 33850 - DNA, 411 bp, Glycine max
agctttatgattatgaaccacgcaattttgatgatgccaaaagcccaagtaattgattcaagacttcaagatcaagcatcaagaatccaatccaagattcaagagaagaaatcaagaagcaaaaagtcacgacttcatatagtataagtattaaaagattttttttttcacaaaccaaatagcacagtcttgttttacacaagaattttctcaaattttctaagttaccagagtggttactctctggtaatcgattaccagttggcagtaatcgattaccagtgaccagtttggttttcaaatgttttcaaatggcttacaatgttccaaactaattctcacatagtgtaatcgattacactatattagtaatcaattacaagtgaatttgaacgttggaattcaaatcca

SEQ ID NO: 33851 - DNA, 337 bp, Glycine max
  unsure at all n locations
ctcagctttcgtcttacgaatgcaacaagttatacggattctcctcggtttttccgcccgtcagcgtgactcaaaagtcagtatgacagatcttgtgagcgcggaagataacgtaaatctccacgtgtcaacgggcttgtcagccgtgattgacgaagggcgcagaagacgacgttagtctctgcgtgctatcaggcttttcgtcatacagacaacaaaaagtttatacggataaccactcgggtatttccgcccgtcagcgtgactcanaagtcagtatgacagatcttgtgagcgcggaagatgacgtaaatctccgcatgtcaacgggcttgtc

SEQ ID NO: 33852 - DNA, 441 bp, Glycine max
  unsure at all n locations
nttcgcanagcttacggtaaaatctgggacctagccttgttagaagtcttcacatatgccatttcctccctcgcccagtattatgatcagccgttgaggtgcttcacctttggggacttcgagctatcacccatggtcgaagaatttgaagagatcctaggatgtcctctagggggaaggagaccatacctcttctcagggttctatccctcattagctagaatttccaagatagtccaaatctcggcgcaggaattagaccacaggaagcaagtcaaatatggcgtggttggaataccgagataatatttggaggcaaaagcaagaatcttgacaagtaaaggtgaatgggcctcgttcatagacgttctcgcactgttgatcttcggaggaggtctctttccaaatgtggatgggttggtggacctagcagcaatcgac

SEQ ID NO: 33853 - DNA, 408 bp, Glycine max
cttcctaagctgcaacttttcaagcatgagtattagtcgctcgtatacatactgaaatatctggaataactcttccgtgaaagggtcaccacctgccttgaaattcttaaatcctcgcaatgccctcgcatagcgattgtctcctgatcctgattcttcctcaaactgatgaacacatacatgaacaaacaattggctgtcgcgagcgcgctttacgcacttctccaatacactgcacacctccaaagttttcaaactattctcaaagtattcctcaaccagttcaaacagtctcctggctcttccaaatgtcttttttgcagcccaagattaccttgacaacttcctggtcatctccagaaagcatttgagattcgtttacagatcgaagaaagggtcgacttcaac

SEQ ID NO: 33854 - DNA, 500 bp, Glycine max
  unsure at all n locations
ncgcgcgggtccggtgaggcttatgacntcctcgaanantcaagggaatctagatagtacgccgggatgctttcgagccttcttgcgttatgcaagctttaacaatggacgagatatggatggctgagtcccttggagatatcaccaaaaacaactttgcagctgaaaataaaagatgtgagatcaacggggcaacaagtcgatgctctataccctgtggactccctactaccctaaacctcttgccctgggtggcacggcgtcaacatagaacaacagagacacctgatctccaatccttacattaactccacgaacgatgttggtgtgggacaagctatcccacattcctcaaataaaccacatgctccccatttcatgcaccgggacacctctatgctgcaacactgcatatgaactctataccgtcaatctgccatatcatattcgcacacatgctctatggctcacgaccgagccttctggccatccgctcgccg

SEQ ID NO: 33855 - DNA, 361 bp, Glycine max
  unsure at all n locations
ctacatcacatgctgcanttcggaatcagctcctccaattaagaacgttatgcactccccgcaccgcgcatcttggcgatcgtggcgcaactgaccgcattgtgctccttcaacgttaccaagatgttattcggtttcaccatcgactctgtcatatcaccaataatgctcttatcttccttagccagtcgcccggcgtatggatgtccaactaacgacttcnccatttcatgattgtgaatgcacagatcaactggagcatccaagctttcccttcatgcactgggttcccacgaagtctgaacgcacaaccacattctctactacggtgtcttttctaacgaattctttatttccacac

SEQ ID NO: 33856 - DNA, 498 bp, Glycine max
  unsure at all n locations
gcgctgccgatganactgagancnatcgaagagcatancgagaatcccagctcgggatccgcggatactttagagtcgacctgaggccttcagtctatcacaacgggaatggtaaagtactagctgaggctgatattaacacggtggccatgtgttcttctgcaagaagaaaggacacgtgaaacagaactgcctcggcttcccacagctggcctcaccacgacaggtaaactcactctcatcactctgctatgaacctaccacgggtagtgttaatatcaacacctacctgattgatcctgcatctcccatccatattgcacccctcttacagggcatcgaaaccataccgaacccatcgcgaactgacaacaccattctatcacgcaataacctattgctacattgtggaggccattagaactcgctcctgactttcctcagcgctctatattcccctagatacgactctttatgttcaactctctccccactccc

SEQ ID NO: 33857 - DNA, 438 bp, Glycine max
cggcctggtctgacctatataaacaattggctacgcttttgctcccccaaaaggcgattaaattaggtacgttaagcttccgcatattaaaaagtcttataagcctgataggccgacctatatatatatatatatatatatatatatatactatatatatacatatatatacatatatactatcttgtgggcgccataaatattcatcttgaaaaacactcgcacaccacatccctataatcaaccaaaggtctacttacactgcgtgcacccttcctcatctatcgacctacccctttgctgtaagacatccttctacatacaactatgcgcgctctatttctataacgtacattgtcccgcagagaaataactcctcctctcccgtcgtatcttgcccgtcccatgacaaacacggctttctatgcatctcacccc

SEQ ID NO: 33858 - DNA, 282 bp, Glycine max
tcacgcttatactaatttatcctaccatgctcagactgaccggcggactgaacggaccattcacccgctggacgaccttttgagggcatgtgtcttaaagcacaagggcagtcggcacagtcttttgacgttgatagagtccacttataacagtagctctccctctaccattagcatggctccctatgaagctctgcatggtacaacgtgttgcacacccctatgtctgctatagcccggagaagacactcacccacgccctgcactggtgcatcaccacac

SEQ ID NO: 33859 - DNA, 364 bp, Glycine max
agtgcacaatatcatctctaatatttctatgaagagtttttattttaaaatccttgcttagcaacattcacttttttgcccgaactagcacagaatatgcctagtatttacttaatagcatcaatctgctctaagtttgttcctgcacaacatagaaaatcatttgcaaaggcaaggtaagaattttttggaccacctttagatgattcaataggcttccaaattttctgctccactacatcattaatcaattgaaataatctctcaatgcaaagaacaaatagatatacagagataggatcctctatcacactcctctaacatgaatgaatttttcaagagcttctccattccacatcacctg

SEQ ID NO: 33860 - DNA, 429 bp, Glycine max
  unsure at all n locations
actcaagcttgcaatctcctctggacactccacataaccagtagtaaaataatgccaaatatgagctnttttttagcttaagaaaatctagcctgacaatagtagaataataccatacaaaaacacaaactaacaaaatataattaaaccctttctccattgtctgatctaagcatttcaccttgtgcaacanaggtgctacaaggtactaaaatcagacaacagaaaagcataccttgatccttgtcacatttgcttaaacatatcaaaatgttgatgccattctttntctgacatcaagatttcagcccttggagttgttctcccacttgcttttaatttctcattaacaagtaacgtggagaattcacaccanacagctttcactttaatgcagaaggaanaccaatcaactctcaagcatcacat

SEQ ID NO: 33861 - DNA, 444 bp, Glycine max
  unsure at all n locations
gccgcccggtgagcttganactgagacttganaacccaaaactaagcggcctatgaggactacacagatttaccccgtttacttttttcgagagacgaccacgaccgtcacgtcatgacgagtgacataccacaacgccaactctctttacgctgtagctatatgccacgtacccatccattatctagtgaatactaggtatggcctaccactgttctactatacaatgtgaaattctagccgtctactaattcaatatggaaacacatacaacattcttaccttgcaatcaccgatgatgaatcacattcggggacacttatatctcatctaagtgtgcactcataactcatatcaacgaaagcgcagaaactacatattgtgccctttccatgaccctacgacgtgcgataccagattatattacgcggactatactgaccg

SEQ ID NO: 33862 - DNA, 154 bp, Glycine max
tttcatgcaagctttttggagtaaaaacatgggaccaactcattttatttcaaaaccgaagtcgtatctagtccatgtctgagagaccatacaacgttcctaacgatctctaattatgtgggccattaagtctatcatacgctgacaatagccg

SEQ ID NO: 33863 - DNA, 449 bp, Glycine max
  unsure at all n locations
tctcaaggaggtgagcttagttatgatatgggtgtgtgtagctaagctctagcttctcaaggaagttttctcaaagaagtttctcaaggaagttttctcaagaaagcttctcaaggaagctacctagtctataaatagaagcatgtgtaacacttgttgtaactttgatgaatgagagtcttgtgagacaaaactcaaagttcaacttctctccctttttcttccttcaatttcgtgctcccccctatctctttctctcccactttcttttcctccattgaagcatcctctccaaggctcatcttggtggtgaagctcattcttccatggcttattccttagtagatggcgcctcctctcacctcttctcctttgtcttccactgcatctccatggtggaaaatcaccattaaaggacctcattanagctcanagatcccagcctcata

SEQ ID NO: 33864 - DNA, 449 bp, Glycine max
  unsure at all n locations
ctataaaactcagcttntatagctttgttaacctatcatttaattataatttttattaatgcaatcaatctaaagcaaaagaaaaaaaatgcaatcaatcgtttccaaaattcttaatagaaattttaatcaattgtcaagctatttaagcaactatctattattaaacacatatattaaatattataacatatatanttttgcatatctaaacgttgggttatcttgtttaattttcaaacctgatatcagtgtaaaaaatttctaattattaatgcaaagtctattctttttctcatatctataattctagttcttaatattctgtttatctaaatctttaatttcaaaatattttatctaaaggttcctttaatggtgaaattgaacgaatagaaaataaaaactttaactgtaaataatctattcacaaatgattttcttatata

SEQ ID NO: 33865 - DNA, 425 bp, Glycine max
  unsure at all n locations
taacaaacttagaaatcaagtgatcatgtattccgattatagggggaganaacggatgcacattntatctatatacaattgtttgttgcttgaatcttgatttcaggtattgtattgtcatcatcaaaaagggggagattgtagatgcaattggctttgatgttttgatgatgatcatgatgatgtgttgcaattgatgcaaatgggcttttcaagattaaaattcaagacaatacttcaagattacaagtcacaacatcaagatgatcactagaatattaggaagggaattcctaattgaattagcaaaggtttggccaagtgatttaaaataaaaagtgtttttcaaagcttttactctctggtaatcgattaccagaggatgtaatcgattaccagtggccaaatacgttttataacagcta

SEQ ID NO: 33866 - DNA, 408 bp, Glycine max
  unsure at all n locations
agcttcaataagcaggaaaattggactaaatctntcaagtacactctttgcaatttgaaatgggccctctattggtttgttggaaatactaacttccagcccctttcagcaatggtatcttcgcatgctgaagtgcctgctgtacggtctctgtacacgaagcgtggtgtcgatgccaaatctgaatctcgaaattgaacctactaatcatatgctaggttaggctacatagttaggccacatacaaatgtgtacatagaactacatagtcaaaattgttactcgatcaaattgaaaaggatgttataagggtctctctcaatttgaagacaaaaagggtgctgatttgtaccactaattggattgaaatttacagcattctcttaataagaaatcacaatttgatgt

SEQ ID NO: 33867 - DNA, 443 bp, Glycine max
  unsure at all n locations
tgatcaaaacanaatctatacattccaatccacttaattcatacaatttctcattcaaatcaatcacaacacttcattctatacaaaatcaaaccactgaatcatattcaaatagttcactattcaatcatgcttttgtacaagctactactacaaacaaaataactgaaatttaaaagactaaaatttaaagactgaaatttanataactaaaacataaacataaaataaactaaaatagaataataataaactgttcaaaatgcaagacaagaagataaagatcctgtcaatccacctgtggatgatcctctgcatgctcgttcaaatccaacaccggagcagctggtggatcctatgaaatgggctgcttttgctccaatgctggtgcagatggctggtaatcatcagtaattggtgctggagagacaggaactacagct

SEQ ID NO: 33868 - DNA, 340 bp, Glycine max
  unsure at all n locations
agcttgccccttgatgacggtttcttgtggacgaaggcatgcacgtattgtttcatcatgcgatcncaaacttccgttcgtccatctgtttgtggatgataagctgagctcatccgcaatttcatgtcgctcatctgaaacaggtcttgccagacaattgcttatgaataatgggtctctgtcggagatcaagctgcgtggcatgccatgacactctctgacgatgtccatgaacaggatgacgactgactaacctgagtgctgagctggcagcatgcctacgtgtatgcctcttgaacctcgatctactacacacaatatggcagtatttctgtgaatc

SEQ ID NO: 33869 - DNA, 454 bp, Glycine max
  unsure at all n locations
ttccataccttgagggaactcaactcatctaagattctatataaaggttctntatgactagtacccttgccattaacactagatgaatgatgactcatgttgcttcctaagttgtggttctttcttgttggaggtttgaaaacaaaaggtaaaagaaactatggttgaaactagccaaataaacactaaaagaggtgtgaaagataaggtaaaaaactaattggtaaaaggaaagctatctangcggtttgacaatggaaggtaaaggaaataagctatgaaagtaagcaagacatgtaaactaggcgaatcctaagagtgtttggatgaccacattcaaggttcccaacanaacactcactatcctaaggaaaaattgcctaaaattattacacacaaatggaagtttggtaacctattggaggctcccaacacactttcaatgaaaggcctt

SEQ ID NO: 33870 - DNA, 452 bp, Glycine max
  unsure at all n locations
nttgatttcaatctgaagcatctcgatatattacagtgtttcagtcggacatccttttanaaatttattgctgtttgaactttctaggagtttctgttttcaatttctagtgtctcgatatattatgggactcaatcggagatcctagttaaaagttattgtgatttgcttatgaaacgagctttcgttttcaatttcgagcgtctcgatatatgacgggactcaatcggacatccgagtaaaaaagttattgtcgtttgaattntatacgagcttccgttgtcaatttggagcatctcgatatattaccggactcaatcagacatccgagataaaagttacagcggtttgaatttgctacgagccatccgtttcaatttcgagcgtctcgatatattatttgactcactcagaaatttgagtaaaatgttattgtcgttcgaatctgatac

SEQ ID NO: 33871 - DNA, 268 bp, Glycine max
cgcttgtagctgtattcgtctattcattgtgtcgcacaccgaatatctgtggtctctgtttacctgcgcacatctcaattccttattgtgaatcttttccatttgctagctatcataatggtaactcgtacgcgaatattcaaacaacgatacctgcataccccctttactctattttactatcaattatatcacatgttatagttacagaattaacatgaattgcgtctaagaaaaataactaatttctcacccaacaccatatcta

SEQ ID NO: 33872 - DNA, 449 bp, Glycine max
  unsure at all n locations
ttggatatcagaggctaaagttcctgagttgtgctttttattatacttgacttacgggacaaccatggccggtctcaaggtagtataaataattaattgaactttcattatattttaaaaggcccaattttgtttgtttatttagatgtgacggtgaacgaatcaatctcaatcattgtctctttccctctcaccaggctattggctatgactntgactatgatgactttcatgggtaattgtctttacatatttgagatttgttctattttttttccatttattttaatcgttagaaatcatgttaaatataatggaatccaaaaagtatttagtgtgtgttgagcagctctgttcatgggagattgccatatgatatgctgaaacctgaccctgttctcangggaaatttgctaagcttgcctgttcgaanagttgtgagttccttt

SEQ ID NO: 33873 - DNA, 285 bp, Glycine max
agctttaatcaaagttctaattaagatggcgagcttacaatgaggaatattattgccactacaccttttattctaacttcaccatcatcattctacaaaatcagattaacttcatcatggcaacttgaattatcatgtcatatataatgctattagtctataggcctttctgggtacacactccataattctttactatcacaggctttcaattacctatatgtacccataccaacaccctcacaaaattgaagacgtatactcttacactatgatgactctttt

SEQ ID NO: 33874 - DNA, 451 bp, Glycine max
  unsure at all n locations
agcatgtgcgcattgagtgcacatacataatataacattttaagtgatcatcgcgctaagcctccaaatgcgcgcttagtacacatgcacagtacaactgacttctagtttggcctctcatgctgagtacactcctccaattcttcatgcatttttttgatgatgtactaatactctataaaataaaaccaaacagtataaatttactcactttagcattctgaaactaaaaacctaaatttttatctttttagataaaaaaaaacattaaaagaattagataattactatataatttaaatgcacaaactaaatatggataacaattatcaaattaatagtaaaaaaggttcaataaatgacataatagggatggcgaaggggtacacaaagtcacacggaaagatgttctgagatgattatatttttcaacaagactntgcttttgaat

SEQ ID NO: 33875 - DNA, 303 bp, Glycine max
ttaagctttaagcaagttgcttcacaaataatcatcacacagtatgcaactagcaaagccacccatcattatgtccgaagcacctatacgcatgaaatttatgagagaaagaagtccacccaaacctgaattgtcgaagtcccagtcgtatgcacgcacttcatgaccccgaagatgctctcctttcgcgatttggggcagaaatgatggccaacggctgaagctttgtgtggaggttccatggagactgaagaataagagaacgacaccgtgagggacagagagggctgtctgaaatgactg

SEQ ID NO: 33876 - DNA, 432 bp, Glycine max
  unsure at all n locations
tttaagttgtgctgcacaaggaggatgtatgaacatttcatctttaattgttgagttaagagtgtgcaggtagtttctaacatttgttacttatttttatttgtagaacaagttgaaaataccatgcatttcatataaagatggggcatgaactanaagaaacaactggcatcaaggatcaagctggacttcaacacagtgttgtgattgttgtggaggtcgacaatggaaaaggcaaactgagagcctactttggcgatgaaattatgtttattattaatgagtaccacacttatcaaagttgttatggtcaatttcaattcatgggtgaatgcaagtttatgacccattttaccccgataagtccattagcaatgcctcatactcaatgcctgactcattccanaatcactctttaaaggatagtcattc

SEQ ID NO: 33877 - DNA, 115 bp, Glycine max
agctttgagcaaattttaacgacaataactctttactcggatgtctgattgagtcccgtcatatatcgacatgctcgaactggaatacccaagctctgagataatctaaacgacc

SEQ ID NO: 33878 - DNA, 431 bp, Glycine max
tcggcattcaagtccaatcgtctcgatatattacgggactgaatcaggcatccgagtaaaaagttattgtggcttggaattgcagagagcttcggtattccatttcgagcgtctcaatatattacgggactcaatcagacatccgagtaatacgttattgtcgtttgaatttgctcatagcttcgataatcaatttcgagcgtctcgatatattacgggactcagtcaaacaaccgagtgaatagttattgtcgtttgaatttgctcagagcttcaacattcaatttctagcatctcgatatattacatgactcaatcagacatccaagtaaacagttgttgtcgtttggaattgctcagagtttcaacattcaatttcgagcgtctcgatatattacgggagtcaatcgaacatacgagtcaaaacttat

SEQ ID NO: 33879 - DNA, 359 bp, Glycine max
  unsure at all n locations
gatcctctnagccgagatgacggcctgcaggcttgtagctgcatgtgtgctttgtcatgtggcgcacaccgaatatcggtggctctactgattatctgtgcccacatcatttacctatggagaattattttcatctgatcactatcataacgggaacttctgtgtgcatattgaaacaatgagtcctggatactcgttttatcttatattactatcagttatatcacatgttatagtgacagcgctcgcatgacgtgcgtctaacaaaaatacctacttactcaccatacactatatctataggaaaccttacctgagaagacaatagcttcaagatgatcagctatatgaatgtaata

SEQ ID NO: 33880 - DNA, 429 bp, Glycine max
  unsure at all n locations
taacttaacataattcacatcattntttaatcattgtgtaacttcacttgncctaaggatttaatcacaaaatcatattctataccttcacattaatcacatgttcataacacaacatctcaagtacaacacaacatctctcacacacaattcattacccaccatcacatagcaagtcacaatgatcattacacagacgttatgcaacatatatactaagactcaatcctatattgaatgtggtatcttatcagtgaaaaataacgctagggcacctaggattacataataaaatacaccacacaatgggtaagcaggtcactcttattaaaagacatcataaggtgatcaattacggttattctgtttagcgtgaatgctctaaccatatgagatcaacatagatntaaaggagcactcacatcgagt

SEQ ID NO: 33881 - DNA, 411 bp, Glycine max
  unsure at all n locations
agctttactatcacaagcacatacacacattactccattaatgcatcacacgatactctatttgaaaatggatctttcactctgtacctgcaaggactgctgacccttccacctgatagttcattgaatcaattgacacaatatatcataagacataagtctcaaagttcataaatagagagagccacacggtcaaaataagcacactaaccatgactgcagaaacaaatattgaaatacataatataccactattatgtgtagcgcatctcttcaattcttgtacctaaaactcgattntcttgttaaccacacgcaaaaagaccaccaaaacgagacttgtcaaccacttgagagcctaactgaacttgcttagattataattctgctcttacgaacttacaatgctat

SEQ ID NO: 33882 - DNA, 453 bp, Glycine max
ttgatggtgtcaagaagaaatcacatgtttgtcatcatcaaaattgggaagaatgtgaatgtatgtatacatgattttgatgatgtcaaagaagaatctaacaaggctgcttcaaaggataagcatttgcttcaagaataattcaagattgcttcaacaaacaaagccttgtttcaagattcactaaagaccaagccttgccttataacaaagtgctttcaagacatgcaaggctctggtaatcgattaccaggaagtgtaatcgattaccagaggacagggttgagaaatagttgttgaaaaaggttttgaatttgaattttcaacatgtaatcgattaccatatgtctgtaatcgattaccaacaacggaactttggaaattcaaattcaaaagtcataacccttcaaattataattgtgtaatcgattacacaaacattgtaatcgatta

SEQ ID NO: 33883 - DNA, 385 bp, Glycine max
gggccaatcatagggtgctacactactatagccacacttggcgaatgaactctccgacaggatacagatgtggggccgaaaattctgccaaagtgacaatgatgttctccgtagtcacccacatctctcatagacctcacaggaatatatcataatatgatgctctatgctgactatgcatatcatgtcataaatgacattctgcaggttaggaccggagacctttacatcatgactttaacagtccagacatctatctaggatatgattcagagtgactatcaatatatcagtcgcatgacactagattaccttctggtgcaatgctggacctatggcacgacgtctacctcgccatatttcaccatctgctgagatgagcccg

SEQ ID NO: 33884 - DNA, 416 bp, Glycine max
  unsure at all n locations
tttgagttntcatttaatgtcttanaaaaagaaatattgngcaccatagaaaggtatttttttgttgttgtcaaaatatcagtttattaaaaaaaaaaactcttgactctacaatagaaaattcccatgaatagccatctctcaagaagattgatggtttcgacttttgcctcccttaattntttttagatttaaatatgtttttgtttcctcaaatttgggtcacttttatttttgaggaactaaaaatagaattttttgaaattgaagaactaaaaatattttaaaattttggaccaaaataaaataactaanatttgagagacaaaaaatatatttaagtttttttattctataatttaaatagttggtttaattcatataaagagaaaacaattcatttatatcctctctaa

SEQ ID NO: 33885 - DNA, 182 bp, Glycine max
agcttgccgatcgtctgtcttagttgaataggtgtattactgatatttggtggacggatcattaaccaagggagacgtctctaatgcagcagatttcgacgctggcaatatatgttcacttggcgtaagaattagcaagtgatgaatgatttacttgtggatgaacgtggccacagacccct

SEQ ID NO: 33886 - DNA, 438 bp, Glycine max
  unsure at all n locations
actcaacttggaatcgatacaccccttntaatcgattacatttgccatctcaacctcctgaccctatttttaggcctggtaatcgattacacacccttggtaatcgattaccagagaccaccttaacttcctgtcttcatttttaagccttgtaatcgattacacacccttggtaatcgattaccagaggccatattccaaatatcactcaagatccatagctggccagccaccacacaagcctccttgctttgtggtctttgttcttttatcggttgactgccaggagctctcctgtttaagtacgtcatangttctcactgaatgactatgcccaggttgggtcgggattggtcaagcttggttntgggcaatagcaccccacctggcatccncaaggtctcctggcccccacgacatatctccaggtaccactct

SEQ ID NO: 33887 - DNA, 409 bp, Glycine max
agcttgttaccgatgaggttgttgacttcttgcgtggaaagaaggttgacctcaatttgctggagaacttgaagagcactctgagagtggctggaggtgtgcttgatgatgctgagaagaaacaaaccaaactctccagtgtcaaccagtggctcattgagctcaaggatgttctttatgatgccgatgacatgctggatgaaatttccaccaaagctgcaactcacaagaaggtacgtaaagtgttttctcgctttaccaataggaaaatggccagtaagttggaaaaagtagttgggaaattagataaagttctagaaggcatgaagggtcttcctttgcaagtgatggcacgggagagcaacgagccatggaatgctctgccaacaacatctctggaagatggata

SEQ ID NO: 33888 - DNA, 453 bp, Glycine max
  unsure at all n locations
tatggattcttcgaggtgacctctaagttgtcgcatgttttcacgggcaatcgttacccctgaagcaccattatggattcgtttcttgttcttcgctatctagttcatttcttcgaggcaaatcgttaacattctaggttgtggaaatcgcaaacccgtaagctttttgcctcgtcgtcgtctagttggtttttagaagcaagaatgtcgttctgtttgggtgtcaaaggtggtggttaaaaaacatggctgtcgcctgaaacatgtcatcgtcagcgtcgttcccatggaaagaagttcctcatcgtacaccttagagccccgaagtcgcgtgatgtgtttgtgtaacgtagagactccattggtgacatcgtggatngaggataatccacganagctttntatggttgtggtcaatataaggtaaggaataatgtatatcgtgggttatgt

SEQ ID NO: 33889 - DNA, 409 bp, Glycine max
  unsure at all n locations
agcttgtgacttttgtaangtctaacgaaagggaaacaggaccaaccaaaggctctaagaacgttataatctggattcttgttgacaaagacagtagtatagggaacattacaatgcacagaagcagtacgcaatctatctatcaagtatgctgctgtagtgaaggcaaaatccccaaacttgagaggcagtgaagcttgtttaagaagagcgagtcctaattccacaatatgtttgtgtttcctttccactacaccattttggtgatgagtgtgtggacagatcaatctaagagtgataccttggcttgctaaaaaattagtgagaggtctgaactcttctcctcaatctgtgtgaacactcttaattctggagtcaaactgaagttcattagcttgaactgttgaaa

SEQ ID NO: 33890 - DNA, 455 bp, Glycine max
  unsure at all n locations
ntgatgatatgttcttcaccgacgaaagaatcaaaatgggtctaattttaggcaaatctgatcatcatgctttgataaatgcaaaaacaagaaaactagggcaaatgaagagggtgagaatgagggagaagcctatgctgtgacagccattcctatatagccaagtttcccaccaacccaacaatgtcattacttagccaataacaaaccttctccttacccaccgcccagttatccacaaaggcaatccctaaatcaaccacaaagtctgtctaccgcatttccaatgacgaacaccacctttagcacaaaccanaaacaccaaccaagaaatgaattntgcagcgagaaagcctgtagaattcaccccaattccagtgtcctatgctgacttgctctcatatctacttgataattcaatggtagccataaccctagccaaggttcatcaacct

SEQ ID NO: 33891 - DNA, 361 bp, Glycine max
tcacgcttgatgacatgttgagactgatgtgatcttgcgctatcacaagatctgttctattgacgtttgaatcacgctgactggcggagatacccgagtggttatccgtataaactttcttttgctatgtctaagacttaaagcatgacaacaagctgagggggtaatcgcgcagaacatattctgcacctttatcattcataatcgcacccgacgagtgggtaaacacgccgatacatattatgctccctttatcattcatgaacaacaagctgagtgggttaacgcctatccatagatgttgcgccctctatcattcagatttctcacgttgcgcgatatacacgcagaaacaaatcct

SEQ ID NO: 33892 - DNA, 452 bp, Glycine max
  unsure at all n locations
tgccactgcagcagttaagtgaacaaatgaagtgtctatagtcattgtatggttgcttggtagaggtacatgtaattaactaataagatttcctacgtgttaggtataattattaagaagaggcactatgtatatagactnttatatataaatcttattagagttttaacacaatctccactggtggttgaaatttattgagaattataaaataagaagaatgactcatcaaatgactagtgggacctgccaaatttgtgattnttaagaaatttgagccaacaataaagagtgtgttcaacagaatgtgttagagacagtgttgctagcatttctctgtttaggaatggtgtttgtagttattagtgaaaatagaaatagaaaatatcttccttatgtcaaacaggctcctgattntcagtttcctcagacttgtgctgtcatgtgcgata

SEQ ID NO: 33893 - DNA, 323 bp, Glycine max
  unsure at all n locations
agcttatacattttactcatttaacaagaattgccactgaaacgatagcattggctgcacttgcaatccttggccacagatcagcacactcttttccaatgggaccagtgatagcagaacctacattgaaacatgtcacaaacaaaattactaccagcaaatgcatcaatagaaggtcaaacggcaaagatgaagagaataacaagtacatgagaacatctcatctgtatttctttctttttgaaagccaaaaataatcagtggctactcactacataaacatgcactttgttaccatgcanataaaatcataaacgatacct

SEQ ID NO: 33894 - DNA, 457 bp, Glycine max
  unsure at all n locations
tataaacgaaaatcaagtgggaaagatatttttcatttatttatagtttagttctaaaggtctgatcaagttgtatgcaatggttgaccgatctctagaagaaatccttgccctaccgtgtaaaccaaggaaaccaagacctgtcaaagagataattgctntgatgcattgattaatgacgacaacaagctctaatgaagatcataactctatttagtcatgtttttaattgatgaaatttatgttagttgtggtggttgttcttgttgttattgttgtttgttttttggatttaatcaaaattctattctttattacattactaggcatgtgtcatttacacataaaaacaaggaanacgtagaccgttaaaagtaagttcatagaacataaaaataagtttgtacaaaaaacatcataagtcgaatacataataatataaaatatccaacagact

SEQ ID NO: 33895 - DNA, 422 bp, Glycine max
  unsure at all n locations
agcttgtntanaatatataagcaggggcaacttccactccagtgctcataatcaagtattgtcatttgagagcaaaacttaatgccttggtctaatgagcttcctgacaggttgacacggcatcatcattcttgaagccaaaacttaagttgactaacattaaaaatgttacgaatgttgttcataatccaataacaaatgagaaagaatgcttactaattccatagaaacaagaaaaagaatacacattcgttcatatttcacaatctcaataaaaaaacttgcctctccataatactcattntcagttgtattctagtatacaagattatacacaatgcaataatttcagaccatacanagagaaccncattagttcttacagacctatacaatacccatacagagaacttacattctat

SEQ ID NO: 33896 - DNA, 442 bp, Glycine max
  unsure at all n locations
ntacaacttaagaaaattaaatataaagaggatagagtctgcataagatagttcgttcaaaaattcataacttcaacacttttggtttggtatttataggcttcaacaacaagtgactgttgtgagtaaatgacattttttttttgcatctagaacatcgtctaaagtaggtgtttatttgagtattaaatgctgaatttaatgctagtacactccaagctaataaagaactctgcttatcttccttaagataaactttacaattgatttcaatggtcaaatcaccntttgcataacaatgacacatctttttttatgtgaagcgagactntaaaacttaactttgctctcactttcttcacttcgacaaatggtaggaagaataatcacatatttcccanaaanaaaggatcaaccaatatagagcattaaatgggtctta

SEQ ID NO: 33897 - DNA, 311 bp, Glycine max
  unsure at all n locations
agcttctattctgaatttcaagcgtctcgatgtactacaggacacaatcaaatatccgagtaacaagctattgtcgtttgaatctgcttagagcttctgttctcaatttcgagcttctcgatatattacgagactcaatcggacatccgagtaaaaagttatcgtcgttagaaatttctcagagctttcgttatcaattaccagttactcgatatattatgggattcattcggacatccgagtaaaaatttattgtcgtttgattctgctcagagattncgctatcaattacgaggatctcaatatatcac

SEQ ID NO: 33898 - DNA, 404 bp, Glycine max
  unsure at all n locations
ntgagcaaattcaaacgacattaactntntactcggatgtctgattcagtcccgtaatatatcgagacgcttgaatttgaatgccgaagctctgagcaaattcaaacgacaataactttttagtcggatgtctgattgagtcccgtaatatatcgagatgctcgaaatggaataccgaagctctgagcaaattcaaacgacaataactttttactcggatgtctgattgagtcccgtaatatatcgagacgctcgaaatggaattctgaagctctgagcaaattcaaacgacaataaattttaactcagatgtctgattgagtcctgcaatatatcgagacgctcgaaattgaataccgaagctctgatcaaattcaaacgacaantaacctttactcggatgt

SEQ ID NO: 33899 - DNA, 317 bp, Glycine max
agcttgttgacatgcggagatatatgtcatcttgcgctctcacaagatctgtcatattgacgtttgagtcacgctgactggcggagatacccgagtggttatccgtataaactttcttttgctatctctaagactcaaagcatgataccaagctgagtgggtaaacgcgcacaacatattctgcaccctttatcattcataatcacacaatatgagcgggtaaacacgcatatacatattctgctccctttatcattcacgaactacatgctgagtgggtaaacgcgtagacaaagattttgcgccctatatcattc

SEQ ID NO: 33900 - DNA, 414 bp, Glycine max
  unsure at all n locations
tgcttttggtttanatatgatttatacatgatttattatcttgtangatccaatttgagcaaaattggatgtgggtaagatggatttcgaaatctgctcaattgtgcagcaaanagctgtcaaattgtgcagccaacttgaccaaatgtgcagaaaaatgcttgtgcattgctggttatgggaaaggtagtacacattgngttctagacattttctagtagatcccaacggtcaaactgtagatttatgtactaggaacctatagtaaaattttcaagtcgatccaacggttaacgaattggaacaaagagaatgttactggngtatttgagtaaggaatgctataatatgtgaatgtgttttgggcagaagtttctgcctcttgcctgttttcttggtttaaggtagttcatg

SEQ ID NO: 33901 - DNA, 323 bp, Glycine max
agctttttatttgatgtttactttaccaactcattctatatgtttgctatgaaatagacgttgaagaattcgattaatctctaacctttcacatatatagaacctgctttgcacataactttgcacatgagagatgctgagttcgacctttcaaataatctgtcttcctagcgggttgtagtagctaaacaataacaagacacagagaccttcacatcttgattggagtctaattgtatgcgaatcctacacgacggatactcctagatgtgctatcagaatagtagctaccatgatgaaagccactttaatactggatatta

SEQ ID NO: 33902 - DNA, 448 bp, Glycine max
  unsure at all n locations
ctcagctntaggggtgaaagcacagaggccaaatatctaatctttactctgaagcgttcgtcccttatccagtttaagaccaaattagatgtgtttttggccaataacacaaaagaagatgtttgtgactttaaggtcaaaggtagttggttggaacgatcttgcgttgtttatgctggtgaatctaacaacatcgtagcccaggtaaaacgatctcctctgtttatataaccaaaacaatctctctttnnctttnntttttttttttttttttnaataaaaaacataataggttttaattaagaatttaatgcctatgctgatggtataatatcatttaattattactttaatataataattaaaaaaaattaagaaacttatcatatatctatgctgatggtataatatcatttaattattactttaatataataattaaaaaaat

SEQ ID NO: 33903 - DNA, 494 bp, Glycine max
  unsure at all n locations
acgcgacggggctaggcgctgtgngcggtattgaaagcactcgacaancatagggngaattcagntcgcacccgggatcctctgaggcttctggattatgcaacctcttatcccgngcaccgtggatggtggtgaagctccttctttctgacttattccctattggatgacgcctcctctcacctcttttgctttatcttccgacgcactaccacggtggaaacccaccatcgcacgacctcattgaagctcacagacccagcctcatagaagcttacaagcaagcttacatcaagtgctaatccgagcacaagagcttccagcacgcgctccttaaccctccattaactttcagctttagcttcgtctccattgtcgttatccatttatctccatgtatctgctcacatgccttgtgctaaatgatgtgcacatgactcttgaacatctcaccgactaaacttgctatacaaagtagatgcgactttctatcg

SEQ ID NO: 33904 - DNA, 424 bp, Glycine max
  unsure at all n locations
nttaccatanacagcaatctttaaggnacattagcattaaccatgcaagagtaagttctccaagaactatggctgttaactgaaatcaccatacctccacaaaagttgtgtattagttcagatatctagatcacatgctgaggtatataatttgattntaacttatgggagaagctcaatctatgttaccttcttattttctcctataatggagaagttcatccaaacataacttgccataaatatatccatcaacttgcggaaacaagttaagattagcttatattgataatttcgcaaagaagcttattgttacaagccaaaaatataagcaatctttataagtctgaagatgctctgtggaagctaaatgctctaattgtaaactaaactactggccttggattttcacttctacctcaat

SEQ ID NO: 33905 - DNA, 373 bp, Glycine max
tctaccttatattcgatgttcactctaaaaatgcattttaaatggtttctattagatacacgctcaacaattcgtttagctctctacccttccacatatatacaacctgctttgccgataactttgcacatcacagatgccgaccttgacctttcacataatttgtcttcctagccgggtttagcagctaaacactatcaagacacacaaaccttcacatcctgactggagtttcatcgtatggcaatcctccacgacaaacatacaaagacgtgctcttacaataagggcctccatgatgacagccactctaatactggatattattatcatcctcccttataacacactaattgaggtcccaaataactcg

SEQ ID NO: 33906 - DNA, 378 bp, Glycine max
  unsure at all n locations
ctataaaactaagcttaacctagaggaccagactatccagtgttggttttatcacgacaatgtctacaagattgacttgcctagtgagtataatgtaagtgccattttcaatgtgtctgatctatctctttntgatgcagatggaggggccttgggtttgaggacaaatccttttcaagaaggagggagtgatgatgacataaccaagggcaaggaccatgaagcacttgaagggcctatgaccagaggcagacttaaacaagcccaacacatcatagagacaaggttggtcatttgtatagctgccattgatgatgattgaaggcccaagtggagaaagatgaatgcccagaggcagaggcactaccaagactacta

SEQ ID NO: 33907 - DNA, 397 bp, Glycine max
agcctgaagcattacttcaggtatactcctgtattttggcatctgtcttacatatgttcaccaatggttgatatttataggttgtgttaagatgtgtagatctagtggcactaagtctctctggaattgtttgatcttgcgattaagtctcactcaagctgctctgctttcactttagttaatgagataagtctaggttgttgttgttttgtgttacgatgtgatgctaattatgttatatctcatataatacaatatgtaacatattttctagcaaccgacaactaaacataaaaacttctaaagcataggagacaaatgcaccttttggtgcatattttatgtgctaaaaacacttggctttgcacaaggtgagatgcgacctcaaatatgtaat

SEQ ID NO: 33908 - DNA, 455 bp, Glycine max
  unsure at all n locations
tcacaaaaagagcccattntntgccaattgaattatgtttaagataatagagagaaaaaatttgttcagcaataaccctttatgtttgagggagaaaaagaacacaaaataatagaaaggaagccatcaaccaatgagctagtcacaattatccaatagtaccatcatanagaaaatgcaattaatataaaccccacctaaagaaatagctctaatttatactattccaatagcaaaactttnttaccttccattgctaatctcgttnttcccaatgaaaccaaagaaaggaccctgatctgcttcatcaagcttcttctgtttgaagtactcctgcaactccttagccttttgcctctgaaactccaatgtaatgacattcttatcatccccaacaacagtagctggcttctgaggnggtgaagaggatggtgatggaggctgagaangaagtg

SEQ ID NO: 33909 - DNA, 399 bp, Glycine max
  unsure at all n locations
ccggatcttaagcatgagcatgcagctaattgtaaaatctaaatgcagcatatgaaaatttgtgtaatcctttggcaaaggaaatgaatgattacaagagtagataaaactttctagtcctctagaattaatgtctaacttatttcaattggttgcataattcttagaggtctatagaaaatttgatgaatataatgccaaaacatgacacaggtgtgaagttgcagaattattctgcataatgttgagggttacgcgcttgtttgaccatctanagcccttacgctcggctaaatatgattctcttgtccccttcacatgtgatgagtgtaatagccaacatggtattcaattctaatgtgagtaaacttgtgccttcatagatataactctggaaca

SEQ ID NO: 33910 - DNA, 451 bp, Glycine max
  unsure at all n locations
tgtgtgaatattaatccaatttgaaacacccttgcgttttagaggcttgaaaatcatctctcaagcaaggatcaacagctgcagtcaatcatgtttggttggtgaaattgccaaactaggtgccaaaaggacaatattccaaattggcaataacaaacatgaatgattacaaagctcatgcttttgggttgactagtgttttttaaggtatcaatgtctattcacactagagatgtgtttgcaatttaggttgttactaacagagaactgaatcaagacctattttgcgctnttatctaatattttcatattttaagatcggttaaattgtcaaaagaacaattagactacagagaattcatagtgatccttatctttntggtgtataataacagttcgaatctaaatcatcaagcatctatttcaattcaccaccgttaagccgatcata

SEQ ID NO: 33911 - DNA, 368 bp, Glycine max
catgaagagatgaccttgaggagcagagaaggacttctcataagaggtaacgagctcacctaacgcatgttgaagattgcaaaacaactcgctcaccggcaccagcgtcgatgatgatgcctcattgtcgaagttcgaacaccgccacctgaggatcatcataaaacgaagaagccgaacaggattcccatgcttgaagcattgccgcccaggaggaaaaacactcattctaacgcatccactcgtaccacgatcgtgtcggaccatccatgtaaaacggcgccactattactactgtatggcgcgagactccttgatagtccaagaactgagatattctacatatccacaccatacggttgtgacct

SEQ ID NO: 33912 - DNA, 459 bp, Glycine max
  unsure at all n locations
tgcaacaatagaaagggggtaaatgaagagcaaatatctgtgacagctccattgaaccagcctgagtgacaaagaaagccccttcatccaagggaggtgatggaagtccttcttcttcatcatcatctacaacggatggattcactgaatctggtgtaccttcttctgaaccaacaaagcatttaataaagccattttcaaacgtgaaaaaatgccgaanaaaagggactaaaaaacagcgagatgaatctgattgtaaccaaacgaaggtagataaaatttctacctgtgatagctgtggtagtagtggccttaacccactcatccaccatttctttccagccactgcaaagtcaggaggaaaagtttagaatgcaagttgttcagaacacaagtgaacaaaattaagccatacaccananaagaataatagctaacttaagtagatgaaatgtgctt

SEQ ID NO: 33913 - DNA, 285 bp, Glycine max
tgcataacgagaatatccgtagaaaggctgtggcctgacttctggctgtaggatcattactacactcatctgggctagtcttgctcacactgcagataacagatcatatactatctatgttagtagctgaacgaatctgatacatttatgaattgttttggactctaggatgttgagccaatgacaccatggcttgatatagctgagtaactactcccacatctgcattgacagtctctggacatccatctaagggtgaaccatcatcttattctctcatcctac

SEQ ID NO: 33914 - DNA, 449 bp, Glycine max
  unsure at all n locations
tgctgaagagagaaggtaaaggtaacaaaatttggcattgtgaattgttgcaacacactcatgccattgtctatttttttttatatgtatacaaatatattagaaaagtaaaacaaaactgcttattctattaaaaaaaggacaattntcgttnttcaatacattaaatactaaattgattggcaatgctaattntaagaattaaattgatggctntctatttttactgttttccaaaataagtttagttaaggattcaagagtgatttttctttttttttttaaaaaaaaaagaatagcatttaatgttaccgatacttccacaccttgattntaataaaagtttcctaattgaaaagatattcctataaagaattaaaaatggacaattaaataataataaattntttactatcatccaatcataatctataatatatgataaattt

SEQ ID NO: 33915 - DNA, 301 bp, Glycine max
agctttgtaacaaagatattctattgcacttggcttagcccactaaataatagccaacaatacaaaaaaaatgaacatattagcaatggattacgtgttggggttagtacaagatcaacgggttcctaacacaccaatctaatacttcaatcaattaccaaaaggctatattggttccatttgatagttacataaaagtatttctaatatctgctgagaaaaagtatgatctattttgcatttaaaaatatacaatcataatccatagagaaaaatagatctatgtaacccaatgtgcatt

SEQ ID NO: 33916 - DNA, 446 bp, Glycine max
  unsure at all n locations
tgttcgcacatcattcacgtgtatgatatccactcgtataggtttgaagtataggagaccttcaatcctataacgcaacatggcggacaaaagtgggcagttaacttgaatggccattattgtcaatgcggaaggtattctgcgtttcactatccatgttcacaaattattgcagcttgtggttacgtgagcatgaactactaccaatatatggatgttgtttacaccaatgagcacatcttanaagcatactccgcacagtggtggcctcttgggaatgaagcggcaattcctccttctgatgaggcatggacactaatccctgacccaactacaattcgtgcgaaaggtcggccaaaatcaacaaggataaggaatctaaccaccgacaaaaatgtagtagatgtggagcagaagggcacaataggcgccgatgtccaatgcaa

SEQ ID NO: 33917 - DNA, 74 bp, Glycine max
caattcatatggagttttctttaaaatgggtcttattaaagccctatctataatgtaccacgcagtgttaatgg

SEQ ID NO: 33918 - DNA, 442 bp, Glycine max
  unsure at all n locations
ntataagcgcgggtctgggagacaaagttcaagaggttgcgatatgtgaagatgatgttccaagtacattggatttggtacgaccatgccttcctgatttccagctgggaaattggcgagtggaggaacgccccggcatttacacaacgagcataatgtaaacctttacggttttaaaagctctatagttgggcctaggctatagagtttttccttttgttaacgcttcgtgtcttttgtttttgaatttataatacaaggatctttcttcatttgttcctacgtctctacccattctcattcattngcatgtatacttctttttctgaaacggcagatccgatgacgagtcccccgaaagtactaatacctgggacccgcctatcgactccgagcaagaaatgaatcanacggatgatgacggacacgaggatgtgggact

SEQ ID NO: 33919 - DNA, 402 bp, Glycine max
agcttgttgtcattaaatcttacatgaatggccttttctacagtcaaggttctggagttatgcactctgtatgccttggacaattcaaagtattcaagtaagattctagaatcacactaggagtcaaactttccaagtttatccttggtgtttaggatgaaacgctgacatccaaatgagtggaagtaagagatattgggcttacgtctcttccataattcatagggacttctttaagataggccttatgtaaattttgttctataaataccaggaaacatttacagcttcaacccataaatctttgggagttgagtgatcgttaagcattgttcatgccatttcctgaagagatatctcttttctctcaacaacttcattctgttgtgctgttcttggagt

SEQ ID NO: 33920 - DNA, 431 bp, Glycine max
  unsure at all n locations
ntaggtagaaagacttgctntcatgattaannattttgttntattttttccccacttgaaataagcatgtataaaccaatccccaatcaaaatggctaanaattatatcgaccatgctttaaagaaactacaaatgttactggtttcctgtgagaatgtctttatggtgttttattgtcagactctgcttcgataaatttgtccataaaaagacaaataaatgagtttcttctataatttaaaatcaactatgcacaacattnttaaattttctctcattctaataattgtctaanaattaagaacatgagttaattntagcttattggttaannatcaatatatttatatattnttttntattntcttcggtaagtacttgtgaagaagtttatcanagccttaattagcacttagcatcangagtcatt

SEQ ID NO: 33921 - DNA, 390 bp, Glycine max
  unsure at all n locations
tagcttctacaagaagagatgacccagaggatcaaagatggacttctcataaaaggtaaggagctgaattaaagcatgttgaagattgcaaaacaactcgctcagtggcaccagctcgatgatgatgcctcattgttgaagtttgaacaacgccacctgaggatcatcataaaatgaagaagcaaaacaggattccaatgcttgaagcattgccgcccaggaggaaaaaaactcattctaaggcatccactagtaccaagatagtgttggaccatccatgtaaaatggcgccactattagtagtttatggtgtgagactccttgatagtcgaagaactgagatatctaaatatccaacccatacggttgtgacctgcanacgttgggaca

SEQ ID NO: 33922 - DNA, 428 bp, Glycine max
  unsure at all n locations
tgtaagtcacatgttgaacccattttttgtagtagatcaaatcaaggtcttggaagtaggagtggaccaaagagagggagtgatgttgaagttctggtttatctttgttgggttcatcttcaaggcttaagtgaaaatcattatttcatgcctttcatttgaactgcttgatgatcaacaaagttaaagaaggtcttctgtttgagaggataacgtgttagctntagtttagtcacattactattgaagataaggttggtgtttttgtacttactaatccctttcaggggaagcgacattcactaatggctggcatgaatttgttaggaataattcacagttntaaaaagctgtaaactggtagttataanggtggttaagtttgttttcttataaccaacaagcagttactattaacctgctatata

SEQ ID NO: 33923 - DNA, 326 bp, Glycine max
agcttaaccattatatgttttattttcttgcataaagaaaataaatgtgggaaggctgtggcatgatctttggctctagaatcaagaatccactcatcttggctagtcttgctaacactgcaagtaacagataatatactacctttgttagtagctgtaccaatctgatttatttgtgaattgttttggactataggttgttgtggtaatgacatccaggctttatattgttgagtagttaatcttacatcttcattttgcgtctcttgatttcgatctaatggtgaaccatcaccttcttctcttatactactagcattattgat

SEQ ID NO: 33924 - DNA, 450 bp, Glycine max
  unsure at all n locations
tgccagaaagganaacaagtaaaaagttcttttaaagtcaaaaatgttgtttctacttctaggcctttagagctcctacaccttgacctatttataccaactaggacaacatccttctatggacgcagatatggtctggtcatagtggatgattacactagatggacatgggttaggttcctaacccacaaggatgagtcttttgataccttctataaattttgtaaaaagatttacaatgaaaaaggtatttgtatctcttcaatcagaagtgaccatgagggagagtttaaaaatgatatttttgaaaaaatttgtcaagagaatggtattcaccacaattttccactccaagaacaccacaacagaatggagtttttgagagcaaaaatagatctctttaagaaatngctangaccatgcttaatgacccacccaaccctaaatact

SEQ ID NO: 33925 - DNA, 418 bp, Glycine max
  unsure at all n locations
agctttctttcncttgtttttgcacttcaattattattcaaaaaaattcatcaaaaaaagaaagcgcgcatgtggctacatggatggaaagtaatcaagtactgaagtgagaacttgtgccccccaaaatttgaaaccttcacaaagtagtgttgaaaatgattaaatcattccaagctcatccgcttagccctaatgacaatatatctgggacaaaaccaaaagaaagaaatatataatataatcccgctgaaacagttagtgaaatttgtcaaatttgaaatatataatataattcctgatatattttttcttccaatttgattgggagacaaccaaacgacagacatacatacattcaaaatccagttgcttaatcacatgagctacaagtacatacaatacaattaatatccaa

SEQ ID NO: 33926 - DNA, 468 bp, Glycine max
  unsure at all n locations
cgccgccgcgnttcaancgttganncttgagcccgttcgtgctacaagcgactctataggaatctgaagactttatgagagcacggcttagtggatagaatgctcggttatggcagcggctgctgtgcacactggcacgatgaaggacgagatgaatgcgccgagccatctctctctagatggagcccgcacgatgacctctaacgctgaacacggcacattacatctgctagcacctcgctatggtacacagagcattgctcgctctataactatggcggagaagcgcattgaccctatgccccctcacccacactctggacgtgtctagcatgacacaccaaacatcgagtggtaactgatcatactctcagaccggattctctcaccctacgttgacatgacgctcccatagcctatggactccctgagatatcggccagatcagctggcgcgcagaccttcaaa

SEQ ID NO: 33927 - DNA, 383 bp, Glycine max
gctttaatggcctagtgaggatggagaggcgcaactaagaagccagtggagtttgatatctccattgaacagtacaatgataaggtgctttgtgatgttgttactatggacgctagccacttactcttggggagaccatggcaatttaataagagggctaatcatgatggtttcaccaacaatatctctctcacggatcaacgcacaaagatgtgctctaaccattgagtccacaagaagtgtgtgaggatcaaagacaaatgagagagataattcttcaagaccagagagacatagaaaacagagccaaacacttgagagttcaaaaagtgacgacaaacagagggaaacacacgagaggacacagatgagtgaaacacttg

SEQ ID NO: 33928 - DNA, 437 bp, Glycine max
  unsure at all n locations
tgccacccagctcgcccaggcgagcagggttgcttctctccagaagaaacagccttctggaggaatcttctggagagcccaagtgggcctggtttgctattgcacccccatttttactaagtacaccccttgccttttttttggtgattctttnttcgtaaagttacggaaacttacgaatttcgtaacgatataaagagatttgttatatagaccgtgttgatatatagaccgtgttgatatanagaaattntatttagcattgtaactacggtttacaataatgccatanacttgaaaatcctgatgagtcattagagacatctaacaacaactntcanaattgccccatgtgtggtgtcacttgtcagtgttaggattcaacaagcgattcttctcanatttcagccagcccgcatcaataaaccttgcacctt

SEQ ID NO: 33929 - DNA, 200 bp, Glycine max
agcctcatgaaaaatcttatctctcatttttggagcatcaagaggactcagcataattcagaacggggggatgaattaattattaatgtgtcctgactaactaaaaattatccctcttaatattactagattcaattacgcttttactactacgttaagaaactaaagaacagaaacagacacttagccaaaagtacaat

SEQ ID NO: 33930 - DNA, 430 bp, Glycine max
  unsure at all n locations
ttgatggtgttgagaagaaatcacatgtttgtcatcttcaaaatcttcatgattaatttgatgatgtttgtgaacttttgaatgagtttttgatgctttgttactccttaaatatttgactttcattaatatttttttatttatttattatcttataggtatgtagaaaaacctgaaaattatcctgtcataggaacaaaatgggtttttagaaataaattagatgaacatggcatagtaagaaacaaaacaatattgctttatccattgctaaagcggaatatatctctgccggcagttgttgtgcacagattntatggatgaagcaacaattatctgactatggtatccttcttgatcacatacctattangtgtgataatactagtgccataaatctatccaaaaaccctgtacaacattctcgaat

SEQ ID NO: 33931 - DNA, 323 bp, Glycine max
cgctttatgatgcatcaagattgattcagtgaagtttttgtgataacaaaggtgatgacaataagcttaaagatcaagaacaattgatgataacaaagatgatgatttcaagactcacatatcgagttcacgatgttcaagattgaatcaagaacactctatggctcaagaggaaatttgatttcatgaatccagaatcaacattcaaggttccagcttctccgaatcaatatcacgattcatgactcatgattcacgactcatgagaagacttaatcctgtatagtactaaaaagtttttcactaactgagtatcacatggc

SEQ ID NO: 33932 - DNA, 288 bp, Glycine max
tttgctgcaagtttcatgtcactgagttaattacgatggctatatgtttgttgcctatgtgatgaccatttgtcctaatatcaacacatcttccaaagattaagattatctgaagctcatttgcaaggctattaactgcattatatattgtaacaacttcatgacatctatttttggcacagtttcattcaagatacatatcgtaataacttcattatctctatgcttgccccatgagttctttacatatgatttattcactcggccttacgttaagactacatgtgc

SEQ ID NO: 33933 - DNA, 270 bp, Glycine max
agcttatgggcagatacgagcatgtgctaggtccatgatctatcaatgatcatcctgcgtccagctcatgacgttaaagagtctatctccctgctttaattttgttctttagaactcctgcttttatttatttgcctattttcttgaatattatctgaatttgcctatttatctgtgaccataggagtctaaaaaatatatacatgaccaggaatgatcaaattttgcaaaacaataaagggggttagctcgcctgcgcaagcatgtctg

SEQ ID NO: 33934 - DNA, 367 bp, Glycine max
agcttcttgagacgcgtacctagatcgatcaactctaacttgggaaggtgtagtacgagccttccttttcttaaatgccatctgcaagacattagcacaggttagtttcacacaaaaacataaaaataaaactgaaattttgatatgtgcttagcgaagcatgtcgcgcttagcgcgccttataaaattttacttatgggataagcgcagtagactcgcacttatcctgaatacacaaaatatttcttctgtacattaagcttaccgcagcaagctgagcttaacctaagtccacaatctccaaaatagaagagagttggagcttagtgtagcatggcgcgcttagctatcgttatcagaatgacac

SEQ ID NO: 33935 - DNA, 411 bp, Glycine max
  unsure at all n locations
agctttgcagatttggtcttcgccagtgaaaggatcgatgtgggtctgaaaaaaggcaaatttgatcatcctactaggacgactgagaaaactggggcaaataaagagggtgaggatgagggagaaacccatgctgtgactgccattcctgtacggccaagtttcccaccaaacccaacaatgtcattactcagtcaataacaaacctcctccttacccaccacccagttatccacaaaggccatccctaaatcaaccacaaagcctatctatcgcacttccaatgacgaacaccacctttggcacaaaccaaaaaaacaccaacaaaaaggaaatttgcagcaaanagcctgtanggttcaccccatattccgttgtcatatgctaaacttgatcccatatccactcaat

SEQ ID NO: 33936 - DNA, 236 bp, Glycine max
agcttttattaaacaaaatctgggactgactgacgaatttattctgaatagcaaggctcttaaataacataaattgactaaatggagcggtcctgctctcatatgttacttctatagttttattacacaccctttacaattgactccctgactcggaggtcattttcactctaatagccaagcctttaaacaaaattcagaactgacttggtcgacctcagtggtggaggtcttaa

SEQ ID NO: 33937 - DNA, 368 bp, Glycine max
  unsure at all n locations
agcttgttgacacgcttatactaacgttgtcttctgcaccttgtgtcatccagagacggcgagtctgatgacatgcgagggtaccttatggttatccgcaccttttgtcatccacagacggcgtgtccgatgacattcgggggtaccatatggttattcgcacctttcgtcaaccaaggcgaatgagtccgatgatatcgggatgatgttggtcgtccgattctgattattctttacaatcttttcagcttttactttcatcatccagagacattcaatcccgacgacgcataagattcttctctgctatgcagggacgatcgagttcgatagcatgtgganacgtcgtggctatccctgtttatcgc

SEQ ID NO: 33938 - DNA, 392 bp, Glycine max
agtttggctctggccatcagaaccatctcattctctacttcatccatcttggaataaacattcctgtcaagtgagtgtctttttgcatcaaacaaatcaaatgtgatcttctgatcatctattcctatttccagattacctttccctatatccaccacacaattggcggttagcatgaagggacaacctaaaatcagaggggattcagcatcctcttcaatgtccatgatcacaaagtccacagtgaaagtgaattgtcgcaccttgaccaatacatcttcaaccatgccataacgccttgaaatgtaacgatttgccagctgcaattcattcttgttgcataatttcagctctccaatcttttgcacatgagagcggatcaaataatacta

SEQ ID NO: 33939 - DNA, 378 bp, Glycine max
agcttgcacatcttctcgatcaggttgacaattcaaatctaattgtcccttggcagcttcagccaccgcatggttttgactccttgaatccaattcattctgcacccgtacctcattctccaatctgtcaactggagttaaatgtcgtaaggtgctatctacttctgattcatctttggtccgccatgataactgatttctctgagcaatctctgcttcacgttcggattgccgcttcttctttcgcatcatcagggttttaaaccgacgtttaactgtcatgcacacattgcatgtgcatgtgggtttgtgtttgcccttcccacttggtggctggatacagacaatgcatgagcacccaggtctatgccgaggatg

SEQ ID NO: 33940 - DNA, 257 bp, Glycine max
agttttgattaataggatatgggatgagagtgtgaaacgatatcatcattacccctatcttattcaaaaatctgttaggattatatagctaaatttgaactaacttaattaagatttgatgggttccacataatattaaatggttttattcctgaaaacacattctcacttggttttttttttcttttcaaattacatcactctgtagtttaattttcaatgtacactgctttacactttgttctttgattaatacc

SEQ ID NO: 33941 - DNA, 387 bp, Glycine max
  unsure at all n locations
agcttgtaaataatcttagatagaagtgtgaaattaagttcttgagtggaatccctcttctaaggagaaaatctgtaatctgtgtagttaatcacagacccttttttataaagttcagaatggctggcaaaagagaaatcaagtggtgtagttggtttaattaaggctaggatgaagtctaatgaggaattggcacgtttttgaaacccagtggtttgttggcctagtattgtactgattgtgttagtgaattctcatctttaacggtgacgattggacatagcccaaagtttatgtgaaccaatattaaaacctttgtgcaccctntccttntctttttctttactttactatgcacaaatatgaaaattggttttgatcacatca

SEQ ID NO: 33942 - DNA, 234 bp, Glycine max
atagcttcaaccctataacgcaacgtggcggacaatagtgggcagttcacttgaatgggcatcattgtcaatgctgaaggtattctgcccttcactatccatgttcacacattacttgcactggtggtacctaagcatgaacttctaccgcatacagatgttgactatacatatgagcccatcttacaagcttactccgacaatggtggccttctgcgaataagcagttattct

SEQ ID NO: 33943 - DNA, 395 bp, Glycine max
agcttggatggctatcttgcaagagtcctcaaggcttgccaaccacaattggcattgcagagtagcaatgctcgccgcataagtgatttagaaccgatactttaaaacatcttatctcacccattcatagccagcaacagtaaaaggacgatggtgacccagcactgtggttacgccgcacatagggggatgccctatcgtccctaccaccactcttccttgccccgaagaacataagggagacaaattatggtgatcaaacaagttcctcgaccggagaagcagcggaaggctacaccctcccatgatagtaagaagtgcctccaccagcatggtgtgaaaccctcaacctctccaaggaagaggagtcgctatcagaaggcccacgacgagtc

SEQ ID NO: 33944 - DNA, 279 bp, Glycine max
agcttctgtctttactttgaaccggtcctggtctatccacttgtggaaccaaagaaaatgaaaacaaagcacttcttctatccatacttagagaacttgcgttcttgttccactgggaaaaaaccagtccaatgaatatggtcaagtgttctacgcaaaccatatgtattgacagcttcattagcagctctaaagccaccaccaatagctggggaagaatcattggccatctgattcttgacaaattcacccaatttattttccacatgagattctgcc

SEQ ID NO: 33945 - DNA, 409 bp, Glycine max
  unsure at all n locations
agcttccaagaatcaagatcaagattcatgaatcaagagaagacttaatcaagataagtatgaaaaggttttttcaaaaactgagtaccacatggatttttctcaaaacatatttaccaaagactttttactctctggtaatcaattaccagattattgtaatcgattaccagtagcaaaatggatttgaaaaagttttcaaatgaatttacaacgttccaattgatttcaaaaaagctgtaatcgattacaatgttttggtaatcgattaccagtgcctttgaacgttgaaattcaaattcaaatgcgaagagtcacatcctttcacataaaagatntgtgtaattgattacattgatttggaatcgattaccagtgattggttctgaataaactaaaagatgtaact

SEQ ID NO: 33946 - DNA, 357 bp, Glycine max
agtttgtctattccactccagcataagtgtcttttgctcgtagtaatactatccatctcgaatataattatctttatcttattccgatgatattctttatctcatgaaaaattttaaccatgattctttaataaaagaaatgacatttattgatttggcactttttaataggaaccatgttcctacagcataagtgtctcagtttgaatagctctggatttgattgatcttgaatccctggtttggtattatccaattgtgctttatcttaccaccaccgccttgcgtcggcacgtgtctttgaagacggaacgtgagaagaagaacgagctgcactttccactaagaaagtatgcg

SEQ ID NO: 33947 - DNA, 389 bp, Glycine max
  unsure at all n locations
agcttttaaaaaaaaagcctgatagacctctcaggctgacctgtttaatatgtgtgtgtgtgtgtaaacttttcttgattcttatttcttatttattttagtatttgacattaagactagattatcaaatgaaacttatggtattttacttagcttgtttattttggtgaatacttaaagtgcttcgattataattcttacttgggttgttgtgattagtgaattttaatctcatattagagtgctctaattaattntaactttttttttcatgcacaaactaaaagggaagtatgtgtctttctttatattaaatcttaaaaagtacaatacggaattttcanaattttactatatagtcattagattcccttcatatataatattca

SEQ ID NO: 33948 - DNA, 397 bp, Glycine max
  unsure at all n locations
agcttctggatatactatgcatctgaatcggacaaccgtgtgacaagttatgactatntgaatctctcgagagcattccttattcaatttcgagcgtgtcgataaatcatgcgcctgaatcggacattcgtgtgacaagttatgactatttgaatttctcgagagctgccggttttcaatttagagcatctcgatatgtgatgcgccagaatcggacatccgtgtgacaagttatgaccatttgaatttctcgagagctttcgatgttcaatgtcgagcgtctggatatattatgcgcctgaatcggacctccgtgtgacaagctctgaccatttgaatctctcgagagcattcgttgttcaatatcaagcgtctcgagattatatgcgccttgatc

SEQ ID NO: 33949 - DNA, 336 bp, Glycine max
agtttgcttctacaattatatatacaagtcatttgatatctatgttaacagtgggacttgaaactaactaacaaatatattaaaaatattatacacgatgactatgaagtgaaatatattagcacgagttgatgaatacagccaagatattaggctgtagggatattcattgtggctccttccatatataagtcgttgcataaattgacttggatcacattagctgaaaaaaacctagtgtgggatggataaaagacaattgtgatgaagggtctttgagggaccacactactacaaaagcagcattctaagttggttataaacggttctctatgt

SEQ ID NO: 33950 - DNA, 295 bp, Glycine max
tctgcatgcaagcttgggaggattgatggggacccggtgttgagagaaacgaggatttgggctacatgggagtacatgagctcagttggaggtgggcaacaagggatggtaggtttatgcgcgatttgtggatgtggaaaatttgttgtgcaccatcgcccgaccgccacctagtaccacatgtgatgggtaccccataatgatacaagcttgagatgaggaagtgtaaaaaggtgatacttcctgcttttattcgttgaccacagagtggtacctggagatatgttgtgggggt

SEQ ID NO: 33951 - DNA, 315 bp, Glycine max
agctttaaaaattgtttgttctaaagttatagtgtcgctcttatttaaggggagtatccagctattccatcaactgaatatccttctagtgtaataactaatgttacaaaaaccaagaatcataacttcgaatcttttccaatggaggtgtcaatattcaatagcttatcatgtctcaagagaatattatcttcttgaagaaacaagaactaattatcaatctattattcaaattattctaaaatattcaatttgatctccaaatttataatcaatttaattcgattatcacatgattgtaaaaaatatatcaat

SEQ ID NO: 33952 - DNA, 390 bp, Glycine max
  unsure at all n locations
agtttgtaattgattaaaagggaagagattatgattgatcttccttcacccagtttattttatagtttcattaattaattacaaatacgattgtaggacaaaaattaactataattatatttaaactggtcaatttagaataaattcggcaggaaaaaaaatgaaattaatataaaaatatgggaaacaaataattcaacgcatatttatttgaactgaacatagaaaaaaagacaaagaaatggaaggtcatttttgcaccctttntttaaaatttttgtctgcgccttactatccgaaaacaaaaaaaaaatgttagataatatctcattctatttcgaanagaaaaatatattaaaattaaggtgaataatgatatatacatataat

SEQ ID NO: 33953 - DNA, 409 bp, Glycine max
  unsure at all n locations
agcttggatgctgcttgatcaaccttagccccttgttgatgccattagaatcattgaagacatgtgctctaaccccgacaacaactcaagggatatgaggattatgaagaaaggcatcaattagatgaggatggattaatcccaaactaaattaggaaagcagatacacgctctatcactgaagattgagacacccatgagagcttaagctcaagtccccattacaaaaccttcattctcaacctataataaatgtgggattatgcatgttccaagagaatgcattattgatgaaagctagtggcaaccatggatgagatcaactttgttaggggaggaaataattcttatagttagtaccccaacaatntcaatcanaaatagggcttcaggcagagtcagggaatgt

SEQ ID NO: 33954 - DNA, 409 bp, Glycine max
agcttgtaatcctttatataagctaatgatgcttaacgaaaggggagagaaaaatattttttctctcatcccttgagctagcttttgggattgagttagacccaaactcacattctaaaaaatacgtaggcatgcgccattacttggtttgcatagaagaaatgtgacgaataaacgtggacaagttcttagaaagagagcatcgagatcacgaagattgaaacgattcttgtgatcttcttcatctgttactctctctattcgaacttgtgctctttaccaaggttatcgagagtctacgtagactcgtgagagtttcatagactcgactcgtagactcatttggtataatctgcttcatataaaaattataacaaaatatttatatataacatactaattatacatt

SEQ ID NO: 33955 - DNA, 387 bp, Glycine max
agctttgcggaattggtcttcgccagtgaaaggatcgatgtgggtccgaatagaggcaaatttgatcatcctactatgacgactgagaaaactggggcaaatgaagagggtgagaaagagggagaaacccatgctgtgactgccattcctatacggccaagtttcccaccaacccaacaatgtcattactcagccaataacaaacctcctccttacccaccacccaattatccacaaaggccatccctaaatcaaccacaaagcctgtctaccgcacttccaatgacgaacaccacctttagcacacaccacaataacaccaacaaaaaggaattctgcagcaaaaagcctgtagggttcaccccaaattcggtgtcatatgctaaa

SEQ ID NO: 33956 - DNA, 309 bp, Glycine max
agcttgtgggattatgtgatagtgatcttgccagacatgctgatgatatgataagtactactggatctgtattctttatgggcgattgagtatttacatggagttctaacgaacaaggcattgtgacactttttacttgtgaagtcgaggttataactacaacttcctgcacatgtcatgccatttggctaagaagattgttggaggaacttcagttgctgcagaatgaaagcaccaagatctatgttgatagttgatctgcgcaagagctcgccaagaatccggtgttccatgaacgaagctagcata

SEQ ID NO: 33957 - DNA, 397 bp, Glycine max
agcttgagatgaggaagtgttgaagggtgaaacttcctgctcttattgttgaccacagagtggtacctggagatatgtcgcgggggtcaggagaccttggggacgtcaggtggggtgctattgcccaaaaccaagcttgaccaatcccgacccaacccgggcatagtcggtcagtgagaacctgtgatgtacctaagcatgcgagctcctggcagtcaacagataaaaggaaaacaagaccacaaagcaaggaggcttgtggtggctggccagctgtgaattttgtgtaatatgtggattgtggcctctggtaatcgattaccaatggtgggtaatcgattacaaggcttaacaatgaagacaggaggctaagatggtctctggtaatcgattacca

SEQ ID NO: 33958 - DNA, 389 bp, Glycine max
agtttgttcacatattattcgcatgtatgatatccactcgacaaggtttgaagtagaggagactctcaatcctataatgcaacgtggcggacaaaagggggcagttaacttcaatggtcattattgtcaatgcggaaagtattttgcgcttcactatccacgtttacacattattgcaccttgtggttacgcgagcatgaactactaccaatatatagatgttgtttacacaaatgagcacatcttaaaagcttactccgcacaatggtggcctcttgtgaatgaagcggctattcctccttctgatgacgcatggacacttatccttgaccaactacaattcgtgcgatacgttggccaacatcaacaaggataaggaatgagatgga

SEQ ID NO: 33959 - DNA, 396 bp, Glycine max
  unsure at all n locations
agcttttctaacattatatcatttgtagggtgtgaacttgcacccggatccagacaagatatagagcccaatgttttactcatatggattacatgatcaatatgagtcatataaattaactcatacgaattacgtaatccgtatgtctcttatagattatgtaatccgtctgtacataatccgtatgactcatattatgtaatttgtatgagttaattcgtatgactcatgcgggatcacgtgattcataagtattttttttaatcttttttttcaaaaatatgtcttttaatttattaatatattaaaatttttaatagtaagtattttttatttataaaaaatatactgattaaataattcatatgaattatatcanaattaattgttataaaa

SEQ ID NO: 33960 - DNA, 320 bp, Glycine max
agcttatctatgggggcagaatcactctcattaactcagtcctatcagctctacctatctacttactatccttctttaagatccctaaaaaagtggtgcacaaaattgtttccatccacagaaatttcctttggggaggtcatcaagaggccaacaagattccttgggtgaagtgagacacagtttgtcttcctaagaacaaagggggcctatggattaaagatttatctaaatttaatgacgctctacttggcaaatgggggtgggagctggctaataatcacaaccaaccttggactagaattttactttctaaatat

SEQ ID NO: 33961 - DNA, 388 bp, Glycine max
  unsure at all n locations
agttttatttaccaggaaaattatagagtaaattaataacaagaaaattgtgatttttgtaattgtataccattgcatatagttgaacaattaaatttaatttttcacatattgtatgcataccaaggtaattactaatgaaagtatcatctttattatatatttcattaattaaggatatacatattagttaattcaaaatatatcttccctatcattgacgaaaaagggtcaagggagaataactttcaaaaaagcattttttttgttaagaggtttttttttctttntaaaaaagtattcgaaattaaatattaaacaatntccatataataataataataagtagactactagtagtagtattagtattattaaatgtaattaa

SEQ ID NO: 33962 - DNA, 266 bp, Glycine max
agcttgcctgtccgatgcagcagtaatgatggcccgggttatgttggggaacggttaccaacccggaatgggtttaggcaaagacaatggcggcataactagcctgaataatgccaaaggaaatcctgggaaatatggtttaggctataaacccactcacgcggatataaagagaagcatcgctgggagaaagagccgtggtcaaagctcgcggctgagacaaaaaagtgaaggaggcccgccctgccacataagtataaagctta

SEQ ID NO: 33963 - DNA, 396 bp, Glycine max
agcttagcattcgccttttgccatgatgtgatctccttcttgacagtatctcatcgagttggagtggtatcacagcattgaactatgttgatcgttccaatgggatgatggttttgattgctgcagataaagtgtgtcattgtgagtttctggtcccatgagttaaactataacgactacaaaaaatattgtcgtatctttaagggccaaaaggataattaaaccttctatttctttataattcttttttaccacgggttatatatatgtagcagtttattctaaacaatggactacgtgtgaaatctttgaattctatgtaagacatgttatttcaaatttctcattacgtctcatgtcaatgatgcatgctccattcgaattctatgtctaatt

SEQ ID NO: 33964 - DNA, 362 bp, Glycine max
agtctttatacgggcatgtttgaagcccatttgtgatgaattccatgtttctctttgaagatctcaatttaaccaaggttcaaagacattaagaagacctaacgtagaagatttattacagattacaatgagaatacaacatcaaaatgaagttgtaccttagccagcatcataatggtgtatttgaggagtctgagactgagaacatcagaacgatactctaatgatcgaccattatcatgactcgacatattatgagacgactacgttagaatgacgcatcgtagtctctcatgccgtatctatgcatcggaacgatcaagcatctacatgtcttccatatgaaatcacagatgatagct

SEQ ID NO: 33965 - DNA, 372 bp, Glycine max
agcttgagtcgctgatattcacctagtccatcatatttagttcgccgattctacacgtctccaaacggaccgaatctccgtgactctgtctctatgctagttcgtgctacgtcatttttcactctttttttatagtacaaggaatattctatgcgtcttttttatctataaaagatttcattgcatttttcaaagcttatttttgacttataggccttatgttttggtataccgtatacttgtaccaagttctattaaaataaattgggtattacttttcataaagagtacagatattcttatgtggcaatgccaatttttcctcataatacataacctattaatacttcaacattttttactcctttattt

SEQ ID NO: 33966 - DNA, 399 bp, Glycine max
  unsure at all n locations
agtcttaacaaagcatatgatcgcatactcagagactgagaaccccacgactcccaatacacgcattactctcctctcgtacataagacgtacaacttatatatttcatacattacatatataaaacatagaacataacccatatgtttcatacatcatatatataaaacatataacccatacatcgcatatatataaaacatacaagtagcaatgatatggttatcacctctaacaaataaagccaaatcatgacatctaggatgtatttaaaattgcaacccaatacaacttacaggtcgcccaaaattaaactacgacatgtacgctgcaaaagggaataaaatanatcatagcacatattctatatctaanataacaataaactaaggtcacaac

SEQ ID NO: 33967 - DNA, 364 bp, Glycine max
agcttcacctcagcattctaggtatgacatatgtaatttgttaattcaatcatattactttgatacattactgaaactcaaatgtatgttaaaccaactacctgtaatttcgaaatgaagtccatttcaaccatgccataggatataccaaggctacaaataaaagtatattgaacatttgaacctaaagcatatatacacccttatttatgcacttcatttagaaataagttcactttacgcaacatttaaaggcataataagggtccttgtgtggtacatttgtttaccttattggcaagagaactgtgacttatgtacaagacgtagaatcaagacttcatcccatgacacattttgtatc

SEQ ID NO: 33968 - DNA, 397 bp, Glycine max
agcttcaaacacttgggtaatcaattgcgatcagcatgtaatcaattaaaatagagagtttttactttagaagaagtcttctaactttggaaaccttctcctggctcctacatgatgatgcatgatgcatatatgaaatgatagagactaagatgcaacacataatagaacaatcaataccaatgtcactcaagagagttaggcatgtaaaagacaaaacttcttcaagctcttctttatgcttcaaggctaagtcttcatgttgctccctctatctctaatgccttgagtatcccggttatgcacgggcgcctgttgacttatgcttacgtgtagattccacattgcgttgggtgtaagagataactactatgagtctaggacctttacttctata

SEQ ID NO: 33969 - DNA, 371 bp, Glycine max
agttttcaacagtcccaaaacccaatgtgtatgcgcaaccaagtgtcatgatttctatattaccaattttgctagttgttaatgttgaatcatagttttgctctctcatctagcattcgtctcatattgtaaacctatttcgtgtcgtccagatttaaaaaaaacttctcttactttatttcaaaatcattcttctgtttaccttacaactcactcaactctatcattaccctttttcaatatgcataattaccaacatgcaaacatatctaatccagcagatggcaccatcaataggcaagctatgatccagaagcagcgagatgcctcatctcccatttctttcatcttctaaatttattggaccttct

SEQ ID NO: 33970 - DNA, 357 bp, Glycine max
  unsure at all n locations
agcttcaaacaacttgttgtaatcaattatgacaactctgtaatcgattaaaacatagagtttttgcctttgaagaaacttttctaacttagaaaatgtccttcacacacactatgatgatgcacaatgcaaaacaaatatcaaatgtactgagatgcaacaatcaagttaacaaccaatacaaatgctactcaagggagttgggcatgtaaaagccaaaacatcttctanagatccttcanacttttcctcgagcttcaagctttagccttaggttgttccatgttgctcatgtttgctgctccctatctntaacacccgcggntagtgatntcataatcactaatacctatgatg

SEQ ID NO: 33971 - DNA, 381 bp, Glycine max
  unsure at all n locations
agcttgtaagaaatatttcaccacagaattgctgcattgatttagatctctatttctttggtcactcttgagacaaccataacactcacctcataaaaaaaagaatacgatgtcaccaacatcatcatggaacgtgtcttgcccgtattatgccttatcactcttacattcacaatccaaggaagaccatcatcttgaaaaccaaagacatggaactgaataacaagaaaataatttatgagaagacgataaccgtacatacctaccttcttatgtggaaacagagaattgagatagatgagacangataacacgatttatacaacttacacaattgcctctagataccaaggagtatttagcaagataagaacagatagc

SEQ ID NO: 33972 - DNA, 384 bp, Glycine max
agcttaagccattaattatgactgcacgtttgatctattgcgtgaaacttgcacacacaagacaagaagtcaaaaatcaattaatcattgcctgtagatgttaaacctagcatcattcacgcggttttatttcatgccgttatgacaacaatattctttctcgtaataatgtgcgagaagaaaaaaattattttaaaataatcatcttctaattttatagtgtaattataattatatttttttacttatatttcttataacattaatataaggaatacaaaaatttaaaataaaataataatgataacattaattttataaaaattattattctatcttatatatttattgggttttgtttatctgtatacaactaactataat

SEQ ID NO: 33973 - DNA, 390 bp, Glycine max
agcttgtgcctcttctcgtctggaatatgaatgtagcatatagatccaaagacccttatgtgctttgctgatggcttcttcccgttccaagcttcaattggagtcttgtcttttacagacttagttggacatctgttgagtatgtaaacagcagtgtagactgcttcagcccagaatttgttaggtagtcccttctccttgagcatcgatctagctatttccataactgtgcgattctttctctcggacactctattttgttgaggagaatatgagactgtaagttgtcgctcaatgccttcatcctcacaaaatcttttaaactcgcgagaggtgtactttttgccgcgatcacttcttagtacttttatccgttttccactttgattt

SEQ ID NO: 33974 - DNA, 391 bp, Glycine max
  unsure at all n locations
agcttgtagccattagaagagaatgagcatgtgattggaattatgactgaaaatgttagtcagtttgccagattgattgtgaaggaatgcattaaccgtatcccggtgagagtgtgatccttaaattttgagagaaacgactatcatttagtactgatttttgcgtgaatctctgaagtatggactgaatgcatgaaattgaggatgatgaaggccatgtttgattgtgatagccacttagccaaaaagctgaccatgtgcttgaatgatttaccccttgcacccagtttgagctgaataaattattgattgattgaatctggactctatacagtgttatcttctgctaccttgacttanngtgtangagagcatcatccacagtaagcgt

SEQ ID NO: 33975 - DNA, 366 bp, Glycine max
agtttaatgatggaatacttacttgttggtgatgaataaaagcgcaaaacggaatcgaagaatgcgaaaagtagagatcctaaggctgcaaactcgtaaattccgtgggtatggcttttgaaaggggggaaaagaagtttttgaatgcaaaaacgtcccccctttcgtcacttttatattttggtgcatgggtggctcgcccaggcgagctaacctgcacttttttttttgagaggaacattaaccatgtcccctccttccttatgggttagtgttttgcctatttgagcctactcaagttagaattaggcgttaattactaaaaacaaacaatggtagtaaaatactgtgaactcataggatact

SEQ ID NO: 33976 - DNA, 395 bp, Glycine max
agtttgtcaacactgttccctttctcccttgcccgaaatcttgggaaacttaagacccttgaaatacagaactgtgacaagttggtagaaattgttggaaaggaagatgtgacggaacatggaacaactgaaatgtttgaattcccttgtttgtggcagttgcttctttataagctgtcactgcttagttgcttttatcctggaaaacaccatctggaatgccccgtattaaaatgcttggatgtgtcctattgtcctaagttgaagctattcacatcagaatttggagatagtcccaaacaagcagttatagaggctccaattagccaactacaacaacaacctctgttctcgattgatatgtgacaaaacattatcagttaaactttttgagc

SEQ ID NO: 33977 - DNA, 385 bp, Glycine max
  unsure at all n locations
agcttgcatttactgcatttcaagataaaggtggcatgcacctgcatccccaaaaaacatgttcataagtgcatagatttctcttgaggatgagaggccctctcaaagagtcaacctcttgcattctcataaggtcgagccctttggtactagtacctattggcttgttttcataagactcaaagtcctctatcatttacattttcaaagactatcgtagactttcatcatgcggagacaattatggtcattcacacctttttttgccttctagagacaatcaagtccgttggcacgcggagacaaattatggtcatccgctntcttttccttccggagacaataaagttcgttggcacacggagacaaattatggtcatccact

SEQ ID NO: 33978 - DNA, 390 bp, Glycine max
  unsure at all n locations
agttttcttaagaagattcctaaagaagctagagcttagctacacatacctctctaatagctaagctcacctccttgagatgagaagctagagcttagctacacaccccctataatagctaagctcacccccatgacaaaaaaacatgaaaataacaaaaaaagtccttattacaaagacaactcaaaatgccccgaaatacaaggctaaaaccctatactactagaatggccaaaatacaaggcctagacaaaggaaaaacctattctaatatttacaaagataagcgggctcatacttagcccatgtgctcgatatctaccctaacgctcatgagaacnctanggcctttccttggatctctagcccaatctacttggagtcttctag

SEQ ID NO: 33979 - DNA, 427 bp, Glycine max
  unsure at all n locations
gcaatcgactcgtacccgngatcttagagcaccttttgcatgcaagcttcacttacacttgattcaaatatcctaacaccctattaatcaatattttctttaaaaaagtgagttaagcacaaccaaatgtatttacctctcgattggatgcatccaatgattatacactggccctcctaatttcacttctttaagaacatgacaagttaaatggaccatcgatatgggtaataggattttcaaatggcaaatagtgagcacagtttgatgttgcagcttgtcaagatctgatacattaaatcttttatcgaacaaactgcgtgagcatgagcaaaattctactgacattacagtcaacgatggatagaaggaggcaaccagcggtcctatttccccctctcacgggatcttattattattaaagtaa

SEQ ID NO: 33980 - DNA, 364 bp, Glycine max
  unsure at all n locations
agcttctaaactttgtacaagaatgaagctctgataccacttgttagacaagtggcctcagatatcttaagaaggggggggttgaattaagatattcgaaactttttcccctaattaaaaatctatcttactttttacttaagttatgaattcccttaatgacaatcttcttaaatattaattcaaatgaagcaacttgaatatgaatataaagcaataataaataaaggagattaacggaagagaaaatgcacactcagttttatactggctcggtcacacccttgtgcctacgttcagtccccaagcaacccgcttgagagttncactaacttgtcaattccttttacaagttctaaacaca

SEQ ID NO: 33981 - DNA, 385 bp, Glycine max
agctttggagaaccaagccaatcaaaatgctagacgaaatatagatgggaatagaggtaacaatggcggtaatgacggaccgaggcagaaccgggttgagggagtaaagctcaatgttcctcccttcaaaggtagaagtgatccagatgcctacctggactgggaaatgaagactgagcacgtatttgcctgcaatgactacactgatgcgcagaaagtcaagctagcagcagctgaattctccgactatgcccttgtttggtggcataaataccaaagagaaatgttgagagaggaacggcgagaggtatatacatggactgagatgaaaagggtgatgagaacaaggtatgtgcccactagctataacagaaccatgcgacag

SEQ ID NO: 33982 - DNA, 394 bp, Glycine max
  unsure at all n locations
agcttgaagtgtaagatcttgtgaactttacaagtcaaactcttatcatggcccacccataggattgatataatggtggcagatcttgtgttcaattttttttttgttcgatttatgaagtcaatttcataatataaataaacattttgcagtttaatttacaaaacatattagtttaaacacatttgaaaatagattttcgaaagtgttgaatctacactttggaaacttagtttctagaagtacaagcattgttcaaatacacaattagagtaccttactgaatctncatgctccattatgtatgtattcccctcgtcactaaacctctttggacccantgttctcacatcaagacaccatggcatttgagactcatggaccacccacatgc

SEQ ID NO: 33983 - DNA, 413 bp, Glycine max
  unsure at all n locations
agcttgatntgtgagttatttntagccatagtttcactttggttattagtcaattcattcaaggaaacttccaaagaaaaacgtctgattaatttttttgattattctattcaaagatattttaattatattattattattttttcaagatattttgattattttattattattttgcctttttttatttaatcgaggttacaacgtgaacgatcggttggattttattttaacagagattaaacgagattacaacacanatgatcggttgaagttcattttatcatttattaggcgagataacggcttacataaatggtaaaaatatcgttaacagcggaagaaaagaanatcaaaagtgaacgagatgaagatgaaagccaacaaaacaagaaatgaattgaaagtctcgg

SEQ ID NO: 33984 - DNA, 393 bp, Glycine max
agctttaagaggtcactttttcttctttttttttgaaagaaagagcatttgaattccattcatgggaagaagcccactgccttctttactgatactatgtcctcaaattaattaaaatatttggcgcattagtgaaagataaagacaccaagacttttctgaagcgattatcataaaagttagttatatggaattaaactaattatttttaattcccttcccctatagagaacgatggcaatggccggctatgacaagttgtctactagatgtatgatttagaatgtagtcttaactttagattacttatagctttctggtgtcccacattttttaatcggttatcaagatccattgatctgctactatgttatacattgcatcaaccacaaa

SEQ ID NO: 33985 - DNA, 412 bp, Glycine max
agcttgcagtggtagtcagttaggtctttaaggacttctcttgggtctcagcctcgcttaacttagtctttgtgtccttcagagacttctgagaatcctctgccagttgcaacaatgtctcattccccttggcagcctcaaccaaagcttgttcatcctttgcatactcaacaaggtgttcgacctcgtcttggagagctagagtaaagcttgcagtggtagtcagttaggtctttaaggccttctcttgggtctcagcctcgtttaacttagtctttgtgtccttcagagacttctgagaatcctctgccagttgcaacaatgtctcattccccttggcagcctcaaccaaagcttgttcagcctttgcatactcaacaagagctaattgtgactcgatatcagccttatc

SEQ ID NO: 33986 - DNA, 377 bp, Glycine max
agcttgttaaaaacggaagaaaagaaaactgaaggtgaacgaaatgaagatgaaagccaacaaagcaagaaatgaattgaaagtctcagattcgaaaacttatcggttgaagaccaaagaacgcacgaagaacggcagaaaatcttcacgaaattgctcacggaaacgtctcggaagcatctcggcttggattttcttcacgaaaacgtgttttttcactcaaaatccctgaaatgcatagggtaaaaggtcaggaggctctggaacagcttcccctatttataggagaaaaggggaggaggttgccgcctatctcacccaggcgagcaggtggcttcctctggaagtattttacgaaaaagttcacgccccctttt

SEQ ID NO: 33987 - DNA, 391 bp, Glycine max
  unsure at all n locations
agttcactcttcgcatctgatgttcacatatgtgtttctggcctccatctttctatcaaggcactaattaatgagacatttatttttaagtattccatcttcataatccagtaaaaaccagattgctgaaggaaaaaaataatttcctctggtatttcttcttgaccttgatacgtggggacagctcgtttaatgtgtagttttatgtcttctttcccattccaaatatgttctgaaacatgtttaccttacatccataaaacgtcaccatcaattagaccaaacttaattnttatatttgatgaacatgatgacgaagatgtcattgatactgcaaaataaaatataatacaataagttaccaacaaactntatacattattntctacaa

SEQ ID NO: 33988 - DNA, 381 bp, Glycine max
agcttgccgccacggagttttccgactatgctcttgtgtggtggaacaagctacaaaaggagagagcaagaaatgaagagccaatggttgatacatggacggagatgaaaaagatcatgaggaagcggtatgtgccggctagttactcaagggacttgaaattcaagctccaaaaactaacccaaggcaacaagggggttgaggagtatttcaaggaaatggatgtgctcatgattcaagcaaatattgaagaagatgaggaggtaactatggcttcgatttcttaatggttgactaatgatatctgtgatattgttgagctgcacgagtttgttgaaatggatgatttgcttcacatagcaatccaagtggagcaacaat

SEQ ID NO: 33989 - DNA, 388 bp, Glycine max
agtcttttgctgcaaaattgcttccttggttggtgttttggttcgtgctaaaggtggtgtttagcattggttgtgtggttggtgggttttgtggttgatttagggatgacctttgtggataactgggtggtgggtaaggagaatggttgttattggctgagtaatgacattgttgggttggtgagaaacttggccgtataggaatggtagtcacagcatgggtttctccttcattctcaccctcttcatttgccccaactttctcacttatcaaagtaggatgatcaaatttgcctcttttcagacccgctttgatccttttgccgatgaagaccaaatcccgaaagcttgaatgtgcataccccaccatattttaatagtaaaacac

SEQ ID NO: 33990 - DNA, 397 bp, Glycine max
agcttcaatggagcttacatcattgtccttggatgtattagttttacttttatcagatgttcacacatgtgcgcagaaggaagctggttaggaaccaaattggaattatatatgcgcagctgaggcgatgccaattttcaagtgtacaggtctctaatttttgtgtgggcttggtgctgataaacaagtaagttgaagggtgattatatgaacgcttggtggtgggttactacttactagtgcctcttattttcttcataaggcttaaggggttaggcgatttttgtttatatcggcctatagaatatatgtattcttgcttacatttatgagtatgatggattaatttactttctatagtgagttggagatcacttatttagaagatcactcttat

SEQ ID NO: 33991 - DNA, 327 bp, Glycine max
  unsure at all n locations
agcttaatatgggtcaatactnccattattgacgtgcatcttgaggaccttccttcaacctcttcttcttcctccttctccttgatcttctacataccacatagctctactcatatgcctatgaagctgctcatacaagcttttcagatctatgtgacacgctctcacatacccaccactctcactcttcttcatctctctatctctctctctatcacacacacacgcacacacagcacttttctnttaaaaattcacaaaattcaccacacacccctatggactttgaagctcatacgcacttgcaatatcaaaacatgcaactct

SEQ ID NO: 33992 - DNA, 353 bp, Glycine max
ttgtgtggatcggccaccacccgtctggacgatagaacgacacatcaattgcatttccttttccatgtcttctgttggacaatggtttggaaaagcatccgactaagcacacattggaccttatatgacccttccccttatttctctgcatcactgtgacccagaaatattggggaaaacgaaatcatctattaaaacatgatcatatttattaaatcttgtcgacatcatagtcttcattccaataagactattctgtgactctccatgttaatctcttttgcgactcatacggtttggtgatcctatcatttgacgcgtatccactatcatcgtgtgtatcgataccaacc

SEQ ID NO: 33993 - DNA, 385 bp, Glycine max
  unsure at all n locations
agcttctatcatcgattcatctaacagtacatgcaccttgttgtgccactcataaatttattgaaagcaaacaagatagagtggtctcgaagggccaatacagctctacagagttaaaaaatgttatagtcaccacccctatgttgcaactccctaacttctccttacagtttgatccaaagaccaatgcttcatcctctaccatcaagcctattctctcttagcaaggtcacctagtggcatattttagtataaaaaaaactctgcacaaaaatgcaatccgcatcagcttgtgcaagggaaatattggcaattaccgagtcagtgaagaagtggtgacactatcttattggcagcaaattccgcatntctatataccaacata

SEQ ID NO: 33994 - DNA, 406 bp, Glycine max
  unsure at all n locations
ntgtccccacttccttctcgctgaactatgctcaactttagcaaccattgaacgtctagactaaaacacactaagctcagccctcagatccctcccgatggattaggctcagcttacacaacctccgtacgcatagactacattaacctacacctcactccacagatccctcattcaccactaggcctaaatcacaccacatcttcatcacctcacatgaagaacactaacactcaatccgcagatccctaatccaagactaagtctcactcccgcttctatcacgtcctcaggcaacaataccatcttccacgcctcaagtcacctacctatacacacaaaccgggcgatcagaccaagagcctgtctaaattacccactgaacatacatacacacattcaatca

SEQ ID NO: 33995 - DNA, 530 bp, Glycine max
  unsure at all n locations
gtaccgcaaacgattccgtgccaggaaataagaaattanagacaccgtcaaaaanaaacagagagtgaaccntgtgacacctcgaanacatcggcgaancganctcgcacccgggatcctcagaccgacccgttgtatgcaatctctggaaccgacgccgatacacaagcgagacgcatgaagcgaccaacagtgagcagccgcaactaaggctcatctaacaacacaacatggcgtcggaagcgtcacaccccaaaccaccccgaggaccaccgctcgacggcacgaaaccaccagcttgaccgctctgacgaactcgacacccatcgataaacaacccgcgaagctccgcgacgcggtggcgagcgaacgaaaacactatcgggcaatccgcaacgcgcacaacacctccgacgccgaagaggggacggccgcgcaataccgacagctccctgacacaacacacccaaaacacgcaccgcacgcagcctctaggccgcacaccgcacccaaacaaaacaccaacaacg

SEQ ID NO: 33996 - DNA, 404 bp, Glycine max
agcttaaataaacattatttgaattgaaagtctcggattcgaaaacttacccgttgaaggatgaagaacgacgaagaacgatgaagaatttccacagaatcgcttacggaagcgttacagaagcacttcgactcgatttttcttcacgaaaacgtgttttttgcccaaaatagccgaaaagcatagaccatggggtcttgaacattttgaaacagctccaccctcccctatttatagaaaaaaaggaggtgcttgccgcccaaagacttaatgaagaagatttctaagcgcacccgaattactaagttcacccgccttttcgaattttacagaaaagttacggaagccttacggaagtgttttcgaatatgactttcatcttttttgtcttccgtttcaccaat

SEQ ID NO: 33997 - DNA, 430 bp, Glycine max
  unsure at all n locations
attgttttcaattatgagcatctcgatatattacgggactcaatcgtgtcatccgagtaaaaagttattgtcgtttgatttttctcagagcttcagttttcaatttcgagcgtctcgatatactacgggacacaatcggacatccgagtcaaacgttattgtcgtttgaatttgcttagagcttttgttttcaattacgagcgtctcgatatattatggggctcaatcggacattcgagtaaaaagctattgtcgtttgatttttctcagagcttcaattttcaatttcgagcgtctcgatatactatgggacacaatcggacattcgagtcacaagttattggcgtttgaatttgctcacagcttctgttntcaattacgagcgtctcacatattacgggactcaatcggacatccgagctaaagttat

SEQ ID NO: 33998 - DNA, 388 bp, Glycine max
agctttgcagcctattccttccttgaagtagctatggtcttttctggtgtcctcttgatctccctatttgaaacttcaacttgtccatttgtttgcggatgatagagtgatgctaatatgtgttgaacatcatattgttggaggacgtttgaaagttgatcattacaaaagtgtgtacctccatcactaatcaatagtctaggcactccaaatctagaaaagatgtttctctttaagaacttaatcattgtctttgcatcattgattggactagcaattgcttccacccactctgagacatagtgcaccactaccaagatatattcattgccaagggaggatggtaagggaccaacaaaatcaattccccaacaataaaagacttcta

SEQ ID NO: 33999 - DNA, 441 bp, Glycine max
  unsure at all n locations
nttccctttntaaagacaccccaagcaaccctccatattaaacaatcattttcaaggaattttcagcttccaaatgtccatctagtttccacttacatgtagaagagtgctattaaccatattccccatagcatgatagtaagtcgatttttttgagaaagtgccatccttggtgaacttccatagaattttatcaggattgtgtgagaggtaaatgggcatggaaaatttttttgcagcatcaataggggcaaatagattatgaataagagtctcattccatgtggccgatgtatggtgaataagggaatttactgttaaattcgagagtccatcaataggaggagaaacaatatatgaattttgtggatcatgaagccaaggattagtccaaatttttatcttgtgtccatctctcaatctccttctaatgtcatcttt

SEQ ID NO: 34000 - DNA, 321 bp, Glycine max
agctttggagcttccatgtgccaatttttcttcttctttagtccagtcttcttctggcttcaattcatcagtgggctctccttctgtgtgcagcatctagggatgttcccagcctttgatgacagctttccaggttctgctatccagtgatttgacgacagccaccatccttgctgtccagtatccatagttggttccatctacgattggtggtctgttgactgtgcctccttctatctccatgtgcatcagaatttatttccctatatctcactctgtgatctcgaatgttggctcttgatccaatcgagattctgatcc

SEQ ID NO: 34001 - DNA, 370 bp, Glycine max
taatgtaaccttttgtagctttgaaaactctacggctgagcctaggctttagagtttccttttgttaaggcattatgtcttttgttcttgaagttttaatataaagatctttcttcatctgttcctgcgcctctacccattctcattaatttgcatgtttatttctttacgcttaaaatgccagatccgacgatgagtccctcgaaggtactaatacccaggacttggccgtcaattttgagcaagaagcgggtcggatggagagtgaagaggacgacgatgtggggcttcatccacagctggagacgataatcgcttatgaggaccgagagatgacgcctcatcaagatgagacggagctcatatactt

SEQ ID NO: 34002 - DNA, 334 bp, Glycine max
tttttatgcaagcttttcagcacgcttccatcaagtgttaattaaagcacacggccttcaagtacgtgctccttaaacctccattaattttcagctttaccttctactccattgttgtttcttcatttttctccatgtatctccttacatttcttgtgctgaatttggttagcatgattttttagaatttcaaccgattaaacttgttatataagcaagatttgattttctatggttcaaattccttgttcttgttcttgaaccatgaattgtgttaagtttaagttcctttgagttttgcattgcaattcttttttttgagaccacaaccatt

SEQ ID NO: 34003 - DNA, 377 bp, Glycine max
  unsure at all n locations
ctattataatcatgcattcaatccacaattaccattttttaactatactaaaactgcattttcaaggagtcaagctaaactgttctatctgtatcacgactttcaaaatctttccaaaacaaaaagtatactgtaaaccatattaacataccacacaaccataatangtcatatgtactaaaaatcgtacaaccaatagaccacacaaacataataattaaaatgtactaagaacaagataattataataataataataataggaggacaggtaatcagatcttgtcattcatcccaatcttgctcctcattatccanatgtagcactggagtcctcgaacgagtagtaatctgtccctcctcctcatctgaaaaat

SEQ ID NO: 34004 - DNA, 394 bp, Glycine max
agcttgtcagggtgaggaggtgaatagcactaaggaaatgcatctattcatcaatgtaggtcattcaaatgaaaggtctgtgggtagaacggattgaggtcgaggctgctcccacgtatgatatctaaaatggactagcataacatattcctgtgtcagagctacttatgtaaaggattattttacaaaactcaaatggtaaaaacaacattcagggggcaaatagacaaagctgatacaactggtatccacaaatagaagaattcacacatcagtacacagagacgcatagagagaataacgaaccagctattatctattgattactgaaaatagtgtctcagcactctcctctactatgagttttccctcaaatacctctgcatatctactg

SEQ ID NO: 34005 - DNA, 411 bp, Glycine max
tgcccttctgatccgaagaggctgacccttgcggagtccgtcgagagcgaaattgacctcgtcaacgtgctccatcatctctccgaactcctgcgcctccatcagcgtcgacgtcgccggaatcccctccgccggcgcccgctatgccctcttcgactcccttgctccgcctgcgccggtgccgtttccgaagtcgccgatctccgaatcgaaaaaggaccaacgctgcgaggacgagtcctgtgaggagaacgcgaagccgcagagagggtcgtctatctcctgagataaggaatccctgaatggctccgcaacgtcgtcgtttagagaggacgagcccgaatacgttcccgaaagggtttctctgcggcggtcgcacgtgcggacgatcatcttatacggggatcggcg

SEQ ID NO: 34006 - DNA, 381 bp, Glycine max
tgtctgcaacctcataaaggtgcttggcgcattagctgagcctaaaaagcatcactagccattcatacaaatcaaacttagtcttgaaagcggttttccactcatcagcctttttcatcctgaattggtgatacccacttttaagatcaatttttgaaaagatattgtcaccatgcaactcatcaagcaaatcatcaagtataggaatggggtgcctatactctacagcgatgctgctgatggccctgcaatttgtacacattctccacgtaccatcctttttgggcaccaacaacactggcccaacacatgggcttatgctcttttgacccagcccttcttaacaatcttttacctgaaatctatctcctatctcctgag

SEQ ID NO: 34007 - DNA, 386 bp, Glycine max
cttaatggagaatgaagaagaagaacatttcaacgtgttgtggagagagagctgtctgaaaagtgtgggggctgagtgaagagagagaaaagctcttcggtttttaaattaaagggttttctctttttctattattttattcaagctctgccacatgtccctatttgagtggagcaaaagggcccactttccttttttactgtgacccacactcagccacaaaagtgagaaaaatctgacctttgaaatgctaaaatcctgcctcggttcgcgtgtcgattctctggttctagtttctcgcatttctctgcgtccgtcggggccggttctctaaagtaaccaatatatatatcataacgctcacaatagaaccacgagcgtggttc

SEQ ID NO: 34008 - DNA, 388 bp, Glycine max
  unsure at all n locations
agcttgaaggcatgtaacccaccatcttttgatagtacaacaccggtaatgtcgttgctatcattgttatcatttccctctccatcattgagggcactacttgagctaccagatccctatacctttgggcatattctttgaaagatctatgctcgtttttacacatgttttctagctgtattctatccggagccatattagaattgtactgatactgcctaatgaaggcaaccattangttcttccaagaatggactccggaaagtttcagattcgtatacctggtgacagctgccccaataagactttcctagaagagatgcattaatttatcattcttcaagtatgcgcccatttctctgctgtacatcttcacgtgaatcttggg

SEQ ID NO: 34009 - DNA, 239 bp, Glycine max
cggacctactgtgaatagcccaaaagcaccttctattttctgaagtggtgaacccgatgtttggatgctctcaatgacatctaactgtcgctaatgaacgactttgactaactatgcccaattatatatgagtaatacctataagctctatacatatgacatgcatatatatatatatatatacataacagaccctcaaaccacctataaatatatacattgatttactgacatggctc

SEQ ID NO: 34010 - DNA, 391 bp, Glycine max
agcttctgctccaaataatcataacccccacgagacaaaacgtgggggacagtattctgcttctggatggcctgtgccttcttgcgcacatcttgaaaaaattaaacaataatgtttgaaatgggtagaatgaagtataacaacatcatgtttaatatgaaaaacaacttaaatggcaaggaacatacctcctaagaagggtctctacgagtctggcaaaaatgggctcacttttccttgctgatgccgtatttctcatagacattgtcctcgacactgtcctgatcggctgcaagggcccatttcctcgtgaggtctgatttaaaccttcttcatctctcacccacgatctgcagaaacttcttttcatcctactatcaaaagcctctaa

SEQ ID NO: 34011 - DNA, 432 bp, Glycine max
  unsure at all n locations
ttggtcaatctaaggagtggtgtcttcatgctgcatattgatggtttctgagtggaaaattctaatttggttaagcatgaaattctgcagcatttgcaaagcagattcaaattaattgaagttatgtacgagcactgtagcttttacaaaaataagcactgcagcttatttaaggcacaaattctgcagcatctgcaatatgtgggtgtgtttcaatgtgtgtgtgtgtgtttctgtgtgcgtgtgtgtgtatgtgtgtgtatctctgtgtgcgtgcgcgtgcgtgtatgtgtgcgtgttccaatgcgcctgcgtgtgcgcgtctccgtgngtgtgtgggtgagaggctgcacaatgtgcgtgcgtgtcgcgctccgagagcatgtatgccagtctgtctaatcccacgtgcgcgctctgcgcgagcgcccg

SEQ ID NO: 34012 - DNA, 343 bp, Glycine max
tttatgcaagtttttactatgccttgatttacatcaagtgatttgatacgtatattagcatggctagacaatattgccactgaaattcataccttaaactatcgtaccatctatattaatgtgaatttgtaacttgtcagtccaataacatagaacatatatctacacttctaccatgctcagtggaacactacaatgttgacatgattataatattaataatgttaaatctctgcatagcgatggctgcttatggcggtaagccacaattctgtcatatccatcatggacatggagtggcagactatatatatatacacacacttctactgacaaattatta

SEQ ID NO: 34013 - DNA, 250 bp, Glycine max
ttaagggtttgctgcattctgagtgtgtctctaagttgactgaccacgcactgtctatttgctcagttgttgctcacttctctgcagcactcatggttatgcttaaacgctcttatctgaacagagatcctcacttcattctttgtacagtagattttccaatcacaaaatgccttattgccttttgctctacccctgtgtttatcattcttctctcacctgaactccctgcccatcaatatgctatact

SEQ ID NO: 34014 - DNA, 358 bp, Glycine max
  unsure at all n locations
taacctctgaatccaagaaagcactctgatttctgacgttcttggcgataaaaatggtcattgaccaatccctattctatgacttgacccaattatctactgaaggtgcaccatttgacggtgcactaaatgatgattggagattcgatctctctgcgcatgatgcccgccaattggttttgcaccaacctcacgaatatcaccggacggctgcttgtcggatcattggcttttgaaaaccgcatccttccctatcttattggctgtattctacttccaagatcttcacacctagcacaggtttntgaagaagatcttatagttatgtgggctttccataatggtcgacaaactgatt

SEQ ID NO: 34015 - DNA, 424 bp, Glycine max
  unsure at all n locations
tgtcaaagccttgtatggattgaaacaagctccaggttcttggtatgaaagactatgctcattcttagttcagaatggcttctccagaggaataatggacaccacattatttagaaaggctcagaaggaaaatctacttattgtacaaatctatgtagatgacataatctttggttcaaccttagaaaggacgtgcaagaagttttttgagctaacgaaaggtgaatttgaaatgagtatgatgggtgagctgaagttcttcctagggcttcaagttattcataaagatgatggaatattcatccatcaagagaaatacacaaaggatctacttanaggttcaagatggatgaaaccaaacctatggctgcccctatgcatccaactattgtcagtgacaaaggtgagaaacacaatgatactc

SEQ ID NO: 34016 - DNA, 412 bp, Glycine max
agcttgtaggattatggggtacccatcacatgtggtactaggtggcggtcgggcgatggtgcacaacaagttttccacatccacaacgcgcgcataaacccaccatcccctgttgcccacctccaactgagctcacgtactcccacgtagcccatatcctcgtttctctcaacaccgggtccccatcaatcctctcaagcttccccaacatccaagtacaacaacattcaaacagcacaaactatcacagccaagaaaagcagagcaaaggcagaaaactctgccaaaacaccaaccaaaatcacagcttttctcacttaaagaccccaataacaattccttcgatccaatttgttgaccgttggatcgactccaaaattttactggaagtctctagtacataagcctacat

SEQ ID NO: 34017 - DNA, 434 bp, Glycine max
  unsure at all n locations
ntaacctaatcgtctctcacagtctttagatttgggagccaatccagtccttgtgttcggactcttagccacttatgatagccgccgatgatcccattactgcttcccctaagctctctgttctttcttcacgccacatcccatgccttgcgaactccttggagtaccctcgcgttgtggtcactgaaacctcgtgcgatgaaaggcgtgatgctttcgtctgatggcactcctctcatgggacatccttcgcatgaagatagaatcctgattcttccttccttctagcgagggaaccatttaacagacgcccctccatgctagccaagagttggtgcacaacaaacaattcttgcgccgctcttttcacatccccggtcgaacgtgtcatacatggccaaaatggcgacgaccgggctttccttgccatgatg

SEQ ID NO: 34018 - DNA, 402 bp, Glycine max
  unsure at all n locations
agctttgaatgctctattcaatggagttgacaagaatatcttcagactgatcaacacatgcacagtggccaatgatgcatgggagatcctgaaaaccactcatgaaggaacctccaaagtgaagatgtccagattgcaactattggccacaaaattcgaaaatctgaagatgaacgacgaagaatgtattcatgacttccacatgaacattcttgaaattgccaatgcttgcactgccttgggagagaggatgacagatgaaaagctggtgagaaagatcctcagatccttgcctaagagatttgacatgaaagtcactgcaatagaggaggcncaagacatttgcaacttgagagtggatgaactcattggttcccttatacctttgactatgactctcgg

SEQ ID NO: 34019 - DNA, 432 bp, Glycine max
tggtgcttggtttgtgagaggtagatctctcttagactatttctcttggcttttctatctttactctttctttttcccttttaatattctcccttttttatatgtggtagagtttcttaagggttacaagtgggtggtccatttttccattttaagcatgtagaactgtggaaaaaaggtaaggggagtttttacaaatccttggggtctatgtgtgtttgcaatgcatagagctttaatttttatgttgtggaatgttgtgtatttttttcgtatttgccttcgccaatgcatctaggacttctttgtttgttattatctgtcttggatgccaaacttgggttccttgaacccaaaatcctaggaaagcatataaagtttggtgaatttgggtttgtgtagcaaaagttatgtaaaaatcaagttttgaac

SEQ ID NO: 34020 - DNA, 395 bp, Glycine max
agcttcaagaaaaagttggccttagcaaactgcttatttctagaagggaattctatcaatagacctccaatctttaatggagagggttaccattactggaaaacccgaatgcaaatttttattgaggcaatagacctaaatatttgggaagccatagaaataaggccttgtatacccaccacagcagaaagaattacaatagatggtagttcatcaagtgaaagtataactatagataaacctatagatagatggtctgatgaggatagaaaatgagtacaatacaatttaaaagccaaaaacataataacatctgccctgtgaatggatgaatatctcaaggcttcaaattgaagactgctaacgaaatgtgggacacttcttgattaacacat

SEQ ID NO: 34021 - DNA, 452 bp, Glycine max
tactcaagcttatactacattgtaagagaatgacgagtagaagagatacttaacagattgtaaaagcagaaattaaatgcacaacggatagtaaaagagtagggaagaaggaaacaagcacacaagagtttttatactggttcggcaacaacccgtgcctacatccagtccccaagcgacctgcggtccttgagatttctttcaaccttgtaaaaatccttttaaaagcaaagatccacaagggatgtaccctcccttgttctctttgaacctagtgaatgtaccctccactagaactgatccacaagagatgtactctctcttgttctcagtcaaacccaagtagatgtaccctccaatgtgtcaagacaaagatctcatgcggttaaaccttccatactctgtgaatggcgatataaaagaactctcacgcggttagtcctttgaacact

SEQ ID NO: 34022 - DNA, 400 bp, Glycine max
agcttcttcctctggtgacgaaacacgtggcggtgccagtggttttgccggaggtgtttcacattgaccacccacactaccgccaccgccacggccactgaaacatggtcccctacggcagcgtcatctggcacagcggtgctgctaacgcgttcggcccctgcgccactactagatattcacttgcctctctcccacgaccactgtatacgccgtcgtcacccccaccacctgcgaaaccacctcccccaccaggagcacggtcggcgcgggtttgcaccttgtggacagtgatgttcggccgccaaggtcttggttgtgcaaatcgcttttcacaactatcactccctcttgaagcatcagttagagctgctggtgtttccatgagccacaaccaagc

SEQ ID NO: 34023 - DNA, 309 bp, Glycine max
  unsure at all n locations
cgttcctgaaaatgctattacgctgagcctgttttcattctctttatctatggaggccaagagatggttgcattcattcaagggcaacagtctacagacctgggatgaggttgctgagaagtttctaaaaaattatttcccagagcctaaaattacaatgggaaaagttgtaattccttcgttccatcagtttcccaatgaatctttgagtggggcattagaaacatttcntaacttgttgaggaaaacttccactcatggttttatacagcctatacacccgaacatnttcactgatgggttacagcc

SEQ ID NO: 34024 - DNA, 186 bp, Glycine max
agtctcgttcatcattttcgtacatgtgtatgaatgctcgttgatcgaggccgtacccgaatcaaataaacatgaaaatgcagtaactaggaagtgatcctaggtcgtttcccaacgagcagtgacaaaccaaatggtcataatatacttgcagtaacagtaacgattggggggggggcttcgtat

SEQ ID NO: 34025 - DNA, 324 bp, Glycine max
ctaagcttcatataagctgaaccattttatcattaaacacccgttcgagttttattcagaacatttgagttgatctctttcatcttagtgagagtgattctcctacgttcttgagtgattcaagaacaccctggctatattagacgactttcacaacctttgtgtgttgccttcgccggaaagattgattatttccttcttttgatctctaaccttgttctttcaaaccataattcctgacaattcacttctgcccacaatcatctcatggccatcactctcgttttacacgcctcaattaagtgatttttgagcctaaattga

SEQ ID NO: 34026 - DNA, 321 bp, Glycine max
agcttattcagaatgataacacggtaaatttaaagaacaataagtagcaattacttacaatttatgcactatgtcacaaccaattttgcttcatgcagacgatcttcagttatcacattactcctgttgtcgtcattcttctctttgtcaaatgcatactccagttgtctctccactgacttgacaattgctgttcgcttggatcttaacctgtatgggggagatgcattgaatgccttattgttgggaatgtcaatcccattgccatggcttgctggactcctggagaaatgcccagaaccagaatcatcatcggttctc

SEQ ID NO: 34027 - DNA, 434 bp, Glycine max
  unsure at all n locations
acagcttggctgttcggaatactaatgtcatatatgctagggttattgatagtacgtacgcatagccacccacgttggggaatttatgcagattatgtgctggttcatttgaatatcgagataatactggataaatctgaaatcgtgtataacactctcagattgaatcaaatttcggggttcaaccaaaattgctcaatcgaataaaatcagaagattataattcaagagttttgtttcggtcttgtatgttttgtcacccataatgctttctgaaccaaaatgattattcatgatcaaagaacaggcggctnttggcggctgatgaacacgtgcgttttggcggctgatggaagttctatctttcttaaaacctgcctctttctgaaagtcacttcnatgtaatttccagaatttgcctacaccgaacatct

SEQ ID NO: 34028 - DNA, 348 bp, Glycine max
agcttcttggaggtttgatggatcctcctctaatgtataagccatataatcggacccataatctttagcaattcttgctctcttacctcttcgaggctctatatctggttctggttgtgcaagattttctactaatagtaggaagataattggatgaagtacccccactattccttaatttaaaaggaaatctattttcataaaaatcagcatcatttgactctatgatcacttttgcgtttacgtcataaaacctatacgctttgctattaatagcataaccaatgaacacacattcataggctctacttgcaagtttaaccctcttatgatctgcgatccttacat

SEQ ID NO: 34029 - DNA, 428 bp, Glycine max
  unsure at all n locations
tgaaggtgtgtagcccatcatcttttcatagtagaattctggtaatgtgtctactatcattatcatcatttttttctccgtcattgaggtgccacttgagctgccaggtctctccacctttaggcgtattcttttgaaagattcgtgccccctttttgcacatgttctgtagttgcatcctatccgaagacattatactgacactgcctaacgaaggcaaccattangtcctcccangaatggactcgggaaggttccaagttagtgtaccaggtaacaactaccccagtaagactttcttggaaggaatgtactaacaattcctcatcttttgcgtatgcccncatcttccgacaatacgtctttagatggttcttggggcaagtaatccccttgtacttgtcaaagtccagtaccttgaacttgag

SEQ ID NO: 34030 - DNA, 329 bp, Glycine max
agcttgtatgattatggggtacccatcacatgtggtactaggtggcggtcgggcgatggtgcacaacaagttttccacatccacaatgcgcgcataaacccaccataccctgttgcccacctacaactgagctcacgtactcccacgtagcccatatcctcgtttctctcaacaccgggtccccatcaatactgtcaagcttccacaacatccaagcaaaacaacattcaaacagcataagctatcacagccaaacaaaagcagagcataggcagaaaactctgctcaaacaccaaccaaaatcacagcttttctcacttatagaccac

SEQ ID NO: 34031 - DNA, 431 bp, Glycine max
ccgcttgtatagttccccaatttgtagtcattttggagtaaattttgtaaataaatcttgtttatggctaacactgtctctagaacaattgcatcggacttaatgatgaaatctgtgcattttcaggtgaaaaagacgctaagttttgaattgcaaaaagcagcagttgggctaagcgcatatccatcgctaagtgcagcttcagcacacttagcgcaaaggagaatctggcagagcatcaacatcaaatttgtgcgctaagcacaacaagtgccttcagccacgctaagcaccagactggcgctaagcccaatttcacttatctgtgctaagcgcacaggcggcgctaatcacatcatcgcgatttcgggcctattaaagcttgtcttggcataatacggtacactttacaacactctaggacttgaaga

SEQ ID NO: 34032 - DNA, 317 bp, Glycine max
  unsure at all n locations
ttgctgcaagcttgtgntttggctaagaaagactctaagatttgggatatcttcttgaatagttcgactattctgaacttatcctcacttttttgctctttttctttgtagtggactccttcaaatgaaggtccttatatggaccttggagctagccatttaccactgttgcaggcattttaaaacacatttaaaactgcatgagttgcctcattcatacaacaaatgaatgatagtgtaataatagctgacattcttatttaccacataatcgacgcccattgactgattatgactcacatcttaatattattata

SEQ ID NO: 34033 - DNA, 377 bp, Glycine max
tgggttaagttgagttggttcatcatattgagaccattatgttcattaatatcattaatttgtataaatgttgttacaatctacatgtgtatatcatgctgcttatgaaatttagtttattacaaaaacttcttgctcttaattttgatatgtatggcgtgacaccctttaccccgacatatacataaataaataaaatatgtaaatatattggtaaacaaatccacgtgggtaaaagattcacattcacttcactattatcaaatataatttgtataaatgttgtttcaatctacatgtgtatatcatgttgcttatgcaatttactttattacaaaaatttcttgcttttaattttgataatggatggtatacat

SEQ ID NO: 34034 - DNA, 386 bp, Glycine max
  unsure at all n locations
agcttctaatgatatgcacggcttatactttaatgatttggaacgatgcattagcgttaattaaatatagtcaacaacaatagtttcaaccgcagatacgtattcaacaattgaggtcaccctaaaaatgatatacaataatcattaatctcctggcctcttcatatccttcccgtttatgtggacttcttatttactaagtggttatttcttaaaagtatttatcaaagcggtagagttttaaaattatttatctactagaggtaatttttgtcatataaaatgtagaaggcatgatcgtgagtgacgtcttgtgtttttcgtttgtccactaataggatgcaccattntatttgacttcttcttttcacgtattcagtcagtat

SEQ ID NO: 34035 - DNA, 413 bp, Glycine max
  unsure at all n locations
tnttgggcgcgcatgcgttttagtagctaggttttgtattttattcaatgaaccaagatggtcatcgatgagaccatcgttgtcgtcattccatgttattacaaaattgccactaggtggcattctaagacggtcataaggaatcgccttagattctgtgacgtaaaaaaaattctgttaattacaaaaatgccatcgtgtggcattctaaggcggttctacagaaccgtcttaaattcactgtcgtaaaaaattaattttctagtagtggtaattgcatctttcgttaaagatcacaaacaagcaaccagaattatattaaaaccaacatactgataaagtggcattgcacganacactaatacttcattgtgaaataaaaataagaacatanaatgcgtggaatataataa

SEQ ID NO: 34036 - DNA, 375 bp, Glycine max
  unsure at all n locations
agctttgtcaaagttagcatggatggagcaccttacctccgcaaagttgacttgaagatgtacaagagttaccctgagctctctgatgccttgggcaaaatgtttagctccttcaccattggtaactataattaatccataatttaccatacattaacttttttttatatagaatttaatgactgatcataacttttacgtatcagtatctagtttgttttctctttaatataactaccaaaagatatggatcttanatttgattctgtagaaagttaactaatggtgtatgtgaatataaaattgaatcgtgcagctgattcgatggtattaattattggtgtgttcttgatatatttaaggaaattgtgaatc

SEQ ID NO: 34037 - DNA, 425 bp, Glycine max
tacatatactgacactacaatggaaataatatgcacttcctaacaactatacataacattttgttcatgtattaatgagacaaccaccaggacattgcttgctcatataatgaggccgacaagacaaatatggatgcataattgctacatttcaagctttttgagttgtaaactgattcactttggccttgggatttggggaataatatcagaatgacttgttggaatttcgatactagatatatcatatcattgctcagaaattaatatatgatgtttattctgatgatgatgtttatcaagcctaattagtttctgatgtggttcacaattaactaagaagtagcatgtagattaaaacaaaaacgaaaacacatacagattcctgttataaagcaattcagtgatacaaaacacataattaa

SEQ ID NO: 34038 - DNA, 390 bp, Glycine max
agcttatcacccttaccggctattaaaaaatcttttaagggaagttaagagcatgatagtgtgctgataccattaactagtcaacaggttcttgagcgggttgagggcatcaatactatatttggaaagacccaaaagaagaaaaaaaaaagtaaaacttccatatggaagatgaggctgatattgtttgatcttccatactggttcgatctagatgtcatacattgtattgatgttatgcatgttgagaaaagtgtgtgtgatagtgtcatcgacaatcttcttaacattcaaggcaagacaaaggatggtttgaatacttgccaagatctagttgagatgggtatacgagaccagttacatccaaggtttgatggtaagaaaatatac

SEQ ID NO: 34039 - DNA, 440 bp, Glycine max
  unsure at all n locations
ntgagaattgcccaaactccctctccctttctaatttcaagcttaaataggtgaccttgttggtgcttgcacgcttagcgcaactccgactcacttagcgtgcataagtgaatttcggcttggcgctcgtcttctcgcttagcggatccatacaagtggtgtgcttagcgagatgagcccttgcttagcatgtgtgtctagctcatcctcattccagattcttcctcgcgctcagccgcaagagtggtgcgctcagcggatggctcgctagcgagaagttgaaaataaacacttcataaacttgcctaattaacctgaaattgaaaggaaatgattattaaatacataaaaatggagtactaagtacttattacctatatttaacananagtaattacaacactacaaaataaccataaatgggaggagttagatacaat

SEQ ID NO: 34040 - DNA, 401 bp, Glycine max
  unsure at all n locations
agctttataagcacatgtctgggagacaaagatcaagtggtcacgatatacgaagatgatgttccgagtacattggatttggtacgaccatgccctcctgatttccagctgggaaattggcgagtggaggaacgccccggcatttacgcaacgagcataatgtaaacatttacggttntaaaagctctatagttgggcctatgctttagagtttttcttttgttgaggctttgtgtcttttgtttttgaatttataatacaaggatctttcttcatctgttcctacgtctctacccattctcatccatttgcatgtttacttanttatttctgaaacggcagatccgatgacgagtcccccgaaggtactaatacctgtgacccgtctatcaacttcgagc

SEQ ID NO: 34041 - DNA, 394 bp, Glycine max
tccatcacattctaaatgtagtttggagaatgaacgatctgctttcttgtaacataaacgtttaggtcacatttctagagaaatgatggaaagattaataaagaatgaaattcttcctgatctacattttacggatctaactatttgtatggattgtattaagggaacacaaacaaaacatacaaagaaaggagctaccagaaacactcggcttcttgaaattgcgcatactgatatttgtgaatcatttgatgttaattccttcatacaagaaaaatactttatcacctttattgatcactattcacgtcacggttatgcctacttactgcatgagaactctcaagcagcggatgccttataaatttacttgaatgaagtacaaagacaatta

SEQ ID NO: 34042 - DNA, 321 bp, Glycine max
agctatttctagactcatcttctctttgaagtgacatctcctctctcccttccttctccattccgctgccactcatcttccaagaagtaaaggaattcattgatgaagaaaatcctagacctacaagctccaatggagcctacatcaccatggtacgagaagaaactctacttctttttcttttgggtctatgttcttctactgcggagattgattgacgaaatgggtcgcgtagaaattatgaatgacgatgggaaatcatggctattctcgcttgtatctcaaagatgagaggatgcaatcactaaacaacaaatgatg

SEQ ID NO: 34043 - DNA, 411 bp, Glycine max
tactcaagctggtgcttctgctacgaagtggagctggaggaggaatatattttagattttcttccttagctcatgattgcctgcggttcttgtgccatggtcctaggtaacgaaccttcctttgttgctattattattagggaccactttagatttaaactctgttgttcggtctgatttcatttgacattctgtttcccccgatctttattctgttatcacttaattctgagcacttttctaatttataactaaatttaacaatcgacaaatgagtggcacgcgatataaaactccctttctcctatctttttttctcaaaataaataaatcctcgattaccgcattctattcataagatactttcagttaaatttggatcaaagcaccctcgtatatgattagaatatg

SEQ ID NO: 34044 - DNA, 385 bp, Glycine max
  unsure at all n locations
agcttggagctggttcacgctggcgtcgtacaactggtcaggaaatttattctccattcttagtggctttcacacatgaggtatgacttaatttgtttcacgtacttaattatggattaataatcatcaccatattatactcatgattttttttattgatcagaactcggaaaactggaagtcctctcatttgacaaaaggaactatcatggatccaaattacagcttgcctcccaatattgctctgataactcttgaggtagagcaacttttccaaggatatatatctatagtctataacactcttgactctntttgtctcanactaaaatgttctgcatgagttggatggtggaattgtgctctttccgttggcacatctata

SEQ ID NO: 34045 - DNA, 415 bp, Glycine max
  unsure at all n locations
tgccttgaatttctactttntcaggtattgtttgtttgagttatattagtttgttaaatctcatttattttaaatttattcctcttaaactatagggtgacaaaataaggagaagaaatgattggaggagatggatcatgcctggtggtcaggttcctaatgttagaggttctcaaaccgttggacagctggctgaacgagttcaaaacattactctggagagaactaacaataacgatgctggagtattagatgtttcacagaatagaccttttggggatttgaatagtcaatatctccattccactagcgagggtactgctcaagtcggtattcaagtttcagatcattctatttctgcaagaaattagagctgcagatgttctttacaaacattttttgaagaatattcttc

SEQ ID NO: 34046 - DNA, 383 bp, Glycine max
  unsure at all n locations
agcttatcaaacaaaggtgctgctttgtcttggggaagacccttctccagatatcccaacttgctgtcagtagattctagattagtttgcactaggatagaagtggagaagtctaaaatggtagtagggtttggtagcagtacatactagttatatgcatattgaaacaatgtactttgcagtgctcccccagatgaaattttgctactgataccttcaggcacaaagtatatagtcaatgcttattggacaatatagttagtacttacaagagtacatgtagcttaaattcaatacttagagcactatagcacataccaagataagagcgctagtacaagaagcattctagccttaccagcatanacacgatcatanactct

SEQ ID NO: 34047 - DNA, 247 bp, Glycine max
cgtgggtgcctcggcatggatacctgcaaatcggttctcccgcctggtggggtctcgtatggcggcgtggacacgctcatatgtgtctgggacttgaagactgatgagagagtgcagactgctcacggccatgctcgtgcagtgactcgcattgcctttgacgatggcgatgttgtctccttttctgttgactcgtagggcattgcaatgttataatagctttaaccattccatttgtttattatta

SEQ ID NO: 34048 - DNA, 396 bp, Glycine max
agcttatcttggatatttttcatctacagaacagaatatccagtatttagcaaatattttcaaactttgtaaatgcagataccaacaaatcaaaccttgacatatgacagacctaaacttctataatctcataaattgctttttccacatctaactcttacttctcaagctgtatgtttgcatgcaatcgagatccttgaaatgaatctgaagtattaccatcgttagacgtgataccaacatctgcataaaacataaagccacaattctactaaggaaattgagttcaacaattaatttctacactctaaactccgggaatcatagagaacatatattaattacatatcaaaaaagatggaaataagagaagacactaacagctacaattttcta

SEQ ID NO: 34049 - DNA, 424 bp, Glycine max
gcttgccacaaacatcaagttctttgaatcttttggatattgtttctatttctgccttgatgctcacttagggctcagataacccttggtcacaaaaacttagtctccaacaaaacatatggattgaatccaatgggatgcaaccaccaacatatttggatagctcacaagcacaaggaagaccacgcgtggttctcaccacacaaccacaacttgaaggattcttgccagcatagtcaacacgctctatttcaacaacaatcttatttaaagcataccttgaaaccattccaagaagcctcttgtataacgtttttttgaagacatgtccaacgacatgtgtacttgtttcaaatgatgctttaatctccgtgtgctgcaacgtaatcatgttgttcatggcattctacacactgcataagtc

SEQ ID NO: 34050 - DNA, 374 bp, Glycine max
agcttattcacaggagcagcaaacctcaactcaacagggcaaagatcatcatatatctcttgtccaacagactcagtcttctcattggacttcttctctggaacatgagaaatgaatgtatcataaattgtattgctataaacagacttttcccgtacaaggtctgtggcagatgagttgaatgcaattggatggtataacaaaaaagattttggttttgaagaaccaacccaggtttcctctccatcttcagcaagggagactgcatgatcatcaaggtgtgcagggccataagctgaaacagcgatctcaccagccacctgcataacttctttgtatttgaggccaagctctgcttctactgaaaatgcgtc

SEQ ID NO: 34051 - DNA, 377 bp, Glycine max
  unsure at all n locations
tgttctatattaatctagtcganaactaattcttcgattcctcttatgtgcttacatctcatagagagaaaatcagagaagagtgttcacatctccagagagaaaactcgagaagaatgatcaggtattaatctaactaatgatttcgcctaatagaaaaaatagatatatcaataaagcacttgtcatttatgactgcctaaattcatcatactaattaatccgctgactaattcctacaacatgaatttggttcaaaatgataaccacaattgtactactatgttaacaaccaccaccataaaagttgttatttcgacccacctaacgccacatatagtgctttctcactgacgtagcattcgtagtgatgatga

SEQ ID NO: 34052 - DNA, 393 bp, Glycine max
agcttcaacatcagaccacttccagggtgctggaactacttcacatggatttgatggggcctatgcaagttgaaagccttggaggaaagaggtatgcctatgttgttgtggatgattcctccagatttacctgagtaaactctatcagagagaaatcagaaacctttgaagtattcaaagagttgagtctaggacttcaaagagagaaagactgtgtcatccagagaatcatgagtgaccatggcatagaatttgaaaacagcacgttcactgaattctgctcatctgaaggcatcactcatgagttctctgccgccattacaccacaacagaatgtgatagttgagatgaaaaacaggaccttgcaagatgctgctcgggtcatgcttcatg

SEQ ID NO: 34053 - DNA, 404 bp, Glycine max
  unsure at all n locations
taaacattcaatttcgaggctctcgattattacgggtatttaatcaagcatccaagaaaaaatttattgtcgtttgaatttgctcagagattcaacattcaatttcgagcgtctcgatatattacgggactcaatcagacatccgagtaaaaagttattgccgtttgaattggctccgagcttcaacattcaatttcgagcgtctcgatatgttacgagactcaatcacacatccgantaaaaacctattgtcgtttgaatttgctcagagattcaacattgaatttcgagggtctcgatatcttacgggactcaatcagacatccgagtgaatagctattgtcgtttgaattggctcagagcttcaacattcaatttcgagcggctcgatatattacggtact

SEQ ID NO: 34054 - DNA, 184 bp, Glycine max
tttgcccttaaaaatcggctctttggttcactcctgatcactttgattttctctctcgcacagtccaagctttcttccaagtcctaaatgacatttcaagctagtattaactcactttaacctcccttactacagaatcagacttaccttccactcttaagactcactcttttccactcataac

SEQ ID NO: 34055 - DNA, 385 bp, Glycine max
  unsure at all n locations
ttaattntattcgttcttatgcatgttttcttcttatctaatagttattttttcttactgatctttctagtttgttttttattttcccgcttaccaagctatcgacgaagaagcatccagcaggcaagatcttttccctttggctgctatgtatgtttttttcattactatttgtctctatttgcaaggttttaattttgtttgttcttatgaatgttttttatgagaatcctgaaactgaccaaatacaggctaaaggcctaagtggagaatgacaaagcccccaagtggagaacgatgaaggcccaagtggaaaaggatgaacgcccagaggcagagacactaccaagactattaattgttgctgaaggcccagattaaattg

SEQ ID NO: 34056 - DNA, 302 bp, Glycine max
  unsure at all n locations
agcttagtttaagttattctaaacctaggagggatttctaaatttaacctagtccaactagagggatctgaggatgaagcttggattgattcagtctaaatttaggctttagatcattacaaaatatgcttagctgagcaacatcttcaaaattgtgattaggacatttcctcagcaatgatttgaattactcctatacttcacaaaagggttcttttgatcctttcctgaatgtagaaatatctgactntacattgatatacctagatggagggaaaaatctatcaagaactttctttcac

SEQ ID NO: 34057 - DNA, 440 bp, Glycine max
aaactaagcttacaaaagtttgtatggcttgaaacaagcaccgaggtagtggtacaagaagtttaatgagtttatgagcaactcaggattcaaaagatgtgacatggaccattgctgctatgttaaaaaatatactaatagttatgttatccttgttgtgtatgttgatgacatgttgattgcaggatctagtatggcagaaattaacaggttgaagcagcagttggcagaaaactttgaaatgaaggatcttggtccagctaaacaaatccttggtatgagaattcttagaaacagatcagaaggaattttgaagctgtctcaggagaaatatatacacaagttgcttgacaggttttaccttggagattctaagaccaggaatacccctctgggatctcatttgaagttttcaaagaagcaatctttgcagacaaatg

SEQ ID NO: 34058 - DNA, 386 bp, Glycine max
agcttatcaaaattgaaaatgatggttcctaatctcaagaatcttagagtcttagattgtgagtcttgccaactaggaaaacatgttaggtcatcatttcctcaaactgtacaaagatgtaactctgctttctctaccattcactctgatatttggggaccaagtagggttacatcttttgattttcggtattttgtaaccttcattgatgaatttttcagatgtacttgggtttatttaatgaaagacagatctgaacttttgcctatattcatgttgttctttaatgagattgagaatcaatttggcaaatcaattaagattttcaaaagtgataatgctaaagagtatttctctcatgatctctcttcctttttatcttcaaa

SEQ ID NO: 34059 - DNA, 411 bp, Glycine max
tggagtaagttcctgagaccgaggactgcttatgaggtcgtagcttgaccatgacccaatcaccttccttaaaggtgacgtccctacattttttatctgccatttgtttcatgaggtcctgagctttcaacagcttcttgcggattaccacgaaggcctcatctctgattttcaaaacctcatctactatgcccaatgtcaaggtgactgtaatgtattgtggtatggtgaggggtttcttgctgaaagtcatctcgtatggggacaaactagagccggagtggaccgaggtgttatagaaccactccacccaatttaaaaacttcccccatgaagacggcttcttatgaacaaaggctcgaagacattgttctatgacacggttcagcacctttgtctaaccatcgatct

SEQ ID NO: 34060 - DNA, 510 bp, Glycine max
  unsure at all n locations
cgcgcggttgcgacgtttgaggccncctgaatccctcggaattccgtganactatagaatactcacgccttcggataaagatacctgcattcttccacttctcagtactttttataaactctacagggatgcacataccactgtgccatacatattccgccactgcctgatgtaaagttactcacatctaccttatcgcctgattacatctggcatcaactctacaaaacatggcttatttgcttattgtgcttattgtgcgcagagtgcggtatctttggagggcaaagaataccccaagtatgaaatctataatgcccatgttgtacattccatccagaaatggtaacttgccggctaactgccgtttctatctaaccattcaatctctgactagtactttctcgcacgacgtgtccctacgaacatatctttggatggttgaatcatacttgcgcttgtgcgttgcgtcgctacctagccacacttggaattttctctcacaccccg

SEQ ID NO: 34061 - DNA, 494 bp, Glycine max
  unsure at all n locations
ggctgcanctgatncntntgaatncncctggatnccttcgnanatncccgcganantatanaatancacagcttganttatgaacacgcttatgacaagattctacgctactgnttggagcttaaaccaattagttaagagcccctcattggtcttagattgcttatcccttgacgtcctcactgtcnaacttccatctctgccttgtgtagcagaaaatcaagaagacctctacccttcctggttttgatgatgaatgtccacatgcacctgattaggcaactgactcaacacacctccatctagaacatgacttaatctcatcacctctcgcacggcatcttctttttgcaccaccactggacatccaaattgacatcctatgaacctatcgtgctgggtggtgttcggactctactagtggctaccacgcggtactacccactgcaaatgcgtggtgagacttcactgggatctaaactacgcatctcggg

SEQ ID NO: 34062 - DNA, 403 bp, Glycine max
agctttgcctccactttcatattcatacgttatttggttcaacattaaattgaaccgacgcacatttttcatgtacgtttttgtgagaaatgaaaattcataacttttaatttaactgtcatttgaggaattccaaatggtaaaccaaacacgctatcttgaaaagttcctgtagttacagataacccagtaactgaataatcaagtttgaaaaattcatgtagttacagataacccagctactcaataatcaagtttgagtcaataatcagtccaattctaataaatccttaatccagatagtcacgttgaacagaaaaacataaatttttatgccaaaaaacaaggtataaatgcaccagacacaaatgagtaaaatataatttacgtttaacacaatact

SEQ ID NO: 34063 - DNA, 441 bp, Glycine max
ggaaggatgcttcaacggaggaaaagaaagagggagcgaaagagagaggggggagtacgaaattgaaggaaaaaaagggagagaagttgaactttgagttgtgtctcacaagactctcattcatcaaagctacaactagtgttacgcatgattctatctatagactaggtagcttccttgagaagcttccttgagaaaacttccttgagaagcttctttgagaaaaattccttgagaagctagagcttagctacacacacccctctcataactaagctcacctccttgagaagcttccttaagaagattcctaaagaagctagagattagctacacatacctctctaatagctaagctcacctccttgagactaaaagctagagcttagctacacaccccctataatagctaagctcacccccatgacacaaaaacatgaa

SEQ ID NO: 34064 - DNA, 403 bp, Glycine max
  unsure at all n locations
agcttagacatatgttttcaatagaaagcaaagatagtcatctcaataaacatacaacacaaaaatgaaatcggtacatttggtatttggttttggtaatattatgtgacgaattcaatccaaaaatcaacaaatgaatgtagacctcataaaagtgtgaatgacaaccttttttttttgtttttccaaaagtataaaacaaataatgaattatgcatagataaattttataaaaaaaaaataggattgtccaagtttgaatttcaatataaaaatacaactcatagtttttgctctgtaaatattgttgaaattgaatcgaaaactgaactatctacttttaanacttaatcggttaaattatgtgaaagtcttacggtattgaatggcatcacaacacaca

SEQ ID NO: 34065 - DNA, 430 bp, Glycine max
tatggattaattcaagttgtttgaatttaattaataatctgggattgttgttattgcgagtatttagatgcgttaaataactaaaagaaagtttttacagtccatgtgatcctatttgcctcgaaacaaagtaatggggagcttggcgtggaagcagcttcttctcaacgctctggaatccaacgctcacctcaagcactcttctttcatgcagctcgtatgtcaatcaaccaatcttttttttttttcttttttttataatttatgcatttttatccttttatttgtgtttcggacaggcaaccctaggaaccaacggaacaccttccaaccgcactgtcgtcttccgaggattccaagacaacactgataacatccaaattaacacccatgcccgcactcccaaggttcttcttattctcgatcagct

SEQ ID NO: 34066 - DNA, 329 bp, Glycine max
agcttggagtgacctttgtgttgacccgagaccgaaatttgtctgtgtgggcgaagtttgaccaaaaccatatcaccaacttggtattcagcttcacggcgctttttatctgctaaatactccatgcgattttgagctttctccaattttttcttgatttctgcgaaaatagcctcgcgatcagtgagcatgacattaacaacatcaatgttagaattctctgcccaatattgagaacagttgaaaggcttcttcgcacatgtgatctcgtacggggaaagacctgagcttgagttccaagaggtgatgtaagaccactccacccaacc

SEQ ID NO: 34067 - DNA, 411 bp, Glycine max
  unsure at all n locations
tgctttgaagtctagaaactactctgcaagtcgttaaacttgctctgcaactctcataggcctctataaaaactacagtgtaactgaaactctttcggaatgaaattaaatgtcatagttccacaaatttttatgcatttctctctctttctcttactctctatttctctctccttctattttgtagtttcaattcatttctagtagatgtcatccctctctttttgtgtactcaaagtcagaatatgtgtatggccaatttgagtaattaaaaaaagttatttgggtttacggcatgactaagacaaaatgtgttagggtgtgtgtgtgtatcaatgcctattctgtttgagtagtacagcttcaaccttggacctgaaccttatcccatntacccctctgtgagaataa

SEQ ID NO: 34068 - DNA, 182 bp, Glycine max
cgggaactcagagacactgcagcatcacgcttgcagcaacttcgcaccaaaaccaaaacccccgaaaaacaacgggatccaaacacaaagtcggacgcaacggacataagaaccaccacataagacgcgccgaacattcgcatacagcggacatgcaaaaaagcgaccatactgcagcaaaa

SEQ ID NO: 34069 - DNA, 539 bp, Glycine max
  unsure at all n locations
actagccaccacacgcctaatgccaaaatatatatacaataaaananannanaagacgcagtgagactcctganccntncgaaaacanaanacnnaagannnaacacannaactgggcgaaccaacgaacgagcgcctactaccacctggcacccataacaagaggancaatccgacaagcgcgacccagaaacgaaagcacacctgaccagcaaccccatactggaaaagcaaacccgaaacaccgacctacacaccgaaaaacgcacagcgcgcacgacacaaacgaaaacgagccaagccgacgcaaacccgagagaactccacaaactatacctcatntctaacaactcaacagagaacaaaacagacacacacgaacacatgtgctacaacacaccgaatgacccagacactcacacaatacccacccctctccatcggcaacaacaaacgaaccaccaatcgctcactgacatctctaaacataacctccaacacacaacacgagcgaacccgacaacccccgagcgcccaac

SEQ ID NO: 34070 - DNA, 373 bp, Glycine max
  unsure at all n locations
tttcatgcaagctttaagaattatggcctcatcgaactacttgtttctcgagggaaattctataaatagacctcccatctttaatggagtgggttaccactattggaaaacccgcatgcaaatctatatagaggcaatagatttaaatatttgggaagccatagaacaaggaccttatgttccctctatagtggccggaagtgcaacaatagaaaaacctagagcatattggactgaggaagaaagaagattantacaatataatttaaaggccaaaaatattattacatctgctctatgaatagatgaatactttacggtctcaaattgtaacagtgctaacgatatgtgggataccctacaagtaacacat

SEQ ID NO: 34071 - DNA, 403 bp, Glycine max
  unsure at all n locations
ttcatctagccaagattataccaaggtgttacaagatatcctaacggtttctaattatatgggccatcaaatttatcatgtgttgaccgtaattgattagcccatcaatctnctcgggggctgtacacacttcggccatggctttcgctttggctaatagttgtgggaggtcttgacttccattcaaggtcaaggtgaacctatccatacacatagtcgcttcttgatgcaatgcatcaatcaccctccctcttgcttctttctcggcgtacacttgtgcaaaatcctccactagctattgttcatgggtcacagactggttcaactcttccttcgactgccctatgatagctagcatgctttgctccgtggcttccaagtgttgagccacactcctcttgga

SEQ ID NO: 34072 - DNA, 392 bp, Glycine max
agctttgaacactctgatatctttgctccatatacctaggaaaaattgttacaagtctgacacactgtcttattatcacagaatccatattgcgaaaggaatgaagaccattatggggctgccaagtgatatgtagtttctgcatgaacaccatctccattatcttcaacttaagataaacatcaatatactgctgcagcaaactgccgatgttaggcgatcaactaaaagacctcatcatcttatacattataagacctatgatggtaagaacaaatgtccattaaatgaatccacacacccttgcatcttctggaagaaatatctcctccatcattttacgtgaacttacaatatagcttcggagattcaccacacttctagccatggag

SEQ ID NO: 34073 - DNA, 433 bp, Glycine max
tgctgattcttaaaaaactgaagtatgaattcagaatatgtaaaaatactaactacaaaattagaaaacaagctaagagtaatgagaccactaatatgaaaactaaacatcaaagcatggcagggatatatgcttaattttgaaaagagataaagtacttttttctaaaaaagataatcatggagtgaaaaatgtgaacctcacgtagtagccaaaaagatgatgcttggtttatgtcttgtgcaagaacaccatcagatatcatttcattctccatagagccaagtagaaatgcttcaggcttttgcctggaggtatcaaaacaaaatgtgacatcatatgtgaagggacttaattacatgctcagaagtgataactaacaaaaaggaaaataatctctatggactatcacatgactgaggcacaatgataa

SEQ ID NO: 34074 - DNA, 389 bp, Glycine max
  unsure at all n locations
agctttcatacatcagaccacgttccacgggtgttggaacttacttcatcatgtgacttgatgagggccctatgcacagttgcaaagcacttggatggaaaagaggtactgccctatcgttgtttgtggattgactttctccagaatttacgctgggtcaatctttatccagagaggaaatcagacacctcttgaagtattcaaagagttgagtctaagacttcaaagagaaaaagactgtgtcatcaagagaattatgagtgaccatggcagagagtttgaaaacagcaagtttactgaattctgcacatctgaaggcatcactcatgagttctctgcagccatcacaccacancataatggcatagttgaaggaacaacatgacttt

SEQ ID NO: 34075 - DNA, 428 bp, Glycine max
tcttgcgccttcttcgctcttgctcttttcatgggttctcatatgccttgtattggatcttgggcttccatctggtcatgagtttgggtctggcggttgtcatgggcttgggctttgatgtccacatcataaaatcttatagttcgatttctatgctatggtttataaatgtttccaacacaagctaaatcattttaagcttcttttttcatacctaaagcaataaaattaaatatagttaataaaacatgaaagaataaaaaaaataatataaaactattgaaaaattcatataagttaaaagaataatttaaaatttatgaaatgatctaaaggtaaaattgtacaataaataaagaatgattagtgaatagttacttacttttgattgattgatcaattttaatctgcataattaaaaatattaa

SEQ ID NO: 34076 - DNA, 537 bp, Glycine max
  unsure at all n locations
tctcaatccacatcactatattaataagaatcgatgtatacttaaaacaaaaaaagcgnatgaaccgtgtgacgcatctagaacccatggcaaatcccagctcggtacctcggagatacccncagagtaccacctgcattgctgccatcttgttatgaaataggacactggaagaacacgcactagacacctacatgccacacagcttgatctgctacgaagtcacgctgcgaaattctaatcccaccacgatacaaacgattctcatgtttccaaagctcaacatatcaactagtcgaccccttggacaccacataacgacatactccaagtcaacgacggcataccaccaaagcctcacggatcgctgcgagaccacgtctaaactggaatacggcccatggacaacccaccaacgtatgaacaaaccgctggataaaaattataaaatctcttaagctcttctcatacctcaaactactttgaacacttataaggctgggacacataagactctatcttcaccgtaggaatccg

SEQ ID NO: 34077 - DNA, 284 bp, Glycine max
ttatttggtacataattgtcttacatattcaattaatttgattgctttcgatatgactcatttctgaatcttaacatatatatgactaaatgaccttgccatctagctaatttttgtttactttacgaaggtaccggagaatttcgattaacatcggattggcccaaaagacacaagatctgccttactattgctagaggtttggctttcttacatgaacaatcaagatctgcctttacatatgaatacccctgcacatggcacattagccaagccaagaatca

SEQ ID NO: 34078 - DNA, 392 bp, Glycine max
agcttcggaagaaagtgatgaggtacaagccctaaaggcagagcttgaaagagcccgagtagtcgaagagaagttcaagtccatagccatcaaagtctgaaaagagtatgatgaactaagggacgtcaatatggccaccgctgatgccttggaatgagaaaccaagaaggcccaaaaggaagaacacgtgccagcaaagttttgaggggctttatagggcagcaatagtgagctcaagctccgaagaggtgaaaggaatcatcacgggtcaaaggcatgatcttgaaggacgagctaaaggcttaccttaggtcgaaaagaaatttgtcctaacagttaagcgagactgaagggaatatgtgggcccgcatcgatgagtgcaaagagaagct

SEQ ID NO: 34079 - DNA, 370 bp, Glycine max
  unsure at all n locations
nttgagcaattcaaatggtcgtaacttttcactcggatgtccgattcatgcacataatatatcgagacgcttgaaattgaacaacgcaagctctcgtgaaattcaaatggtcataactttcaactcataggtccgattcaggcgcataatatatcgagatgcacgaaattgaacaacggaagctctcgagaaattcaaatgatcataacttttctcacggaggtcagatttatgcgcataatatatcgagacgcttgaaattgaacaacggaagctctcaaaaaattcaaatggtcctaacttttcactcggaggtcccattcaggcgcataatatatccagacgcctgaaattgaacaacggaagcttt

SEQ ID NO: 34080 - DNA, 383 bp, Glycine max
agcttattaacccaagctcttagcttcaatgcaaggaaacatacttatggctaaaaatctaaatttttgttttggaagtggaaaggccagaaaattatgacatgcttgagagggtttttactcgaatttggctgccccatgagggatactttgcaccttggtagcatgaaaaatacctttcaatggtatgtatatatgtgtgtgaatataggtagcatggaaaacacctttcaatggtgtgtatatatgtgaatatatggcatacaatcccttgcaaagtgtgaatgagtagcttcctaaatgaatatatgatggcacataattcccttttcacatgccagtatgtgcatgacgtaggtagctttccaatgtgcatatgaata

SEQ ID NO: 34081 - DNA, 344 bp, Glycine max
tttctttgtgggttgatgtgttctatcgcacaaaatgtcttgatcactgactgacatattctcaattagctcaattgcttctttcgacgtctttagctttatttttccccctgcaaaagcatctatcaattgcttggtttgtggtctcagcccacctatgaacatattcaattgaattggctcagaaaatccatgggtgggagttcttctcaataaacctttgaacctttccaatgcttcactcatacattcatcatggaactgatgaaatgaagagattaccagctttaccttccgtagtcttggactctgggaagaatttctttacatatttttcaacaact

SEQ ID NO: 34082 - DNA, 281 bp, Glycine max
agcttatccttatggcctgccttcggacttcaccccctgtgccaccccggaagacttaagccaagcccttactttggaggggcaactcccaccttatgaagactatcccgggcaagacgatggggaacgagatacccatcttggccccctgctccacctcacagatccgcccccacatgaactaccccaaccgaacatagtccgccatatcccggcctcacccacacccgtaaaagaatctgtccccttcgcggaagataacggacagattgatgcgcttg

SEQ ID NO: 34083 - DNA, 423 bp, Glycine max
  unsure at all n locations
tcacgctgctcaattgcttcaggatgctttatggaatgtcaaacgtctgtatggtggtcagcagaggagcacaaaccacaaacccttgcgacaggtacagatttctgattcaccgccagctgggttaccaagttaaccaatgcatccagtttgccttcaagcttcttagcttcatatgatgcagatgggcttgtagctacctcatgcactcctctaatgactatggcatcatttctggcgctaaattgttgggagttggaagccatcttctcaattaaatntctaacttcagtaggagtcatgtctccaagggctccaccactggcagcatctactatacttctctgcatattgctgagtccttcataaaaatattggagaagaagttgcctcgacatctgatggtgagggcaactgacacat

SEQ ID NO: 34084 - DNA, 404 bp, Glycine max
  unsure at all n locations
agctttcatagatatttaccataatgtttacatcgctcaagctttcaaatttaaagtaccaaagtacacaacataaactagtacatactgaatataaattagtcatatccaactacacatcctaataacaaaataaaacaagaaatgggtcttcacttttcttcatttttatactggatctttatcagcagccttccttccagtgaacctcggtgttggcatgtaaaataagggtgttgttggtgggccatccacaacaggtgcgtctactgttgaagtgtgtgaaatgttcttttgtttgggtcttgttatgtctagcttataccttgctactgggtggaacatcacaatagatgcanggacctacatgcaaatgccanacatgaataacacttgtaatatat

SEQ ID NO: 34085 - DNA, 439 bp, Glycine max
  unsure at all n locations
nttaataganaattataacattctcccacttggtctatatgttttgactcattggctaaaataagtcaatgctcaatttccttaaagaaatgaacatgtgaatcatagtgatagtttctcttataacgagtaatatcatccttgtattacaacatgttcaatttcccaagtagtatacttaatgtaataataaaacttaatgaataaactcaatgtttattgttggtccaaaacatagattttctcaaataaatcaatgtgcacatgaatatgagaaaatatcacaatgtaagagtttcaactctgacctgtatgtatacaatcataaagtggaaccaagtcttattctctctacatgatccttgaacttaaatggtgacatgtccttagtcaaaggatcaatgatcactagcttagtgcttatatgctcaatgatcat

SEQ ID NO: 34086 - DNA, 398 bp, Glycine max
  unsure at all n locations
agcttagcaaatggttctgngtgttgcccagtttcatcatatcttccgtaatactcatcacctctatcatatctaataattttcacatttatgtctaattgcccttttacttcattgtagtaaatttctaaggcatccattgcctaagaaatctcgggcagtaagtagacataactgtaacgtgaataatcataaaaaatgatgataaagtatcattcctttccgaaagaactaacatcaaaaggtccacaaatatcagtatgcacaatttcaagaagctgagtgcttcttgtagctcctttctttgtatgttctggttgttatcctttaatacaacccacacaaatatttagatccgtacaatctagataacgaagaattcatcttttataatcttt

SEQ ID NO: 34087 - DNA, 442 bp, Glycine max
  unsure at all n locations
tanaacagtgcagaatcaagacacaattgcattaaacttatcttctttgtgttcttgccttctttttaaggtagaaaactcaaaaaaatcattttcttctgtttactacatttcaattcatattttttctttaaaccatttatccaaaattaatttctttctaattattacttattttaattattggattaaacatctttttgatctttctaaatataaaaatggcttttggtcctctatttctaagagattgtcacagtacatctatatcactcatctcgttcgatataagtggagttaacggtaatgcagtttgtgacaatttaccagcacatcaagatataaatgatatattcatagtgttttaaccacacaaaaattgtccctcatccctagtcgctgaaacgaacttaactccaaacttttactttcttaccttata

SEQ ID NO: 34088 - DNA, 344 bp, Glycine max
agtcttctctatatgttatgctcctgaatcggtcatccgggttaaaagtcatgaccatttgaatttctcaagagcttttgttgttcaatttcgaacgtattgatgtattaagcacctgaatcggacctccgaccgaaaaattatgaccatttgaatttctctagagctctcgttgtttaatttcaagcgtctcgatatattatgcgcctgacttgtacctccgatggaaaagcgatgaccattttaatttctcgagagctcccgttgttaattttaagcgcgctatatattatgctgcccgaatctgaccctacagttaaagctatgaatattcgaatttcccg

SEQ ID NO: 34089 - DNA, 393 bp, Glycine max
gtcataactcttaactaggatgtcccattcttgcacataatatatcgagacgctcgaaattcaacaacggaagctctcgataaattcaaatgttcataactgttaactcggatgtcagattcaggcgtataatatatagagacccttaaaattgaacaacgaaagccctcgtgaaattgaaatggtcataaattttaactcagatgtcatattcatgcgcatgatatatcgagacgctggaaattgaacaacggaagctcttgataaattcaaatggtcatatgttttaactcagaggttcgattcatacgcattatacattgagatgctcgatattgaacaacggaagcttttgagaaatcacatggtcataacttttaactcagatgtcat

SEQ ID NO: 34090 - DNA, 164 bp, Glycine max
  unsure at all n locations
agcttgcttctacattattaaactaatatagggaaattaacanaaagtaaaagagaggggtagagaaggcttcacttagggctaaggagctttcaaaatctctcttatccatggaaccctcacaacctccttgaacaccaataacttggtcttccaatgaacct

SEQ ID NO: 34091 - DNA, 433 bp, Glycine max
  unsure at all n locations
tcctaagcaagagaccaaattgagactcttagtccccctttctctcttaactggcacaccaccctaggtcattctagggttggtgtggccttatatagggggtcttaatccacctgngttaaggcccaattaggtcaggtgccctaattgaatcttaaaactctctattaagcttcgtgatacttaaccttagtctttagttactctaaattattaattccaactctaactaaatctctttatcaattaaattatttttttagttttttttaatatatttaccaatttgtcattaatgagttgacaaagtcaaccctttgccattgaccctagtagtctatggttgaccttgttgactttctctaattnttactagaaaacgagtatnttttttctcattnttccttttaatctaattttctataattctaat

SEQ ID NO: 34092 - DNA, 398 bp, Glycine max
agcttgccaagatcatggcagacttcgaggcctggctgaaggagttagagtccaagctgaaggagttcgagcagcgggcgactagggagagagaggtcaggcagcaacttgaagaagagttgctgatctacaagaatgaggttttggagcagcatgagaaaggctttaaaaaggttgtcaagcaggccggattcttccaaaaggaccttgacttgggtctttttgaccctttcaattgtttttggaaggttattatgactgaatttgattgtcaatgtttttcaaaagacctagtcaattacccatgcatttagatttgtcgtgctcatctttatacatgttctaaaatcacttaataatatggttattagttttaaaaataaataatacaacatatg

SEQ ID NO: 34093 - DNA, 351 bp, Glycine max
  unsure at all n locations
tgcctcanagagatctaggaaggataaagcggctgatggacccagttctgctcccgaatatgacagccaccgttttaggagcgctgagcacatcaagggatggtcatttctctgggagcgacgcgtccagctcagggatgacgagtataccaacttccaggaggagatagttcgccggcgttgggcatcactggttacccccatggccaagtttgacccagacatagtcctcgaattttatgctaatgcttggcctacaaaagaaggcgtgcgagatatgcgatcctgcgtgaggggtcagtggatcccgtttgatgcggatgctcttanccagttcctgggatacccttt

SEQ ID NO: 34094 - DNA, 383 bp, Glycine max
agcttgtatggcaaactggatgcattggttaacttggtaacccagctggccttgaatcacaaatctgtacctgtcgcaagggtttgtggtttgtgctcctctgctgaccatcatacagacctttgcccttccatgcagcaacctgcagcaattgagcagcctgaagcttatgctgcaaatatttacaatagacctcctcaacctcagcagcaaaatcaaccacagcagaacaattatgacctctccagcaacagatacaaccctggatggaggaatcaccctaatctcaaatggtccagccctcagcaacaacaacagcagcctgctcctttcttcaaaatgctgctggcccaacagaccatacacttcttcaccaatccaac

SEQ ID NO: 34095 - DNA, 392 bp, Glycine max
tattctttatctagagtagttgagcatccaacttactactgacatatattcgactgtagtagtggacaatgtagttgagccttgcatcttgcatattcatgttactaagttagcaccgataaagtaatagcttccactagagctttttctttcaactctatcaccaacatagtcaacatcataatagcttgcaagtctgaaactctctctatttttgaacataacaccaagattagaagttccaattaaatatctacaaatatgtttaatttcacttaggtgaacttccctttggtatttttgaaatcttgcacatagataaacattgaacataatatcacaaatggatgcagtgagatagaccactgagttgcatccactttttttgatcc

SEQ ID NO: 34096 - DNA, 392 bp, Glycine max
  unsure at all n locations
agctttaataggtagattcttcaacatgcactttactttctggtcaaccaatctaaaggatgttttttcctagagaggatgggtttgtactttggtgggctgcctaaggtctctcctaatggggtgcagactgtatttgtattgcttttatctttgtattttcagtacacctagtactggatttcatatataatatattgatttttgctgtgcaaaaaaaaaagaaaactgagtttttaactanagtaagaaactctttgaacagagtcagagtttcagatttacttttcaacacataaagccaagtaaaacgagtgtgggcatcaacaaaggttacataatatctgtaacctgtgttggacaagagagaagaccccacagatctgtataaa

SEQ ID NO: 34097 - DNA, 422 bp, Glycine max
ttaacattaattaaaagctcactgttgtaggggcaatcacttatggtaatttttatgcatgtgactgaacttgagccaatctatatgaaataaaataaatgcattctcagggtttcgttttgctgaatgctacaggctttgcaaaacttttttgctgctttagtctattctgcaaatactagttttgattctctgctggagtcactactagcctgtgctaagccttctccacagtctggtggcattgctaaacaagctttgcattcaatagctcagtgtgttgctgttctatgccttgctgctggtgatcagaagtgttcatctactgtgaaaatgcttactgacattctcaaggatgacagcagatctaactcagtaagtctttttctccagtactcttgacgtgtagtgatattaattga

SEQ ID NO: 34098 - DNA, 419 bp, Glycine max
  unsure at all n locations
nacccgcctgagcctttgatacnctgaatacccgaantctcaaactacgcttgatgttgtctgtatgaaaatcttctgcaacctgttcttccatatagaaatgattaggcaaaattgcgccagagataaacacaataccgaacacgagccggagaaaggaactgggaagcttaccggtagaaaaattaaaagtccaaacaaatgcagcggacccctttttatgtcaaaactctattatttcttccttgacaattttgtgctanctgtaactgggggaggcggggaagggagccaacacctcaactaaagactcttgagcattcaacttgacgcgaatataatcttcttaaaacaagtacagatttctttggaaaacacaaaagggctcgctctaaaagcctaaccatacaacataatcg

SEQ ID NO: 34099 - DNA, 311 bp, Glycine max
gcgaattcagctcggacccgggatccttaagtcacctgctgcatgcaagtttatggtgatgaaccaagccattttgatgatgccaaaagtccaagtgattgattcaagattgattcaatactcaagatcaagcatcaagaatccaatccaagattcaagattcaagagaagaaatcaagaagctacaagtcaagacttcatataggataagtattaaaagaatctttcaaaaaccaaatagcctagcttagtcttacaaaagaattttctcaaatcttctaagctactagagtgattactctctggtaatc

SEQ ID NO: 34100 - DNA, 391 bp, Glycine max
ttatactgttacctctatgtttcttctgtcctttactttattggtctacatattagatgcaagactactttatattggtggaattattttgctactgaccttgttttgatactaattaatttctatttcctatagtatgtttatatttgattgctttctctgcactaatattatgtgttgacaatgcccttatgcagcaacaacctaatacaatgactattattgtccctcggcatcgacagcaatgactatagattgtcaaagtaacgttctatttctcatattctttcaaatcatgattttggttccctacagatatctttcatacgaggccatccttacttcagactaacggaataaaaagaaaccaaaacagcaagttaacccatat

SEQ ID NO: 34101 - DNA, 337 bp, Glycine max
  unsure at all n locations
agctttagatcagtagtgtattgttcactcacgttaatgcaatgcattgttcactcacattacaacactgaaatagcagaaaacaaccgtcaagggaataactttagaacaataatgctgaaaacaagcttcataggctccaataatttacacccgtgaaggttgcacatgcatgaatagaataaaagtagtcatgaagcatgcttatacggtcatttatggtgaaatgatttatgatagcatggaatcttgccagaaataaagtagtcaaatttaacttatgctgtaaacatgatttatgatagcatggaccaacttgctntaagttggttaaatt

SEQ ID NO: 34102 - DNA, 423 bp, Glycine max
tcaaaatgtagttaagactgcagacaacttctgttcatgtttgaagcttgatagaaacacagatgttagctatagtaatatgaggaaggctgcttcttgggaagatttgactgacaactatttattctgttctaaagctgtagatcctcagtacaaggatttaaggcattttcagtggcattgggaaaagggggagcctgtcattgtcagcaatgtgcttgaatgtacatctggtttaagctgggaaccgcttgtcatgtggcgtgcattacgtcatgtaactaataccaagcatggccaacatttggcggagaaaacaattgattgcttagattggactgaggtttgcttaatttcccaatctttaactctattgaccatggagagctctttacacaaatttcattcttcaccttcattctc

SEQ ID NO: 34103 - DNA, 475 bp, Glycine max
  unsure at all n locations
tgaacctctcacaccgatggaacgaatcgactgattgatccattaanatcaggagagtgagcgggtgaccctgtgatacctcgaacacataggcgataccactcggaccgcggatctctaaagtcaaccgcttttgcaagcttcaggacaagaacacataggaaccgaaagagcattcaagagaataacttacaagagacggggtattacaattatatagatggcacaagagtaactacttgggacaacttaacgcacttagtaccaacgacaatctgaagaaccatgacaaactatatcctgctagatccccctcagctacgaaagccatactagctggaatacgcacttaagacacgacccacaaggtttatccatatgcccatgttaccacacagaaatcgaagcaagctcaaatacattatcccttcccgaatacacgacatcaactaaatgtctgctctccctgataacc

SEQ ID NO: 34104 - DNA, 290 bp, Glycine max
gaactcagaatactacgcttgatgataaagtgagatttacgtgtatgtgggttactactcaagatccaacgggtgcacactctataatccacatcgtagaaagaccgtcctaagtcgcgacctggaactcgacgaagacgattgttgggatcggaatgttcaagacgactcgtatgatttcctcccttactttgaacaacatgatgacattgaacaacctatcctataggaacatattacactaccttcctcaccataccaacgctctatgaaacaattccacgtgagag

SEQ ID NO: 34105 - DNA, 336 bp, Glycine max
tttcatgcaagcttatcaaaactgaatataatggctcctaggctcaagaatcttatactcttagactgtgagtcttgctaactaggaaaacatgttacgtcatcatttcctcaaactgtacaaagatgtaactttgctttgtctaccattcagcttgatatttggggaccaagtatggttacatcttttggttttcggtattttgtaaccttcattgatgaattttccagatgtacttgcggttatttaatgaaagacagatctgaacctttacatatattcatgtcgctctctaatgagattgagaatcaatctggcagatcaattaagattttc

SEQ ID NO: 34106 - DNA, 418 bp, Glycine max
tgggggtaaaacttgatttgtatagctagaagtggttatgacacaagacttgtaacttgtgagaagtaagtggaacttggtagtttgccaagaattggatgtaatcttagtggtagagacgaaatttgtagtttgtgaaccctaatctcccaatttcaattaaattttgtttatttagccagttgaattgttgtgttgcattacttcttatttgggattgatcactccaaaaacctaattcattaatgtatgtttggattaaagtttgcaaaagtgtcttaagtcttacttctctataactgagttcttacgccaaattttactatcacacatatctttttgggcaaccaaacatgaccctaaactgattttactctacacacactctgggaacactcccattggaaatccaaacata

SEQ ID NO: 34107 - DNA, 379 bp, Glycine max
ctgcagctttgatgggttttaaaaatccatgtttgtcatcatcaaaaaaggggagaatgtgaatgtatgtttacatgatcttgatgatgtcaaagaagaatctatcaagactgcttcaaatgataagcatttgcttcaagaataattcaagattgcttcaacaaacaaagccttgttcaagattcactaaagaccaagccttgccttaaaacaatgtgctttcaagacatgcaaagctctggtaatcgattaccaggaagtgtactcgattaccagatgacagggttgagaaatagctgctgaacaaggctctgaacttgaattctcgacatgtaatcgaatatcgtatgtctgtaatcgattaccaacaacgaaactt

SEQ ID NO: 34108 - DNA, 441 bp, Glycine max
tgtaatagtttgtctgtgcaataatatcaagttcttttttggatctttcctccttttcccccaattttttctctgaaatactgtaagtatgaatctcactatgtctggctaatccttttgaaggcaccctcaagggaccttagttatctctatttggaaaatgcgaatatgatttagaacccagttgttgtaaatagtgtttttttttctacttattcttttcttttgcttgtttttcgaaaacctgggatttttaagcctgcaaaggtgtgcccttgatagctgttttttatgaaagtcctttttggttaggcgggtgcttggaggaaaataagatcaagtaagacccaaagaagtgtgggcagttctcgatcttcagtactcagcttaatatccacaaaatcgataaggacctgtgtaaaaaaaaaaaaaagagtctgg

SEQ ID NO: 34109 - DNA, 358 bp, Glycine max
agctttacttccactattttaattcttattgcaggattctttccctaccatgctattaattgattgcctttatctattctttttaattaattcttacctctgaattgaaccttacttttttgcttgtccggaacattttataccaatctgccttgcgtcactgctttacgactttaccattaagacgggtgatattaaattaaaaaaaggacatatatattatcaacatcataattcttatatgtactgaacaaaatctcaacaattttagacattatgaccgacctgcaagagagggactaaagagtatgtcgatgctgatgtgaaaatattttgattcttgcaagcagctgacacg

SEQ ID NO: 34110 - DNA, 450 bp, Glycine max
tactatagctatattgagttattataactccaaatatatcatgtacattgtatagagtccataggagtgtaaagcaaacaaaggcggctatatcccaagttaagaaatgatatacgaactataggtgttaatagataattgctataataggaaaatgatataggatttggatggattgaatagtgtaccacttagtccagtgtgtttaaggatgattgtgattgaattatttttgggaacattcttccatttgactatgaacatgattttatgtatattgaaatgagtgcgacatgtaatgcgtggctcttatgtgtatgaaatgtcaacgccatggtacatgactaaaatttgaaatgtctagagaacctactccatgtgggataggattctccatgtgatgtaaccatgtgcatcctatgtaatcatgcatcatagatgtgcatatgc

SEQ ID NO: 34111 - DNA, 319 bp, Glycine max
agctttgagggcgcgtatcccaccatcttttcatagtagagtaccgataatgtgtctaccatcacgattatcgctctcctttttgcacatgttctgtagttgcatcctatccggaaccatatcagaatagtactgatactgcctaacgaaggtaaccattaggtccttccaagtatacactcaggaaggttcctaagttagtataccaggcgacagttgtcctagtaagactttctcaggaaaaatgtatcagcagtttctcatcttttgcatatgcccccatcttccgacaatacatctttagatggttcttggagca

SEQ ID NO: 34112 - DNA, 448 bp, Glycine max
  unsure at all n locations
actcaagctntggagcttgaagaagttttgtctttntacatgtccttctctttaagtgacatttgtattgattgctgcattttagtctctatcttttcatatgtacatcatgcatcatcatgtagaggtaggaagattgtatctaaagttagaaacttcttcagtgcataaaactctctattttaatcgattacaaggcttatcgtaatctattacacaagtgtctgtagcttgtagagagattctagttttgttttaattgattaccaggtaaccctaatcgactagataattcagttgagatcgtgtctggtctttcatgagtctccgctttaatcgattaccaggtgatcatagtcaattactttgttcttaaagatgttcccanaagtgatcaagaacactttaatcgattacatcaagaatctaatcgattacattgttcttg

SEQ ID NO: 34113 - DNA, 403 bp, Glycine max
  unsure at all n locations
agcttgccgctggatctgacccatgaactgccctaattcttttagactggtgatccctatgctcttgaccttgacttgatagaatctctttttaagcgaaggcatttgacttgatcccatgttttactaaagtgaacaaaaatcggtgcgaatcaaaaccccaacatctttcatgggtggaatggatgaacgcatgaggaaatgcatatgacacgaatgcaatttatgaacacggtagcccgggaaattgtctctttcttagatacaacatcttggggtagcaaagtgcccgacgtatgtattaaagaaggtgacacggaccatcctttggttctccaatgtgcgtgatgcanatgcgaaaggcgcaacgcgggaatgtacagtatgacaatattcacaaaat

SEQ ID NO: 34114 - DNA, 441 bp, Glycine max
  unsure at all n locations
ttagaaaccctaatttgaggaagaagaagcaagtgattaagaaaatatttgataactttttaaattttgcattaaagtccagtctacatgtcacattttgggacaatttgtcacgttggatagtctatgtgacactaaaattgccaataatgcacctcactaacgcgttacttttaaatttaacgacaaggactattttgcaaaacttatgcaaagatagggactattttttacatttcaaaaagatagggactaatttgtaaaaagggtcaaaagtcagggaccaaaatgcttatttactcgtacaataacacttgttcaatgtttgactaaaaaaattgtcatgagacaacacanaananaaacgaagcataggacaaagtctaaaattcttgttactcaccaaaccacatgacaactntntccatagcatatgttatg

SEQ ID NO: 34115 - DNA, 369 bp, Glycine max
  unsure at all n locations
agctttcttcttgcgatgaaacaaaaaaccacagaaaggtagtaaatgatgcacatacaacatcaaaaccgaacaaaaaaaggttgaaccttttgtactaatcataaaaaatcataaaaaatgaacaaagattgaagctttattgttgcgatgaaacaaaaaaccacagaaaggtagtaaatgatacacatgcaacatcaaaaccgaacaaaaaaaggtcaaaccttttgtactaatcataaaaaatgaacaaaggttgaagctttcttgttgcgatgaatcaaaaaaccacaaaaaggtagtaaataatgcanatgcaacatcaaaacccaacatagcccgagcaaaatggtacataacaacaaacca

SEQ ID NO: 34116 - DNA, 421 bp, Glycine max
ctgtactcaatgaagtttattcttactgtgacgagtttcatactttatatactgtttgtctcttcccttgtagtttccatagcagcagacacatcatccatttcacaatcccaatccctcagttctggaagaaccatagtttctccaaatggagtctttgaacttggattcttcaatcttggaaatccaaacaaaagttacctcgggatttggttcaagaatattccgtctcaaaacattgtttgggttgcaaacggtggcaacccaataaatgattcctttgccctcttgagcctaaacagttctggccatttggtccttacacacaacaacactgttgtttggtccacaagttctctaagagaaacacagaatccagtggcaaagctcttggattctgcgaatcttgtgataagggatg

SEQ ID NO: 34117 - DNA, 396 bp, Glycine max
  unsure at all n locations
agcttataagaatactcaataaacaacttaagagagaagtagaaatacttggtctatattagttcactcaaatagagctacgtccagctctcctttacacaactataaagggatccactaatcaaaacttccattacaaccaggtattctatcctatcactcttggctataaaagtattctctatgtcactcttgacacacccttagactccccctgaatctaagaacactcaagtatggtttaacactgagccacttttgattttctcaaacaaaagtttgaatgaatacaatgattcaacaacactcaaagagtggataaatagttaaactcanatgcaaataactntgcttagcaaatgatgaanagattaagtgttgagtatatcgtccact

SEQ ID NO: 34118 - DNA, 402 bp, Glycine max
tcatccgtgggtcaaaaatcatagcaattgaaagaatgacattatagtcacttcaatacttgctaaacttttccatcatcaacactgacatattttgcaatactggatcatcacacttaagtgtttctcgcaacaaccattcaattttccatacttgcatgaagtattcattgggcttgtctatttgtcttaagtttaggctacgaaattggaatttgtctattattgaatttggttgctaacttgctacaaaataaaaactgaactacctaacaattataaataattataaatttataataataataaaataaaataatatattatttaaatattgtgggttgacgggctggcccatcaacccacgggttgagcccacctaacccacgggctaagtgggcc

SEQ ID NO: 34119 - DNA, 357 bp, Glycine max
  unsure at all n locations
agcttagacgaccttgtttgagtcgagaatactttattatttatttggacaagcttgaatatgatgtagaagaaaatgaatgtgagcctttgtccncatcgaaagacttgtaaaaaaaatgctttaacaatacttttaatcaatatttgaatcctttttccttattagtatatatgcggggggtagagggtgtcacatataagactgtaaacattgaagtcctttgaaacatanagcataagatatcgcagtcttttgaaacataaaacaaaggacattgagtcctatgataaaacacaggacgttgagtcctatgaatcatgcactcgcattttggaaatttgtctataatgagaa

SEQ ID NO: 34120 - DNA, 435 bp, Glycine max
tatgcgcatatttccttacatacgttctcttgcacattacatttaaccgaaaaagtgcacccatatacaatcaaggcagcttcattacctagattatttacacgtactgccaaggtgtatttgttacttacatcacacacatctccttggctgaatttgcatacatgcatactcaaagcattttggggtaccaaaaattgcacatgtgcacatcttggtatttctaatacctatatatacacaaacttcatgatgaatcttgactatcttcacaaaaaggtgctacacttcatcccttttttcaagtttttgctacctaaagccgcatgcaaattcaagcatattttcctttgcggactaaaattgtattcaaattaaaaggtatattttttgtaatatgttttcttcacataacatgcaacatatttatatata

SEQ ID NO: 34121 - DNA, 393 bp, Glycine max
  unsure at all n locations
agctttattcaagacaaagaaattaaagatattcaagatggatgatcaagacagtctttagagtcttagaaagggtatattaaataggaagggaattccaattgaagtagcaaaaggtttggccaagaaatttaagttaaaaagtcttttacaagaaatttactctctggtaatcgattaccagaggatgtaatcgattaccagtggccaaaactgatttacaacagctattaaaatttgaattcaaaatttgccctgtgtaatcgattacacatatatggtaatcgattaccagcagtttctgaacgttttaattcaaattctatagattgtaatcgattacacatatactgtaatcgattaccagactagattttcananaatattctcaa

SEQ ID NO: 34122 - DNA, 431 bp, Glycine max
  unsure at all n locations
tggtggagttcactgagaatcatggaatgttcgggttgggttacgagcctacatatgccgacaagaagatggttaccttagaaaggaaggagagaagcctggcccatctacaagggcgaggactacaagtggaaagggtccccatttgtcacatcaacgaaagctttgtcagtgcaggatggatgcgtgaggattaggttgcagtgatagatgaagaaacccctcaagaccgaccaaattgggtgcagccatgtcctccaaactttgaattggggaattgaaaaattgtcaaacgacccaagatttgcatgacaaattcaatgtaatccaatagttccaaccctattgttgggcctaggctntggggtctgctcttttgttagatccgatgttgagtcctgtaagagtaacaatatcgaggactcggacgt

SEQ ID NO: 34123 - DNA, 361 bp, Glycine max
  unsure at all n locations
agcttttatgggatcaaggagtctatcatgtgttcaacaagatggacgaggactccaagcataccttaatagttaaaggtttagtagtcgctaaacaacaaaagtttagaaaaaccaacttaaaggctatgaaggtggccttggaaaaaactttgaaggaggctctagaagtggatgtgcacgccatcaacaagccaaacaaaagagattcgccaagtccattcctattgaaggccttggtctggatagctttggcatggcaagaaaaattaagaagatcaatgttgggtagaaaaagaagaagacaaccagancacaatcctaaagggatgaagagaaaatgtgattttgccaaggaaca

SEQ ID NO: 34124 - DNA, 407 bp, Glycine max
  unsure at all n locations
tctatagaaggtccgttcctaatttctctacaattgcatcacctctcaatgagctggtgaagaagaatatggcatttacctggggtgaaaaacaagagcaagcctttgcttttctcaaagaaaagcttactaaggcacctattctagctcttcctgaattttctaaaacttttgagctagaatgtgatgcctctggtgtgggagttggagctgtattgttacaaggtgggcaccctattgcttattttagtgaaaaacttcatagtgccaccctcaactaccccacctatgataaagagctctatgccttaataagagccctccaaacttgggaacattaccttgtttccaaggaatntgtcattcatagtgatcatcaatcacttaagtacattagagggaaaatc

SEQ ID NO: 34125 - DNA, 382 bp, Glycine max
agcttcaggctgctcaattgctccaggttgctgcatggaagggcaaaggtctgtatggtggtcagcagaggagcacaaaccacaaacccttgcaacaggtacagatttctgattcaaggccagctgggttaccaagttaaccaatgcatccagtttgccttcaagcttcttagcttcacatgatgcagatgggtttgtagctacctcatgcactcctctaatgactatggcatcatttctggcgctaaactgctgggagttggaggccatcttttcaattaaatttttggcttcagcaggagtcatgtcttcaagggctccaccactggcagcatctatcatacttctctccatattactgagtccttcataaaaatattgg

SEQ ID NO: 34126 - DNA, 422 bp, Glycine max
ttgctaatttagttgtctctggcgaaattatcgaagtgggtctgagaagaggcaaatttgattatcctgctttgatgaatgggaagcctgcggaaaatggagagagtaagaatgagggaggaacccatgttgtgactaccatgcctacatggaaaaattcctcaccagctcaacaatatcaatactcagccaatatcagcccttctcattacctaccaccctatcagccaaggacacccaatcattcacaaaggccacccctaaatcagccacatagtctgcctgctgcacatcaaataccaaacaccacccttaacacaaaccataacaccaaccagggaaggaattttccagcacagaagcctgtagaattcacctcaatcctggtgtcgtatgctaacttactcccatatctactcaat

SEQ ID NO: 34127 - DNA, 248 bp, Glycine max
agcttctgggagcacaaatggattggggaaaagccactaaaacaactttttcccatatcgcatctgataaatgatggacaggaggacattattgtaaacaaggcaacttcacatgggattgcgagtgcaagcgacggtgcaacctaattgtctcgaaacagcagcttctacaaagctaactctcaagatgacggttgccctcattatgtcgagcggatttgcgtgaccctattaatggatctagaata

SEQ ID NO: 34128 - DNA, 261 bp, Glycine max
taaggtttaatcactgtatgaatgagtgataataccttcagctgctaagaggtcaatcagaacgactgcgcagcatgtgcgcagtactcactgagtcaagaacgggggaggagaggaacaactaagccagtctcctttttggggctgtactcactacgatcgactttgaccgggaatagcaggtgacactcaaaccccactcgttactcgtgcacgcctcactttgcaggtgagattaccaaaatctccctgtgcttgaag

SEQ ID NO: 34129 - DNA, 286 bp, Glycine max
  unsure at all n locations
aagaaaacaaaagaaaaaaaagnncccgggcaaagnncagaagaaaacaaagggaanaagaaaatccctgancaaagaacggaagaaaangaaagaannatgnagaangggcttcggaccagacaaatatccaaacaatacaaaatagccataaccaaataaggaaataaaggaaaccacgacttgaagtagtcctctccctttggttaccaaccaaaatcctatgcgctaatgactttcttgccccgcactaaacaaaaacagaaaaaggaaagccaaaacactt

SEQ ID NO: 34130 - DNA, 501 bp, Glycine max
  unsure at all n locations
nnnnttttttnnnnnnnnnnnnnaaccagcaagacccagaagaaacacagcacgccacacagacaacaccccnnnnnnnnnnnnnntnnntntnnnnnngnnatgggcctctccggttncnnnnnggggttttttttttnnnnnnggagccnnnccaccccgcnncncccnnancccaaacctccaancccagcannaaacacanggcaccctnnaaggcaaagcnncctgagggcaacacacttatcagcaatgcactcaatctccgcatccccaacggttccaatcccacaaagagccaacctctccaaattcctgcaactggacgcaatcgccgctaggctcgaaaaagtgggaaaaacaccaatcaacacgagctcctgcaaataaaacagtgttaggcntcgcatgcaacccatcatcaccaaacccataaacccccacccatcaatgtgaaccttcctcaacaacccacacctatcagcaaccgacaaaactccc

SEQ ID NO: 34131 - DNA, 413 bp, Glycine max
  unsure at all n locations
nnnnaagnnnnnnnnttctactaacgatcagctncnccnnnnaangaaatnctccnccccccnaaccctcccccccccccccttaaaaaataaaaaccccccaaggataataaccccnccggcggggnnaaaaacaaccccnnnnnnnnnnnnnnnnnnnnaaaannnaaaaaaannaaaaaaaaannnaaaaaaaaaaccccaaaaaaaacaccaaaaaaacaaaaaaaacanacaaaaaaaacaaaaaaacaaaacaaaaacaaaaaaaaaaaaaaaaaacaaaaaacaaaacacacaaaaaaacaaaaaaaaacaaccaccaaaaaaaaaaaaaaaaaaaancaaaaaaaacncaaaaaaaaaaaacaaacacaaaaaaaaaaaacaaccaaaaaanaaaaaaaaaaaan

SEQ ID NO: 34132 - DNA, 238 bp, Glycine max
  unsure at all n locations
gaaatcattaactctattagtcaaatattgtcacaaattgatcccttttgcgtgcatttagtcattatattatatacttaaaaattgttaagtaaaaacaaattattattctaaaaaatatacttttacgaaaagaaatatttgttaaatatttagacctgattaatccaacccaacccatttatgattgggttgcgttgggtatgaaaaaaattatacaaaccccactanggatggc

SEQ ID NO: 34133 - DNA, 267 bp, Glycine max
atgtttccttaataaagtctacaagtttcaacaatacatttatggattgaaagaagtgtctagaatttggagcattcattttaacaagataatttgaatggttaatcttgttagctatgaagaagaactttgtgagtaaaaaaaggttactgggagcattacatttatatgtagatgacatataaaataatacacaatattatgaaaaaagaattgactactaatatattatcaatgaaatatttaagagaaacaatatttaaaaat

SEQ ID NO: 34134 - DNA, 349 bp, Glycine max
agctttgagtaaattgaaatgacaagaactttctacacggatgtccggttgagtcccgtaatatatcgagatgctcaaaatttagatccgaagctctgagaaaattgaattgacaataactttatacacggatgtccggttgagtcctgtaatatatcgagacgctgtaaattgaaagcggaagctcgtaggaaattcaaacgacaataactttttactccgatgttcgattgaatcccgtaatatatccagacgctcaaaattgagactacaagctctgagcaaattgcaatgacaataactctatacaccgatgcccggttgagtcccgtaatatatcgagaccctc

SEQ ID NO: 34135 - DNA, 405 bp, Glycine max
agctttcgataaattcaaatggtcataacttttcactcgcatgtccgattcaggcgcataacttatcgagacgctcgaaattgaacaacggaagctctcgagaaattcaaatggccataacttttcactcgcatgtccgattcaggcgcataacttatcgagacgctcgaaatttaacaacagaagctctcgagaaattcaaatggtcataacttttcactcgcatatctaattcagcgcatagcatatcgagacgctagaaatttaacaacggaagctctcgagaaattcaaatggtcataacttttcactcgcatgtgcgattcaggcgcatagcgtatcgagacgctagaaatctaataacggaagctctcgagaaattcaaatggtcataacttttcactc

SEQ ID NO: 34136 - DNA, 442 bp, Glycine max
  unsure at all n locations
ntntggagtagaaacatgggacgaactcattttatttcttattggaagtcgtatctagtcaaggtctgagagaccatacaagtttcctaacgatttctaattatgtgggccattaagtctatcatatgctgacaatagccgagaagcccatgaatctcttcgggggcggagtaggtgtctgccatcgccttggccttggctaacaatcggggaagttcttgactcccgttcaaggtaagagcaaaccgatccatccacatggttgcctcttggtgtaaagagtcgatcacccttcctctagcctctttttccgcgtatacttgggcatattcgtccgcaatcctatgctcgtgggccgcggctagacctaactcttcttggtacttggcgatgatagctagcatgttggtctccgtctcgcataaacgctgagacaagcttc

SEQ ID NO: 34137 - DNA, 391 bp, Glycine max
agcttgtgaacttaatataaaaaaatagacagcttcagttttgaaacatgcaaattattattctctttttctatcataattttacatatatatttctttgttgtttttctccctttatttttgtcttcttattagcattgtgttgcgagtatgtttaacttgagggtaaatctaaacacgctcatgttaaaactttgagaaaacaaataaatttagttaagtcaatttgagtatttgtttttttgttaaaattatttttaatgtgctaaaataatgtttgttataccaatttttgttttttaaaatttttattttgaacaaaataactaacaggtttaatataaattcagctataaataatttttgtgtcatgcagaagagatgttttgat

SEQ ID NO: 34138 - DNA, 435 bp, Glycine max
ttctagacagatatgtaccagctgcttctgtaattaattttgcctaaattatgttttgaaggtccaatagcctaaaagaatggtagaacaatgatagtatcgaactcaagaaatctgtgaaaatccaaattgaataaaaagacaggcaaaacgagtattcatgtgtttgccatgaatcaaacataatgaggttccaacaatttttaatcaaattttaattttaattttaattatccttatgctagaaagtttaactttttttatttatttcatatacttgcacaaattttgggaaaacaagtgtaagaaactaagaacttaagtgaaacagtatcatgaacacttctaattgcttttaccagagatctcatagcatttacaaaatcaggtttttcttctaaaggatcaacagacagaacaagtcttcccagtgtg

SEQ ID NO: 34139 - DNA, 391 bp, Glycine max
agctttatgtaatgtggtaccatgtcagtgaaaaacctcggcgggcgcctaggagtacatgacaagacaagccacacaatagtaagtcaagtcactctcactaggtaatatcatagggagaccagtcagggtcacagtgttttgcgagaattttccaaccatatgagatcaacataggcttaaaggagcactcaaaccgtgtgacccccaaggcctacactccgaacagtccgtcagggcctctccctcctgattcacgtccaaccaagaaaatattttagcacacagactctatctatgaactgtacaaaacacatgacttctcaattgttctcaaaataaatctaactcgccgtcctttaacggtcttatcattaactcgtccgcctta

SEQ ID NO: 34140 - DNA, 435 bp, Glycine max
tgtgatatctttactatatatgtgtgtgtcttcgtttatctctacctgtttaaaaatgtgataattcactcctcatgtgttgtttatgtttggatcatgtgatgatcttaaaccttgtgtttgtgagagcaaatgactaggtgaattactttaagaaaccttgtgatggaggactctgagacacaatattttgataggatgtaacattggaacaagagtttttattttaattgcatgacgtatcaaacatgtcattttactttatttgataaacttgaacagtcttgttttaagtcataaatatttctaagaaattttatttggttacaagtgaagcgaatgtgaacattacccacgtggactgatttacgattttattgaataaaattgatttaattagatctcgcattttatatatgtctttctcatttatat

SEQ ID NO: 34141 - DNA, 306 bp, Glycine max
agcttcttttatcttgtgtcatgggcatattgagacatgcgtgcggtccaccccattgagcgactttccatgaatcaatttctctacatagaattgtcttcatatacaaagggcaacgaaaatctgcatttctattcacgcaacaaacgacatacttgtcccattttctttcaaccactttgaaactttcatgcaccttcataacatattgctcgactgcattcttgaccgcatctttactatcaaaatccatgtcaacatataattctctgccaacattaaaactggatcgcctttccaaaccac

SEQ ID NO: 34142 - DNA, 446 bp, Glycine max
  unsure at all n locations
tatacaatactcatgcttgaactcattagacaaaatctatatactagtnggggattcgttgggtttgtttctgctggtatgaccctagcttgtctgataaaaaatgaaccattagtttacacattatgagaatacattaatataccatacatcatattattaaagagtgtcctacaataccttaatagtgacaagttcaagcctttcacccacaatgggttagtaccctccacaacatctttcaaaaaaaaaaattcttccacaatctccaatattgttttgactagcagatgataatatcaatgatttcagacttaattangagttttattanggtaagccaaattacatttctcaaccatgatttgctctttagggattcgattgatatggctactacgtgtttttacaattaatgttcaatcttactaggatgcacaacacat

SEQ ID NO: 34143 - DNA, 362 bp, Glycine max
  unsure at all n locations
tttctttattttgggaagaaaacagggatgggggtaatgcatgaagatattgattttactatcaaacatttagtccttcgagatacgtcctgagagcttgaataaattacagcccaaaaatcaacccaagtgcgatgcattttgctctttagttaatcatccaatgtgtcaatatgatccacaattagtgggtaaagcttatacacaactcataccaacataaggaatgttatgcacattgacgaccagaggaataaaaagttgaagtcagagaacacaattccttttngtcctctatatcctttcacaacactacccgaaatggacatgacaacattagacattcctcaaaatcatattga

SEQ ID NO: 34144 - DNA, 414 bp, Glycine max
  unsure at all n locations
tgtcgttggcttttatttgacacggtgcgtagaattacttggtttgttgcactttcagtgtatcgagtctaataattaccagttgaacaaatcttatgtgtacacacttttaatataaaaaacaaataacaatcgtacaatatgattgtaattgtgacatttcaaaaacacaatagtgaatggatacttcacaccaacactatggtgaccaacaatatggtgacgtaaaaaaaatagtaaattttgagaaatatgtgtagtgtttatgaatatatgtgagaaggaactgttactatcaagtntcttaaaagttatccccatgttctaaaacttgcttgtttcgtgaagttaattacctccatatagtgaacatgacatgttaatttttcacatctgcaaatatcttagatgctt

SEQ ID NO: 34145 - DNA, 262 bp, Glycine max
ttctttttaattcgaattaaaacgttcaggacgtgctggtaatcgattagcacatatgtgtaatcgattatcacatgcaaattttgaattcacacctcaatagctgttgtaaatcactctcggctcctgggaatccattacatcctccggttatcgatcaccacacagtacacctcctgaacaagactttataacctaaatttcttcaccaaacctttcgctacttcaataggaacctccttcctatctgaatatactcttc

SEQ ID NO: 34146 - DNA, 293 bp, Glycine max
  unsure at all n locations
agtctatagtgggagagcgaactaatttcatatctataacacttcatgaagacctcattctattatagagccatacgcatgaaatatttattatgcaatcactaaagaagatagatgactattatcaacacactattaaacaaaaataatctttaaaacataatgtgacagccgttctcactttattttaagntaatcttcaacataacaaatacacaattgtagaactcaactaccgattcgtacccaactccaccttatactatataggattatacaaatccttaataaaa

SEQ ID NO: 34147 - DNA, 298 bp, Glycine max
tgcttatactaaattcgactacaactcggtacgctatttaagctaactctactcctacaacagggatatgaggatgaagcttagtttacagtcaccctaaacctatgagggctgtctaaattgagcctactccaacaagatggatctgaggacaaagcttgaattgattcaatctaactgcggatcgaggcttactaacttacgccacaacataaaacacaaaaacatgattgatcggtgtgctttccggtcaaccggatttcccttgaatacttttttataaagaacaaagcggaca

SEQ ID NO: 34148 - DNA, 387 bp, Glycine max
  unsure at all n locations
tggaattgcatttgggcacctattctgaatctcttatgttgcacctacatataagaaacagtcccactctcccaattttacaaaatcatattcatacatcattggggcatttcactgagcacttggcgagcgcatgttcggacataaattgcaagaggatggggacaatgtggcatgccccattgcttnagaatacagcatacgcctaaggccttctcattcaaatcctcaattcaagaaaacaagcataaaaacaaaccaaaactgccccacaaatataagcacattctctcaatttggagcaccaaaagatgaagaaaatataccaatgggaagctaaaaacatcaaggattgaatacttacttgtgggagtgaacaataacacc

SEQ ID NO: 34149 - DNA, 381 bp, Glycine max
ttcttgtgatatatcccactgatttttatttatgcgtttatagcaatatagcgtataccgaattacgttggatgtattgaaactttgaaattgacaaaatcatcaaaatactgataatataatcttataagaattatatatgtacgaaaattttcagcctttttttcttttaaattttataatcacagcgatatatcaataaatcttactgatctatgtattgtaattgagttacgtaatgaaaattttctcttcctttcttatgtaaccagtaaattgtgctctggtcacatgtcgtcattaattaatggcagttatacttattaatatttgaacacaatactattagatctataaaattatcattcttatcacatatat

SEQ ID NO: 34150 - DNA, 434 bp, Glycine max
  unsure at all n locations
taaggtacgatgaatttcgaggtgcaagtcattcattctcctccccaaacatactcatcccagtaactggtagaattgtaaaatatagaagcttccgaactccctgcactgtacctgcctctctgctccctagaaaacttgaacagcgtggtagcaccatgaactagtttcttcgaataggccttgttgtccttgaaaacaatggaagcagatgccaaggcagcagccatctcagctgcaagatcagaacaactatggcattcagtcacagggcggtcatagtccatgtcctctgggcgcatccagcaatagtggtcattcggactgtcaccaccggaagtatctccaagcccaacctgtcaaacaagcataaaaaaccatcattgagacacatcctactccgcaccacacaacanaattctagtccaccaacc

SEQ ID NO: 34151 - DNA, 539 bp, Glycine max
  unsure at all n locations
ccccaccccccccaccacactaccccgaccacaactctacacacacntcnnnnnnngggcggcggcgctgactcgtaaaccacggaatgcaaacgnacgngcggaaccctacacncaatccgccggcacgcaagcccctcattcaccatccgccgcgcccaccacaggcagcggacaacggccgaagcacacaacacccncacacctacaccgcaacgccggacacaaacgcgggcagccaacccgactggccaccaccaccaacgcgccaaagactccgcgctcaaccagccatcgccacacaccaccgccccccgacgcacacgagcatgcactaccaccacaatacaaacgtccgccacacaaacgaacacatttcacaagctcaccccgcacaacggtggcgtctcgcgaacgaaccgacacaccccccacccgatgacgcacggacacctacacccgacccacacagaatcaccgcaacaggccccccaacaccaacacggacaaagaacgagacggatcgccccgaacccacc

SEQ ID NO: 34152 - DNA, 432 bp, Glycine max
  unsure at all n locations
tgacctaagaaccagcttttcgggttatatcagggatcttattgcaatgaagaggaaatacagcaacaaaaagggcacaataatcagcatttgggaaagaatttgaatgctgagccagtcgtactagctgtccagtcccatgttggggaagaagatgactacgacatgcagacccactctcaccttatatcggggcagagttatcacagtattgggccagattgcaactttggcccaaacatcatgcaggaggggtgcaataagcaggaggcttattctgtagctctttcggacgagcatcaggatcactctcaaatagctgatgacacaaacaaatctttaggcccaacttcgaaactcaaggggtgtaataaggaggaattattagctgtagcccanaccanaaaaggaactccagacttgtactccaaa

SEQ ID NO: 34153 - DNA, 384 bp, Glycine max
agctttatatagactttagagcttcgatctgttgagagatctcaggtagtcgttgtctaatagctttggcgcttaagacgaggccgctactatgcagagagagagtgggaaccacaaacactttctacagcatatctttagagaagtacaatctgtcaatgttgtttagtgctcagagttgactttcaacgtacaaatcaaaagaaacgttaacaacataagacaaaaggaattaataatgtcaaggcaagacaatttaaatcttcccttttgcgcgttatgactgaacttatggatgttactttctgatgatcattcttagcactcgaggatcaagtgactatttcattgcttttgtactgcgagcctgaaaaaagatgatcg

SEQ ID NO: 34154 - DNA, 381 bp, Glycine max
tcagaaaacaatagaagataatgctacagcggccgcttccaatacagctagggaagcggaaccggtgctacagccctcaataaacttgggccgagatagaaacacgacggttttcggtcggaggtatagtcctcaagcctacccttatggtttgcctctggacttcactccccgtaccgctccagacgatttgagccaagcccctaccttcgaggggcaactccctccttatgtcaactatcctctgcaacaagatgatgaaggagatgcccatctaggccctctacttcccctcaaggatccggccccccatgaattgccccaaccgaacatagttcgccatgtcccgtctccacctgcacccattaaagaattcgttcc

SEQ ID NO: 34155 - DNA, 391 bp, Glycine max
  unsure at all n locations
agctttttctcacatcgttcgcgtctatgatatgcagtcgacaatgtttgaagtagagaagaccttcaattctataacgcaacgtggcagacaaaagtgggcagttaacttgaatggccattattatcaatgcggaaagtattctgcgcttcactatccatgttcacacattattgcagcttgtggttacatgagcatgaactactaccaatatataaatgttgtttacacaaatgaacacatcttanaagcttactccgcacaatggtggcctcttgggaatgaagcgacaattcctccttctgatgacgcatggacacttatccctgacccaactacaattcgtgcaaaagggtcggcaaaatcaacaaggataaagaatgagatggat

SEQ ID NO: 34156 - DNA, 453 bp, Glycine max
ctaagcttaaggaaatcttttcttcagccgaagatgaaatattgttagctaaactacaagaaaaaaaaataggtgatttgtgttttctttatgacaactacaaagaggacaacaagagacaataacataaccacatttgcttagattttcgtcagaagggtttttttgtgaagaattctctagactaagaaagatctaaatggagggattgatgctaactaggtatgctttgctaaagaatcctgactaggtttcaatctgatagcattatcggctttcttgatggataaaataccattttcagaaggtctccacactgaaatgtcagtcttaatgaaagatgcaaggctaatgctactaactaattctcttaaattagtatttttgagatacaaaatatcagggtggaccaatattgacccacagtaaaatcctgcacaaaagaaaagagca

SEQ ID NO: 34157 - DNA, 398 bp, Glycine max
  unsure at all n locations
agctttatacgttcaatttcgagcgtctcgataagttacgggactcaatcagacatccgagtaaaaagttattgtcgtttgaatttgcacagaggttcaacattcaatttcgagcgtctcgatatgttacggggctcaatcagacattcaagtaaaaatttaatgtcgtttgaattttctcagagattcaacattcaatttcgagcgtctcgatatgttacgggactcaatcagacatctgagaaaaacgttattgtcgtttgaattagctcagacgttcaacattcaatttcgagcgtctcgatatattacgggactcaatcacacatccgagaaacaagttatggtcgtttgcattggctcagagcttcaacattnaattttgagcgtctcgatat

SEQ ID NO: 34158 - DNA, 444 bp, Glycine max
  unsure at all n locations
ntgagccaactcaaacgacaataacgtttttctcggatttctgattgagtcccgtaacatatcgagacgctcgacattgaacgttgaagctctgagccaatagaaacgaccataacttttttctcagatgtctgattgagtcccgtaacatatcgagacgctcgaaattgaatgttgaatctctgagaaaattcaaacgacattaaatttttactcgaatgtctgattgagccccgtaacatatcgagacactcgaaattgaatgttgaacctctgagcaaattcaaacgacaataacttttttctcggatgtctgattgagtcccgtaacatatcgagacgctcgaaattgaacgttgaagctctgagccaatacaaacgaccataactntttactcggatgtctgattgaggctcgtaatatatctagacgctcgaaattga

SEQ ID NO: 34159 - DNA, 365 bp, Glycine max
agcttgtagtttattttttccttccatttatatccttactattttaatatacttttaccctctgctcttcaaattgttcatatgtaactattttttaattactcttttctttttattaatttttgggctatttatttcataatattataatatttactttaacaacactatttaattagtccttaattaaatatgtttttgcctacaaaacaagaatagaattcacataaaacagctatacaatatgttcattattttatatttaccaactatttcaataattctacaaaacgctcttaatttaataagcaagcttataaacttttagctcttagctggtagcttataaactttaaagcatctta

SEQ ID NO: 34160 - DNA, 438 bp, Glycine max
tctcaaggaggtgagcttagttatgagaggggtgtgtgtagctaagctctagcttctcaaggaagttttctcaaagaagcttctcaaggaagttttctcaagaaagcttctcaaggaagctacctagtctataaatagaagcatgtgtaacacttgttgtaactttgatgaatgaaagtcttatgagacacacttcaaagttccacttctctccctcttttattcctttaatttaatgatacccccttctttctttcttttcctccattaaagcatcctcttcaagcttcttatccaaggcacattcttggcggtgaagctccttcttccatggcttattccatagtggatggtgtagaagcaagcttcattgcttcataatgatgaatcaagattgattcaaggtgttttgatgataacaaagatgatgacaaaaat

SEQ ID NO: 34161 - DNA, 342 bp, Glycine max
agctttctttggtctggaaaacatgaccatatgatctgaatcctttatcactttcacctcagcatatggaccagtgctttcaactacccacctctgaaagtcctctgtgtgcaaattatctttttcactgatgatgggaggtcaaggcctcaccagacagaaagcaagtgtcaattccttcacagtacgtaatcgaacttgacttcattaatgacgaaattacattctttttatcatggggaacattacatagcacatacaaaagataaaaagctcactaaaaataaatcaagctcatgtcaataaactaaaaaataatcaatcaactgcttatatatgatc

SEQ ID NO: 34162 - DNA, 430 bp, Glycine max
ctgttagcacaatagcacctcctttgatgcatgatgatattttcacagtgataaatatattgtctccggttgtaaaaaaaaggagggatttttttcatcaattttaattggtagcaataagtaataaagaatttaaatttccccaccttgtggctgtggactgtggtgacaagtttggtgtttaattttaatttcttcggctataaattttgaactgataagtgatatggttatatccggaacatgaacactggcaacggcataaacaaagagatttgctaaactcaggtttgtgcttgattgaattttgctatacgctttccttctgagactatgttactaagagtaacgactaacgtgacccaattaagaatagaagaagggtatgaagctattgattttcaactcgatctcctaattaacaagacct

SEQ ID NO: 34163 - DNA, 271 bp, Glycine max
ctcttagcgagtatggggggctgagcagggcaccagcatgctcaccgagacacacgaatctggaacagaatctgccttgcaagcacgcgctcaccgcgtggccgctcgctaagcgagtcatccgtcatcttccaagctaaccgcgagactggcgtagagtcacacgtcactaatgcgcgctaaccctcacatcggtgctcaacgagaggcccccgacaggatttccatataacacctgacatcaagaattggcagacgtgcggacccacac

SEQ ID NO: 34164 - DNA, 435 bp, Glycine max
gactgtatattgatttctttagtatgttctctttgtgtccatttccttcaactgagaaccccattggttggtccatacaaacattcttctctaaatcttcattcagaaagggggttttcacatttatttgatgtagctccaagtcataacgggctactaatgccatgataatcctgaaagaatcctttcgagaccagtaaaatgtctctctataatgaatgtcatatttctgagtaaattccttagcaacaagtctagccttgtaacgttcaaggctgccatgagagtcacgtttagtcttgaagacccacttacaaccaactctcttacaaccccttggtaattctacaaggttgcaaacaccattatgttccatggaatctatctcttctctcatggcattcaaccacttctcagagctatcacaacttacac

SEQ ID NO: 34165 - DNA, 371 bp, Glycine max
ttttttatagtttatgccctttgctttttgtcgcgctgcttccgtgtttcgaaattcatcataattgtgatcaagtttctcatcaggaatctgttttagttcgtctctctcttgtggatgttgtcgctcgcgcaccaaattactatcattgcctaaaacgtgcccaaaaaattgttgtaaactagtcgtttcacacattgactacgagggttttgcacgtttctttatctgggtttgctgcggcgcttgttgcattctggctcttgtatatttctttcttaaccttttctgcaatccctgggattataccatcgtattttaatatataaatatacaaaaacatgtcacataacttcgaactggctcccact

SEQ ID NO: 34166 - DNA, 436 bp, Glycine max
tatggaattggcatgatgtgtcggtgctggaacttattatattcatcatagagcaagtgaacaatttgatatgaaaaatgaattggaagacacaagtttcaaagtttggagttataaagctaatttgatttgatggttaaaagataaaaaaaaatggtggattcaaatctctctcactagtgaaaatcaacaaattaacaactaatattaacctttaaaaaaaaaaccaatgttccgagttttacttgggattgacttgattaaaaggtgggacgtccaattcagatgataacctgcctaaaatttttaatttatatgtcaaaagatctaattagagggataggatagggattaccgagtgatgacagattatctttatgcagattttcgaagtatctgcaatttatatataatgaagaattttcttgggatatta

SEQ ID NO: 34167 - DNA, 381 bp, Glycine max
ttctttcaagaggattggcaaaggggatcttatccaaggcctttatgtcctagacctcaacgacactcatgattgaaaatttactttttctgctatcaattcacatgcacattccactctttgtaacaatgctcatatttggcattctagatccggtcatctatcaaacaaactttccaatcatttgaataatacaattggctcacacttctcccctaatttctcttcttctaattgttctgtttgtccacttgctaaacttacaagattattttttcctaactctaatcatttatctgatctaccttctgacttacttcactgtgatatatggggtccctatgcccaccctacatactgacggaacgagattcttcctta

SEQ ID NO: 34168 - DNA, 418 bp, Glycine max
taataataaaaggtaaaatttgcattttaaaaatttattatcaaaatagtcaaattaatttgttggatgtaaaatataccaaaaaataacaagttaaaggttaaaagtatgattaagcctgatttaaatatgtacacatttcaattccaagggttgtgattgttttttcaaaaaaattcacaaaaccatataattgaaacaaaatcttgaaattgggtttgggacagttttcccttttttcataggttcaaacttttgggcaattgaatactatatctcctatttttttttaaaaaaagtttcaacctatcccttttatcttctttctcttttttccttcttcctttttttcttttttgtagtcaacctgctctggttcttcttttcttgctgtagcgaaagtctatactcctttttt

SEQ ID NO: 34169 - DNA, 338 bp, Glycine max
  unsure at all n locations
tgcttttctttatatgaataagaacaccgatcggactgagctgctcacgtaccgcttctcaagaaccatctggcccacaaagcacggactttttgcaagaagcacaacctcctaagatctagttagcgaagaaccgcgtacctgtgcacgccaattacaagactattgcaagtacgccatatacatcatccactatttactgatcatcgatcatncattgtgaagttacatgatcacgacaccacctaccctcttcctctacacaaatggatgccagctcacactacgatggttgctaatcgggctcgcctcttttactacgtcgcatgctgccacaa

SEQ ID NO: 34170 - DNA, 424 bp, Glycine max
  unsure at all n locations
ccgcttgagttttgattggcagaagaagaacagacgaatatcttgttaagggataattcatacgaaaatattgctaattatcagcataactgaaattgtcctatgcagatctgatcatcatgctggtgctttctcatctattggtttcgtcatctagcctattatttttatttattctgtggcgattatcaaattatatatcttctaacttctaaacagtcatgatggattctacatattgctaaanttatgttgccatgaacgtcttcaaaaggccaaaataatctctcttcctctgatgtaataaaaatccccattcttctctccctcaactctaagctctcattctctgtcctacaacaaatttttctatcttgttcaacatactgtatttcattctgacggatgcggatttgcctggaac

SEQ ID NO: 34171 - DNA, 356 bp, Glycine max
tgctttcgatacaagtgattgcgaaaaaaccgcgtcatcccgcttgatattttccaagtagcccttgaaaaattagaaaaggtggagaagattaggcattcggcgccttcaaacctcacatgttcacgtcctaatctctttgtctgcttttccatttgcttcatatttcaatattacgtcagtctcatcttttggtctgccatgtgttccgtaaaaaataaaaaagaataagacaaatgagaaaaaaaataattatttgaaaaaagttgatgcgcggcattatttttattttattttctgagtaattaaattgcatgatctctctctacatcgtatcttgggcgacccaatgggag

SEQ ID NO: 34172 - DNA, 442 bp, Glycine max
ctaagcttgaccttatagtaaacaagtcaagctgagttgttcttttataggtctacaagctgcttggccctaaatttttcaactgcatgtgatcctaaacaatataatttattgtcaaataaatcattaaacattataatttaatgataaaatgatctcacaaatttaatggcaagactaatttattgtagttttacatattcatgaactaaatttgtctttctcattattttttaaagatcaatttgttttatgagatgaatttaactattcttcctttaaaagaatgagagaaatctttttggatgaaaccaaataccactttatggttcccacgtattctcttcccatccatcatcattcttatatcactctcacacgaacagaacctgccttagctaaacgggttcaatatcacccacactctctctctttgtcaaca

SEQ ID NO: 34173 - DNA, 318 bp, Glycine max
tagcttgttggagcacgatgggagctgatatttgtgaaggcattcaggaatttcatggcagcgcatcattgcctaaaggtatcacttcatcatttactactcttatccctaaatttgagcaatcgtaaagcttgtcggagtatcaccctattttactcataggtggtcttcataggatcatttcgaagactctggcccatacaatgaacgcagtattacctactattatatctccgcaacaaatagcctttttacccggaaggaaaatccatgatggtgcggctgttatcaacgagttggtggattcgcgaaaaacga

SEQ ID NO: 34174 - DNA, 432 bp, Glycine max
  unsure at all n locations
tgagctgactctatcttggatcatttttattatgggttatattggcaacttggcataataatatggatggaattatgttctgggtgatggccatgccaaatgtttgcccaccttttatccgtaaaattttgttatcttttattctatcgtatgagtacatggaaatttatagaagttcgttggttcagtccttttattaaattttattttgctactcttgaacaaaatatatgtcattatcactttggtacaagatagccaaaagatcctaccttgaattggattggaaaggcagagggaactcttaagttgtgtaataatatggacagtatgttctttcctaaaatataaaaatatatccatacatattgttcgtgcataactgcatataacataaataagaataatagctnttanatcgttactaacatt

SEQ ID NO: 34175 - DNA, 358 bp, Glycine max
agcttattattgttacggtttcatttgtaatggctggctaaacacctttgttggggatttctaatgaacaactgatgtaattattttcatatctaattgatcttgtttcttgtgttcaatgcttcttcagtgcttaagttttgtatgctcttggtctgatcaaccatttgtgtgcctagttacgtgattttaacattgcgaaatgtattgtctccttacaacttgaatgaagcagaattgaagcttagtcttacaagacggatctgcggattaagtttttgttttaagtatgttgctacaactaatgctgttgggccaagtctaaaccaacaagacggatctaacgacacagcttacg

SEQ ID NO: 34176 - DNA, 415 bp, Glycine max
tcaaggatatcaaattcatcctgactaacaataaattatgttttattgttagtaaattataaattttggctaataaagaaaatgaaagatgaaaactgaaatacctgaatatcctcctatatcaaatccttctgagtagcagggacttccttccaagtctcgtatgtcatgtcgacctatcaccagcgataatcccaaaatatgtacttgatttcttcttgtggggaccttcggccttcccgatcgcaggatcgacgtggaccaccgatctctctgccccaggtggtctagtggccaacgattgtagtcgtgtggctttgcgtgtctgcttcaaggtagacagagattgtgatgctactgcaagaggagaacgacgaagaggaggaggcgacgtatgtggagtagccatggacct

SEQ ID NO: 34177 - DNA, 397 bp, Glycine max
agctttagccttaggttgttccatgttgctgctccccttatctttaacagtaacaagcacatttccattcacaggtttagcgacatcaacatcatcacttgagccctcactttcaatgtttccattatccagtaatatcatgcctcttttatttggacattgagaagcaatatgaccaactccttgatacctgaaacatttgatatcatgggatctagaagatgaattaatttccattttacctttaggtgcagcaaatgaatttttggacttagcttcatcttttgactttgtcatagattttttgttttgccaatttgaccttcatgaataagtggaatcaaatttggaagtactcttagctctcaattgcctctccacttgaatagatttatgc

SEQ ID NO: 34178 - DNA, 443 bp, Glycine max
  unsure at all n locations
gtgcttgagcccactctgactcttctaggcctgactccgtcattatcctctgagaaggaacttctacctcaaatgggagtactgcctccatcccataaaccaaggaatacggtgttgccccagtagaagttcgcaccgaagttctgtacccgtgtagggcgaaaggcagcatctcgtgccaatctttgtatgacaccgtcatcttctgaacaatcttcttgatattcttattcgcagcctctacagccccattcatctttgaccgataaggggtagagttatgatgctggatcttgaagtcttcgcacatctcctgcattatcttattgttcagattggtgccattgtcagtaatgatcttcctgnggagtccgtatcgacaaatcagctccttctttatgaatctaactaccacattctttgtgacattagtataagaagcg

SEQ ID NO: 34179 - DNA, 392 bp, Glycine max
  unsure at all n locations
agcttgtagctgaatactgttccagctgcagcaggaactctttataaagacattttaggactttgtcctcatcctaaggtcctccacccctccctcttagtctttttgcagtatgcaagcttacctttgtagttgcttgtagccgtatatctttagttgagacaaaagaaaaagaatgtttataaagaaaatgaatattcaataagctttaatctgaaggatatagccaaatgggcagaaattgattattcacagcatactctagctagcatgatttttaaatgggtatgattcataatcattcaaacacaatgtagatagaaccaacaaaagtgtttcacgatctgtgaattntgtatacagccaacaacagctgctagaaatctctgtct

SEQ ID NO: 34180 - DNA, 443 bp, Glycine max
tgacttgtccaatataatagattaacaggaagcatcccattggaaattggcaggcttgggagaattgatcaattttctcaatttatcatttaacaatttggaaggaaagattccatctgatggtatctttactttatttcagtttcaaacttgtcattcttagggaatccacaactctggggaacaattgcaggcatatccttgtgctatcaaaggaatggtggtgttagtgttaactcgttgacaagtgtatcaaatcgtcacaagtagtaaagttctcggaagtccgagtgtcgaattcacagggactttgtttgtacttagattaatgcaaaccccaatttaaaagcaagaatttaaagataaaattagaagataaaagaaaagataagatatttaaagataaagttagaagataaaagaaaagataaatgatagaagat

SEQ ID NO: 34181 - DNA, 386 bp, Glycine max
agctttatcttcaacccaagaaggaagtgataaggaggattcaattgaaatagacgaagatgatgatctcaatctatttgtaaaaagattcaaccaatctcgaagagtcagaggaaattaaagaagatcaaattttaaatcaaagaaaagggcagaagattcatcctctattccaaaatgttatgaatgtaatcaacctggacatttgagggttgattgcccaatcttcaagaaaagaataaagaaatctgaaaagaaagtctttaatgaaaacaagactaagaaggcctatattacatgggatgacaatgatatggactcatctgaagattctgaacacgaagttgtaaacctgagtctgatggccaagaattatgacagcgatg

SEQ ID NO: 34182 - DNA, 439 bp, Glycine max
  unsure at all n locations
ntgatttcaaattagtattatcttataatgatcatatatgtatccaatcaaatttcttttttttttcaagtacatacatatatgcctacatattaacgtgtatagttatcttaatatattattataggattagttattatatacatacatatatatatatatatatatatatatatatatatatatatatatatatatatatatatatatatatacatatatatgttttttattatacatgtatattgcatatatatattataaatagatattttggacatcatatgtcattatagcatgattttgaaaatgcttattgtcatggaattggaaacattatggtttgatcgttatatatgtgtatatgtatgttgcgtcctatgaacattgttatgaatgttatgaagatgtataaatgaacatgacgtggattaagtgc

SEQ ID NO: 34183 - DNA, 99 bp, Glycine max
agctttgttttgaatatcttagtaccctgcacgcataggttcctcccatctttggtctccatcgtcgaaagcataccgctacttcgaattttagccgca

SEQ ID NO: 34184 - DNA, 376 bp, Glycine max
  unsure at all n locations
ggtcattagaaccaatgaactcactgacaatctccttggacagaaccttctctcgaatgaaatgacaatccatctctatatgcttagtcctttcatgaaagactgggttcgaggcaatatgaagagcatctcgattattacaatacaacttcatttgcaactcttcacaaaacctcaattcttgcacaaattgtctaatccacatgagttcacaagtaactatacccatcgatcgatattcagcttctgcactaaaccgacctacaaccgtctgtttcttgcttctccaagaaataagatctcctccaatgaagacacaatagcctgatgcaaacctnctatccatgggacagccagctcaatcagcatcacaata

SEQ ID NO: 34185 - DNA, 432 bp, Glycine max
agctcgtccgggatccttgagtcacctgaggcatgcaagctttaactaatgtcttcacaaataatcatcacacagcagaagactaacaaaaccacccatcatatctcccaaaaccccatacccacgaaatttaagacagaaagaagtccacccaaacctgaattttcgaagtcccactcgtagccacgcacttcacgactccgaaaatgctctcctttcgcgatttggagcagaaatgatggccaaaggttgaagctttgcttggagcttcaatggagaatggaggagaaggaaaaagccacgtgaggaagagggagagagagagctgttctgaaattgggctgagtgaagagagagacagagttgctttttttttgggtcttaataaaagggttttctcttttctattattttattcaagctctgcacatg

SEQ ID NO: 34186 - DNA, 443 bp, Glycine max
agatgttaggtgatgcaatcctaccccgcaagggcattggatagaaaacttcaagtagattgggccaaagatgcaagagaaggccctagggttcttatgagccttatggtagatttcgggcccatgggctaagtatgagcccacttatctttgtaaatattagattaaggtttcattatttttgggccttgtatttagggctccataatgtaggtagggtaccctagaaatataggatttttcagcccttgtatttaagggcacctagactagtttttgtattacgggtagttttgtaatttcacatgtactaagtggatatttgatgtgtgtggttggaaataaatttaattgaattggtagaagcccaatccaattaaattttagagggggaggtgagcatttgcttactacaccccattgccacatcatatagttacact

SEQ ID NO: 34187 - DNA, 391 bp, Glycine max
tttcttgccacccaggtcacccaggctagctcagctcgcccaggcgagctatgctgcttcaccgccttctggagaacttcctggaaggcccaaatcggtctagttgctatttgcacccccttttttactaaatacaccccttgcctttttttgctgattctttttccgtaacgctacggaaacttacgaattacgtaacgatacttgtttcccttccttaatgttaacgaaccttacagattacgtaatcatccctctttttgccttccagaatgttacagaactttacggattgtgcactaacactctcttctaattttcccgattccacggaactctacggatcgtgctacaatgctctcttttgacttccgacatgtctccgaacttc

SEQ ID NO: 34188 - DNA, 438 bp, Glycine max
gtgaacagtgttgtttttcaccttctcgttaagcttatctgttggcttagcgagcgtccgttaagcacaacactcataggctaagcgcgaggaagactctggaagaagatgagttgtacaggtttgctaagtgcaccgcttcatctcactaagcgcaccgcttcagttcatccactaagcgagaaaggcacgcgctaagccgaaattcactaatgtgcgctaagcagtccataagaaatacttcccagagtccaagactgcggaagggaaagatgcaatctctttatttcatcagtttcctgatgaatctttgagtgaagcattggagaggttcagaggcttgttgagaagaactctcactcatgggttttccaagccaatccaattgaatatgtttatagatgggctgagacgacaaaccaagcaactgttagatgc

SEQ ID NO: 34189 - DNA, 387 bp, Glycine max
  unsure at all n locations
tttcttccttgtgatgattcctatagaagctagagcttatctacacacacctctctaatagctaagctcacctccttgagatgagaagctagagcttagctacacaccccctataatagctaagttcaccctcatgccaaaatacatgaaaataaaaaaagtctctactacaaagactactcaaaatgccctgaaatacaaggctaaaaccctatactattanaatggtcaaaatacaaggcccaaaagaaggaaaaacctattctaatatttacaaagaagagtggacccaaccttggcccatgagctcagaaatctaccctgaggttcatgagaaccccagggccttctttagcagctctagcccaatcctctcggagtcttcta

SEQ ID NO: 34190 - DNA, 437 bp, Glycine max
  unsure at all n locations
tctagccaaatggaattaccttgaattaattcctttgatagcccttttgagccttgtttccctttccttgttttgaagctcactacaagccttaaatgaagaaccatgatatcaccatatccttaaggaattttggagctttggaattgttttgggaataagtgtggggggtttttgtttcattggataacttgttttgttggctatgcttcatgatgtattttgggccatacttgatgtacattgtatattggttaaatgttggacatgcaataaagttgagtgaataagatcttaaatggcacaagaatgatgaaactcttggttctactctntatgtttaaattttatctttacttctttttattttcttattntttttcttaatatgcacttattccccattgctcctctattcctttgcgatttagccactt

SEQ ID NO: 34191 - DNA, 385 bp, Glycine max
ttctttcattttgacattaaggttctctttttgaattaagcaacattgaaaggtagcagtcttgacgttgaaatgtactccggtttgcgcaatttatattcacaatctcaaaatatcttagttagattttaaaatggggcaggattacattaaatctttcaccatattttatattctctaatcttttgatttttgttattgttctcttttctaaccatctgtcataacgattgacagatcttgaaaactcttttattttctgatcttcggtcaatactcaatcctgcttcctctcttgctacgctgacgccaacaaacctgttcctatggatgatcacaacatactgagtataaacagcggcagcatccatggttctcctggtcc

SEQ ID NO: 34192 - DNA, 416 bp, Glycine max
tgttgaatctaggatttgtgtcatggaattcatatgctgtcattccataagcattgctgaatggatgcccaccctccttaactgaatctgtcaagtggaacctacaagaatgcagtcctttaaactctctatctaagacttcactaatcactaaccactaattatttataaaaaaaaaagttacgttgcaagtatatttgatttatgttgctggcaatctttactttatagtgacatataaaattataaatatcattacaaattctcatttttaggtgacaatctttcctttataggcaacattatacgaaagaacatatatgagaaaaggctggtatagaaccaattaacgaaaaaatgacaaaatcggttaaggtagtaattttgatacgtacacaagagatgcgactgaaaaa

SEQ ID NO: 34193 - DNA, 380 bp, Glycine max
atgatgaattctgacagactcagggcgtgtcgatcctaactacgatgatgagctccggctcgagatactgactcccctaccgagtcaagatggcctcacgatttacgacagatgtgcacctccgatcgatgaatcatgaataatgctctcgatgatccacgaatcccgacacgaatctttcaacgatcatactcttaactctttcacacaatttagtcccatacgaacgcttcgcaggccctttactcaccgagtctctactttctactaatccatcaccacctcattgtaatcgactaccaccagccaagattgttctacaacgctttcccttatttacaccgctcctctgattcaaacggcgtaccgactccaccgcc

SEQ ID NO: 34194 - DNA, 352 bp, Glycine max
  unsure at all n locations
atatagcgataaattagtacgaaactcttttcattnttttgtatcagatatacagtgtgcattagctcatctcatcataatggattcacgactcaaaagatttactgtaggtctagatcatcaagatcctaggttaattgtcaaccagcatcctttctgactgccttactgtgctaattttctgatatattagtatctttctttcgggcctgtctttctttgatcaagccaaaagcatattttaatgacagtgaaaattcacattatggagttatcttgctcttgacctacactacatacctgattctttacaaaaagtatacatgcctcaaaatattgataatctgtatat

SEQ ID NO: 34195 - DNA, 322 bp, Glycine max
  unsure at all n locations
ttcttgtatatgttgagcaatagtcatcaccgcgattgaaatgcccaaaatttttcccaattcacaccattgtcacttttattcaacatatgatggctatgatctgctatatgttttagatcaataaggcggcttgacacaaaactgttaacaaaaaccccaccgttggtaatggtcaagatactagccaaaaagtgggcaatatgaaactctaacacctgtcanttcatctttttggcctccttatgactggagggttccgcagacctattcttgtgatcacagctttgtcttttgccttctgcactgtctctctcctttg

SEQ ID NO: 34196 - DNA, 410 bp, Glycine max
tcacatgcttcactctctcttgtgtgctgcggctttggattatggacactatcttttatacttggtatcaagtattggattgcgtactttcatacgatgaatctaggagaggtgtcctttaagagacatcgatacatgggatctgctttatttttctcttagcagagtgttagttacatgcatgctgtggttcatatgttacacagagtatttcttgttctacaacttgtgagggtcatccattctatcacctggaggaataagtactggactccagatgaagaagggaagcagaggtacacattatttctgcaataattcatagatgaacctgaagtcaaatattacatcttgttctgaggatgaaaggaacatacttgacttctgaatcagaattgagtacaggttat

SEQ ID NO: 34197 - DNA, 363 bp, Glycine max
agcttctaccatgccaaaacgaaggagacttagtatggatttaagaaaacaaagctagtaacagtgctctgggtcaaacacccacattactacatgaaagagctaagagtatttcgggttttacaaaggaacgtaatttggaaattccgaccacgccaatgtgaccggggttcagtgtaggttacaaaaataacatgtatttcatgaaaggataacgtttacaaagtctctttctctaaggtttttcaaaggaagcataagacatgcaatggcggctgcaaagttagaaaagatgcaaagagaagatggaactaacaagaaacaagcatagaaccatggttacctcgaaagaaaacaaaagat

SEQ ID NO: 34198 - DNA, 423 bp, Glycine max
  unsure at all n locations
tattgtgtggtgttagcagcgcataagatgttgagtgctacagatattctagaaattgatacatttagaaaagttggtataaggccttctcaaatgatgggtgatggaagcttgcttgtgggacttctatggaggttggatctttgagcttcaatgaagtcctttaatggtgatttttcaccatggagatgcagcgaaagacaaaggagaagaggtgagaggaggcgtcatccactaaggaataagccatggaagaaggagcttcaccaccaagatgagccttggataagaagcttggagaggatgcttcaatggaggaaaagaaagagggggagaaagagagagggggagcacaaaattgaagaaaaacagggagagaagtgaactttgattgtgtctacaagactctattcatanacttac

SEQ ID NO: 34199 - DNA, 341 bp, Glycine max
  unsure at all n locations
agctttatcacttttcacacagaggtcagattcgggcacataatatgtcgagatgctcggaattgaaccacggaagctctcgagtaattcaaatggtcataacttttcacacagatgtccgattcgggcgcataatatgtcgagtagctcgaaattgaacaacggaagctgtcgagaaattcaaatggtcataatttttcacacggaggtcacattcnggcacataatatgttgagatgctcggaattgaaccacgaaagctctcgagaaattcaaatggtcataacttttcacacggacgtccgattcacgcgtatcacatatacagacgctcgaaattg

SEQ ID NO: 34200 - DNA, 426 bp, Glycine max
  unsure at all n locations
acagcttgaatcggacctcagtgtcaaaagttatgaccatttgtatttctcgagagcttccgtggttcaatgtcgagcatctcgacatattatgtgcccgaatctgactttcgtgtgaaaagttatgaccatttgaatttctcgagagcttccgatgtttaatttcgagcatctcaatatattgtaagcctgaatcggagctcagtgtgaaaagttatgaccatttgtatttgtcgaatgcttccttggttcaattccgagcatctcgacatattatgtccccgaatctaaccttcgtgtgaaaagttatgaccattcgaatttctcgagagcttccgttgttcagtttcgagcctctcgatatattatgcgcncgaatcggacatccgtgtgaaaagttatgaccatttgaatntctcgagagct

SEQ ID NO: 34201 - DNA, 395 bp, Glycine max
  unsure at all n locations
agctttattttgcgggttcgggagacaaaggtcaagcgttcgcgatatgcgaggatgatattccgagtactttggatttggtacgaccatgctctcctgatttccagctgggaaattggcgagtggaggaacgccccggcatttacgcaacaagcataatgtaaacctttacggttttttaaagctctatagttgggcctacgctttanagttttcattttgttaaggctttgtgtcctttgtgtttgaatttataatacgaggatctttcttcatctgttcctggtctctacccattctcattcatttgcatgtttacttctttttctaaaacggcagattcgatgacgagtcccccgaaggtactaatacctgggacccgtctatcaacttcg

SEQ ID NO: 34202 - DNA, 442 bp, Glycine max
  unsure at all n locations
tgatttgtgagttgattntagctttagtttcacttggttatttctcaactcattaaaagagaattttcaaagtaaatgtccggttgagacttgcccttttgatgattaaccaaggttacgacataaacaatcggttgaattttattttgaaagtgattaaatgagattacaatgcaaacgatcggtcaaaattcattttaaaattgattaagtgagattacggcttaaacgatcagtcaaaactcacttaaaacgaagaaaaagaatactgaaagtagacgagacgaacatgaaaacatacgaagcaagaatcgacgcctaaggatgcatagaatgaatccaaagcttcgaaatcaaaaactaaccagttgaagattgacgaacgatgaagaacagcaaagaatattcacggaattggtcacggaagcgttacagaagcgcc

SEQ ID NO: 34203 - DNA, 394 bp, Glycine max
  unsure at all n locations
agctttattaacttgttgtaatcaattacgaaggacctataatcaattaaaatagagagttttttcctcttgaagaaacttttctaacttagaactttttttcacactaaccatgatgatgaatgatgtaaccaatacaaatgccactcaagggagttaggcatgtaaaactcaaaacatcttcaaaaattcttcaagcttttccttgaaaggttgttcaccatattgctcatgttgctcatgttgttccccttatctctaactatctccccctttttggctctgatgatgccaaacttacatatgacgttgagtgcatttggagggtttgagtcttgagattggagacttgatccttaatcttatcctgacnaattcttaacacttacgaaga

SEQ ID NO: 34204 - DNA, 420 bp, Glycine max
gtctaaattgacgctttagatcatttttattatgctttgctgagcaacatcttcaaaattgtgattaggacatttcctcagcaatgatttgaattactcctatacttcacaaaagggttcttttgatcctttcctgaatgtagaaatatctgactttacattgatatacctagatggagggaaaaatctatcaagaacttttcttccactatgctccagcttgtcaaactttgatttggatgagattgtagccatgctttggctttccctgttaaagacaatggcaataatctaaggtacacaacctcctcttcacctttaggaatgcccattgtgccatattgttcatagaaagtagatagatgagtatatggatcctcattaccagcacttgcaaactgatgtgcactgatcaaactt

SEQ ID NO: 34205 - DNA, 532 bp, Glycine max
  unsure at all n locations
accacgccacgccacctcttccccgtctcttttcgtcctcctccttctctcttantcactcatcaccntcgcggcgccgccnnctgagccttgatacattgganatcnnaggggtaccagggatcctatcgagccacctacacgcatgcagcctatcgtcattttttagtaagagggactaagcgacctgaagtttattgtccacctgacactcagcccgcaaactgatagacgactcactttgcgagcctgatacgcgctaattgtgtgcttgccgaacatatgtctgctcagattcccctttactcgataatgccgctggtgatgggcttaaccggcgatgcgcaccaatcccattgcgccaccttaccgtgatgagtcctttgtcacaacttcaaaaaccttctatctactcactctacacaacattaacataattccatccgaaaggctctactgttacagatcgacccacgaatttatctccacgtacaccaaaacatcattgcagactattacatttgaaacatct

SEQ ID NO: 34206 - DNA, 431 bp, Glycine max
  unsure at all n locations
tcanaccacagcaacacacaatctatgtatccaaaacctctcattttaatggattatcaaggtttgagaagtgaaattgagaatggggtaaatttggagtaaaacctcacctcacacaagtctataacatcaatttaaacttgctcaactggatttacacctaaaatttcaccgaatcaaaatttgactcctcaacacccaattttaccctagaaatggctctttgatcactttggccatttgtttttctctcttgcacagcccaaactttctcataagtcctaaatgacatttcaaactaggattaactctgtntaacctccaaataccactaaatgcagatttggacttccaactttcaaagtctcactctatattcactcacaacaccatactctcaccttctaaccctaggttaactctacccttca

SEQ ID NO: 34207 - DNA, 397 bp, Glycine max
tttcttattgagtaaaataaagcccaaagagcaggaataattaaggaaatcagagctaattgagaaaagcaagctaattgaggaaagaatggctaattgaggaaagcatggctaattaaggaaataagattaattaaggaaagcaaagttaataaaggaaagaagacttattaaggaaagtagaataattaaggaaaccataattaattaaggaaagtaaaggcagacttggtgtaaaaagctcactaatctgcacctataaaagaaaaagagaaaagaaggagaagacacatagaaattccaagagaatataattcctcatagaacgaaaaggctagaagaaggagaagcaaacaataggagtcattccttccctctatctcctttcttatctttt

SEQ ID NO: 34208 - DNA, 433 bp, Glycine max
tggcagatagtttagatagtactcgacgaaggatcactgctttgtttgcaactgaataagaataattaaacaaaagaatgagaagtaagacaatggctaaaatacataacactaggcctgtaaacaataaaatttatgatataaaagtacatgttactcttgcagatcaaaatttagattaaatcctccacaccagtcttagtctatacatgatggatattaattagttagtgaggtaagttggtttaacaaataaggcatgttgcctattaatcttgtcgtttgtgagagaactggggcctttgggcattgggaagtccaaacactcgaagttctacaagtttaaatctattattctttctgataagataccatgtttctaccaatatgctttagcaacacagacattcatatacatggaccaccataacac

SEQ ID NO: 34209 - DNA, 393 bp, Glycine max
  unsure at all n locations
tttctttcaacaagagtcttcacaaataaccatcatgaagcagaaaactaacagaactacccatcatatctnccaaaatcccatacccacgaaatttaagagagaaagaagtccacccaaacctgaaatttcgaagtcccactcgtagacacgcacttcacgactccgaaaatgctctcctttcacgatttggggcagaaatgatggccaaaggttgaagctttgtttggagcttcaatggagaacgaaggagaagagaatggcaacgtgagggagagagagagctgtctgaacagtgtgggggctgagtgaagagagagaaaagctttttggttttaaatacaaaaggggctttctcttctctctattattttatttaatcaacgccacatg

SEQ ID NO: 34210 - DNA, 433 bp, Glycine max
ttgatgcaacatttggagaggttaatgaaacatcttgttgatgcgctccatgagaggttggatcaaatggagaatagagatcataatgaagaagaaaggaggagaagagggaatgatggtgttcctagacaaaaccgaattgatggtattaaactcaacattcctccatttaaaggaaagaatgatccggaggcctacttggagtgggagatgaaaatagagcatgttttctcatgcaacaactatgaggaggaccagaaggtgaagcttgccgccacggagttttccgactatgctcttgtgtggtggaacaagctacaaaaggagagagcaagaaatgaagagccaatggttgatacatggacggagatgaaaaagatcatgaggaagcggtatgtgccggctagttactcaagggacttgaaattcaagc

SEQ ID NO: 34211 - DNA, 395 bp, Glycine max
ttcttatgctttccaagacctccctcatccgcggactgcatgcatatgtgctgctcttcacccccctgatcgccgacttccaaccgaccttggtgctgttatatagttttccagccccaaagcttacaaatctgttttaaatccaagcccataaataaaataaaatcaaatctagataagataagataagatctagatgagatcaaatctaaataatatctagataagataaatttttgtagaataaaatagtctgccctcttcaagtccaaactcaattctggattcaagtccaatgcttcattaattcctgaaattatattaaaaacatcaaattagctgaatgggcccaaataataaagctgcataattaatttgacaattaagactaatta

SEQ ID NO: 34212 - DNA, 428 bp, Glycine max
tctctttctcaatcaacctgtctattgactaacttttctaattaatagttcacatacttgttctttctttgtctaacatacatacttgctcaaacttatgaaaagaaacacaaattccatcacaatcatgcatttaatccaaaagcccaagtgattaattaaagacttcaagatcaagcatcaagaatccaatccaagattcaagattcaagagaagaaatcaagaagcaacaagtcaagacttcataaaggataagtattaaaagaatttttcaaaaaccaagtagcacagtttgttttacaaaagaattttctcaaattttctaagttaccaaagtgattactctctggtaatcgattaccagttatcagtaatcgattactagtgaccagtttggttttcaaaatgttttcaaatgatttgtaac

SEQ ID NO: 34213 - DNA, 248 bp, Glycine max
ggataaggcggcggaagggactacttacgctcctgactatgacagcccccgctttacgagcgctatacaccagctagcgcttcgacgccaccaagggatggtcgtttcttcgggagcgacgccgttacctcagggacgacgagtctactgattctcctgatgaaacagggccccggcgcgggacatcactggttactcccatggccaagttcgatcaagacactactcttgagtttatgcccatgctc

SEQ ID NO: 34214 - DNA, 412 bp, Glycine max
acatctagaggtgctttccaatctgttcttttaccacttattctgccttcttttattttcagagtgggaatgcctctgacagcacctttgtcaatgattttcttcatgcctcttaagtgcagatgtcccaatctttgatgccatattctgacttcatcttctttggaggatagacatgtggaggagtaactgctttcttgacgtgtccatacgtagcagttgtcctttgatctgctgcccttcattagaacttcactcttctcatcagtcactaagcattctgactttgtgaagcttacattgaatccttcatcacacagctgactgatgctgatcaagtttgcagtcagtcccttcaccagcagtactttgtccagactatgaagtccatcatggactaactttcccattc

SEQ ID NO: 34215 - DNA, 377 bp, Glycine max
ttgcttgtggactataccttcgaccgaacacggtcgtgtttctgtctacgcccggattcaaggcgggctgcagcaccggctccgcttccctaactgtactggaggcggttgccgtggctttatcctctatggttttctggagttttaacatgacttccaagatggaagccatttgatcttttaaggccgatagatcggccttcatctgttcttgcacgcccttttcattatccatttttttggatcgagtgttatacgggtgccttggtgttttcttaattatgatgaaattcctaaagaaataaacaacagtgagtatgccaccaaaacatgagtatgcaaatggatgatcggagcacttggatccaccccaagat

SEQ ID NO: 34216 - DNA, 422 bp, Glycine max
  unsure at all n locations
tcacgtctacgatcgttgtccactataccacctggtgttgagagaccagtggtgtatgttgatcctgctacagggaaggccgatggtccccacaagaagaaattaagaacatatttggggattgtggcgcgtgataaggtggacatcacctacgagaactggaaggaggtccctactgctcagaaggacctaatttgggaggatattcaggtatttctcttttcttatttgattgtgtgtaattaatagccaaaaaatttcattattgtaataaataaactttgtttcatgttgttaggcggaatttgatatcccagaggcttctgacagtaggacaaaaaggaagttactacagaccatgggggagagatggaggcagtttanatcagacctcacgaggaaatgggcccttgcagccgatc

SEQ ID NO: 34217 - DNA, 381 bp, Glycine max
  unsure at all n locations
ttgctttggttcttcttcaaattaaaacccgccatgttgttcttgagttgggttgaatcacactcctgtaagtatatttgttactatatattgtgctaacatcatatatatgcatgagaaataaaatgacttaacaaacaaatgctatatctctgaatacctgaatttgatgccctcctgatattgcttgtgactggaggatangtgatctgagaccatctatgtcgttagaactaggtcttagccgtgactctccacaactgttgtcagtttcatgaaattcagaaggtcaccaaaaataacaaaaaaaaaatgctttagttccatcactctcaagagatgtaccgcgtatcatataaaatatatagtatggtagaaaat

SEQ ID NO: 34218 - DNA, 411 bp, Glycine max
tgtgcattacgcaatatgccaatattcatgtccaaaattgacaccgttacaattttgtcacgacattaagaagatagaaagagtaaatgaaatctaatcctcaaaagtatgtatctcattttcattttcgtcctcaggtttaatgaaatgagaaaaaagttctgtgtaaaagcatacacgcaaaaataacgtggaacattattatttaaaaaaaacactaaatataaattattaaaagtaaaaaagtataaattctaattaccaacatcttttaaaacttaaatgtatcatttcttaatttagcatcttcaatatatatatgcaacaacgcctactaaaatacagtttaattttatttaaacgttacatctcagtcaaccacaacttcttaacttacacctgatatatttt

SEQ ID NO: 34219 - DNA, 397 bp, Glycine max
  unsure at all n locations
agcttagactaaatgtacctaggtacgttggcgatggacaacaaaaagcgagcagtcatggtcgtcagcgcgatggagaaagcttagatgcagaacacggagaagaagagagcgcgagcaatgtaggtcgtgtatgatataagttaaaatgtaattccaacatcgattttcaatacaaaaccgatgttaacaaaatgatgttaacgttaacatcggttttcttctanaaactgatgttaactgatcatatgttaacatcgatgttcaaaaaaccaatgttaacgaacataggttaacatcggttttcttcaaacccgatgttaactaagagacattaacatcgattnttccaaaccgatttaacaaattaatgttaacatcaatcttacaagaatcg

SEQ ID NO: 34220 - DNA, 438 bp, Glycine max
  unsure at all n locations
tatcgttagtcaagaatgatgcatctaaatacatgatattatgattcatcttgggtagaaagatttatgggtagacaggttatgcactgctaaaactaatatgaatttatatgataccatgagtggatgttaatttatcatgtactcttttttacactctaaagtgtatagaagctaaatcgaagacttttacactatcaaataataatataacaccttatttataactcttactagtattatcataacagtgaatgatgttcagtagtggaagaatgattttcagtcatgcacgattggttgataggataaattatgctgtgagtttatgctaactgaattatataaaatgcacgttctcaaaaaatagccattgctgtcattntattattccttcgattctggttggatacgcttgtgctaacagaggtataataa

SEQ ID NO: 34221 - DNA, 321 bp, Glycine max
  unsure at all n locations
agcttgtatatttccccaatttatggttattttgtagcgatttttgtaaataaatcttgttttatggttaatgctgcctctagaacatttccattggatttaatgatgaaatatgtgcattctcgggtgaaacagaggctaagttttgaattgcaaaatgtagcagttgggctaagctcaacagttgggctaagcgcatatccaccgctaagcgtantttcantgcgcttaacgcaaaggagaatctggcagagcatcagcatcaaagctgcgcgctaagcgcgacatcaatgcgctaaccgcactacgtgccttcaccca

SEQ ID NO: 34222 - DNA, 434 bp, Glycine max
ctacaatttgaattaaaacgttcaataactgctggtattcgtttaccatatatgtataatcgattacacagtgcaaattttgaattcaaattttaatagctgttgtaaatcagtttttggccactggtaatcgattacatcctctggtaatcgattaccaaagagttaatctcttgaaaaagactttttaacttaaatttcttggccaaaccttttgctacttcaataggaattcccttcctattttaatatactctttctaagactctagaaactttcttgatcatccatcttgaatatctttgtcttgaataaagctttgagaaacatgtaaccctttggcaagctttccctttggcatcatcaaaacattcagcttgatcctttgtctacatagatgactctcaaaaagcactctctaaaagataagatcg

SEQ ID NO: 34223 - DNA, 373 bp, Glycine max
  unsure at all n locations
agcttatgttcattttcaaaggatgttgtttgctctacatctatactccaatgatcctagatataccaatttaagtcaagtcaaaagatataatcaattccagggatgatcaattaaagattaactaatttatctgagattttccaaagagtttgatcatgcattattctctacctaggtctaccaaacataaacaaatgatcaccacaatacatttgattaancatatgattgatcaatttccaattaaacaataataaaaaggtagataattaattaatataaaaatactaaggaatttcattaaaaaaataaaggattacaattagaaagttacatcatatcccttagactaacgtgactagctatttat

SEQ ID NO: 34224 - DNA, 443 bp, Glycine max
  unsure at all n locations
agcttgatcaaaacaattatctaatgatttcaatccactcattatattcaattgctcattcaaatcattctcaaacactcatttcatgcaaaacaatccactgcatatcattttcaatcaattcactattcaaacacgcttttggtacaagtaaacaactcaaagtgctgaaatttaaataactaaaatttaaaataactaaaatataaaaactgaaattaaaatgactgaacataaatcataaaataactgaaaataaactaaaattttcaagatgcacaaatttaaatgtcctgctcctgtggttgctcctatgcatgctcattaaggtccaacacctgagcagctggtgaatcctgagagataggctgctctaactcagatgctagtgcagatggtacaacatcatcangtatgggtgctagggatggctctgggatctg

SEQ ID NO: 34225 - DNA, 378 bp, Glycine max
agcttgctttattcttctgcttcttgctaaaagagtcaaatatccattaatgtatatgaacgaatcgctcgtgggtgtcgatttcctaacacgctggctgtacttgacataaacgccaagcgaatcataaataatacctcctcccgtataatttcaagaaatcaggatatactaagactctagttgttcataattctcacttgtctaaactcttttgtattgaaatttacacatttaataaattaatactcgcagctgactaatgtggtacatcattctctacacaatgtcttcacgatatttatactctctctctgcacgatcccatcctctttaaacaagcactctttcggtacaacatacttatgcccaatcact

SEQ ID NO: 34226 - DNA, 399 bp, Glycine max
  unsure at all n locations
tactcaagcttgttgatgagactctgagacggaggaatctctttgattctgttttattatgaccatgcaacagtatgtatgtttaagagggatatgatatttttacattgagaaattaaaaggtcatctgattttgttgggtatattagaggtcaggtatacaacaatataaaatcgatttgttgattttatgtcaagtaaatcctgtgtggatagggaaagcctttctgaatacctacttgatcaccacatccatctttanaaggaaaattagttgcgctcaaattttcagagatgacattatgctctgtgattatctttttcattgattgaaagtcactaatgatatatttcatatcctttatttatgtctattaaatgctgatgacgttttgccgt

SEQ ID NO: 34227 - DNA, 317 bp, Glycine max
  unsure at all n locations
gatcctataagtcgantgcacgctgcacgcttttttttgtgtttgtaacatcgttgcaagctacacctttccatcggcaacactcacctttctttctaagacgaaagccttgaacacggatctttgaagctttctttcatattgacaagtgcttggctctcttcttcattgcagacaacagagaaccaccccctggaactggaagaccacaattcacatgcaattataacgataccacacctcatacccgccgagctctgcatgctcgttcgttctgtatcccactcaaacaatttgatgcctgtgatgatcatacg

SEQ ID NO: 34228 - DNA, 373 bp, Glycine max
  unsure at all n locations
gcctaattcgtctaagagctcgacagcggcgggcattggatatcgatcacgcaccgngatngcatttaaagctctgtagtccatgcaaaagtgccatgaaccatcctgcttgcgaactacgagcacagacaagacgggtcctttctagagcattgatccaacctgcgattcaatctcatgtttctggtaatgtggataacgatagggccgtacgctgactggcgcaccttgcttcatgatgtgaatgtcgaggtctgtttcgcgggccgtcgtcatctaataacggggctcaaataatgcacgaaaatgatcaattcaagattggatacgtgcgtggggagacataccactctgcggtgcgttttctaccact

SEQ ID NO: 34229 - DNA, 527 bp, Glycine max
  unsure at all n locations
cacacgcaccccaccgcctccgcacgccaccgatagcccaacactaaatcaacaccacatanactnnnttnnntnnggacggaccgcngctcgacntcgtanaacancacanannnaaacanannnggnacacgccgcacacaaaaagcaaccagcacgcacgctttcttgtgacaacacaagaccaacaaccgccggctaaggacgccgcaacaacccaccataccaccgacacaccaaccgaaaccccacccaacccaaccaacgaaacgacgcgcccgacacggcgcaaacagacaagacgcggcccgcgacccaaccaccgacgcccacacaacaccacgtccgaaaacgaccacaccccccacccacccccctccgcccacagcggacccacaacacgaacaccagccaccagcaacacacgcacgcaccagccccacgcaactacaaccaccacaccaccgcaaccccggacacacaccggacacccccacacaacaagacacagccccccaccacccacc

SEQ ID NO: 34230 - DNA, 542 bp, Glycine max
  unsure at all n locations
acaacgccaacacgagaacaataaatgaccgggataacggatgacgaaccacataaagactnanacaaccgcgagacaattgatgcgtcgtagccccncacntaaatannaaaacnnaagcanngagancggaaaaacgccacacagcaaagaatttcattatcccccggaacgcggaccaggggggggagagaagcgcaagacacgccaagcacagaaggccagaccaaacgcccggcacaaaagccgaccacaggcgcaaagaggaggccaaacaccagctcgagcgccnagcgcacagaaggacgacaaacacacgacagcgagcaacggaccaacgcgccaaccacgcatataacacgaacagaagcagcgcgccgaaacagacgaacaggcgcccatatacaaccagaacaacacaccacgcacaaaactcaacgccgcgcacaccacacgaatgaagcgcaaggggaggcccgaaagccacaaagaggcgacgaggagggaaaaaacccgccaaagcacgcaaaaaaatgaacaac

SEQ ID NO: 34231 - DNA, 234 bp, Glycine max
  unsure at all n locations
ttgcttgtagttaattcaaacgacaataacttgttaatcggatgtctgattgagtcccgtcatatatcgagacccttcaaattgaatgctgaagctctcagccaattcaaacgacaataactccttactcgaatgtccgactgagtcccgtcatataacgagacgctcgaaactgaacgtcgaagctctgacccaattcacacgacaaccactttttactccnatccctgattg

SEQ ID NO: 34232 - DNA, 428 bp, Glycine max
  unsure at all n locations
ccgcttaaacattcaatttcgagcgtctcgatatattactagattatatcttacatccgngtaaaacgttattgtcgtttgaattcgctcagaggttcaacatttaatttcgagcgtctcgatatattacgggccttaatcagacatccgaatacaaagatattgtcgtttgaattggctcagaacttcaacattcaattttgagcgtctcgatatatgataggactcaatcagacatccgagtaaaaagttattgtcgcttgaattgtcttagagcttcaacattcaatttcgagcgtctcgatatattacgggcctcaatcagacatccgagtaaaaagttattgtcgtttgaattggctcacagcttatacattcaccttcgagcgtctcgatatatgacaggactcaatcagacatccatgtaa

SEQ ID NO: 34233 - DNA, 331 bp, Glycine max
ttttctttgaatggcgttccatccataagaatgaacattttcattcatgaacctttatcttttaatgtaatctactactttgcgaagtgaccatcaaagacttctattaaaaaactacactacaaaagctctcattgtacaattgagtggtcaatgacctttgataaagaaacacttgctagtaaaagttgcgttttataaataaataaataaaatcatttttatccgtttctgcacactctgaaatcgactaaaagaaattaatatacgtctgcatatataccttacaaacttatggccactcctctcagttcacaagcatatcacatac

SEQ ID NO: 34234 - DNA, 404 bp, Glycine max
  unsure at all n locations
acctccttaacnttagacccaaaatagccacaacagaacaattatgacctctccagcaacaagtacaatcctgggtggaggaatcatcccaaccttagatggtcgaatccttcacaacagcggcaacaacaacaacaacaacaacaaccttattttcagaatgctgctggcccaagcagaccatatgttcctccaccaatccagcaacaacaataacagcaaacagatgaggcccctccgtaaccttcccttgaagaacttgcgaggcaaatgactatgcaaaacatgcagtttcaacaagagaccacagcctccattcagagcttaactaatcacgtgggacagtcggctacacagttcaatcaacaacagtcccagaattatgatagattaccttttcaatc

SEQ ID NO: 34235 - DNA, 472 bp, Glycine max
  unsure at all n locations
cggaccggcgntttgactcgatgacactttatanaggcaattctatcttcgcacccggggatcctgtatactcaaagtgcacgcatgcgtttttatgatattataacatgatagacactagattctgtaacttgcctctcactgctaatgaagtagtgaagaacaatgcggaaatgacttatgcgaacagctcatcatgacatggggattgccatacatcaacctattgcagatactgatataactatcttatgaatcaataacattcgttgactaatactgaaaaccacttatattattaataaattctcattcgatactaagtggggccactaatgattactttattgaaattatcattatatgcgccacttaataccccacctatatctcaagctttatcctctttgagacttctcgaatctggaatgttatcttgacccaggcacatcactatactgatcttagccgc

SEQ ID NO: 34236 - DNA, 369 bp, Glycine max
agttctagctgtctaggaacttagacgttgatgaactttgttcaacataaattgagaagtattcctagaagccatcttatgaaagatagacactccgaggtactttcccagatccttagtccacgccatacccatttgtccacttagttgatccttgactcgagcctccacatttttggaaaagaacattcaacatttctccaacctaattttctgcttacaactcttgcaaaacaaattccaaatattcctgattgaatggacctgctccactaaagccttcataaataaaataaggtcccatgcaaaggctaagcgagatataactggaccatgtctcacaagacgaatatggcaccatactctttg

SEQ ID NO: 34237 - DNA, 360 bp, Glycine max
  unsure at all n locations
tgcttatagtatgcccgagtcattcatccctatgagatgttgttgaagtattggcgatcagaattgccattccttggattataggattgaaccaagctcatgctcttacaaaaaggttcatcaagtcaagttgaaatacggaagtaaccgtcttgcaaaattggggcaaaagatgaatcgagtcacatcactgcttcatctactgccaaacatatttangattgttgatgtccttgttacttncagtttcaccttgacaaagttgtcatggaccatgttgaaaatctaaattgattcaaccccatatcctgcgtaaaaattcgcaatacttcaactgtacatcattcgcatgcatccatg

SEQ ID NO: 34238 - DNA, 437 bp, Glycine max
  unsure at all n locations
ntgagggtgcgcagcccaccatcttttcatagtagagtaccgataatgtgtctaccatcacgattatcgtctccctttccattattgggggtaccacctgngccgccagatccctccaccttttgggcgtgttctttgaatgatccgtccccctttntgcaaatgttctgtagttgcatcctatccagaaccatatcaaaattgtattgatactgcctaacaaaggcaaccattangtccttccaagaatggactcgggaagattccaagttagtgtaccaggtaacagctaccccagtaagactttcttggaaggaatgtattancaattcctcatcttttgcgtattcccccatcttctgacaatacatctttagatggttcttgggacaagtagtccccttgtacttgtcaaggtccagcaccttgaacttggg

SEQ ID NO: 34239 - DNA, 323 bp, Glycine max
  unsure at all n locations
aaacaaacaagggaatctcgagtccaatatatctatcgcttaactcttaaagttcattctcaatcaatcgatacatatctcaattcgaacgagaacaacctttaaaactgtccactttacactttgatctatcttatataatcaagggtacataatcacttccgttgtcgaacgcgtcatctcgctgactaatgtctcccttaaacatgaaaaatacaaaatctataccctcaacacgcaaaaagcgncactcacatatgcgagcgctaactttcgtccatcacccctcatcaaacaatctactttacatatanggacaaatc

SEQ ID NO: 34240 - DNA, 370 bp, Glycine max
actcagcttcttcattctgcatcaacgaatcactctttttcacattggactcacccagaacccagctaatcatatattacttttatatctcatgagagaggattgatcttcatctcatatgaaaaattgctgcattctacctgctatgttgcagatatactagcttaaccgttggagaagaataaaccaacaagggacgggcgaggaaaaagagaggaaagtcactggttccaattctttctaactttatttttaacaaaattaacaaatcaatatctaatatttattgataaaaaaattgttcccatgctaactaattgacggacttcaccatttaattattgtgaaatatatactctatatttacaca

SEQ ID NO: 34241 - DNA, 386 bp, Glycine max
  unsure at all n locations
agcttctatagaaggttcgttcctaatttctctacaattgcatcacctctcaatgagctggtgaagaagaatgtggcatttacctagggtgaaaaacaagagcaagcctttgctttgctcaaagaaaagcttactgaggcacctgttctagctcttcttgacttttctaaaacttttgagctanaatgtgatgcctctggagtgggagttggagctgtattgttacaaggcgggcaccctattgcttattttactgaaaaacttcatagtgccacccttaactaccccacctatgataaagagctttatgccttaataagagccctccacacttgggaacattacccttgtttccaggaatttgtcattatagtgatcatcaatca

SEQ ID NO: 34242 - DNA, 423 bp, Glycine max
  unsure at all n locations
tcttatccaaggctcatcttggtggtgaatctccttcttccatggcttattccctagtggatggtgcctcctctcacctcttctcctttgttttccgctgcatctccatggtggaaaatcaccattaaaggacctcattgaagctcaaagatctaacctccatagaagccccacaagcaagcttccatcactcaggttgatcaccatggggggaagttgcctgcgcacgacagggtgaccttgatacttgcttcctagttttcctaagtgagagtgtcatgtggacacgcttangctatttcctgacgaatgataccatattgcattttagagttgagtcacgtgcatgcatcattctgagcataatcgatttgaatatgaacaagttgatgactagtttgttaagcgtatgttgaactgatg

SEQ ID NO: 34243 - DNA, 395 bp, Glycine max
agctttattagtgcgggtctgggagacgaaggtcaagtgttcgcgatatgtgaagatgatgttccaagtactttggatttggtccgaccatgccctcctgatttccagctaggaaattggcgagtggaggaacgccccggcatttacgcaacaagcataatgtaaacctttacggttttaaaagctctatagttgggcctaggctttagagttttcattttgttaaggctttgtgtcttttgtttttgaatttataatacaaggatctttcttcatctgttcctggtctctacccattctcattcatttgcatgtttacttctttttctaaaaaatggcagattcgatgacaagtcccccgaaggtactaatacctgggacccgtctatcaactt

SEQ ID NO: 34244 - DNA, 436 bp, Glycine max
tgatcaaaacaattatctaatcattccaatccactcatatcatacaattgctcattcaaatcattctcaaacactcatttcatgcaaaacaatccactacatatcattttcaatcaattcattgttcaaacacgcttttggtacaaacaaacaactcaaagtgctgaaatttatataattgaaatttaaaaaaattgaaatataaaatctgaaattaaaatgactgaacataaatcataaaataattgaaaataaactaaaatgttcgagatgcacaaatttaaatgtcctgctcctgtggttgctcctatgcatgctcattaaggtccaacacctgagcagctggtgcagatggtgtggcataatcaagtatgggtgctagggatggctttgggatctggtttgtagaagcatcctcctcttgagccctgttgtc

SEQ ID NO: 34245 - DNA, 320 bp, Glycine max
  unsure at all n locations
accgggatcttaagtcactgcagctgcagctttctttaattacatnttctggccgaagtccaacctgccatcatccgcggattaatttcctctgcctgaatatgggtctgatcgctgctgacatccatcgctccaccagattgtggacgagactcacatttgccacgtccactgttctatactaataaaatacttgcccatgtccatgtccttcttgcttacacaaaagtataatattgaatttccctttccttgtacaacatcntatataaatactaccacctcattcctctaaactcattcctcataccccactgttc

SEQ ID NO: 34246 - DNA, 434 bp, Glycine max
  unsure at all n locations
gctcagtgggtcagttatttaatactggtgcaaaaatntatttttatatattctgaatgaatgagaaatttagatgctaacaaaattaatatcattcctaaagaaattattaaaaattcaacgtgacaaaacagatcatgcaaaaagcatttcaataataataataataggtagataatatagataatagaagatttgtcaccaattaaaataattacatacaatataatcaattgaaaacataattattaatcaaggtaacataattgtatgcacttagtttactatttaaatggattgattgatttgttaaaattttattttaaagtaatcaaaaataaattgtaacatttattattttatttttttgaatttgaactaatttgaattaactaattaaaatagaattaatgacacttagctaatgctgaatg

SEQ ID NO: 34247 - DNA, 395 bp, Glycine max
agcttggcctcaagttccttcgcttccatgcaacttccattcgcgcagaactcgcgaatcgtcacacgctcgttcttaccggactccatcaatcatttcctcgccacctgcacacccacaaagcacgcgcgttaacattttttttttttgcctctttccgacaagtgaagattaccgaagtagattttgtctctttcgataaagccttttccataaacaaccagttaatcaaagccatgcttaaaaggaacctagctacctaccaacattgttggtacgcgcgcgttaacattaacggatccaaacaatgccgttcgagattcatgtgtttctcattagttgcgcgtaaataacggaaagaaagaacaacgtccgcgctgtgaacagagattaat

SEQ ID NO: 34248 - DNA, 438 bp, Glycine max
  unsure at all n locations
ccttaatctctttgtcaacacaaaaacttcccgtgcaatacttcatttattaacgcgttgccgagggataaacacatctaaagtaaggtgttagattatatgataatatattctgattttatataattcttatatctattagatttatctttagtcatatctttagctattaggtttatctttagttntatagttgttatatctattcgatttatctttagccattccattagatttatctttagccatatctttagcttatatatctttagcttgtaaccttatatataagagaatggtgcttaatgaattattcaaggaaacaatttctttcatggtatcagattgcttaaggaaatatttttgaaccttcctcagccttccgcacacaggccctagcgtcgtttagcccctttcttcttcttctccccttcttct

SEQ ID NO: 34249 - DNA, 309 bp, Glycine max
  unsure at all n locations
actatccatccatcttcccatgctatctacgcattcactctttcgttccacattaacgtaccatctaccaaacttatattatacacacccactccctagccacctatccttccacaaacctactagatctccaattctccactccatcatcttctcaaaccacccatcacttccacntccacacacttgccttatgttgctccaccacacgaatggatagtgcctcccaccattctcgctattnnttcacataccttgaaatcatattatgtataactttttccattctctatacatcacttattctct

SEQ ID NO: 34250 - DNA, 320 bp, Glycine max
  unsure at all n locations
gcctcctattaaactgtctgacatcttgattccttacctatatagtaaagatactgccgagaggttgtatctaggttccttgggcataacgtgatgccggttggccaagagcctgaaaaccaacatgtgagtagtgtcctgacttaaatgcaacccaagtaaaactctcttgtctcatacagtcccaagcccccaattgtaatctttgatgagtaatttgacactgattggatgctgggattttgaaagcagaatatattaattctgttngtgtcctatctaaaattacatatcctaccaaattgctaatgcgtggattt

SEQ ID NO: 34251 - DNA, 354 bp, Glycine max
tttcttctaatgaagtgtggagacccaaaatcattcatacttagacgaaattgtcataaagtgatagaagtcactgagacacgccgataaaggacaatgacaaaataggcgtctacaaagtgcttcactagaaaacgaacggcgagctaaaggcgatggccaaaaaacacgttgaaaagagacaacgatagaatacgcaatcaaaatgatttgttggaaaatgaacaacaaacaaaaggaggtggcaaccatcgtagagagagacgaacaaaaaatcatgaaccaataaagtgcataaaaacgtgttttcgtactgggtccaactaaatgatcatgtatgtatggggacaaaac

SEQ ID NO: 34252 - DNA, 447 bp, Glycine max
  unsure at all n locations
ggaactataaaactccgcttgatgagtactgggaaagatgaagaaattgtgtgcttttgtcctcaccaccagatttctgagcaactccttcttcaatatttctatgagggacttagcaacatggagaggagtatgattgatgctaccagtggtggagctcttggtgatatgacccctgatgaggctaggaatttgattgagaagatggcttccaactcccaacaattcaatgcaagaaatggtgctattattcttanaggagtccatgaggtggccatggattcatcttcatctactgaaaataaaaagtttgaaggaaaacttgatgccttggtcaacctagtaactcagcttgccatgaatcaaaaatctgcacctgttgcaagagtatgtggtctatgttcttctacagatcaccatacagatctttgtccttctttacagcaa

SEQ ID NO: 34253 - DNA, 328 bp, Glycine max
ttgctttgtttatggtacttacccgttgaagatcgaagaacgatgaagaacgactgaccaacgtccaacaatggttgaaacctttgcgaaattcctcacagaaaacgttaccgaaacgtttcggaagcgcctccgcttagattttcttcacggaaacaatttttccaagcaaattccaaagagagagaagtgcctcacgggctgaaccccttccttcttcacttcctcccctatttatatcaaaatacgggaggtggctgtcgcccagctcgcccaggcgagccaggatgcttccttcacaacaacacgcttctggaggaatattcta

SEQ ID NO: 34254 - DNA, 418 bp, Glycine max
tgtccctcacttccatattagagcccactaaggatctcttttatgcttgttctttcctcctccctaagtccagctcttaaatggagtacttccatttgttgtctatattcttcaatactcatactcccttgtctaagcctttggagcttgcccataagctccctttcagagtaggagggaatgtgcttcttcctaagggcactcttaagattattccaatactctactggaggatccccatgaatccttcattccataacaagggaagtccaccaatagagagcctacccttgaaagctaacggtagccaatggaacttttctttcttcgctaatatgatggcaagcaaagagttgctcaaccttcatttcccaatctaagtaggcctcaccattatcttttccatggaaatatggga

SEQ ID NO: 34255 - DNA, 330 bp, Glycine max
  unsure at all n locations
tttcttgtagcaaactggatgcattggttaactcggtcacccaactggncttgaatcacaaatctgtacctgtcgcaagggtttgtggtttgtgctcctctgctgaccaccatacagacctttgcccttccatgcagcatcctgcagcaatcgagcagcctgaagcttatgctgcaaatatttacaatatacctcctcaacctcaacatcaaaatcaaccacatcacaacaattatgacctctgcagcaacagatacaaccctgtatggacgaatcaccctaacctcaaatggtccanccctcatcaccaaccacagcagcctcgctctt

SEQ ID NO: 34256 - DNA, 381 bp, Glycine max
  unsure at all n locations
caaatttgatcatcctgctttgatgaatgagaaaactagggcaaatgaaaaggatgagaatgaggaaggaacccgtgttgtggctgtcattcctacatggccaaacttcccaccagcccaacaatgtcatcgctcagccaatatcggcccttctccttacccaccacccaatcatccataaaggctatccctaaatcatccacaaagtttgctagccgcacatccaatgtaaagggcaaaccgaaacaccaaccaagaaatgaattttgcagcgaataagcctgtagaattcaccccaattccatcgcctatgctgatttgctcccatatctacttgataatgcaatggtagccataaccncttgccaaggtcctcaacct

SEQ ID NO: 34257 - DNA, 308 bp, Glycine max
tttctctcttcttatccgcaaatgaacctgcccaacctcactctactccagaaaaagatgatgacaaacatctaaagagtcagttacctaacaattcctatgcaggtgaatcttccactggtaattctgatttaccgaaccaacatatccctcttccattccctccaagagcaatttccacaccaacaacggaacacgcatacaacgaaatcttggaaacatttacaaaagtagacgtccacatacctctgctggatgcactaaagccaattccaagacatgccacattcttgaacgagctgtgcact

SEQ ID NO: 34258 - DNA, 435 bp, Glycine max
tataatagggtgatgttcgaggggccatggatgtgtgttttatctttatattatgatataatattggcaccctttttaatggcaagtgcgacatagagtaggaagttggcagtgtggatctatatcccaaaattacatattgaactttataatcatgagttcctttatagattgggatctatcctcgtagcattctaaggtctagtttgcacatgtatgtgtcaaattggatttgaatgtgcctctacaaccaaaagttatagcccgaggatacttgttgaagttacaatatgagggattgcataaaatctatttcaaatgcataaggtatggtcataaggagaataattgtgtaagtgttggaatgacacaggagcataggaggagataagtacaccaattggagtggttggcgatagcaatcacaatatgacg

SEQ ID NO: 34259 - DNA, 380 bp, Glycine max
  unsure at all n locations
tgcttctggtgggacatcttgacttgctttccaatctgacattcaccacagattctgccttcttctattttcagattgggaatgcctctaacagcacctttgtcaatgattttcttcatgcctcttaagtgcagatgtccaaatctttgatgccatattctgacttcatcttctttggaggatagacatgtggaggagtagctagtttcttggggtgtccatangtaacaattgtcctttgatctgctgcccttcattagaacttcactcttctcatttgtcaccaagcattctgactttgtgaagtttacattgaacccttcatcacacagctgactgatgctgatcaagtttgccgtcagtcccttcaccagcagtac

SEQ ID NO: 34260 - DNA, 439 bp, Glycine max
  unsure at all n locations
cttgagcaattcanatggtctgaacttttcacttttagttctgattctggcacatcacatatatagacgctcgaaattgaacaacggaagctctccagatattcaaatggtcataacttttaacttggaggtccgattctggcacataatatatcgagacgcccgaaattgaacaacggaagcacttgagaaaatcaaatggtcattacttttaactcgaaggtccgattcaagcacatcacatatagagacgctcgaaattgaacaacggaagctctcgagatattcaaatgattataacttttaactcggaggtccgattcaggcgcataaaatatagaaactgtcgaaattgaacaatggaagctctcgagcaattcaaatggtcataacttttcattcggaggtctgatactagcgcatgatatatcgagacgct

SEQ ID NO: 34261 - DNA, 385 bp, Glycine max
agctttaaataagaaatatgagtaacaaatgaacatatggtatcattgatatttgatccaatacaacgacagagattcatgttatgtcttaagtgttggatttggactcaatcaaagatcaaaaccatcatatcaacaagcactaatgtgtacaaaaagttgctagcttttacatccacttcattcaaaattccttagattttgattttcaatcgtaagggtatcttcattttttttaagaaattatatttgtacaaaaaatcttacaataaaaaagagagaggaaagagaaaattttgaaatgtaataaatgatatggaaggaaaacatagacatataaaatgatattatataaattgctgcaagaattgctgtacatgtatta

SEQ ID NO: 34262 - DNA, 420 bp, Glycine max
ctataaaactcagcttggggctgcgtggcttgtagttcctatgagcttgggagtttttgaagtgagggggaagagttttgggtgaagaaaacgttccccctccacctctttatattttcgtacaggggttgctcgcccaggcgagctaacctgtaccctttttttttttttttgaggggaacattaaccatgtctcctccttccttatgggttagcgtttgcccacttgaacctacttaaattagaattaggtgtcgattacttatttaaaacaaacaatagtaaaagaaactgcgaatgcaaaggatactgggctgccttgcaacgacgttctctgcttgtttagtgccgggaaggggcaacgatcggtcggtcgtgaccttatccccacttgcatccgtccctatgtacctgtaagta

SEQ ID NO: 34263 - DNA, 369 bp, Glycine max
agcttaaggctacaaatataacactttcatgttaagtttgggcttccacctcctgcaaaccctccttccattatgttaatcacacctcgtagccaagtcttgagtgggaaagtctcactctagcacaatgattctgtcgtctcttgagtctagttgcactctcggctctattgcattccctttcttgctctcatgaaggttccttatccttaatgaatctctgcagctaccccttctaaatcaatttttctattttttccttgaggttaacgcattccttagtgttttgaccaatgactcactgataacgacaatatttggacttggctactcctagtggaggtcactctctagaccacaactgaatta

SEQ ID NO: 34264 - DNA, 413 bp, Glycine max
  unsure at all n locations
tttatctatctattatgaaacatggttaacttaaaaatatgatttatgatcgtgctttaagcgtttattgaattcagggaaatcctaaatctatatataacgcaatttgggtttttatactattttgaatgccaggagaaatatttgtatgcttctcaactacccatttctacagctttagtctgtccaagaatgtggccttttcttgtgaaaaataatgtttttttttatttttttagaaaatacattctaagatgtcccccttgatatcttcctacctggactacttttagtaactttgtaatgcattcttattagacaatgatacaaacattcctaataacatctttgaagcatgtgatggtaagattgatgatgcttatgtggagccatcatttgctgttgngaaatct

SEQ ID NO: 34265 - DNA, 392 bp, Glycine max
agctttattcaagacaaagaaattaaagatattcaagatggatgatcaagacaagtctctagtcttagaaagggtatattaaataggaggggaattccaattgaagtagcaaaaggtttgaccaagaattttaagttaaaaagtctttttcaacaaatttactctctggtaatcgattaccagtggccaaaactgatttacaacagctattaaaatttgaattcaaagtttgcactgtgtaatcgattacacatatatggtaatcgattaccagcagtttctgaacgttttaattcaaattttaaagcttgtaatcgattacacacatactgtaattgattaccagaggagtttttcagaaaagattctcaacagtcacatctttctgtgtg

SEQ ID NO: 34266 - DNA, 437 bp, Glycine max
  unsure at all n locations
tctagattagtgtaccagacggcgcgcggccccagccatgctatcttggaagaagtgcattaacaacttttcatccctagaatgcgcccccatcttgcgacaatacattttgagatggttcttaggataagtcatccctttgtacctatcgaaatcaggtaccttgaattttggggggatgacgatgtccggtactaagcaaatatcagccatgtccacgaatggatagtcgccatagccttcaacaactctcaatctctcttcgatgagattgagtttccttttttcctccgttgccaggggtggcccttctgcggacaagaatattggttgtgctgggaggtttcgaggttctcccgtgaggttgggctgaggtagtgtgttgggtgccggcccctcgacgtggatcggngagtangaatcgatgtctccttggg

SEQ ID NO: 34267 - DNA, 394 bp, Glycine max
agcttgtcttagcgtctatgcgagacagaaaccaacatgttagctatcatcgccaagtaccaagaagagttgggtctagccacggcccacgagcatagaatcgcggatgagtatgcccaagtatatgcggaaaaagaggctagaggaagggtgatcgactctttacaccaagaggcaaccatgtggatggatcggtttgctcttaccttgaacgggagtcaagaacttccccgattgttagccaaggccaaggcgatggcagacacctactccgcccccgaagagattcatgggcttctcggctattgtcagcatatgatagacttaatggcccacataattagaaatcgttaggaaacttgtatggtctctcagaccttgactagatacgact

SEQ ID NO: 34268 - DNA, 427 bp, Glycine max
tggactcaaggagaaacataagatggctctagagtaatgtattaaaaaaaactataaaaaaaagactcaacaaacctctagctttggcccttgtttttcacactaattttcaattgaaatttaggaactaagattggtataaaataggcaccaattatagaataaattttgagccaaaacaacaagcatacttccctttcacttttttttcctggatactgatttttctgccaaattgtgtgatgtttagtattttttccttttatccaaatcacttggttctttttttataaattttttctagatgtgtagcaaattcagtaaaaatttcagctcaaaattcgaagtaaccaattctcagtaatttttacaactttgtatgtccaagctgccaacaccagcgatttttttaagcatggtatattga

SEQ ID NO: 34269 - DNA, 398 bp, Glycine max
tttatcctggtcatggatagatcacccaggttcgggtctataagcaatgacaattgccctgtgaagattcgctttcgctacagcttcggtggtttcccttaaccaagccacaacctatgagtcgccagctcattcttcaacaggcacgtggtcagagtcccgagcctcctcccactgcttgggagcttacggtttcatgttctatttcactccccgatgggggttcttttcacccttccctcacggtactacttcactatcggtcacccaggagtatttagccttgcaaggtggtccttgctgatacacacgggattccacgtgccccatcttaatatgaattactcacaacgcaattcaaaataaacttctttaaagaacaagataaatagcaatcc

SEQ ID NO: 34270 - DNA, 437 bp, Glycine max
  unsure at all n locations
ntaccaagtattcttgagcccttcttccatcaagcttatgtaagtgacctccattttcaactctaaggttgattttcacttcatcttcttgttctattctcacttgtagtttcaaaaccttattttgcacacttgacggttggaaacttgaacctaaactccctcattcttccttctaaatttggtggaacctataagggccaaatttcagttatttttgggattaaattgttagctataataactattgttttttataaaagccaaagcctaggctagttctcccatcttgctaaagattttggagaaagaggagaccatatttttcttcttcttccaagctttaccaagtattcttgaacccttcttccatcaagcttaagtaagtgacctccattntcaactctaaggctgattntcacttcatcttcttattc

SEQ ID NO: 34271 - DNA, 382 bp, Glycine max
agctttgtgtagaagaatgatggataatcttgatccaatcaaggataactattttctaaaaaaggcaagaaagagactgagactttctgatgtagttgttttctcaaaatcacatatttgaccctattttctttggtaactcattttctaattactacctaacaaatattttgaaagaaaataactcttaatatacgcgggataggagcaggtaaatccatattaaaaagctgcaaaatttggcaaaggatacatccagatcttatgcgatcgagttctccattgaaaataatcactttccgttcagtgttcaagaccgcctctttataaagttcttccacaacaagtatttctgaaatacaagggagcagtaatcatgata

SEQ ID NO: 34272 - DNA, 440 bp, Glycine max
  unsure at all n locations
ttctaactaaatagtgttatgaccatatagatgtgcgtgattgcattgaatgagataatgtgcaaagttgggaatgctaatttcagttgttttgatttaaatacacataaccataacacttgtgtgcttgaaagaaacactatcctcatgagaagtgaagcatggttgatcttctttgatgtttgtcatacttgctaacctattttatctccaagtgcattcttcgcatgcttctatcatgaaaactatgtatgacaaatgtgaacttgagagttagaaattgaagttgtttgaaagatatgtagttgtctcaattattggggctgattacattctaaacattgtcattgacctaacttagtgtagtttagtttacttttgcttgaggagaagaaaagctctattgngggagtttgataattgttatgtatacgtaaatt

SEQ ID NO: 34273 - DNA, 419 bp, Glycine max
  unsure at all n locations
cttaagtcacctgcggcatgcaagctttcattcccccaccattccctccgtattgttttttagtagattttccaccacccttgctcccgtaactccatggttcagacaatgtagaccaagcataaacatcaccaccccagtttgtcttgttattttttaaacaagatgcaccacgcccaccatgccctccaccagctccatcgttgccaacaggtgtgccactattttgggaaggtggagaccctcctaaagatgatgagtctatataagaattgtatcccattgtcagattggctgcaaataaaaccacagagccagaaacaatggatgcatcttgaccaagtctaacgttgccggatacattgactgttatcatacacccttncatgggacataaaagtgacacatcagagagtatc

SEQ ID NO: 34274 - DNA, 427 bp, Glycine max
  unsure at all n locations
tactaagcttacgccttaaaaaaatggcccaaagaggatgcaagatttatattataccaacaacattaccttcagtgaagaaagttatttcctatagcattagccgaaaaagatttaattacaaaattttatggcatttcccgttggggagttttctcaagcaagtttcgtgcatggcagtgtgtgttactcagaacatgctgagttatttttagaagaaaagtaaaaacgtgagagatcaccaaaccttggttcagcaagatgcagtgcagaagcaaaaccttcgatttgagactgcctccaaagtagtggagtttcagggttttaaaaatcgtccctgaacaccaaatgtcgcttctttgccaagaatcccgtttgaaacccanaaaanattatagcaggaaccaataaaatggataatggagaa

SEQ ID NO: 34275 - DNA, 125 bp, Glycine max
tttcctcgagcaaattcaaacgacaataactgtggactcggatgtacgatcgtgccccgtaagatatcgggactctccaaagcgaaagcgcatgctatcgcagaagactaacgacaataacttgc

SEQ ID NO: 34276 - DNA, 382 bp, Glycine max
atattatttgttctaatcggacatcctagtcaaaagttattgtcgtttgaatttgcttacagcttcagctttcaatttcgagcgtcttgatatattacggggctcgatcagacatccgagtaaaaagttattgtcgtttgacttttcttacagctcccgttttaaattacaagcgtctcgatatattagagggctcaatcggacatcccaataaaaagttatcgtcgtttgattttcctaacagcttccgttttcaattacgagcgtctcgatatcctacgggacacaatcggacatccgagttaaaatttattgtcgcttgacttttcttagagctatcgttttcaatgtccagcgtctcgatatattccacggctcaatc

SEQ ID NO: 34277 - DNA, 391 bp, Glycine max
tgcttgcatgatttacattctccccctttctcaagcaaattcttaattcttcttgacatcatcaaaatcttcatgatttacattctccccctttgtcaagcaaattctttttgatatcatcaaaacctgcatgatttaaaaaaacaagctagcaattctaatgaatcatcacttcatatcccttcccttttcaaccaagttagcactacttcctataccaaaatcccaacatataaaatttacaacaactttgtacagtttataacataatatgcttaagtcaaacatttatttattcacaaagaacttgcttccctttttctttttcttttctttcttttcttttctatccaataattcaatatttaatttaccttaataccctcattta

SEQ ID NO: 34278 - DNA, 417 bp, Glycine max
  unsure at all n locations
tgcgaggaaagaagattgccgngtggtggtgatgagctgcatcaagttttccatcaagaagtgcctgaggaagtgcttcagcaagttggtttcgcgcgaagaccaccacgaagcgatgatcatgttgaaggacatgccgcctgagccaaactggtaccaagggaagtggaggagggcaaggcacaatgggaacaatgaggagctcaaaggagagaataataacaacaacaagggagttcaaagaaacagaaccattgccttatcagggcctttggatgggaatggaagaataattcatgagaagatggtgaacaacaacaaggtgatgaaactctctggtcctcttgatgggaaaatgaatggtggtaacaatgagagagtgaatgtgtatgcaaatgcaaatagaagcccattgat

SEQ ID NO: 34279 - DNA, 376 bp, Glycine max
ttgtcttgataattgatctggccaccaagtccaatgcacttctgttatacactctccatctctcctctgacttatttatctatgttgattcttccctctaagggtgtaattggtttagaggatggaaatagacgagaaattttttaattgagtagagcgtaaaaggtgtgggtcccacaaaaaaggtaaaaaacttatctcaaatatttctctcctctctaccaaacacaccattaatgaatcatgaactcacaataaatcttcctgcatgttgaaaatcaattgtcttttggctattgagaatattggtttaacccactgcccccgccttgctctctgaacaccaacccattcccacatctctccatcttgtttc

SEQ ID NO: 34280 - DNA, 430 bp, Glycine max
gtatttatgaaacaactttgcttgtaattctttttcttataattttatataacaaggggcatttgaaattatttatttgaggttataaaagtgactaatgaaatttctataagtttttcattgtattggaccttagatgtaacaaaacttttgttttgggtgcctgtcaagtagtaagtaacaatgtagtgtcatatcatcacttagttgacgataaagattcaacaaaagttttgatatatcaagacaataatgtaaccaaaaaatttattgaagacccaaaataaaaaattgtcatttatcatgaatttcacacatatttaatcttttcttttatttacaagagtttcacgttcgaatttattaataagctcttatttaataacattctattgaataggtgcttcattaacttcgttacctcaatatt

SEQ ID NO: 34281 - DNA, 397 bp, Glycine max
tgcttgcaaaatatggctgattgacgtttctcttaataacacatttagatgtccaacatatgattaggcatggctgtacaattctgtatagtaacataaaacttctcgtgtagacaacaacaaacatcattccacatcatctagccattcaatgactgaagaaagattcatagaaatttgtaatacctatcaaatatttgtccaaagggaaccattgcaacgtaattagcagccacctgtaattacatttcatcaggtattattagagttgtcagagaggcacatggaagtcaagtcagtcttgccatattgagatcaatatcacttgctgacagaggacttaactctactccagacaaaggtcactactcttaagtttattcaagggtgaaaaaac

SEQ ID NO: 34282 - DNA, 431 bp, Glycine max
  unsure at all n locations
agatgcttacgggccttgaaacatgtgcttttgtttctttgttttatcaagccattttgggcctagtgcttgttccctcatcaagtctataattttagccattagaatacagtggattagggtaatgctgaacttgtattatttttcacgccactcttgaccttaagcttgttaacaatgctttgagtatatgttgataatgataagttaaagagatggcggaaattacacttttgaagtgtgataaagataaaagtagtatttttaagaactagaaagtccaactaaataagttgcaactacttttaaagttgctatactttgcaagttccgaaaacctctggtgtcttgacctatttggcatattgagttttcatgttcagagggaattctgttgtagttgctaggaatgcatntgctggaaacaaaat

SEQ ID NO: 34283 - DNA, 306 bp, Glycine max
agcttatgcgcatatttccttacaaatgttctcttgcacaagacattctattaaccgaaaaaatgcacccatatacaatcaaggcagctccgttacctagattatttacacgtacttccaaggtgtatttgttacttacatcacacacatctccttggctaaattcacatacatgcatactcaaagcattttggattaccaaaaattgcacatgtacacctcttggtatttctaatacctatacatacacaaactctatgatgaatcttgactatctacacaataaggtgctacatttcatgctct

SEQ ID NO: 34284 - DNA, 451 bp, Glycine max
  unsure at all n locations
gacacttatagaatactccgcttgtagaatggctagacatgatacatgtcatggtttggtttggtttaaggataaaagggatgccccacattatttccatgacacaaatgcaaaaatgatgatttggaaactttatgcaaaactggtcatgcatgcacctatgtggacactcaagtgtcaaatttttatggtcatgtgatgctagggctcaggattcatttcctctattttagtcaacccaatgtttccaaaatatgttcttttatccatatgtgcattcatccgagtccattttgggcgtccggngaaattttcacagcattcacccttcaggtgtatacacatttttcaaaaactagttatgattagtgaatttttttcaaagaaaagttggaagtcatctcttttcaaaagcatgttggtttttcagctagacaacttatttttcttt

SEQ ID NO: 34285 - DNA, 342 bp, Glycine max
  unsure at all n locations
cgctttgtttcactccctacaagtaagtgcactttgccttggttatttggctctccattgttgtgttttggtgctttagttgctcatattatgcgaaattcgtgaagcaattcacatatgaaaccatacttgttttcgctaaattaaggggttgtaacggatggccttaagcctatgttgcattctggagtaatggggcatgccacattgcccncattctcttgctattcatgcctaaacatgtgcncaccaagtgctcggtatagggacaacatgtacaggttaaaatgagtgcctgaatgcgaattctacgctaagaacccaagctcttgatttcaatac

SEQ ID NO: 34286 - DNA, 407 bp, Glycine max
tcttttagtccttgaacaagcaatctacttctctttcataaccatgctatgtgctcgcgactggtccctttcttcccttcgcaacttgagttcattattgctaccccatagagctccgcgaaatttgttccggccatactcttccttgcgagccctcttggtctctttttcaagggctcttgcggtaattgcattctcttcccgtaacccggcgcactccttccgaacgtgtgtagcagccaacttgaacttctccttggcgagttttgcctttcctaactcgcttttgagagcttggacttcctcgtcctcttccggtgcttcaaaattctcttcgctgacgacttttaacttggcgagccaatctaaacctcgtatgcgaactttcaaccattcgtggtacccac

SEQ ID NO: 34287 - DNA, 337 bp, Glycine max
gacgtatgctttcttgtagagttatgtctcgtctcagttgaatcaattacaagcttatcgtaatcgattacaccgtcgattttgagacaatgactgatttattcaagattctctactttaatcaatcacaatgagatataatcgattacttctctttctataagtgttttagaagaaaacaagaacactttaatcgattgctttgagtatctaattgattatattgttcttgacgcgcttccagtttttggaagaacactctactccattaacaagataatctaatcgattacttcattgacctaactagttatcttgtatatttaaccgattacac

SEQ ID NO: 34288 - DNA, 384 bp, Glycine max
tccacaacatccaagcaaaacaacattcaaacagcactagctatcacagccaagcaaaacagggcaaaggcagaaaactctgctcaacacactaaccaaaatcacagcttttctcacttaaagaccccagtaacaattccttcgatccaattcgttaaccgttggatcgactccaaaattttactgggagtctatagtgcataagcctacattttgaccgttgggatctactagcaaacatccagaacttattctacattactctttccacaaccagcaaatacatggatttttctgcacttgtgcaaaattctgctgcacaattttacagcacaatctgcacaaagagcatatttcgaaaaccacacttcccctcatccaatc

SEQ ID NO: 34289 - DNA, 356 bp, Glycine max
agctctccgttacttttttttttttttgggagggtgaattttgacaacaggcagcttgtattccattggcattgagtggtcgtgatatatgtggtagcgccattaccgggtcaaggaaggcaatctctttgctactttctttgggtgtttgtttgttaatttgtacgtaatgccttgcttctgtggttcggtgcctgagtttctgtatgatggtgtttcttttaatcccctttgatcatatcctgctattgtgcttccatgcaaaccgctcgatttccactacctactttacagagggcgttgcttcgtccaaaccgcatgcgtgcaataagggtgctcattcttactcccaccac

SEQ ID NO: 34290 - DNA, 416 bp, Glycine max
  unsure at all n locations
taattgcaattntggtcctcgtagttttgcaaatcctcaattttcattctcctagnttctaattggaacatttggtccccctggtcgggtgaacatgtttagaaataaaaacttgtgacttgacccaaaagtcaacgagattgaatgggctaggttggatgtgatccaagcacactaaatgcccaacacaaattgtttggattagtttggtttaattcagcttcacgggtgacccgtatacttaaacacgagatttaaatcttgcacctcccatattgtatcctacacctcccaaaaatgtttgaaaagactaaatttccaaaacacctcgtccatactaatcacagtcctaagacttgttatggcacctccttcacccgtgacaactatgacctcatcctccacattgcaccacc

SEQ ID NO: 34291 - DNA, 393 bp, Glycine max
agcttatattaacaaaattgccttaatcatttccaaatatgcatgtgaattaggacgcatcaacaagaatcaagccaaggctattgtgcaagcaatcaatggggcaaaacacaccaaatgattataatgatggatggctcaaattctcacaaaggtaaaatcatcactttcaaattgagctttcaaaactatcatgacatgtagagaagaatcaaggatttcaagtcacaaaatgtcaagaacttttattttcaaaacaattacccatttcttgaacatatcctataatctaaagaaaaacatgcaaagtcgtacgtgcacatgaaattgacccaaaatattaaactgaaaatccgacgaaactaacaacattaacaaattaacacaactaac

SEQ ID NO: 34292 - DNA, 438 bp, Glycine max
  unsure at all n locations
tgtgcaaatcaaatcactcctacatctcatctctagcatgcattttctttctttacccactcctcacgtttgaaaacaccataactaaacgcgccgcaagggatccctatcgcaccagatccaaatctagaacgatgggcgatcaagaggagacacaggaacagatgaaagccgacatgtcggctctgaaagaacaaatggcctccatgatggaggccatgttaggtatgaagcagctcatagagaagaacgcggccaccgccgccgctgtcagttcggctgccgaagcaggcccgactcccttggcaactacgcaccatcctccctcaaacatagtaggacggngaggggacgcactgnggcacgatggcagccctcacctgggatacaaccgagcggcttacccttatggattgccgcccaactattcaccaccca

SEQ ID NO: 34293 - DNA, 385 bp, Glycine max
  unsure at all n locations
agcttttattctctgctgatgaagatgaattggtggctacttcatgcaatcctctaatgacaatagcatcacttctggccgtggtcctgcaagcaaggaaatctttttctaagaatactctcttgaggtcatcccagctcgtgatagaccgtggagcaaggtaataaagccagtcctttgccactccctctanagaatgangaaaagcctttaaaaatatgtgatccctctgcacatctacgggtttcatggtggagcacaccatatggaattctttcagatgtttgtatgggtcttcacctgcaacgccatgaccacttggagcaaatggactcaatcagttctaagaacatatgggacatcctcatctgggtattggatgcac

SEQ ID NO: 34294 - DNA, 428 bp, Glycine max
tgaatttacaacgttccaattgatttcaaaatgttgttattgattacaatgatttggtaatcgattaccagtatgtttgaacattggaattcaaatttaattgtgaagagtcacatcctttcacaaaaaagctttgtgtaatcgattacactgatttggtaatcaattaccagtgatagtttctgaacaaaatcaaaagatgtaactcttccaatagttttcaagtttttcttaaagtcataacttttccaaatggtttttaagtttttctaaaggttataactcttctaatggtctcttgactagacttgaagagtctataaaatcaaggctctgatttgcattttatttaaaaaatattcattcattctttagacaacaaacttttgccaattgctttctgaatatctttgaactccttcttcttc

SEQ ID NO: 34295 - DNA, 403 bp, Glycine max
  unsure at all n locations
agcttctttgaganaacttccttgagaagctagagcttagctacacacacccctctcataactaagctcacctccttgagaagcttccttaagaagattcctaaagaagctagagcttagctacacatacctctctaatagctaagctcacctccttgagatgagaatctagaacttagctacacacccccaataatagctaagctcacccccatgacaaaaaacatgaaaatacaaaaaaaaaagtccttactacaaagactactcaaaatgccccgaaatacaaggctaaaaccctatactactagaatggccaaaatacaaggcccaacctaaggaaaaacctattctaatatttacaaagataagcgggctcatacttagcccatgggctcgaaatcta

SEQ ID NO: 34296 - DNA, 343 bp, Glycine max
  unsure at all n locations
actcagctatacctttgcttatttattcattataagttcttagtgataaatagaatgtgtaaccatttgcatagcacaacttgtgaaactttagcatcatggataacaatcaatatataaatctaggtgtacctgaaataattgctactttagaatacatanaatggccgtgcttaaagaatcaatggatcgttgatcatgtaatatctacctacaagaaagtgttttttatttttattattatacaatggactaaactactataaattaatcgagataatattgtagagtacgcaacgaattggatctattaaaacaaatattcatgattataaaaatagat

SEQ ID NO: 34297 - DNA, 363 bp, Glycine max
tagcttctatggaggctggatctttgagcttcaataaggtccttcaatggtgattttagccatggagttgtagcggaggataaaggagaagaggtgagaggaggcgccatccactagagaataagccatgaaaggagaagcttcatcaccaagagctccttggataagaagtttagaaaggaagcttcaatggaggaagagaatgagagaaagagagaagggggggcgtggaaattgaaggagaacacggagaaaagttgaactttgaagtgtgtctcacaagtttctcattcatcaaagttatggcaagtgttacacatgtttctatttatagcctatcacatgggaaacttccttgagaag

SEQ ID NO: 34298 - DNA, 406 bp, Glycine max
  unsure at all n locations
taaggttaaattagaccaactatgggttggtgtcctcattagcaagttttgaagcacccagcagtggcaggatttttgactcattgtggttaaataacccctcattatagtgcagtacttgacccctgtatgctataatgcagttgctacaccaaaccaaatactttttatataatatgttcaaaactaaagtacttaaataaaaactggagaaacaatgttgggcttggttggaaaagggtgaaagagaggctgagggacaggaaaatgcagagggtatagagacaaacaaagcatgaataggtgtttggctgctggaaacttgagagagcaaagtgtagatgagaaacaagcatatgcggcttcacgatgcanaaacaagggtgaagtagtggcaatatgctat

SEQ ID NO: 34299 - DNA, 283 bp, Glycine max
tctcctttagtttctctagcctatacgtagcgggttgcttgacaacgaaggaacatgcacgtcagatctgcggaaagtgcctcttcatactagaggcctcacggacgctctaaggactcttccttacctcatatccaaacgctcaatctttcaggcctaaacaccataaaatctattacacacacaaacaactactacaattcattgcttcactatctttaaacttttaacaagcaaatctaccataactattctcgatacaactgcttttatcataacatat

SEQ ID NO: 34300 - DNA, 416 bp, Glycine max
actcagcttgaattagtacaagcctacaggtccacagtgtgtttctagactctccccagcaggttggttctagctcgggtcttgatgaaacctattggataatgcctaaagaggcccaagtcgcactaaattgtgatgtaagaattgtccagtttggtaaagttgtacgttatggaggagttattcacaatcatgcagtgagatttatttttggttttaagctcagtcaagagaaggttttgtcctatatgggggatataagtctattcttaatagcatcaaacttgctttgaatataaggttctactcaattcatattgactcatgcttagttgaggctattgaagcgctacaggataattgagatcgtcttcgtactcattaccaactaattcaagagatccatttggtgcatg

SEQ ID NO: 34301 - DNA, 387 bp, Glycine max
  unsure at all n locations
agcttcaacatcagaccacttccagggtgctggaactacttcacatggatttgatggggcctatgcaagttgaaagccttggaggaaagaggtatgcctatgttgttgtggatgatttctccagatttacctgngtaaactttatcagagagaaatcagaaacctttgaagtattcaaagagttgagtctaagacttcaaagagagaaagactgtgtcatcaagagaatcaggagtgaccatggcagagaatttgaaaacagcaggttcactgaattctgcacatctgaaggcatcactcatgagttctctgcagccattacaccacaacagaatgggatagttgagaggaaaaacaggaccttgcaagaggctgctcgggtcatgc

SEQ ID NO: 34302 - DNA, 392 bp, Glycine max
tcaacattcaatttcgagcgtctcgatatatgacgggttctaatcagacatccgagtaaaaagttattgtcgtttgaattggctcagagcttcaacattcaatttcgagggtctcgatatattgcgggactcaatcagacatccgagtaaaaagttattgtcgtttgaattggctcggagcttcaacattcaatttcaagcgtctcgatatatgacgggactcaatcagacatccgagtaaaaagttattgccgttggaatggcttaaaaggttaacaattaaatttgaaccgcctaaatatattacggaactcattcaaacttccgagtaaaacgttattgtcgttggaattgcctaagaggttcaacattcaatttcgagcgtctcgata

SEQ ID NO: 34303 - DNA, 350 bp, Glycine max
tgcttttgctagttggaatcatttatcctatctccgacagccaatgggtgagtctcgtccagatagtcccgaagaaaaccagcctcaccgtgatcaaaaatgagaaagaggagttgattcctactcgggtgcagaacagttggagagtttgcatcgactataggagactgaaccaggttaccaaaaaggaccattttcccctgccattcattgaccaaatgcttgaatgccttggaggtaaatctcactactgcttccttgatggtttttctggttatatgcaaatcactattgcccctaacgatcaggaaaaaaccacattcacttgccctttcggcacttttgcctat

SEQ ID NO: 34304 - DNA, 418 bp, Glycine max
  unsure at all n locations
ctttcgtcttacagacagcaaagaataatggttatactgttcaccactcgagtatttccgccagtcagcgtgactcaaatgtcagtatgacagatcttgtgagcgcggaagatgacgtaaatctacgcgtgtcaacgggcttgtcggccgtgattgacgaagggagcagaagactacggtagtctctgcgtgccatcaagcttttcgtcttacagacagcaaaaaataatggttatacggatcaccactcgagtatttccgccagtcagcgtgactcanatgtgagtatgacagatcttgtgagcgcggaagatgacgtaaatctccgcgtgccaacgggcttgtcggccgagattgacgaagggcgcacaagacgacgttagtctctgcgtgctatcaggctcttcgtcttacagac

SEQ ID NO: 34305 - DNA, 320 bp, Glycine max
cgcttataaagaaaaattatgacatgattttaacccaatcacattatgttgaaaagttattgaagaagtctaattattctgatgtgaaacttgtttctacttcttataactcattcattaagttaaagaaaaacttgagtaacggaatttcttcacataaatattctcaaattattggctgcttgctgcatttgacaaacttctctaaggctgacattgcatatgcagttgatagattagaaagtaattgagggatttagtgatgcacactggatttctaattctaactaaacaaaatcgacaagcggttatgtttttac

SEQ ID NO: 34306 - DNA, 430 bp, Glycine max
  unsure at all n locations
taatgttatatctgactgctgggaagagtgctaagatcttagtgctcangcttatgctcacattcagtgtcaagatgaacaaaggctctctcaacttcagggagttcttcgatccttatctgcaatgattctccaattgcatgtgcttctttcagtggaagatcctccggtagttctatgtccacctgtttatgtccaacatggatacgaatttcaaattagtttatatcaaattccctttaaatttgttaacatcaaatgtgttttatgttaatacatatcacatggagattggttaaagcacatggtcctacatcacataagaagttccttctttattgagaaaaacatgttttaagttcctaaaataggataaattattatataatntgcgaccaanattatatattccgaactagctntacataat

SEQ ID NO: 34307 - DNA, 374 bp, Glycine max
  unsure at all n locations
agcttttattcntctatattctctttcactcttatcctcgatatatttattcattctccttattaccatttttaaataaatcatgattttgttattgtcgcaacctaccctacgacgggacgacgaaggaaaaatcgataagccaaagcgttcgtctccaagggagaaaacgagcggagtcgccaccaacgtttattcaaggaaaatgttagaaaaatcaaaaagaggtatgcaaattttggaaataagggttcagaagttgtttacgcatggggaaggcattaacaccccacgcgtccgtcacaagggacgacaggctctaatcgagtgtgcataatgcaacttcagaaatatttacttttccctctttatat

SEQ ID NO: 34308 - DNA, 426 bp, Glycine max
  unsure at all n locations
tatcctgcaaacatttataatagaccccctcagcagcttaaccaacaacagcagaataattatgatctttcaagcaacagatacaatccaggttggagaaatcatccaaatctgagataggcaagtcctccacaacaacaacagcctgtcccttttttccagaatgctactggtccaagcaagccatatgttcctcctccaatgtagcagcagcaacagcagcagtcacaacaaagacaataagcaactgaggctcctcctcaaccttccttagaagagttagtgaggcaaatgaccatccagaatatgcaatttcagcaagagacaaaagcctccattcagagtctgacaaatcagatggggcagatggctactcagttgaaccaagcttagtccanaaattctgacaaatggccttcacaaact

SEQ ID NO: 34309 - DNA, 359 bp, Glycine max
  unsure at all n locations
tttcttgttgacacgtggagatttacgttatcttccacgctcacaagatctgtcatactgacttttgcttcacgctgacggccggaaatacccgagtggttatccgtataaactttttgcattctgtaagacgaaacgcccgataacacgcagagactaacatcgtcttctgcgaccttcgtcaatcgcggccgacaagcccgttgacacncggagatttacgtcatcttccgcgctcacaagatctgtcatactgactcttgagtcacgctgactgcccgaaataccccagtggttatccgtataaaccttttgctgtccgtcagcacaaaagcctgataccacgcagagactaacgc

SEQ ID NO: 34310 - DNA, 424 bp, Glycine max
  unsure at all n locations
ttntgtcttacagacagcaaaacgtttatacggataactcactcgggtatttccgcccgtcagcgtgactcaaaagtcattatgacagatcttgtgagcgcggtagatgacgtaaatctccgcctgtcaacgggtttgtcagccgcgattgacaaagggcgcagaagacgacattagtctttgcgtgttatcaggcctttcgtcttacagacaacaaaaagtttatacggataaccactcgggtatttccgcccgtcagcgtgactaaaaagccagtatgacagatcttgtgagcacggaagatgacgtaaatctccgggtgtcaacgggcttgttggccacgattgacgaatggcgcagaagacgacgttagtctatgcgtgctattaggcttttcgtcttacagacagccaaaagtttatac

SEQ ID NO: 34311 - DNA, 398 bp, Glycine max
  unsure at all n locations
atctaacccttgtagtagtcatagaagtcaagaagattgttagttatgaatgcagaaaagagaaatgagaaattgatagaaacaaacaaaggaagaaatggaatgttagtttcattaatgtaaaaggatagcttgttttcaatagaagatatttcattaaagttctattattttaacaataaataattaatttattaaaatgaactcaatcataaattgttaattaagtatgatataaatttgtcaagtttttcacaaattgaccaattttatattaattacttcaaaaatgatatttatgacaatttataattaaatattattagttaaaatattctacttagtgtatcgaaattaaaattttaaataattgatatatattgcgtataattatttcn

SEQ ID NO: 34312 - DNA, 432 bp, Glycine max
tgaatgaatgtaagacacatcttcttcaacctttgtgattcttgactccatttcattgaagcgcatatccacttgtaattccaaattgtcaaacctctcaccaacaaaggtttgaagaccatcaaacctgtccaaaatctttgaaaggagagatgaatcttctccatcatgtccttctacaccaacatgtcgaccacctttcttcacctaagagccatcatgctccttttgataaccaaaagatgctatgactgaagcgcctataaggaaagatctcttgattggaacataaggttcacaatcaagagggatgttgaagtgttgaaggaaaagggtaacaagatgagggtaaggcaatggagcattcaatcgcaatgccttatgcatgcgatatctaacaagatgtgcccaatcaattcgtaaacctttatg

SEQ ID NO: 34313 - DNA, 394 bp, Glycine max
ttttccaactatagctcaattatatttaatagttacatataaccgttttgcgcgttgtaaaaaagtaatttttttagtagtagtaatagtcattcactctataagtccaacaaaataaatactttccttgtgtccatacggctgcctattaagtataccattcatgaaacttacaaatacttttactataatataactatattaaaatattaacttgcattaatatatattaaatataaacataatattaatatatatatatatatatatatatatatatatatatatatatatatatatatattaacgtcgatgtatatcaacatgatatattaaaatattaatatagatctacattaatatacatatatcacaatatgaacgcataagtacg

SEQ ID NO: 34314 - DNA, 432 bp, Glycine max
tcttaatccataaatgaatctttgcaaatagcataccttcccagcttccttcgactaagcaaaaccctcgggttatgttatgtacacatccttaagaagattcctattaaggaatgtagtcttgacatccatctacaagacctagtcatggtacacaacaacaacaaaaagaatccaaagaaatttaagcatcgcaaatggtgagaaggtttcatcatagtctataccatgaacttgcttgaaaccttttgccactagtcgtgccttataggcattcacctttaccatccatgttagttttcttcttaaagaccacttacaccttatgaggttttaccccttaatgtgaatcaaccaacgtccaaacttggttaatgtatatggactccatctcagatcccacaaccttaagtcacttctcatatccaggcg

SEQ ID NO: 34315 - DNA, 403 bp, Glycine max
ttttatgccttggatcttcttcatcaatggagtcctttgcttcttgaagatcaatggcagcagaatggagaatgaggaaagatgattggagacgccacttcaaggagaagatgagtcaagaacaacctcaccaccatacgaagccatggataagagcttataggtaggaaaagatgagtggaaggagagggagagaaggggcacgaaattttgtgcctcaaatgaggtcttaactttgaagtgtaattctcaaatgatcaaagttgaaaaaatgcacacacgtgaccttatttatagcataagtgtcacacaaaattggagggaaatttgaatttctattcaaatttcacttgaatttgaaattgaattcgtggaaccaaattttggagccaaaatttcactg

SEQ ID NO: 34316 - DNA, 428 bp, Glycine max
cttatccaaggctcatcttggtggagaagctccttcttccatggcttattccctagtggatggcgcctcctctcacctctactcctttgtcttccattgcatatccatggtggaaaatcaccattaaaggacctcattgaagctcaagatccaacctccatagaagccccacaagcaagctcccatcaagtggtaatcagagcacaagagcatcaagtaggtgctccttaaacctccattaatttttttatgctttaccttctcttccattgttgtttcttcatgtctctccatttatctcctcacatgtcttgagataaatgttgcaaacatgattctttagagtttatacttattaaactatctatacaagctagattagattctctatggctcaaatctctagacttgttcttgatcatgaatag

SEQ ID NO: 34317 - DNA, 379 bp, Glycine max
accactaccatacacatgggtggaaataagacatgttgggcttacgtcctatccacaattcataaggatctcttttaagattggcctaatataaattttattttgtaaataatagacaatgtttattggttcagcccataagtgtttaagggttgagtgatcactaagcatggtcctagccatttcctgaagaaatatacttttcatttacctctaaacatattctaatttggtgttcttggagtggaaaattgtggtgaataccaatctcttcacaaaatatttcataatatcattttcaaattctcccccatgattacttctaattgaagagatacatgataatgactattgaattactccaaaacagataaaacta

SEQ ID NO: 34318 - DNA, 401 bp, Glycine max
ttgaaattaatagtatacacacattgtttctgtatatataatgtccctgtatatattgtgtaaaaaaaactgtaagtacaaataaaattaacaagtgtgtatgctgtaattccatggatgaaaactaagtgcctaaataaagggcaagtatgggataggaatgaatgaaaaagtgaaggttattctatggatgaatgctctcctagaacctaagcttttgaatcctagaaaaaccatgaattgttggcagcctaaccccattacaagcctagaaagtccttcggattcattttgtgtgttcattgttgtatcatgtgagatgaaatgcaaacgttgggacttgtgctagttgtttatgatggaataagcctaaacacttgagcttgagtgaaacaatgacg

SEQ ID NO: 34319 - DNA, 484 bp, Glycine max
  unsure at all n locations
cgagtgcntttgatgcttggctccntcgcgccctatagaatactgaagctagcctggccgatgcatctagtgtgatggccctagttatgttggaggatcgatgacgttcccggaatgggattaggactatgacctcggtgactttactatgcctgtatatagtcttaggagatcgtgggacagtatggattatgctatgaccccactgcatgcatgcttcttgagaatcttaatgggaacgatgggcggtggtcaaatctcacagttgtaacaatatcgcgaaggaaacccgtcataccgcatctactgagcgttataagcacggttctggtagacgatggactactgacgttttatcgaccatgatgctccgagtgcgtcggatatgactcgaccttggcctcctggattggagacgtggtattggcgattggtggatacccgcgacattgatccagggatgctcatgtatacgctgacggtn

SEQ ID NO: 34320 - DNA, 405 bp, Glycine max
  unsure at all n locations
atgcattcttgtgcaaatcaaatcactcctacatctcatctctagcatgcattttctttctttacccactcctcacgtttggttttttagggaaaacactataactaaacgcgccgcaagggatccctatcgcaccagatccaaatctagaacgatgggtgatcaagaggagacacaggaacagatgaaagccgacatgtcggctctgaaagaacaaatggcctccatgatggaggccatgttaggtatgaagcagctcatagagaagaacgcggccaccgccgccgctgtcagttcggctgccgaagcagacccgactcccttggcaactacgcaccatcctccctcanacatagtaggacggngaagggacgcactgngacacgatggtagccctcacctgcg

SEQ ID NO: 34321 - DNA, 343 bp, Glycine max
ctccatttcatcgaagcgcatggccgctagtaacaccaaatcgtcaaacctctcaccaacaaaggctagaagaccatcaaacctgcccaacacctttgaaaggagagatgaatcttcaccatcatgatcttctacaccaacatgtcgaccacctttcttcacctaagagccatcatgctccttttgataaccaaaagatgctatgactgaagcgcctataacgaaagatctcttgattggaacataaggtccacaatcaagagggatgttgaagtgttgaaggaaaagggtaacaagacgagggtaaggcaacggagcattcaatcgcaatgccttatgcatg

SEQ ID NO: 34322 - DNA, 401 bp, Glycine max
  unsure at all n locations
tcttatcaaattgattaaaaatactatgagaaagaaagataaggtcaagagcatatgtacaacaatttttatactagttcactctctatctctagagaagctacttcagttatctaattcaatatgaatcggattttcaccatgcacatagaattcttacaaacaatcacaatcaatctcagttcttccctagaaaaaaggactaaggtacccaaccctagggtcccttgtgaatacgagcctaagagacacctacccttatcccaaactagaaaatcctattctagcatatatgccttcaaaaattcatgcatatgctaacaacatgtaaaacacatgaaaaaatgagtcagagagatacacaacctgatcattcacatgcaagaaccttttcttgtttn

SEQ ID NO: 34323 - DNA, 427 bp, Glycine max
cttaaagaggtccacgaaagataaagcggccgtttgaaccagttccgctcccgagtatgacagccaccgctttatgagcgctgaacaccagcagcgcttcgaggtcattaagggatggtcatttctccgggagcgacgcgttcagctcatggacgatgagcataccgatttccaggaggagatagttcgccggcggtgggcatcactggttacccccatggccaagttcgacccagacatagtcctcgaattttatgcctatgcttggcctacggatgatggcgtgcgagatatgagatcctgggtgaggggtcagtggatcccgtttgatgcggatgctatcagccagctccttggatatcctttagtgctggaagagggccaggagtgcgagtatggccagatgacgaaccggtccgatggtttt

SEQ ID NO: 34324 - DNA, 405 bp, Glycine max
  unsure at all n locations
tgcaatcttagctttattccttacaaccactaccatccaaatgggtggaaataagaaatgttgggcttacgtcctttccacaattcataaggattccttttaagattggcctaatataaattttattttgtaaataatagacaatgtttattggttcagcccataagtgtttaagggttgagtgatcactaagcatggtcctagccatttcctgaagaaatatacttttcatttacctctaaacatattctaatttggtgttcttggagtggaaaattgtggtgaataccaatctcttcacaaaatatttcaaaatatcattttcaaattctcccccatgattacttctaattgaagagatacatgataatgactattgaattactccaaaacaaataaaactan

SEQ ID NO: 34325 - DNA, 429 bp, Glycine max
  unsure at all n locations
ccttgagaagctntctcgagaagattcctagagatgctagagcttagctacacacacctctctaataactaagctcacctctttaagatgagaagctagagcttagctacacaccccttataatagctaagctcacccccatgccaaaatacatgaaaatacaaaaaaagtccctactgcaaagactactcaaaatgccctgaaatacaaggctaaaaccctatattactagaatgaccaaaatacaagcccaaaaaaaaggaaaaacctattctaatatttacaaagaagagtggactcaaccttggcccatgggttcaaaaaatctacccttaggttcatgagaaccctagggccttctttagcaactctagccgaatcctcttgtagtcttctatccaatacccttggggggttggattgcatcag

SEQ ID NO: 34326 - DNA, 392 bp, Glycine max
cttgcttaaggaaaccaagttcagtatcgcttatgccaatgacttgttggtagaaagaaccattttgtgtgggtgcagacgggcaacaacttccaattgaggagaaagaataacttcttcacaaatcttctcagtccaacatggaaatgcaacctatttttaaaaaaaataggttttttactagctacaaacaagttagtaagttgtaaccctatcctagaaacaaaacaataacccatttcctagttacaaaacactaatccatctaaagcaaagaatcttgcaagttaaaatcatagttgctcatgagatcttcaactccattatttccaataacatctccttcatcattcaaatcaataatgtcaaaatcttccaaaggcggtgatgct

SEQ ID NO: 34327 - DNA, 572 bp, Glycine max
  unsure at all n locations
tctctcatgtcgcgccagtcagccaattcgcgttaataacgnagattatcggcggtgcatctttcccntctcncccagagcgcanttgttgatgcactcgtattccgngacactatantatactcaagcttgtgctaaaggaagacataacatgtgttgagatgcctttaaccttacctcacatgaaactcgatgaagatgggatgattaaccagttcgatacagatagatggaagcctaatagaagaagcctggttgttgctaaggtaagaaagaaggctcattatacatcatgcacggaaaagatatgcacaagggaaagacaaattgttgcttcaagatgcaactcaaagaatttgtggcacatagatattggcgacacttcgagtgaagaaaggttcgaaagtttctagccaaatgatctactttccaaacacttaagaggcaacccacttgaatcccttgaagattgtcttgcaggtaaataatgcagagtgtctttccaaagattgaatgaactagaaggagatagcatatccttgatcttgtccacttagatatctgctcaatgg

SEQ ID NO: 34328 - DNA, 397 bp, Glycine max
  unsure at all n locations
ttctccttcttttccctataaataggggaaggatggaagaacaaaaatgttcaaccctcctggtatctgaggatcacttaaaattagtgagaaaaattgtttccgtgaagaaaatccaaactgaggcgcttctgtaatgcttccaagacgattccgtgggcgatttcgcaaaggtttttcgccattcttcatcattcttcgttcgctcttcagtcttcaaccggtaagttcccgaaatcaaacttttcaattcattctatgtacccttagtggtcctcatttgtttcgcatgcttttatttttatttcatttactttccgtacccccttttgacgtgctntagtaatttatttaagtcattttctcgcatcctcaaaactagaatgaatttccaccg

SEQ ID NO: 34329 - DNA, 488 bp, Glycine max
  unsure at all n locations
cgacgagctcttttgatgcgatcgctagctatgtcagngacactatataatactcacgctgtaggctgttcaattgcttcagattgttgcccagaatggcaaaggtctgtgtggtggtcggcagaggagcataaaccacaaagtctggcgataggtgcagattttttattcattgccagttggattaccaggttaaccaaggcatctagtttaccttcaagcttcttagtctcacttgatgaaatgaattcgtggctacttcatgcactcctctaatgacaatagcatcatttctggcactgaattgctgggagttggaagccatcttctcaattaaatttctagcttcagcaggggttatgtctccaagggctccaccactggcagcatctatcatacttctctccatgttgctgagtccttcataaaaatattggaggagaagctgctctgaaatctggtggtgagggcaactagcacataatttn

SEQ ID NO: 34330 - DNA, 386 bp, Glycine max
tgcaaactttgtgaactatatatttcaagacaaatagaattggagctcaaaagacaatggcacttgagacttatgctacgtatgaaagattgaagtatatcatggtattttttaaaattgtttacattagtataaatatatttttcctattaaatcaatattaaaatattgttacttttttttatttgtaggattcaaagataagtattgaggctcacagtaattcatagagattgtttgactaactgaactagacctcataagtgatatatatatatatatatatatatatatatatctatatatatctatatgtatatatatatatatatatatatgtatataatcatatcttgtctttagttgacaacacccttgcatgatag

SEQ ID NO: 34331 - DNA, 443 bp, Glycine max
ttaagcttgcaacggtatgaaataataacacacacaggagttaatattctcatttatgtgttaaaaaaactatgagtagtagataaaaataaaaatgtatgttgttattcaagaaaaagaaaagctaagtgtggaaaggctagtaacagagctggagtaaaaagaaaaaggttaatctatggatgaatgctctcctataacttacgtttgcagcctacaaaaaccatgatttgtttgcagcctagcctcattacaagcctagtcaaagtccttcggattcaagtttgtgtgttcttgactgtatggtatgagatgaagtgcacagattgagacttatgttggttgttgactgatggatagcctatacactactgcttgagtgaaataatagctgtgaggctttggttaataatcctgtcttgatatctatcattcctactaac

SEQ ID NO: 34332 - DNA, 384 bp, Glycine max
  unsure at all n locations
agctttttgaaaaaccaaaaggcacatccaaaacatccaaccaatatcaaacttttacaccaccaagctatcagcaaatatagcacctaataattagaacttgataaaaaataaataagaattctgcacaaaggggtatactaagcccaactacatcaagatatgttcatcaaagtgaagaggacatacaagaggtccactactcatatatgatgacatggaaggcatttttagcctagccttaagccaaaacaactcctaaccttaatcatgtcaatcacctcagcaaaatccaactatgctcaatggaaacatattatgattcaatgttaacaatagcttccagcactccgagactntgtttccatgtgccaaatcatagag

SEQ ID NO: 34333 - DNA, 424 bp, Glycine max
caattgatggccaaaacttatgttaaagataattattctttgttttgtcaccccattcaaaagatgtccaaattctttattgttctcattgtcaatccgtcagcttatcctcaagcgatccatgtatgcagaaggccgtttatacagtgaatttaagatggcttacgttctaacctgcctcatcaacctgtcaaccattcacaatgagagtgctagtttaaatattataaaataaaaaatataaaaaatctttcgaagaggctaaataattgttgttactaaaccttataaaaacatcataaatggttcaaaactttcaaatgagtctgaaaacatagggacatgtcataatttttcaaaatagatgaaacgcgaaagtgatcctataacagtgtaaccaaacatgagatacacatctccaccg

SEQ ID NO: 34334 - DNA, 220 bp, Glycine max
gagtcgagaatactctattatttatttggacaagtttgaatatgatgtacaagaaaaatgaatgtgaacctttttcccctttgaaagacttgtaaaaaaaaatgttttaaaaatacttttaattaatatttgaattttttttatctcttattagcatatatgtgacgggtagacggtgtcacaagtggtacctcgacaccggcgcaagcaaccacatgtg

SEQ ID NO: 34335 - DNA, 436 bp, Glycine max
tccaacggtaagatataataacacacacaggagttaatatgttcaacattgtgttaaaaaaactataagtagtaaataaaaataaaaatgtatgttgttattcaagaaaaagaaaagctaagtgtggaaaggcaagtaacagagctggagtaaaaagaaaaaggttaatctatggatgaatgctctcctataacttaagtttgcagcctaaaaaaaccatgatttgtttgcagcctagcctcattacaagcctagtaaaagtccttcggattcaagtttgtgtgttcttgactgtatggtatgagatgaagtgcaaagattgagacttatgttggttgttgactgatggatagcctaaacactagtgcttgagtgaaatactagctgtgaggctttggttaataatccttccttgatatctatcattcctactaac

SEQ ID NO: 34336 - DNA, 212 bp, Glycine max
  unsure at all n locations
actaattgtgattgtgatagacaaaagagagagccttgtgcttcacgcactgacttacttttgtacatgtttgattattcttgctgatatctgatactctactntattgccatgtattcgcatcatctagaaccataatctacctcttggtttgactcaccatttgtgtctacctagctcttgtattaagatggcaaccatacgaaagtttc

SEQ ID NO: 34337 - DNA, 434 bp, Glycine max
  unsure at all n locations
ctagcacacttcagagatcttcgaaaagatcccaacggtcagatcattgacaagtgtcntttgaagttgcagaccaaatttcgagaagatccaacagttaacaaaggctgggcagcgtttttaccgagacagcttcatgtagttttctctagaagcttcattaagaggcttcctccaaaagcttcattaagaggcttctagaacactccagacatcttctcaaagatcccaacggtcagatcatggaaaaatatcttgtgaagttgcagaccaaatttggaaaagatccaacggttaacgaacactgggcatcgtttttaccgaggcagctacatgtagctntctctagaagcttcattaagaggcttcctccagaagcttcctcgtggcttctttgagaagctttctcgagagggcttcttgagaagctagan

SEQ ID NO: 34338 - DNA, 430 bp, Glycine max
  unsure at all n locations
atacccttcacttgcaagaaccacttctcataacaacatcactcactcttctgctagtgtccacaacaatctacttagtccaaaagaaattcataatactggggcatctagttcgtctaaactttggcatcaaagactaggccatcctaacaaggatgcactagcaattgtactaaataaatgtaatataccctttatcaataaaactagcagcgatttttgtaattcttgctctatagccaaatctcacaaactaccctcttatccctcttctactgtatatactgcacctcttgaattagtattctttgatgtttgggggccctctttagatagtcatcttgtggattcttgtatctcctaacttgtgttgatgcctattccatattcacctggatttatctgcttaatcataaatctgaccgttctn

SEQ ID NO: 34339 - DNA, 164 bp, Glycine max
  unsure at all n locations
gcatctgtgcggtatttcacaccgcatatggtgcactctcagtacaatctgctctgatgccgcatagttaagccagccccgacacccgccaacacccgctgacgcgaaccccttgcggncgcatctaattaacttcgataatgatgctatacaagtttatcgtg

SEQ ID NO: 34340 - DNA, 399 bp, Glycine max
ttttctcggcgttggggagattcatatatacggtcgaacctgcaccggtgtcctctgctcgcatcctctttccagggatattagggagagaaccgtgttactcttattacagctcacctgatgtagaatgttgcacaacggtgagctggaacaaccaaactggttcccaaagacccgaataatctgttatctgtcttattattaaagaaaacatgcacacgcgcctaaagcgcttacttgtataggtgccttgattcccctgaatttggctccatctaatggagtgataatatgcgcctaaaattatgctgttattcgaacttagatttaacattatttctttctttaaggcgttagctataagtatatcgctaagattattcccttttgtttggcccg

SEQ ID NO: 34341 - DNA, 484 bp, Glycine max
  unsure at all n locations
agagtgggtttgtgcttcgctcntcgncacactagagacactaaaacttatcgcccttacgcactttaccttatttagaagaatctttgtgtgtattgtgaatacagttactgcgataaggtgacattggcttaggcattgactgaaagaagatcttggagaaacgaaatgagagtgcctacaatttagctcatgcaactctatttcatgctgatgcacgagacatagtatattatactttgatagcttcttctcctataactggacatgagatatgactatcgcatcgacgtcatatcagactcgcacaaaatggttcacacagacatgatcactatcttgatgagaaaaaggataccgagctctgccgacagtgactataacatgtacactactcatgccttctagcactcatgattatatatactcatgccctttgcacaagcgcaagccttaggattggagcgatccttgatgcatagat

SEQ ID NO: 34342 - DNA, 374 bp, Glycine max
gtgaagaattcagcttgacatccatttatagtggtcacagctgatgataaagcagaggtatgtacaaccttgacatgctttgtgttcataaaggagttctgcctcaattggttagatggcatggttgcttgtaattttctgtctgcatatgaaggaagtttgagttatatgctttattgtcccaataaaatggctgtcattgctagtaattaagatgcttcatggtagtatagattggtactatattgtctcccacatacaaatatttaatctgagaagtacgttgtggttagatgctagtgtatacaaaagtcagttccgagctctggtattttctttgttcttgcgactgttacctatctgtgtaatactag

SEQ ID NO: 34343 - DNA, 354 bp, Glycine max
  unsure at all n locations
agcttattgtcgtttgaatttgctcanagcttctgttctgaatttcgagcatctncatatactacgggaaacaatcggacatccgagtaaaaaggttttgctgcttgaattttctaagaggttatgatttcaattctgagcgtctcgatatattacgagactcaatcacgcatccgagtaaaaagttattgtcgttagatttttcttacagcttctatttccgattatgagcgtctcgatatattacgagattcattcggacatccgagtaaaaagctattgtcgctcgattctgctcaaagcttctgttatgaatttcgagtgtctccatatactacnggacacaatcggaca

SEQ ID NO: 34344 - DNA, 430 bp, Glycine max
  unsure at all n locations
ntgagcaatatcaaacgacaataactgtctactctgatgtccgattgtgtcccgtagtatatcgagacgctcaaaatttagaacacaagctctgcgcaaaatcaaacgacaataactttttactcagatgtccgattgtgtcccacagtatatcgaggcgctcgaaatttataacaaaagctctgagcaaaatcaaacgacaataacatcttactcgaatgtctgattgcgtcccatagtatatcgagatgctcgaaatttaaaacagaagctctgagcaaaatcaaacgacaataactttttactctgatgtccgaatgagtcctgtaatatatcgagacgttggaaattcaaaacagaagctctgagctaaatcaaacgacaataactttttactcgaatgttcgattgtgtcccgtaaataacgaag

SEQ ID NO: 34345 - DNA, 315 bp, Glycine max
  unsure at all n locations
agcttgatatgaggaagtgttgaagggtgaaactgtctgcttttattgctgaccacacagcggtacctggagatatgtcgcgggggtcaggagacctcggggacgtcaggtggggtgctattgcccaaaaccaagcttgaccaatccngacccaacccgggcatagtcggtcactgagaacctgtgatgtacctaagcacgcgagctcctggcagtcaacagatacaacgaacaaagaccacacagcaaggaggcttgtggtggctggccacctgcgaaacttgattgatatgtgagatatggtctctggcaatc

SEQ ID NO: 34346 - DNA, 428 bp, Glycine max
tgagatgaggaagtgttgaagggtgaaacttcctgcttttattgttgaccacagagtggtacctggagatatgtcgcgggggtcaggacaccttggggacgtcaggtggggtgctattgcccaaaaccaagcttgaccaatcccgacccaacccgggcatagtcggtcagtgagaacctgtgatgtacctaagcaggcgatctcctggcagtcaacacataaaaggaaaacaagaccacaaagcaaggaggcttgtggtggctggccagctgtgaattttgtgtaatatgtggatggcggcctctggtaatcgattacaaggcttaaaattgaggacaggaggctaagatggtctctggtaatcgattaccaaggggtgtaatcgattaccaggcttgaaaacgaagccacgaaacttacggagcctc

SEQ ID NO: 34347 - DNA, 360 bp, Glycine max
cagcttttctgattaagttcaacaagccatcactgctttattctccttcgattaactatatgcaaccgcacaacattatcttctgatcgcatggatctgatggttatatggcgccaaacaagtccctttcgcattcagatcctgagagtttttctaattcttgtggcggtgcgtttaacaaccgcggtggtggctggtagcactgcacccgcggaagaagccggggtcgtggttggcctgctaactctcacgtgcaagtctgcctgaagtatggtcacactacctcactcctgtattatcgacacgagcaacattatcaaccacacccaactctcgtcgctcaggatctactactatgcg

SEQ ID NO: 34348 - DNA, 432 bp, Glycine max
tcgcaagtttgaagggtattattattatggcacagttttatcacgcatggtcgcctgaagctgctcttgaatggggagggtgtgtcttctgttttggagcacatagatccttttctctacaagtgcagatcagttcacacccacaagagaagaacaaggtacgcaggttcttctgccagaatttactatgcatcaacatcatctctgagtagcaaaagccaccgttgtaatgcggaggcacgtcacacttctggcaatgggagtgttcatgatgaatatgatgacattgatgatgatgaggatgacgatgatgacgaggaggacgacgaggatgtgtttgacccacatggcttgtcttgtatccggagtttggtgttggacattgcttacaggccactttcatctcttacacaatcgcatcttttttaacta

SEQ ID NO: 34349 - DNA, 391 bp, Glycine max
  unsure at all n locations
agctttgttctatccctangcataaaacccattaggtgttcctctccatttctaagttcaaaagcatttcccaatgacaattcaaaccttcaagcaaagggtgatcaagccaaaacaagcattaatgcatagaagagaacacttgataatgaacaataaacatagattaataatcaaaatgtaaacattacgatgggctcacttacatcaaccccaaaatgggtaaatctaactacataactaccagaagaaaagaagaaaatagatgaaagagatgatgaaaaatggcaagagagagcttccncgctgcaacctacaaccctagatagttctcctaaccaaatctttcttcaattcgcatccttggaacttanatatggccaaacacact

SEQ ID NO: 34350 - DNA, 429 bp, Glycine max
  unsure at all n locations
tgtcntgatcattttgctcaatttctttgctttcttgttcataagcttttcctcttttcttctcgagcaatagcctctgcttttctttatctcgatagttatcgcacctaatatgcagttaatcatctatgtgtggtgattctctggttcaagcttgattcgtgatatggtatcagagttcttccattgaagagctctgctgcacaatcaagagaagttttcaaagcaatttatcctttcttcacctctgttttgagttttgtaacatctcaattttcgtaaactagattaaaaggaattgttatttataaataaatagaattctaaaaataatgatgagattttataaataaataaataacgagatataattattaattaaaataataattcgagagaaaataaaaaggatattttattcatctgttt

SEQ ID NO: 34351 - DNA, 405 bp, Glycine max
aagcttgcttgattcgctagagcttagctacacacgcgcctctaatagctgaacggacctccctgagaagctagagcatatctgcgcacacgcctctaatgactaagctcgcctccttgagatgagaagctggaggttaactagacacatcccctataatagctaagctcaccccatgccttaacacaagaaagtactataatgtccctactacaaagactgctcaaaatgccctgaaatacaaggctaataccatatactactattatgagcctgatacaacgcccgaacgatggaaaaacctattgtaatatttacaaagaagagaggacccagccttggcacatgggctaaataatatacccttacgttcatgataaacctagagccttctgttgcagctct

SEQ ID NO: 34352 - DNA, 306 bp, Glycine max
agcttcaccttctggtcctcctcatagttgttgcatgagaaaacatgctctattttcatctcccactccaagtaggcctccggatcattctttcctttaaatggaggaatgttgagtctaataccatcaattcggctttgtctacgaacaccatcattccctcttctcctcctttcttcttcattatgatctctattctccatttgatacaacctctcatggagcgcatcatctcgttgtttcattaacctctccaaatgttgcatcaaagcttgcatctggaattgcgaaagccccactccatca

SEQ ID NO: 34353 - DNA, 419 bp, Glycine max
  unsure at all n locations
gtgcacatccacaatgcgcgcataaacccaccatcccctgttgcccacctccaactgagctcacgtactcccacgtagcccatctcctcgtttctctcaacaccgggtccccatcaatcctctcaagcttacacaacatccaagcaaaacaacgttcaaacagcacaagctatcacagccaagcaaaacagagcaaaggcagaaaactctgctcaacacatgaaccaaaatcacagcttttctcacgtaaagaccacagtaacaattccttcgatccaattcgttaaccgttggatcgactccaaaattttactggaagtctatagtgtataagcctgcattttgaccgttgggatatactagcaaacatacagaactcattctgcactagactntccacagccaaccacacacaagca

SEQ ID NO: 34354 - DNA, 329 bp, Glycine max
  unsure at all n locations
agcttcataatgacaatatcttggaccgttgtcgccattctagagctcaattccactttccccctccgtcaaacccacttgtcgggtcctttgtgatttccaaccctatgatccctatcaaatgcctctcatcgaaggacatggtcattcgacacaacaaaggcttctactgttggaaaagagaacgttatacgaattaattgagagaaatagacgagagaatatctgaaagacgactagcttttatgacttgagaaatttcttggtttggctttctttctttggctttcnttggttcacttacaaatgacaatctttcccccttttat

SEQ ID NO: 34355 - DNA, 437 bp, Glycine max
tgcttgagaaacttccttgagaaacttgtttgagaagctttcttgataagctagagcttagctacacacccctctaatagctaagctcacctccttgagaagctagagcttagctacacacacccctctaatagctaagctcgcctccttgagatgagaagctagaggttaactatacacatcccctataatagctaagctcaccccatgccaaaatacaagaaaatacaaaaatgtccctactacaaagactgctcaaaatgccctgaaatacaaggctaaaaccatatactaatataatagccaaaatacaaggcccaaaagaaggaaaaacctattgtaatatttacaaagaagagtggacccaaccttggcccatgggctaaaaaatctacccttaggttcatgagaaacctagagccttctttagcagctct

SEQ ID NO: 34356 - DNA, 382 bp, Glycine max
  unsure at all n locations
agcttctatattatactacacgttttactgactggaagccagagttagtcattaacttatgtaaggtgaagaaagcatcgcatttgtgttcccttgactcagaaagcgagatttgatcccgtaagctttcacgaagatccgcaagaccattattaattaaaaaagaaaacatattgagattcttgatatgcaaaattgatgggggcagttcattcaaacctgattgtactaaaaacaacgctcgaagagattgtggccaagtgttgctgctaaggctcttaagcgatgagcacccgctcacatttaacatctcaagcttcgggagagagcanatngattcatcaacataacgcaagctttcacaaccacgcatacttacata

SEQ ID NO: 34357 - DNA, 433 bp, Glycine max
taaatattttggggtgttctgcctttagggtgttttctacatgagtacaacgataccttctttcttttactatatatcttcccttttatataccttttatatacatttttccctttatgctttctgaccttttactatgtgtggacaccttaatgtgcttctctttatcctagataacagagagaaaaaatggagcactggcagacctggtgagtggttacatttaattttgccaaaaaaacaagtgatgttaccattagcttttcttccttatttttatctctgattttatcatttatcatgtaggatgatgttggttgttttaagtactatgccaagcttgtacgaagattgctaattgcagttgtgttcctagaaaacctgtggaatattgatttggttctttattctatatcacgttgtgattctgatt

SEQ ID NO: 34358 - DNA, 312 bp, Glycine max
tgaagagtcatcctccaatgaaaagaatgttggcggcataaacttctcaactatccatgtgcctgatacattttctatgactaggcctgatccattaatgagtcttgtgcatgaacaggaagcagtcccaccaatgaaatcacaactagatgcttatcttgaggagaacaatacttatatctctaataatgaaaactccacttttagtgccttggagtggtggacgaataatagtctcaaatatcaagattctatccagatggcaagagatatactagctgctctaatgtcaccagctgtatcacaatctac

SEQ ID NO: 34359 - DNA, 435 bp, Glycine max
tcaacctgttaacttgctttccatcaagatgattcgcttaagttaattatttctgtttgttcgaccaaaactatgttgctaggttttgataaaccctaagttaatattaattaataattttgcgcttcaaaaaattagaaaagaaattcggcgatccaaaatttctagatacgcatgctaatctgactaaagataagagtgtgttgtgcattactatcagttgaagacaccaacactatggagtaatgcgactttttgacttgtgaaattgctccgtaaattttattcattctctcccttttttgcggctatcacaatggataagagacacacattaaaactcctaaattagagattcctataaaattctcaaccaagagaaaaattatcctaaaaaagaaaataagttatacttacaatgtaatacaattagct

SEQ ID NO: 34360 - DNA, 169 bp, Glycine max
  unsure at all n locations
cgcatctgtgcggtatttcacaccgcatatggtgcactctcagtacaatctgctctgatagccgcatattaagccaagcccgacacccgccaacacccgctgacgcgaaccccttgcggncggatnaatataacttcgtataagtgtgctcttcgaaattattacgact

SEQ ID NO: 34361 - DNA, 320 bp, Glycine max
agcttgtctccttacttgtggcttttgccttggcgtctgcactagctgagcccttcgccaattcgctacagccttggtgtaacgctgccacgagaccactttacatagctgcaaaacaagaataaaatcatattgcatactctctccaaaacagtaaaatgagtatgaacaaataatatattattctgttatctaatcacaattgactgtgaatgatacgactcttagccactataataactactgtaaaaatcataccaaacatgatttcttatttgtcgacaatataaatcctctcactaattaaactcactagcacc

SEQ ID NO: 34362 - DNA, 373 bp, Glycine max
atgtatggggacaacatgaaggatttaaaataagtggccgaatgcgattctaggcctaggaacccaagcttttaatttcaatacaaggaagcatgacttatgcctaggaatctaagtttggttttgaatgtaaaaaggcatgaatattatgacatgtttgagaggtttttattagaatttaaatttggttgccccatgaggaataccttgcacctaggtaccatggaaaatacctttcaacggtatgtatatatgcgaatatatggcataaaaataccttgcaaagtgtgaatataatgcataaaaataccttgcacagtgtgaatgtatagcagataatgcatttcaaaatctgtatatgtaggatatgtag

SEQ ID NO: 34363 - DNA, 357 bp, Glycine max
tgataaacgagagcttagcgccacgctcctataatagctacgctcaccgacttcagagacgatgagcttagctactcacagactgactttagattgactcgccaactcttcatggtacgctaggagatttgtattcacgaatcctatgttagctatgctgacccaatgcccaagtatcagaatcaacattcatgtccctactactaagactgctcagaatgccctgacatacaaggctttaaccatatactactataatagcgcaaatactgggcccttctcaaggaccttcctactgtgatatttacatagatgagtggaccctaccttggcccatgggctgattaccataccctt

SEQ ID NO: 34364 - DNA, 217 bp, Glycine max
  unsure at all n locations
atcttgttctgtcacgctaagcgcaattatctctgtgtttttctatttgttggaatcgggcttaccgagcctgctcgctaagctagtgttgtccagtagagtagtcgcacttggcgccccttgccgcactaagcgcacatccttatctgtctgacaaattatggaattgggcttaacgagcctgctcactaanccaattctacagaaaaaaaattgg

SEQ ID NO: 34365 - DNA, 288 bp, Glycine max
tctgttcctcacactcctaaataatgcatagatacatgcacattcaacataccttgtattatattggaatacctaagactgacaatgccatgctaaatttaggagcttcttgtactgttatactgataagccatcattatcttctatatactaaaccctttctgcaccatcttaattattgaatggcattaattgtcaatcaattatgcagttctataatatgggctcatttatctaatatgatgtgttcaatctaacttcaggaattaatgaaacattgcgcttaat

SEQ ID NO: 34366 - DNA, 222 bp, Glycine max
tttttctggtgggacatcttgacttgctgtggagtgtgacattcaccacatattctgccttcttctatttttatatcgcgaatgcctctaacagcccctttctcaatgattctcttcatgcctcttaagtgcacatgtcccgatctttgacgccatattttgacttcatcctctgtgcacaatacacatgcggaagactgactggccccttcatgcgtccat

SEQ ID NO: 34367 - DNA, 422 bp, Glycine max
tagggttaaagctcacgattgtacgtgtttatgcttcaattgttagccgtggctatacgagacatcatgccaaacaaagtcaagttaacgataactcgcctgtgctttttcttccatgctatatgtagcaaagccattgatcctgtcaagtttgatgagttggaaaatgaggctgcaattatattgtgccagttggatatgtatcttccccctgctttctttgacattcatgactcacttgattgtgcatctagtcagagaaatcacatgttgtggtcctatatatctacggtggatgtacccagttgagcgatacatgaagatcttcaaagggtatacaaagaatctatatcgtccagaagcatctattgttgagaggtacattgcagaataagccatcgaattatgttagaatacttaat

SEQ ID NO: 34368 - DNA, 385 bp, Glycine max
agcttctaacgggcatcacttcatcttggttgcgatcgactactttaccaaataggtcgaagccgcctcatactctatcgtcacgaggaatgtggttgctacgttcatcaaaagggagataatctattggtatggatcgcccaggaagattatcacaaacaatggcaccaatctgaataacaaaatgatgaaagaaatgtgcgacgagttcaagatccagcacggcaattccacgccttactagcctaagatgaatggggcagcacaggcggccaacaagaatatcaagaagattatctacaacatgactctgtcatataacgattggcatgaaattcttcctttcatgctgcatggctatcgaacctcggtacacacatcaatc

SEQ ID NO: 34369 - DNA, 433 bp, Glycine max
tcctcgtggcttctttgagaagctttcacaagaggcttctttgagaagctacatccttatctatccacccctctattaactaaattaacttccttaaaaataattacggatgaaaataacgcaacaaataatcaaacatcaaacataattactaataatatatagatatatatatatcagggtgttacaactctcccacccttttagaaatttcatcctcgaaatttaccttactcaaacaaggatgggtgagcttctcgcatctgaatttctaattcccacatggcatcttctcctgatgcacctccccatatcaccttgaccaacgaaatctctttccctcttaggtgttttgttcgccaatcctcgatcctcaaaggcaatatttcatatgtcaaattctccttcacttgtacatcatccaattcaatca

SEQ ID NO: 34370 - DNA, 319 bp, Glycine max
  unsure at all n locations
ttcttattntcattccgggaatttgatcacgaaaaacaagcctgaagtgacaggacaaagacgtgagtatctagcaccagcttctatgagaacttctncaacaaacagtggtcttcttcttgcaactactgctcttcctcctgcgaatgacagcaccatggaagagttgcaacgcgggcattccagctgcaattgctcactgcaaaaattctattctcaaacaagagaagctcagctgctgatacaaacctggcacactttttttttttcttgttaccacctgcgcctcttattgccataccctcctcattttatctcc

SEQ ID NO: 34371 - DNA, 431 bp, Glycine max
  unsure at all n locations
taactaanattaaatatattaaaagatttggcatatactatcacttaaacgttgaaattacctccattagtatagttttcgttcaacagaaattaaactagtaatatagtcattatagatctacaatgagttctttggatttttgttttagaatattaggatttaaaaccaactaattaaataacaatcataggtttcatttacaatttatatatgtaaacaaattaattattagatcaaaattaattgtcataaaatttattatataaattcagatgtactttgaatatacataagacattgtagtcttatatatagcgacattaattattttataacataattagcatattagttcggttgattagagcgaatgcaaaagtcacaggttcgattcctgcattacccattaattctagattcacttatga

SEQ ID NO: 34372 - DNA, 313 bp, Glycine max
agcttgtcaaataatgtctgacactatttatcaaacaggattgccactcaaacgctcccacagccttacatcttatatttttgcgcggtgtcaaagtgaacatctaattagtttatcttttgttatttattgtatcgctgctgagaacaatttgaattacaatacaataattctatttcctccacatatctattgtctctcttctctcctctgttttttataatttcctcctcacaaccaacaatcggtatcaagagctctattcttacgggacctgcaccatggaacgcgatgcgagagaattatgatcttt

SEQ ID NO: 34373 - DNA, 304 bp, Glycine max
tgcatggctcactaagccttagtctatgacagagagctatttgtgcttagcgagactcactcgcttagcgcgacacactaaacaggcttagcgccatcaggcgcttagcccaaattgactactggaacttaattggcttagcgagcaagctcgctaagcccaattccaaaatagagaagaaatagcacttagcgagacttactcgcttaacgcatgaacaaaaactcagaaaactaaattgctttcggcttagcgagactgacttgcttagcccaggcttattcactaaaagaggttgggtggc

SEQ ID NO: 34374 - DNA, 139 bp, Glycine max
tgtattctagctttgtccgcgtgctcaaagctttggtccaacggattaaagcgttgccttatcttaatgacttatttttgactgatgaatgactcttggccggccatggaaatcctatacatcaagcccacagttggca

SEQ ID NO: 34375 - DNA, 416 bp, Glycine max
tgtgcctctagtagtaaggtgattgcttctttatttgttgttaaaaaaataatgaagaggagcaacacaataatgagcccatgatacataatgaacctattatggaagaaccacaagaagtaacattaaggaggtctcaaagagaaaggagaccagctatttcgaatgactatgtggtatacctatataaaacaaaaacaaacttaagcattaatgataataatctagtttcattttcacaagctataagatgtgataattgtgagaagtggttaaatgtcatgaaagaaaagataaattccataaaatataatggtgtttaggaccttgtagaattgccaaagggttgtagagatttggttgtcagtgggtcttcaagactaaatgtgactctcatggcaaccttgagtgttaca

SEQ ID NO: 34376 - DNA, 397 bp, Glycine max
tagaagaagtcagtgactatatttcggtgttgaagatgcaagtacaagccatgaaggctctcgtcgatgtccttgccactagtgcttcgtcgccagctccgatcggtttgagcaaatgtaatcacaaaaatattgtgtacttcactactttatatggtcatatttatcttaattgaactttaatttctttctatcctatacacattggatatgttcaatcataatttacattatgccttcttcacattcagcataatagatgcaataaacaggagtgatatttgatgaaataaactcattgccctaatgattaacgaaatgtgtacatttgatgccaagatgtatacatctacggatattatatataaagtggccctacataatagaaatgatatag

SEQ ID NO: 34377 - DNA, 434 bp, Glycine max
tacaagaaaaccaaacaatgccttgatcatcttaaacgagcaaagaattcaagaattatgagaatcaatcaaaatcaattgtgataatcccaatggtggcactcaaagcatccaagaatcgcacaactcacatggttaaagcaacattcaagagttctcaagagttatgctacatccactaaccacaatcaatgcatcatccaaccattctactcactcattagtgcatccacacatatgattgcaagagaaactttccatattattcccaacatgcataagtgttctcacaagctctaaacctcaaaccacatgtcataacattacaaaataaaagatgaacagtaaatacaccacaattgctaagaaaaataaaacataaaactaccacatgatgatattaatatgagatgatgttgttattgatgactatg

SEQ ID NO: 34378 - DNA, 194 bp, Glycine max
gcttaatcactgctaaagcaaaatctaacccgattgtcacactataacctcagctaaataaaaaaaaggccaaataataataaaataatcaaaatatctctgacaaaaaataaaatcaaaaatcacaaaaatcaatcggacattcttctttgaaacgttccttgaatgaattgactaataaccaaagtgaaact

SEQ ID NO: 34379 - DNA, 438 bp, Glycine max
gtgagccataaaaaaggagaaggacaatttccaatcatttatgaagcaaaaaaaaggagagaaggaaaatttccaatcaaaggaaaaaagagaggacaggaaattcccaatcaaagagtgggagaaagcaaaaagaaaagaaaggaaattcccaatcaaagaatgggagaaagaaaaaagagaaggagaagaaggaaagaaagctcctgatcaaggatcgaaagaaaacagaagaaatgtgcagagaggtctctggaccagacaatatctgaacaaatacggaattgtcaccaaatgaacaaaagaaagataaggaaaccataacctaaaagtggtcttctccctttgattaccaaccaaaatcctgtgcgtcggtgacttgttcgcctcgcgtcaaacaaaaacagataaagaaaaagccaacataaaatcaaaagc

SEQ ID NO: 34380 - DNA, 406 bp, Glycine max
  unsure at all n locations
cttatgagagcaaaattgcctcaatcatttccaaatatgcatgtgaattaggaagcatcaacaagaatcaagccaaggctattgtgcaagaaatcaatggggcaaaacacaccaaatgattatgatgatggatggctcacattctcacaaaggtaaactcatcactttcaaattgagctttcaaaactatcatgacatgaagaggagaatcaaggatttcaagtcacaaaatgtcaagaacttttattttcaaaacaattacccatttcttgaacatatcctataattcaaagaaaaacatgcaaagtcgtacatgcacacagaattgaccctcaatattaaactagaaatccgacgaaactaacaacagtaacaaattaacacaactaacatattatcaaaaccn

SEQ ID NO: 34381 - DNA, 434 bp, Glycine max
  unsure at all n locations
tggatttccttttagtagggaatctatccttcctaagatggagcctaacccaatcaccctcattaagaattagctcttttcttcctctattgcctttagttgagtacaccgttgttcggttctctatttagttcttaaccctctcatgcaacttctttacaaactcttacctagattccccttctttatgtataaaaaaagtgtccagtggaaggggaatgaggtctaacggcgttaggggatggaacccatagacaacctcaaaaggggattgcttggtggttctatgaacccccctgttgtatgaaaattctacatgaggaagatcctcatcccaagacttatggttgcctttcagaagagcccttanaagggtggataaagacctattcactacctttgtttgcccatcagtttgtggatgacaagtggta

SEQ ID NO: 34382 - DNA, 309 bp, Glycine max
gctttgacttgagtcatcaagagattatcaatatgtgaccatggcatgagtttccagaacatcaatcatctttgaatcatctatctttcaatcttccttcaacattcttcaatcaatcttttcaactctttctacagaatcttcggattcatcttctcttcatcctctcttaaggtcttgttcaatactttctctttcacgaaaagttttttgataaacaacttgcgctattcatctttctcattctcttctcctccatgtcggccttcatctgcctttgcaccccccgaattcttctgcgtctctctc

SEQ ID NO: 34383 - DNA, 426 bp, Glycine max
tcacagatgaccagtccatttatcatcccaccactcactcttacgtatgagttggagggtagacccatgcatatgtttagctcttggcttctattccctatgtcaataatcgcgaaaaagaagtttactacaggaaaaactacattaaaagctctctattccgtctagtctgatattacgtaaccagtccatttcgtatgtctttcgaagcgaggggccgggtttccttgtttcctttcggaggacatggtacatgccctgcaagaaaatagtctttataataataattataataataagaagtcctgttctctctcggcagctaccatcggatcatcggagttgggcagttacatctttcattcaataaccagtggttgaaggttgattcccaacaagagcaacatgttcaataagatgggagct

SEQ ID NO: 34384 - DNA, 376 bp, Glycine max
  unsure at all n locations
tcttctgttgcattatgctatgaatgtctttacatgttataacctcgctgacatcttttgccttgactggaattgccatgacaggtttattgatactggctttgatgtataggacttgatattgtgttgcggcatgctattcctattgaactaactcaccatccttcacttgccaacttgtgatgacattagttgttggatcacctatgatgtcttgcatacaagggtaagcatatatgcttgctgatggcataagcatgaatcctattcaagaaaaagaccttcatcttgactctttcatacaagacagggaacttgactcggatatgctttctgtttgtaacgtatgtctgacacaaaagaaatgctcgttgcn

SEQ ID NO: 34385 - DNA, 428 bp, Glycine max
ctgttgcattctactaatatatggagttggtttctgctttttctgagaataacaattggttgaccacaacaacgctagaggcggtaaaggacaacggtctttcaaataaacctgttatgcgtgaacaaacattattaactcaaatgaaccagggaagtgattgcctaattcttagactaactaccttcaatgtacttgaacaaaatgatttccaaacacatgaccgaaacatatcatgcggtgcacagaagaatcgggtggtggttgaattttaagaggaaaaaatgtcatgctttgttgtagggacaacgatacaaggattacgttataccatgatgcaatgacatatctcatctccattatatccatccacttgttcacactaacctgaatcaagcaaacatacacatctaagttatttaaacttt

SEQ ID NO: 34386 - DNA, 398 bp, Glycine max
  unsure at all n locations
tttttttattaattccaatcttattcctcactgaatgcgaaatgaatcactaaatgggggtataaagctttttgtggacaagcactctaaccttagggttcgcgatcttttgatgcatgtgtatttcaagttgaatggattatagtcttgtcaaaatttggatgtgctaattacatgtggtgcttgagtctaaacacaaacctatacgcatttggtaaggctaagtgtttttctttgagagatttctatcaccatgatacattcttaattttgacttgactacttgtccactttgcattttgtgatcatgtgttcatggattgcttgttaccttgaaaccattcttccattttccatctctctaatttntgtgcattggtaggatccattgaacaatg

SEQ ID NO: 34387 - DNA, 432 bp, Glycine max
  unsure at all n locations
tatggattccaatattaccccaaaagagagcatgtttcttanaagttactttaagggatgtcccactagaagctttcaaggctatgcttaactttttatatgatgggcaattgaatgacaaagtaatagattctggtgctttgttgctccaactccttctaagtttctcagctgtgatatgacctgctagaatagacattcctccaaatagcacagcgataacctatgagatttaatgtttcaataaaaacacaagtcaatattaaagttttaattaaacttcaaaaaatttatcgattacaaatcctagcagactttcttccaagagtaaaattataggcttaaaggagaaaaaaaatggaaataaataaattaataaaaaaattgataattacgtgatttaagagacccgtagctaacctgagttgaatg

SEQ ID NO: 34388 - DNA, 383 bp, Glycine max
ccttcgacctaacacgggcatgtttctgtctaagcccggattcaaggcgggttgcagcaccggctccgcttccctaactgtactagaggcggatgccgtggctttatcctctatggctatctggagttttagcatgacctccgaaatggaagccatttgatctttcaaggccgatagatcggtcttcatctgttcctgcacgccctcttcattatacatttttttggatcgagtgttataggggcgccttggcgttatcgtatttatgatgaaactcctaaagatatgaacgacggtgagcatgcctccgaaacatgagtatgagaatggatgatcggcgctcttggatacaccccaacgtttgtacataacgagaagagtct

SEQ ID NO: 34389 - DNA, 350 bp, Glycine max
ctgtatctcaaaaacgttcaactaagatgtataaatgttatttacggactctctgcatgacatgtgagagtgccagatgatgttgtgctttatgagcatgatactcactcctatctctgaatctatggtccagctcctaccacattcgatcttgtgatctgcattatacattacatattgagagatatcttaattagatatacatgatagttgcatgatgtgccaagaaaagagagaatcatggaagttgtgacttacatgccattatctgataaggttgattatctctgaccatctgactgccaatgataacgatggttgatctgaccatttaaaatcaattattggtg

SEQ ID NO: 34390 - DNA, 347 bp, Glycine max
agctttaactactttgtgataccaacacagactacacttatgtttaaattaaaagccccgtttgtctgactattttgcttctgaaaaacaaaaatctggcactcgattaacacaatgctcgtttgtcagcgcgaacactggttgtttctagacatggaatctcaaacaagtcagcagattatcatttggcgacatgtgtctcgctaacgtgtcaagttattactctttactaggcactagacagccagacataaatattttcaatttgctacttcaattcaatcacacaatgcgaacaaaccgcataaacaatgaaatccgatcaccatcaacctacaaacacaaca

SEQ ID NO: 34391 - DNA, 430 bp, Glycine max
  unsure at all n locations
tctttcaagggggacatgaactatgattgcacccttatatgtgcttataatttttacatttcactggaagagcaataacaatatgtatgttcactttctagagcatctcaatacaccatgattaatgcacatttttagaactcccccctcccccctccccctttttttttctaaatttgtgggtgtgaaattataaagcattaatcaacttgtaatttttcattctatgcaatgatgattattatgtttttatcaagagtggacattccaacctccaatttgtgttactagtcctaaaatggtagaattgtttgaaaatcataccaataattttctcaaacgaaggcattgtgttgtaccaattagagatttgttctggatgtttagaatgattacgattatangatgagatacccattggattatcaaa

SEQ ID NO: 34392 - DNA, 391 bp, Glycine max
  unsure at all n locations
agcttgctgcgtgcacaagagaaacaagaagaagaagatcacagaagaacgaagaaggtcgcggatcaagaagaacgagcacggaagaagatgaaaagcttgggtgcaaaactttaaaaaaaaatatgcaggggtattttttacttttacccttaagtgctgggtgcaccagcaataatgcttggtgcacctaagcagccccctttattaaacctctaaagttagttagccacgtgcaacacgcgagattcacgatttctatctttgacgtacgtacacgtagtcgcctagtatcctacattgttgtgccgcgcaacataatttacaaaataataatanaatcttacaacgtaattcttttctgatgctcttacacatatatattgcatac

SEQ ID NO: 34393 - DNA, 432 bp, Glycine max
tctagccaaatggacttaccttgaattaattcctttgatagcccttttgagccttgtttccctttccttgttttgaagctcactacaagccttaagtgaaaaaccatgatatcaccatatccttaaggaattttggagctttggaattgttttgggaataagtgtggggggtttttgtttcattggacaacttgttttgttggctatgcttcatgatgtattttgggccatacttgatgtacattgtatattggttaaatgttggacatgctgaatgaaatgttgtttctcaaaggctataaaaaaaacaagaataaaaaaaaattattcgaaaaataaaaaatcgaaaaaagaaaaagaacagcaataaagttgagtgaataagatcttaaatggcacaagaatgatgaaactcttggttctactcttcat

SEQ ID NO: 34394 - DNA, 389 bp, Glycine max
agctttcttttgtaatagccccaacaataagatttggaagttgatactctaccctgtgtacaccacacgtactgatactaagcaataatattttgttgaaataggtagctcaaaatttaatagctaattagtggattcatttaaaaatagtgtcagaaagattaaggatattccaaaaatattgcccaggaagaacaacttctgatatctataagtattaagtagtctcaaaacacaaatggcaggaaaaaaatgaggaaagactagaggctctctttgacaaaagttgcaaagtatttggtggcataccttgagaatagccgcaatatctcacaatgtaatttagaagctgagtaagcatacactctaacacttgtttccacaaccac

SEQ ID NO: 34395 - DNA, 396 bp, Glycine max
tgcccttctgatccgaagaggctgacccttgcggagcccgtcgagagcgaaattgacctcgtcaacgtgctccatcatctctccgaactcctgcgcctccatcagcgtcgacgtcgccggaatcccctccgccggcgcccgcttcgccctcttcgactcccttgctccgcctgcgccggtgccgtttccgaagtcgccgatctccgaatcgaagaaggaccaatgctgcgaggacgagtcctgtgaggagaacgcgaagccgcagagagggtcgtcaatctcctgagataaggaatccctgaatggctccgaaacgtcgtcgtttagagaggacgagcccgaatacgttcccgagagggttcctttgcggcggccgtatgtgcggacgatcatctt

SEQ ID NO: 34396 - DNA, 341 bp, Glycine max
  unsure at all n locations
tagcttctagtttgtggtcatgtaacactaaggctttggatttattttccctatttaaaaccaactcagtgtttccaaaagatgcttttttatcaaattatgcacacatctgagcccattaaggcattcggaaaaattttcacagcattcacccttcaggtgtacacatatttttttcttttttttcaaaaaccttttgtgttttgatcggcggaaccttttttcaaagaaaaactggcagtcacttctttccaaaagcgtcttggctttgtagaagcaaagcttcatggcgaatcanaggtgttntgatgataacaatgatgataacacaagatgatgac

SEQ ID NO: 34397 - DNA, 295 bp, Glycine max
tattttccattcttagaggcttttacacatgaggtatgactcaactgcatgtacttacactagctatgtctgctaaattcgactccaaattccaacaaactccatgcagaatacgcaactcttttattgaatgataatattaggattattaataatttaaacataatattgctctcttttttatcaatagttttaaaactattacaaacgaatgaacacaaatatttgaattaataaattaatatttactactatattttaaattaatgtattgggcaatgatatttgaatgatg

SEQ ID NO: 34398 - DNA, 375 bp, Glycine max
  unsure at all n locations
agcttatcccaagaggggatggacctttttgatgcaatcctatgccgcaagggcattggatagaagaccccaagtagaatgggccacagatgcaagagaaggccctatggttcttatgagccttanggtagattctgggcccatgggctaagtacgagcccacttatctttgtaaatattagattaaggtttcattatttttgggccttgcatttacggctccataatgtacgtagggtaccctagaaatatangatttttcagcccttgtattttacggcacctagactagtttttgtattacgggtagttttgtaatctcacatgcactaagtggatatttgatgtgtgcggctggaaataaacttaattgaa

SEQ ID NO: 34399 - DNA, 428 bp, Glycine max
ttctccactaagttgcctaatgcctgaaatgtcttctctaatggcaatggtcctagatgcagggaagaatttttccatgaacaccctattaaggtcatcccagctgaaaatagacctgggagcaaggtagtatagccaatcttttaccactcccttcagagaatgaggaaaagcctttagaaagtcatgatcttcttggacatcagggggcttcatggtggaacaaacaatatggaactccttaagatgtttatgaggatcttcacctgcaagagcatgaaacttgggctgcaaatgtattagtccagtcttgagaacatatggaacaccctcatcagaatattgaatgcacaagctttcataagtgaaatcaggtgcagccatctccctaagaatcctctcacgaggtggaggttgatccatgttct

SEQ ID NO: 34400 - DNA, 395 bp, Glycine max
  unsure at all n locations
aaaccaacatgtttaagtaataataacaataataataataataataataataataataataataataataataataataaatattattattattaaataaaaaaattaaaactcttcagattcttataaaataataaatagaaaataaaagacattttcagacaatttaaatatttttgtttggctatattagtataaatcatctctaatccatacattttttaatattatgctctttttttattttcttttgatatactttgtgttttaacgacttgaatttaatatgattatgtttatcaattatttttgaatttgtacattacttatacgtaattctataagtttcattntttttagttagtatttcactaggttttaaaataattaattgg

SEQ ID NO: 34401 - DNA, 64 bp, Glycine max
ctccgctcatgagaatcagatgattcaaatgtttgatgtaacaaagatgataaccaaagatgat

SEQ ID NO: 34402 - DNA, 397 bp, Glycine max
gcatttagaaatgttagtcagtagacaaattgattgagaaagaaaagcttgaaccataactcggtgagagtgtgaactcaattattgagagaacgactagcatagagcaatgacttttgtttcaatctctgaattttagaatgaaatgcataaatatggatatgatgaaggccattattgttttgaaagccacttgaccaaaaagcttacctgtttataaatgataatatcatttgcacccttctgtgaattgaattgtaatggtcaaattgaaccttaagctttgaaattgttatctctatttaccttgcttaggatttaattgggttaagacaactttgccccacatttgggggagtttgtttgatggataatttaaaaggtaagaaacaacacg

SEQ ID NO: 34403 - DNA, 482 bp, Glycine max
cgcgcgcccaatgagcctcgtattacgtcacactatataatactcaagctcgtgtcaacaaataggacaccttctataaatctaggattcatgcacgggtaaacctttgtagttgttctacgttaccgtcatagtgatttatttgtgataaatggtgagccaaccaacttaatttaaccatactgtcttgaagttcaccttcctgtggtctgactcccaacaattcttcacataaatcaacccaatcaagatttgttggaccaattaatggtgccccatcaacacgcagacctaataatacagagacatcttaaagagtaatcgtacattctccgcatctcatgtgaaatgtatgtgtttcgggccttcatctgtcaatcaaggcagtcattaatgacgcatttattcttaggtatgtcatcttcattatccaataaaaactagattgccgaagtagaggaataatctcctctagtatttcg

SEQ ID NO: 34404 - DNA, 393 bp, Glycine max
tacaccatgatatcgccatatccttactgaattctggagctttggacttggcttgggaataagcgtgggggatttagtgttcttggagcacatgttttgatgggcgtgcttcatgatagattatgagccatccttgatgtacactgcgtatgggccaaatgtgggacatgctaaatatcatggtgtttatcatatgctactgcttatagagctacagaatcggcgagcatactgatgagccgtgaggtggagtgaataacatcttaagtgaccacacatggaggagactgttgagtctactctgtatgatcaaacactatctttacttctttatattgtcctatcgttacgtactatgcactcatgcatcattagctctctattcgttcgagc

SEQ ID NO: 34405 - DNA, 428 bp, Glycine max
  unsure at all n locations
tcgacgcttggtaagggatatacgtccttgtagatgtcttgntgatgtcggagtagtcagagcacatacgtcatttgccattggccttttttaccatgacaatgttggccaaccaattcgaatatctgacctttctgataaattgggccttgagtaacttgtcaacctcctttctgaccaccttttgttgctcttctcccatctntcttggcttctatgatactagtttagccttggggttgatgaccaattcatggcatatgatgctagggtggataccaagcatgtcaaatggttgccaagctaagtgcactatctaggtttatgtccaagttctaacttgacaagttcttcgatcggtttcagacctttgtgaaaaatgtcatcccacggatctacatcgaatacaccatcttgatatatcctan

SEQ ID NO: 34406 - DNA, 397 bp, Glycine max
ctttgttctttttataaaatgagaagttttgaactcatcatgttatctaaaaaccttggggtggatccaagtgctccgatcatccatttgcatactcatgttttggtggcatactcaccgttgcttatttctttaggaatttcatcataactaagaaaacatcaaggcacccctataacactcgatccagaaaaatggataatgaagagggcgtgcaggaacagatgaaggccgatctatcggctttaaaagatcaaatggcttccatctcggaggtcatgttaaaactctagaaaaccatagaggataaagccacggcaaccgcctccagtatggttagggaagcggagccggtgctgcaacccgctttaaatccgggccgagacagatacacggg

SEQ ID NO: 34407 - DNA, 429 bp, Glycine max
acaaatctgttttaaatccaagcccataagtaatatctaatcaaatctagataagataagataagataagatctagatgaaataatatctagataagataagatataattttgtagaataaattagtctgccctcttcaagtccaagcccaattctggattcaagcccaagcccaattctagattcaagcccaatgcttcattaattcttgaaattagattaaaaacatcaaattagctgaatggacccaaataataaaactgcctaattaatttgacaattaagactaatcaatacttaaaatggtgctaaaagggttaagaaataggagaaaataatggcacatcaaaaccccccatacttagccttttgcactcctgggcaaaatgaaataaagaacacaatccaaggatataaaagagagacaag

SEQ ID NO: 34408 - DNA, 407 bp, Glycine max
  unsure at all n locations
tgcattctttggacaagctaaacatgcaaactagaaactaaaatcaaaaactaaaaactgaaacataaatataaacctaaattataaaatgtactaaaagcaaaataataataaaagtgttcaaaagataggaaaatagaagtcctgtcatgggtcctatggtgggtcctgtggtgcagaaggggaaaaatccatggttgtgacatcatcctcatcctcagagagctccagcacaggcgtgcctactggtgatgcctgtggggaagtcaactccagcacaggtgtggtcactggtgatggttgtggagtcgtgtcgggagtagcctccacaacgtcctcctgagtagctgggtcagtctctaagatctctggctctggaatctctaagtcagcctctggatcaacan

SEQ ID NO: 34409 - DNA, 425 bp, Glycine max
  unsure at all n locations
taaaagcccaattgaaccttccttcttctggtatttttgtcactttaagttatgcagttcggatttaattatctcactctcaaataagatatcttactcctgtatgatatgttctctctctctctctctctcacacacacacacacacacacatatatatatacatataatcttttccgatttggttttattaaattatgtttaaagcaataaattcaattagtatctttacaattcgttgattgatttggtttttaaaatgatgttttgaaagcccatatatatatatatatatatatatatatatatatatatataatagccttgtatttaaaatagaaaaattaagactaaattagaattttgatccgcctgtagtttcacatctaatccccttatttctaaatcaagacatgcatnctttt

SEQ ID NO: 34410 - DNA, 486 bp, Glycine max
  unsure at all n locations
gcgagaattgtgaatcgatcgacactctnggtgaatacgatctcgagacccgcggatcctttagagttcacctgcacgcatgcatgctttatatatatgtacacaatatttgtcttactttgcggatgacaataactaacattttgaccttgtaatttgtctattaaaagaaaaaagaggagaattctgtggaaaacatacacttaattcactttacgtttaatccaacttggactttatttatgttaactcacacacataataatgaatattgctgtaacgtcttctattgttggaataggtggatttggtcacaaaagaacctggattaggaaaaactcctatatagttcatatgttataggtccactcacttcaatagttgaaatctatgcatgcattaagagacaattgcaagtatcccatgtacaatacccaacattttaattgaacatgattcattgtcagacaaacgctatactgcttg

SEQ ID NO: 34411 - DNA, 143 bp, Glycine max
agctttgacatgacttctgggctgacgatcacctttgctaacagccaccttgctgctgttggccaatctgatgcccggtgcagctctgctcctacttatatcaattgcgcattactgcaacttcctttctgctatctacgaat

SEQ ID NO: 34412 - DNA, 482 bp, Glycine max
  unsure at all n locations
agggctggcnttttggcctttanngcttgnagagacantatantttactcaagcttatggtaaaatctgggacttagccatggtagaagtcttcactttgccattgcctccctcgcccaatactatgatcaaccgatgaggtgcttcaccttaggggacttccagctatcacctatggtagaagaatttgaagagatcctgggatgccctctagggggatggaaaccctacctcttctcagggttctatccctcatagtccaaatctcggagcaggaattagaccacaagaagcaagtcaaaaatagggtggttggaataccgagaaaatatttggaggcaaaagcaagaatcttggcaggtaaaggcgagtgggccccgttcattgatattctcgcactgttgattttcggaggagtcctctttccgaatgtggatgggttggtggacctggcagtgatcgacacttttctcgcctatcan

SEQ ID NO: 34413 - DNA, 473 bp, Glycine max
  unsure at all n locations
gcgtgtttgtgactcattgacaccccttgatgcatcactacctgggcaattcagctcggacccgggatcctctttatttacctgcaagcatgcaagctttctagctcttcattggtgtatttcgatctccttttgctgctctaaattgtgggaacgtgctcacatatgtggggcaatctaggcttgtatccttgcttgactaacctgaagtgccggtttgtatgacatggtcctatgcctatcatgcattttgaagtactgtgtcatgccacaattgccgcgttctcttgctattgatgcctaaacgcgcgcccaccacttgctggtgaaatgcctcaatggcattatcacgtgatttttgtaaggaaacaacccatgccgctgattggtttgcacatacttttgggacatgcattccttttcgacagagctacaataatctgccctcatgtgtcttacgtctcgataccacn

SEQ ID NO: 34414 - DNA, 395 bp, Glycine max
gcctctcgacatattatgcgcccgaatcggacatccgtgttatatgttatgaccattcgaatttctcgagagcttacgatgttcaattccgagcgtatcgacatattatatgcctgaatcggacctccgtgtgaaaagttatgaccattcgaatttcccgagagcttacgttgtgcattttcgagcgtctctacatgtgatgcgccttaatcgaacatccgtgtgaaaagctatgaccatttgaatttctccagagcttccgttgtccaatttcgagcctatcgatatgttatgcgcccgaattggaccttcgtgtgaaaagtcatgaccatttgaatttcactagagcttacgatgtttaatttcgagcgcatccacatattatgcgcctgaat

SEQ ID NO: 34415 - DNA, 380 bp, Glycine max
tttacagcagattttagtaatgacccactaacctataattaaaataacttaatgccattaacctagggaattaaaaaaaaacttaatggctgagtgtaactgatattgtggcaaccaaaagtcacccccaacagccaacaagtcagtcaccatttggtctcccaaaaggctgatgcctaggttgccaattgggcccttattacaacttgaactaaacctatctaaagcccttttagttgattaacccaaaacatatttttggtcagccaactttacaaggattgcgccattatttagacaaactaaacactctataattgagacaaagtggtgtcatttagttctcctccattagggccatgatacaactcacaaccttg

SEQ ID NO: 34416 - DNA, 423 bp, Glycine max
  unsure at all n locations
tcaagatatttgaatggtcataactttttatactaatgtccgattttgggacataagatatcaagacgctcgaaattgaacaacggaagctctcgagaaatgtgaatggtcataacattccacacgaatgttcgattgggggacataactcatgtagacgctcgaaattgaacaacgtaagttctcgagaaattcgaatagtcataacatttcactcggatgttcgattcgtgggcatattatatggagacgctcgtaattgaacaacgtgatgtgaatttgagtatgagcggatcatttgataccggctacggaggtttggatgacgccacttccagtgaaggaagataagtcatggtagacgccacttccaatgaaagaagataagtcaaggtagacgctcactttcagagaaagaagatn

SEQ ID NO: 34417 - DNA, 396 bp, Glycine max
ttgtgtcacttactttttggttagggcgtctcaatttcatgttagctcttagattttttttttttattaatccctggttgtattcatcatttcattaatatagaaatgatgagttgatttcataaaaaaaaagtttgagttggacttttttgctaaacaaaggcaaacgagtaaaatatcaaattagtccctcatttttagaggcactgtcaatttgatccctgagatttaaaaaatatcaaaatgatcctcgattttacatttcgtttgccacgttagcccctgtcattagtagtctcctaagaccgttagtaaatgtgtgatatgacacgctaaatgtcacctagacacacacgtgaaacttccacatcatgttttcttacttgccacgaaggg

SEQ ID NO: 34418 - DNA, 332 bp, Glycine max
aatgtgcccagagttgattcacaatgcatatgaagaaccacatggtcacatgactaccatcctatccatggttttggttctttctaactttatgtgggttatcactttaggttcaaatatatttttatttttaatacatatttaattcgcctatttattcctaacaaattctttattttctatcgaatgtttaataaaacgattattttatttattatcattcatattttattcccatcttcgataaacgagtgatcttatgattatcctatgatatatcacatacttttatgttagtttgggctatctataaataataaataatactttta

SEQ ID NO: 34419 - DNA, 397 bp, Glycine max
aattctcagtattatgaacatgtgaagcagtaccctttatttttaatcttgattaagtctcttccataaataaggattgtacccattgtctacacgaaaataaagactatctatcttccaaaaatgtaaatgcttttactttatagtgtaaaaaaggaacaacaaaaaagaaacacaccctcatcttttccacctatcctacatcttatgttatctattttactaatatttgatagacaactgtgattgaagtttttttctttttgtttcttgctctttttcttgtgatgattgaggaagtaccctttttctggaaaagtaagttctacattgattaattgtattattcccatatttttttttagctgaatgaacagacatattttgacccatttag

SEQ ID NO: 34420 - DNA, 319 bp, Glycine max
ctttcaagccaatttctattcaatgacaaattgtttatattatggagactggtgcatcagtccagacaccgcgggtcactcttcatgggacatgtttacaactgttcatcacaaaactaaagctcccttgaataactgaattgtaacatcagttatcacctttatcttcacagactacaacagaggctaaaccacacgaatcttgtgactgtacatcacaagcacaaccattggcatgagtcccaatctgtcaatattacattacaccatcagaagaatagcaccactcaatatccatcagacccagtatttcatcttc

SEQ ID NO: 34421 - DNA, 402 bp, Glycine max
  unsure at all n locations
tttctttctctagcttcccaaggaagctaccttcctttcttctcaaggaagcttccaatgtgctaggttataaatagaaacatgtgtaactcttgtcataactttgaggaatgagaaacttgtgtgacacacttcaaagttcaacttctctccctaatctccttcaattcccatgcccccctctctctctctttctcttcctccattgaagcttcctctctaagcttcttatccaaggcactctcttggtggtgaagcttctgcttccatggtttattctttagtggatgacgcctcctctaaccttttctcctttatcttctgctgcaacaccgtggctaanaaccaccattgaaggaccttattgaagctcatagatctagcctccatagaagctttcag

SEQ ID NO: 34422 - DNA, 415 bp, Glycine max
ggacatgaggaagtgttgaagggtgaaacttcctgcttttattgttgaccacagagtggtacctggagatatgtcgcgggggtcaggagaccttggggacgtcaggtggggtgctattgcccaaaaccaagcttgaccaatcccgacccaacccgggcatagtcggccagtgagaacctgtgatgtacctaagcaggcgagctcctggcagtcaacagataaaaggaacaaagaccacaaagcatggaggcttgtggcggctggccagctgtgaactctgattgatatgtgggttatggcctctggtaatcgattaccaagggtgggtaatcgattacaaggcttaaaaatgaagacaggaggctaacatggtctctggtaatcgattaccaaggggtgtaatcgattaccacgc

SEQ ID NO: 34423 - DNA, 265 bp, Glycine max
agcttgtttttataatctccccctttctgatcatgaggaccctgaaatcaagaaacacatacacattcttttcccaagtcgatcactcacttaattctccatattctccccctttgtctttgagcttaagcctcactcgaaattaagctatctaattatgtgagttcttgatttcctattctctctccccctttggcatcaacaaaaagccaaagtgcgtcagaaatagaaaacatacataaataactaatcatacaagagaata

SEQ ID NO: 34424 - DNA, 424 bp, Glycine max
tggtacgtagtaggtattgcattgtgcgaaactaatttttttcgttggatatatctgtaccaagattaggtggtctgaacggcaggggatctctattggcaaaatattgataattagttataaattttgacaattgctatattcagttctcctcgttattttattcactttctttttgaatttgtttttttttccaaagatatcccctgtagaaaaaatacacgctctcttttgaacatacttacgtcattaccctcctgagacaaatatacttcccagtcgagaagcgctacactctgcatgacccaaacacaaaaaacaccatttagaaaaaaaaaatcacctcataaaagacagaaactcatagatggaactttctttatctagcagtagtagtaacactacccattaccacccaagcttc

SEQ ID NO: 34425 - DNA, 394 bp, Glycine max
  unsure at all n locations
agcttcttttgtattttgaacaagccattaactgctgtgtcagaaccatgctatgtgctcgccactggcctctttcttcccttcgcaacttgagttcactattgctaccccatagagctccgcgaaatttgtctccgccatactcttgcttgcgagccctcttggtctcttgttcaagggctcttgcagtaattgcactctcttcccgtaacccggcacactccttccgaacgcgcgtagcggccaacttgaacttctccctggcaagttctgcctttcctaactcgctcttgagagtncggacttcttcgtcctcttccggtgcttcaaaactctctctcctgacgacttttcactcggcgagccaatctaaacctcgcatatgaactatcag

SEQ ID NO: 34426 - DNA, 438 bp, Glycine max
tatgcgcatatttccttacaaacgttctcttgcacaatacattctattaaccaaaaaaatgcacccatatacaatcaaggcaggttcgttacctagattatttacacgtacttccaaggtgcatttgttacttacatcacacacctccttggctaaattcacatacatgcatactcaaagcattttggggtaccaaaaattgcacatgtgcacatcttggtatttctaatacctatacatacacaaacttcatgatgaatcttgactatctacacaataaggtgctacattttatgctcttttcaagtttttgctacctaaagccgcatgcaaattcaagtatattttcctttgctgactaaaattgtattcaaattaaaaggtatacattttttggtaatgtatcttctttacataacatgcaacatatctatgtat

SEQ ID NO: 34427 - DNA, 191 bp, Glycine max
  unsure at all n locations
ttctttgtatgangaagtgtcgaaaggtgaaacttgctgcttttatctgtgaccacaaactggtacctggagatatgtcgcgggggtcacgacaccttggggacgtcagatggggtgctattgcccacaaccaagcttgaccaattccgatccaacccgagcatattcggtcactgagaacctgtgatgta

SEQ ID NO: 34428 - DNA, 428 bp, Glycine max
tgctaacccatggaagctcctaatatctcccacactttttggggtgggccattcttggatggccttgattttctcagggtccacttggaccccatttctaccaactacaaaacctaagaaaactatattatctacacaaaaggtacacttctctatatttgcatagagggtgttcttcctaaggactgaaagaacttgtctgagatgtcctaagtgatcatctacgctcctactatacactaaaatatcatcaaaataaacaactacaaatctacctatgaaatcccttaagacatgatgcataagcctcataaaggtgcttggtgcattagtgagcccaaaaggcatcactagccattcatacaaaccaaacttggtcttgaaagcagttttccactcatcaccctttttcatcctgatttggtgat

SEQ ID NO: 34429 - DNA, 76 bp, Glycine max
actttttttaaaaaaatttattaacttttgatttttaaacgaacggcatttttgtaaattcaatgaattgcttggt

SEQ ID NO: 34430 - DNA, 434 bp, Glycine max
  unsure at all n locations
tgcacttgagganannncnagacgacatctnancgctagtttttattttacttctaacctccattgaggacagagattcacacttatgcctccccactcctgaaagactcactcttttgtccactcacaacaccagattctctctttctaaccctaggctaactctacccttaatctctaactgttcccataggcaatcccagcatataaacatcatcacataaccctaaaacagaatgggtctgcctaactcatcccaacatggcaattccaacaagcttacaacaagatccttcacaaataatcatcagacagcataaaactacacaacaccacccatcatatctcccataacaccatacccaccaaacttaacagagaaagaagtccacctaaacctgaatcttccaagccccactcgacagcacgcactt

SEQ ID NO: 34431 - DNA, 377 bp, Glycine max
  unsure at all n locations
atcttctacttatgtggcagggcgggcttccttcactttcttgtctccaacgcgagctttgaccactgctttctcttcccgcgatgcttctgttcatatcccccctgagtgggcttatagcctaaaccataccttccacgatttcctttggcatttatcaggctagctatgccgccgttgtctttcgctaaacccatttcgggttcataaccgttccccaacataactcgggccatcattactgctgcatcggacaaacaagtcgtccctttatacttgtcgaagtccggcactttgaacttccgnggaataacaacatcacgtactaagcatagatccgtcatgtctgcgaacggatagtctccaaatccttccac

SEQ ID NO: 34432 - DNA, 432 bp, Glycine max
tttatcaacttgactctttatgtaggtcaagaggctttttatttaaaaagaaaaataaatcgtatatttaaatacatcatgacaaatctaatactccctgctgtcctatatatagaaacaagttactcgttcgtcaagaccaataaaaatagtttagttagttagttttaattaataatgtcaaatttaaattttattcaaaacatacccttttaaggtattttgtttgagaagtagttgcatttaatgacatgagaaacagtgtaatttatatttttaatagaccaataaatgcatgagaaatgagtagttacctcattaatggatttcacaacatgaagggtaaaaaagaaaactaacaattaatacatcttacagtgggtctatgtttcttataatgaggacaaacaaagaataccctcttgtttctta

SEQ ID NO: 34433 - DNA, 373 bp, Glycine max
agcttatttgtttaaaaaattaaagatctttttgttatctttccagcgactactcacacgttccatttggagttctttagtgtcttctacgcttgcacaaggcagataggtcaagtaagcacaaaatctaaaatttaactacaattctcaattaagctcaatcatttgccttagaccaaaaccgagttaatgtgagaaaataacggtcaaagagatttcaattgacctaagaagaatagacaaatattaaactacaaatactcaatcaaattcccccacactttatcatttgaactcatgggagaaactaacagacagattaagacaaagatatcaaacttagaaaataaccacactaaaagaacgtatgaac

SEQ ID NO: 34434 - DNA, 347 bp, Glycine max
ttcttgtttctttataagacactcaacatgtcatcaggatgcacactgaacacgctcctcaatctgttatattgattgtgaacgaatgcttcaaccgtaactcggtgacggtgtgatcttaactgtgagagaaacgactacaactaggttatgaattttgcatgattctctgaattatggaatgaatgcatgaatctgacgatcatgaacgtcatgcttgattgatatagccacttatgcaaaacactgaccctgtgcatgaatgatttatcccttgcacccagattgagtctaattaatgtctgatcgatcgaaccttgagcctcgctagctatctcatgctacct

SEQ ID NO: 34435 - DNA, 411 bp, Glycine max
ttgagccaaaatcctgactcaccatagaccttgactcattgtgttaatgtcaatccttaccctcggaagcgaaaaggaaagaaggaagatttccaatccaagagaatgcatataaaacgaatgagcagaaggaaaattccccaatcaaagagtgggagaaagcacaaagataacaaagaaaattcccaatctaagaatgggagaaagtaaaaaaggaagaagaagaaggaaagaaagctcctgatcacggattgaaggaaaacagaagaaatgtgcacagaggtctttggaccggacaatatctgaacaatacagaattgtcaccaaatgaacaaaaagaaggaagggaaaccacaacctaatgtggtcttctccctttaattgccaaccagaatcttgtgtgctagcgac

SEQ ID NO: 34436 - DNA, 388 bp, Glycine max
agcttatgaatagaaagaagaaaatcatgcaatagatttatcatatttcattttcaaactatgtggaacaatattagtacatccaaatattatagattagaatttttcactatatatagactaagaataaaaatagttttctcacattctactattcttttcacaagtctctattttctaaactaatgtattctttcttcaagaaacctctttagcctcactttaaagaaaaaattgatgttattaggagatagacaataaatactccatgataactgaaagtattctctaaaactgcacaaaaggtgcaagaactaataatgaaacttagaaatgaacaaacgaataatggttcttaactcttttgatatgtagcaagatcattatc

SEQ ID NO: 34437 - DNA, 431 bp, Glycine max
ttctcccaagtactaaatgacatttcaagctagtattaactcactttaacctccatttaccacagaattcagacttagccttccaactctcaaagcctcactcttttttccactcacaacaccacattctcactttctaaccctaggttaactctacccttcatctctaacagtttccataggcaatttcagcatataaacatcatcacaaaaccctaaaacagaatgggtatgtctaactcatcccaacatggcaatttcaacaagctttcaacaagttccttcacaaataatcatcacacagcataaaactaacaaaaccacccatcatatctcccaaaaccccatacccacgaaatttaagagagaaagaagtccacccaaacctgaattttcgaagtcccactcgtagccacgcacttcacgacccc

SEQ ID NO: 34438 - DNA, 371 bp, Glycine max
  unsure at all n locations
agcttgtgtgttagagaggatttgttcgccttgtggaccaaagagctccaaagggttcttcttgtctaatgaatgtactangaatgctgatatagtttgcattggtgtttctttttatcataacagttattgttttggtgtttgtgtacttttttccacagtaaaaggatttatattaatattaagtgaaggttatgcttgtcacaagaagtgccacacccaacctcataaatgcatcatggagttccttccaaaacactactactcctttacatatatattgattctacaacattataaggaacagatggtatcaacaatattccatagtaccctaccatgccttctagtgttcccttggtccttatttc

SEQ ID NO: 34439 - DNA, 423 bp, Glycine max
tctactccttttgttgctattgttgttgttgcggctcctactcctccacctcctcttactatctctattaaggagatttctatttctcatgcgactgaagttagtgcgccagtcgcttcggtcagtgctgtcgaggctcctctgtctactattgttgcacccttgttgagcgtcggtgtggcaaccataagtactcccgtgatgtcccttcctccttcttcagcttcatcagttccccccttgaccgtgttggtgtcagcgttgtcttccacttgtcttttcacccaagtgtttctttggatcacatcttcacttcttgtgatgttgattttctatggggtatgggttacaagcctgaccagaagaccctcggtggctttgtgtcaacctatgataaaaatcttattcggtcagctggggtct

SEQ ID NO: 34440 - DNA, 397 bp, Glycine max
  unsure at all n locations
aatgttaatgtcacatcagataatatcaaaaactatatcaaattatggagatcatgatatggtattgtaagtgacatccttggccagagtaggtttgattgggatggcactaagcacatgatcacaattgagaatgaaaatgcttgaaatgaatattgcactataagtattctttaatatattgctatttgttattcaaagtagattggatttgactttttctttttttccagtggcataaatagagtaaaccgttttgattcaaggtgcttcaaaactaggatgatacagtggatttgtgcgctaaagatagagccattggtcatggagttgaaactgctgatgtagctccatgtggagcttgtatgcctaggatcttcttcatcaatggagtacn

SEQ ID NO: 34441 - DNA, 426 bp, Glycine max
tatcaaggagtacgactagatcctcgttgtgaatgctgacaatgtgggatcgaaccagctccaaaacattcacaagggtctctgcaatgactctgtcatcctcatggggaaggaaattcttcttttaggtgcatgataaaaaggtatggagttccaagtgggaaatacaagttttataggtgtgcctagcagtggataaacaaccattgtatcttaatagcagctgctcgaggcatatgataggagacaaatcaaatttcttgcctctaaaagctaaagaaggaggatttgtaacctttggtgacaacaacaaagggagaattctcagatacctctttatgatgatgatgatgtaagaagtcctaaagaatcctctcctacaagtgaaaaggtagtgaacaataacccttttgaagaacacccact

SEQ ID NO: 34442 - DNA, 365 bp, Glycine max
catgtatggcttcctcgagcggtgacattatcttcaaacatgagtgaacgaatcataacgatgcatgtacttacgagcttacttgaatcagtaagtaatatttatctagtacattccaaaaatatatgcattatacgtacctaattatatttgtggacttcaaggcacattggtagcttgttggtagtccacgagaccataattgtggctcggtttgctctctacctaagaagcctaatattaacatccaagttgccactaacacgctatggatcaaatcataattcatttactatataacaattataggcaacgccaacataatcttaatcttatatatcgttatgcgctttttaaccatgcat

SEQ ID NO: 34443 - DNA, 432 bp, Glycine max
  unsure at all n locations
tacactcagactntgatcatgttcgtgatcaagtactttctgtggatcaggttccatccatggattctctcatcactaggcttctccgtgtgcctcacttatcgaaggatgaaaatcctactgatagtgtggagacgtcagcaatggttgcatcacgtggtagaggaggcggtcgcaacagcagaggaggccgcaatggaaggggtggacgtcctcattgcacctactgcaagaggatgggtcacacccaagagaattgttattcgttgcatgggtttcctgacaaggttgcacaggtttctagatcagagaaagtagagtctaagttctctgatgaggagtatcaggagtatntgaagctcaaatccgagagacccagcaaccaagctcaatcctcatctgtaccatgttnttcaacagcttgtatctctc

SEQ ID NO: 34444 - DNA, 236 bp, Glycine max
  unsure at all n locations
agacatgaatggaataagattggagttttcaaatgcttggaagcattcaaaattctcatttgagaagaacctcatatctatgaattttgggtctacaatggaacgagaggaaaaaagatttgtgtaccgtatacgctgttcctctgatgagaataataacccacaaggaatggacggagngaattgagcttcctgtgacccacaatgccgctgactccgactcgaagttcctttgc

SEQ ID NO: 34445 - DNA, 439 bp, Glycine max
tgcattcggaattgcgaaagccccactccatcattatgattattacctgacatctcaaacaaacaaatcaaacgtaacaagacaattatagttgctgtttgaatacctcacccactcaagtgtatcacacaatgatggcttttctctaatgaaacactctttccttttaccactctaattccccttgagttcttaggcaattcaagagattatggccacaacaaagaacaattcaccaatatgtgtaaggtaaggctagagagacaaggaaaaggttaaccaagaaaaggctaacaatgtttttaggcacaaatgaaggaaataaaattcagaatttaggaattcaagtaacaatcctccatgcaaccaatatattaccttaaagagattttttttaaagttcttcaagcattgaaccattcagcccaatttttttttt

SEQ ID NO: 34446 - DNA, 238 bp, Glycine max
agcttctattgtttctacaatagtcgattatcaaatgcggtaattgattatttcgaaacatggaaagctcctaatgttccatacaaaatctaatccactacaatatgacataatcaattatttcaaggcacaatatcacaatcaatatgacaaatactgcagaaaactcttaccaattcagggcagatgtgcccttcatctccacaagcttccttaacccatgatactcgaacagttc

SEQ ID NO: 34447 - DNA, 434 bp, Glycine max
  unsure at all n locations
tgtacatcctgaanaaataaattagttagtgtatattgtattcattctgcattacttggatttcaaaaagaagtacccataaacaatattcgaattaggcacactgcattatagaagttattttagaagctacacacaacaattgtaatcatgtataatgtgaaatccccaatttcaaacaccatcacaaaattataaataaatttgccaggtggaaaagatgaccacgccaaaagtttaaccaatttttcatccatattaactatgaagatgtccacatcagttagaaatatagccaaaatactccttatacggcttggacaatcatctaacctcaagctagctatgcggtcatgttatgcctagcccatttttaattttaactaaacagaaatttttcgtccatttataccttgtaaaacaatatcaaaaca

SEQ ID NO: 34448 - DNA, 569 bp, Glycine max
  unsure at all n locations
acacctgtatctcaccctaaacaccnacntaatgtantcaccttcttgtntattatattatatannnannnnnnnnaagagatgtttgatgacgtcgatggacactccaaggtgaatccgagctcggtgcccggcgatacagtagagctgacctgcatgcatgcattctttatacctcgatacaccattccattaatctcaactacataagatgccaagacctattgaattgcggaaccaatgtcacagaggcgcacatctatgacagcttcctaaatggcaagccaaacattccatagcatgatagaggaaccatcgaattgcatgatctaagtggtgcataatgaaaacctcacacgacacacaacgaacataggatatacggtggagggtgtacggatcagaaaccatatattaagctcgtgaagcttcgccgtgctacagatctatggacatacaaacggataagagcgctcaaaatagagccattgatcacgaatctgaaactgataatgtagcgtcattgagcagctccggaggcattggatcttcatcatcaatggaagtcn

SEQ ID NO: 34449 - DNA, 526 bp, Glycine max
  unsure at all n locations
acaatcgacccccggtaacaacattacgacaaaccgaaaacgacacacccacaccnaaagccggannatgaactcgtgacgcaggccctaananacccagcgncacggacnccccagaacacgngcaagaggttatcccgaacacacctgacaacccgggagcaagcaataacatgtatgcggcacccaactgagaatgaagacgacagaacacccacaattcaaaggctacaccgacggtggcaaccgcgagtaggaacaaaaccagcatgcaagtcgccctagacgaacggccatagaatacggcaagccacgcaggcacatggctcacaccatttgaggccacttatggtaaacctcctgcgaaaagtgggaagaactcaatgctacctcattggtaacaataagaaaggagggagcgcaccaaataggccgagatgagactaatcgaaggacaaaatccaataaagcggcaaaatcaagagatcctaaacagaaacaaaataaaacagcacagcgaacaccg

SEQ ID NO: 34450 - DNA, 330 bp, Glycine max
  unsure at all n locations
atctttttgtattccatatatagacccattaagcgtgcaaaccacatgctccccactatcacacgataaaccttcatgttgtntcatataaacctcctcctctaaatcaccattaagaaaagctgctctcacatcaatttgccgccactcaacgtcaaaatgagcacctactgccaagattatacgactagaatctttcttacatactgcacaaaaagtctctttgtcatctattccttgcttgcgagtcaatcccttagcaacaactcttgccttgtatctcctaatgttgcctaatgaatccttttctggcttaaagacccacttaca

SEQ ID NO: 34451 - DNA, 428 bp, Glycine max
  unsure at all n locations
agcacaatggcgattctaattggtcatctagtggattatattttacaaaacatgaatattatatatatcaacatgcattcatttaggaagacttaaccacaaagcatgaacaaaagctaggaaccaagaagcacaagaaagcgagcagccggtggaaggaaaattcgtttctgaagcttttatcgatccgtttcaatccatttttcttccatcttcttccctttcaccccacctttatttttgtaagtctctcatgacaacaaaagactaagattacctattgttggtagctctgtaaatcaaactctctttgatgtaatgattctaaactatcttttaatataatgctgttattattattcatccctatgcttatttatatacttatggtttgatcattcatctttatgtattggttaaagatatan

SEQ ID NO: 34452 - DNA, 345 bp, Glycine max
  unsure at all n locations
atctttgcagcatanggactaaagttcgtgagccttggacatcttgtcctaccgttactgacggaggagctagagtggatgatgaacggatgtcctccattctagctctttttctcgattccatttgcaactaaaaagaactaaaaactccttacaccaaaattgctcacgtttaacaacagaaataaaggctgaaactaacactacgtgcttancgagatatagctcgctcagcgcaccctcaaagacataacatatcggcttacctggagccaagctcgctctacctaatagtggtcgcgacaaaatgcgctgagctcacatgaactccgcttagcacgaggc

SEQ ID NO: 34453 - DNA, 418 bp, Glycine max
tagcgagggcatagcctctagaagagatatgggttgtttggcttgcacctggcaacacaactcaggattgagacccgagatgaagcaactaaggagaaacaacagagcgagaccaacgatacagttggccagccgttcaaactcgatcaaatagtcattgaccgtgctgtgttgatgaagcttgaagagtgtgccatgcgaattgtcataaaatgatggagcgaaacgcgactctaaggcctgaagcattacgggccatgtcgtgaggaagccgttgcgcgtcatccactagtatcagctaagcgttgggtcctccatatagaacaagacgatggtgaggcgttcgggttcaggcaccccttgatagtccaagaactgcaatattttgaatacccagcctaacaagtcctagccatca

SEQ ID NO: 34454 - DNA, 393 bp, Glycine max
agcttgaaggtatgagacgatgagtggagtgagagggagagaaggagcacgaaattttgtgcctcaaaagaggtctgaactttgaagtgtaattctcaaatgatcaaagttgaaaaaattcacacacatggcctctatttatagcctaagtgtcacacaaaattggagggaaatttgaatttctattcaaatttcacttgaatttgaaattgaatttgtggagccaaattttggagccaaaatttcactaattatgattagtgaatcttagttatggttcagcccactaatccaagatcaagtccaagattgtccactaagtgtgctttggtgtcatgaggcatgtaaagcatgaaggacatgcacaaagtgtgactatatgatgtggcaatg

SEQ ID NO: 34455 - DNA, 432 bp, Glycine max
ttggctgcgcagcagctctgaattcgtgagtatttattgaagatgacgcattgtaatcgattacaggtattggtaatcgattacaggcccaataagccttctggtaatcgattacaggatgttgtaatcgattacaggctgcctgttcatgtgtaatcgattacactggatggtaatcgattaccagagcctatcctaggctagtttctaagagaatatctatatttatgctcaaatacatcctatatgactaattttcactactaatacactaaattcaatcattcaattactatatacacaagaaatcataaattctatcataaagacaagaattcaaacaagatcaaacaaaataatctacaatcaaaaggtaaaaagtaaatcaaccaatcaatcaaccaatcaatcaaccaatcaattcctattttt

SEQ ID NO: 34456 - DNA, 345 bp, Glycine max
  unsure at all n locations
agcttgtagattgctccagaatgaagaaagcctcatatttaaagttctgaaagttaagtatttcctagattaaacctgtttttgaagtaaaattgggccattaatttgtggagatttctccaagggaggattaaacacctgaacttattcaagttaaaccagctaaattgatatagtgattttttgtgtagaccatatgcaatttgagcttacaagccagtttagccagggagagaactcccaacaaaatctagctagctataagggtgttggagaagtggtgaaaatattctttttttaatgaataattataatattctaaatcttgatttanattgaaatata

SEQ ID NO: 34457 - DNA, 430 bp, Glycine max
tcccaataatcacttataagagaagaatataaaaatgttaaatgaattaagtttctccaataagttaaaattagcttaagcataagttaaaataagattttggagaaattaaatgagagttcctacaatttagcttatgcaaaactaattttaacttatgaaagaaacttaatttattttactttcttattttcttctcctataagtgtttataaaagaagtttatccaaacaaggtcatatcaaatttgcacaaaatcattagcatagaaaagataactataagaagaagaaaatttaccaagttctgccaatagtgataattatctgtacacttttcatgcctccaagcatcaagattaaatatattcatgccataggcccaagcacaagcttttggattgaagctctccttgattaaaggatgagag

SEQ ID NO: 34458 - DNA, 360 bp, Glycine max
  unsure at all n locations
tagctttataggtcatgcaagacctgttattaaatcttgaagctcatcatgggtatgaactgcaaggtaatcaaatgtttataggaagattgattttgcctaaatattgaccctatatccctttactttcatttgaatttcataacttatccatgggatgacactctctggacctctggtttcttttgtacctacaaaaggttanctaatttggtgtgttaccaaagaatgaagaagggtattcataaatctgttgcaacctgtgacacttttcaacacaataagtatggcaccttgtccttagtctatcgctacaacattggatattcctacacatatctggtctaatatttctatgga

SEQ ID NO: 34459 - DNA, 431 bp, Glycine max
  unsure at all n locations
ntcacctatggaagaagaaaaaattgttccattcatttgtcaagcaacatgttgaacatttaggaacttattttaacattgcaacaagataatttcaattgatttctaattaaattgttcacacacacacacacacatatacctttttttgttatatgcaagctaataggacaaaaaacagaagaatattcaggtatccctgataatagttccaacattgagaattagaattgttgatgaaacaacattgagtcttgcaatgaagagaaattcaagaaataaattcatataagtgaagttgattcatgttagttgtgagagtttttgcgttttgaatttttaatctttaataagtagagtctttgctgttacagacttttctccttctttttctgttttttagttagctattgatataccaataaagtctt

SEQ ID NO: 34460 - DNA, 337 bp, Glycine max
agcttatgtgtaactactcttgatattttttaggctatgtgtttaaatttttttaaaacaaagtagattcagaaaataattacatttattattattttgattaacttctgaatatggtgtaaatcttatgtgtgtctgacatattaaacaagttaacgtctaatttatttgattagaatatgaatctgtctaaccaaattaagatgtttaataagtaagtttatttaagtattttatacttcatagcttgtaaggcattacttatatatcgcatataggttcgcaactctctttttatacttcttatcattactattttaatacaccttcctcttat

SEQ ID NO: 34461 - DNA, 410 bp, Glycine max
  unsure at all n locations
tgaggggggttttaaattaatgggtgtgacttatggttattaaatggttatgttcgactcggatgctaaccgatagaacgacatcaatggaagaccgtggatgatgttcgattattatctnatggttcatccatggacttcaaaatttgtggtgacagaagcaacaatagaccaaaccttggcttggatccgttttccaagtctttggatggtctatcatgatgagactgtattactgaccttggcatcaactattgcaacacccatcaaggttgatctaaacatcttgaatatgcataggggaaagttcgtgcgattatgtgcataaattaatctcaatgtccttgtcgtgggagattttgcatcaatggaaatcggtataatatagaatatgacgcgcttcatattct

SEQ ID NO: 34462 - DNA, 345 bp, Glycine max
agctttgttctctgcatgtcttcacacagcaaaatctctcaaaactctctggattcagacccttctctctctagagtctctcacatgcagaagctccttgagaaaatggctaaaatcccagaacttgaacctctctttgtagaatctctcacatgcagaagctccttgagaaaatggctaaaatcccagaacttggacctctctctctctagaaatctctaaaaaatacataagctcaaggaaaagcccacactcctctcaaaatctgattcaggcttaaatagggctttgttgtgttgacgcttatgaactctgaacgttatcgccattatggatttggttaca

SEQ ID NO: 34463 - DNA, 436 bp, Glycine max
  unsure at all n locations
tctcccgcaattntctataaataaggggagaagtgaagtggtaaaggtttcagccccttaggcacttctctctctttcgaatttgtttagaaaaattgtttccgtgaagaaaatccaagccgaggtgcttccgtaacgtttccgtaacgtttccgtgagtgatttcgcgaaggttttcgaccgttcttcaaccttcttcattcgttcttcatcgttcttcagtcttcaacgggtaagtacctcgaaccaagcttttcgattcattctatgtacccgtggtggtccacatttggtttcatgtatttttattctcgtttcatttactttttatacccccttttgacgtgcttaagccattntatttaagtcatttctcgcttaacctaaaaataaaataaatttccaccgatcgtttgaattgtattatccgttaact
